United States Patent Application Publication US 2016/0230186 A1 - sequence listing, part 3

SEQ ID NO: 2217 - DNA, 2048 bp, Diabrotica virgifera
cacgtcaaacgcaaatacatccactttctaaaaccgatcgtaatttagttctattgttcttgaattgttaagtccgttcgtggaatcttagtcactaatgtttttcactttccacgaaacactgcttacgattaaaaatatattatttacaaattttggccctatacaaggcgatagaactacgatctcgtggtattggacataaaattaattttctgaattcttcccataaaattatataacagtattgttagaattgttgtagaattgtttttttaagaaattcaaaaaattaaatttatatcaatagaccataagaccatagtttttcatcaccctgtatatgaccaaaattgtatagaatttaattttgctattaaacaagtgtttcggaaaagtgaaaacggttagtgataatgattcgacgaaatggacgggacattaacaaacaattcggtgattagaaagtggacagagcgttgacgggaacaatgacgtttttaagatctttccgggaaggtttttaatttggtaaacaaattgtattagtttttagatgtaaaagtagaaagtagaaaagaactaattatatttcttgaaatttgacaaattggaaaagttatgtggaagaatatttggtttctcaagaaataaatggtttaagagaggttgttgttgattggatggaaaatatcgggagtagggataatgaatgttggagtctggatttgagagagaaataaggggtactgtgtaaggaacatcgatagcaaggcagtcgagtttttaaaagtgtgtaatcagtgtagagtggtgtgatcagcctttgcgagcagaatcaagttgaaaccaaattgtcgaccggttgaagagttaattttcctggtccgagggagattcctttgttttgtctagaacgagtagctgattattatcctttggtgcacaagatatcgagcaaggaaaactgaataatagagttcgagcaagtcctgtgtgtttttcttgaaagcagttttgacgtgagggactttctcgcaacatccagagagtacgtgttgggagaatcaaggacggcgcaatccagaaaacgaggaagtgaagaaacaaaaaggttagtgaaatcatttgtcggaatggagaaaatttgtgtatatcaaaaccatatttgttcatttgtttattgaacatttttttaacgcagttagtcatttcaaatttgagaaatcaattcaaaagaagaaaagtaaaattcattaaatttagtaggagtaaataataaattaattaaataattttttttgtcaaaacaaggagatatcagagttatcagatatcagataagttagaaattgttgcaacaaagttgaattttagtattttttgaatcatatgtacacggcttatttgataaaaacaatagattacatttatatgattttgagtgttttcaatttccctatttccaccctggaagaagtaagcaactagaaatactagaagccacagatcacaggtattgtaccaaatacaaaattagccctgagaataaaattgattggaaaatttaatttgaatttagttttgtttttacataggcagtgaataaaataattgaataatcaattaaattaagaatttgctaatcaatctaaataaatagataaagtagagcataacaatacattgtaaatcccaaatcatgatttcaaaattatgattcgggagtgcattaacgtatttactcttagtagcatttaacgtgtattggtttgtttatttctactgcatcttgactgtacatttactatagctatgtctgcttcttctttcaatgtccaaatatcgttgaaacgttgcaaaaagtctgttgaactgaagatagactatattattgagaagtaaatgcaaatttaaaacagaaacagattccagaaacgtcccttttgtttttttttaatagtttgcaatgtatttgcacaagagttggtaattttaaggcctttgtaaaaacgaagaaatgttcaaacgataataaataaaaataa

SEQ ID NO: 2218 - DNA, 1838 bp, Diabrotica virgifera
ggtaaataattatatttaaggcaattaatatttaaaacatacaaagctaacgtcattcacacagtaaagaaatgactgtgtttagatttccgtcaaagtgaataaaataacaaaaataaaatatgttattggattttttgaagttatacttctttaccggcgatagagggtgatttttatatgttaaaacctatcagcccggcgcatgcgcattataactttgttctgattggatgttcaaatgacatgtcaaaaattatccgatatggcagctgtggtttggaggtaaaggtaaaggtaaacaaatgtataatatattagttttattgttgtgaggacagaaacaaaaaagtttataatattgtagtgacttttaaatagtttttaaaagcaacaggtacgtaataattgttaatgtatcatgggtataaacctacctatttgatctgccaaaatacatagtatgtaatacttttatttatataatttgattaccatcaaaatttctatcaatattcacctaatatattgttttcttactctatgttttgttgtattttttcaattctaaatcatttcaattcaaaattaaaataatttgatcaattttcaaaatatcaaaatatcacaagtttaatccgtttagttagtcgatcttcgtaaataatgacacatagtgtccgtggctaagcgttgaaggcgaatgaattccaataccaaccgcgcttatcagcgctggttcgagtcccaatagaaactttctttttgtttttttttaatacattttatgattgtaagtatatttattatataattgtattttcagaaaatacgtatttagttaaaaaaattttcgacaattaatgttcagacatcatttgtggcttgtttaatgtgtttgtgtgtgttttattcttttattattttaatttttggcactgttctaataaaaatgtttgagaagtagtaagtataaattagtttaatatttaaacaaaatataaataaaaagtatattaatttcgtttaaatcatataatagaagtataacttcttacgtgcgtacaaagtacacacacattcttttttttttgtcaaaacaaggagatatcagagttatcagatatcagataagttagaaattgttgcaacaaagttgaattttagtattttttgaatcatatgtacacggcttatttgataaaaacaatagattacatttatatgattttgagtgttttcaatttccctatttccaccctggaagaagtaagcaactagaaatactagaagccacagatcacaggtattgtaccaaatacaaaattagccctgagaataaaattgattggaaaatttaatttgaatttagttttgtttttacataggcagtgaataaaataattgaataatcaattaaattaagaatttgctaatcaatctaaataaatagataaagtagagcataacaatacattgtaaatcccaaatcatgatttcaaaattatgattcgggagtgcattaacgtatttactcttagtagcatttaacgtgtattggtttgtttatttctactgcatcttgactgtacatttactatagctatgtctgcttcttctttcaatgtccaaatatcgttgaaacgttgcaaaaagtctgttgaactgaagatagactatattattgagaagtaaatgcaaatttaaaacagaaacagattccagaaacgtcccttttgtttttttttaatagtttgcaatgtatttgcacaagagttggtaattttaaggcctttgtaaaaacgaagaaatgttcaaacgataataaataaaaataa

SEQ ID NO: 2219 - DNA, 1754 bp, Diabrotica virgifera
ataacatctcgagcatttgaaggcgaaatacattatttgcatacagtgtgattttgcaccgttgttttgaagttatacttctttacgggcgtaatgacggtgaaattttatatgggaaaacctagcgaccgggcgcatgcgcattataactttgttctgattggatgttcaaatgacatgacaaaaattatccaatatggcagctgtggcacagctgtgggactgtggtttggttataatgtatgcttgttgcgttttaaaatttgtaggaagagaaacaacaaacaaaaagttagttaatggttatactgcctttttaaatagttttcatattatatttttggacttatttacatagaagagatgattgttgcatgccaatgtgaaagctcatcaaactgtgctagtatgagtgccgcagatctcgcttattcaaagctaaagaatctttcactggtaagtgttttataaatagttgatcaaattttgttatgatatttgaacatagccactttgcacgacgcaagtgattgcgaaatttattagtcgttatacgggctccgatacctaccttgaacctaccaaaatacataagtagtatgtaatacttttatttacataatttgattaccatcaaaatttctatcaatattcacctaatatattgttttcttactctatgttttgttgtattttttcaattctaaatcatttcaattcaaaatcaaaataatttgatttacataagttaaaaatgtcaaaaggttaatctgtttagttagacgatcttcgcacataatgacaagctgtctctgtggcgagttttaatgcgagtgaatcccaatacaacgcaaataccagccgcgtggtaagttggttcgaatcccaatagaaacttttattttttatttttttttatacattttatgattgtaagtatatttattatataattgtattttcagaaaatacgtatttagttaaaaaaattttcgacaattaatgttcagacatcatttgtggcttgtttaatgtgtttgtgtgtgttttattcttttattattttaatttttggcactgttctaataaaaatgtttgagaagtagtaagtataaattagtttaatatttaaacaaaatataaataaaaagtatattaatttcgtttaaatcatataatagaagtataacttcttacgtgcgtacaaagtacacacacattctttttttttataaattcttaaaatttttcaacctagtcaaatatcgatgggttcctgacgaaacattgcaagcgacaaagtgcatatctttcaggagaccaccttttcttctaacaactttttggccaatataattaaaattctcaaaccatgataaattagtacataatctgctaatctactaatttatcatagttcaaaaactttaattatattagccaaaaagttattagaaaaaagtcatctcctgaaaaatatacgttctgtcgcttacaacgcttcgccaaaaacccatcgatattattttagattttttttaatcattctaacaaaggtaaaaaaaggtcttttgtaatttttctcttaagcatttgagttacaaataaaaaaaacgaaaaatgacggctgaaaaacacaagtaaaaaaaatcattgtcgaaaaaaataagaagtacctaaatttaagttcaaaccttattccatcagttcttgatacttattttgggcttataggtttgaactttaatttgtac

SEQ ID NO: 2220 - DNA, 1615 bp, Diabrotica virgifera
ggtaaataattatatttaaggcaattaatatttaaaacatacaaagctaacgtcattcacacagtaaagaaatgactgtgtttagatttccgtcaaagtgaataaaataacaaaaataaaatatgttattggattttttgaagttatacttctttaccggcgatagagggtgatttttatatgttaaaacctatcagcccggcgcatgcgcattataactttgttctgattggatgttcaaatgacatgtcaaaaattatccgatatggcagctgtggtttggaggtaaaggtaaaggtaaacaaatgtataatatattagttttattgttgtgaggacagaaacaaaaaagtttataatattgtagtgacttttaaatagtttttaaaagcaacaggtacgtaataattgttaatgtatcatgggtataaacctacctatttgatctgccaaaatacatagtatgtaatacttttatttatataatttgattaccatcaaaatttctatcaatattcacctaatatattgttttcttactctatgttttgttgtattttttcaattctaaatcatttcaattcaaaattaaaataatttgatcaattttcaaaatatcaaaatatcacaagtttaatccgtttagttagtcgatcttcgtaaataatgacacatagtgtccgtggctaagcgttgaaggcgaatgaattccaataccaaccgcgcttatcagcgctggttcgagtcccaatagaaactttctttttgtttttttttaatacattttatgattgtaagtatatttattatataattgtattttcagaaaatacgtatttagttaaaaaaattttcgacaattaatgttcagacatcatttgtggcttgtttaatgtgtttgtgtgtgttttattcttttattattttaatttttggcactgttctaataaaaatgtttgagaagtagtaagtataaattagtttaatatttaaacaaaatataaataaaaagtatattaatttcgtttaaatcatataatagaagtataacttcttacgtgcgtacaaagtacacacacattctttttttttataaattcttaaaatttttcaacctagtcaaatatcgatgggttcctgacgaaacattgcaagcgacaaagtgcatatctttcaggagaccaccttttcttctaacaactttttggccaatataattaaaattctcaaaccatgataaattagtacataatctgctaatctactaatttatcatagttcaaaaactttaattatattagccaaaaagttattagaaaaaagtcatctcctgaaaaatatacgttctgtcgcttacaacgcttcgccaaaaacccatcgatattattttagattttttttaatcattctaacaaaggtaaaaaaaggtcttttgtaatttttctcttaagcatttgagttacaaataaaaaaaacgaaaaatgacggctgaaaaacacaagtaaaaaaaatcattgtcgaaaaaaataagaagtacctaaatttaagttcaaaccttattccatcagttcttgatacttattttgggcttataggtttgaactttaatttgtac

SEQ ID NO: 2221 - DNA, 1502 bp, Diabrotica virgifera
  SmartBlast Evalue=5E-26; Info=UPF0047 protein yjbQ n=1 Tax= Camponotus floridanus RepID=E2APY6_9HYME
ataacatctcgagcatttgaaggcgaaatacattatttgcatacagtgtgattttgcaccgttgttttgaagttatacttctttacgggcgtaatgacggtgaaattttatatgggaaaacctagcgaccgggcgcatgcgcattataactttgttctgattggatgttcaaatgacatgacaaaaattatccaatatggcagctgtggcacagctgtgggactgtggtttggttataatgtatgcttgttgcgttttaaaatttgtaggaagagaaacaacaaacaaaaagttagttaatggttatactgcctttttaaatagttttcatattatatttttggacttatttacatagaagagatgattgttgcatgtcaatgtgaaaagcccatcaaactgtgactagtatatgagtgccgcaaaattactgataaaaaacctattagctcgaaggcgtagaaaactgtggataacaacaatcaaccgggacgatctacgatctcgcttattcaaagctaaagaatcttacatgcccgctcacgtaaaagcatgctttctgggttccaatttaacgattcctataacggaaggtaagttaaatctcggcacgtggcagggcatctggctctgcgaacatcgggaccatgcgggttctcgaaaactgatggttactctaaacggttgccttcgagacaacgcctgtacccccttgtccccagtgagcccaatggcgagtaccagcagttagggaaagcactcggggcattcgctgtccaagcactgattgtcccgagttataatctaaaaacctataaagttcacgtctagtgaaaatcacagacttaaaataaataaaatattacgacaatatgtacatagttgtacattgtaatatactgttttctttttatatagataagtggggttgacattaattttacgtggaacattattttcattgaacgaaaattgggagaactattttttaaattcttaaaattattttgggagttatatgagtgtaaagccaatattttattagtatttgttttactactaaattgctagactaattattaaagttcattttttaaaatcatgtatcatctattgtgaaataagtgattccatcacccagtgaagggagattatttaatatcatgttacatatattcaaactaagctgttaatgcccggttgcaccttaagacatactttaagcttaaatataaatgtaaatccttaggtataagctgagctggactaagctggagcttaagatctgttggtgcaaccaggcataataatagtataagagcccgtacacagtatgggtacgtatgagtctttaccgcagcgcttaacgccgcgttttacctgttaaatgttttatttaacaggttatcaggggttttatcaggtaaaacgcggggttaagcggtgtcatgtgtatggcctctaaaagtacatatgatctttgtaagtagcctatcgattat

SEQ ID NO: 2222 - DNA, 2522 bp, Diabrotica virgifera
  SmartBlast Evalue=1E-118; Info=Endonuclease-reverse transcriptase n=1 Tax=Bombyx mori RepID=D7F170_BOMMO
caacgagaatataaaaaaaatgtaaatataaacgggcctgtaacgtactacaaataaaaacgatcatctattattctactttttttccagaaaactacaaatcgatcaacaaaaaaaggagatagtcaatacaagcaatgtattaaaaaataatacaaacaagaaaaataatcggacaaatatgaaatcgggactaggataatgatgtgcgctttagattatccgatgatcctctaagcttatcctatttatcggtcgtactgtcttcttagccttccgtcttagcctgagcaagatactttcaatttgttccggctattctttttgtctaacagtgtggcctgcgaagctccatttgagttggtcattgccaatgactcactggtcgtactgtaacagaataagtaacaaaaaaaaaccttatttgtccccaaagccctttcaatatttttcctcgtagcagagatttcacgatttcccatacaattcagtaactggcaaacgtattccatctatgtaaatcatgcactcaatattggtcatcagcaccatatgcccgagttttagactttcaatatttgaattatgtctatctagacctgttttatctacctatcttacctatctagtcctaactgtttttggtgagtcctcagtatgctacgaagtcaacttcaaggagactgcgctgaatggatccgaccagcatctaaatagtaggcaccatcagtgcaattatatctcaagtaattatttgtttgctccatacacttcatgatacacttttatttttcatttacaggcaaaaatttattgtctctcgtactgagagaagatacgatgttcatacttttcttctcaaatgtattttttggaaattcttttattacacgggatgtcttagccaaccgcctctagtgtatggtgggtgtttcatcatcatcagtagctcgacaatcatttttgggtgctggtttgttctaggattttccgccattctgttctgttccttgctttgttcttccagtgggtaatctcaagtgttttcagatcttgttccacttgttccatgtatctaagtttgggtcttccctttgaccttctccctactggtgtttgcctcattatatgttttggtgtttcggtctccaacatccgttcaacatggcccatccagcgcagacgtccgatctttatggatgttatgacgtcgggttcgttgtatgctgcgtatagttcaaaattatatcttctgcgccatacgtcattttctttcaccccttatatatgtgtctaaggatttttcgttcaaacgtacctaataagttctcatcgcttttcgacagtgtccatgtctctgatccatatataaggaccggttttatcagggttttgtatattttgcatttggtttttctcgtgatgttgttagatcttagatgtttaatgagtccattatatgttttattagcaatatgtattcttctcttaacttcttcgctgacattgttatctgcggtaactagtgaacctagatatgtaaaatttttacgctttcgatgttatagtctcctattgtcagattctgtaggtttctttggcctgtcgatttgctggccttcatgtatttggtttttatttcattaatatttaggccactgttttgtgccgctctctctatcgcattaaatgcttctatcatttctcttttgcttctagctatatcaacatcatctgcaaatggcaatatttgtacactttttgttattattgttcctctggtgtttacttttgactctctaattattttctctaatgtgatgttgaatagaatacaggatagggcatctccctgtcgtaggtccgttctaacatggattgtatctgttagtgcgttttgaattcgaattttgctttgtactttaagtgtttttttactatatcaatgagttgagttgaaatattataatactctttcagggcgtggatcagaaattctcgatggatactatcataggcactctcaaaatcaatgaagagatgatgtgtgtctatattaaattcactagtattttccaagatttgcctcaagacgaagatctgatctattgtggacttctgcctgcagaaaccacattgatatcccccaactatttgttccacaatatttgacagtattttatatgccacagtcagtagcgttattgcccggtagtttttacattgaagctgatctccctttttacgcagtggaataattactccggtattccagtcttgtggcagttgtttattattccatatgttcactattagttcgtgtatcgcattcagtagggagtctccgccttcctttattaattttgcgataatgttgtctaatccaagtgattgttgtatttcagtctggtcactgcttcttgcatttcagctactgaaggggtggggttgtttctctggtatccgtttgatccagtataattccatcgtatagtggatctccgtttggcgtggatatggtg

SEQ ID NO: 2223 - DNA, 1772 bp, Diabrotica virgifera
  SmartBlast Evalue=1E-118; Info=Endonuclease-reverse transcriptase n=1 Tax=Bombyx mori RepID=D7F170_BOMMO
tagtctgggagacgaccgtattgatgctctaaattttttgacgtttggatttttcatattatagtgcaagtcacaggtgaaactgctgatgtcttctatcatgaggtatttcccttttggtttttcaatatgtgatgaagagtgttatgtcttaaggtattttttgtacagatgtgaaaatgttttgggtcacgatcatcatcagtagctcgacaaccctttttgggtcctggcttgttctaggattttccgccattctgttctgttccttgctttgtttttccagttggtaatcttaagtgttttcagatcttgttccatgtatctaagtttgggtcttccctttgaccttctccctactggtgtttgcctcattatatgttttggtgtttcggtctccaacatccgttcaacatggcccatccagcgcagacgtccgatctttatggatgttatgacgtcgggttcgttgtatgctgcgtatagttcaaaattatatcttctgcgccatacgtcattttctttcaccccttatatatgtgtctaaggatttttcgttcaaacgtacctaataagttctcatcgcttttcgacagtgtccatgtctctgatccatatataaggaccggttttatcagggttttgtatattttgcatttggtttttctcgtgatgttgttagatcttagatgtttaatgagtccattatatgttttattagcaatatgtattcttctcttaacttcttcgctgacattgttatctgcggtaactagtgaacctagatatgtaaaatttttacgctttcgatgttatagtctcctattgtcagattctgtaggtttctttggcctgtcgatttgctggccttcatgtatttggtttttatttcattaatatttaggccactgttttgtgccgctctctctatcgcattaaatgcttctatcatttctcttttgcttctagctatatcaacatcatctgcaaatggcaatatttgtacactttttgttattattgttcctctggtgtttacttttgactctctaattattttctctaatgtgatgttgaatagaatacaggatagggcatctccctgtcgtaggtccgttctaacatggattgtatctgttagtgcgttttgaattcgaattttgctttgtactttaagtgtttttttactatatcaatgagttgagttgaaatattataatactctttcagggcgtggatcagaaattctcgatggatactatcataggcactctcaaaatcaatgaagagatgatgtgtgtctatattaaattcactagtattttccaagatttgcctcaagacgaagatctgatctattgtggacttctgcctgcagaaaccacattgatatcccccaactatttgttccacaatatttgacagtattttatatgccacagtcagtagcgttattgcccggtagtttttacattgaagctgatctccctttttacgcagtggaataattactccggtattccagtcttgtggcagttgtttattattccatatgttcactattagttcgtgtatcgcattcagtagggagtctccgccttcctttattaattttgcgataatgttgtctaatccaagtgattgttgtatttcagtctggtcactgcttcttgcatttcagctactgaaggggtggggttgtttctctggtatccgtttgatccagtataattccatcgtatagtggatctccgtttggcgtggatatggtg

SEQ ID NO: 2224 - DNA, 1866 bp, Diabrotica virgifera
  SmartBlast Evalue=6E-29; Info=Endonuclease-reverse transcriptase n=1 Tax=Bombyx mori RepID=D7F170_BOMMO
caacgagaatataaaaaaaatgtaaatataaacgggcctgtaacgtactacaaataaaaacgatcatctattattctactttttttccagaaaactacaaatcgatcaacaaaaaaaggagatagtcaatacaagcaatgtattaaaaaataatacaaacaagaaaaataatcggacaaatatgaaatcgggactaggataatgatgtgcgctttagattatccgatgatcctctaagcttatcctatttatcggtcgtactgtcttcttagccttccgtcttagcctgagcaagatactttcaatttgttccggctattctttttgtctaacagtgtggcctgcgaagctccatttgagttggtcattgccaatgactcactggtcgtactgtaacagaataagtaacaaaaaaaaaccttatttgtccccaaagccctttcaatatttttcctcgtagcagagatttcacgatttcccatacaattcagtaactggcaaacgtattccatctatgtaaatcatgcactcaatattggtcatcagcaccatatgcccgagttttagactttcaatatttgaattatgtctatctagacctgttttatctacctatcttacctatctagtcctaactgtttttggtgagtcctcagtatgctacgaagtcaacttcaaggagactgcgctgaatggatccgaccagcatctaaatagtaggcaccatcagtgcaattatatctcaagtaattatttgtttgctccatacacttcatgatacacttttatttttcatttacaggcaaaaatttattgtctctcgtactgagagaagatacgatgttcatacttttcttctcaaatgtattttttggaaattcttttattacacgggatgtcttagccaaccgcctctagtgtatggtgggtgtttcatcatcatcagtagctcgacaatcatttttgggtgctggtttgttctaggattttccgccattctgttctgttccttgctttgttcttccagtgggtaatctcaagtgttttcagatcttgttccacttgttccatgtatctaagtttgggtcttccctttgaccttctccctactggtgtttgcctcattatatgttttggtgtttcggtctccaacatccgttcaacatggcccatccagcgcagacgtccgatctttatggatgttatgacgtcgggttcgttgttcaaaagtatatcttctgcgccatacgtcaataggttctcatcgcttttcgacagtgtccatgtctctgatccatatataaggaccggttttatcagggttttgtagtatattttgcatttggtaaatgttttgggcgcttgtgttaatattgatcgcagttatgatatcgcagtgctgataaaacatcaaatatgatatcacctcctcgtgaagccaacattaacagtgtgtgttgatgctcaaaacaccaattccaaagtgaagccgactaaaattcagtatgcagattacattcggcaaataaacagatccatccgtttaccattgcttcatcaaatgccgaaatgtttatctttgtttgtttctattagtatataaaaagtataaactatgacaactgtacattaaaaaactgcacttaaagtgtctgcgcgttcagctagcaaggtgttgacataattgactgacaaacttataatcatttgaatataacagatatttttattaagaaataaacacttttcgatagttttcattgtgtacctaaacacatatgtacacgtatgtgtatatatatgtataaaacgacataatgtgaataaaccttgtttacgaaacttgcttaaaaagtcacacgatag

SEQ ID NO: 2225 - DNA, 1549 bp, Diabrotica virgifera
  SmartBlast Evalue=3E-22; Info=Endonuclease-reverse transcriptase n=1 Tax=Bombyx mori RepID=D7F170_BOMMO
caacgagaatataaaaaaaatgtaaatataaacgggcctgtaacgtactacaaataaaaacgatcatctattattctactttttttccagaaaactacaaatcgatcaacaaaaaaaggagatagtcaatacaagcaatgtattaaaaaataatacaaacaagaaaaataatcggacaaatatgaaatcgggactaggataatgatgtgcgctttagattatccgatgatcctctaagcttatcctatttatcggtcgtactgtcttcttagccttccgtcttagcctgagcaagatactttcaatttgttccggctattctttttgtctaacagtgtggcctgcgaagctccatttgagttggtcattgccaatgactcactggtcgtactgtaacagaataagtaacaaaaaaaaaccttatttgtccccaaagccctttcaatatttttcctcgtagcagagatttcacgatttcccatacaattcagtaactggcaaacgtattccatctatgtaaatcatgcactcaatattggtcatcagcaccatatgcccgagttttagactttcaatatttgaattatgtctatctagacctgttttatctacctatcttacctatctagtcctaactgtttttggtgagtcctcagtatgctacgaagtcaacttcaaggagactgcgctgaatggatccgaccagcatctaaatagtaggcaccatcagtgcaattatatctcaagtaattatttgtttgctccatacacttcatgatacacttttatttttcatttacaggcaaaaatttattgtctctcgtactgagagaagatacgatgttcatacttttcttctcaaatgtattttttggaaattcttttattacacgggatgtcttagccaaccgcctctagtgtatggtgggtgtttcatcatcatcagtagctcgacaatcatttttgggtgctggtttgttctaggattttccgccattctgttctgttccttgctttgttcttccagtgggtaatctcaagtgttttcagatcttgttccacttgttccatgtatctaagtttgggtcttccctttgaccttctccctactggtgtttgcctcattatatgtttcggtctccaacatccattcaacatggcccatccagcggatacgtccgatctttatggatgttatgacgtcgggttcgttgtatgctgcgtatagttcaaaattatatctcctgtgccatacgtcattttctttcacccccttatatatgtcgtaccatcaatgcaagaccatcacaacccaaaaattaccattttccgctttccatgaatctgcaatggcaatgggcagtctaacataatgcaagagtattataacttaacattaatattgtttaataatgtcttatattaaattttgagttataatactctttcattatgttagactacccattaccattacagattcataaaaacaaaaaatggcaatccctgagttgtgacagtcttgcattgatggtgcgacttatacaaa

SEQ ID NO: 2226 - DNA, 1459 bp, Diabrotica virgifera
  SmartBlast Evalue=3E-37; Info=Endonuclease-reverse transcriptase n=1 Tax=Bombyx mori RepID=D7F170_BOMMO
caacgagaatataaaaaaaatgtaaatataaacgggcctgtaacgtactacaaataaaaacgatcatctattattctactttttttccagaaaactacaaatcgatcaacaaaaaaaggagatagtcaatacaagcaatgtattaaaaaataatacaaacaagaaaaataatcggacaaatatgaaatcgggactaggataatgatgtgcgctttagattatccgatgatcctctaagcttatcctatttatcggtcgtactgtcttcttagccttccgtcttagcctgagcaagatactttcaatttgttccggctattctttttgtctaacagtgtggcctgcgaagctccatttgagttggtcattgccaatgactcactggtcgtactgtaacagaataagtaacaaaaaaaaaccttatttgtccccaaagccctttcaatatttttcctcgtagcagagatttcacgatttcccatacaattcagtaactggcaaacgtattccatctatgtaaatcatgcactcaatattggtcatcagcaccatatgcccgagttttagactttcaatatttgaattatgtctatctagacctgttttatctacctatcttacctatctagtcctaactgtttttggtgagtcctcagtatgctacgaagtcaacttcaaggagactgcgctgaatggatccgaccagcatctaaatagtaggcaccatcagtgcaattatatctcaagtaattatttgtttgctccatacacttcatgatacacttttatttttcatttacaggcaaaaatttattgtctctcgtactgagagaagatacgatgttcatacttttcttctcaaatgtattttttggaaattcttttattacacgggatgtcttagccaaccgcctctagtgtatggtgggtgtttcatcatcatcagtagctcgacaatcatttttgggtgctggtttgttctaggattttccgccattctgttctgttccttgctttgttcttccagtgggtaatctcaagtgttttcagatcttgttccacttgttccatgtatctaagtttgggtcttccctttgaccttctccctactggtgtttgcctcattatatgttttggtgtttcggtctccaacatccgttcaacatggcccatccagcgcagacgtccgatctttatggatgttatgacgtcgggttcgttgtatgctgcgtatagttcaaaattatatcttctgcgccatacgtcattttctttcaccccttatatatgtgtctaaggatttttcgttcaaacgtacctaataagttctcatcgcttttcgaccgtgtccatgtctctgatccatatataaggaccggttttatcagggttttttatattttgcatttggtttttctcgtgatgttgttagatcttagatgtttaattagtccattgt

SEQ ID NO: 2227 - DNA, 1116 bp, Diabrotica virgifera
  SmartBlast Evalue=2E-29; Info=Endonuclease-reverse transcriptase n=1 Tax=Bombyx mori RepID=D7F170_BOMMO
tagtctgggagacgaccgtattgatgctctaaattttttgacgtttggatttttcatattatagtgcaagtcacaggtgaaactgctgatgtcttctatcatgaggtatttcccttttggtttttcaatatgtgatgaagagtgttatgtcttaaggtattttttgtacagatgtgaaaatgttttgggtcacgatcatcatcagtagctcgacaaccctttttgggtcctggcttgttctaggattttccgccattctgttctgttccttgctttgtttttccagttggtaatcttaagtgttttcagatcttgttccatgtatctaagtttgggtcttccctttgaccttctccctactggtgtttgcctcattatatgttttggtgtttcggtctccaacatccgttcaacatggcccatccagcgcagacgtccgatctttatggatgttatgacgtcgggttcgttgttcaaaagtatatcttctgcgccatacgtcaataggttctcatcgcttttcgacagtgtccatgtctctgatccatatataaggaccggttttatcagggttttgtagtatattttgcatttggtaaatgttttgggcgcttgtgttaatattgatcgcagttatgatatcgcagtgctgataaaacatcaaatatgatatcacctcctcgtgaagccaacattaacagtgtgtgttgatgctcaaaacaccaattccaaagtgaagccgactaaaattcagtatgcagattacattcggcaaataaacagatccatccgtttaccattgcttcatcaaatgccgaaatgtttatctttgtttgtttctattagtatataaaaagtataaactatgacaactgtacattaaaaaactgcacttaaagtgtctgcgcgttcagctagcaaggtgttgacataattgactgacaaacttataatcatttgaatataacagatatttttattaagaaataaacacttttcgatagttttcattgtgtacctaaacacatatgtacacgtatgtgtatatatatgtataaaacgacataatgtgaataaaccttgtttacgaaacttgcttaaaaagtcacacgatag

SEQ ID NO: 2228 - DNA, 799 bp, Diabrotica virgifera
  SmartBlast Evalue=6E-23; Info=Endonuclease-reverse transcriptase n=1 Tax=Bombyx mori RepID=D7F170_BOMMO
tagtctgggagacgaccgtattgatgctctaaattttttgacgtttggatttttcatattatagtgcaagtcacaggtgaaactgctgatgtcttctatcatgaggtatttcccttttggtttttcaatatgtgatgaagagtgttatgtcttaaggtattttttgtacagatgtgaaaatgttttgggtcacgatcatcatcagtagctcgacaaccctttttgggtcctggcttgttctaggattttccgccattctgttctgttccttgctttgtttttccagttggtaatcttaagtgttttcagatcttgttccatgtatctaagtttgggtcttccctttgaccttctccctactggtgtttgcctcattatatgtttcggtctccaacatccattcaacatggcccatccagcggatacgtccgatctttatggatgttatgacgtcgggttcgttgtatgctgcgtatagttcaaaattatatctcctgtgccatacgtcattttctttcacccccttatatatgtcgtaccatcaatgcaagaccatcacaacccaaaaattaccattttccgctttccatgaatctgcaatggcaatgggcagtctaacataatgcaagagtattataacttaacattaatattgtttaataatgtcttatattaaattttgagttataatactctttcattatgttagactacccattaccattacagattcataaaaacaaaaaatggcaatccctgagttgtgacagtcttgcattgatggtgcgacttatacaaa

SEQ ID NO: 2229 - DNA, 709 bp, Diabrotica virgifera
  SmartBlast Evalue=6E-38; Info=Endonuclease-reverse transcriptase n=1 Tax=Bombyx mori RepID=D7F170_BOMMO
tagtctgggagacgaccgtattgatgctctaaattttttgacgtttggatttttcatattatagtgcaagtcacaggtgaaactgctgatgtcttctatcatgaggtatttcccttttggtttttcaatatgtgatgaagagtgttatgtcttaaggtattttttgtacagatgtgaaaatgttttgggtcacgatcatcatcagtagctcgacaaccctttttgggtcctggcttgttctaggattttccgccattctgttctgttccttgctttgtttttccagttggtaatcttaagtgttttcagatcttgttccatgtatctaagtttgggtcttccctttgaccttctccctactggtgtttgcctcattatatgttttggtgtttcggtctccaacatccgttcaacatggcccatccagcgcagacgtccgatctttatggatgttatgacgtcgggttcgttgtatgctgcgtatagttcaaaattatatcttctgcgccatacgtcattttctttcaccccttatatatgtgtctaaggatttttcgttcaaacgtacctaataagttctcatcgcttttcgaccgtgtccatgtctctgatccatatataaggaccggttttatcagggttttttatattttgcatttggtttttctcgtgatgttgttagatcttagatgtttaattagtccattgt

SEQ ID NO: 2230 - DNA, 2516 bp, Diabrotica virgifera
cgtgagaatttttctctacattttaaccatggaaatcgatgtaaaacataattctaagaaaaaatgctctttaagttttcgtcgtaaaactaatattttaagttatttgcgcttgaaagttaatggttttcgacgaaaaaatcgactttttttagagggttttttgagaataactcaaaaaatatgtagataatcaaaaaaactgtaattataaaattgtattttttacaaagaaaaaaaaatccttttttctttaattttctccaactaacacgaaccgagagaaggtatgttaaggcaagccgcacaccaacgaaacatgaaacgaaaaacatgaaacatgaaacgtaaaacacgtttgatgaaaattaaacactgctaaacaaatctcaaagtccgcctaccaatgaaacgagtgtgattcatgctcatgacacatttttattttcggagagtttcataaatggccggacgtatatttgtttagcagtggtttatttccatgaaacgtaatttacgtttcatgtttctttgatgtgctgcctgcctaaaggttagcttttttcgtcacatgcataatttgaattattcaaagccaaataatgggaaaactgcattttgcgaggtaaacttacataatcttttttcaagtatataattattagtagattaataaaaagaaaaaagtttctaccataaaaattaggcgacttatgataaaaataacgtcggtagatacctattcttgtacaaaataatcagtgaaaacaacccgctaactgtcctcctaattaaaatttatttccacccttttgtaattcttttttatatgtattatcaatacacccaagaagtttgatctatttaaaaggcataattttagaaaaattggagattaaaaataaatagattttttgtaatttcatattttttactttttcttcaaaatatctccgaaaatattggagatacgaaaaaaattatagaatactagtccaggaaccaaagcatttcacctcgaaatttttacagaatggatcaatttgcttgaaaatccgagaccaagcagtggatggtccatggatcaaaatctatatgatgccgacacgcgcttttaaccatgggggtggttgtcaccacatctcggaggtggacattttttattatattttgaccgcaaaagttaataaaaatattcattctaagcaaaaaatgttctatacatttttgcgataaagttagtagtttttgatttatttgatatcgaaagtgtttgttttatatctaaaaatcaatggttttcgacggtttactcatttacgattcactcaatttttgccgtagaacaaattttattaaaccaagttcttgagaattaaataacctatctacaattttagatttaaacatttttcgtatctctgatgctaatcgttctattctgaaaacaatggcagtttttaccaaattgcaaacattcgttatcgctttaaacttcagtttttaaaaaactaattattctaagccagtcaaacttttataatctattaacaatacataaataaagaaaaataagtaaggcaaatgactaaaaataccgctaacttgcattattatgcttccaatcggatttctcctttttttttcaaaaaaatataatgattttttaaccctaacttgtctattttttgtcttagaaagttttttaaaaaataattttataggcttttacaagatatatataaggctattgatattaaatccttttaaaaattctcagtcacaaaaacagttggcattgaaaaggttggtaaaggtagtttttgcgtgatattacaagttttaattgtcaatagctcactcaatttttgccgtagaaaaaatttttgcaaaccaagttcttgggaattaaataagctacaatttcatatttaaacattttttcgtatctctgatgctaatctttctattctgaagaaaaggccattttttccaaactacaaaaattcgttattcgcttttaactccattttttttaaactaatcattctaagccggtcaaacttctagaacctattaataatacataaataaagaagaccaaataaggtcaatgactaattttaattagggtggtgattaggaggttgcttccgatcactttttcgctgaaaaaagtagggactgacattcttttcattatacgtcacttaatttttgagctaaagactttctttttatttctggagatagatattttcaaatgctttaaattagtttgaacaagttatcctcgaaaaatgcatagttttgccgtcttttgactttgaaactacagtatttagcatttgaccaagaagagctatcatttaataatgtatagctcgattactattggtcttaaaaaaattaaaagaaacggttttgtttattgtttcaaaaggtacatttttgttaagtaaagttgttttgataaatgaaaacttttggagttattagccgaaaacttgttaaca

SEQ ID NO: 2231 - DNA, 2249 bp, Diabrotica virgifera
cgtgagaatttttctctacattttaaccatggaaatcgatgtaaaacataattctaagaaaaaatgctctttaagttttcgtcgtaaaactaatattttaagttatttgcgcttgaaagttaatggttttcgacgaaaaaatcgactttttttagagggttttttgagaataactcaaaaaatatgtagataatcaaaaaaactgtaattataaaattgtattttttacaaagaaaaaaaaatccttttttctttaattttctccaactaacacgaaccgagagaaggtatgttaaggcaagccgcacaccaacgaaacatgaaacgaaaaacatgaaacatgaaacgtaaaacacgtttgatgaaaattaaacactgctaaacaaatctcaaagtccgcctaccaatgaaacgagtgtgattcatgctcatgacacatttttattttcggagagtttcataaatggccggacgtatatttgtttagcagtggtttatttccatgaaacgtaatttacgtttcatgtttctttgatgtgctgcctgcctaaaggttagcttttttcgtcacatgcataatttgaattattcaaagccaaataatgggaaaactgcattttgcgaggtaaacttacataatcttttttcaagtatataattattagtagattaataaaaagaaaaaagtttctaccataaaaattaggcgacttatgataaaaataacgtcggtagatacctattcttgtacaaaataatcagtgaaaacaacccgctaactgtcctcctaattaaaatttatttccacccttttgtaattcttttttatatgtattatcaatacacccaagaagtttgatctatttaaaaggcataattttagaaaaattggagattaaaaataaatagattttttgtaatttcatattttttactttttcttcaaaatatctccgaaaatattggagatacgaaaaaaattatagaatactagtccaggaaccaaagcatttcacctcgaaatttttacagaatggatcaatttgcttgaaaatccgagaccaagcagtggatggtccatggatcaaaatctatatgatgccgacacgcgcttttaaccatgggggtggttgtcaccacatctcggaggtggacattttttattatattttgaccgcaaaagttaataaaaatattcattctaagcaaaaaatgttctatacatttttgcgataaagttagtagtttttgatttatttgatatcgaaagtgtttgttttatatctaaaaatcaatggttttcgacggtttactcatttacgattcactcaatttttgccgtagaacaaattttattaaaccaagttcttgagaattaaataacctatctacaattttagatttaaacatttttcgtatctctgatgctaatcgttctattctgaaaacaatggcagtttttaccaaattgcaaacattcgttatcgctttaaacttcagtttttaaaaaactaattattctaagccagtcaaacttttataatctattaacaatacataaataaagaaaaataagtaaggcaaatgactaaaaataccgctaacttgcattattatgcttccaatcggatttctcctttttttttcaaaaaaatataatgattttttaaccctaacttgtctattttttgtcttagaaagttttttaaaaaataattttataggcttttacaagatatatataaggctattgatattaaatccttttaaaaattctcagtcacaaaaacagttggcattgaaaaggttggtaaaggtagtttttgcgtgatattacaagttttaattgtcaatagctcactcaatttttgccgtagaaaaaatttttgcaaaccaagttcttgggaattaaataagctacaatttcatatttaaacattttttcgtatctctgatgctaatctttctattctgaagaaaaggccattttttccaaactacaaaaattcgttattcgcttttaactccattttttttaaactaatcattctaagccggtcaaacttctcaaacctattaataatatacaaataaagaagaccaaataaggccaattgctaattttaattagggtggtaattaggtggttgcttccgataactttttcgctgaaaaaataggcactgacattcttttcattacaagtcacttaatttttgagctagagacttttttgttatttctggaga

SEQ ID NO: 2232 - DNA, 1164 bp, Diabrotica virgifera
gcagaaagttttttttcaaaccaagttcttgggaattaaataacctacaattttgtatttaaacattttttcgtatctccgatgcaaatctttctgttctgaagaaagtggcattttttaccaaactacaaaaattcgttattcgcttttaacttcagtttttaaaaactaatcattctaagccagtcaaacttctagaatctattaataatacataaataaagaagaatgaataaggccaatgactaaaaacaccgctaacttacattattatgcttccaattggatttctccttttttttttcaaaaaaatatattgattttttaaccgtaacttttttattttatcttagaaagtttggtaaaaacaattttgtaggttttacaagatctataagtctattaatattaaatcttttaaaatcctcagtcgcaaaaagaggtgactttgaaagggttggtaaaggtgatttttgcatgttattacaagtttaattgtcaatagctcactcaatttttgccgtagaaaaaatttttgcaaaccaagttcttgggaattaaataagctacaatttcatatttaaacatttttcgtatctctgatgctaatctttctattctgaagaaaaggccattttttccaaactacaaaaattcgttattcgcttttaactccattttttttaaactaatcattctaagccggtcaaacttctagaacctattaataatacataaataaagaagaccaaataaggtcaatgactaattttaattagggtggtgattaggaggttgcttccgatcactttttcgctgaaaaaagtagggactgacattcttttcattatacgtcacttaatttttgagctaaagactttctttttatttctggagatagatattttcaaatgctttaaattagtttgaacaagttatcctcgaaaaatgcatagttttgccgtcttttgactttgaaactacagtatttagcatttgaccaagaagagctatcatttaataatgtatagctcgattactattggtcttaaaaaaattaaaagaaacggttttgtttattgtttcaaaaggtacatttttgttaagtaaagttgttttgataaatgaaaacttttggagttattagccgaaaacttgttaaca

SEQ ID NO: 2233 - DNA, 1013 bp, Diabrotica virgifera
ctgttatttaactggtaaaataagctgtactgattgtggaagagttggcaccactgcataaatgagaaagatacatgggtatcattcaagccagttcttaccagtaaatgcaaaagaattgagaaatgcagaagaagttggatttctcttaaaaaaatatatattgactttttaaccgtaacttttttatttttatcttagaaagtttggtaaaaatgaattttgtaggttttacaagatctataagtctattaatattaaatcttttaaaatcctcagtcgcaaaaagaggtgactttgaaagggttggtaaaggtgatttttgcatgttattacaagtttaattgtcaatagctcactcaatttttgccgtagaaaaaatttttgcaaaccaagttcttgggaattaaataagctacaatttcatatttaaacatttttcgtatctctgatgctaatctttctattctgaagaaaaggccattttttccaaactacaaaaattcgttattcgcttttaactccattttttttaaactaatcattctaagccggtcaaacttctagaacctattaataatacataaataaagaagaccaaataaggtcaatgactaattttaattagggtggtgattaggaggttgcttccgatcactttttcgctgaaaaaagtagggactgacattcttttcattatacgtcacttaatttttgagctaaagactttctttttatttctggagatagatattttcaaatgctttaaattagtttgaacaagttatcctcgaaaaatgcatagttttgccgtcttttgactttgaaactacagtatttagcatttgaccaagaagagctatcatttaataatgtatagctcgattactattggtcttaaaaaaattaaaagaaacggttttgtttattgtttcaaaaggtacatttttgttaagtaaagttgttttgataaatgaaaacttttggagttattagccgaaaacttgttaaca

SEQ ID NO: 2234 - DNA, 897 bp, Diabrotica virgifera
gcagaaagttttttttcaaaccaagttcttgggaattaaataacctacaattttgtatttaaacattttttcgtatctccgatgcaaatctttctgttctgaagaaagtggcattttttaccaaactacaaaaattcgttattcgcttttaacttcagtttttaaaaactaatcattctaagccagtcaaacttctagaatctattaataatacataaataaagaagaatgaataaggccaatgactaaaaacaccgctaacttacattattatgcttccaattggatttctccttttttttttcaaaaaaatatattgattttttaaccgtaacttttttattttatcttagaaagtttggtaaaaacaattttgtaggttttacaagatctataagtctattaatattaaatcttttaaaatcctcagtcgcaaaaagaggtgactttgaaagggttggtaaaggtgatttttgcatgttattacaagtttaattgtcaatagctcactcaatttttgccgtagaaaaaatttttgcaaaccaagttcttgggaattaaataagctacaatttcatatttaaacatttttcgtatctctgatgctaatctttctattctgaagaaaaggccattttttccaaactacaaaaattcgttattcgcttttaactccattttttttaaactaatcattctaagccggtcaaacttctcaaacctattaataatatacaaataaagaagaccaaataaggccaattgctaattttaattagggtggtaattaggtggttgcttccgataactttttcgctgaaaaaataggcactgacattcttttcattacaagtcacttaatttttgagctagagacttttttgttatttctggaga

SEQ ID NO: 2235 - DNA, 746 bp, Diabrotica virgifera
ctgttatttaactggtaaaataagctgtactgattgtggaagagttggcaccactgcataaatgagaaagatacatgggtatcattcaagccagttcttaccagtaaatgcaaaagaattgagaaatgcagaagaagttggatttctcttaaaaaaatatatattgactttttaaccgtaacttttttatttttatcttagaaagtttggtaaaaatgaattttgtaggttttacaagatctataagtctattaatattaaatcttttaaaatcctcagtcgcaaaaagaggtgactttgaaagggttggtaaaggtgatttttgcatgttattacaagtttaattgtcaatagctcactcaatttttgccgtagaaaaaatttttgcaaaccaagttcttgggaattaaataagctacaatttcatatttaaacatttttcgtatctctgatgctaatctttctattctgaagaaaaggccattttttccaaactacaaaaattcgttattcgcttttaactccattttttttaaactaatcattctaagccggtcaaacttctcaaacctattaataatatacaaataaagaagaccaaataaggccaattgctaattttaattagggtggtaattaggtggttgcttccgataactttttcgctgaaaaaataggcactgacattcttttcattacaagtcacttaatttttgagctagagacttttttgttatttctggaga

SEQ ID NO: 2236 - DNA, 729 bp, Diabrotica virgifera
gcagaaagttttttttcaaaccaagttcttgggaattaaataacctacaattttgtatttaaacattttttcgtatctccgatgcaaatctttctgttctgaagaaagtggcattttttaccaaactacaaaaattcgttattcgcttttaacttcagtttttaaaaactaatcattctaagccagtcaaacttctagaatctattaataatacataaataaagaagaatgaataaggccaatgactaaaaacaccgctaacttacattattatgcttccaattggatttctccttttttttttcaaaaaaatatattgattttttaaccgtaacttttttattttatcttagaaagtttggtaaaaacaattttgtaggttttacaagatctataagtctattaatattaaatcttttaaaatcctcagtcacaaaaggaggtgactttgaaagggttagtatagatggtttttttatgttattacaagttttaattatatagctcactcaatttttccatcagaaaaaatttttgcaaaccaatttcttgggaattaaataacctacaattttatattttaacaatttttcgtatctctgatgctaatctttctattctgaagaaaagcgcattttttacgaaactacaaaaattctttattcgctattaacttcattttgataaaaactaagccagtcaaacttatttaacctattaatagcacac

SEQ ID NO: 2237 - DNA, 579 bp, Diabrotica virgifera
ctgttatttaactggtaaaataagctgtactgattgtggaagagttggcaccactgcataaatgagaaagatacatgggtatcattcaagccagttcttaccagtaaatgcaaaagaattgagaaatgcagaagaagttggatttctcttaaaaaaatatatattgactttttaaccgtaacttttttatttttatcttagaaagtttggtaaaaaatgaattttgtaggttttacaagatctataagtctattaatattaaatcttttaaaatcctcagtcacaaaaggaggtgactttgaaagggttagtatagatggtttttttatgttattacaagttttaattatatagctcactcaatttttccatcagaaaaaatttttgcaaaccaatttcttgggaattaaataacctacaattttatattttaacaatttttcgtatctctgatgctaatctttctattctgaagaaaagcgcattttttacgaaactacaaaaattctttattcgctattaacttcattttgataaaaactaagccagtcaaacttatttaacctattaatagcacac

SEQ ID NO: 2238 - DNA, 3239 bp, Diabrotica virgifera
attagaaaatcggtacagtaaaagctccttattcgcgcttcctttattcgcgttttttctagctctctgaatagttttccaaaaaagctgaaaaaatcattttaaaatacaatgcaggctgtcactgtaaactgtcatttaggtatttattctattcatttgttttgtgtaaattgtatgtaattattattgagttctaaaactgttaatatatgaattatttaatgattgtaattattgtaattggtataaccgtaaataaactatttatttatttatttgttttcactattcgcggattaaaaaaatgctacctaattcctatattcgcggcccaagatttctttattcgcggattgaattttatattatacgcaaataaaaagcatttggtaccatctgtcaataaatcagcaaatccactaataaaaaaataaaattgatcttattacaactacacctctactagattaagtttccaaaagctatcggcatcagcaattcctttaaggtaactcgctgttgccgttgtcggtgtttttgagactgtaaataatgagaatgtttaaataaaataaattattactcaaaacatagagcattcagttctgccgcgattgcaggttccatgctttggcaagagctgtattgtgtgtttattgttttacttttttattattgatgaaattgcgggtgggataggacgagatgggttcgaacagttataatcaagtgacgtctaggagttgcttgaaccagacttgtaggaaatgttaaattcacaacccgttgaagaggttcaacaagcactgaaaatgtgacatttaatttaaaaaatcttagtgaatgtttatgaatggaaaatgagctttgtgatttctttatgaaaattgatccatttatggaaagaggccctatttttaagaggcaaaatgctaatgccaatgctgaacatcagtctgaattgaagcaattttcaaaaattgccaagtaagagtttacgaaattctttaaacaattgcttaaagctgaagattatatgtaattaatcaatctgtatggtcaaaacttcaattaaactgatttttttttagtctgtttgcttttttatttcgtcacctaagaacgtatcccatacaatcccatataaatgaccattccatattcacggtttccgtattcgcggcatatttacggaacgtataccccgcgaataaagagcttttactgtaattaaataaaagaagattgttaaaaacatttttaattctcaattttgctacattatattgctataggatcgacgaataagtatatcaacaaaaatgtctacaatctttctggaaaccttaaatagagtcagtctctaataatcatgaataatctattttatatacacagacatgtttccattacatcatttccatcgatatattataacttataaaagtaaactaataactagacatcacattttcttatttcaagatcccgtaaaaatactaataataggaaatattactagcgcagctctgtatatgtactgccagtaactaaatagaaccaaataaaaatcatattaaaacgtgtctaaatttaactaactaactaaacacagttatacaatacacagttgttaagttatacaatacagagatgcaccatttaaacaagtaacttgtaagaacaccttgaccagataacgtaaaaaatttaagataaaatgttatactgtacagttttatagacaccctcttgtgctacattcttctagtatttcgtatagaaatgttaatagaattaaaacaagtatataacaaaaagtaggactaatagttgcactcttgatcatagaaacattgaaaatgtagaagagtatgtgtacttggggcataaaataaagcaagggaaacaaaattaaactgcggaaattacaagaagaataagaatggcatggatagcaaacggcaaactaagctttactactaggaaaatcacaaaaaacatggatcgacaaaattaaagaaaaagtaaggagaaactggaaccagatacctcaaaacagaggtttatgtctaggagtgaatcagaagaggctgctaaccaagattacttcttaagcgttacgattacttcttaagaagcggaaaaaaggctgacaaatggagattggggttagctttattttattttcgaaaaattaatgaaataaaatgttagcttgaatgatttggaagcgattgtatgtacacaaaatttatgtattaacgatatatttgcacacattattgacaatcttaacttacaaaccagtaaaacctttcgattaaaaacaggtcttttaagccatttagataattaagacaaaaatactgaaggccgccaaaagtcatgaagaaaatgaacaatacaaataaagagagatatgaagaaagtatgaaaatgataaaagtcactaggaggagaaaatttatatgagacaaaaggactaaaagggaaattgagtgaatctttctgataaaaaaggacactggagaagagcattcaggtcttacatcagaaaaaataagcgcacgtatacactgtattgcagagaccatgagtgcagtagtggaaataataatgtatcatattgagtgtcgcaagtatttgtaaacaggtgcctccgaaaaaaaagtatattggcccaacatcataacaaatcaaaaactctggaagaaaacagaacaagagccaattgaaattgcaattaaaagggaaaaaatggaattggctgggacacaccctgaggaaggataacgcagacataacaaagaaagctctaaaatggacagtagcaggacgaagaaaacaaggacaattgaagctgactacaaaagtatgagaaagagctggggagaggtagcagctaataaaggccagagacagagtccaatggagaagcttcgtggatgccctatggagtaacaggaaataatatacagtatggtgcaaatgaaaggaataaattcgacatttcgtaaaccagcgattttacagaaaaatcccgaaaccggttgattcctattttaaacatgacattttggcatattatttatgtcatactagtgacctcatccatctgggcgtgatgacgcaatcgatgatttctttaaatgggaataggagtcgtgtgctagctcatttgaaaggtcattcaattatctacccagcaatataaacatttacacaattatttg

SEQ ID NO: 2239 - DNA, 3177 bp, Diabrotica virgifera
atatatctacgtcatacgtctttggtttgtattattgtatataccaatagcgtatgtcgtggatatattgatgttatgtgacacatgacagaggctcgaaacaaatgactgtgaatgaaaagccctattgagttctaaaactgttaatatatgaattatttaatgattgtaattattgtaattggtataaccgtaaataaactatttatttatttatttgttttcactattcgcggattaaaaaaatgctacctaattcctatattcgcggcccaagatttctttattcgcggattgaattttatattatacgcaaataaaaagcatttggtaccatctgtcaataaatcagcaaatccactaataaaaaaataaaattgatcttattacaactacacctctactagattaagtttccaaaagctatcggcatcagcaattcctttaaggtaactcgctgttgccgttgtcggtgtttttgagactgtaaataatgagaatgtttaaataaaataaattattactcaaaacatagagcattcagttctgccgcgattgcaggttccatgctttggcaagagctgtattgtgtgtttattgttttacttttttattattgatgaaattgcgggtgggataggacgagatgggttcgaacagttataatcaagtgacgtctaggagttgcttgaaccagacttgtaggaaatgttaaattcacaacccgttgaagaggttcaacaagcactgaaaatgtgacatttaatttaaaaaatcttagtgaatgtttatgaatggaaaatgagctttgtgatttctttatgaaaattgatccatttatggaaagaggccctatttttaagaggcaaaatgctaatgccaatgctgaacatcagtctgaattgaagcaattttcaaaaattgccaagtaagagtttacgaaattctttaaacaattgcttaaagctgaagattatatgtaattaatcaatctgtatggtcaaaacttcaattaaactgatttttttttagtctgtttgcttttttatttcgtcacctaagaacgtatcccatacaatcccatataaatgaccattccatattcacggtttccgtattcgcggcatatttacggaacgtataccccgcgaataaagagcttttactgtaattaaataaaagaagattgttaaaaacatttttaattctcaattttgctacattatattgctataggatcgacgaataagtatatcaacaaaaatgtctacaatctttctggaaaccttaaatagagtcagtctctaataatcatgaataatctattttatatacacagacatgtttccattacatcatttccatcgatatattataacttataaaagtaaactaataactagacatcacattttcttatttcaagatcccgtaaaaatactaataataggaaatattactagcgcagctctgtatatgtactgccagtaactaaatagaaccaaataaaaatcatattaaaacgtgtctaaatttaactaactaactaaacacagttatacaatacacagttgttaagttatacaatacagagatgcaccatttaaacaagtaacttgtaagaacaccttgaccagataacgtaaaaaatttaagataaaatgttatactgtacagttttatagacaccctcttgtgctacattcttctagtatttcgtatagaaatgttaatagaattaaaacaagtatataacaaaaagtaggactaatagttgcactcttgatcatagaaacattgaaaatgtagaagagtatgtgtacttggggcataaaataaagcaagggaaacaaaattaaactgcggaaattacaagaagaataagaatggcatggatagcaaacggcaaactaagctttactactaggaaaatcacaaaaaacatggatcgacaaaattaaagaaaaagtaaggagaaactggaaccagatacctcaaaacagaggtttatgtctaggagtgaatcagaagaggctgctaaccaagattacttcttaagcgttacgattacttcttaagaagcggaaaaaaggctgacaaatggagattggggttagctttattttattttcgaaaaattaatgaaataaaatgttagcttgaatgatttggaagcgattgtatgtacacaaaatttatgtattaacgatatatttgcacacattattgacaatcttaacttacaaaccagtaaaacctttcgattaaaaacaggtcttttaagccatttagataattaagacaaaaatactgaaggccgccaaaagtcatgaagaaaatgaacaatacaaataaagagagatatgaagaaagtatgaaaatgataaaagtcactaggaggagaaaatttatatgagacaaaaggactaaaagggaaattgagtgaatctttctgataaaaaaggacactggagaagagcattcaggtcttacatcagaaaaaataagcgcacgtatacactgtattgcagagaccatgagtgcagtagtggaaataataatgtatcatattgagtgtcgcaagtatttgtaaacaggtgcctccgaaaaaaaagtatattggcccaacatcataacaaatcaaaaactctggaagaaaacagaacaagagccaattgaaattgcaattaaaagggaaaaaatggaattggctgggacacaccctgaggaaggataacgcagacataacaaagaaagctctaaaatggacagtagcaggacgaagaaaacaaggacaattgaagctgactacaaaagtatgagaaagagctggggagaggtagcagctaataaaggccagagacagagtccaatggagaagcttcgtggatgccctatggagtaacaggaaataatatacagtatggtgcaaatgaaaggaataaattcgacatttcgtaaaccagcgattttacagaaaaatcccgaaaccggttgattcctattttaaacatgacattttggcatattatttatgtcatactagtgacctcatccatctgggcgtgatgacgcaatcgatgatttctttaaatgggaataggagtcgtgtgctagctcatttgaaaggtcattcaattatctacccagcaatataaacatttacacaattatttg

SEQ ID NO: 2240 - DNA, 3013 bp, Diabrotica virgifera
  misc_feature (41)..(41): n is a, c, g, or t
cggcagtgcctttgaggtaacccgctgtcgccgtcatcggngtttttgagactgtaaacaagagaatgttttaagtaaaataaattaatgtattattcaaacctagagcattaaattctgccgcaatcacaggttccatgcttgggcaagagctgcatttcgtgtttattattttatttttccattcgttacaaaaattgtaattaagtgacacgtctcttccgatatcttcctaatttataatgttgactaaaaaaaaatgaaaaacggatttcgatccgaaaaaaatcattttattacttaaagtgaaaatagaaatgcttgatcgtaaacataaaagaatcattacaagaaaccagacacattgaaatcatgctggaaaaaactgtggcctgttcggagtgcaggaaatgaggaagaatctgtgttcaaattttaactgcaaacattgccgaaattgcgggtggaagaggacaagatgggttcgaacagttactatcaagtgacgtttaggagttgcttgaaccagacttagaggaaatgttaaattcacaacccgttgaagaagaggcttcaacaagcactcaaaacatgacatttaatttaaaaaatcttagtgaatgtttatgaatggaaaatgagctttgtgatttctttatgaaaattgatccatttatggaaagaggccctatttttaagaggcaaaatgctaatgccaatgctgaacatcagtctgaattgaagcaattttcaaaaattgccaagtaagagtttacgaaattctttaaacaattgcttaaagctgaagattatatgtaattaatcaatctgtatggtcaaaacttcaattaaactgatttttttttagtctgtttgcttttttatttcgtcacctaagaacgtatcccatacaatcccatataaatgaccattccatattcacggtttccgtattcgcggcatatttacggaacgtataccccgcgaataaagagcttttactgtaattaaataaaagaagattgttaaaaacatttttaattctcaattttgctacattatattgctataggatcgacgaataagtatatcaacaaaaatgtctacaatctttctggaaaccttaaatagagtcagtctctaataatcatgaataatctattttatatacacagacatgtttccattacatcatttccatcgatatattataacttataaaagtaaactaataactagacatcacattttcttatttcaagatcccgtaaaaatactaataataggaaatattactagcgcagctctgtatatgtactgccagtaactaaatagaaccaaataaaaatcatattaaaacgtgtctaaatttaactaactaactaaacacagttatacaatacacagttgttaagttatacaatacagagatgcaccatttaaacaagtaacttgtaagaacaccttgaccagataacgtaaaaaatttaagataaaatgttatactgtacagttttatagacaccctcttgtgctacattcttctagtatttcgtatagaaatgttaatagaattaaaacaagtatataacaaaaagtaggactaatagttgcactcttgatcatagaaacattgaaaatgtagaagagtatgtgtacttggggcataaaataaagcaagggaaacaaaattaaactgcggaaattacaagaagaataagaatggcatggatagcaaacggcaaactaagctttactactaggaaaatcacaaaaaacatggatcgacaaaattaaagaaaaagtaaggagaaactggaaccagatacctcaaaacagaggtttatgtctaggagtgaatcagaagaggctgctaaccaagattacttcttaagcgttacgattacttcttaagaagcggaaaaaaggctgacaaatggagattggggttagctttattttattttcgaaaaattaatgaaataaaatgttagcttgaatgatttggaagcgattgtatgtacacaaaatttatgtattaacgatatatttgcacacattattgacaatcttaacttacaaaccagtaaaacctttcgattaaaaacaggtcttttaagccatttagataattaagacaaaaatactgaaggccgccaaaagtcatgaagaaaatgaacaatacaaataaagagagatatgaagaaagtatgaaaatgataaaagtcactaggaggagaaaatttatatgagacaaaaggactaaaagggaaattgagtgaatctttctgataaaaaaggacactggagaagagcattcaggtcttacatcagaaaaaataagcgcacgtatacactgtattgcagagaccatgagtgcagtagtggaaataataatgtatcatattgagtgtcgcaagtatttgtaaacaggtgcctccgaaaaaaaagtatattggcccaacatcataacaaatcaaaaactctggaagaaaacagaacaagagccaattgaaattgcaattaaaagggaaaaaatggaattggctgggacacaccctgaggaaggataacgcagacataacaaagaaagctctaaaatggacagtagcaggacgaagaaaacaaggacaattgaagctgactacaaaagtatgagaaagagctggggagaggtagcagctaataaaggccagagacagagtccaatggagaagcttcgtggatgccctatggagtaacaggaaataatatacagtatggtgcaaatgaaaggaataaattcgacatttcgtaaaccagcgattttacagaaaaatcccgaaaccggttgattcctattttaaacatgacattttggcatattatttatgtcatactagtgacctcatccatctgggcgtgatgacgcaatcgatgatttctttaaatgggaataggagtcgtgtgctagctcatttgaaaggtcattcaattatctacccagcaatataaacatttacacaattatttg

SEQ ID NO: 2241 - DNA, 2768 bp, Diabrotica virgifera
attagaaaatcggtacagtaaaagctccttattcgcgcttcctttattcgcgttttttctagctctctgaatagttttccaaaaaagctgaaaaaatcattttaaaatacaatgcaggctgtcactgtaaactgtcatttaggtatttattctattcatttgttttgtgtaaattgtatgtaattattattgagttctaaaactgttaatatatgaattatttaatgattgtaattattgtaattggtataaccgtaaataaactatttatttatttatttgttttcactattcgcggattaaaaaaatgctacctaattcctatattcgcggcccaagatttctttattcgcggattgaattttatattatacgcaaataaaaagcatttggtaccatctgtcaataaatcagcaaatccactaataaaaaaataaaattgatcttattacaactacacctctactagattaagtttccaaaagctatcggcatcagcaattcctttaaggtaactcgctgttgccgttgtcggtgtttttgagactgtaaataatgagaatgtttaaataaaataaattattactcaaaacatagagcattcagttctgccgcgattgcaggttccatgctttggcaagagctgtattgtgtgtttattgttttacttttttattattgatgaaattgcgggtgggataggacgagatgggttcgaacagttataatcaagtgacgtctaggagttgcttgaaccagacttgtaggaaatgttaaattcacaacccgttgaagaggttcaacaagcactgaaaatgtgacatttaatttaaaaaatcttagtgaatgtttatgaatggaaaatgagctttgtgatttctttatgaaaattgatccatttatggaaagaggccctatttttaagaggcaaaatgctaatgccaatgctgaacatcagtctgaattgaagcaattttcaaaaattgccaagtaagagtttacgaaattctttaaacaattgcttaaagctgaagattatatgtaattaatcaatctgtatggtcaaaacttcacctaagaacgtatctgttccctataaccccatataaattaccattccatattcacgatttccttattcgcggcatatttatggaacgtatactccgcgaataaagagcttctactgtattaacccacaactctcctcgttcttttgacagtgcatttaaaatagctcgatctttaaatgtggtaggtattctaaaaaactcactttatctctttcacctgtcccaaaacactttaaaactgaacaaagcactggcattttaacgataatcttgaaattaaacaatggttttctgcattaaatgtactttgttcacaaaggtgtttgcccctcagggcatcatcctggaatggtctatccagggtgacgtcatttgacagcggctgaggggcaaacaacttgtaaacaaggtgcgtttactgcagaaaaccgttgtttggtttaagaatacgattaaagtaccagcgttttgttcagttgtgaagtattccagtaaaggtaaaaggataaactgagtttttttatttaaagatcgagaagttttaaatgcacagtcaatatttgacatttttgtagttaaaaccatatattttttaaaataaaacgagttaatagcaaaacgaacactgaaagcacaatttttgtgcctcagctacgctgtcaaagtcacgtgacctggaatgatctaaatgtgctcagaattaaaaatatgtaaagatagtttttttaggttattgcagaaattttgaagatttgatatggacatagattttgaagtcaataagtaattaaaaaattaacgaaattgtatcgatgtaacgaaaaataatctggggaattccatccgaattatcttgcaacagatagtacagtcttgaaagtacggtactgtagtgtcgttcaataagatcaattctgcagtactgcagcacatatgcaagtctgtctgcagtcaaattgtatgatttcgttggatacacagtcacacacgatcaaaatttttgccaattcatcgaattctacaaagttgaacgagtaccgtggctggccagctttataaaagtaatttctacaatcaaattttgctttagtattggttgatttatgtaaaccaccaattacttgatatatgccactttataaactcttgttgtttatatggacatgtatctattattcagaaaaaatttaaagtttctgcttggagatggatttcatattgtgcagaaaaatttatattttatatattatattcttgaaaacgtaatgtgatgtaatgtaacgagaaacatattttttgcaataatgctgtaatttttactctgctttttatattatagatagggtataaacatattgtgctatttattaataagaaagtggaacaaaataataatatagtaggcaatataatctttaacatcaaatactaaatctttattgtatattaatgttgtgcttttaaatatttatttcctttaaaaattaataacataaccactctgcagtgaaaacttgtatccattgtaacatttcaaatagctgtgaaacatcatgaattctttatttagtacagcttttagtcaactaaggacaagcctggtaaatgtaatagcccgaagacaggtatatcgcaactacgaaaactctgtgatctataaaatacatttaatatacgaattattcctttcttaag

SEQ ID NO: 2242 - DNA, 2706 bp, Diabrotica virgifera
atatatctacgtcatacgtctttggtttgtattattgtatataccaatagcgtatgtcgtggatatattgatgttatgtgacacatgacagaggctcgaaacaaatgactgtgaatgaaaagccctattgagttctaaaactgttaatatatgaattatttaatgattgtaattattgtaattggtataaccgtaaataaactatttatttatttatttgttttcactattcgcggattaaaaaaatgctacctaattcctatattcgcggcccaagatttctttattcgcggattgaattttatattatacgcaaataaaaagcatttggtaccatctgtcaataaatcagcaaatccactaataaaaaaataaaattgatcttattacaactacacctctactagattaagtttccaaaagctatcggcatcagcaattcctttaaggtaactcgctgttgccgttgtcggtgtttttgagactgtaaataatgagaatgtttaaataaaataaattattactcaaaacatagagcattcagttctgccgcgattgcaggttccatgctttggcaagagctgtattgtgtgtttattgttttacttttttattattgatgaaattgcgggtgggataggacgagatgggttcgaacagttataatcaagtgacgtctaggagttgcttgaaccagacttgtaggaaatgttaaattcacaacccgttgaagaggttcaacaagcactgaaaatgtgacatttaatttaaaaaatcttagtgaatgtttatgaatggaaaatgagctttgtgatttctttatgaaaattgatccatttatggaaagaggccctatttttaagaggcaaaatgctaatgccaatgctgaacatcagtctgaattgaagcaattttcaaaaattgccaagtaagagtttacgaaattctttaaacaattgcttaaagctgaagattatatgtaattaatcaatctgtatggtcaaaacttcacctaagaacgtatctgttccctataaccccatataaattaccattccatattcacgatttccttattcgcggcatatttatggaacgtatactccgcgaataaagagcttctactgtattaacccacaactctcctcgttcttttgacagtgcatttaaaatagctcgatctttaaatgtggtaggtattctaaaaaactcactttatctctttcacctgtcccaaaacactttaaaactgaacaaagcactggcattttaacgataatcttgaaattaaacaatggttttctgcattaaatgtactttgttcacaaaggtgtttgcccctcagggcatcatcctggaatggtctatccagggtgacgtcatttgacagcggctgaggggcaaacaacttgtaaacaaggtgcgtttactgcagaaaaccgttgtttggtttaagaatacgattaaagtaccagcgttttgttcagttgtgaagtattccagtaaaggtaaaaggataaactgagtttttttatttaaagatcgagaagttttaaatgcacagtcaatatttgacatttttgtagttaaaaccatatattttttaaaataaaacgagttaatagcaaaacgaacactgaaagcacaatttttgtgcctcagctacgctgtcaaagtcacgtgacctggaatgatctaaatgtgctcagaattaaaaatatgtaaagatagtttttttaggttattgcagaaattttgaagatttgatatggacatagattttgaagtcaataagtaattaaaaaattaacgaaattgtatcgatgtaacgaaaaataatctggggaattccatccgaattatcttgcaacagatagtacagtcttgaaagtacggtactgtagtgtcgttcaataagatcaattctgcagtactgcagcacatatgcaagtctgtctgcagtcaaattgtatgatttcgttggatacacagtcacacacgatcaaaatttttgccaattcatcgaattctacaaagttgaacgagtaccgtggctggccagctttataaaagtaatttctacaatcaaattttgctttagtattggttgatttatgtaaaccaccaattacttgatatatgccactttataaactcttgttgtttatatggacatgtatctattattcagaaaaaatttaaagtttctgcttggagatggatttcatattgtgcagaaaaatttatattttatatattatattcttgaaaacgtaatgtgatgtaatgtaacgagaaacatattttttgcaataatgctgtaatttttactctgctttttatattatagatagggtataaacatattgtgctatttattaataagaaagtggaacaaaataataatatagtaggcaatataatctttaacatcaaatactaaatctttattgtatattaatgttgtgcttttaaatatttatttcctttaaaaattaataacataaccactctgcagtgaaaacttgtatccattgtaacatttcaaatagctgtgaaacatcatgaattctttatttagtacagcttttagtcaactaaggacaagcctggtaaatgtaatagcccgaagacaggtatatcgcaactacgaaaactctgtgatctataaaatacatttaatatacgaattattcctttcttaag

SEQ ID NO: 2243 - DNA, 2542 bp, Diabrotica virgifera
  misc_feature (41)..(41): n is a, c, g, or t
cggcagtgcctttgaggtaacccgctgtcgccgtcatcggngtttttgagactgtaaacaagagaatgttttaagtaaaataaattaatgtattattcaaacctagagcattaaattctgccgcaatcacaggttccatgcttgggcaagagctgcatttcgtgtttattattttatttttccattcgttacaaaaattgtaattaagtgacacgtctcttccgatatcttcctaatttataatgttgactaaaaaaaaatgaaaaacggatttcgatccgaaaaaaatcattttattacttaaagtgaaaatagaaatgcttgatcgtaaacataaaagaatcattacaagaaaccagacacattgaaatcatgctggaaaaaactgtggcctgttcggagtgcaggaaatgaggaagaatctgtgttcaaattttaactgcaaacattgccgaaattgcgggtggaagaggacaagatgggttcgaacagttactatcaagtgacgtttaggagttgcttgaaccagacttagaggaaatgttaaattcacaacccgttgaagaagaggcttcaacaagcactcaaaacatgacatttaatttaaaaaatcttagtgaatgtttatgaatggaaaatgagctttgtgatttctttatgaaaattgatccatttatggaaagaggccctatttttaagaggcaaaatgctaatgccaatgctgaacatcagtctgaattgaagcaattttcaaaaattgccaagtaagagtttacgaaattctttaaacaattgcttaaagctgaagattatatgtaattaatcaatctgtatggtcaaaacttcacctaagaacgtatctgttccctataaccccatataaattaccattccatattcacgatttccttattcgcggcatatttatggaacgtatactccgcgaataaagagcttctactgtattaacccacaactctcctcgttcttttgacagtgcatttaaaatagctcgatctttaaatgtggtaggtattctaaaaaactcactttatctctttcacctgtcccaaaacactttaaaactgaacaaagcactggcattttaacgataatcttgaaattaaacaatggttttctgcattaaatgtactttgttcacaaaggtgtttgcccctcagggcatcatcctggaatggtctatccagggtgacgtcatttgacagcggctgaggggcaaacaacttgtaaacaaggtgcgtttactgcagaaaaccgttgtttggtttaagaatacgattaaagtaccagcgttttgttcagttgtgaagtattccagtaaaggtaaaaggataaactgagtttttttatttaaagatcgagaagttttaaatgcacagtcaatatttgacatttttgtagttaaaaccatatattttttaaaataaaacgagttaatagcaaaacgaacactgaaagcacaatttttgtgcctcagctacgctgtcaaagtcacgtgacctggaatgatctaaatgtgctcagaattaaaaatatgtaaagatagtttttttaggttattgcagaaattttgaagatttgatatggacatagattttgaagtcaataagtaattaaaaaattaacgaaattgtatcgatgtaacgaaaaataatctggggaattccatccgaattatcttgcaacagatagtacagtcttgaaagtacggtactgtagtgtcgttcaataagatcaattctgcagtactgcagcacatatgcaagtctgtctgcagtcaaattgtatgatttcgttggatacacagtcacacacgatcaaaatttttgccaattcatcgaattctacaaagttgaacgagtaccgtggctggccagctttataaaagtaatttctacaatcaaattttgctttagtattggttgatttatgtaaaccaccaattacttgatatatgccactttataaactcttgttgtttatatggacatgtatctattattcagaaaaaatttaaagtttctgcttggagatggatttcatattgtgcagaaaaatttatattttatatattatattcttgaaaacgtaatgtgatgtaatgtaacgagaaacatattttttgcaataatgctgtaatttttactctgctttttatattatagatagggtataaacatattgtgctatttattaataagaaagtggaacaaaataataatatagtaggcaatataatctttaacatcaaatactaaatctttattgtatattaatgttgtgcttttaaatatttatttcctttaaaaattaataacataaccactctgcagtgaaaacttgtatccattgtaacatttcaaatagctgtgaaacatcatgaattctttatttagtacagcttttagtcaactaaggacaagcctggtaaatgtaatagcccgaagacaggtatatcgcaactacgaaaactctgtgatctataaaatacatttaatatacgaattattcctttcttaag

SEQ ID NO: 2244 - DNA, 439 bp, Diabrotica virgifera
  misc_feature (41)..(41): n is a, c, g, or t
cggcagtgcctttgaggtaacccgctgtcgccgtcatcggngtttttgagactgtaaacaagagaatgttttaagtaaaataaattaatgtattattcaaacctagagcattaaattctgccgcaatcacaggttccatgcttgggcaagagctgcatttcgtgtttattattttacttctctattcgttacaaaaattgtaattgacatgtctcttccgatatcttcctaatttataatgactaaaaaaaaaatgaaaaacgggttttgatctgaaaaaaatcagttttattaaatgaaaacagaaatgcttgatcgtaaacataaaagaatcatcacaagaactggaaccacacacattgaaatcatgaaaaaactgtggcctgttcggactgcgggaaatgagaaagaatctgtgttaaaactgcaaacattgccg

SEQ ID NO: 2245 - DNA, 3028 bp, Diabrotica virgifera
  SmartBlast Evalue=4E-23; Info=Endonuclease-reverse transcriptase n=1 Tax=Bombyx mori RepID=D5LB38_BOMMO
tgttgattctcgacgaaatagaaacaagcagaaagaataaagtatagcatactgcctttgtctttattcactgaaaattaagtcactgttatatgcttccaatgaattcaagctatttccttaaaaatatggggatgttgtaaaggcaactattaaagtgttaattttatttttgataactcaagttacttccaactctaaaatagcagtggtcttagtatgtgtcaaaaaacaagcgtatgtaactaacagtttattaattaaatctttataacgtacattatttttttccctaaaaacctaacctaaaactttttttaaagtcttcaatatttttcaaaatcaaatctacatgtgtatattttttagagcctttgcatttgccactaaatcttttgtctgaataggaaaacattgtggtttttgcactaaaaatacgtctgattaacttctttgtcaatattatatctaaactatgtcactgattaaagcaaaaatctttgtaactttgtttttgattttttctgtttagcgcaatttttcgtttgaaatactttgttgagagaatcagaccaggcgcgctgatttaatgatagtcgatttaaacctatccattacataaatactttgcattgtaggcgtgtaggttaaccgatccgttttctgacaaatgacagatgtaacgtgaatggttaccatacattacaaaatttggatcgttgacaaaataacagaaatcttcaaaactaaatgttgaacattattatgttgtgtttaattacttatgtctttaaagatcttctaaactttttatcactacattcacaattaacacaatttgtcaaaatagcgatatcacaactggatttttgcatagcagcttgatgttgtatcacagatcaaagttaaaataacccactgcaacaaaatggtttaatataaaagctgttatagtgttccaatttttttcatttacttgatgacacgagttaactgtaattgtgctgataaaaaataaagagattttaagtcatatcttagtcaaataaatctcaaatgcttttttggccagctcataagctcaccgagacagtatttagatgaaattatttatttataaaataataaattgtagttatagtattgtattttcaatttgtcatttatttcaatatgtcatttattgaaaaaacaccacatggctgatattgtaccctcggagatcggtggaaaaaatttacacccaaaataacaaaattcagtttggcaatactgtgtgaatgttgatagtaacatatccttttaagataaacagaactgtaatttagtccagacaaattaatatatttttttgccaacaaaaatgagatttttcaaccaaataatgtttcaaatatgatgtgcaaaataatttttaattgggttctgctaatgagcttgcttttttgtcattaaagtagaaaaaatttaaatttcactcattaaatcattatcgtccagttatcgtcttaattattttaactgtactaatatccatcgactaattctgaatgataatgtgttgttaaaacattgtatctgtagcggcttctggaatgtcttaaaaatatcgaatttcattgattaaatgcgcatatccctccgatcttcgcctcgaccatatacatttttaagtatttgttttagtttttattcttcttcttcatgtaccatgtcctttcagaacgttggttacgatcatagctatcttaattgtattcactgccaccctaagtagcgtgcttgtataaacaccataccaatctcgcaagttattcaaccatgaggttcttcttcgtcctggactgcgtttgcctgctatttgtccttgcataatattttgcagcaacctatatttggaacctctcattacatgtacaaaatactccagctttctctgcttgatgctttttataatctcggtagttttgctgagacgttctagtaatgtggagtttcgaatcttttccacccaggaaacttttaaaattcctctatagcaccacatttcgaaaacctcaaggcgatttagatcgattttattcacagtttacatttagtttttattggaacaataaaatcagaggttcttttgtacaaaatgttggtaaattcgttcacctgtttgtcctacattttaaattcaattaattactcgttttagagcttatttaagaaatatctaccatcaatgatctacgtaggccaaacaggtggaccttatagttggagattacacgaacatctcatatgcatttattttcatcgtgtaatttaaatcccaataatagtttttaagaaatattgacactttctgaataggcagccatcgtgtaagctttaatttttgtactaattatttttaatcgatcagaaaaatgtgtacgcgtacatactttgacaacctgctgaatatacgcagaggatttctgagcaaaatgtgcctttcgaacaattttttactccggaattccaccattccatctcgccgaattttttcgaacacttttgtgagaaaaacgcgacgatttccgagagtcgataaaaaagaattctgtgatgacagaaaagactgtatcgtacggccagcgacctctatcggtgcggctgtgatatttaacgtttttttttctaaatattttacaatagctcaattattacgtcattccaaaactgctttttattcctaattcattttgcaatactgccacttcacgatggaaagtaaaaatatgttagaaaagcgatttcgccagcagtatgatcttgcaaaaagcgtagtcctgttgaggctgtcaaaaatggtcaaaatacatttgacatgtagcaagaattgtattttagcaagtttttttgtataaaaatgcaaaaacgtcacggaattttgctaaatataaatgcttgtgttatatacagggtctccagaaactctcctgataaatgaaggccggaggttcctcagatattcctaatttattattcacaattt

SEQ ID NO: 2246 - DNA, 2751 bp, Diabrotica virgifera
  SmartBlast Evalue=4E-23; Info=Endonuclease-reverse transcriptase n=1 Tax=Bombyx mori RepID=D5LB38_BOMMO
taaaaattattaccaaacagtgaaaacagcatttaatttgtgtctattttgagagtttttttaatcatgtggacactaagtcagtatttaattaaaaatacagcatgaatgaatgctttgcgtaaaaaatgcaagcttcaaggttttatgaaccgtgttttttaactcgcctatactaatttatgtaatagtgttgaattacataaaaattatataaacatcgtatttcagagatttttaatcatttcccgttcatgtcacacaatgatcaaagacctttacagctaggtcaaaacattcaattaaaaaaactgatggaaatacaaataagtataataaaaattcttgtctattagtcacagctattcaatgtgtatcatgtacatattcaataaattaagtttttttttgtttcaaaaaagcacgactctcggtagtttgtcgcttgggatagagaacagcaaacctaggcttctctgatgatgcttccagcaagaagcgaaaatcgtcgattaaggtccggtttcaccaacaacaaataaatcaatgaatagattcgtggaataaaatgtattaagacgtttatattttgtttcaatataattttgataatttaatataaagttaattataatttaatataaagtttaactggcgaatctactttcttataaatatttacagcgagatgaacttttgccagtttattcgaagattaagtatttatttgataaataagcaaaataatttttatttgagtaaaactattacatatttatttattagtaaaatggggaaatgtcagtttattggtcgaataactgtaataataatactcaggtatttattaaatttaataaaagtacatataagatttataagtgaaaaataagacagttttgccttcgcattgcaagtgaataaaaatggtgtaccctcggagatcgctgggaaaattcagtttgactcaaaataacaaaattcagtttggcaacactgtgaatgttgatagtaacatatcccttttaagataaacagaactgtaatttagtccagacaaattaatatatttttttgccaacaaaaatgagatttttcaaccaaataatgtttcaaatatgatgtgcaaaataatttttaattgggttctgctaatgagcttgcttttttgtcattaaagtagaaaaaatttaaatttcactcattaaatcattatcgtccagttatcgtcttaattattttaactgtactaatatccatcgactaattctgaatgataatgtgttgttaaaacattgtatctgtagcggcttctggaatgtcttaaaaatatcgaatttcattgattaaatgcgcatatccctccgatcttcgcctcgaccatatacatttttaagtatttgttttagtttttattcttcttcttcatgtaccatgtcctttcagaacgttggttacgatcatagctatcttaattgtattcactgccaccctaagtagcgtgcttgtataaacaccataccaatctcgcaagttattcaaccatgaggttcttcttcgtcctggactgcgtttgcctgctatttgtccttgcataatattttgcagcaacctatatttggaacctctcattacatgtacaaaatactccagctttctctgcttgatgctttttataatctcggtagttttgctgagacgttctagtaatgtggagtttcgaatcttttccacccaggaaacttttaaaattcctctatagcaccacatttcgaaaacctcaaggcgatttagatcgattttattcacagtttacatttagtttttattggaacaataaaatcagaggttcttttgtacaaaatgttggtaaattcgttcacctgtttgtcctacattttaaattcaattaattactcgttttagagcttatttaagaaatatctaccatcaatgatctacgtaggccaaacaggtggaccttatagttggagattacacgaacatctcatatgcatttattttcatcgtgtaatttaaatcccaataatagtttttaagaaatattgacactttctgaataggcagccatcgtgtaagctttaatttttgtactaattatttttaatcgatcagaaaaatgtgtacgcgtacatactttgacaacctgctgaatatacgcagaggatttctgagcaaaatgtgcctttcgaacaattttttactccggaattccaccattccatctcgccgaattttttcgaacacttttgtgagaaaaacgcgacgatttccgagagtcgataaaaaagaattctgtgatgacagaaaagactgtatcgtacggccagcgacctctatcggtgcggctgtgatatttaacgtttttttttctaaatattttacaatagctcaattattacgtcattccaaaactgctttttattcctaattcattttgcaatactgccacttcacgatggaaagtaaaaatatgttagaaaagcgatttcgccagcagtatgatcttgcaaaaagcgtagtcctgttgaggctgtcaaaaatggtcaaaatacatttgacatgtagcaagaattgtattttagcaagtttttttgtataaaaatgcaaaaacgtcacggaattttgctaaatataaatgcttgtgttatatacagggtctccagaaactctcctgataaatgaaggccggaggttcctcagatattcctaatttattattcacaattt

SEQ ID NO: 2247 - DNA, 2216 bp, Diabrotica virgifera
tgttgattctcgacgaaatagaaacaagcagaaagaataaagtatagcatactgcctttgtctttattcactgaaaattaagtcactgttatatgcttccaatgaattcaagctatttccttaaaaatatggggatgttgtaaaggcaactattaaagtgttaattttatttttgataactcaagttacttccaactctaaaatagcagtggtcttagtatgtgtcaaaaaacaagcgtatgtaactaacagtttattaattaaatctttataacgtacattatttttttccctaaaaacctaacctaaaactttttttaaagtcttcaatatttttcaaaatcaaatctacatgtgtatattttttagagcctttgcatttgccactaaatcttttgtctgaataggaaaacattgtggtttttgcactaaaaatacgtctgattaacttctttgtcaatattatatctaaactatgtcactgattaaagcaaaaatctttgtaactttgtttttgattttttctgtttagcgcaatttttcgtttgaaatactttgttgagagaatcagaccaggcgcgctgatttaatgatagtcgatttaaacctatccattacataaatactttgcattgtaggcgtgtaggttaaccgatccgttttctgacaaatgacagatgtaacgtgaatggttaccatacattacaaaatttggatcgttgacaaaataacagaaatcttcaaaactaaatgttgaacattattatgttgtgtttaattacttatgtctttaaagatcttctaaactttttatcactacattcacaattaacacaatttgtcaaaatagcgatatcacaactggatttttgcatagcagcttgatgttgtatcacagatcaaagttaaaataacccactgcaacaaaatggtttaatataaaagctgttatagtgttccaatttttttcatttacttgatgacacgagttaactgtaattgtgctgataaaaaataaagagattttaagtcatatcttagtcaaataaatctcaaatgcttttttggccagctcataagctcaccgagacagtatttagatgaaattatttatttataaaataataaattgtagttatagtattgtattttcaatttgtcatttatttcaatatgtcatttattgaaaaaacaccacatggctgatattgtaccctcggagatcggtggaaaaaatttacacccaaaataacaaaattcagtttggcaatactgtgtgaatgttgatagtaacatatccttttaagataaacagaactgtaatttagtccagacaaattaatatattgttgtgccaacaaaaatgatcaaccaaatgtttcaaatatgatgtgcaaaataattttgaattggtttctgctaatgagtttgctttttttgtcattaaagtagaaaacactttaaatttattctttattatcattattgtccagttctcgtcttattattttcactgtactaatatctgtcgaataatttacaatgattaatgcgatgttaaaactcgtgcgttgtcggcacccttgatgaaaccctcgtgacgacacactgtcgtcgtgggcactgaacgaattaaatggactgctttatttgagttcaatgcaccaaaaaatatgctcgacgtcatgactgtgcgttgttatctgcgaatactggcacgtgagaaatacttctgctttcgtaaacgtagaaaacagaaaatagagcatttctccttgtactatctacttctgatagaagataccattgctctccatgttttaagttttgcagtgttgtcaaatgtttacaaacttttaaccctttaacgtcgggaaccgcatatatgcgcaaaagtttgcttgccacatattaacttgcatcaaaatttacttcagagcgggaaacgttatattgatttttataaataattaataaaacgtttatcttgtgtgcttgtctattcaattttacactaacgaatttgttaccacaaaagttgggaaatgcgtagatgcgcaaagtgatacggaagcgcaaggcccaaaaacatggagtatatggagcacgcacgtttaaaaattgccgttgtgaaaaggttaaatttgagttgtaaggttcatcctgctagcttttagtgtacactaagcatcaaaatcaacgcaccaccttaaaaa

SEQ ID NO: 2248 - DNA, 1918 bp, Diabrotica virgifera
  SmartBlast Evalue=2E-23; Info=Endonuclease-reverse transcriptase n=1 Tax=Bombyx mori RepID=D5LB38_BOMMO
aaagttgatattataacaagaaaaatgagatcttgtgcgctaaaatcggtccactgggcttagatagatagatttataagatttagaaggtcgtccgtggaaaacctcggagatcggtggaaaaaatttacacccaaaataacaaaattcagtttggcaatactgtgtgaatgttgatagtaacatatccttttaagataaacagaactgtaatttagtccagacaaattaatatatttttttgccaacaaaaatgagatttttcaaccaaataatgtttcaaatatgatgtgcaaaataatttttaattgggttctgctaatgagcttgcttttttgtcattaaagtagaaaaaatttaaatttcactcattaaatcattatcgtccagttatcgtcttaattattttaactgtactaatatccatcgactaattctgaatgataatgtgttgttaaaacattgtatctgtagcggcttctggaatgtcttaaaaatatcgaatttcattgattaaatgcgcatatccctccgatcttcgcctcgaccatatacatttttaagtatttgttttagtttttattcttcttcttcatgtaccatgtcctttcagaacgttggttacgatcatagctatcttaattgtattcactgccaccctaagtagcgtgcttgtataaacaccataccaatctcgcaagttattcaaccatgaggttcttcttcgtcctggactgcgtttgcctgctatttgtccttgcataatattttgcagcaacctatatttggaacctctcattacatgtacaaaatactccagctttctctgcttgatgctttttataatctcggtagttttgctgagacgttctagtaatgtggagtttcgaatcttttccacccaggaaacttttaaaattcctctatagcaccacatttcgaaaacctcaaggcgatttagatcgattttattcacagtttacatttagtttttattggaacaataaaatcagaggttcttttgtacaaaatgttggtaaattcgttcacctgtttgtcctacattttaaattcaattaattactcgttttagagcttatttaagaaatatctaccatcaatgatctacgtaggccaaacaggtggaccttatagttggagattacacgaacatctcatatgcatttattttcatcgtgtaatttaaatcccaataatagtttttaagaaatattgacactttctgaataggcagccatcgtgtaagctttaatttttgtactaattatttttaatcgatcagaaaaatgtgtacgcgtacatactttgacaacctgctgaatatacgcagaggatttctgagcaaaatgtgcctttcgaacaattttttactccggaattccaccattccatctcgccgaattttttcgaacacttttgtgagaaaaacgcgacgatttccgagagtcgataaaaaagaattctgtgatgacagaaaagactgtatcgtacggccagcgacctctatcggtgcggctgtgatatttaacgtttttttttctaaatattttacaatagctcaattattacgtcattccaaaactgctttttattcctaattcattttgcaatactgccacttcacgatggaaagtaaaaatatgttagaaaagcgatttcgccagcagtatgatcttgcaaaaagcgtagtcctgttgaggctgtcaaaaatggtcaaaatacatttgacatgtagcaagaattgtattttagcaagtttttttgtataaaaatgcaaaaacgtcacggaattttgctaaatataaatgcttgtgttatatacagggtctccagaaactctcctgataaatgaaggccggaggttcctcagatattcctaatttattattcacaattt

SEQ ID NO: 2249 - DNA, 1816 bp, Diabrotica virgifera
tgttgattctcgacgaaatagaaacaagcagaaagaataaagtatagcatactgcctttgtctttattcactgaaaattaagtcactgttatatgcttccaatgaattcaagctatttccttaaaaatatggggatgttgtaaaggcaactattaaagtgttaattttatttttgataactcaagttacttccaactctaaaatagcagtggtcttagtatgtgtcaaaaaacaagcgtatgtaactaacagtttattaattaaatctttataacgtacattatttttttccctaaaaacctaacctaaaactttttttaaagtcttcaatatttttcaaaatcaaatctacatgtgtatattttttagagcctttgcatttgccactaaatcttttgtctgaataggaaaacattgtggtttttgcactaaaaatacgtctgattaacttctttgtcaatattatatctaaactatgtcactgattaaagcaaaaatctttgtaactttgtttttgattttttctgtttagcgcaatttttcgtttgaaatactttgttgagagaatcagaccaggcgcgctgatttaatgatagtcgatttaaacctatccattacataaatactttgcattgtaggcgtgtaggttaaccgatccgttttctgacaaatgacagatgtaacgtgaatggttaccatacattacaaaatttggatcgttgacaaaataacagaaatcttcaaaactaaatgttgaacattattatgttgtgtttaattacttatgtctttaaagatcttctaaactttttatcactacattcacaattaacacaatttgtcaaaatagcgatatcacaactggatttttgcatagcagcttgatgttgtatcacagatcaaagttaaaataacccactgcaacaaaatggtttaatataaaagctgttatagtgttccaatttttttcatttacttgatgacacgagttaactgtaattgtgctgataaaaaataaagagattttaagtcatatcttagtcaaataaatctcaaatgcttttttggccagctcataagctcaccgagacagtatttagatgaaattatttatttataaaataataaattgtagttatagtattgtattttcaatttgtcatttatttcaatatgtcatttattgaaaaaacaccacatggctgatattgtaccctcggagatcggtggaaaaaatttacacccaaaataacaaaattcagtttggcaatactgtgtgaatgttgatagtaacatatccttttaagataaacagaactgtaatttagtccagacaaattaatatattgttgtgccaacaaaaatgatcaaccaaatgtttcaaatatgatgtgcaaaataattttgaattggtttctgctaatgagtttgctttttttgtcattaaagtagaaaacactttaaatttattctttattatcattattgtccagttctcgtcttattattttcactgtactaatatctgtcgaataatttacaatgattaatgcgatgttaaaacattttatcgttagcggcttctggagtgtttgagacatatctaatttcattgataaaatgcacagtcccaccgatttccacttgaaccataacaccacatttcaaatgactgtagcttatttatgtgttcttgcttcaagtccagctttcaagtccatattgcagtatcgcgaacacgtaggataaaagctcttactctcagctctaatctaaggtctttttctttgttgcagagaattgatttcatttttac

SEQ ID NO: 2250 - DNA, 1106 bp, Diabrotica virgifera
aaagttgatattataacaagaaaaatgagatcttgtgcgctaaaatcggtccactgggcttagatagatagatttataagatttagaaggtcgtccgtggaaaacctcggagatcggtggaaaaaatttacacccaaaataacaaaattcagtttggcaatactgtgtgaatgttgatagtaacatatccttttaagataaacagaactgtaatttagtccagacaaattaatatattgttgtgccaacaaaaatgatcaaccaaatgtttcaaatatgatgtgcaaaataattttgaattggtttctgctaatgagtttgctttttttgtcattaaagtagaaaacactttaaatttattctttattatcattattgtccagttctcgtcttattattttcactgtactaatatctgtcgaataatttacaatgattaatgcgatgttaaaactcgtgcgttgtcggcacccttgatgaaaccctcgtgacgacacactgtcgtcgtgggcactgaacgaattaaatggactgctttatttgagttcaatgcaccaaaaaatatgctcgacgtcatgactgtgcgttgttatctgcgaatactggcacgtgagaaatacttctgctttcgtaaacgtagaaaacagaaaatagagcatttctccttgtactatctacttctgatagaagataccattgctctccatgttttaagttttgcagtgttgtcaaatgtttacaaacttttaaccctttaacgtcgggaaccgcatatatgcgcaaaagtttgcttgccacatattaacttgcatcaaaatttacttcagagcgggaaacgttatattgatttttataaataattaataaaacgtttatcttgtgtgcttgtctattcaattttacactaacgaatttgttaccacaaaagttgggaaatgcgtagatgcgcaaagtgatacggaagcgcaaggcccaaaaacatggagtatatggagcacgcacgtttaaaaattgccgttgtgaaaaggttaaatttgagttgtaaggttcatcctgctagcttttagtgtacactaagcatcaaaatcaacgcaccaccttaaaaa

SEQ ID NO: 2251 - DNA, 706 bp, Diabrotica virgifera
aaagttgatattataacaagaaaaatgagatcttgtgcgctaaaatcggtccactgggcttagatagatagatttataagatttagaaggtcgtccgtggaaaacctcggagatcggtggaaaaaatttacacccaaaataacaaaattcagtttggcaatactgtgtgaatgttgatagtaacatatccttttaagataaacagaactgtaatttagtccagacaaattaatatattgttgtgccaacaaaaatgatcaaccaaatgtttcaaatatgatgtgcaaaataattttgaattggtttctgctaatgagtttgctttttttgtcattaaagtagaaaacactttaaatttattctttattatcattattgtccagttctcgtcttattattttcactgtactaatatctgtcgaataatttacaatgattaatgcgatgttaaaacattttatcgttagcggcttctggagtgtttgagacatatctaatttcattgataaaatgcacagtcccaccgatttccacttgaaccataacaccacatttcaaatgactgtagcttatttatgtgttcttgcttcaagtccagctttcaagtccatattgcagtatcgcgaacacgtaggataaaagctcttactctcagctctaatctaaggtctttttctttgttgcagagaattgatttcatttttac

SEQ ID NO: 2252 - DNA, 3096 bp, Diabrotica virgifera
  SmartBlast Evalue=1E-73; Info=Endonuclease-reverse transcriptase n=1 Tax=Bombyx mori RepID=D5LB38_BOMMO
cgcagtattgatcttcatccccattttttcacaactctcaataaccctatccaacagtatctgcagactatggtccgaatcagtcattaataccgtgtcatctgcatagcggatgttatttactctctaaccgtttatcctgattccttctgaagggtgcgataaagagtttgcaaatattacctcagagtagacgttaaaagtatgggtgatagcacacaaccctgtctgacacctcgtatttcaattggccttgacgtattaccattggtctttatgattgctgtctgattccaataaatagcctctataattttagaatctcttttgtcgactccgatgtcattcaatctttctatcaaggtcttgtgcttcaccctatcgaacgctttctcaaaatctatgaaacagataaaaaggtctgcttgctgatctttttatctttgtgccagagtttgaagacagaatattgcttctcgtgtccccatacctttcctgaagccaaattgttcttgaccggtgacctcatcacattttttataatatattctgttctgtatgatacgcaagaaaagcttcagaatgttatttaatagacttataaggcggaagtcctggcataatttggcgttcttatttttaggtagtggtatgaagactgattcaagccatattttaggaatagtccctgtattgtaaacattaataaatagtccaagaagatggtctaagttttcctcgttgattaacttcaatagctcagctggtatttcatcttttcctacagatttgttgttttttagttgacgtagagtatattccaggtcggaatttagtattggaagaccttcgtcgttttcggtatttaatgtaggaggttctctgatgtcatagaagagttcctttatatagtcttcccacatgtttatttgttcttcagggcttgaaatcagtttgccttctgcgttgattagattatttggtccttgtgagtatattgtgcctgtgaattccttgagtttcttatacagatggaagtcatcatgttttttatataagttttcaatttcttcacattgttctgttaaccattttcttttgcaatttttattttttgtttaatggttctatttaatgctgtgtacattgctttgtgctgcactttcttctttcatccattaaatccaatatttcctctgtcatccatctttggttccgtggtcgctgttttgtgagcatttcagttgccgttgttagggcgtgtctgatttcctcccgaagacgaaagttaaggatgtttaattatatgaaagtgctaaaaaaacagtgcgaaaaagtaaaacccatttaaaatacattgttacttcagacacactttaaactcttcatgtactgctatctatatttacaattttcacacaataaaacctttacatttttacataatatgagatagagtagataaaaattatttttgtgaatttggttaacaagggttggttaaacaatttttcgaccgcggtaccgcgtgacaccctgtgtatttgttataaggattgttatacggatgtatttctctgagtaagtttgtgcaaaaaatcgaatcagaatagtttgcctagcgggggcgacgttacatactatactaataagtagttgaaacggtcaaaacaaagaaacgcacactcatcaaaaatgcacttgagattctcgtataatcaacatttactgaatcgatccaggaagagtcaactccaactagtaaaagttgatttatatttttaaaatcaacttttactgctcgtttcagttggagttgactccaactagttggagtcaactctaactgagaatcaacttgaactgtaacatatatattttttaagacagatcagaaaatttaccctttttggataatttttgtcgagaaaataccgttttgccggtcaagaccggaaaatgatcgttggggacggaactagttatttgcgttaccaggctggaaagtggtgtttttcaggtcgagccaagcagattggggagaccaatttccggtatcgtgacgtacaatatttttttaagaccgacactttgatgtaaacttaattctttgttttattttactttataatataataaaatgattaacaagtactaggactgcatactgaatgtagctgcataaactgaataaataggtacattacttttgggtctttgtgttgatgtacaattgttactgataaatatctgaagggaagatgtttctaaaatgctgggaattgttatattttttgtagtggcattaacaaaattagtttcctgtgtaatgtttttggaatattttgcattgatttattttgaaatattaatcttttttcttattgaatctttaaggcagtcttctgctatagtttccatcctccataccgttttaagttcggacaataattcaaaatctgaatccatatttttaaattggcgaactcactaggcaagtttgacaaccgataaattaaaaatcaactggcacatgtcacaaccggcaaatatcttttttcggtccctatattttattttccactggctattttataataaatctcaacgttgcttggtgccatagtaacggaatcaaggaaaaaagctttttttaagaccgaccagaaaatgtacactttctggataatttgttgttcagaaaataccgttttgccggtcaagcctggaaagtgaacgttaggaaccagcaaatatctttctctatggatgctatacaatgtacaacttctctcactacttacatacattcaaaacgaacaatttctcatggagtgagaaaagtcggccattgcagtgagaaatatttttgtcacgggttctcctacggttttccatatatgatcaccgtttccgtggtaacatgcacaatacaaacacaaataatattgtcaaataaaatgtattgaagcaaaacttaccaggaattacctttcaaaactgttcgaaaataactgtcaattagaattttaaataaataacgtaagtacttatataaattttaagaatattaaatacctatatgtatattatgta

SEQ ID NO: 2253 - DNA, 2317 bp, Diabrotica virgifera
  SmartBlast Evalue=1E-73; Info=Endonuclease-reverse transcriptase n=1 Tax=Bombyx mori RepID=D5LB38_BOMMO
cgcagtattgatcttcatccccattttttcacaactctcaataaccctatccaacagtatctgcagactatggtccgaatcagtcattaataccgtgtcatctgcatagcggatgttatttactctctaaccgtttatcctgattccttctgaagggtgcgataaagagtttgcaaatattacctcagagtagacgttaaaagtatgggtgatagcacacaaccctgtctgacacctcgtatttcaattggccttgacgtattaccattggtctttatgattgctgtctgattccaataaatagcctctataattttagaatctcttttgtcgactccgatgtcattcaatctttctatcaaggtcttgtgcttcaccctatcgaacgctttctcaaaatctatgaaacagataaaaaggtctgcttgctgatctttttatctttgtgccagagtttgaagacagaatattgcttctcgtgtccccatacctttcctgaagccaaattgttcttgaccggtgacctcatcacattttttataatatattctgttctgtatgatacgcaagaaaagcttcagaatgttatttaatagacttataaggcggaagtcctggcataatttggcgttcttatttttaggtagtggtatgaagactgattcaagccatattttaggaatagtccctgtattgtaaacattaataaatagtccaagaagatggtctaagttttcctcgttgattaacttcaatagctcagctggtatttcatcttttcctacagatttgttgttttttagttgacgtagagtatattccaggtcggaatttagtattggaagaccttcgtcgttttcggtatttaatgtaggaggttctctgatgtcatagaagagttcctttatatagtcttcccacatgtttatttgttcttcagggcttgaaatcagtttgccttctgcgttgattagattatttggtccttgtgagtatattgtgcctgtgaattccttgagtttcttatacagatggaagtcatcatgttttttatataagttttcaatttcttcacattgttctgttaaccattttcttttgcaatttttattttttgtttaatggttctatttaatgctgtgtacattgctttgtgctgcactttcttctttcatccattaaatccaatatttcctctgtcatccatctttggttccgtggtcgctgttttgtgagcatttcagttgccgttgttagggcgtgtctgatttcctcccgaagacgaaagttaaggatgtttaattatatgaaagtgctaaaaaaacagtgcgaaaaagtaaaacccatttaaaatacattgttacttcagacacactttaaactcttcatgtactgctatctatatttacaattttcacacaataaaacctttacatttttacataatatgagatagagtagataaaaattatttttgtgaatttggttaacaagggttggttaaacaatttttcgaccgcggtaccgcgtgacaccctgtgtatttgttataaggattgttatacggatgtatttctctgagtaagtttgtgcaaaaaatcgaatcagaatagtttgacctaacgggggcgacgttacagactatactaataagtagttgaaacggtcaaaacaaagaaacgcacactcatcaaaaatgcacttgagattctcgtataatcaacatttactgaatcgatccaggaagagtcaactccaactagtaaaagttgatttaaatttttaaaatcaacttttactgctcgtttcagttggagttgactccaactagttggagtcaactctaactgagaatcaacttgaactgtaacatttataatatctatgtactattaatattatttataatttaaaatagcatatacagtagaatcccgattatccgggtgcggattatccgtgctatgattttctattactcaagttgcatttttgaggttttatcaaaatagcgtcatcgtaactcacttgacggaaactctatatgacgaaagagagactcataatgaaagatttatttttttctgttattttttatggtaggtacatattattatgtatttgtatacgtacataatatgtattatacataataaatacatgttcggattatccgtgccacccttcggtcccgaggagcacggataatcgggcttctactgtatatacatatactaaagtcagaatttggtattagatttgaaagtaaactaaatgtaagcccaaatacttacgatgtcgggatagtatcacgagg

SEQ ID NO: 2254 - DNA, 1971 bp, Diabrotica virgifera
acttgcctatttgttctttttatatctaatatcggccacagttatcggccgtgtctagcaagtggttgcgttggctagcggtatgtgtatctagttacggacgtgtcagtacttggttcgaatcccccgtaaggaaaacttttttgtttaatattaatggttattgacatactgactattataaggactaagtacacacactcttttttcattagaaggatataattaagtaagtgttaatgttttttatgattgacgatacaattttgtacgcaccacctcatactctttatcgaacgtgtctgttcctctgctcgtaatatcagactcgttcgataaagagtcactttactgactgactttactgaaattggttaaacaatttttcgaccgcggtaccgcgtgacaccctgtgtatttgttataaggattgttatacggatgtatttctctgagtaagtttgtgcaaaaaatcgaatcagaatagtttgacctagcgggggcgacgttacatactatactaataagtagttgaaacggtcaaaacaaagaaacgcacactcatcaaaaatgcacttgagattctcgtataatcaacatttactgaatcgatccaggaagagtcaactccaactagtaaaagttgatttatatttttaaaatcaacttttactgctcgtttcagttggagttgactccaactagttggagtcaactctaactgagaatcaacttgaactgtaacatatatattttttaagacagatcagaaaatttaccctttttggataatttttgtcgagaaaataccgttttgccggtcaagaccggaaaatgatcgttggggacggaactagttatttgcgttaccaggctggaaagtggtgtttttcaggtcgagccaagcagattggggagaccaatttccggtatcgtgacgtacaatatttttttaagaccgacactttgatgtaaacttaattctttgttttattttactttataatataataaaatgattaacaagtactaggactgcatactgaatgtagctgcataaactgaataaataggtacattacttttgggtctttgtgttgatgtacaattgttactgataaatatctgaagggaagatgtttctaaaatgctgggaattgttatattttttgtagtggcattaacaaaattagtttcctgtgtaatgtttttggaatattttgcattgatttattttgaaatattaatcttttttcttattgaatctttaaggcagtcttctgctatagtttccatcctccataccgttttaagttcggacaataattcaaaatctgaatccatatttttaaattggcgaactcactaggcaagtttgacaaccgataaattaaaaatcaactggcacatgtcacaaccggcaaatatcttttttcggtccctatattttattttccactggctattttataataaatctcaacgttgcttggtgccatagtaacggaatcaaggaaaaaagctttttttaagaccgaccagaaaatgtacactttctggataatttgttgttcagaaaataccgttttgccggtcaagcctggaaagtgaacgttaggaaccagcaaatatctttctctatggatgctatacaatgtacaacttctctcactacttacatacattcaaaacgaacaatttctcatggagtgagaaaagtcggccattgcagtgagaaatatttttgtcacgggttctcctacggttttccatatatgatcaccgtttccgtggtaacatgcacaatacaaacacaaataatattgtcaaataaaatgtattgaagcaaaacttaccaggaattacctttcaaaactgttcgaaaataactgtcaattagaattttaaataaataacgtaagtacttatataaattttaagaatattaaatacctatatgtatattatgta

SEQ ID NO: 2255 - DNA, 1960 bp, Diabrotica virgifera
tatgtcaaaagtaaaattctgtagtgtttcgcaattatattcatacaaataaatcaaaactttacagatttagtaattaggtaggtatacaatattgataactatcgattaaacatcaaaaccggccatcatgcaaaagtcatctgtcattactgtcattactgtcatacgaattttttatttcgtctataattaaaaaaatttcctcaaagttgtaagtaagtgttaatgttttttatgattgacgatacaattttgtacgcaccacctcatactctttatcgaacgtgtctgttcctctgctcgtaatatcagactcgttcgataaagagtcactttactgactgactttactgaaattggttaaacaatttttcgaccgcggtaccgcgtgacaccctgtgtatttgttataaggattgttatacggatgtatttctctgagtaagtttgtgcaaaaaatcgaatcagaatagtttgacctagcgggggcgacgttacatactatactaataagtagttgaaacggtcaaaacaaagaaacgcacactcatcaaaaatgcacttgagattctcgtataatcaacatttactgaatcgatccaggaagagtcaactccaactagtaaaagttgatttatatttttaaaatcaacttttactgctcgtttcagttggagttgactccaactagttggagtcaactctaactgagaatcaacttgaactgtaacatatatattttttaagacagatcagaaaatttaccctttttggataatttttgtcgagaaaataccgttttgccggtcaagaccggaaaatgatcgttggggacggaactagttatttgcgttaccaggctggaaagtggtgtttttcaggtcgagccaagcagattggggagaccaatttccggtatcgtgacgtacaatatttttttaagaccgacactttgatgtaaacttaattctttgttttattttactttataatataataaaatgattaacaagtactaggactgcatactgaatgtagctgcataaactgaataaataggtacattacttttgggtctttgtgttgatgtacaattgttactgataaatatctgaagggaagatgtttctaaaatgctgggaattgttatattttttgtagtggcattaacaaaattagtttcctgtgtaatgtttttggaatattttgcattgatttattttgaaatattaatcttttttcttattgaatctttaaggcagtcttctgctatagtttccatcctccataccgttttaagttcggacaataattcaaaatctgaatccatatttttaaattggcgaactcactaggcaagtttgacaaccgataaattaaaaatcaactggcacatgtcacaaccggcaaatatcttttttcggtccctatattttattttccactggctattttataataaatctcaacgttgcttggtgccatagtaacggaatcaaggaaaaaagctttttttaagaccgaccagaaaatgtacactttctggataatttgttgttcagaaaataccgttttgccggtcaagcctggaaagtgaacgttaggaaccagcaaatatctttctctatggatgctatacaatgtacaacttctctcactacttacatacattcaaaacgaacaatttctcatggagtgagaaaagtcggccattgcagtgagaaatatttttgtcacgggttctcctacggttttccatatatgatcaccgtttccgtggtaacatgcacaatacaaacacaaataatattgtcaaataaaatgtattgaagcaaaacttaccaggaattacctttcaaaactgttcgaaaataactgtcaattagaattttaaataaataacgtaagtacttatataaattttaagaatattaaatacctatatgtatattatgta

SEQ ID NO: 2256 - DNA, 1279 bp, Diabrotica virgifera
cgcagtattgatcttcatccccattttttcacaactctcaataaccctatccaacagtatctgcagactatggtccgaatcagtcattaataccgtgtcatctgcatagcggatgttatttactctctaaccgtttatcctgattccttctgaagggtgcgataaagagtttgcaaatattacctcagagtagacgttaaaagtatgggtgatagcacacaaccctgtctgacacctcgtatttcaattggccttgacgtattaccattggtctttatgattgctgtctgattccaataaatagcctctataatttaagaataaaactaaaatataacctgatcaaacctaacctaatcgaaataatataaacaaattaataactgaaaattaaagtgacctagtaaccattcaaatattctttagtgacttaaaatatacctgatcaaacctaaccctaaatttttctaatttcaccttaaatttaaggtcgctcttcacgtagacaaacacccaaataattgtacttaattaaatgaacacattctatatttccataaggaattatattttttttaataagacaacattgcagaatcagctgcgctcaaacccatgcttaaaccaaatttacaccaaatgcgcaacagccatggcggccatattttgaaaacatcacatttttaaatgagattaatgctgagcgcacttaattgtgaattttaaattgataaaaaagtaaggccgcacatatcatattatacacagttgtcatactcgtgtggggagtgagtcaataccaaataaataccctctgagctatagaaataaaacattgagacgatgattaatatagtttatcattcgataataaacgttgacctccaactacagtagcgccgccaagcgggagaaacggcgtacataggtgccattaggaaccttgtgtgatgcattaaacgaacttttacaacaaatctcaaaactattcttacatttttggttgtcactttgatgcagtaaaggttgttgaaaactgttgtcggctcatccactaactaagcaaaaatcaagggaagtactaaattgtttatatttttctggtcacatttgcatactacatccgtaaaactagattttctcttttacgacatacttataacttctagaagatataagctcgtccagggagccgtatacttctaataagcactttaagctgattagatttgaagttaaattcatggatcaatacattttctcaaataagtctctaaaa

SEQ ID NO: 2257 - DNA, 1190 bp, Diabrotica virgifera
acttgcctatttgttctttttatatctaatatcggccacagttatcggccgtgtctagcaagtggttgcgttggctagcggtatgtgtatctagttacggacgtgtcagtacttggttcgaatcccccgtaaggaaaacttttttgtttaatattaatggttattgacatactgactattataaggactaagtacacacactcttttttcattagaaggatataattaagtaagtgttaatgttttttatgattgacgatacaattttgtacgcaccacctcatactctttatcgaacgtgtctgttcctctgctcgtaatatcagactcgttcgataaagagtcactttactgactgactttactgaaattggttaaacaatttttcgaccgcggtaccgcgtgacaccctgtgtatttgttataaggattgttatacggatgtatttctctgagtaagtttgtgcaaaaaatcgaatcagaatagtttacctaacgggggcgacgttacagactatactaataagtagttgaaacggtcaaaacaaagaaacgcacactcatcaaaaatgcacttgagattctcgtataatcaacatttactgaatcgatccaggaagagtcaactccaactagtaaaagttgatttaaatttttaaaatcaacttttactgctcgtttcagttggagttgactccaactagttggagtcaactctaactgagaatcaacttgaactgtaacatttataatatctatgtactattaatattatttataatttaaaatagcatatacagtagaatcccgattatccgggtgcggattatccgtgctatgattttctattactcaagttgcatttttgaggttttatcaaaatagcgtcatcgtaactcacttgacggaaactctatatgacgaaagagagactcataatgaaagatttatttttttctgttattttttatggtaggtacatattattatgtatttgtatacgtacataatatgtattatacataataaatacatgttcggattatccgtgccacccttcggtcccgaggagcacggataatcgggcttctactgtatatacatatactaaagtcagaatttggtattagatttgaaagtaaactaaatgtaagcccaaatacttacgatgtcgggatagtatcacgagg

SEQ ID NO: 2258 - DNA, 1179 bp, Diabrotica virgifera
tatgtcaaaagtaaaattctgtagtgtttcgcaattatattcatacaaataaatcaaaactttacagatttagtaattaggtaggtatacaatattgataactatcgattaaacatcaaaaccggccatcatgcaaaagtcatctgtcattactgtcattactgtcatacgaattttttatttcgtctataattaaaaaaatttcctcaaagttgtaagtaagtgttaatgttttttatgattgacgatacaattttgtacgcaccacctcatactctttatcgaacgtgtctgttcctctgctcgtaatatcagactcgttcgataaagagtcactttactgactgactttactgaaattggttaaacaatttttcgaccgcggtaccgcgtgacaccctgtgtatttgttataaggattgttatacggatgtatttctctgagtaagtttgtgcaaaaaatcgaatcagaatagtttacctaacgggggcgacgttacagactatactaataagtagttgaaacggtcaaaacaaagaaacgcacactcatcaaaaatgcacttgagattctcgtataatcaacatttactgaatcgatccaggaagagtcaactccaactagtaaaagttgatttaaatttttaaaatcaacttttactgctcgtttcagttggagttgactccaactagttggagtcaactctaactgagaatcaacttgaactgtaacatttataatatctatgtactattaatattatttataatttaaaatagcatatacagtagaatcccgattatccgggtgcggattatccgtgctatgattttctattactcaagttgcatttttgaggttttatcaaaatagcgtcatcgtaactcacttgacggaaactctatatgacgaaagagagactcataatgaaagatttatttttttctgttattttttatggtaggtacatattattatgtatttgtatacgtacataatatgtattatacataataaatacatgttcggattatccgtgccacccttcggtcccgaggagcacggataatcgggcttctactgtatatacatatactaaagtcagaatttggtattagatttgaaagtaaactaaatgtaagcccaaatacttacgatgtcgggatagtatcacgagg

SEQ ID NO: 2259 - DNA, 2148 bp, Diabrotica virgifera
gccatcttatcaaaacccttctaatgcgaaagttgtagataatatatgaatctacaaatttcgttatatatattttttttaaacctcaaagttaccgagaaaaaaatgaagaaaatcgtctcttttcgatattttcgtttttattttcatttctgtcaaaattattcaattttggtgaaacttggctatcacaaattaaaaaaaaatttggaagttcctgagatattcgatttttttttttcgaaaaagacgaatcaaattcgaaaatcaaaattggaaccaaaaaaattgtttttgatttcatgtaaacgtagattcttctatgaataaaatgagctctaacacaagtaaaaaaatcaatgtgtaaaagaaaattgtaatagttaagaagtatattttcactaagtttcatcaaaattcaaaacgaaaaacattgataaagaccattttctttattttcttagtacctaattttaatgttgtaatatagattaaaatattatataataaaatttgtagtctttcgcatttgaaatttttcttgatggaatgtcagatttgtaggaaagtgaactgctgcctccaaacgtccccccaaataacccccggaactttttagaatgtatttttttgtgtattatacccccacttaccaatatcgatcataaaattttagataactttttttcaccttgtttgctcatttgcctggtccagagactaaaacaagaaattatttctttctaaattaattagtgcatcaacttttttgagtataagttggtttaatatcttttagtcttctcaatagagatcacaagcgagaatagagttaacccattcgctgccgatcacgcaccagcgcgtgatacggttactttagtcaggtgccgttcacgcaccagcgagtgatatggttacttcagtcaggtgccattcaacaaaatggctcctagccgagttgcattctcttagataggcagggaatgggttaacacttctgtttatgtaaatacatgtttaaatttccgtttatttgaatctaagtcaccacgtgtacacttaccagtgattcaggtctttttatcctgaaacttcgaatccgaaggagattcagcagaaattataaaatttaatacattcgaacccgcttataggaatagccttcgtgccaagcaaaaatattcttataaccgggatattctaataaccgatcattggttgctagccgtaataagtgtaccgactatacgtaataatagctcacactatgttaatatgtatatgtatatggttttatgtctttttatgtcaataatacaatagcgtaacgtatttattaaaaaaccaaattactttatattatgtggatgcatacagtaattaatatgaaatgtatgcaatatatagattatgtaaatattttcgtattaaaatacataatatacttaataagaaaattacttatttagtcttgaaaaataatcggtaattgtagcttgttttttttgttacataaaatactagtcacttttgttgctctgaattatataaaattagaaaaatttacaatagtttggccatcccgaaaacgttttataactttacaagagattaggatgggcgaactgtttcttaaaatttttataacaggcaactgggtggcaatatgtatagtttgtagacaaaggaaattattttacgactaatttgtcggtaaacgattgaattggtactcataaaaacgcaataaaatatttattacctatctgacaaacccaaataatataaataaaacagcactacaggccttcgaagcccttggcgagaaaccatatacaagacataatttaaatttttaggaaattcgaaattgtaggtaaaaatttattcgttgacctgaaaaatattctaataagcggtattgttttattaatacgtattccaataaacggataaatttattaaggagtaaatggaaacgtttcgggacctcgaatttatattccataaaccgggatattcctataaccggtactctaataagcgggttcgactgtacaagggttatggactagaatgttcaatccatcttgcaagaaggcagcaggcagcaacaactttattgttgacataaaccgtgtgttt

SEQ ID NO: 2260 - DNA, 1765 bp, Diabrotica virgifera
agattcgaactcactaccattcggaactttcgatccaaaggttaggcgctcttaccactgagccacagagggggttttaaactgcaattctgccaaccgaatgtcaacaccaatgcgcatccaagtctcaaatacaaagtgaatttggtcagactgtacataatcgtacgaattacgtagagccagagcccacgaaaaattatactaaatttacagtcaagatgaagtagaaataggcagacaaggcacgttggatgctactggcagcactcccgaatcaaaaattacaatgtatatacattgtaaatcccaaatcatgatttccgaagtttatacattgtaaattatgattcggtagtgctcccagtagcatttgacgtatcttggtttgtttatttctactgcatcttgattgtaaatttagtatagtaactcatgcggtacacggcctgtagacattggccaatatcattccaataaattaaatattgtttttatttcactcagcgtttggtgtttaactgaattccaagaggacttttgtttcattgtactggatggaataatacaaaagtacgtcaaaattaacgttggattaattaaaattaattaaagacggatacgaaatatattcaaatactatgaagtctatactattgtaatcaccgtgcctatatataaaattaacgcacatatttatcagaacaggcaataattgtgaaaactgaaggtttgacactgtatgatgattattacagtcgaacccgcttattggaatagccttcatgccaagcaaaaatattcttataaccgggatattctaataaccgatcattggtggctagccgtaataagtgtaccgaatatacgtaataatagtacatactatgttaatatgtatatgtatatggttttatgtctttttatgtcaataatacaatagcgtaacgtatttattaaaaaaccaaattacattatattatgtggatgcatacagtaattaatatgaaatgtatgcaatatatagattatgtaaatattttcgtattaaaatacataatatacttaataagaaaattacttatttagtcttgaaaaataatcggtaattgtagcttgttttttttgttacataaaatactagtcacttttgttgctctgaattatataaaattagaaaaatttacaatagtttggccatcccgaaaacgttttataactttacaagagattaggatgggcgaactgtttcttaaaatttttataacaggcaactgggtggcaatatgtatagtttgtagacaaaggaaattattttacgactaatttgtcggtaaacgattgaattggtactcataaaaacgcaataaaatatttattacctatctgacaaacccaaataatataaataaaacagcactacaggccttcgaagcccttggcgagaaaccatatacaagacataatttaaatttttaggaaattcgaaattgtaggtaaaaatttattcgttgacctgaaaaatattctaataagcggtattgttttattaatacgtattccaataaacggataaatttattaaggagtaaatggaaacgtttcgggacctcgaatttatattccataaaccgggatattcctataaccggtactctaataagcgggttcgactgtacaagggttatggactagaatgttcaatccatcttgcaagaaggcagcaggcagcaacaactttattgttgacataaaccgtgtgttt

SEQ ID NO: 2261 - DNA, 1698 bp, Diabrotica virgifera
agattcgaactcactaccattcggaactttcgatccaaaggttaggcgctcttaccactgagccacagagggggttttaaactgcaattctgccaaccgaatgtcaacaccaatgcgcatccaagtctcaaatacaaagtgaatttggtcagactgtacataatcgtacgaattacgtagagccagagcccacgaaaaattatactaaatttacagtcaagatgaagtagaaataggcagacaaggcacgttggatgctactggcagcactcccgaatcaaaaattacaatgtatatacattgtaaatcccaaatcatgatttccgaagtttatacattgtaaattatgattcggtagtgctcccagtagcatttgacgtatcttggtttgtttatttctactgcatcttgattgtaaatttagtatagtaactcatgcggtacacggcctgtagacattggccaatatcattccaataaattaaatattgtttttatttcactcagcgtttggtgtttaactgaattccaagaggacttttgtttcattgtactggatggaataatacaaaagtacgtcaaaattaacgttggattaattaaaattaattaaagacggatacgaaatatattcaaatactatgaagtctatactattgtaatcaccgtgcctatatataaaattaacgcacatatttatcagaacaggcaataattgtgaaaactgaaggtttgacactgtattaataagaaatcctaatattgatgatatgctggatattttaaagtaaaccttcatatgaatatgtctgtcgaaaattattacgaatgtttcccaagttattaccaaaaaaatgaggctttgtacaactttatacaacgaataccgtgatgtatatattttttatatttttgcatttagtaagatttcttgaaataattcattctaggagaagatgtaattgtgatcatatttttattagtagatagtatacatactaaaaaggtaatttagcgtcccagaaatagaaatgtggctagatagttgattctagaagtatatattttactactattcttttttttttctatttttaaagacttttatagagtgcgagttaacagtttttatttttgggacattttatatgtttagaaggtcatatataaccacaaagtacttaacaaattattttgtacgagttcgtaatttagaaatgccatatatcgttttggatacaaatttaatcttcccctgttttataaattgtctcttatttttttctccgaaacgaaccaataatttaatcgttccttctttaccgaaacaggttaggcatagttcaaaccaaactattctttcaatgcgtcatagtttatcgaattatttctaacgcattaagttgaaagtgacagaaaaaatgtatgtacgtccgtgattgtacacagttatttatacagggtgtaacaaaatacaggtcataagttggatcacatgttctgggaccaaagatagttcgaatgaacctaacttagtacaatgtgcacatagaaggggttacagcactttgaagttgcaaggtgaaaatcgattttttcgagtatgttgagggctgttagagattttttattgaaaagtggacatgtggcactctgacggcaggagcatcttaaagaaaaattatattgaaatttgtg

SEQ ID NO: 2262 - DNA, 1713 bp, Diabrotica virgifera
gccatcttatcaaaacccttctaatgcgaaagttgtagataatatatgaatctacaaatttcgttatatatattttttttaaacctcaaagttaccgagaaaaaaatgaagaaaatcgtctcttttcgatattttcgtttttattttcatttctgtcaaaattattcaattttggtgaaacttggctatcacaaattaaaaaaaaatttggaagttcctgagatattcgatttttttttttcgaaaaagacgaatcaaattcgaaaatcaaaattggaaccaaaaaaattgtttttgatttcatgtaaacgtagattcttctatgaataaaatgagctctaacacaagtaaaaaaatcaatgtgtaaaagaaaattgtaatagttaagaagtatattttcactaagtttcatcaaaattcaaaacgaaaaacattgataaagaccattttctttattttcttagtacctaattttaatgttgtaatatagattaaaatattatataataaaatttgtagtctttcgcatttgaaatttttcttgatggaatgtcagatttgtaggaaagtgaactgctgcctccaaacgtccccccaaataacccccggaactttttagaatgtatttttttgtgtattatacccccacttaccaatatcgatcataaaattttagataactttttttcaccttgtttgctcatttgcctggtccagagactaaaacaagaaattatttctttctaaattaattagtgcatcaacttttttgagtataagttggtttaatatcttttagtcttctcaatagagatcacaagcgagaatagagttaacccattcgctgccgatcacgcaccagcgcgtgatacggttactttagtcaggtgccgttcacgcaccagcgagtgatatggttacttcagtcaggtgccattcaacaaaatggctcctagccgagttgcattctcttagataggcagggaatgggttaacacttctgtttatgtaaatacatgtttaaatttccgtttatttgaatctaagtcaccacgtgtacacttaccagtgattcaggtctttttatcctgaaacttcgaatccgaaggagattcagcagaaattataaaatttaatacattcgaacccgcttataggaatagccttcgtgccaagcaaaaatattcttataaccgggatattctaataaccgatcattggttgctagccgtaataagtgtaccgactatacgtaataatagctcacactatgttaatatgtatatgtatatggttttatgtctttttatgtcaataatacaatagcgtaacgtatttattaaaaaaccaaattactttatattatgtggatgcatacagtaattaatatgaaatgtatgcaatatatagattatgtaaatattttcgtattaaaatacataatatacttaataagaaaattacttatttagtcttgaaaaataatcggtaattgtagcctgttttttttacataaaatacttagtcacttttgttgccatgaattattttttttatggcatagacttgggtgtcatttagccagtcacaactttttttgttgtttaaaaattagaaaaatttacaatggtttggccatcccgaaaacgttgtataactttacaagggattaggatgggcgaactgtttcttaaaaattttataacaggcaag

SEQ ID NO: 2263 - DNA, 1677 bp, Diabrotica virgifera
gccatcttatcaaaacccttctaatgcgaaagttgtagataatatatgaatctacaaatttcgttatatatattttttttaaacctcaaagttaccgagaaaaaaatgaagaaaatcgtctcttttcgatattttcgtttttattttcatttctgtcaaaattattcaattttggtgaaacttggctatcacaaattaaaaaaaaatttggaagttcctgagatattcgatttttttttttcgaaaaagacgaatcaaattcgaaaatcaaaattggaaccaaaaaaattgtttttgatttcatgtaaacgtagattcttctatgaataaaatgagctctaacacaagtaaaaaaatcaatgtgtaaaagaaaattgtaatagttaagaagtatattttcactaagtttcatcaaaattcaaaacgaaaaacattgataaagaccattttctttattttcttagtacctaattttaatgttgtaatatagattaaaatattatataataaaatttgtagtctttcgcatttgaaatttttcttgatggaatgtcagatttgtaggaaagtgaactgctgcctccaaacgtccccccaaataacccccggaactttttagaatgtatttttttgtgtattatacccccacttaccaatatcgatcataaaattttagataactttttttcaccttgtttgctcatttgcctggtccagagactaaaacaagaaattatttctttctaaattaattagtgcatcaacttttttgagtataagttggtttaatatcttttagtcttctcaatagagatcacaagcgagaatagagttaacccattcgctgccgatcacgcaccagcgcgtgatacggttactttagtcaggtgccgttcacgcaccagcgagtgatatggttacttcagtcaggtgccattcaacaaaatggctcctagccgagttgcattctcttagataggcagggaatgggttaacacttctgtttatgtaaatacatgtttaaatttccgtttatttgaatctaagtcaccacgtgtacacttaccagtgattcaggtctttttatcctgaaacttcgaatccgaaggagattcagcagaaattataaaatttaatacattcgaacccgcttataggaatagccttcgtgccaagcaaaaatattcttataaccgggatattctaataaccgatcattggttgctagccgtaataagtgtaccgactatacgtaataatagctcacactatgttaatatgtatatgtatatggttttatgtctttttatgtcaataatacaatagcgtaacgtatttattaaaaaaccaaattactttatattatgtggatgcatacagtaattaatatgaaatgtatgcaatatatagattatgtaaatattttcgtattaaaatacataatatacttaaactttataacaggcaactgggtggcaatatatatagtttgtagacaaaggaaattaatttacgactgaatttgtcggtaaacgattgaattggtactcataacaacgcaataaaatatttattacctatctgacaaaccctgacaaataatataaataaaacagcactacctacaggccttcgaagcccttggcgagaaattataatacaaaacataatttaaat

SEQ ID NO: 2264 - DNA, 1330 bp, Diabrotica virgifera
agattcgaactcactaccattcggaactttcgatccaaaggttaggcgctcttaccactgagccacagagggggttttaaactgcaattctgccaaccgaatgtcaacaccaatgcgcatccaagtctcaaatacaaagtgaatttggtcagactgtacataatcgtacgaattacgtagagccagagcccacgaaaaattatactaaatttacagtcaagatgaagtagaaataggcagacaaggcacgttggatgctactggcagcactcccgaatcaaaaattacaatgtatatacattgtaaatcccaaatcatgatttccgaagtttatacattgtaaattatgattcggtagtgctcccagtagcatttgacgtatcttggtttgtttatttctactgcatcttgattgtaaatttagtatagtaactcatgcggtacacggcctgtagacattggccaatatcattccaataaattaaatattgtttttatttcactcagcgtttggtgtttaactgaattccaagaggacttttgtttcattgtactggatggaataatacaaaagtacgtcaaaattaacgttggattaattaaaattaattaaagacggatacgaaatatattcaaatactatgaagtctatactattgtaatcaccgtgcctatatataaaattaacgcacatatttatcagaacaggcaataattgtgaaaactgaaggtttgacactgtatgatgattattacagtcgaacccgcttattggaatagccttcatgccaagcaaaaatattcttataaccgggatattctaataaccgatcattggtggctagccgtaataagtgtaccgaatatacgtaataatagtacatactatgttaatatgtatatgtatatggttttatgtctttttatgtcaataatacaatagcgtaacgtatttattaaaaaaccaaattacattatattatgtggatgcatacagtaattaatatgaaatgtatgcaatatatagattatgtaaatattttcgtattaaaatacataatatacttaataagaaaattacttatttagtcttgaaaaataatcggtaattgtagcctgttttttttacataaaatacttagtcacttttgttgccatgaattattttttttatggcatagacttgggtgtcatttagccagtcacaactttttttgttgtttaaaaattagaaaaatttacaatggtttggccatcccgaaaacgttgtataactttacaagggattaggatgggcgaactgtttcttaaaaattttataacaggcaag

SEQ ID NO: 2265 - DNA, 1294 bp, Diabrotica virgifera
agattcgaactcactaccattcggaactttcgatccaaaggttaggcgctcttaccactgagccacagagggggttttaaactgcaattctgccaaccgaatgtcaacaccaatgcgcatccaagtctcaaatacaaagtgaatttggtcagactgtacataatcgtacgaattacgtagagccagagcccacgaaaaattatactaaatttacagtcaagatgaagtagaaataggcagacaaggcacgttggatgctactggcagcactcccgaatcaaaaattacaatgtatatacattgtaaatcccaaatcatgatttccgaagtttatacattgtaaattatgattcggtagtgctcccagtagcatttgacgtatcttggtttgtttatttctactgcatcttgattgtaaatttagtatagtaactcatgcggtacacggcctgtagacattggccaatatcattccaataaattaaatattgtttttatttcactcagcgtttggtgtttaactgaattccaagaggacttttgtttcattgtactggatggaataatacaaaagtacgtcaaaattaacgttggattaattaaaattaattaaagacggatacgaaatatattcaaatactatgaagtctatactattgtaatcaccgtgcctatatataaaattaacgcacatatttatcagaacaggcaataattgtgaaaactgaaggtttgacactgtatgatgattattacagtcgaacccgcttattggaatagccttcatgccaagcaaaaatattcttataaccgggatattctaataaccgatcattggtggctagccgtaataagtgtaccgaatatacgtaataatagtacatactatgttaatatgtatatgtatatggttttatgtctttttatgtcaataatacaatagcgtaacgtatttattaaaaaaccaaattacattatattatgtggatgcatacagtaattaatatgaaatgtatgcaatatatagattatgtaaatattttcgtattaaaatacataatatacttaaactttataacaggcaactgggtggcaatatatatagtttgtagacaaaggaaattaatttacgactgaatttgtcggtaaacgattgaattggtactcataacaacgcaataaaatatttattacctatctgacaaaccctgacaaataatataaataaaacagcactacctacaggccttcgaagcccttggcgagaaattataatacaaaacataatttaaat

SEQ ID NO: 2266 - DNA, 2503 bp, Diabrotica virgifera
  SmartBlast Evalue=7E-28; Info=Endonuclease-reverse transcriptase n=1 Tax=Bombyx mori RepID=D5LB38_BOMMO
taaacttctgagcaaactatctagtggctgtaattccactctacttggctaagtgattctaaaaaggaacgtacctacgacttaaatattttgtattggtatcatgtgacgtcactgactatgacgcggatgacgtgcaacggtatttatactgtaagaaccatatgacctttaaaaagcacttattttttgtcttatttttagaaaaattatcaatagaatatattaacagttttacagattaaaaacgaccggattgtagcaatgtggaataaactttttccataatgaaagatttttccataaatctcacatgattatcacacgtcacctagtccaattttggaaagtgaaaaaggcaggtactaccccacgattccgtctccagatgaaggtggtacgttagccataacgatctccaacgatcagaagcctgtgatctttctgagcaaactattactcgcaaatgtacataggtatacttgacacgttacacaacagccttggtctctgaggaacgcatcctctactacttgtctttaatggttcttcatctttctacactacatatttatgttgttcatactgcactcatgaagcagtttttcactgtgctagtcgatctggttcgggtttaccctcactcatctcttcttcttatggtgccgtgcacctattaggaccgtgcaagttcggaagagcgacacctggtgtcatagctcagcaataattgtagcacttttaattatattgaccaattatattagtcctggttactggataattattgtcaaggccatagcccaaaaaagaataagaagaaaaagcaagattgaggttatgttattaaaaggtaaaccttatatggaaatccacttttctatttgtattaatttgtgcctagaaattggaaccgaatagaatttaaattgacaatttattgttgtattttttgcactttataacatagcatttgcgaaatcccattttcttcaatgacagtaggtatggaatatgtcaatttcaattgacaataaggaaagttgcaagatttctccgctactcgtgcacgatcgtttctcgtatcccctccaagtacttgcatacagcgaatagtgcattggcgaattatcttaaggtcagacgtctctcttttgcggcatgcaaaagctcgccagtgatatttatgctcctctaactctttatatttcgtagccacgacatttgtttgcgacgtactcctctctcgccctcaatctatccttggatgattagttgagagattgcatatttcccctctcagaatgtggcccaggtatacaatttttcattccttgatcaagttgaacaattctctcgcagtatttacgtttcttaagacttcctcgtttttaaccctatctatcaatgatatgcggaacattcttcgcatgatccacatttcgaaggcccctcaacttattaatggaagatatttccaacttccatgtctccatgccatataacaatatggaccatacatagcacttaaccattttgtaacggagattgaaggaatgattgcggttacaaactagcagttttttaataaaagattgttttgcttgttcggtacggcattttatttctcgctgaggatcccattggtcattcaccatcattcccaagtatttgtactcttaactgtacgccatttcttattgccatgcatttagtttttccagcatttatcttcttcttcttcttgtatagacatgactctgtctgttttttcaaagtgcctctagtaagttgtcgttccatcgttttcgtggtcttcccactgatcgtcttcctattggagaaccgtctctcgctgtcctgactatcctatttgttgtcattcgggttatgtggtcattccattctattcttctgtttgttacccagttatttgtatatttattttaatgtaaacttagacaataatatttctatcatgttgagtctggctgaatgactaaaagtctatgccaaaaaaaatacccagttattaatgttatacaccttgcatctccgtcgtatatctgtacttatagctctgtcccataagacataaattcatgaagaataagtaaagtgaatctgccgtgagaagtcatccttatgatttcaatactgagtttacctcttcatttgcccattttaagattcaaactttatctaatcaaatttttaagtatatataaaaattttgcagtgttatgtaaactatctattttccattcaatgttatttaattctttcgctgtagaaaattaactagtaggttatatttatatagaaaataacttcgccaaacggcatgtcagttactgttacttatccttatataaactgagatcatcattttaactttactcagaaaacccgctatttctttggatacattttatgctctctttgtaatgatatcacaaaatgtagttatacttaactgtactttcagaaacaacgtaagtaa

SEQ ID NO: 2267 - DNA, 2444 bp, Diabrotica virgifera
  SmartBlast Evalue=7E-28; Info=Endonuclease-reverse transcriptase n=1 Tax=Bombyx mori RepID=D5LB38_BOMMO
taaacttctgagcaaactatctagtggctgtaattccactctacttggctaagtgattctaaaaaggaacgtacctacgacttaaatattttgtattggtatcatgtgacgtcactgactatgacgcggatgacgtgcaacggtatttatactgtaagaaccatatgacctttaaaaagcacttattttttgtcttatttttagaaaaattatcaatagaatatattaacagttttacagattaaaaacgaccggattgtagcaatgtggaataaactttttccataatgaaagatttttccataaatctcacatgattatcacacgtcacctagtccaattttggaaagtgaaaaaggcaggtactaccccacgattccgtctccagatgaaggtggtacgttagccataacgatctccaacgatcagaagcctgtgatctttctgagcaaactattactcgcaaatgtacataggtatacttgacacgttacacaacagccttggtctctgaggaacgcatcctctactacttgtctttaatggttcttcatctttctacactacatatttatgttgttcatactgcactcatgaagcagtttttcactgtgctagtcgatctggttcgggtttaccctcactcatctcttcttcttatggtgccgtgcacctattaggaccgtgcaagttcggaagagcgacacctggtgtcatagctcagcaataattgtagcacttttaattatattgaccaattatattagtcctggttactggataattattgtcaaggccatagcccaaaaaagaataagaagaaaaagcaagattgaggttatgttattaaaaggtaaaccttatatggaaatccacttttctatttgtattaatttgtgcctagaaattggaaccgaatagaatttaaattgacaatttattgttgtattttttgcactttataacatagcatttgcgaaatcccattttcttcaatgacagtaggtatggaatatgtcaatttcaattgacaataaggaaagttgcaagatttctccgctactcgtgcacgatcgtttctcgtatcccctccaagtacttgcatacagcgaatagtgcattggcgaattatcttaaggtcagacgtctctcttttgcggcatgcaaaagctcgccagtgatatttatgctcctctaactctttatatttcgtagccacgacatttgtttgcgacgtactcctctctcgccctcaatctatccttggatgattagttgagagattgcatatttcccctctcagaatgtggcccaggtatacaatttttcattccttgatcaagttgaacaattctctcgcagtatttacgtttcttaagacttcctcgtttttaaccctatctatcaatgatatgcggaacattcttcgcatgatccacatttcgaaggcccctcaacttattaatggaagatatttccaacttccatgtctccatgccatataacaatatggaccatacatagcacttaaccattttgtaacggagattgaaggaatgattgcggttacaaactagcagttttttaataaaagattgttttgcttgttcggtacggcattttatttctcgctgaggatcccattggtcattcaccatcattcccaagtatttgtactcttaactgtacgccatttcttattgccatgcatttagtttttccagcatttatcttcttcttcttcttgtatagacatgactctgtctgttttttcaaagtgcctctagtaagttttctcaacaccgcaactgtcaatttatgatagaatgtcaccttcgttcaatcacagttaaagtgtgatccggataaatgtgcttcatacaaacgctttataatccatttatacaaattaaatgaaacacgttatggcatatttctttaaatttacattaatagaaatcttcaaatattacttctacacgtatataatacaatgtatctagtggctgtaattccactctacttggctaaacgattctaaaaagaaacgtacctacgacttaaatattttgtattggtatcgcttatgatttcaatattgagtttagctcttcatttgcccgttttaagattcaaactttatctaatcaaatttttaagtatatataaaaattttgcagtgttatgtaaactatctattttccattcaatgttatttaattctttcgctgtagaaaattaactagtaggttatatttatatagaaaataacttcgccaaacggcatgtcagttactgttacttatccttatataaactgagatcatcattttaactttactcagaaaacccgctatttctttggatacattttatgctctctttgtaatgatatcacaaaatgtagttatacttaactgtactttcagaaacaacgtaagtaa

SEQ ID NO: 2268 - DNA, 2180 bp, Diabrotica virgifera
  SmartBlast Evalue=6E-28; Info=Endonuclease-reverse transcriptase n=1 Tax=Bombyx mori RepID=D5LB38_BOMMO
taaacttctgagcaaactatctagtggctgtaattccactctacttggctaagtgattctaaaaaggaacgtacctacgacttaaatattttgtattggtatcatgtgacgtcactgactatgacgcggatgacgtgcaacggtatttatactgtaagaaccatatgacctttaaaaagcacttattttttgtcttatttttagaaaaattatcaatagaatatattaacagttttacagattaaaaacgaccggattgtagcaatgtggaataaactttttccataatgaaagatttttccataaatctcacatgattatcacacgtcacctagtccaattttggaaagtgaaaaaggcaggtactaccccacgattccgtctccagatgaaggtggtacgttagccataacgatctccaacgatcagaagcctgtgatctttctgagcaaactattactcgcaaatgtacataggtatacttgacacgttacacaacagccttggtctctgaggaacgcatcctctactacttgtctttaatggttcttcatctttctacactacatatttatgttgttcatactgcactcatgaagcagtttttcactgtgctagtcgatctggttcgggtttaccctcactcatctcttcttcttatggtgccgtgcacctattaggaccgtgcaagttcggaagagcgacacctggtgtcatagctcagcaataattgtagcacttttaattatattgaccaattatattagtcctggttactggataattattgtcaaggccatagcccaaaaaagaataagaagaaaaagcaagattgaggttatgttattaaaaggtaaaccttatatggaaatccacttttctatttgtattaatttgtgcctagaaattggaaccgaatagaatttaaattgacaatttattgttgtattttttgcactttataacatagcatttgcgaaatcccattttcttcaatgacagtaggtatggaatatgtcaatttcaattgacaataaggaaagttgcaagatttctccgctactcgtgcacgatcgtttctcgtatcccctccaagtacttgcatacagcgaatagtgcattggcgaattatcttaaggtcagacgtctctcttttgcggcatgcaaaagctcgccagtgatatttatgctcctctaactctttatatttcgtagccacgacatttgtttgcgacgtactcctctctcgccctcaatctatccttggatgattagttgagagattgcatatttcccctctcagaatgtggcccaggtatacaatttttcattccttgatcaagttgaacaattctctcgcagtatttacgtttcttaagacttcctcgtttttaaccctatctatcaatgatatgcggaacattcttcgcatgatccacatttcgaaggcccctcaacttattaatggaagatatttccaacttccatgtctccatgccatataacaatatggaccatacatagcacttaaccattttgtaacggagattgaaggaatgattgcggttacaaactagcagttttttaataaaagattgttttgcttgttcggtacggcattttatttctcgctgaggatcccattggtcattcaccatcattcccaagtatttgtactcttaactgtacgccatttcttattgccatgcatttagtttttccagcatttatcttcttcttcttcttgtatagacatgactctgtctgttttttcaaagtgcctctagtaagttttctcaacaccgcaactgtcaatttatgatagaatgtcaccttcgttcaatcacagttaaagtgtgatccggataaatgtgcttcatacaaacgctttataatccatttatacaaattaaatgaaacacgttatggcatatttctttaaatttacattaatagaaatcttcaaatattacttctacacgtatataatacaatgtatctagtggctgtaattccactctacttggctaaacgattctaaaaagaaacgtacctacgacttaaatattttgtattggtatcatgtgacgtcactggctatgacgcggatgacgtgcaacggtatttatactgtacgaaccatatgacctttaaaaagcacttctgctaaacttctgagc

SEQ ID NO: 2269 - DNA, 908 bp, Diabrotica virgifera
tatatcacataattattgtagaagctgattatacaacaaaacaaattaatcatcatcatcactctctttgccttatccctatgcggggtcagcttcccaaattgcatttctaaacacaattctatcttgggtcatatcaatggaaataaataaaagaatttgaaacagcaaacaagatcgtcttacgttaaagtaaataataaaaacaataaatataataaaacaaacttatagtaaataataaaaacaaatcttaagtgtcaacaccgcaactgtcaatttatgatagaatgtcaccttcgttcaatcacagttaaagtgtgatccggataaatgtgcttcatacaaacgctttataatccatttatacaaattaaatgaaacacgttatggcatatttctttaaatttacattaatagaaatcttcaaatattacttctacacgtatataatacaatgtatctagtggctgtaattccactctacttggctaaacgattctaaaaagaaacgtacctacgacttaaatattttgtattggtatcgcttatgatttcaatattgagtttagctcttcatttgcccgttttaagattcaaactttatctaatcaaatttttaagtatatataaaaattttgcagtgttatgtaaactatctattttccattcaatgttatttaattctttcgctgtagaaaattaactagtaggttatatttatatagaaaataacttcgccaaacggcatgtcagttactgttacttatccttatataaactgagatcatcattttaactttactcagaaaacccgctatttctttggatacattttatgctctctttgtaatgatatcacaaaatgtagttatacttaactgtactttcagaaacaacgtaagtaa

SEQ ID NO: 2270 - DNA, 827 bp, Diabrotica virgifera
catgtcctgcctaatcgtcttaacaaaacaaattaatattcaatggaaataaataaaggaatttgaaacagcaaacaagattatcttacgttaaagtaaataataaaaacaataaatataataaaacaaacacttatagtaaataataaaaacaaatctgaagtgtcagcaccgcaactgtcaaataagtgctgccaatttatgatagaatgtcaccttcgttcaatcacagttaaagtgtgatccggataaatgtgcttcatacaaacgctttataatccatttatacaaattaaatgaaacacgttatggcatatttctttaaatttacattaatagaaatcttcaaatattacttctacacgtatataatacaatgtatctagtggctgtaattccactctacttggctaaacgattctaaaaagaaacgtacctacgacttaaatattttgtattggtatcgcttatgatttcaatattgagtttagctcttcatttgcccgttttaagattcaaactttatctaatcaaatttttaagtatatataaaaattttgcagtgttatgtaaactatctattttccattcaatgttatttaattctttcgctgtagaaaattaactagtaggttatatttatatagaaaataacttcgccaaacggcatgtcagttactgttacttatccttatataaactgagatcatcattttaactttactcagaaaacccgctatttctttggatacattttatgctctctttgtaatgatatcacaaaatgtagttatacttaactgtactttcagaaacaacgtaagtaa

SEQ ID NO: 2271 - DNA, 644 bp, Diabrotica virgifera
tatatcacataattattgtagaagctgattatacaacaaaacaaattaatcatcatcatcactctctttgccttatccctatgcggggtcagcttcccaaattgcatttctaaacacaattctatcttgggtcatatcaatggaaataaataaaagaatttgaaacagcaaacaagatcgtcttacgttaaagtaaataataaaaacaataaatataataaaacaaacttatagtaaataataaaaacaaatcttaagtgtcaacaccgcaactgtcaatttatgatagaatgtcaccttcgttcaatcacagttaaagtgtgatccggataaatgtgcttcatacaaacgctttataatccatttatacaaattaaatgaaacacgttatggcatatttctttaaatttacattaatagaaatcttcaaatattacttctacacgtatataatacaatgtatctagtggctgtaattccactctacttggctaaacgattctaaaaagaaacgtacctacgacttaaatattttgtattggtatcatgtgacgtcactggctatgacgcggatgacgtgcaacggtatttatactgtacgaaccatatgacctttaaaaagcacttctgctaaacttctgagc

SEQ ID NO: 2272 - DNA, 563 bp, Diabrotica virgifera
catgtcctgcctaatcgtcttaacaaaacaaattaatattcaatggaaataaataaaggaatttgaaacagcaaacaagattatcttacgttaaagtaaataataaaaacaataaatataataaaacaaacacttatagtaaataataaaaacaaatctgaagtgtcagcaccgcaactgtcaaataagtgctgccaatttatgatagaatgtcaccttcgttcaatcacagttaaagtgtgatccggataaatgtgcttcatacaaacgctttataatccatttatacaaattaaatgaaacacgttatggcatatttctttaaatttacattaatagaaatcttcaaatattacttctacacgtatataatacaatgtatctagtggctgtaattccactctacttggctaaacgattctaaaaagaaacgtacctacgacttaaatattttgtattggtatcatgtgacgtcactggctatgacgcggatgacgtgcaacggtatttatactgtacgaaccatatgacctttaaaaagcacttctgctaaacttctgagc

SEQ ID NO: 2273 - DNA, 1044 bp, Diabrotica virgifera
tgggagatggatatgtcgaaaatttttacctgggtcagagagtgcagcctttagtcttcactgcggcgtccatttggcttgcatattgtggaagccttggaggttgtcaccaggaaatgggccaataaagtttttcaattaaggagcttttaaaaatatttaatttacaaatatttttattaggttgaaaaacagtcttttatttagcagatgccgctaggcacctactaccatctcgtcagttgcggtgggagatggatatgtcgaaaatttttacctgggccagagaaaagcagcctatgcagtctctgatgaacctctaacaagaggtgaaatcgtcgataagagtgctggctgcactctctgatctgagtaaaaattaagacagttttggtttcgcaccgcaactgaatgaataaaaatggtatacatttttatttttatattagtattactcctatagagtaactaggtccattttccgttggaactttaccagctgcagacgggggatgtgaattgcatagtgtagaattccttcccttttgtcttcactgcagcatccatctggcttgcaaattttagaagccttggaggtgttaccagggaaatggaccaataagttttcaatttaaaaatcttttagtaatatttttaatatttttcaatattattaatgttgctattaggattgaaaactttacctttcagttgacatatgacgctagtcacctactccatacacgtcagttgcaatgcggggataaactttcatggtttggtcacttcgagcagatagcagcaggcctacgtcctctctgatgatgactccaaatagagtcgaaaatcgtcgatttagagtgctggtctgcgctccctgttctaagtgaaaaataagacggttttgccttcgcattgcaactgaataaaaatggaatttttattttatttttatattgttcaaattcaatgcacaaaactgccactaacagcgctggcgaaaactgtcaaatcccctctactcatcggctcacagcgaatatg

SEQ ID NO: 2274 - DNA, 1061 bp, Diabrotica virgifera
tgggagatggatatgtcgaaaatttttacctgggtcagagagtgcagcctttagtcttcactgcggcgtccatttggcttgcatattgtggaagccttggaggttgtcaccaggaaatgggccaataaagtttttcaattaaggagcttttaaaaatatttaatttacaaatatttttattaggttgaaaaacagtcttttatttagcagatgccgctaggcacctactaccatctcgtcagttgcggtgggagatggatatgtcgaaaatttttacctgggccagagaaaagcagcctatgcagtctctgatgaacctctaacaagaggtgaaatcgtcgataagagtgctggctgcactctctgatctgagtaaaaattaagacagttttggtttcgcaccgcaactgaatgaataaaaatggtatacatttttatttttatattagtattactcctatagagtaactaggtccattttccgttggaactttaccagctgcagacgggggatgtgaattgcatagtgtagaattccttcccttttgtcttcactgcagcatccatctggcttgcaaattttagaagccttggaggtgttaccagggaaatggaccaataagttttcaatttaaaaatcttttagtaatatttttaatatttttcaatattattaatgttgctattaggattgaaaactttaccttttaatttttttaaacttaaaatgttctccgattacataaatatacatatgcaacggttgaaaatagtgtcggtcccgcttgattagcaattaaaaaacaaaggggttttcgatattgtattgcaaaggactcttcggagtttgatcaatcgatgttcaaagagtatcttcttaccttggcggcatcgaggttttcagtttttcacctagtttctgaaggttgaaaatgggcgatttcgcaatttttgaatttttaatcgcttttatgtcaaggactatcaactatagagagggtcactaaggacctttttctgtttgaaatgatccaaaaaacctggaaaagctttgttcgatg

SEQ ID NO: 2275 - DNA, 830 bp, Diabrotica virgifera
aacgtcgattgatggaatcccgaacggttttttgcaatgcaatgtcaaaaacccctttgtttttaattattttttaattggtctaggcctctccgatgatgactccaataagagtcgaaaatcgtcgattcagagtgctgggctgcgctccctatcctaagtgcaaaataaaattgttttgccttcgcattgcaactgaataaaaatggtatacctacatttttattttatattagtattactcctttagagtaactaggtccattttcgttggaactttaccaagctgcagacgggggttgtgaattgcaacgtttagaattcccttcctttgtcttcactgcagcatccatctggcttgcaaattttagaagccttggaggtgttaccagggaaatggaccaataagttttcaatttaaaaatcttttagtaatatttttaatatttttcaatattattaatgttgctattaggattgaaaactttacctttcagttgacatatgacgctagtcacctactccatacacgtcagttgcaatgcggggataaactttcatggtttggtcacttcgagcagatagcagcaggcctacgtcctctctgatgatgactccaaatagagtcgaaaatcgtcgatttagagtgctggtctgcgctccctgttctaagtgaaaaataagacggttttgccttcgcattgcaactgaataaaaatggaatttttattttatttttatattgttcaaattcaatgcacaaaactgccactaacagcgctggcgaaaactgtcaaatcccctctactcatcggctcacagcgaatatg

SEQ ID NO: 2276 - DNA, 831 bp, Diabrotica virgifera
gtgcgactggatgactgcttacgcaagaggccattgagagaaagaagaagtttatgtgaaatttagaggttacctctgtttttattggctgtaagtttcgtcggtagcgctctctcgcggtttgaaacttgtacttttctgataaaattgttcaaatgcttttctcaatttttttttttgccttcgcattgcaactgaataaaaatggaatttttattttatttttatattggtcgttacttctttgagtaactaggtccattttctgttggaatttaccagctgaatagacggggtcgtgaattgtaagtttttttgaattctctcttgtcttcttcgcttcagcatccatctggcttgcaatttttagaagccatggaggtgttatcagggaaatggatcaataagttttcaattaaaaatcttttagtaatatttttaatctttttcataattattaatatttctattaggttgaaaacttactttgcctttcagttgccagatgacgctagtcacctactccataaacgtcagttgcaatgcggggataagctttcgtgattttgtcacttcgggcagagagcagcaggcctacgtcctctctgatgatgactccaaatagagtcgaaaatcgtcgatttagagtgctggtctgcgctccctgttctaagtgaaaaataagacggttttgccttcgcattgcaactgaataaaaatggaatttttattttatttttatattgttcaaattcaatgcacaaaactgccactaacagcgctggcgaaaactgtcaaatcccctctactcatcggctcacagcgaatatg

SEQ ID NO: 2277 - DNA, 847 bp, Diabrotica virgifera
aacgtcgattgatggaatcccgaacggttttttgcaatgcaatgtcaaaaacccctttgtttttaattattttttaattggtctaggcctctccgatgatgactccaataagagtcgaaaatcgtcgattcagagtgctgggctgcgctccctatcctaagtgcaaaataaaattgttttgccttcgcattgcaactgaataaaaatggtatacctacatttttattttatattagtattactcctttagagtaactaggtccattttcgttggaactttaccaagctgcagacgggggttgtgaattgcaacgtttagaattcccttcctttgtcttcactgcagcatccatctggcttgcaaattttagaagccttggaggtgttaccagggaaatggaccaataagttttcaatttaaaaatcttttagtaatatttttaatatttttcaatattattaatgttgctattaggattgaaaactttaccttttaatttttttaaacttaaaatgttctccgattacataaatatacatatgcaacggttgaaaatagtgtcggtcccgcttgattagcaattaaaaaacaaaggggttttcgatattgtattgcaaaggactcttcggagtttgatcaatcgatgttcaaagagtatcttcttaccttggcggcatcgaggttttcagtttttcacctagtttctgaaggttgaaaatgggcgatttcgcaatttttgaatttttaatcgcttttatgtcaaggactatcaactatagagagggtcactaaggacctttttctgtttgaaatgatccaaaaaacctggaaaagctttgttcgatg

SEQ ID NO: 2278 - DNA, 662 bp, Diabrotica virgifera
gaaaagtaagattgttttgccttcgcattgcaactgaataaaatggtatacatttttattttatagtcgtattactccgtagagtaacaggtgcagtttccgttggaactttaccagctgcagacgggggatgtgaattgcatagtgtagaattccttcccttttgtcttcactgcagcatccatctggcttgcaaattttagaagccttggaggtgttaccagggaaatggaccaataagttttcaatttaaaaatcttttagtaatatttttaatatttttcaatattattaatgttgctattaggattgaaaactttacctttcagttgacatatgacgctagtcacctactccatacacgtcagttgcaatgcggggataaactttcatggtttggtcacttcgagcagatagcagcaggcctacgtcctctctgatgatgactccaaatagagtcgaaaatcgtcgatttagagtgctggtctgcgctccctgttctaagtgaaaaataagacggttttgccttcgcattgcaactgaataaaaatggaatttttattttatttttatattgttcaaattcaatgcacaaaactgccactaacagcgctggcgaaaactgtcaaatcccctctactcatcggctcacagcgaatatg

SEQ ID NO: 2279 - DNA, 679 bp, Diabrotica virgifera
gaaaagtaagattgttttgccttcgcattgcaactgaataaaatggtatacatttttattttatagtcgtattactccgtagagtaacaggtgcagtttccgttggaactttaccagctgcagacgggggatgtgaattgcatagtgtagaattccttcccttttgtcttcactgcagcatccatctggcttgcaaattttagaagccttggaggtgttaccagggaaatggaccaataagttttcaatttaaaaatcttttagtaatatttttaatatttttcaatattattaatgttgctattaggattgaaaactttaccttttaatttttttaaacttaaaatgttctccgattacataaatatacatatgcaacggttgaaaatagtgtcggtcccgcttgattagcaattaaaaaacaaaggggttttcgatattgtattgcaaaggactcttcggagtttgatcaatcgatgttcaaagagtatcttcttaccttggcggcatcgaggttttcagtttttcacctagtttctgaaggttgaaaatgggcgatttcgcaatttttgaatttttaatcgcttttatgtcaaggactatcaactatagagagggtcactaaggacctttttctgtttgaaatgatccaaaaaacctggaaaagctttgttcgatg

SEQ ID NO: 2280 - DNA, 3819 bp, Diabrotica virgifera
  SmartBlast Evalue=4E-75; Info="Phytanoyl-CoA dioxygenase, peroxisomal n=1 Tax=Bos taurus RepID=PAHX_BOVIN"
cgcagaatgcaaaagctcttattttcgacaataaaatttatagaaattaaaaattagaagattgcgtttttttttcaaaggaaaaattaattccatataccaaggctcaccctaggccgtggagtcaaagatgattggttgtggttgtaacgggtcgggatctacccatccacgggctttgaggtacactcatcccagctcaaagttgacacttgctcaaagacaattttatgaacgaaatggattcattgtcgtaagaaaaaacgttagccctgaattaatagaagttttgaatcagagatttattgatatttgtgaagatcgtgccgatgatatgcaatgtttcgttatcaaagacccagtactaaggaaaaaaggtttaaagggagaggcggtcatgaacaagcttcaagattttgtctttgatccagttttgagtcgttactgtatggaaaagagcttagtagatgctgtggaaaatataatcggaccaaatataacagttgctcattccatgcttatcaacaagcctccagatacagatccagatatatcaagacatcctatgcatcaggatcttcattactttccctttagaccagctgacaaaattgttgcttcctggacagcaatgcagagagtggacgaaaataatggatgccttttcgtagtacctggatcccacattgataatcctttgttaccacatatatatcctgagggtaaaaataatgccatgtaccacggagtacaaaataaggaccatctacccaaacagtttgtggtattagataaaggtgatactgtgttcttccatcctttactgttgcacgggtctggagtaaatcgcacaaaaggttatagacgagctatatcatgccattttgcggatacaaattgcgaatttattgacgtcacaggaacacttcaagagaatattagaaaagaagttgaaaccataactatcaaacgtggaatgccaatgtctttcatagatgtatggaaaagtaaaagtaggttagtccgggggccacctggaaatttccaaagatacgacagtcatctttagtaacgtgcctttatcaaagaagttgctatttttgtatcggagtaatattttttcagataatccaattatgggtttgcataattaacttgttttagatattgtagccataatgtgttaaaaaaggtatttggaagtatgtactgaaaagtcaaaagagattgcagagttgactgttaatctcagtctttagtcattactctggaatatctctaaaaatcatatgcatgatgagcttgcactatcttgtcaattaaattgtcaaattatttattaaaatcctttataaggtatatttatattaaaaagaccctttcgggcagaccctacagattgttttcgacataaaaatttcatcatcagcgctgctaacctgaaataagtacatataatcacttataaatgcaaacatgaatattaaattttgactaaggttaaaaatacataaggattatgcttacaggtgtacctacatgcttgagccaccaaaatatatgggtaaaaatcctttgaatgttatgaacttgtagaaaagttacatgttcacataaaataatatgtgatgtttaaaatactcaggggcgtcaattcaaattttgattgaggggggcaagcacaaaaagcaaaattcgttgttaccgaatttttcttttttttttcgaagctgctatattgtcagtgatacgtatgatttcattcagagatgggtatttatacaaaaaaaaaagtttttaccgctcaccggaatatcaaaatgatttaatcgatgagtattcttcaagactgctgaaaaatattatcacaaaaggtaatcaagtcgaattctttgctataatggctgatgaaaccaaagatacagctgaaaccaaatcggaacagcttgcaattttaatccgttatgttgatgctgagggcacaaaaatttatgaacgtgctatcgggctgcaccatcttaaggactgtggtgccgaaagtatagccaacgccatacaatcgatgttatcggataaaagactagacatagaaaactgcgttggtcagtgttacgacggagcgaatgtcatcagcggggtccaggcgagaattaaaaatttagcccctcatgctacgtacttccactgtgaggctgatcgactaaatctagttgtagtggatgtgttgggtaacattgacaaagttagacttttttctacagttcaaactctatcgattcatttccaacactgctactcgccatcagctttttgtaaaaatacaacagaggatgaataaaccactactaaatttggaaaggactgtaacgtaacaagatactggttgaatgcagtatcgaaaattcgaaagacatgccagaccagtttagctgttctagatgaaggaaaaaggccagtgtagagagtatcggaataaaagcgcaggtaatgcaggtaatgcattgttctatggagaagatattaggcgttacttattgtcacagcagttacaagccgaagaacttgacttagcaactgccatgcatctaatcaaaagtaccaaagaagaacttaaaaaatccagaactgacgacacataccgcgaggttttagaaaaggctaaatctttgacagacagtagtggtgttttatttgacgagcaaaaaaggacgatgactgttcctcatagactcgctataagcgtattaatgtcaacaactggcaataaatataccgaaacaaaggcatatacttcgaagttatcgacagcattctcatggaacacaatcgtcgcttctcagaaaatgaaggatgccccggtctgttcgcagtaccggatgcctttaagaaagaaaatcaagcattcatggcggaagaggaattaaagccattaatagaaaactacaaaaattttctaaatatataacttctacatctgcaactgcctttagtcaataaccatttacaaacatgcgatgaagactccgttttgtcactactcgaatctctcagagtgcttctagtggcatactcagaagtgattcatatttgtgctacactgcctatcaccacagttggaaatgaaacatttttctctgtgctaaaaagagtaaaagggtaggtacctgcgaagttctactggtgatgaaaaattgtcctcacttatgttgatggcagatgaaagaaaagaaacaaaaataataccactagactaagtggtggatgatttttgctgcgaggaaactacgacggtacccattactacactaacgtgacattgagtggttattttgttctattcgtaataaatcattagtattgtaataaagcttaatttcctaattattacaactaaatcatcatagtaataaaatttatgcattttttgtaaattccaatattataggggggggggcaaatgccccctcctatcactattaaatgacgcccttgattaaatactcattgatgttacgtcaggaaacgtaggactccccatactgtggtaaatcagaacataacataaatacctagcactgatttagtgccagatattgatgttatgttctgatttataattatgtatttctgtatacttatacagcaactaaaccacttccgaatacataaatagcatctttagtgaagacttttaaataaattttatatttgagggcttatatttgtaaattttacgggttatatgttattcagattttaatgattgtattgttaatacctatatatttttatatattaactaagtgattgttaataaaa

SEQ ID NO: 2281 - DNA, 3809 bp, Diabrotica virgifera
  SmartBlast Evalue=4E-75; Info="Phytanoyl-CoA dioxygenase, peroxisomal n=1 Tax=Bos taurus RepID=PAHX_BOVIN"
cgcagaatgcaaaagctcttattttcgacaataaaatttatagaaattaaaaattagaagattgcgtttttttttcaaaggaaaaattaattccatataccaaggctcaccctaggccgtggagtcaaagatgattggttgtggttgtaacgggtcgggatctacccatccacgggctttgaggtacactcatcccagctcaaagttgacacttgctcaaagacaattttatgaacgaaatggattcattgtcgtaagaaaaaacgttagccctgaattaatagaagttttgaatcagagatttattgatatttgtgaagatcgtgccgatgatatgcaatgtttcgttatcaaagacccagtactaaggaaaaaaggtttaaagggagaggcggtcatgaacaagcttcaagattttgtctttgatccagttttgagtcgttactgtatggaaaagagcttagtagatgctgtggaaaatataatcggaccaaatataacagttgctcattccatgcttatcaacaagcctccagatacagatccagatatatcaagacatcctatgcatcaggatcttcattactttccctttagaccagctgacaaaattgttgcttcctggacagcaatgcagagagtggacgaaaataatggatgccttttcgtagtacctggatcccacattgataatcctttgttaccacatatatatcctgagggtaaaaataatgccatgtaccacggagtacaaaataaggaccatctacccaaacagtttgtggtattagataaaggtgatactgtgttcttccatcctttactgttgcacgggtctggagtaaatcgcacaaaaggttatagacgagctatatcatgccattttgcggatacaaattgcgaatttattgacgtcacaggaacacttcaagagaatattagaaaagaagttgaaaccataactatcaaacgtggaatgccaatgtctttcatagatgtatggaaaagtaaaagtaggttagtccgggggccacctggaaatttccaaagatacgacagtcatctttagtaacgtgcctttatcaaagaagttgctatttttgtatcggagtaatattttttcagataatccaattatgggtttgcataattaacttgttttagatattgtagccataatgtgttaaaaaaggtatttggaagtatgtactgaaaagtcaaaagagattgcagagttgactgttaatctcagtctttagtcattactctggaatatctctaaaaatcatatgcatgatgagcttgcactatcttgtcaattaaattgtcaaattatttattaaaatcctttataaggtatatttatattaaaaagaccctttcgggcagaccctacagattgttttcgacataaaaatttcatcatcagcgctgctaacctgaaataagtacatataatcacttataaatgcaaacatgaatattaaattttgactaaggttaaaaatacataaggattatgcttacaggtgtacctacatgcttgagccaccaaaatatatgggtaaaaatcctttgaatgttatgaacttgtagaaaagttacatgttcacataaaataatatgtgatgtttaaaatactcaggggcgtcaattcaaattttgattgaggggggcaagcacaaaaagcaaaattcgttgttaccgaatttttcttttttttttcgaagctgctatattgtcagtgatacgtatgatttcattcagagatgggtatttatacaaaaaaaaaagtttttaccgctcaccggaatatcaaaatgatttaatcgatgagtattcttcaagactgctgaaaaatattatcacaaaaggtaatcaagtcgaattctttgctataatggctgatgaaaccaaagatacagctgaaaccaaatcggaacagcttgcaattttaatccgttatgttgatgctgagggcacaaaaatttatgaacgtgctatcgggctgcaccatcttaaggactgtggtgccgaaagtatagccaacgccatacaatcgatgttatcggataaaagactagacatagaaaactgcgttggtcagtgttacgacggagcgaatgtcatcagcggggtccaggcgagaattaaaaatttagcccctcatgctacgtacttccactgtgaggctgatcgactaaatctagttgtagtggatgtgttgggtaacattgacaaagttaaagacttttttctacagttcaaactctatcgattcatttccaacactgctactcgccatcagctttttgtaaaaatacaacagaggatgaataaaccactactaaatttggaaaggactgtaacgtaacaagatactggttgaatgcagtatcgaaaattcgatagacatgccagaccattttagctgttctagatgaaggaaaaaggccagggcagagagtatcggaataaaagcgcagataatgcagaaaatcttcatatttctcctttgttctatggagaagatattaggcgttacttattgtctatcacagcagctacaagccaaagaacttgacttagcaacggccatgcatctaatcaaaagtaccaaagaagaacttaaaaaatccagaactgacgacacataccgagaggttttagagaaggctaaatctttgacagtagtggtattttatttgacgaacaaataaggacggtgactgttcctcatagactcgctatgagcgtattaatggaaacaaaggcatatacttcgaagttatcgacagcattctcatggaacacaatcgtcgcttctcagaaaatgaaggatgccccggtctgttcgcagtaccggatgcctttaagaaagaaaatcaagcattcatggcggaagaggaattaaagccattaatagaaaactacaaaaattttctaaatatataacttctacatctgcaactgcctttagtcaataaccatttacaaacatgcgatgaagactccgttttgtcactactcgaatctctcagagtgcttctagtggcatactcagaagtgattcatatttgtgctacactgcctatcaccacagttggaaatgaaacatttttctctgtgctaaaaagagtaaaagggtaggtacctgcgaagttctactggtgatgaaaaattgtcctcacttatgttgatggcagatgaaagaaaagaaacaaaaataataccactagactaagtggtggatgatttttgctgcgaggaaactacgacggtacccattactacactaacgtgacattgagtggttattttgttctattcgtaataaatcattagtattgtaataaagcttaatttcctaattattacaactaaatcatcatagtaataaaatttatgcattttttgtaaattccaatattataggggggggggcaaatgccccctcctatcactattaaatgacgcccttgattaaatactcattgatgttacgtcaggaaacgtaggactccccatactgtggtaaatcagaacataacataaatacctagcactgatttagtgccagatattgatgttatgttctgatttataattatgtatttctgtatacttatacagcaactaaaccacttccgaatacataaatagcatctttagtgaagacttttaaataaattttatatttgagggcttatatttgtaaattttacgggttatatgttattcagattttaatgattgtattgttaatacctatatatttttatatattaactaagtgattgttaataaaa

SEQ ID NO: 2282 - DNA, 3780 bp, Diabrotica virgifera
  SmartBlast Evalue=4E-75; Info="Phytanoyl-CoA dioxygenase, peroxisomal n=1 Tax=Bos taurus RepID=PAHX_BOVIN"
cgcagaatgcaaaagctcttattttcgacaataaaatttatagaaattaaaaattagaagattgcgtttttttttcaaaggaaaaattaattccatataccaaggctcaccctaggccgtggagtcaaagatgattggttgtggttgtaacgggtcgggatctacccatccacgggctttgaggtacactcatcccagctcaaagttgacacttgctcaaagacaattttatgaacgaaatggattcattgtcgtaagaaaaaacgttagccctgaattaatagaagttttgaatcagagatttattgatatttgtgaagatcgtgccgatgatatgcaatgtttcgttatcaaagacccagtactaaggaaaaaaggtttaaagggagaggcggtcatgaacaagcttcaagattttgtctttgatccagttttgagtcgttactgtatggaaaagagcttagtagatgctgtggaaaatataatcggaccaaatataacagttgctcattccatgcttatcaacaagcctccagatacagatccagatatatcaagacatcctatgcatcaggatcttcattactttccctttagaccagctgacaaaattgttgcttcctggacagcaatgcagagagtggacgaaaataatggatgccttttcgtagtacctggatcccacattgataatcctttgttaccacatatatatcctgagggtaaaaataatgccatgtaccacggagtacaaaataaggaccatctacccaaacagtttgtggtattagataaaggtgatactgtgttcttccatcctttactgttgcacgggtctggagtaaatcgcacaaaaggttatagacgagctatatcatgccattttgcggatacaaattgcgaatttattgacgtcacaggaacacttcaagagaatattagaaaagaagttgaaaccataactatcaaacgtggaatgccaatgtctttcatagatgtatggaaaagtaaaagtaggttagtccgggggccacctggaaatttccaaagatacgacagtcatctttagtaacgtgcctttatcaaagaagttgctatttttgtatcggagtaatattttttcagataatccaattatgggtttgcataattaacttgttttagatattgtagccataatgtgttaaaaaaggtatttggaagtatgtactgaaaagtcaaaagagattgcagagttgactgttaatctcagtctttagtcattactctggaatatctctaaaaatcatatgcatgatgagcttgcactatcttgtcaattaaattgtcaaattatttattaaaatcctttataaggtatatttatattaaaaagaccctttcgggcagaccctacagattgttttcgacataaaaatttcatcatcagcgctgctaacctgaaataagtacatataatcacttataaatgcaaacatgaatattaaattttgactaaggttaaaaatacataaggattatgcttacaggtgtacctacatgcttgagccaccaaaatatatgggtaaaaatcctttgaatgttatgaacttgtagaaaagttacatgttcacataaaataatatgtgatgtttaaaatactcaggggcgtcaattcaaattttgattgaggggggcaagcacaaaaagcaaaattcgttgttaccgaatttttcttttttttttcgaagctgctatattgtcagtgatacgtatgatttcattcagagatgggtatttatacaaaaaaaaaagtttttaccgctcaccggaatatcaaaatgatttaatcgatgagtattcttcaagactgctgaaaaatattatcacaaaaggtaatcaagtcgaattctttgctataatggctgatgaaaccaaagatacagctgaaaccaaatcggaacagcttgcaattttaatccgttatgttgatgctgagggcacaaaaatttatgaacgtgctatcgggctgcaccatcttaaggactgtggtgccgaaagtatagccaacgccatacaatcgatgttatcggataaaagactagacatagaaaactgcgttggtcagtgttacgacggagcgaatgtcatcagcggggtccaggcgagaattaaaaatttagcccctcatgctacgtacttccactgtgaggctgatcgactaaatctagttgtagtggatgtgttgggtaacattgacaaagttaaagacttttttctacagttcaaactctatcgattcatttccaacactgctactcgccatcagctttttgtaaaaatacaacagaggatgaataaaccactactaaatttggaaaggactgtaacgtaacaagatactggttgaatgcagtatcgaaaattcgatagacatgccagaccattttagctgttctagatgaaggaaaaaggccagggcagagagtatcggaataaaagcgcagataatgcagaaaatcttcatatttctcctttgttctatggagaagatattaggcgttacttattgtctatcacagcagctacaagccaaagaacttgacttagcaacggccatgcatctaatcaaaagtaccaaagaagaacttaaaaaatccagaactgacgacacataccgagaggtttggacgatgactgttcctcatagactcgctataagcgtattaatgtcaacaactggcaataaatataccgaaacaaaggcatatacttcgaagttatcgacagcattctcatggaacacaatcgtcgcttctcagaaaatgaaggatgccccggtctgttcgcagtaccggatgcctttaagaaagaaaatcaagcattcatggcggaagaggaattaaagccattaatagaaaactacaaaaattttctaaatatataacttctacatctgcaactgcctttagtcaataaccatttacaaacatgcgatgaagactccgttttgtcactactcgaatctctcagagtgcttctagtggcatactcagaagtgattcatatttgtgctacactgcctatcaccacagttggaaatgaaacatttttctctgtgctaaaaagagtaaaagggtaggtacctgcgaagttctactggtgatgaaaaattgtcctcacttatgttgatggcagatgaaagaaaagaaacaaaaataataccactagactaagtggtggatgatttttgctgcgaggaaactacgacggtacccattactacactaacgtgacattgagtggttattttgttctattcgtaataaatcattagtattgtaataaagcttaatttcctaattattacaactaaatcatcatagtaataaaatttatgcattttttgtaaattccaatattataggggggggggcaaatgccccctcctatcactattaaatgacgcccttgattaaatactcattgatgttacgtcaggaaacgtaggactccccatactgtggtaaatcagaacataacataaatacctagcactgatttagtgccagatattgatgttatgttctgatttataattatgtatttctgtatacttatacagcaactaaaccacttccgaatacataaatagcatctttagtgaagacttttaaataaattttatatttgagggcttatatttgtaaattttacgggttatatgttattcagattttaatgattgtattgttaatacctatatatttttatatattaactaagtgattgttaataaaa

SEQ ID NO: 2283 - DNA, 3757 bp, Diabrotica virgifera
  SmartBlast Evalue=1E-74; Info="Phytanoyl-CoA dioxygenase, peroxisomal, putative n=1 Tax=Pediculus humanus corporis RepID= E0VKX4_PEDHC"
aacaatctttgaccagttctaaaatacataaatattatacaatgttggaaaaattactatttcatagaaagttattgttgttatctacttggactagcattaaaggcaaaatggctttgaggtacactcatcccagctcaaagttgacacttgctcaaagacaattttatgaacgaaatggattcattgtcgtaagaaaaaacgttagccctgaattaatagaagttttgaatcagagatttattgatatttgtgaagatcgtgccgatgatatgcaatgtttcgttatcaaagacccagtactaaggaaaaaaggtttaaagggagaggcggtcatgaacaagcttcaagattttgtctttgatccagttttgagtcgttactgtatggaaaagagcttagtagatgctgtggaaaatataatcggaccaaatataacagttgctcattccatgcttatcaacaagcctccagatacagatccagatatatcaagacatcctatgcatcaggatcttcattactttccctttagaccagctgacaaaattgttgcttcctggacagcaatgcagagagtggacgaaaataatggatgccttttcgtagtacctggatcccacattgataatcctttgttaccacatatatatcctgagggtaaaaataatgccatgtaccacggagtacaaaataaggaccatctacccaaacagtttgtggtattagataaaggtgatactgtgttcttccatcctttactgttgcacgggtctggagtaaatcgcacaaaaggttatagacgagctatatcatgccattttgcggatacaaattgcgaatttattgacgtcacaggaacacttcaagagaatattagaaaagaagttgaaaccataactatcaaacgtggaatgccaatgtctttcatagatgtatggaaaagtaaaagtaggttagtccgggggccacctggaaatttccaaagatacgacagtcatctttagtaacgtgcctttatcaaagaagttgctatttttgtatcggagtaatattttttcagataatccaattatgggtttgcataattaacttgttttagatattgtagccataatgtgttaaaaaaggtatttggaagtatgtactgaaaagtcaaaagagattgcagagttgactgttaatctcagtctttagtcattactctggaatatctctaaaaatcatatgcatgatgagcttgcactatcttgtcaattaaattgtcaaattatttattaaaatcctttataaggtatatttatattaaaaagaccctttcgggcagaccctacagattgttttcgacataaaaatttcatcatcagcgctgctaacctgaaataagtacatataatcacttataaatgcaaacatgaatattaaattttgactaaggttaaaaatacataaggattatgcttacaggtgtacctacatgcttgagccaccaaaatatatgggtaaaaatcctttgaatgttatgaacttgtagaaaagttacatgttcacataaaataatatgtgatgtttaaaatactcaggggcgtcaattcaaattttgattgaggggggcaagcacaaaaagcaaaattcgttgttaccgaatttttcttttttttttcgaagctgctatattgtcagtgatacgtatgatttcattcagagatgggtatttatacaaaaaaaaaagtttttaccgctcaccggaatatcaaaatgatttaatcgatgagtattcttcaagactgctgaaaaatattatcacaaaaggtaatcaagtcgaattctttgctataatggctgatgaaaccaaagatacagctgaaaccaaatcggaacagcttgcaattttaatccgttatgttgatgctgagggcacaaaaatttatgaacgtgctatcgggctgcaccatcttaaggactgtggtgccgaaagtatagccaacgccatacaatcgatgttatcggataaaagactagacatagaaaactgcgttggtcagtgttacgacggagcgaatgtcatcagcggggtccaggcgagaattaaaaatttagcccctcatgctacgtacttccactgtgaggctgatcgactaaatctagttgtagtggatgtgttgggtaacattgacaaagttagacttttttctacagttcaaactctatcgattcatttccaacactgctactcgccatcagctttttgtaaaaatacaacagaggatgaataaaccactactaaatttggaaaggactgtaacgtaacaagatactggttgaatgcagtatcgaaaattcgaaagacatgccagaccagtttagctgttctagatgaaggaaaaaggccagtgtagagagtatcggaataaaagcgcaggtaatgcaggtaatgcattgttctatggagaagatattaggcgttacttattgtcacagcagttacaagccgaagaacttgacttagcaactgccatgcatctaatcaaaagtaccaaagaagaacttaaaaaatccagaactgacgacacataccgcgaggttttagaaaaggctaaatctttgacagacagtagtggtgttttatttgacgagcaaaaaaggacgatgactgttcctcatagactcgctataagcgtattaatgtcaacaactggcaataaatataccgaaacaaaggcatatacttcgaagttatcgacagcattctcatggaacacaatcgtcgcttctcagaaaatgaaggatgccccggtctgttcgcagtaccggatgcctttaagaaagaaaatcaagcattcatggcggaagaggaattaaagccattaatagaaaactacaaaaattttctaaatatataacttctacatctgcaactgcctttagtcaataaccatttacaaacatgcgatgaagactccgttttgtcactactcgaatctctcagagtgcttctagtggcatactcagaagtgattcatatttgtgctacactgcctatcaccacagttggaaatgaaacatttttctctgtgctaaaaagagtaaaagggtaggtacctgcgaagttctactggtgatgaaaaattgtcctcacttatgttgatggcagatgaaagaaaagaaacaaaaataataccactagactaagtggtggatgatttttgctgcgaggaaactacgacggtacccattactacactaacgtgacattgagtggttattttgttctattcgtaataaatcattagtattgtaataaagcttaatttcctaattattacaactaaatcatcatagtaataaaatttatgcattttttgtaaattccaatattataggggggggggcaaatgccccctcctatcactattaaatgacgcccttgattaaatactcattgatgttacgtcaggaaacgtaggactccccatactgtggtaaatcagaacataacataaatacctagcactgatttagtgccagatattgatgttatgttctgatttataattatgtatttctgtatacttatacagcaactaaaccacttccgaatacataaatagcatctttagtgaagacttttaaataaattttatatttgagggcttatatttgtaaattttacgggttatatgttattcagattttaatgattgtattgttaatacctatatatttttatatattaactaagtgattgttaataaaa

SEQ ID NO: 2284 - DNA, 3747 bp, Diabrotica virgifera
  SmartBlast Evalue=1E-74; Info="Phytanoyl-CoA dioxygenase, peroxisomal, putative n=1 Tax=Pediculus humanus corporis RepID= E0VKX4_PEDHC"
aacaatctttgaccagttctaaaatacataaatattatacaatgttggaaaaattactatttcatagaaagttattgttgttatctacttggactagcattaaaggcaaaatggctttgaggtacactcatcccagctcaaagttgacacttgctcaaagacaattttatgaacgaaatggattcattgtcgtaagaaaaaacgttagccctgaattaatagaagttttgaatcagagatttattgatatttgtgaagatcgtgccgatgatatgcaatgtttcgttatcaaagacccagtactaaggaaaaaaggtttaaagggagaggcggtcatgaacaagcttcaagattttgtctttgatccagttttgagtcgttactgtatggaaaagagcttagtagatgctgtggaaaatataatcggaccaaatataacagttgctcattccatgcttatcaacaagcctccagatacagatccagatatatcaagacatcctatgcatcaggatcttcattactttccctttagaccagctgacaaaattgttgcttcctggacagcaatgcagagagtggacgaaaataatggatgccttttcgtagtacctggatcccacattgataatcctttgttaccacatatatatcctgagggtaaaaataatgccatgtaccacggagtacaaaataaggaccatctacccaaacagtttgtggtattagataaaggtgatactgtgttcttccatcctttactgttgcacgggtctggagtaaatcgcacaaaaggttatagacgagctatatcatgccattttgcggatacaaattgcgaatttattgacgtcacaggaacacttcaagagaatattagaaaagaagttgaaaccataactatcaaacgtggaatgccaatgtctttcatagatgtatggaaaagtaaaagtaggttagtccgggggccacctggaaatttccaaagatacgacagtcatctttagtaacgtgcctttatcaaagaagttgctatttttgtatcggagtaatattttttcagataatccaattatgggtttgcataattaacttgttttagatattgtagccataatgtgttaaaaaaggtatttggaagtatgtactgaaaagtcaaaagagattgcagagttgactgttaatctcagtctttagtcattactctggaatatctctaaaaatcatatgcatgatgagcttgcactatcttgtcaattaaattgtcaaattatttattaaaatcctttataaggtatatttatattaaaaagaccctttcgggcagaccctacagattgttttcgacataaaaatttcatcatcagcgctgctaacctgaaataagtacatataatcacttataaatgcaaacatgaatattaaattttgactaaggttaaaaatacataaggattatgcttacaggtgtacctacatgcttgagccaccaaaatatatgggtaaaaatcctttgaatgttatgaacttgtagaaaagttacatgttcacataaaataatatgtgatgtttaaaatactcaggggcgtcaattcaaattttgattgaggggggcaagcacaaaaagcaaaattcgttgttaccgaatttttcttttttttttcgaagctgctatattgtcagtgatacgtatgatttcattcagagatgggtatttatacaaaaaaaaaagtttttaccgctcaccggaatatcaaaatgatttaatcgatgagtattcttcaagactgctgaaaaatattatcacaaaaggtaatcaagtcgaattctttgctataatggctgatgaaaccaaagatacagctgaaaccaaatcggaacagcttgcaattttaatccgttatgttgatgctgagggcacaaaaatttatgaacgtgctatcgggctgcaccatcttaaggactgtggtgccgaaagtatagccaacgccatacaatcgatgttatcggataaaagactagacatagaaaactgcgttggtcagtgttacgacggagcgaatgtcatcagcggggtccaggcgagaattaaaaatttagcccctcatgctacgtacttccactgtgaggctgatcgactaaatctagttgtagtggatgtgttgggtaacattgacaaagttaaagacttttttctacagttcaaactctatcgattcatttccaacactgctactcgccatcagctttttgtaaaaatacaacagaggatgaataaaccactactaaatttggaaaggactgtaacgtaacaagatactggttgaatgcagtatcgaaaattcgatagacatgccagaccattttagctgttctagatgaaggaaaaaggccagggcagagagtatcggaataaaagcgcagataatgcagaaaatcttcatatttctcctttgttctatggagaagatattaggcgttacttattgtctatcacagcagctacaagccaaagaacttgacttagcaacggccatgcatctaatcaaaagtaccaaagaagaacttaaaaaatccagaactgacgacacataccgagaggttttagagaaggctaaatctttgacagtagtggtattttatttgacgaacaaataaggacggtgactgttcctcatagactcgctatgagcgtattaatggaaacaaaggcatatacttcgaagttatcgacagcattctcatggaacacaatcgtcgcttctcagaaaatgaaggatgccccggtctgttcgcagtaccggatgcctttaagaaagaaaatcaagcattcatggcggaagaggaattaaagccattaatagaaaactacaaaaattttctaaatatataacttctacatctgcaactgcctttagtcaataaccatttacaaacatgcgatgaagactccgttttgtcactactcgaatctctcagagtgcttctagtggcatactcagaagtgattcatatttgtgctacactgcctatcaccacagttggaaatgaaacatttttctctgtgctaaaaagagtaaaagggtaggtacctgcgaagttctactggtgatgaaaaattgtcctcacttatgttgatggcagatgaaagaaaagaaacaaaaataataccactagactaagtggtggatgatttttgctgcgaggaaactacgacggtacccattactacactaacgtgacattgagtggttattttgttctattcgtaataaatcattagtattgtaataaagcttaatttcctaattattacaactaaatcatcatagtaataaaatttatgcattttttgtaaattccaatattataggggggggggcaaatgccccctcctatcactattaaatgacgcccttgattaaatactcattgatgttacgtcaggaaacgtaggactccccatactgtggtaaatcagaacataacataaatacctagcactgatttagtgccagatattgatgttatgttctgatttataattatgtatttctgtatacttatacagcaactaaaccacttccgaatacataaatagcatctttagtgaagacttttaaataaattttatatttgagggcttatatttgtaaattttacgggttatatgttattcagattttaatgattgtattgttaatacctatatatttttatatattaactaagtgattgttaataaaa

SEQ ID NO: 2285 - DNA, 3718 bp, Diabrotica virgifera
  SmartBlast Evalue=1E-74; Info="Phytanoyl-CoA dioxygenase, peroxisomal, putative n=1 Tax=Pediculus humanus corporis RepID= E0VKX4_PEDHC"
aacaatctttgaccagttctaaaatacataaatattatacaatgttggaaaaattactatttcatagaaagttattgttgttatctacttggactagcattaaaggcaaaatggctttgaggtacactcatcccagctcaaagttgacacttgctcaaagacaattttatgaacgaaatggattcattgtcgtaagaaaaaacgttagccctgaattaatagaagttttgaatcagagatttattgatatttgtgaagatcgtgccgatgatatgcaatgtttcgttatcaaagacccagtactaaggaaaaaaggtttaaagggagaggcggtcatgaacaagcttcaagattttgtctttgatccagttttgagtcgttactgtatggaaaagagcttagtagatgctgtggaaaatataatcggaccaaatataacagttgctcattccatgcttatcaacaagcctccagatacagatccagatatatcaagacatcctatgcatcaggatcttcattactttccctttagaccagctgacaaaattgttgcttcctggacagcaatgcagagagtggacgaaaataatggatgccttttcgtagtacctggatcccacattgataatcctttgttaccacatatatatcctgagggtaaaaataatgccatgtaccacggagtacaaaataaggaccatctacccaaacagtttgtggtattagataaaggtgatactgtgttcttccatcctttactgttgcacgggtctggagtaaatcgcacaaaaggttatagacgagctatatcatgccattttgcggatacaaattgcgaatttattgacgtcacaggaacacttcaagagaatattagaaaagaagttgaaaccataactatcaaacgtggaatgccaatgtctttcatagatgtatggaaaagtaaaagtaggttagtccgggggccacctggaaatttccaaagatacgacagtcatctttagtaacgtgcctttatcaaagaagttgctatttttgtatcggagtaatattttttcagataatccaattatgggtttgcataattaacttgttttagatattgtagccataatgtgttaaaaaaggtatttggaagtatgtactgaaaagtcaaaagagattgcagagttgactgttaatctcagtctttagtcattactctggaatatctctaaaaatcatatgcatgatgagcttgcactatcttgtcaattaaattgtcaaattatttattaaaatcctttataaggtatatttatattaaaaagaccctttcgggcagaccctacagattgttttcgacataaaaatttcatcatcagcgctgctaacctgaaataagtacatataatcacttataaatgcaaacatgaatattaaattttgactaaggttaaaaatacataaggattatgcttacaggtgtacctacatgcttgagccaccaaaatatatgggtaaaaatcctttgaatgttatgaacttgtagaaaagttacatgttcacataaaataatatgtgatgtttaaaatactcaggggcgtcaattcaaattttgattgaggggggcaagcacaaaaagcaaaattcgttgttaccgaatttttcttttttttttcgaagctgctatattgtcagtgatacgtatgatttcattcagagatgggtatttatacaaaaaaaaaagtttttaccgctcaccggaatatcaaaatgatttaatcgatgagtattcttcaagactgctgaaaaatattatcacaaaaggtaatcaagtcgaattctttgctataatggctgatgaaaccaaagatacagctgaaaccaaatcggaacagcttgcaattttaatccgttatgttgatgctgagggcacaaaaatttatgaacgtgctatcgggctgcaccatcttaaggactgtggtgccgaaagtatagccaacgccatacaatcgatgttatcggataaaagactagacatagaaaactgcgttggtcagtgttacgacggagcgaatgtcatcagcggggtccaggcgagaattaaaaatttagcccctcatgctacgtacttccactgtgaggctgatcgactaaatctagttgtagtggatgtgttgggtaacattgacaaagttaaagacttttttctacagttcaaactctatcgattcatttccaacactgctactcgccatcagctttttgtaaaaatacaacagaggatgaataaaccactactaaatttggaaaggactgtaacgtaacaagatactggttgaatgcagtatcgaaaattcgatagacatgccagaccattttagctgttctagatgaaggaaaaaggccagggcagagagtatcggaataaaagcgcagataatgcagaaaatcttcatatttctcctttgttctatggagaagatattaggcgttacttattgtctatcacagcagctacaagccaaagaacttgacttagcaacggccatgcatctaatcaaaagtaccaaagaagaacttaaaaaatccagaactgacgacacataccgagaggtttggacgatgactgttcctcatagactcgctataagcgtattaatgtcaacaactggcaataaatataccgaaacaaaggcatatacttcgaagttatcgacagcattctcatggaacacaatcgtcgcttctcagaaaatgaaggatgccccggtctgttcgcagtaccggatgcctttaagaaagaaaatcaagcattcatggcggaagaggaattaaagccattaatagaaaactacaaaaattttctaaatatataacttctacatctgcaactgcctttagtcaataaccatttacaaacatgcgatgaagactccgttttgtcactactcgaatctctcagagtgcttctagtggcatactcagaagtgattcatatttgtgctacactgcctatcaccacagttggaaatgaaacatttttctctgtgctaaaaagagtaaaagggtaggtacctgcgaagttctactggtgatgaaaaattgtcctcacttatgttgatggcagatgaaagaaaagaaacaaaaataataccactagactaagtggtggatgatttttgctgcgaggaaactacgacggtacccattactacactaacgtgacattgagtggttattttgttctattcgtaataaatcattagtattgtaataaagcttaatttcctaattattacaactaaatcatcatagtaataaaatttatgcattttttgtaaattccaatattataggggggggggcaaatgccccctcctatcactattaaatgacgcccttgattaaatactcattgatgttacgtcaggaaacgtaggactccccatactgtggtaaatcagaacataacataaatacctagcactgatttagtgccagatattgatgttatgttctgatttataattatgtatttctgtatacttatacagcaactaaaccacttccgaatacataaatagcatctttagtgaagacttttaaataaattttatatttgagggcttatatttgtaaattttacgggttatatgttattcagattttaatgattgtattgttaatacctatatatttttatatattaactaagtgattgttaataaaa

SEQ ID NO: 2286 - DNA, 3566 bp, Diabrotica virgifera
  SmartBlast Evalue=2E-62; Info=Zinc transporter n=1 Tax=Aedes aegypti RepID=Q16FG6_AEDAE
attataaatgtagtaaaagtgtgatacgatgagtgctcaataacgagtgtgtgctaatcttatatttcgaacgtaacatctcaaccggctcaatctcagtgtagattagtcggtctggaaaacaataaatccaaacaacaaaagcggcaaaaatccgtgtcaagtattttatcaacaactgaacaatgtcactgcttgcaaacgctttcatctgtgctacagacattaacagcacaaattatgacgattcctatcaggaaatagttaaagacttagtgccagactgggtttgtgctctggaatatgttccctggtgctgggccatctttggatctctccttgtcggacttagcggggttttgcctctccttgtcatacccattgatcattcggagaacttgaaacaaggagatggtgccaataaacttaagactctattgagtttcgccgtaggaggacttttgggggacgttttcctgcactccttgcctgaaatttgggccaatgacacagtcacaaaattgggaagtggacacatctcaaacagcggactattgatattaacggggctcatagttttcgtggctgccgaaaaggtattctctgtgatagaacaaatagaagacaatgagaaaagtacatcgcaaagtgtcgagaacaacaataccaaaggactgagtcagccaatcgaacacaaaaaatcggtttccggttatttgaacttggtagctaacaccatggacaacttcacccacggtctgtcattgggtggcgccttcttggtatcccttagactaggactgctgaccaccttcgccattttagtccacgaaatcccccacgaagtcggagacttcgccatcttgcttaagtccggcttcacgaggtggcacgccggcgttttccaacttttgaccgcaggtggcggtctcatcggcgccatggcggccatcttgttcagcggcgcacatacagctcttgaagcgaggagctcctggatattaccatttacagccggcacattccttcacatagctttagtaaccgttcttcccgatttactcaaagaagaagatcccaaagaatcattcaagcaactgttagccttgatcctggggataacagtcatggcgttcgtcaccaacgctttcgagtgatggcgaccacaaaacattatcacaaatgtacttgaagcaatagtttatttgaaataatcagaaatttccataattagtggttagtattattagttgcggttttattaagtgtcaactgtcatttgtcaaaatgtcaactgtcatttgtcaaaatgtcatctgttatttgtcaaaatgacagatgacaataactcaactgtcagttgtcaaaaagatggcgtaaagatatataaattagttctgtagagtataaaagtcctttatgtaattcttactttcaaataaactcttgcactgacaaattaaatgtaattttgacagtttctgaaaggtttgactaaatgtaaatgtcagaattatatatctgttgatttttatacaggcacatcaaacatattgacatacacaattgaagatcgttgtaactgatatctgcagtcaacaatttggaaattgcttcacagctaactcaaattagaagttatgtttcacaactgcataaaataattgttaacaggatcaatattttattgtttatattagtttttgtaaagatatgtttcaccagtacttaaatatcgatcagagacacaaactgtgttagaaaaggtccatggaatgtatcaatatgattttattttttatatcaccttcattgtgcattccggtctcaataattaatgtaaaacgtcaaattttcgtttcaggcgacaattactgatactgcctacaaatagtggtattctttttctcatgatcatctttcagtgcgtcacagtttttccatttctctctaacgcattaaattgtatgtgacagaaaaaaaggcacgtctgtgaatactttggtaattattctagtttggtgattattctagttgtcgatagatggcgccataatcaaaaaagaattatttattaaataaaataatactattatcaatataatctgtacaatttataagactatacaaatgaaagaaaataccattttataaatgcaatagacacaattgatttggttttattccaaattgaaaataaaatttgacaactgtcagatttaactaaaatgtcacgttagaataaatgtcataaatgtgtattatcacggacttcctttttttctataatttgtgacgcattgaaaaatgttcatgaaaaggagaatataaggcttttcatcgattgtcatttgtttcgagcttcttctgtcatctagcaggcaagaccgcctaaatgcggtctaatttctagctatttcagctatgtttaggtatgcagcatgcaaacctgcctttggtcgtatactactaagtgtacttgtaaatatttggttaacgctaattgattggctctattaagtcaaaagatatcaagctttgaatttttccattgaaaataaaattggcctgctagagggataatctgtgtataatattaatatacacggattataccacatattatgacagaagctcgaaataaatgactgaatgaaaagccctatggagcgagacttgtcagaacatgttttggtttcacctaaccttacataacctacaatttatctgaatagctgtctattgagatatattttgtctgccactgtctttttatgaataacaattactgttttacctaaaaacaattaaaaaacatgtgataatgcgcgcgtacgcatttaatattttattaatatgcatacttcgacagattcgattcagttcgcttcagacgctgaaaagtagaaaccttggtcagccgatggtggtggcctcgaatcgaatttaatctaaagctatctttccttaaaaaacgtgtattattcttcttttgggatattcttaaggcaatgccttatctctccattatctatattatatcaaaatattttgatcggatttatgttgggtatttattgcgattacttttacatttaacattacatttctacatttaacattactctatgagctattaaagtatatcataacccaactttttgtaaatgatgctattcccgctctttcactgcggcatttttttggaaggcatgcccaggtgctcactttctactggcaatgaaagtttgaatgcgcatgtgtgacacgcacactgaacactttgcctgacactgatccgtgacatgcgcagtaaaaggtttaactagtttcttaatgatctcagttacaaagatattcacctgtgtaatgtatgatggaaaacgtgccgttctatgctgtgttaaaaccgttgccatattctatgattctctagtgatatgtaattaaaaaatgtatataaatattttatcagtatttttaggtagaatggatatttgatatttgaaggaaataagtcttaaattgataatatgtagttttttaaaatacacattctgttttaa

SEQ ID NO: 2287 - DNA, 3515 bp, Diabrotica virgifera
  SmartBlast Evalue=2E-62; Info=Zinc transporter n=1 Tax=Aedes aegypti RepID=Q16FG6_AEDAE
attataaatgtagtaaaagtgtgatacgatgagtgctcaataacgagtgtgtgctaatcttatatttcgaacgtaacatctcaaccggctcaatctcagtgtagattagtcggtctggaaaacaataaatccaaacaacaaaagcggcaaaaatccgtgtcaagtattttatcaacaactgaacaatgtcactgcttgcaaacgctttcatctgtgctacagacattaacagcacaaattatgacgattcctatcaggaaatagttaaagacttagtgccagactgggtttgtgctctggaatatgttccctggtgctgggccatctttggatctctccttgtcggacttagcggggttttgcctctccttgtcatacccattgatcattcggagaacttgaaacaaggagatggtgccaataaacttaagactctattgagtttcgccgtaggaggacttttgggggacgttttcctgcactccttgcctgaaatttgggccaatgacacagtcacaaaattgggaagtggacacatctcaaacagcggactattgatattaacggggctcatagttttcgtggctgccgaaaaggtattctctgtgatagaacaaatagaagacaatgagaaaagtacatcgcaaagtgtcgagaacaacaataccaaaggactgagtcagccaatcgaacacaaaaaatcggtttccggttatttgaacttggtagctaacaccatggacaacttcacccacggtctgtcattgggtggcgccttcttggtatcccttagactaggactgctgaccaccttcgccattttagtccacgaaatcccccacgaagtcggagacttcgccatcttgcttaagtccggcttcacgaggtggcacgccggcgttttccaacttttgaccgcaggtggcggtctcatcggcgccatggcggccatcttgttcagcggcgcacatacagctcttgaagcgaggagctcctggatattaccatttacagccggcacattccttcacatagctttagtaaccgttcttcccgatttactcaaagaagaagatcccaaagaatcattcaagcaactgttagccttgatcctggggataacagtcatggcgttcgtcaccaacgctttcgagtgatggcgaccacaaaacattatcacaaatgtacttgaagcaatagtttatttgaaataatcagaaatttccataattagtggttagtattattagttgcggttttattaagtgtcaactgtcatttgtcaaaatgtcaactgtcatttgtcaaaatgtcatctgttatttgtcaaaatgacagatgacaataactcaactgtcagttgtcaaaaagatggcgtaaagatatataaattagttctgtagagtataaaagtcctttatgtaattcttactttcaaataaactcttgcactgacaaattaaatgtaattttgacagtttctgaaaggtttgactaaatgtaaatgtcagaattatatatctgttgatttttatacaggcacatcaaacatattgacatacacaattgaagatcgttgtaactgatatctgcagtcaacaatttggaaattgcttcacagctaactcaaattagaagttatgtttcacaactgcataaaataattgttaacaggatcaatattttattgtttatattagtttttgtaaagatatgtttcaccagtacttaaatatcgatcagagacacaaactgtgttagaaaaggtccatggaatgtatcaatatgattttattttttatatcaccttcattgtgcattccggtctcaataattaatgtaaaacgtcaaattttcgtttcaggcgacaattactgatactgcctacaaatagtggtattctttttctcatgatcatctttcagtgcgtcacagtttttccatttctctctaacgcattaaattgtatgtgacagaaaaaaaggcacgtctgtgaatactttggtaattattctagtttggtgattattctagttgtcgatagatggcgccataatcaaaaaagaattatttattaaataaaataatactattatcaatataatctgtacaatttataagactatacaaatgaaagaaaataccattttataaatgcaatagacacaattgatttggttttattccaaattgaaaataaaatttgacaactgtcagatttaactaaaatgtcacgttagaataaatgtcataaatgtgtattatcacggacttcctttttttctataatttgtgacgcattgaaaaatgttcatgaaaaggagaatataaggcttttcatcgattgtcatttgtttcgagcttcttctgtcatctagcaggcaagaccgcctaaatgcggtctaatttctagctatttcagctatgtttaggtatgcagcatgcaaacctgcctttggtcgtatactactaagtgtacttgtaaatatttggttaacgctaattgattggctctattaagtcaaaagatatcaagctttgaatttttccattgaaaataaaattggcctgctagagggataatctgtgtataatattaatatacacggattataccacatattatgacagaagctcgaaataaatgactgaatgaaaagccctatggagcgagacttgtcagaacatgttttggtttcacctaaccttacataacctacaatttatctgaatagctgtctattgagatatattttgtctgccactgtctttttatgaataacaattactgttttacctaaaaacaattaaaaaacatgtgataatgcgcgcgtacgcatttaatattttattaatatgcatacttcgacagcttcgattcagttcgcttcagacgctgaaaagtagaaaccttggtcagccgatggtggtggcctcgaatcgaatttaatctaaaggcaatgccttatctctccattatctatattatatcaaaatattttgatcggatttatgttgggtatttattgcgattacttttacatttaacattacatttctacatttaacattactctatgagctattaaagtatatcataacccaactttttgtaaatgatgctattcccgctctttcactgcggcatttttttggaaggcatgcccaggtgctcactttctactggcaatgaaagtttgaatgcgcatgtgtgacacgcacactgaacactttgcctgacactgatccgtgacatgcgcagtaaaaggtttaactagtttcttaatgatctcagttacaaagatattcacctgtgtaatgtatgatggaaaacgtgccgttctatgctgtgttaaaaccgttgccatattctatgattctctagtgatatgtaattaaaaaatgtatataaatattttatcagtatttttaggtagaatggatatttgatatttgaaggaaataagtcttaaattgataatatgtagttttttaaaatacacattctgttttaa

SEQ ID NO: 2288 - DNA, 3563 bp, Diabrotica virgifera
  SmartBlast Evalue=2E-62; Info=Zinc transporter n=1 Tax=Aedes aegypti RepID=Q16FG6_AEDAE
attataaatgtagtaaaagtgtgatacgatgagtgctcaataacgagtgtgtgctaatcttatatttcgaacgtaacatctcaaccggctcaatctcagtgtagattagtcggtctggaaaacaataaatccaaacaacaaaagcggcaaaaatccgtgtcaagtattttatcaacaactgaacaatgtcactgcttgcaaacgctttcatctgtgctacagacattaacagcacaaattatgacgattcctatcaggaaatagttaaagacttagtgccagactgggtttgtgctctggaatatgttccctggtgctgggccatctttggatctctccttgtcggacttagcggggttttgcctctccttgtcatacccattgatcattcggagaacttgaaacaaggagatggtgccaataaacttaagactctattgagtttcgccgtaggaggacttttgggggacgttttcctgcactccttgcctgaaatttgggccaatgacacagtcacaaaattgggaagtggacacatctcaaacagcggactattgatattaacggggctcatagttttcgtggctgccgaaaaggtattctctgtgatagaacaaatagaagacaatgagaaaagtacatcgcaaagtgtcgagaacaacaataccaaaggactgagtcagccaatcgaacacaaaaaatcggtttccggttatttgaacttggtagctaacaccatggacaacttcacccacggtctgtcattgggtggcgccttcttggtatcccttagactaggactgctgaccaccttcgccattttagtccacgaaatcccccacgaagtcggagacttcgccatcttgcttaagtccggcttcacgaggtggcacgccggcgttttccaacttttgaccgcaggtggcggtctcatcggcgccatggcggccatcttgttcagcggcgcacatacagctcttgaagcgaggagctcctggatattaccatttacagccggcacattccttcacatagctttagtaaccgttcttcccgatttactcaaagaagaagatcccaaagaatcattcaagcaactgttagccttgatcctggggataacagtcatggcgttcgtcaccaacgctttcgagtgatggcgaccacaaaacattatcacaaatgtacttgaagcaatagtttatttgaaataatcagaaatttccataattagtggttagtattattagttgcggttttattaagtgtcaactgtcatttgtcaaaatgtcaactgtcatttgtcaaaatgtcatctgttatttgtcaaaatgacagatgacaataactcaactgtcagttgtcaaaaagatggcgtaaagatatataaattagttctgtagagtataaaagtcctttatgtaattcttactttcaaataaactcttgcactgacaaattaaatgtaattttgacagtttctgaaaggtttgactaaatgtaaatgtcagaattatatatctgttgatttttatacaggcacatcaaacatattgacatacacaattgaagatcgttgtaactgatatctgcagtcaacaatttggaaattgcttcacagctaactcaaattagaagttatgtttcacaactgcataaaataattgttaacaggatcaatattttattgtttatattagtttttgtaaagatatgtttcaccagtacttaaatatcgatcagagacacaaactgtgttagaaaaggtccatggaatgtatcaatatgattttattttttatatcaccttcattgtgcattccggtctcaataattaatgtaaaacgtcaaattttcgtttcaggcgacaattactgatactgcctacaaatagtggtattctttttctcatgatcatctttcagtgcgtcacagtttttccatttctctctaacgcattaaattgtatgtgacagaaaaaaaggcacgtctgtgaatactttggtaattattctagtttggtgattattctagttgtcgatagatggcgccataatcaaaaaagaattatttattaaataaaataatactattatcaatataatctgtacaatttataagactatacaaatgaaagaaaataccattttataaatgcaatagacacaattgatttggttttattccaaattgaaaataaaatttgacaactgtcagatttaactaaaatgtcacgttagaataaatgtcataaatgtgtattatcacggacttcctttttttctataatttgtgacgcattgaaaaatgttcatgaaaaggagaatataaggcttttcatcgattgtcatttgtttcgagcttcttctgtcatctagcaggcaagaccgcctaaatgcggtctaatttctagctatttcagctatgtttaggtatgcagcatgcaaacctgcctttggtcgtatactactaagtgtacttgtaaatatttggttaacgctaattgattggctctattaagtcaaaagatatcaagctttgaatttttccattgaaaataaaattggcctgctagagggataatctgtgtataatattaatatacacggattataccacatattatgacagaagctcgaaataaatgactgaatgaaaagccctatggagcgagacttgtcagaacatgttttggtttcacctaaccttacataacctacaatttatctgaatagctgtctattgagatatattttgtctgccactgtctttttatgaataacaattactgttttacctaaaaacaattaaaaaacatgtgataatgcgcgcgtacgcatttaatattttattaatatgcatacttcgacagattcgattcagttcgcttcagacgctgaaaattagaaaccttggtcagccgatggtggtggcctcgaatcgaatttaatctaaagctatatttccttaaaaaacgtgtattattcttttgggatattcttaaggcaatgccttatctctccattatctatattatatcaaaatattttgatcggatttatgttgggtatttattgcgattacttttacatttaacattacatttctacatttaacattactctatgagctattgaagtatatcataacccaactttttgtaaatggtgctattcccgctctttcactgcggcatttttttggaaggcatgcccaggtgctcactttctactggcaatgaaagtttgaatgcgcatgtgtgacacgcacactgaacactttgcctgacactgatccgtgacatgcgcagtaaaaggtttaactagtttcttaatgatctcagttacaaagatattcacctgtgtaatgtatgatggaaaacgtgccgttctatgctgtgttaaaaccgttgccatattctatgattctctagtgatatgtaattaaaaaatgtatataaatattttatcagtatttttaggtagaatggatatttgatatttgaaggaaataagtcttaaattgataatatgtagttttttaaaatacacattctgttttaa

SEQ ID NO: 2289 - DNA, 3138 bp, Diabrotica virgifera
  SmartBlast Evalue=2E-62; Info=Zinc transporter n=1 Tax=Aedes aegypti RepID=Q16FG6_AEDAE
attataaatgtagtaaaagtgtgatacgatgagtgctcaataacgagtgtgtgctaatcttatatttcgaacgtaacatctcaaccggctcaatctcagtgtagattagtcggtctggaaaacaataaatccaaacaacaaaagcggcaaaaatccgtgtcaagtattttatcaacaactgaacaatgtcactgcttgcaaacgctttcatctgtgctacagacattaacagcacaaattatgacgattcctatcaggaaatagttaaagacttagtgccagactgggtttgtgctctggaatatgttccctggtgctgggccatctttggatctctccttgtcggacttagcggggttttgcctctccttgtcatacccattgatcattcggagaacttgaaacaaggagatggtgccaataaacttaagactctattgagtttcgccgtaggaggacttttgggggacgttttcctgcactccttgcctgaaatttgggccaatgacacagtcacaaaattgggaagtggacacatctcaaacagcggactattgatattaacggggctcatagttttcgtggctgccgaaaaggtattctctgtgatagaacaaatagaagacaatgagaaaagtacatcgcaaagtgtcgagaacaacaataccaaaggactgagtcagccaatcgaacacaaaaaatcggtttccggttatttgaacttggtagctaacaccatggacaacttcacccacggtctgtcattgggtggcgccttcttggtatcccttagactaggactgctgaccaccttcgccattttagtccacgaaatcccccacgaagtcggagacttcgccatcttgcttaagtccggcttcacgaggtggcacgccggcgttttccaacttttgaccgcaggtggcggtctcatcggcgccatggcggccatcttgttcagcggcgcacatacagctcttgaagcgaggagctcctggatattaccatttacagccggcacattccttcacatagctttagtaaccgttcttcccgatttactcaaagaagaagatcccaaagaatcattcaagcaactgttagccttgatcctggggataacagtcatggcgttcgtcaccaacgctttcgagtgatggcgaccacaaaacattatcacaaatgtacttgaagcaatagtttatttgaaataatcagaaatttccataattagtggttagtattattagttgcggttttattaagtgtcaactgtcatttgtcaaaatgtcaactgtcatttgtcaaaatgtcatctgttatttgtcaaaatgacagatgacaataactcaactgtcagttgtcaaaaagatggcgtaaagatatataaattagttctgtagagtataaaagtcctttatgtaattcttactttcaaataaactcttgcactgacaaattaaatgtaattttgacagtttctgaaaggtttgactaaatgtaaatgtcagaattatatatctgttgatttttatacaggcacatcaaacatattaacatacacaattgaagatcgttgtaactgatatctgcagtcaacaatttggaaattgcttcacagctaactcaaattagaagttatgtttcacaactgcataaaataattgttaacaggatcaatattttattgtttatattagtttttgtaaagatatgtttcactagtacttaaatatcgatcagagacacaaactgtgttagaaaaggtccatggaatgtatcaatatgattttattttttatatcaccttcatttgtgcattccggtctcaataattaatgtaaaacgtcaaattttcgtttcaggcgacaattactgatactgcctacaaatagtggtataaggcttttcatcgattgtcatttgtttcgagcttcttctgtcatctagcaggcaagaccgcctaaatgcggtataatttctagctatttcagctatgtttaggtatgcagcatgcaaacctgcctttggtcgtatactactaagtgtacttgtaaatatttggttaacgctaattgattggctctattaagtcaaaagatatcaagctttgaatttttccattgaaaataaaattggcctgctagagggataatctgtgtataatattaatatacacggattataccacatattatgacagaagctcgaaataaatgactgaatgaaaagccctatggagcgagacttgtcagaacatgttttggtttcacctaaccttacataacctacaatttatctgaatagctgtctattgagatatattttgtctgccactgtctttttatgaataacaattactgttttacctaaaaacaattaaaaaacatgtgataatgcgcgcgtacgcatttaatattttattaatatgcatacttcgacagattcgattcagttcgcttcagacgctgaaaagtagaaaccttggtcagccgatggtggtggcctcgaatcgaatttaatctaaagctatctttccttaaaaaacgtgtattattcttcttttgggatattcttaaggcaatgccttatctctccattatctatattatatcaaaatattttgatcggatttatgttgggtatttattgcgattacttttacatttaacattacatttctacatttaacattactctatgagctattaaagtatatcataacccaactttttgtaaatgatgctattcccgctctttcactgcggcatttttttggaaggcatgcccaggtgctcactttctactggcaatgaaagtttgaatgcgcatgtgtgacacgcacactgaacactttgcctgacactgatccgtgacatgcgcagtaaaaggtttaactagtttcttaatgatctcagttacaaagatattcacctgtgtaatgtatgatggaaaacgtgccgttctatgctgtgttaaaaccgttgccatattctatgattctctagtgatatgtaattaaaaaatgtatataaatattttatcagtatttttaggtagaatggatatttgatatttgaaggaaataagtcttaaattgataatatgtagttttttaaaatacacattctgttttaa

SEQ ID NO: 2290 - DNA, 3087 bp, Diabrotica virgifera
  SmartBlast Evalue=2E-62; Info=Zinc transporter n=1 Tax=Aedes aegypti RepID=Q16FG6_AEDAE
attataaatgtagtaaaagtgtgatacgatgagtgctcaataacgagtgtgtgctaatcttatatttcgaacgtaacatctcaaccggctcaatctcagtgtagattagtcggtctggaaaacaataaatccaaacaacaaaagcggcaaaaatccgtgtcaagtattttatcaacaactgaacaatgtcactgcttgcaaacgctttcatctgtgctacagacattaacagcacaaattatgacgattcctatcaggaaatagttaaagacttagtgccagactgggtttgtgctctggaatatgttccctggtgctgggccatctttggatctctccttgtcggacttagcggggttttgcctctccttgtcatacccattgatcattcggagaacttgaaacaaggagatggtgccaataaacttaagactctattgagtttcgccgtaggaggacttttgggggacgttttcctgcactccttgcctgaaatttgggccaatgacacagtcacaaaattgggaagtggacacatctcaaacagcggactattgatattaacggggctcatagttttcgtggctgccgaaaaggtattctctgtgatagaacaaatagaagacaatgagaaaagtacatcgcaaagtgtcgagaacaacaataccaaaggactgagtcagccaatcgaacacaaaaaatcggtttccggttatttgaacttggtagctaacaccatggacaacttcacccacggtctgtcattgggtggcgccttcttggtatcccttagactaggactgctgaccaccttcgccattttagtccacgaaatcccccacgaagtcggagacttcgccatcttgcttaagtccggcttcacgaggtggcacgccggcgttttccaacttttgaccgcaggtggcggtctcatcggcgccatggcggccatcttgttcagcggcgcacatacagctcttgaagcgaggagctcctggatattaccatttacagccggcacattccttcacatagctttagtaaccgttcttcccgatttactcaaagaagaagatcccaaagaatcattcaagcaactgttagccttgatcctggggataacagtcatggcgttcgtcaccaacgctttcgagtgatggcgaccacaaaacattatcacaaatgtacttgaagcaatagtttatttgaaataatcagaaatttccataattagtggttagtattattagttgcggttttattaagtgtcaactgtcatttgtcaaaatgtcaactgtcatttgtcaaaatgtcatctgttatttgtcaaaatgacagatgacaataactcaactgtcagttgtcaaaaagatggcgtaaagatatataaattagttctgtagagtataaaagtcctttatgtaattcttactttcaaataaactcttgcactgacaaattaaatgtaattttgacagtttctgaaaggtttgactaaatgtaaatgtcagaattatatatctgttgatttttatacaggcacatcaaacatattaacatacacaattgaagatcgttgtaactgatatctgcagtcaacaatttggaaattgcttcacagctaactcaaattagaagttatgtttcacaactgcataaaataattgttaacaggatcaatattttattgtttatattagtttttgtaaagatatgtttcactagtacttaaatatcgatcagagacacaaactgtgttagaaaaggtccatggaatgtatcaatatgattttattttttatatcaccttcatttgtgcattccggtctcaataattaatgtaaaacgtcaaattttcgtttcaggcgacaattactgatactgcctacaaatagtggtataaggcttttcatcgattgtcatttgtttcgagcttcttctgtcatctagcaggcaagaccgcctaaatgcggtataatttctagctatttcagctatgtttaggtatgcagcatgcaaacctgcctttggtcgtatactactaagtgtacttgtaaatatttggttaacgctaattgattggctctattaagtcaaaagatatcaagctttgaatttttccattgaaaataaaattggcctgctagagggataatctgtgtataatattaatatacacggattataccacatattatgacagaagctcgaaataaatgactgaatgaaaagccctatggagcgagacttgtcagaacatgttttggtttcacctaaccttacataacctacaatttatctgaatagctgtctattgagatatattttgtctgccactgtctttttatgaataacaattactgttttacctaaaaacaattaaaaaacatgtgataatgcgcgcgtacgcatttaatattttattaatatgcatacttcgacagcttcgattcagttcgcttcagacgctgaaaagtagaaaccttggtcagccgatggtggtggcctcgaatcgaatttaatctaaaggcaatgccttatctctccattatctatattatatcaaaatattttgatcggatttatgttgggtatttattgcgattacttttacatttaacattacatttctacatttaacattactctatgagctattaaagtatatcataacccaactttttgtaaatgatgctattcccgctctttcactgcggcatttttttggaaggcatgcccaggtgctcactttctactggcaatgaaagtttgaatgcgcatgtgtgacacgcacactgaacactttgcctgacactgatccgtgacatgcgcagtaaaaggtttaactagtttcttaatgatctcagttacaaagatattcacctgtgtaatgtatgatggaaaacgtgccgttctatgctgtgttaaaaccgttgccatattctatgattctctagtgatatgtaattaaaaaatgtatataaatattttatcagtatttttaggtagaatggatatttgatatttgaaggaaataagtcttaaattgataatatgtagttttttaaaatacacattctgttttaa

SEQ ID NO: 2291 - DNA, 3135 bp, Diabrotica virgifera
  SmartBlast Evalue=2E-62; Info=Zinc transporter n=1 Tax=Aedes aegypti RepID=Q16FG6_AEDAE
attataaatgtagtaaaagtgtgatacgatgagtgctcaataacgagtgtgtgctaatcttatatttcgaacgtaacatctcaaccggctcaatctcagtgtagattagtcggtctggaaaacaataaatccaaacaacaaaagcggcaaaaatccgtgtcaagtattttatcaacaactgaacaatgtcactgcttgcaaacgctttcatctgtgctacagacattaacagcacaaattatgacgattcctatcaggaaatagttaaagacttagtgccagactgggtttgtgctctggaatatgttccctggtgctgggccatctttggatctctccttgtcggacttagcggggttttgcctctccttgtcatacccattgatcattcggagaacttgaaacaaggagatggtgccaataaacttaagactctattgagtttcgccgtaggaggacttttgggggacgttttcctgcactccttgcctgaaatttgggccaatgacacagtcacaaaattgggaagtggacacatctcaaacagcggactattgatattaacggggctcatagttttcgtggctgccgaaaaggtattctctgtgatagaacaaatagaagacaatgagaaaagtacatcgcaaagtgtcgagaacaacaataccaaaggactgagtcagccaatcgaacacaaaaaatcggtttccggttatttgaacttggtagctaacaccatggacaacttcacccacggtctgtcattgggtggcgccttcttggtatcccttagactaggactgctgaccaccttcgccattttagtccacgaaatcccccacgaagtcggagacttcgccatcttgcttaagtccggcttcacgaggtggcacgccggcgttttccaacttttgaccgcaggtggcggtctcatcggcgccatggcggccatcttgttcagcggcgcacatacagctcttgaagcgaggagctcctggatattaccatttacagccggcacattccttcacatagctttagtaaccgttcttcccgatttactcaaagaagaagatcccaaagaatcattcaagcaactgttagccttgatcctggggataacagtcatggcgttcgtcaccaacgctttcgagtgatggcgaccacaaaacattatcacaaatgtacttgaagcaatagtttatttgaaataatcagaaatttccataattagtggttagtattattagttgcggttttattaagtgtcaactgtcatttgtcaaaatgtcaactgtcatttgtcaaaatgtcatctgttatttgtcaaaatgacagatgacaataactcaactgtcagttgtcaaaaagatggcgtaaagatatataaattagttctgtagagtataaaagtcctttatgtaattcttactttcaaataaactcttgcactgacaaattaaatgtaattttgacagtttctgaaaggtttgactaaatgtaaatgtcagaattatatatctgttgatttttatacaggcacatcaaacatattaacatacacaattgaagatcgttgtaactgatatctgcagtcaacaatttggaaattgcttcacagctaactcaaattagaagttatgtttcacaactgcataaaataattgttaacaggatcaatattttattgtttatattagtttttgtaaagatatgtttcactagtacttaaatatcgatcagagacacaaactgtgttagaaaaggtccatggaatgtatcaatatgattttattttttatatcaccttcatttgtgcattccggtctcaataattaatgtaaaacgtcaaattttcgtttcaggcgacaattactgatactgcctacaaatagtggtataaggcttttcatcgattgtcatttgtttcgagcttcttctgtcatctagcaggcaagaccgcctaaatgcggtataatttctagctatttcagctatgtttaggtatgcagcatgcaaacctgcctttggtcgtatactactaagtgtacttgtaaatatttggttaacgctaattgattggctctattaagtcaaaagatatcaagctttgaatttttccattgaaaataaaattggcctgctagagggataatctgtgtataatattaatatacacggattataccacatattatgacagaagctcgaaataaatgactgaatgaaaagccctatggagcgagacttgtcagaacatgttttggtttcacctaaccttacataacctacaatttatctgaatagctgtctattgagatatattttgtctgccactgtctttttatgaataacaattactgttttacctaaaaacaattaaaaaacatgtgataatgcgcgcgtacgcatttaatattttattaatatgcatacttcgacagattcgattcagttcgcttcagacgctgaaaattagaaaccttggtcagccgatggtggtggcctcgaatcgaatttaatctaaagctatatttccttaaaaaacgtgtattattcttttgggatattcttaaggcaatgccttatctctccattatctatattatatcaaaatattttgatcggatttatgttgggtatttattgcgattacttttacatttaacattacatttctacatttaacattactctatgagctattgaagtatatcataacccaactttttgtaaatggtgctattcccgctctttcactgcggcatttttttggaaggcatgcccaggtgctcactttctactggcaatgaaagtttgaatgcgcatgtgtgacacgcacactgaacactttgcctgacactgatccgtgacatgcgcagtaaaaggtttaactagtttcttaatgatctcagttacaaagatattcacctgtgtaatgtatgatggaaaacgtgccgttctatgctgtgttaaaaccgttgccatattctatgattctctagtgatatgtaattaaaaaatgtatataaatattttatcagtatttttaggtagaatggatatttgatatttgaaggaaataagtcttaaattgataatatgtagttttttaaaatacacattctgttttaa

SEQ ID NO: 2292 - DNA, 2021 bp, Diabrotica virgifera
  SmartBlast Evalue=2E-19; Info="Juvenile hormone-inducible protein, putative n=1 Tax=Aedes aegypti RepID=Q17DF4_AEDAE"
aaaaacgaaacatatttttaaatcaagtagttaattgtattgtttcacaattgccgtttgagttacacaatggcagaaaacggtatgagtattgatctcaatcaagtagtacaaacggctctctctgattttgagaacgtgcagttggtatcggagaaaaacgacaaagaagacgaccgtcaagtgctagctgacgtgaagacaagtggcgaaaatttaaatctggtgatcaaactaggaaagggtgtaaatgtagcggagggcttccaaagggaagcttacgtattaaacagagttactcccctatttaaggatatacaaaagtacttgaggatacagaatccagtgcaagagtttcaaaaatgctacaaagtcttcaaccaggaaggtacagaaatcatcgtattagatgatattgaaaaaagaggattcgaagctgtgtctggtgatttgagtgagcacaacttcaaattaatactaaatacaattgccaaatttcatgctctatctttcgccttgcgtcatattcacaaagaaaagttcgatgaagtactctccaactgccaagtcgttacgaagactatgttagaagaagttgctcaattctttgatgctcgacttgagaaattgaagttcagtcttaagctccgtatgaggttagatctgttaaagaattttgaagatgcgttagaaaattttaacggaagaagcattattgatattctaaatcaaagtgtagagcattctgttttagttcatggagattaccatcagaacaacactttgttaaagtttgcgggacaagacaagacacatgccattgatgtagctcttaccggtttccaagcttccggactccattccccggtcatcgatctatcgtactacttcttcagcagtttaggatgcggattcttccccaacgtttccgaattcttgaaatattactacgaacaactgacgtcttttcttaaagagctcggttgtgacgttgcacaaatatatactttcgaaaaacttcaagaacactggcagcaatactccttttatggattttgcctttcgatcgcctatttggaactgggttcaataaacttcgaaaaacattttaggaaggaaaacgaagagagttctgaggtagaaaaacctgcagtaggtgctccaaatgttgcaagtgctaatgcttatagacaaaaacttgaaaagatcgtagagttctttttagaagctcaacaagaattttattaatatggtaaagtgttttatatactccgtctaatatacttacagctgcacgtcatccgcgtcatagcccgtgatgtcacatgataccaacacgaaatatttaggcggtaggtgtgttccttttcagaatcattttgctgagtacactggaattacagccactagatatattttattatatacgcgtagaaataatatttgaagatttccattaatgttaacttaaagaaatacacaataatatgtttcatttaatgtgtataaatagattacaaagcgtttttatgaagaacatttgttcgaaaaacgttgtaactttaatcgaacgaaggtgatactttggcataaattggtaacatttatttgacagttacggtgatgacacttcatatttgtttttattctttactataagtatttgttttattatacatttttactgtttttagtatttactttaacataaggttatttttttagttcttgttatctttctatttatttacattcaatattaatttgttttgttctataatccacgtttgcaataattatttgatctatttgatttaaaatggattcaggatttttttatactttggtaactatgtcaacttagatttctgacgtagataatgacgtgcaacagtaagtatattagacgcactgtatgcatagatgtatataaagtcaaaacaactggttaaaattgctgttttttatagcatatatctaaatacaaataaaagctatatatttagtcttgtcatctaaac

SEQ ID NO: 2293 - DNA, 2021 bp, Diabrotica virgifera
  SmartBlast Evalue=2E-19; Info="Juvenile hormone-inducible protein, putative n=1 Tax=Aedes aegypti RepID=Q17DF4_AEDAE"
aaaaacgaaacatatttttaaatcaagtagttaattgtattgtttcacaattgccgtttgagttacacaatggcagaaaacggtatgagtattgatctcaatcaagtagtacaaacggctctctctgattttgagaacgtgcagttggtatcggagaaaaacgacaaagaagacgaccgtcaagtgctagctgacgtgaagacaagtggcgaaaatttaaatctggtgatcaaactaggaaagggtgtaaatgtagcggagggcttccaaagggaagcttacgtattaaacagagttactcccctatttaaggatatacaaaagtacttgaggatacagaatccagtgcaagagtttcaaaaatgctacaaagtcttcaaccaggaaggtacagaaatcatcgtattagatgatattgaaaaaagaggattcgaagctgtgtctggtgatttgagtgagcacaacttcaaattaatactaaatacaattgccaaatttcatgctctatctttcgccttgcgtcatattcacaaagaaaagttcgatgaagtactctccaactgccaagtcgttacgaagactatgttagaagaagttgctcaattctttgatgctcgacttgagaaattgaagttcagtcttaagctccgtatgaggttagatctgttaaagaattttgaagatgcgttagaaaattttaacggaagaagcattattgatattctaaatcaaagtgtagagcattctgttttagttcatggagattaccatcagaacaacactttgttaaagtttgcgggacaagacaagacacatgccattgatgtagctcttaccggtttccaagcttccggactccattccccggtcatcgatctatcgtactacttcttcagcagtttaggatgcggattcttccccaacgtttccgaattcttgaaatattactacgaacaactgacgtcttttcttaaagagctcggttgtgacgttgcacaaatatatactttcgaaaaacttcaagaacactggcagcaatactccttttatggattttgcctttcgatcgcctatttggaactgggttcaataaacttcgaaaaacattttaggaaggaaaacgaagagagttctgaggtagaaaaacctgcagtaggtgctccaaatgttgcaagtgctaatgcttatagacaaaaacttgaaaagatcgtagagttctttttagaagctcaacaagaattttattaatatggtaaagtgttttatatactccgtctaatatacttacagctgcacgtcatccgcgtcatagcccgtgatgtcacatgataccaacacgaaatatttaggcggtaggtgtgttccttttcagaatcattttgctgagtacactggaattacagccactagacatattttattatatacgcgtagaaataatatttgaagacttccattaatgttaacttaaagaaatacacaataatatgtttcatttaatgtgtataaatggattacaaagcgtttttatgaaggacatttgttcgaaaaacattgtaactttaatcgaacgaaggtgatactttggcataaattggtaacatttatttgacagttacggtgatgacacttcatatttgtttttattctttactataagtatttgttttattatacatttttactgtttttagtatttacttaaacataaggttatttttttagttcttgttatctttctatttatttacattcaatattaatttgttttgttctataatccacgtttgcaataattatttgatctatttgatttaaaatggattcaggatttttttatactttggtaactatgtcaacttagatttctgacgtagataatgacgtgcaacagtaagtatattagacgcactgtatgcatagatgtatataaagtcaaaacaactggttaaaattgctgttttttatagcatatatctaaatacaaataaaagctatatatttagtcttgtcatctaaac

SEQ ID NO: 2294 - DNA, 2021 bp, Diabrotica virgifera
  SmartBlast Evalue=1E-19; Info="Juvenile hormone-inducible protein, putative n=1 Tax=Aedes aegypti RepID=Q17DF4_AEDAE"
aaaaacgaaacatatttttaaatcaagtagttaattgtattgtttcacaattgccgtttgagttacacaatggcagaaaacggtatgagtattgatctcaatcaagtagtacaaacggctctctctgattttgagaacgtgcagttggtatcggagaaaaacgacaaagaagacgaccgtcaagtgctagctgacgtgaagacaagtggcgaaaatttaaatctggtgatcaaactaggaaagggtgtaaatgtagcggagggcttccaaagggaagcttacgtattaaacagagttactcccctatttaaggatatacaaaagtacttgaggatacagaatccagtgcaagagtttcaaaaatgctacaaagtcttcaaccaggaaggtacagaaatcatcgtattagatgatattgaaaaaagaggattcgaagctgtgtctggtgatttgagtgagcacaatttcaaactaatactaaatacaattgccaaatttcatgctctatctttcgccttgcgtcatattcacaaagaaaagttcgatgaagtactctccaactgccaagtcgttacgaagactatgttagcagaagtggctcaattctttgatgctcgacttgagaaattgaagttcagtcttaagctccgtatgaggttagatctgttaaagaattttgaagatgcgttagaaaattttaacggaagaagtatcattgatattctaaatcaaagtgtcgagcattctgttttagttcatggagattaccatcagaacaacactttgttaaagtttgcgggacaagacaagacacatgccattgatgtagctcttaccggtttccaagcttccggactccattccccggtcatcgatctatcgtactacttcttcagcagtttaggatgcggattcttccccaacgtttccgaattcttgaaatattactacgaacaactgacgtcttttcttaaagagctcggttgtgacgttgcacaaatatatactttcgaaaaacttcaagaacactggcagcaatactccttttatggattttgcctttcgatcgcctatttggaactgggttcaataaacttcgaaaaacattttaggaaggaaaacgaagagagttctgaggtagaaaaacctgcagtaggtgctccaaatgttgcaagtgctaatgcttatagacaaaaacttgaaaagatcgtagagttctttttagaagctcaacaagaattttattaatatggtaaagtgttttatatactccgtctaatatacttacagctgcacgtcatccgcgtcatagcccgtgatgtcacatgataccaacacgaaatatttaggcggtaggtgtgttccttttcagaatcattttgctgagtacactggaattacagccactagatatattttattatatacgcgtagaaataatatttgaagatttccattaatgttaacttaaagaaatacacaataatatgtttcatttaatgtgtataaatagattacaaagcgtttttatgaagaacatttgttcgaaaaacgttgtaactttaatcgaacgaaggtgatactttggcataaattggtaacatttatttgacagttacggtgatgacacttcatatttgtttttattctttactataagtatttgttttattatacatttttactgtttttagtatttactttaacataaggttatttttttagttcttgttatctttctatttatttacattcaatattaatttgttttgttctataatccacgtttgcaataattatttgatctatttgatttaaaatggattcaggatttttttatactttggtaactatgtcaacttagatttctgacgtagataatgacgtgcaacagtaagtatattagacgcactgtatgcatagatgtatataaagtcaaaacaactggttaaaattgctgttttttatagcatatatctaaatacaaataaaagctatatatttagtcttgtcatctaaac

SEQ ID NO: 2295 - DNA, 2021 bp, Diabrotica virgifera
  SmartBlast Evalue=1E-19; Info="Juvenile hormone-inducible protein, putative n=1 Tax=Aedes aegypti RepID=Q17DF4_AEDAE"
aaaaacgaaacatatttttaaatcaagtagttaattgtattgtttcacaattgccgtttgagttacacaatggcagaaaacggtatgagtattgatctcaatcaagtagtacaaacggctctctctgattttgagaacgtgcagttggtatcggagaaaaacgacaaagaagacgaccgtcaagtgctagctgacgtgaagacaagtggcgaaaatttaaatctggtgatcaaactaggaaagggtgtaaatgtagcggagggcttccaaagggaagcttacgtattaaacagagttactcccctatttaaggatatacaaaagtacttgaggatacagaatccagtgcaagagtttcaaaaatgctacaaagtcttcaaccaggaaggtacagaaatcatcgtattagatgatattgaaaaaagaggattcgaagctgtgtctggtgatttgagtgagcacaatttcaaactaatactaaatacaattgccaaatttcatgctctatctttcgccttgcgtcatattcacaaagaaaagttcgatgaagtactctccaactgccaagtcgttacgaagactatgttagcagaagtggctcaattctttgatgctcgacttgagaaattgaagttcagtcttaagctccgtatgaggttagatctgttaaagaattttgaagatgcgttagaaaattttaacggaagaagtatcattgatattctaaatcaaagtgtcgagcattctgttttagttcatggagattaccatcagaacaacactttgttaaagtttgcgggacaagacaagacacatgccattgatgtagctcttaccggtttccaagcttccggactccattccccggtcatcgatctatcgtactacttcttcagcagtttaggatgcggattcttccccaacgtttccgaattcttgaaatattactacgaacaactgacgtcttttcttaaagagctcggttgtgacgttgcacaaatatatactttcgaaaaacttcaagaacactggcagcaatactccttttatggattttgcctttcgatcgcctatttggaactgggttcaataaacttcgaaaaacattttaggaaggaaaacgaagagagttctgaggtagaaaaacctgcagtaggtgctccaaatgttgcaagtgctaatgcttatagacaaaaacttgaaaagatcgtagagttctttttagaagctcaacaagaattttattaatatggtaaagtgttttatatactccgtctaatatacttacagctgcacgtcatccgcgtcatagcccgtgatgtcacatgataccaacacgaaatatttaggcggtaggtgtgttccttttcagaatcattttgctgagtacactggaattacagccactagacatattttattatatacgcgtagaaataatatttgaagacttccattaatgttaacttaaagaaatacacaataatatgtttcatttaatgtgtataaatggattacaaagcgtttttatgaaggacatttgttcgaaaaacattgtaactttaatcgaacgaaggtgatactttggcataaattggtaacatttatttgacagttacggtgatgacacttcatatttgtttttattctttactataagtatttgttttattatacatttttactgtttttagtatttacttaaacataaggttatttttttagttcttgttatctttctatttatttacattcaatattaatttgttttgttctataatccacgtttgcaataattatttgatctatttgatttaaaatggattcaggatttttttatactttggtaactatgtcaacttagatttctgacgtagataatgacgtgcaacagtaagtatattagacgcactgtatgcatagatgtatataaagtcaaaacaactggttaaaattgctgttttttatagcatatatctaaatacaaataaaagctatatatttagtcttgtcatctaaac

SEQ ID NO: 2296 - DNA, 2021 bp, Diabrotica virgifera
  SmartBlast Evalue=1E-19; Info="Juvenile hormone-inducible protein, putative n=1 Tax=Aedes aegypti RepID=Q17DF4_AEDAE"
aaaaacgaaacatatttttaaatcaagtagttaattgtattgtttcacaattgccgtttgagttacacaatggcagaaaacggtatgagtattgatctcaatcaagtagtacaaacggctctctctgattttgagaacgtgcagttggtatcggagaaaaacgacaaagaagacgaccgtcaagtgctagctgacgtgaagacaagtggcgaaaatttaaatctggtgatcaaactaggaaagggtgtaaatgtagcggagggcttccaaagggaagcttacgtattaaacagagttactcccctatttaaggatatacaaaagtacttgaggatacagaatccagtgcaagagtttcaaaaatgctacaaagtcttcaaccaggaaggtacagaaatcatcgtattagatgatattgaaaaaagaggattcgaagctgtgtctggtgatttgagtgagcacaacttcaaattaatactaaatacaattgccaaatttcatgctctatctttcgccttgcgtcatattcacaaagaaaagttcgatgaagtactctccaactgccaagtcgttacgaagactatgttagaagaagttgctcaattctttgatgctcgacttgagaaattgaagttcagtcttaagctccgtatgaggttagatctgttaaagaattttgaagatgcgttagaaaattttaacggaagaagcattattgatattctaaatcaaagtgtagagcattctgttttagttcatggagattaccatcagaacaacactttgttaaagtttgcgggacaagacaagacacatgccattgatgtagctcttaccggtttccaagcttccggactccattccccggtcatcgatctatcgtactacttcttcagcagtttaggatgcggattcttccccaacgtttccgaattcttgaaatattactacgagcaactgacgtcttttcttaaagagctcggttgtgacgttgcacaaatatatactttcgaaaaacttcaagaacactggcggcaatactccttttatggattttgcctttcgatcgcctatttggaactgggttcaataaacttcgaaaaacattttagaaaggaaaacgaagagagttctgaggtagaaaaacctgcagtaggtgctccaaatgttgcaagtgctaacgcttatagacaaaaacttgaaaagatcgtagagttctttttagaagctcaacaagaattttattaatattgtaaagtgttttatatactccgtctaatatacttacagctgcacgtcatccgtgtcatagcccgtgatgtcacatgataccaacacgaaatatttaggcggtaggtgtgttccttttcagaatcattctgctgagtacactggaattacagccactagacatattttattatatacgcgtagaaataatatttacagatttctattaatgttaacttaaagaaatacacaatactatgtttaatttaatgtgcataaatggattatcaagagtttttatgaagaaaatttgttcggaaaacattgtaactttaatcgaacgaaggtgatactttggcataaattggtaacatttatttgacagttacggtgatgacagttcatatttgtttttattctttactataagtatttgttttattacacatatttattgtttttagtatttactttaacgtaaggttatttttttagttcttgttatctttctatttatttacattcaatattaatttgttttgttctataatccacgtttgcaataattatttgatctatttgatttaaaatggattcaggatttttttatactttggtaactatgtcaacttagatttctgacgtagataatgacgtgcaacagtaagtatattagacgcactgtatgcatagatgtatataaagtcaaaacaactggttaaaattgctgttttttatagcatatatctaaatacaaataaaagctatatatttagtcttgtcatctaaac

SEQ ID NO: 2297 - DNA, 2021 bp, Diabrotica virgifera
  SmartBlast Evalue=1E-19; Info="Juvenile hormone-inducible protein, putative n=1 Tax=Aedes aegypti RepID=Q17DF4_AEDAE"
aaaaacgaaacatatttttaaatcaagtagttaattgtattgtttcacaattgccgtttgagttacacaatggcagaaaacggtatgagtattgatctcaatcaagtagtacaaacggctctctctgattttgagaacgtgcagttggtatcggagaaaaacgacaaagaagacgaccgtcaagtgctagctgacgtgaagacaagtggcgaaaatttaaatctggtgatcaaactaggaaagggtgtaaatgtagcggagggcttccaaagggaagcttacgtattaaacagagttactcccctatttaaggatatacaaaagtacttgaggatacagaatccagtgcaagagtttcaaaaatgctacaaagtcttcaaccaggaaggtacagaaatcatcgtattagatgatattgaaaaaagaggattcgaagctgtgtctggtgatttgagtgagcacaatttcaaactaatactaaatacaattgccaaatttcatgctctatctttcgccttgcgtcatattcacaaagaaaagttcgatgaagtactctccaactgccaagtcgttacgaagactatgttagcagaagtggctcaattctttgatgctcgacttgagaaattgaagttcagtcttaagctccgtatgaggttagatctgttaaagaattttgaagatgcgttagaaaattttaacggaagaagtatcattgatattctaaatcaaagtgtcgagcattctgttttagttcatggagattaccatcagaacaacactttgttaaagtttgcgggacaagacaagacacatgccattgatgtagctcttaccggtttccaagcttccggactccattccccggtcatcgatctatcgtactacttcttcagcagtttaggatgcggattcttccccaacgtttccgaattcttgaaatattactacgagcaactgacgtcttttcttaaagagctcggttgtgacgttgcacaaatatatactttcgaaaaacttcaagaacactggcggcaatactccttttatggattttgcctttcgatcgcctatttggaactgggttcaataaacttcgaaaaacattttagaaaggaaaacgaagagagttctgaggtagaaaaacctgcagtaggtgctccaaatgttgcaagtgctaacgcttatagacaaaaacttgaaaagatcgtagagttctttttagaagctcaacaagaattttattaatattgtaaagtgttttatatactccgtctaatatacttacagctgcacgtcatccgtgtcatagcccgtgatgtcacatgataccaacacgaaatatttaggcggtaggtgtgttccttttcagaatcattctgctgagtacactggaattacagccactagacatattttattatatacgcgtagaaataatatttacagatttctattaatgttaacttaaagaaatacacaatactatgtttaatttaatgtgcataaatggattatcaagagtttttatgaagaaaatttgttcggaaaacattgtaactttaatcgaacgaaggtgatactttggcataaattggtaacatttatttgacagttacggtgatgacagttcatatttgtttttattctttactataagtatttgttttattacacatatttattgtttttagtatttactttaacgtaaggttatttttttagttcttgttatctttctatttatttacattcaatattaatttgttttgttctataatccacgtttgcaataattatttgatctatttgatttaaaatggattcaggatttttttatactttggtaactatgtcaacttagatttctgacgtagataatgacgtgcaacagtaagtatattagacgcactgtatgcatagatgtatataaagtcaaaacaactggttaaaattgctgttttttatagcatatatctaaatacaaataaaagctatatatttagtcttgtcatctaaac

SEQ ID NO: 2298 - DNA, 2003 bp, Diabrotica virgifera
  SmartBlast Evalue=0; Info=Asparagine synthetase [glutamine- hydrolyzing] n=1 Tax=Harpegnathos saltator RepID=E2BXP2_9HYME
agtcaacaatgaagagatcgtttattttgttacatttttagctttcaattatattgaaagttattgtttttaaaaatacagattttaaaaatttgatttttcagatcattttgtttaataaattaattaaaaaatgcatatttttgcattgtcctgttatttaagtacacctagatattagtgaccgttgatttctggtttttcgtcggccgcgtaatgtttaataaacctagctgaaggatctgtgactccctcgcaccatctcggcatccaatagtaaggcaaaaagttttgggctagtttggggtagctcttttcgaagacttccctataatagtacgcctcttttgtagtcggggtgcagtgtgggtacttatgtttggctttttctaaatcaaacggctctggcattcttttgtcgattatttcttgaattatcacgaacaaggattttgtgtttgaggctactccatcactgaaagcttctttatgcctccagagaatttcatgtggcaagagatcggtaccatcaaaagcagatcgtaataaatacttttctacattgtttttgggttgtttaagtgttttttccaagttcaggtaatagtcagtgaactgcaggtccaaaaatggtactcttagttccagactttgcgaagctgtcgtcctgtcagctctcaatccatcaaacaaataaatttctcttaacaaccgtaaactgtcttcgtgtgctgcttgcggtgaaggagcatctctgaaataaatataaccttgtgcgatctcatccgctccttctccgctcaacaaaacggtcgtttctgtgttttcttgtatatactttgagatcagatacattggaattgacgctcgaattgtggtaatgtctggtgtttctaatgtgtatatgacgtcatctaagaccttggctacatcctcttctgtaaaggatacttcgtggtgatctgtgccgacgtgtttagcaacaacgcgggcggctctgagatccggactgtcgcccattccaattgagaatgactgaactttatatgggacgttggcagatttagcttcttttaccagtagtgctgctatcaatgaagaatccagtcctccagataacatacagcctatctttctttctgccatcaatctttttttcacagacatttgcaataatttcctaatgttagcttgatgatcgttggggattaggtcttcatacggcaaaaaaggtttgaacgatggtctatctccaggcgaaaagtacctctggcttcggactagttttactttaccattttctagtaaatcgtattcttcaaaagttccaggagggaatggttctatttttttcgattctccgttcagatctttctcaataccgaccaaacctttggcttcggaacagattcctaggacaccgctgctacttatcactttgaaaagtggtctcactccataaggatctcttcctaacaaaactttccttctgggaacatcgatcagacaaaaagcaaagacaccgtctagattcttaacacattcttcgatgccgaacttttcgtacaagtggaaaatgcattctacgtcacatctggtttcgtaatcgaagtcgtattgttctcctagcctttggaagttgtaaagttctccattacaaatcagcatggaatggggatactgatgcaacttcatgggctgcataccaaatttgcaacccacaatggccaaacggtggaagccaatacagcaattcttaagtttgttgtcatactcaactctccatgcatctggacctctatgaccaatttggcaaaaagttgaagcgcaatgggaatgtatgttagaagtgagtccaaaaacagcccaaattccacacatgtttgtttagttcagttactttattttctataatcagttagacttaaaacattaaaaagatcactagcgtttgaaaccttctttgccactcagacctaaccaccacaaccacatgagctgac

SEQ ID NO: 2299 - DNA, 2003 bp, Diabrotica virgifera
  SmartBlast Evalue=0; Info=Asparagine synthetase [glutamine- hydrolyzing] n=1 Tax=Harpegnathos saltator RepID=E2BXP2_9HYME
agtcaacaatgaagagatcgtttattttgttacatttttagctttcaattatattgaaagttattgtttttaaaaatacagattttaaaaatttgatttttcagatcattttgtttaataaattaattaaaaaatgcatatttttgcattgtcctgttatttaagtacacctagatattagtgaccgttgatttctggtttttcgtcggccgcgtaatgtttaataaacctagctgaaggatctgtgactccctcgcaccatctcggcatccaatagtaaggcaaaaagttttgggctagtttggggtagctcttttcgaagacttccctataatagtacgcctcttttgtagtcggggtgcagtgtgggtacttatgtttggctttttctaaatcaaacggctctggcattcttttgtcgattatttcttgaattatcacgaacaaggattttgtgtttgaggctactccatcactgaaagcttctttatgcctccagagaatttcatgtggcaagagatcggtaccatcaaaagcagatcgtaataaatacttttctacattgtttttgggttgtttaagtgttttttccaagttcaggtaatagtcagtgaactgcaggtccaaaaatggtactcttagttccagactttgcgaagctgtcgtcctgtcagctctcaatccatcaaacaaataaatttctcttaacaaccgtaaactgtcttcgtgtgctgcttgcggtgaaggagcatctctgaaataaatataaccttgtgcgatctcatccgctccttctccgctcaacaaaacggtcgtttctgtgttttcttgtatatactttgagatcagatacattggaattgacgctcgaattgtggtaatgtctggtgtttctaatgtgtatatgacgtcatctaagaccttggctacatcctcttctgtaaaggatacttcgtggtgatctgtgccgacgtgtttagcaacaacgcgggcggctctgagatccggactgtcgcccattccaattgagaatgactgaactttatatgggacgttggcagatttagcttcttttaccagtagtgctgctatcaatgaagaatccagtcctccagataacatacagcctatctttctttctgccatcaatctttttttcacagacatttgcaataattttctaatgttagctggatgatcgttggggattaggtcttcatacggcaaaaaaggtttgaacgatggtctatctccaggcgaaaagtacctctggcttcggactagttttactttaccattttctagtaaatcgtattcttcaaaagttccaggtgggaatggttctattttcttcgattctccgtttagatctttctcaataccgaccaaacctttggcttcggaacagattcctaggacaccgctgctacttatcactttgaaaagtggtctcactccataaggatctcttcctaacaaaactttccttctgggaacatcgatcagacaaaaagcaaagacaccgtctagattcttaacacattcttcgatgccgaacttttcgtacaagtggaaaatgcattctacgtcacatctggtttcgtaatcgaagtcgtattgttctcctagcctttggaagttgtaaagttctccattacaaatcagcatggaatggggatactgatgcaacttcatgggctgcataccaaatttgcaacccacaatggccaaacggtggaagccaatacagcaattcttaagtttgttgtcatactcaactctccatgcatctggacctctatgaccaatttggcaaaaagttgaagcgcaatgggaatgtatgttagaagtgagtccaaaaacagcccaaattccacacatgtttgtttagttcagttactttattttctataatcagttagacttaaaacattaaaaagatcactagcgtttgaaaccttctttgccactcagacctaaccaccacaaccacatgagctgac

SEQ ID NO: 2300 - DNA, 2003 bp, Diabrotica virgifera
  SmartBlast Evalue=0; Info=Asparagine synthetase [glutamine- hydrolyzing] n=1 Tax=Harpegnathos saltator RepID=E2BXP2_9HYME
agtcaacaatgaagagatcgtttattttgttacatttttagctttcaattatattgaaagttattgtttttaaaaatacagattttaaaaatttgatttttcagatcattttgtttaataaattaattaaaaaatgcatatttttgcattgtcctgttatttaagtacacctagatattagtgaccgttgatttctggtttttcgtcggccgcgtaatgtttaataaacctagctgaaggatctgtgactccctcgcaccatctcggcatccaatagtaaggcaaaaagttttgggctagtttggggtagctcttttcgaagacttccctataatagtacgcctcttttgtagtcggggtgcagtgtgggtacttatgtttggctttttctaaatcaaacggctctggcattcttttgtcgattatttcttgaattatcacgaacaaggattttgtgtttgaggctactccatcactgaaagcttctttatgcctccagagaatttcatgtggcaagagatcggtaccatcaaaagcagatcgtaataaatacttttctacattgtttttgggttgtttaagtgttttttccaagttcaggtaatagtcagtgaactgcaggtccaaaaatggtactcttagttccagactttgcgaagctgtcgtcctgtcagctctcaagccatcaaataaataaatttctcttaacaaccgtaaactgtcttcgtgcgctgcctgcggtgaaggagcatctctgaaataaatatacccttgtgcgatctcatccgctccttctccgctcaacaaaacggtcgtttctgtattttcttggatatactttgagatcagatacattggaatggacgctcgaattgtggtaatgtcaggtgtttctaatgtgtatatgacgtcatctaagaccttggctacatcctcttctgtaaaggatacttcgtggtgatctgtgccgacgtgtttagcaacaacgcgggcggctctgagatccggactgtcgcccattccaattgagaatgactgaactttatatgggacgttggcagatttagcttcttttaccagtagtgctgctatcaatgaagaatccagtcctccagataacatacagcctatctttctttctgccatcaatctttttttcacagacatttgcaataatttcctaatgttagcttgatgatcgttggggattaggtcttcatacggcaaaaaaggtttgaacgatggtctatctccaggcgaaaagtacctctggcttcggactagttttactttaccattttctagtaaatcgtattcttcaaaagttccaggagggaatggttctatttttttcgattctccgttcagatctttctcaataccgaccaaacctttggcttcggaacagattcctaggacaccgctgctacttatcactttgaaaagtggtctcactccataaggatctcttcctaacaaaactttccttctgggaacatcgatcagacaaaaagcaaagacaccgtctagattcttaacacattcttcgatgccgaacttttcgtacaagtggaaaatgcattctacgtcacatctggtttcgtaatcgaagtcgtattgttctcctagcctttggaagttgtaaagttctccattacaaatcagcatggaatggggatactgatgcaacttcatgggctgcataccaaatttgcaacccacaatggccaaacggtggaagccaatacagcaattcttaagtttgttgtcatactcaactctccatgcatctggacctctatgaccaatttggcaaaaagttgaagcgcaatgggaatgtatgttagaagtgagtccaaaaacagcccaaattccacacatgtttgtttagttcagttactttattttctataatcagttagacttaaaacattaaaaagatcactagcgtttgaaaccttctttgccactcagacctaaccaccacaaccacatgagctgac

SEQ ID NO: 2301 - DNA, 2003 bp, Diabrotica virgifera
  SmartBlast Evalue=0; Info=Asparagine synthetase [glutamine- hydrolyzing] n=1 Tax=Harpegnathos saltator RepID=E2BXP2_9HYME
agtcaacaatgaagagatcgtttattttgttacatttttagctttcaattatattgaaagttattgtttttaaaaatacagattttaaaaatttgatttttcagatcattttgtttaataaattaattaaaaaatgcatatttttgcattgtcctgttatttaagtacacctagatattagtgaccgttgatttctggtttttcgtcggccgcgtaatgtttaataaacctagctgaaggatctgtgactccctcgcaccatctcggcatccaatagtaaggcaaaaagttttgggctagtttggggtagctcttttcgaagacttccctataatagtacgcctcttttgtagtcggggtgcagtgtgggtacttatgtttggctttttctaaatcaaacggctctggcattcttttgtcgattatttcttgaattatcacgaacaaggattttgtgtttgaggctactccatcactgaaagcttctttatgcctccagagaatttcatgtggcaagagatcggtaccatcaaaagcagatcgtaataaatacttttctacattgtttttgggttgtttaagtgttttttccaagttcaggtaatagtcagtgaactgcaggtccaaaaatggtactcttagttccagactttgcgaagctgtcgtcctgtcagctctcaagccatcaaacaaataaatttctcttaatagccgtaaactgtcttcgtgcgctgcttgcggtgaaggagcatctctgaaataaatatacccttgtgcgatctcatccgctccttctccgctcaacaaaacggtcgtttctgtgttttcttggatatactttgagatcagatacattggaatggacgctcgaattgtggtaatgtctggtgtttctaatgtgtatatgacgtcatctaagaccttggctacatcctcttctgtaaaggatacttcatggtgatctgtgccgacgtgtttagcaacaacgcgggcggctctgagatccggactgtcgcccattccaattgagaatgactgaactttatatgggacgttggcagatttagcttcttttaccagtagtgctgctatcaatgaagaatccagtcctccagataacatacagcctatctttctttctgccatcaatctttttttcacagacatttgcaataatttcctaatgttagcttgatgatcgttggggattaggtcttcatacggcaaaaaaggtttgaacgatggtctatctccaggcgaaaagtacctctggcttcggactagttttactttaccattttctagtaaatcgtattcttcaaaagttccaggagggaatggttctatttttttcgattctccgttcagatctttctcaataccgaccaaacctttggcttcggaacagattcctaggacaccgctgctacttatcactttgaaaagtggtctcactccataaggatctcttcctaacaaaactttccttctgggaacatcgatcagacaaaaagcaaagacaccgtctagattcttaacacattcttcgatgccgaacttttcgtacaagtggaaaatgcattctacgtcacatctggtttcgtaatcgaagtcgtattgttctcctagcctttggaagttgtaaagttctccattacaaatcagcatggaatggggatactgatgcaacttcatgggctgcataccaaatttgcaacccacaatggccaaacggtggaagccaatacagcaattcttaagtttgttgtcatactcaactctccatgcatctggacctctatgaccaatttggcaaaaagttgaagcgcaatgggaatgtatgttagaagtgagtccaaaaacagcccaaattccacacatgtttgtttagttcagttactttattttctataatcagttagacttaaaacattaaaaagatcactagcgtttgaaaccttctttgccactcagacctaaccaccacaaccacatgagctgac

SEQ ID NO: 2302 - DNA, 2003 bp, Diabrotica virgifera
  SmartBlast Evalue=0; Info=Asparagine synthetase [glutamine- hydrolyzing] n=1 Tax=Harpegnathos saltator RepID=E2BXP2_9HYME
agtcaacaatgaagagatcgtttattttgttacatttttagctttcaattatattgaaagttattgtttttaaaaatacagattttaaaaatttgatttttcagatcattttgtttaataaattaattaaaaaatgcatatttttgcattgtcctgttatttaagtacacctagatattagtgaccgttgatttctggtttttcgtcggccgcgtaatgtttaataaacctagctgaaggatctgtgactccctcgcaccatctcggcatccaatagtaaggcaaaaagttttgggctagtttggggtagctcttttcgaagacttccctataatagtacgcctcttttgtagtcggggtgcagtgtgggtacttatgtttggctttttctaaatcaaacggctctggcattcttttgtcgattatttcttgaattatcacgaacaaggattttgtgtttgaggctactccatcactgaaagcttctttatgcctccagagaatttcatgtggcaagagatcggtaccatcaaaagcagatcgtaataaatacttttctacattgtttttgggttgtttaagtgttttttccaagttcaggtaatagtcagtgaactgcaggtccaaaaatggtactcttagttccagactttgcgaagctgtcgtcctgtcagctctcaagccatcaaataaataaatttctcttaacaaccgtaaactgtcttcgtgcgctgcctgcggtgaaggagcatctctgaaataaatatacccttgtgcgatctcatccgctccttctccgctcaacaaaacggtcgtttctgtattttcttggatatactttgagatcagatacattggaatggacgctcgaattgtggtaatgtcaggtgtttctaatgtgtatatgacgtcatctaagaccttggctacatcctcttctgtaaaggatacttcgtggtgatctgtgccgacgtgtttagcaacaacgcgggcggctctgagatccggactgtcgcccattccaattgagaatgactgaactttatatgggacgttggcagatttagcttcttttaccagtagtgctgctatcaatgaagaatccagtcctccagataacatacagcctatctttctttctgccatcaatctttttttcacagacatttgcaataattttctaatgttagctggatgatcgttggggattaggtcttcatacggcaaaaaaggtttgaacgatggtctatctccaggcgaaaagtacctctggcttcggactagttttactttaccattttctagtaaatcgtattcttcaaaagttccaggtgggaatggttctattttcttcgattctccgtttagatctttctcaataccgaccaaacctttggcttcggaacagattcctaggacaccgctgctacttatcactttgaaaagtggtctcactccataaggatctcttcctaacaaaactttccttctgggaacatcgatcagacaaaaagcaaagacaccgtctagattcttaacacattcttcgatgccgaacttttcgtacaagtggaaaatgcattctacgtcacatctggtttcgtaatcgaagtcgtattgttctcctagcctttggaagttgtaaagttctccattacaaatcagcatggaatggggatactgatgcaacttcatgggctgcataccaaatttgcaacccacaatggccaaacggtggaagccaatacagcaattcttaagtttgttgtcatactcaactctccatgcatctggacctctatgaccaatttggcaaaaagttgaagcgcaatgggaatgtatgttagaagtgagtccaaaaacagcccaaattccacacatgtttgtttagttcagttactttattttctataatcagttagacttaaaacattaaaaagatcactagcgtttgaaaccttctttgccactcagacctaaccaccacaaccacatgagctgac

SEQ ID NO: 2303 - DNA, 2003 bp, Diabrotica virgifera
  SmartBlast Evalue=0; Info=Asparagine synthetase [glutamine- hydrolyzing] n=1 Tax=Harpegnathos saltator RepID=E2BXP2_9HYME
agtcaacaatgaagagatcgtttattttgttacatttttagctttcaattatattgaaagttattgtttttaaaaatacagattttaaaaatttgatttttcagatcattttgtttaataaattaattaaaaaatgcatatttttgcattgtcctgttatttaagtacacctagatattagtgaccgttgatttctggtttttcgtcggccgcgtaatgtttaataaacctagctgaaggatctgtgactccctcgcaccatctcggcatccaatagtaaggcaaaaagttttgggctagtttggggtagctcttttcgaagacttccctataatagtacgcctcttttgtagtcggggtgcagtgtgggtacttatgtttggctttttctaaatcaaacggctctggcattcttttgtcgattatttcttgaattatcacgaacaaggattttgtgtttgaggctactccatcactgaaagcttctttatgcctccagagaatttcatgtggcaagagatcggtaccatcaaaagcagatcgtaataaatacttttctacattgtttttgggttgtttaagtgttttttccaagttcaggtaatagtcagtgaactgcaggtccaaaaatggtactcttagttccagactttgcgaagctgtcgtcctgtcagctctcaagccatcaaacaaataaatttctcttaatagccgtaaactgtcttcgtgcgctgcttgcggtgaaggagcatctctgaaataaatatacccttgtgcgatctcatccgctccttctccgctcaacaaaacggtcgtttctgtgttttcttggatatactttgagatcagatacattggaatggacgctcgaattgtggtaatgtctggtgtttctaatgtgtatatgacgtcatctaagaccttggctacatcctcttctgtaaaggatacttcatggtgatctgtgccgacgtgtttagcaacaacgcgggcggctctgagatccggactgtcgcccattccaattgagaatgactgaactttatatgggacgttggcagatttagcttcttttaccagtagtgctgctatcaatgaagaatccagtcctccagataacatacagcctatctttctttctgccatcaatctttttttcacagacatttgcaataattttctaatgttagctggatgatcgttggggattaggtcttcatacggcaaaaaaggtttgaacgatggtctatctccaggcgaaaagtacctctggcttcggactagttttactttaccattttctagtaaatcgtattcttcaaaagttccaggtgggaatggttctattttcttcgattctccgtttagatctttctcaataccgaccaaacctttggcttcggaacagattcctaggacaccgctgctacttatcactttgaaaagtggtctcactccataaggatctcttcctaacaaaactttccttctgggaacatcgatcagacaaaaagcaaagacaccgtctagattcttaacacattcttcgatgccgaacttttcgtacaagtggaaaatgcattctacgtcacatctggtttcgtaatcgaagtcgtattgttctcctagcctttggaagttgtaaagttctccattacaaatcagcatggaatggggatactgatgcaacttcatgggctgcataccaaatttgcaacccacaatggccaaacggtggaagccaatacagcaattcttaagtttgttgtcatactcaactctccatgcatctggacctctatgaccaatttggcaaaaagttgaagcgcaatgggaatgtatgttagaagtgagtccaaaaacagcccaaattccacacatgtttgtttagttcagttactttattttctataatcagttagacttaaaacattaaaaagatcactagcgtttgaaaccttctttgccactcagacctaaccaccacaaccacatgagctgac

SEQ ID NO: 2304 - DNA, 1903 bp, Diabrotica virgifera
ttatctataaatagttagatgagacaatatctatgaaatttaagtttttctccaactcatttacaattacacaaaaactgtaataaccatcaacattttagctaattattgtacaagaattcgttagacaattttcgtttacacaatttagaacttggttttggaatgttactatcaaacacatagaaaaaatattttttactactacaaattcgaaactaaatcaaatcactaacatttcgaacaaactacttttacaagaagaagaattaaaccaagaaatattctttctgagcacttatgtaagagggcagtggttttttagtgataggtactcgattattgtctggaagtaccccaaagcttctttcttcactaaaaatatatactttgtccctctgaagacacatatattcccaattatagctatatagagtataacaataataaaagcgaagtattcatttcttataataaatatatatttgctttttgatcctcaagaaaaaaggaattattatttatgtaattattaatattatacataactttaacattaattaaaaaaagaaaaacttaagtagaaactttcacctataatctgtagtgattctgcaacggctgttgtatatcaaaccagtcttaattgttttatagcagctttatcttacaaacagtcaaagttagattgtttaaaacatgaaataatgttagatactaaaagatttatcaaataaaaagaaccagatgttatcaacaattccgatcaccttttacaatatcactaaagaaatgttagataattagatagttactgatattcaacaattttatgtaatttttacgggtaatcaataatttattgtaatttttactgatattcaatgatgttatgtaatttttaacagcaattattatgcaaccacaacattaattggtgaacaagaaaggaaataggtacctataaagaaaattatgttgaatttggatgaaaaaataaaaaataattgattcctttcagttttgaggaatattataattacttatgtataaatttatctgcagtcttgtcatttataaatctaaatccctattctacgagaacaataagttctcaatatcgcattacagtataggttaaaaaatacagattattatatggtgttataaatccttatgctttttcaacgctattatactgtgaaaaaatcaaataaatataacaatatgtatactaaccgagcagcaaacttaaacaattcaattaaagctactatattcactacatatcacaggacaacagatcagttgctatacctgaacatacgtagctcgatggcccggttaggtaaacaaaaaatcacctctacagtcttttcccgtcaccttttgatggcgacccttccttttccttgtctcatgaactggttttttcgctctctgacccactcctcaaagacttcttcagtttgtccagaagtctgttgtggaacttgttcaaggtcggttctgagtcgttcttcgggggcgatgaccctacactcatatgcctcactgggctgggaaggctggtttcacttgttctggaacttgctctggagtactgtctcgatgacatattgctgggcacagaactgcggatcggggatgttacgaattccgatccaggagaagtcgacagacttggaccttctgatttacactctgacacttttctcgaacggcatgatgtagggttcgcgcattcggaaactcttcgagaacgattggctttgtagatatcccaatcgtttttcaccactggcatcataaaagccatttttgatcaattatttgttatcactttcaaatttcaacacaccgaaacgtcactttcttgtcaacgtgttacattaacaacaat

SEQ ID NO: 2305 - DNA, 1893 bp, Diabrotica virgifera
ttatctataaatagttagatgagacaatatctatgaaatttaagtttttctccaactcatttacaattacacaaaaactgtaataaccatcaacattttagctaattattgtacaagaattcgttagacaattttcgtttacacaatttagaacttggttttggaatgttactatcaaacacatagaaaaaatattttttactactacaaattcgaaactaaatcaaatcactaacatttcgaacaaactacttttacaagaagaagaattaaaccaagaaatattctttctgagcacttatgtaagagggcagtggttttttagtgataggtactcgattattgtctggaagtaccccaaagcttctttcttcactaaaaatatatactttgtccctctgaagacacatatattcccaattatagctatatagagtataacaataataaaagcgaagtattcatttcttataataaatatatatttgctttttgatcctcaagaaaaaaggaattattatttatgtaattattaatattatacataactttaacattaattaaaaaaagaaaaacttaagtagaaactttcacctataatctgtagtgattctgcaacggctgttgtatatcaaaccagtcttaattgttttatagcagctttatcttacaaacagtcaaagttagattgtttaaaacatgaaataatgttagatactaaaagatttatcaaataaaaagaaccagatgttatcaacaattccgatcaccttttacaatatcactaaagaaatgttagataattagatagttactgatattcaacaattttatgtaaaaatcaataatttaatgtaatttttaccgatattcaatgatgttatgtaatttttaacagcaattattatgcaaccacaacattaattggtgaacaagaaaggaaataggtacctataaagaaaattatgttgaatttggatgaaaaaataaaaaataattgattcctttcagttttgaggaatattataattacttatgtataaatttatctgcagtcttgtcatttataaatctaaatccctattctacgagaacaataagttctcaatatcgcattacagtataggttaaaaaatacagattattatatggtgttataaatccttatgctttttcaacgctattatactgtgaaaaaatcaaataaatataacaatatgtatactaaccgagcagcaaacttaaacaattcaattaaagctactatattcactacatatcacaggacaacagatcagttgctatacctgaacatacgtagctcgatggcccggttaggtaaacaaaaaatcacctctacagtcttttcccgtcaccttttgatggcgacccttccttttccttgtctcatgaactggttttttcgctctctgacccactcctcaaagacttcttcagtttgtccagaagtctgttgtggaacttgttcaaggtcggttctgagtcgttcttcgggggcgatgaccctacactcatatgcctcactgggctgggaaggctggtttcacttgttctggaacttgctctggagtactgtctcgatgacatattgctgggcacagaactgcggatcggggatgttacgaattccgatccaggagaagtcgacagacttggaccttctgatttacactctgacacttttctcgaacggcatgatgtagggttcgcgcattcggaaactcttcgagaacgattggctttgtagatatcccaatcgtttttcaccactggcatcataaaagccatttttgatcaattatttgttatcactttcaaatttcaacacaccgaaacgtcactttcttgtcaacgtgttacattaacaacaat

SEQ ID NO: 2306 - DNA, 1847 bp, Diabrotica virgifera
ttatctataaatagttagatgagacaatatctatgaaatttaagtttttctccaactcatttacaattacacaaaaactgtaataaccatcaacattttagctaattattgtacaagaattcgttagacaattttcgtttacacaatttagaacttggttttggaatgttactatcaaacacatagaaaaaatattttttactactacaaattcgaaactaaatcaaatcactaacatttcgaacaaactacttttacaagaagaagaattaaaccaagaaatattctttctgagcacttatgtaagagggcagtggttttttagtgataggtactcgattattgtctggaagtaccccaaagcttctttcttcactaaaaatatatactttgtccctctgaagacacatatattcccaattatagctatatagagtataacaataataaaagcgaagtattcatttcttataataaatatatatttgctttttgatcctcaagaaaaaaggaattattatttatataattacttattaatattttacataagtttaacatcaattaaaaaaagaaaacttaagtagacactttcacctataaatcttaagtgatactgcaacagctgttgtagatcaagctagtcttaatttttttatagctgctttatcttacaaacagccaaagctagattgtttaaaacatgaaataatgttacaagaaaatttatcaaataaaaagattttatcaacaattcttatcaacttttgcaatatcactaaagaaatattaaatagttacttatattcaacaatttaatgtaatttttactgatattcaatgatgttgtgtaatttttaacagcaattatgaaaccacaagcttaattggttaacaagaaagaaatataaagaagataatgttgattttggatgaaaaaataaaaaataattgattcctttcagttttgaggaatattataattacttatgtataaatttatctgcagtcttgtcatttataaatctaaatccctattctacgagaacaataagttctcaatatcgcattacagtataggttaaaaaatacagattattatatggtgttataaatccttatgctttttcaacgctattatactgtgaaaaaatcaaataaatataacaatatgtatactaaccgagcagcaaacttaaacaattcaattaaagctactatattcactacatatcacaggacaacagatcagttgctatacctgaacatacgtagctcgatggcccggttaggtaaacaaaaaatcacctctacagtcttttcccgtcaccttttgatggcgacccttccttttccttgtctcatgaactggttttttcgctctctgacccactcctcaaagacttcttcagtttgtccagaagtctgttgtggaacttgttcaaggtcggttctgagtcgttcttcgggggcgatgaccctacactcatatgcctcactgggctgggaaggctggtttcacttgttctggaacttgctctggagtactgtctcgatgacatattgctgggcacagaactgcggatcggggatgttacgaattccgatccaggagaagtcgacagacttggaccttctgatttacactctgacacttttctcgaacggcatgatgtagggttcgcgcattcggaaactcttcgagaacgattggctttgtagatatcccaatcgtttttcaccactggcatcataaaagccatttttgatcaattatttgttatcactttcaaatttcaacacaccgaaacgtcactttcttgtcaacgtgttacattaacaacaat

SEQ ID NO: 2307 - DNA, 1610 bp, Diabrotica virgifera
ttatctataaatagttagatgagacaatatctatgaaatttaagtttttctccaactcatttacaattacacaaaaactgtaataaccatcaacattttagctaattattgtacaagaattcgttagacaattttcgtttacacaatttagaacttggttttggaatgttactatcaaacacatagaaaaaatattttttactactacaaattcgaaactaaatcaaatcactaacatttcgaacaaactacttttacaagaagaagaattaaaccaagaaatattctttctgagcacttatgtaagagggcagtggttttttagtgataggtactcgattattgtctggaagtaccccaaagcttctttcttcactaaaaatatatactttgtccctctgaagacacatatattcccaattatagctatatagagtataacaataataaaagcgaagtattcatttcttataataaatatatatttgctttttgatcctcaagaaaaaaggaattattatttatgtaattattaatattatacataactttaacattaattaaaaaaagaaaaacttaagtagaaactttcacctataatctgtagtgattctgcaacggctgttgtatatcaaaccagtcttaattgttttatagcagctttatcttacaaacagtcaaagttagattgtttaaaacatgaaataatgttagatactaaaagatttatcaaataaaaagaaccagatgttatcaacaattccgatcaccttttacaatatcactaaagaaatgttagataattagatagttactgatattcaacaattttatgtaatttttacgggtaatcaataatttattgtaatttttactgatattcaatgatgttatgtaatttttaacagcaattattatgcaaccacaacattaattggtgaacaagaaaggaaataggtacctataaagaaaattatgttgaatttggatgaaaaaataaaaaataattgattcctttcagttttgaggaatattataattacttatgtataaatttatctgcagtcttgtcatttataaatctaattccctattctacgagaacaataagttctcaatatcgcattacagtatgtataggttaaaaaatgtagattaaaatggtgttataaatccttattcttttttcaacgctattatactgtgaaaaaatcaaataaatataacaatatgtatactaaccgagcagtaaacttaaacaattcaattaaagctactatattcactacatatatcacagaacaacagatcagttgctatacctgaacatacgtagctcgatggcccggttaggtaaacaaaaaatcacctctacagtcttttcccgtcaccttttgagggcgacccttccttttccttgtctcacgaactggttttttcgctctctgacccactcctaaaagacttcttcagtttgtccaagagtctgttgtggaacttgttaaaggtcggttctgagtcgttcttcgggggtgatgacccaataacgctcatatttctcacggggctggaagggctgctttcactcgttttggaactcgctctggagt

SEQ ID NO: 2308 - DNA, 1600 bp, Diabrotica virgifera
ttatctataaatagttagatgagacaatatctatgaaatttaagtttttctccaactcatttacaattacacaaaaactgtaataaccatcaacattttagctaattattgtacaagaattcgttagacaattttcgtttacacaatttagaacttggttttggaatgttactatcaaacacatagaaaaaatattttttactactacaaattcgaaactaaatcaaatcactaacatttcgaacaaactacttttacaagaagaagaattaaaccaagaaatattctttctgagcacttatgtaagagggcagtggttttttagtgataggtactcgattattgtctggaagtaccccaaagcttctttcttcactaaaaatatatactttgtccctctgaagacacatatattcccaattatagctatatagagtataacaataataaaagcgaagtattcatttcttataataaatatatatttgctttttgatcctcaagaaaaaaggaattattatttatgtaattattaatattatacataactttaacattaattaaaaaaagaaaaacttaagtagaaactttcacctataatctgtagtgattctgcaacggctgttgtatatcaaaccagtcttaattgttttatagcagctttatcttacaaacagtcaaagttagattgtttaaaacatgaaataatgttagatactaaaagatttatcaaataaaaagaaccagatgttatcaacaattccgatcaccttttacaatatcactaaagaaatgttagataattagatagttactgatattcaacaattttatgtaaaaatcaataatttaatgtaatttttaccgatattcaatgatgttatgtaatttttaacagcaattattatgcaaccacaacattaattggtgaacaagaaaggaaataggtacctataaagaaaattatgttgaatttggatgaaaaaataaaaaataattgattcctttcagttttgaggaatattataattacttatgtataaatttatctgcagtcttgtcatttataaatctaattccctattctacgagaacaataagttctcaatatcgcattacagtatgtataggttaaaaaatgtagattaaaatggtgttataaatccttattcttttttcaacgctattatactgtgaaaaaatcaaataaatataacaatatgtatactaaccgagcagtaaacttaaacaattcaattaaagctactatattcactacatatatcacagaacaacagatcagttgctatacctgaacatacgtagctcgatggcccggttaggtaaacaaaaaatcacctctacagtcttttcccgtcaccttttgagggcgacccttccttttccttgtctcacgaactggttttttcgctctctgacccactcctaaaagacttcttcagtttgtccaagagtctgttgtggaacttgttaaaggtcggttctgagtcgttcttcgggggtgatgacccaataacgctcatatttctcacggggctggaagggctgctttcactcgttttggaactcgctctggagt

SEQ ID NO: 2309 - DNA, 1554 bp, Diabrotica virgifera
ttatctataaatagttagatgagacaatatctatgaaatttaagtttttctccaactcatttacaattacacaaaaactgtaataaccatcaacattttagctaattattgtacaagaattcgttagacaattttcgtttacacaatttagaacttggttttggaatgttactatcaaacacatagaaaaaatattttttactactacaaattcgaaactaaatcaaatcactaacatttcgaacaaactacttttacaagaagaagaattaaaccaagaaatattctttctgagcacttatgtaagagggcagtggttttttagtgataggtactcgattattgtctggaagtaccccaaagcttctttcttcactaaaaatatatactttgtccctctgaagacacatatattcccaattatagctatatagagtataacaataataaaagcgaagtattcatttcttataataaatatatatttgctttttgatcctcaagaaaaaaggaattattatttatataattacttattaatattttacataagtttaacatcaattaaaaaaagaaaacttaagtagacactttcacctataaatcttaagtgatactgcaacagctgttgtagatcaagctagtcttaatttttttatagctgctttatcttacaaacagccaaagctagattgtttaaaacatgaaataatgttacaagaaaatttatcaaataaaaagattttatcaacaattcttatcaacttttgcaatatcactaaagaaatattaaatagttacttatattcaacaatttaatgtaatttttactgatattcaatgatgttgtgtaatttttaacagcaattatgaaaccacaagcttaattggttaacaagaaagaaatataaagaagataatgttgattttggatgaaaaaataaaaaataattgattcctttcagttttgaggaatattataattacttatgtataaatttatctgcagtcttgtcatttataaatctaattccctattctacgagaacaataagttctcaatatcgcattacagtatgtataggttaaaaaatgtagattaaaatggtgttataaatccttattcttttttcaacgctattatactgtgaaaaaatcaaataaatataacaatatgtatactaaccgagcagtaaacttaaacaattcaattaaagctactatattcactacatatatcacagaacaacagatcagttgctatacctgaacatacgtagctcgatggcccggttaggtaaacaaaaaatcacctctacagtcttttcccgtcaccttttgagggcgacccttccttttccttgtctcacgaactggttttttcgctctctgacccactcctaaaagacttcttcagtttgtccaagagtctgttgtggaacttgttaaaggtcggttctgagtcgttcttcgggggtgatgacccaataacgctcatatttctcacggggctggaagggctgctttcactcgttttggaactcgctctggagt

SEQ ID NO: 2310 - DNA, 2853 bp, Diabrotica virgifera
ttcggccatcttggcatcttcatcttggcaccttgccttgccgtggattgtttttagttgtttgtattatttgtgctttttaagaatatttttttaattcggatacttttataatagctttaatagtattattaacatagtgcataaaatggtgtcctgtttttaacgcagttggagtagcagaaacaaatgtagataaaaaaatctgcaggaataacgtttcaattatgacagaagctccaaacaaatgactgtgaatgaaaagccctattaaaagctttccagaagatcctgcgaagaagacatgaagtatagatcagatttgttaatagaggagtatgttcaaaacactttttagaaaaagatattgacagaacttcactttcatctgttcgtttgagagactgtgctgttccaatagcttatgtcacacagaatcagctgagagaagtggtctacaaaaaaccagaaaggaaacggaatatgtggctacgaaaagcaaaagaaaggtttacaaagcaaatgtgacacatttttttataatatttaggaatatcagtaaattacattaaaaaatgtatgaaaagattttttgcaataaaaatgtttatatttatcaaggatgtattatttggtatggccacatatcgtcagtgatgtgacaatacctcctatctgttctttcatgagatttgtaggagactgaaaaacttgtttgggccacctcctgttttcatatattttttgacttgttttgtagtaaattcaactatctatttactacaaaacaagtcaaaacttacgtatgaaaacaggagatgaccttaaaaaatgtttttcgtctcctgcaaaactcatgaaaaaacatataggaggcactgtcacatcaccgacgatatatttcagagaatgtctaaaaaacatactttgaatgtcctaagaacattcgtagacattcatggaatgtttcaacaagacattcagtctaaaaaaatatactgtgaatgttcaaagaacattcgtagacattcatggaatgttccaacaagacattcaaggaatgtttaaaatgctgacacagcagtttccagggacgttcgtgtgcttttggggacattccaggaatgttttcaatgtcctgtgtgtacattctaggaacattcatggaatgttttgtgttattagggagtagactcgctcaaacgaagcagttaaaaccatttttaagacccgcaattatctttcaaaaagtacgatgtactgtggactaatagtcattattaaataaaatatctacagttttgtattaaacggtgaatttctagccggccaagacctcttgagagcatccatgaatttattgtccggtgcactttcgaaaggatggacattcaaagcatccaaatccaagtcgttcctttgcagacgcttcttagtcgcttcactgaccagtttatgttggtatatccagcaacatagtgggaccaagagttgtccctgtttttgaaccaggattttcaattatcaaactattaaaaaaattgctgaaatcatcttgtttgattttttcctttggacatttcggttcctcgaacttatgtgggactgcgtaatccccatatggcaattgagtcattgtgaggcattttggcttatagtccaaattggggatgagggcaaaatactttggcttatttcctctagcatagactcttttacatataccatatttatttgtttctgagagaacctgtttaccaagtgggtaaatgcttgaaaagcttcagcgttaaattgatcaggtaaaacataatgtgtctcgcctcttacgattgtttcagggaaaaatttcttatcgctgaatccgataatatcaaaacatctatcagtctccgatctaaacatactgtcatccactatcataaactttccgtgacgtttaatgcctcttacaatttcatcttctttaactattacatctcgattttcggctagggctctgacataactcctctttggtcttgaagaaatgagtttcaagaagatcagatcgtcgtacctaaatattttataagtatttgctggaatgcggagttttgttccgaatgatagtggtagtatccaaggctgaccccctggtgagtctttgtaactgaacaacagattcagtccaattttagtattacacatgacaccattcctgataccagttacaatctttttggcagtagctaaattttgattaccagcaggcaattgtagttcattcatgcattttggtatacactgtgtattagttatgacaaatggaagtttcacgttgggtccaattatgtacagaaacatttcatgtccattcattcgttccatgagagaacttaactttgccgtatcgacatttaagggtttggttgaatctaaggtggtaaaaatatgagctgcaacgtcaccaggccgtcaattgataccgcttggtctaaatgatgcacacccaaagacaaggcatctatccaatttgactggccaggtttggcactttctactgcagaaaagattgcgtttggttcaaagtcttcttcttgaagtgtgtgaatatgcggatagttaaaatcgttatcagttactgccgagtttatcagaattacgcggtatatacttctggagttgatgtaccacttgaagcaacagaatttcatgagaccattgaggagttccgtttttttcggcgatgctacgtcgaacaagattagtccgcagtctttttttgtttgtggagacatattaattacgtttttgacgaatttgtactaattataataaaaaatgctcaaattctaatttgaagaaaacagc

SEQ ID NO: 2311 - DNA, 1851 bp, Diabrotica virgifera
gaacattcgtagacattcatggaatgttccaacagaacattctaagaatatttaaaatgctgacacagcacattccagggactttccagggacattcgtgtgcatttggggacattccaggaatgttttcaatgtcctgtgtgtacattctaggaacattcatggaatgttttgtgttattagggagtagactcgctcaaacgaagcagttaaaaccatttttaagacccgcaattatctttcaaaaagtacgatgtactgtggactaatagtcattattaaataaaatatctacagttttgtattaaacggtgaatttctagccggccaagacctcttgagagcatccatgaatttattgtccggtgcactttcgaaaggatggacattcaaagcatccaaatccaagtcgttcctttgcagacgcttcttagtcgcttcactgaccagtttatgttggtatatccagcaacatagtgggaccaagagttgtccctgtttttgaaccaggattttcaattatcaaactattaaaaaaattgctgaaatcatcttgtttgattttttcctttggacatttcggttcctcgaacttatgtgggactgcgtaatccccatatggcaattgagtcattgtgaggcattttggcttatagtccaaattggggatgagggcaaaatactttggcttatttcctctagcatagactcttttacatataccatatttatttgtttctgagagaacctgtttaccaagtgggtaaatgcttgaaaagcttcagcgttaaattgatcaggtaaaacataatgtgtctcgcctcttacgattgtttcagggaaaaatttcttatcgctgaatccgataatatcaaaacatctatcagtctccgatctaaacatactgtcatccactatcataaactttccgtgacgtttaatgcctcttacaatttcatcttctttaactattacatctcgattttcggctagggctctgacataactcctctttggtcttgaagaaatgagtttcaagaagatcagatcgtcgtacctaaatattttataagtatttgctggaatgcggagttttgttccgaatgatagtggtagtatccaaggctgaccccctggtgagtctttgtaactgaacaacagattcagtccaattttagtattacacatgacaccattcctgataccagttacaatctttttggcagtagctaaattttgattaccagcaggcaattgtagttcattcatgcattttggtatacactgtgtattagttatgacaaatggaagtttcacgttgggtccaattatgtacagaaacatttcatgtccattcattcgttccatgagagaacttaactttgccgtatcgacatttaagggtttggttgaatctaaggtggtaaaaatatgagctgcaacgtcaccaggccgtcaattgataccgcttggtctaaatgatgcacacccaaagacaaggcatctatccaatttgactggccaggtttggcactttctactgcagaaaagattgcgtttggttcaaagtcttcttcttgaagtgtgtgaatatgcggatagttaaaatcgttatcagttactgccgagtttatcagaattacgcggtatatacttctggagttgatgtaccacttgaagcaacagaatttcatgagaccattgaggagttccgtttttttcggcgatgctacgtcgaacaagattagtccgcagtctttttttgtttgtggagacatattaattacgtttttgacgaatttgtactaattataataaaaaatgctcaaattctaatttgaagaaaacagc

SEQ ID NO: 2312 - DNA, 1308 bp, Diabrotica virgifera
ttcggccatcttggcatcttcatcttggcaccttgccttgccgtggattgtttttagttgtttgtattatttgtgctttttaagaatatttttttaattcggatacttttataatagctttaatagtattattaacatagtgcataaaatggtgtcctgtttttaacgcagttggagtagcagaaacaaatgtagataaaaaaatctgcaggaataacgtttcaattatgacagaagctccaaacaaatgactgtgaatgaaaagccctattaaaagctttccagaagatcctgcgaagaagacatgaagtatagatcagatttgttaatagaggagtatgttcaaaacactttttagaaaaagatattgacagaacttcactttcatctgttcgtttgagagactgtgctgttccaatagcttatgtcacacagaatcagctgagagaagtggtctacaaaaaaccagaaaggaaacggaatatgtggctacgaaaagcaaaagaaaggtttacaaagcaaatgtgacacatttttttataatatttaggaatatcagtaaattacattaaaaaatgtatgaaaagattttttgcaataaaaatgtttatatttatcaaggatgtattatttggtatggccacatatcgtcagtgatgtgacaatacctcctatctgttctttcatgagatttgtaggagactgaaaaacttgtttgggccacctcctgttttcatatattttttgacttgttttgtagtaaattcaactatctatttactacaaaacaagtcaaaacttacgtatgaaaacaggagatgaccttaaaaaatgtttttcgtctcctgcaaaactcatgaaaaaacatataggaggcactgtcacatcaccgacgatatatttcagagaatgtctaaaaaacatactttgaatgtcctaagaacattcgtagacattcatggaatgtttcaacaagacattcagtctaaaaaaatatactgtgaatgttcaaagaacattcgtagacattcatggaatgttccaacaagacattcaaggaatgtttaaaatgctgacacagcagtttccagggacgttcgtgtgcttttggggacattccaggaatgttttcaatgtcctgtgtgtacattctaggaacattcatggaatgttttgtgttattaggggttcaaaatgccgcgcagtaaacaaaatatgttccaacagttgatcgttcatcgtatcgtctttttgggagttccaacaacaattgcgatcgtccagtgaccgtttagtgacgattgtttc

SEQ ID NO: 2313 - DNA, 764 bp, Diabrotica virgifera
ttcggccatcttggcatcttcatcttggcaccttgccttgccgtggattgtttttagttgtttgtattatttgtgctttttaagaatatttttttaattcggatacttttataatagctttaatagtattattaacatagtgcataaaatggtgtcctgtttttaacgcagttggagtagcagaaacaaatgtagataaaaaaatctgcaggaataacgtttcaattatgacagaagctccaaacaaatgactgtgaatgaaaagccctattaaaaggttagtatgcaaatatgtaaacgaaggcatgccctgtatttcagaaaataaattaatactattaataccctaataatactattcataaaaaatcttttaagtaacctagatataacaaagtgaataaaaggcataaatcagaagaattattattttattttataagttaataattattggtcatatccatttattattttaataataattgtgaataagccacaaacttcgcttattcctaactaaaatagtaaatagagataataacaataggatttgtaaaactaaagtaattctttttgcgtttttgctaatgtatgcctttataaataggatggtagaccacacactataatatgcagtaccaactaatgaatacacagaatattatagtcgatttgctaaactcagtctcagtactactgagtctcagacacaaccggctagtgattttagtaaataattttgccaatttggtaaaattggc

SEQ ID NO: 2314 - DNA, 617 bp, Diabrotica virgifera
ttcggccatcttggcatcttcatcttggcaccttgccttgccgtggattgtttttagttgtttgtattatttgtgctttttaagaatatttttttaattcggatacttttataatagctttaatagtattattaacatagtgcataaaatggtgtcctgtttttaacgcagttggagtagcagaaacaaatgtagataaaaaaatctgcaggaataacgtttcaattatgacagaagctccaaacaaatgactgtgaatgaaaagccctattaaaaggttagtatgcaaatatgtaaacgaaggcatgccctgtatttcagaaaataaattaatactattaataccctaataatactattcataaaaaatcttttaagtaacctagatataacaaagtgaataaaaggcataaatcagaagaattattattttgtaagttaataattggtcatatccatttattattttaattgcgaataagccacaaacttcgcttattcccaactaaaatagtaaatagagataatataataacaaaatagtaaatagagataataacaaaaggattatttttgtaaaattaaaataataatttttctttttgcgtttttgctaa

SEQ ID NO: 2315 - DNA, 306 bp, Diabrotica virgifera
gaacattcgtagacattcatggaatgttccaacagaacattctaagaatatttaaaatgctgacacagcacattccagggactttccagggacattcgtgtgcatttggggacattccaggaatgttttcaatgtcctgtgtgtacattctaggaacattcatggaatgttttgtgttattaggggttcaaaatgccgcgcagtaaacaaaatatgttccaacagttgatcgttcatcgtatcgtctttttgggagttccaacaacaattgcgatcgtccagtgaccgtttagtgacgattgtttc

SEQ ID NO: 2316 - DNA, 1835 bp, Diabrotica virgifera
  SmartBlast Evalue=0; Info=Encapsulation-relating protein n=1 Tax=Diabrotica virgifera virgifera RepID=D7EYY4_DIAVI
aatatacaaaaaatatttatttatttgtagcaatcataacaataaatattttaaacaacatattaaatataaaccagtctttacatcatgagtggtactctttggtaggttccttgcaccatgattggtactctttggtaggttccttgagtttgccacatacggccttgtgtgttagacatgagttggttgagtaattgttggggaacaactttcaattgttggagcatgagtacgatctgttggtggatttgtctttgttggtagatcaattcttggggtacagcatctccgtgttggatcaattgaagtatttgggtgtaaatagcaaagtattgggaaaccaattcttggggaatggtgtgtttttgttgtgccaagacctggatcaactgtttgtagtaggtttgttgatatacgaattgtttaatcaaaacttgaagaaacctttcaacatgttggtaggtaattctttggtagaggacaagttcctgtgggataacatgtccttgttgaattaatacttggatttgttgccttacgtgagtttgttggtacaaaacttgttggatcaattgctggatctgctcgttaataatattttgttgtacaacccatctttgaatggaaatagtatcgacttcagttgcttcagtgctttcggctaggcgattcaagaagatttgttggtaggtcaaacgttcaattacttcatgaacttgttggtaaaccaatctctgttggtaaacgagctgttggggaactacttgtcctttaacaatgtattgttcaacttcacgtgtaatgaggttttgatggtaagctaattgttcaatcagtttttcgatctgttcgttaatcatttgttgctgatagtgaacatcttcagtgactggttgtcttctttcggtgatttcagtcaattcttggttgatcaattcttgtttggcgaagagtttttcgagaagttgaacgttaacgaattcttcaggaacttcgtatacttgctctccgtttacaagtctcatgtttaccaaataacggttcaatggagattgtccaagttgttgtctgtagatttggctcaagatttggttagtgttcatttgatcttcaagaagggattctccagatagatattgttggggcaaatattgttgttggctcaataaaccttgttgaagttgacgttgttgttggatttgtccgagaagagtttggaaatgtctgagtggagaataagtttgcaacaaaccttggtcaagagcccaggttctatggtttccatattccaaattttgtccaagaggcataacatttcctacttgtccagcatattggcggagggtacgtactccttggacggggacaatgtcactaattccttgcatacggtattcacgatcccagtttctaataacatcgtagatggtttcgttgacgactccagcttcaactaacatttgaatcctgttaagaaggctatagtatttggtgtcgtcaagagtaccttcatactgacgaaaaatatcagtaagaatatcagcttggttgtagttttggtaaactgaaacaccagcgagggtacgacggtcgatagcttctccagttctcagtggttccccaacttggaacatatgggttcttgtgtttggacttctgagaacaacctcgacttgtctgggatcggtaacactcttgaggattacgagttggtatcctctagagtcgaagagagatacagttccatcttctgtgactcttacggttctaccaaggagtgttggtagagcaacgctgagtgcaactaaagaaaagagaactaataccttcaa

SEQ ID NO: 2317 - DNA, 1849 bp, Diabrotica virgifera
  SmartBlast Evalue=0; Info=Encapsulation-relating protein n=1 Tax=Diabrotica virgifera virgifera RepID=D7EYY4_DIAVI
aatatacaaaaaatatttatttatttgtagcaatcataacaataaatattttaaacaacatattaaatataaaccagtctttacatcatgagtggtactctttggtaggttccttgcaccatgattggtactctttggtaggttccttgagtttgccacatacggccttgtgtgttagacatgagttggttgagtaattgttggggaacaactttcaattgttggagcatgagtacgatctgttggtggatttgtctttgttggtagatcaattcttggggtacagcatctccgtgttggatcaattgaagtatttgggtgtaaatagcaaagtattgggaaaccaattcttggggaatggtgtgtttttgttgtgccaagacctggatcaactgtttgtagtaggtttgttgatatacgaattgtttaatcaaaacttgaagaaacctttcaacatgttggtaggtaattctttggtagaggacaagttcctgtgggataacatgtccttgttgaattaatacttggatttgttgccttacgtgagtttgttggtacaaaacttgttggatcaattgctggatctgctcgttaataatattttgttgtacaacccatctttgaatggaaatagtatcgacttcagttgcttcagtgctttcggctaggcgattcaagaagatttgttggtaggtcaaacgttcaattacttcatgaacttgttggtaaaccaatctctgttggtaaacgagctgttggggaactacttgtcctttaacaatgtattgttcaacttcacgtgtaatgaggttttgatggtaagctaattgttcaatcagtttttcgatctgttcgttaatcatttgttgctgatagtgaacatcttcagtgactggttgtcttctttcggtgatttcagtcaattcttggttgatcaattcttgtttggcgaagagtttttcgagaagttgaacgttaacgaattcttcaggaacttcgtatacttgctctccgtttacaagtctcatgtttaccaaataacggttcaatggagattgtccaagttgttgtctgtagatttggctcaagatttggttagtgttcatttgatcttcaagaagggattctccagatagatattgttggggcaaatattgttgttggctcaataaaccttgttgaagttgacgttgttgttggatttgtccgagaagagtttggaaatgtctgagtggagaataagtttgcaacaaaccttggtcaagagcccaggttctatggtttccatattccaaattttgtccaagaggcataacatttcctacttgtccagcatattggcggagggtacgtactccttggacggggacaatgtcactaattccttgcatacggtattcacgatcccagtttctgatgacatcgtagatggtttcgttgatgagtccagcttcaactaacatttgaattctgttaagaaggttgtagtatttggtgtcgtcaagaataccttcatactgacggaaaatatcagtaagaatatcagcttggttgtagttttggtaaacggaaacaccagcgagggtacgacggtcgatagcttctccagttctaagtggttccccaacttggaacatctgggttcttgtgtttggacttctgagaacaacttcgacttgactgggatcggcaacactcttgaggattacgagttggtatcctctagagtcgaagagagatacagttccatcttctttgactcttacggttctaccaaggagtgttggtagagcaacgctgagtacgactaaagaaaacagaactagtaccttcatcttcgtgctgtatt

SEQ ID NO: 2318 - DNA, 1832 bp, Diabrotica virgifera
  SmartBlast Evalue=0; Info=Encapsulation-relating protein n=1 Tax=Diabrotica virgifera virgifera RepID=D7EYY4_DIAVI
aatatacaaaaaatatttatttatttgtagcaatcataacaaatattttaaacaacatattaaaaataaaccagtctttacatcatgagtggtactctttggtaagttctttgcatcataagtggtactctttggtaagttccttgagtttgccacatacggtcttgtgtgttgaacacgagttggttgactaattgttggggaacaactttcaattgttggagcatgagtacgatctgttggtggatttgtctttgttggtagatcaattcttggggtacaatatctccgtgttggatcaattgaagtaattgggtgtacatagcgaaatattgggaaaccaattcttgaggtatggtgtgtctttgttgtcccaaaatttggatcaactgtttgtagttggtttgttgatttacgaattgtttaatcaaaacttgaagaaatctttcaacatattggtaggtaattttttggtaaaggacgagttcctgtgggataacatgtccttgttgaattagtacttggatttgttgccttacgtgagtttgttggtacaaaacttgttggatcaattgctggatctgctcgttaataatattttgttgtacaacccatctttgaattgaaatagtatcgacttcagttgcttcagtgctttcggctagatgattcaagaatatttgttgggaggtcaaacgttcaattacttcatgaacttgttggtaaaccaatctctgttgagagacaagctcctgaggaactacttgtcctttaacaatgtattgttcaacttcacgtgtaatgaggttttgatggtaagctaattgttcaataagtttttggatctgttggttaatcagttgttgctggtagtgaacgtcttcagtgattggttgtcttctttcggtgatttcagtcaattcttggttgatcaattcttgcttggcgaagagttgttcgagaagttgaacgttaacgaattcttcaggaacttcgtatacttgctctccgtttacaagtctcatgttaaccaaataacggttcaatggagattgtccaagttgttgtctataaatttggttcaagatttggttagtgttcatttgatcttcaagaaggtattccccagatagatattgttgaggtaaatattgttgttgggtcaataaaccttgttgaagtacacgttgctgttggatttgtccgagcagagtttggaaatgtctgagtggagaataagtttgcaacaaaccttggtcaagagcccagtttctttggtttccatattgcaaattttgtccaagaggcataacatctcctacttgttcagcatattggcggagggtacgtactccttggacggggacaatgtcactaattccttgcatacggtattcacgatcccagtttctaataacatcgtagatggtttcgttgacgactccagcttcaactaacatttgaatcctgttaagaaggctatagtatttggtgtcgtcaagagtaccttcatactgacgaaaaatatcagtaagaatatcagcttggttgtagttttggtaaactgaaacaccagcgagggtacgacggtcgatagcttctccagttctcagtggttccccaacttggaacatatgggttcttgtgtttggacttctgagaacaacctcgacttgtctgggatcggtaacactcttgaggattacgagttggtatcctctagagtcgaagagagatacagttccatcttctgtgactcttacggttctaccaaggagtgttggtagagcaacgctgagtgcaactaaagaaaagagaactaataccttcaa

SEQ ID NO: 2319 - DNA, 1846 bp, Diabrotica virgifera
  SmartBlast Evalue=0; Info=Encapsulation-relating protein n=1 Tax=Diabrotica virgifera virgifera RepID=D7EYY4_DIAVI
aatatacaaaaaatatttatttatttgtagcaatcataacaaatattttaaacaacatattaaaaataaaccagtctttacatcatgagtggtactctttggtaagttctttgcatcataagtggtactctttggtaagttccttgagtttgccacatacggtcttgtgtgttgaacacgagttggttgactaattgttggggaacaactttcaattgttggagcatgagtacgatctgttggtggatttgtctttgttggtagatcaattcttggggtacaatatctccgtgttggatcaattgaagtaattgggtgtacatagcgaaatattgggaaaccaattcttgaggtatggtgtgtctttgttgtcccaaaatttggatcaactgtttgtagttggtttgttgatttacgaattgtttaatcaaaacttgaagaaatctttcaacatattggtaggtaattttttggtaaaggacgagttcctgtgggataacatgtccttgttgaattagtacttggatttgttgccttacgtgagtttgttggtacaaaacttgttggatcaattgctggatctgctcgttaataatattttgttgtacaacccatctttgaattgaaatagtatcgacttcagttgcttcagtgctttcggctagatgattcaagaatatttgttgggaggtcaaacgttcaattacttcatgaacttgttggtaaaccaatctctgttgagagacaagctcctgaggaactacttgtcctttaacaatgtattgttcaacttcacgtgtaatgaggttttgatggtaagctaattgttcaataagtttttggatctgttggttaatcagttgttgctggtagtgaacgtcttcagtgattggttgtcttctttcggtgatttcagtcaattcttggttgatcaattcttgcttggcgaagagttgttcgagaagttgaacgttaacgaattcttcaggaacttcgtatacttgctctccgtttacaagtctcatgttaaccaaataacggttcaatggagattgtccaagttgttgtctataaatttggttcaagatttggttagtgttcatttgatcttcaagaaggtattccccagatagatattgttgaggtaaatattgttgttgggtcaataaaccttgttgaagtacacgttgctgttggatttgtccgagcagagtttggaaatgtctgagtggagaataagtttgcaacaaaccttggtcaagagcccagtttctttggtttccatattgcaaattttgtccaagaggcataacatctcctacttgttcagcatattggcggagggtacgtactccttggacggggacaatgtcactaattccttgcatacggtattcacgatcccagtttctgatgacatcgtagatggtttcgttgatgagtccagcttcaactaacatttgaattctgttaagaaggttgtagtatttggtgtcgtcaagaataccttcatactgacggaaaatatcagtaagaatatcagcttggttgtagttttggtaaacggaaacaccagcgagggtacgacggtcgatagcttctccagttctaagtggttccccaacttggaacatctgggttcttgtgtttggacttctgagaacaacttcgacttgactgggatcggcaacactcttgaggattacgagttggtatcctctagagtcgaagagagatacagttccatcttctttgactcttacggttctaccaaggagtgttggtagagcaacgctgagtacgactaaagaaaacagaactagtaccttcatcttcgtgctgtatt

SEQ ID NO: 2320 - DNA, 1846 bp, Diabrotica virgifera
gtataatgaatacaatttattcttggaggaatttaatgcaaataaataattaatgacgtatccctctggataggcaacatatctcaaagttgttctgaagctatttccttgtggcatttttgtaatcaactattctaaatgagaaacaagccacaatttaattaaaaaaatgattattttgtgacggatattcttgagttgggctgatttcatgtaatcgaatgaactatcttttagtagagttccaggaacgcaactcataaatattggaaatatcattttaaagtctgtataatatatgtctgaattgccgatataaatgagtcagattaaattaaatttttagaagaattttttactaagcaacaacatttttgtttaatttattaatattttgtattttgacaacgacatccgatgtagacgtcgaaacgttaataaaatcatttttgaggttatacttctttacgattgagggtgaaattttatacttccctggcgcatgcgcagacagacagtatgtagttcgttgctaatctttcaagatagtatgtatcagcgcaaataagtcattaaaagaatatattagtgtttttagtaaatgtattatttattataatttttgtgtctttttatttgtcttcctcgggaataaaatattttataataataataagtatattttctttaaatattaaagtatttttatacctcacttggtctattaaatttgtcagtatgtatgagaaatcttgtaacctgtcaaagcaaagggaatatagctcagtggtagagcgtgtgaccggagatcgagaggtcccggttcgaatccgtgtgttttctatttttttttattttggtattgttttaataaaatttttggaaagtagtaagtaaaaattagtttaatatttaaataaaatacaaataactgttaagtatattatttcgttgaaatcatataatagaagtataacttcttacgtgcgtacaaagtacacacacattcttttttcctagtctatcacccaaccatcatgaccgaagagaaatagctgactgacagagttggctcttcaaatctgtttttatctgtttcgtgttgaggtttgacagttgatattaaaatgaatatttttgaacatttttacaaagaaaattgaaaatctattataagaaaatgtaccttagatgtccgtattatccaattaataatttatttatttaaaaaattgatctgaagactaaatggccccaaatacatatacattgtgttatgctaaaaataaccaaaaacaatgaaaaaattcgatttgttaattgtgaatgggattgtttttctcaaacatctcttattcgcacaatgtaggagctactggatgttaattctcttatctttctgtcaaaaatggaagtctttaaaatgaccttgacagtgtgcattaatattgtataaatattgtgttaaatcactcatatgtatagcagagatattaatagtgattcgattaaatgtcttgattctaaaatgggtacattatatatctactacacttaagtttgtgttaactgataaaacaaagttcaaactgtcagtcagctatgtctcctcggccttgatggttggatgatacatccacgcaatgaaaaaagttttaatgtgtttgtaacatttatgcggccgcccctttccagttttttctctttgggggttgtacggaggacaaccataaatagtgcacatgcatacatgactatacattgcaatgcagctagacattgctatgatgctcatgcacatgaccttaactagtggtaccccctccatcttatattgacataagtc

SEQ ID NO: 2321 - DNA, 1329 bp, Diabrotica virgifera
cgcatgcgcacaccgacagtatggtattagtcactacatctttatgtagcgcaaataaggtgtgcgtgaatagaatatattattagtgtttttagtaaatatatttattataatttttgtgtctttggatttgtcttcctcgggaataagatattttataataatagtaagtatatttaaagtattttgtatacttcacttggtctattaaatttgtcagtatgtatgagaaatcttgtaacctgtcaaagcaaagggaatatagctcagtggtagagcgtgtgaccggagatcgagaggtcccggttcgaatccgtgtgttttctatttttttttattttggtattgttttaataaaatttttggaaagtagtaagtaaaaattagtttaatatttaaataaaatacaaataactgttaagtatattatttcgttgaaatcatataatagaagtataacttcttacgtgcgtacaaagtacacacacattcttttttcctagtctatcacccaaccatcatgaccgaagagaaatagctgactgacagagttggctcttcaaatctgtttttatctgtttcgtgttgaggtttgacagttgatattaaaatgaatatttttgaacatttttacaaagaaaattgaaaatctattataagaaaatgtaccttagatgtccgtattatccaattaataatttatttatttaaaaaattgatctgaagactaaatggccccaaatacatatacattgtgttatgctaaaaataaccaaaaacaatgaaaaaattcgatttgttaattgtgaatgggattgtttttctcaaacatctcttattcgcacaatgtaggagctactggatgttaattctcttatctttctgtcaaaaatggaagtctttaaaatgaccttgacagtgtgcattaatattgtataaatattgtgttaaatcactcatatgtatagcagagatattaatagtgattcgattaaatgtcttgattctaaaatgggtacattatatatctactacacttaagtttgtgttaactgataaaacaaagttcaaactgtcagtcagctatgtctcctcggccttgatggttggatgatacatccacgcaatgaaaaaagttttaatgtgtttgtaacatttatgcggccgcccctttccagttttttctctttgggggttgtacggaggacaaccataaatagtgcacatgcatacatgactatacattgcaatgcagctagacattgctatgatgctcatgcacatgaccttaactagtggtaccccctccatcttatattgacataagtc

SEQ ID NO: 2322 - DNA, 1326 bp, Diabrotica virgifera
tatctatcagcgtagtcaggatatgtatcagcgctgtcagcgcaaataagtcatattatatcatataaaaggatatattagtgttcttagtaaatgtattatttattataattttgtgtctttggatttgtcttcctcgggaataagatattttataaaaatagtaagtatatttaaagtatttttgtatacttcatttgtcagtatgtatgagaaatcttgtaacctgtcaaagcaaaagggatatagctcaagtggtagagcgtgtgaccggagatcaagaggtcccgggttcaaatcccggacgattcatattctttttttttatatttttggtatcgttttaataaaaattttttaaaagtggtaggtaaagaaagttagtttaatatttaaataaaatacaaataactgttaagtatattatttcgttgaaatcatataatagaagtataacttcttacgtgcgtacaaagtacacacacattcttttttcctagtctatcacccaaccatcatgaccgaagagaaatagctgactgacagagttggctcttcaaatctgtttttatctgtttcgtgttgaggtttgacagttgatattaaaatgaatatttttgaacatttttacaaagaaaattgaaaatctattataagaaaatgtaccttagatgtccgtattatccaattaataatttatttatttaaaaaattgatctgaagactaaatggccccaaatacatatacattgtgttatgctaaaaataaccaaaaacaatgaaaaaattcgatttgttaattgtgaatgggattgtttttctcaaacatctcttattcgcacaatgtaggagctactggatgttaattctcttatctttctgtcaaaaatggaagtctttaaaatgaccttgacagtgtgcattaatattgtataaatattgtgttaaatcactcatatgtatagcagagatattaatagtgattcgattaaatgtcttgattctaaaatgggtacattatatatctactacacttaagtttgtgttaactgataaaacaaagttcaaactgtcagtcagctatgtctcctcggccttgatggttggatgatacatccacgcaatgaaaaaagttttaatgtgtttgtaacatttatgcggccgcccctttccagttttttctctttgggggttgtacggaggacaaccataaatagtgcacatgcatacatgactatacattgcaatgcagctagacattgctatgatgctcatgcacatgaccttaactagtggtaccccctccatcttatattgacataagtc

SEQ ID NO: 2323 - DNA, 1149 bp, Diabrotica virgifera
atacgtcacttggtctatttgacaatatctctgagaaatcttgtagtccgcacccgcacaaacaaaatgagtatagctcagtggtagagcgttcgactggagatcaagcggtccccggttcaaatccgggtgttttctattttttttttattattttttggtattgttttaatacatttttttggaaaactactaagtaaaaattagtttaatatttaaataaaatacaaataactgttaagtatattatttcgttgaaatcatataatagaagtataacttcttacgtgcgtacaaagtacacacacattcttttttcctagtctatcacccaaccatcatgaccgaagagaaatagctgactgacagagttggctcttcaaatctgtttttatctgtttcgtgttgaggtttgacagttgatattaaaatgaatatttttgaacatttttacaaagaaaattgaaaatctattataagaaaatgtaccttagatgtccgtattatccaattaataatttatttatttaaaaaattgatctgaagactaaatggccccaaatacatatacattgtgttatgctaaaaataaccaaaaacaatgaaaaaattcgatttgttaattgtgaatgggattgtttttctcaaacatctcttattcgcacaatgtaggagctactggatgttaattctcttatctttctgtcaaaaatggaagtctttaaaatgaccttgacagtgtgcattaatattgtataaatattgtgttaaatcactcatatgtatagcagagatattaatagtgattcgattaaatgtcttgattctaaaatgggtacattatatatctactacacttaagtttgtgttaactgataaaacaaagttcaaactgtcagtcagctatgtctcctcggccttgatggttggatgatacatccacgcaatgaaaaaagttttaatgtgtttgtaacatttatgcggccgcccctttccagttttttctctttgggggttgtacggaggacaaccataaatagtgcacatgcatacatgactatacattgcaatgcagctagacattgctatgatgctcatgcacatgaccttaactagtggtaccccctccatcttatattgacataagtc

SEQ ID NO: 2324 - DNA, 508 bp, Diabrotica virgifera
acaatataatgcaccatatttacaagataacatattttttctctattaaaaatttacagctaaacaaataaaataacatattttacacaacagtttactaaatttgtatagactttataaatctgtatatttcagtcagtgtatcattttacgtatgtacaaaatagtcgagttattaactggagtttgaaaaaaaaaaattgaagataatacttgaaatcgaatattttttgtcaacagatttaattgtcagtgagcccaagaactttgtacgtaaatggttaaaatacacctgaacaaaatatttataatatataatccaatattcatttcatgtagttgccaatttgctacatagctttggtgaaccgtaatctcccttagtttgaactataatcggggggaggggcgccctttaatttctcgtaaattttatgtcttattgtaaatgatattttctttaaataaatgttggggaattgttattattagcttatacaaaaaaaaa

SEQ ID NO: 2325 - DNA, 6007 bp, Diabrotica virgifera
  SmartBlast Evalue=1E-132; Info=Phosphatidylinositol transfer protein alpha isoform n=3 Tax=Apocrita RepID=E2A4U5_9HYME
gccggtcagggttgacacacatttatagatatagatttttttttaatatttaatttaaccagagttgatgtcatttgtataatgcgaaataaaaaaatctgtcagataatacagactgaattttattcatggtttttaaatggattcggccattccgagcgttaagtgatccctgcgcataagacttttcaaaaaatgaatgatccgagccattcatctgactgttttcggcaagccgaccccagctcatctcgagcttgacgatttacacgttaaactagagtcgaagagcaaccaaacgtatatttctctccgtaggcattaagcggcaggtacggcacatttaaatctgccgatgtttcatttggaagcatcggcagaaattgtaaaaaataatcacgccgatttagtcgcgtcgtttaactgctattgtaatttatttaagttttgaggaattgtcatttacgggacatgatgaatcggagcattcgttaaatcaaagtaattatagagaattaataaaattgtttaagaaatacgatttgaaattttccaatttttttttctgattcgaagatatttagcggcgtgtctaaaacagtacagaatgaactaatataatcaattagtttcattttgaataacgttatttaatctgagattctgaaaaccatttgcctttcgttagaagtagatgaaacttctgattatcatgtcattcacaactatcaattgttgttcgataggcgttacgtggtaatatttatgagaggtttttaggttttacagacgtcagtaaaagcaataaggtagaatatatttttggtgttttaaaggacagattaaaatttttggatatcaaaaataaattggtaaggcaaatttacgacggcgctgccgtgatgtccggtgaattgaatggtctccaggcaaaaggtaaaactattgcaccccaagctttatttactcactgtcatgcgcatagaatgaatatagttttgcaggatacgtgtaaaaaaattaaagaatatcatattttcttgccattttagctcgcctaaacggactactactgttttagaacaatttgtttaaaaaaaaaatgcaaacagtttatgaaattttaagtctcggttagttttcactgtagcaaattttcgtgaacagtgttttggaagtttttgattttattaacgaaggcgacgattttcaaagcggtgatatctcgatccgtgaagcaagcggtttgagaactttattaatattcttttaaatatttttaaagaaagtgtttgcccaaaccaatttgatattcattgttgttaaaaatcagtaaattgtcattatttattccaaaaataaaataagaaggctggtgcaaaatctcagagattttcgtaatgatagaagtttccaatatatacgcagtgacgttttggattcgcttgatattctcgaaccaccccaaaaaagacaaagtcacgatacatatctcgaaaaacgagtatattttgaaattttggattatggaacctgctattatgcaaacagatactcgtttttcgaattttgaagatttgcaaatttttgacctctttaataattcaaaatttaaaagttaccttcgccaaaaaattaccaatatatttatgtacaagttacttaaaaattatgctgatccaaatagtttcggaaagttggataagttacaaatatgtataattttatatagtaagtactgcaattcactacaacaaactgttcataaattctcttattaccactaacttctgcctcaaatgaacgggatttctcttgtctcaaaataatcaaaacgtattgtcgaaacactatgacacaagaatgtcaagtaaaccaaacaaaataaaaacaaaaacatctcctatgatgatttaagccttttaattagatggtatacacctatatgaggaggcaaaaaaatcttgccgaccctgtctctaaggccacgagccgccactggatggagcatcgctgacccaagtgtatcgagctaaaaggagactaggttcagaaataagtcaccacatattgtcaggatgtcaattttgtcaggatgaatcacaattcatcctgacaatattcgttcaaacctactctcaatgaaaataacttcaaaaatattaattttgactgttttattatgttttcaaaggaatgacggtttttattaaattctatataatcgcagataacagtttaagttgaataattaaaatagtaaaaaatatatacaacagtgtagatttttctgcagataaacaattcattaaaacgtaagtaaccgttggaactacctgtatatacaaatatatgtacttattcagtttttttctacaaaaaaagagacataaatgcaccttactaataaaaaaataatttaaaaaccactttatacttaaaaatactgaaattcaagactaggacattcggaaaaccccgtgtcacccttatccaaaacttttctttccggaatgtcggtgtctcaactcgatgagacggtcctgcattaaaatatcgtgaggcatcgctcgtaagttatacgaggtttgtctttttagttttgtatatcgccgcttagagggcgccaccaatgaaaccttccaacacaaatgtaacctcaatcttctgttgacataaatccaaagtttcattgtgatgtcgtgtaaatcaagtcaatccaaagtcgtgtaaatacaatgaattttttaaattatcaagttggacgaaaaatggatcttagtcgagaacattttcaaaacaataattttttacaattttcggagaggattatgccaacagcaatgtctcgctgaaatggtttctgtgtttgggaatgaatcatcacaccagtcaactatttctcgctggtattgtgaatttcaacgtggtcgttccagtcccagcgacgaatccagccaggtctacccaaaacagcaggcacacagcaaacattgatgcggttcgtcagctaattaaggatgactgctgtgtaacataccgggagatagaggcatctttgggcattttaaagacctcgatccaaaagatcctacatgaagaactgggtgttacgaagttgatttaccgttggatccttcatttactcacagaagagcaaaaatcggttcgcgtcaattggtatcgaaaaacattagaacggttcaacaaaggaagcccaaaaaatgtaatagcattcttagtgatgatgaatattggatttactcctacgaaccggaaaataaacgccaatccgctgtgtgggtgtttcacgatgaggaaaaatcaacaaaaacgatcatttctcgaaatgtgtcaaagaaaatagtcgctactttttttgtcaaaatctagttatgtggcaaaaattgctttagaaaatgaagaacggttacttttgattggtatataacagtttgtttaccagaagttatcgcgaaactccgacaaagcaacacacaatggtgaatcatcctagataaggacaatgtgctcacactgcccaaaagataatacgagtttttggagcttcaaaacatcgaattgctacactatccactgtatacccccgacctaagtcacaacgacttcttcacgttgccaaagatcaagatttcaatgcgtgggcagcgattccagtcatcagaagaagccatcgatgcctttaaaacagcaattttgcaggtgtcaactgaagactggaataactgttttaacaattggtttgaacgtatgcaaaagtgtatcgatcttaaaggaaatctatatcgatgtctatatatttttgtctggctatatacacaactaaaaagacaacccttgtaatggaagagaagagaatacttgaggatacaaaaaaatgtttttgtattaaattttgtaaagtatattgagtctcgttctaaaattagcaatctcagaaacagctagttaagtacatttctttatttctaaattaatttctcttcttgttaagatagagagccatttttaatgtattgactacatttggacagtttgtatgatgtttttcagtttttttttgccagattttctattttttgacaatataacagtgaatcaagattattttgagagtttgtattatctttttcagtgttttgccagaatttatattttttgacaatctaactgtgaagcaagatgaagaagcatgcttctagatgatttttttcaggattgacaagttttggcagtcaaatgttcaaaaatcgtcctagtcaaaaagttattatcagtgactactccttatcagtgtgagggatatatttcttaggtactgtaccactttgaccaattcgagatctgtctggaagatgtttatccatttttaacaacattgactactattctaccatctagatgacgtttttagccgttttattattgttacactgatttcctttaaacaatctggctattgtttccactgttcttccagtgttttcttcatatcgaaattagctgaggtaacaacatgaaaaacattttaaaaaagaatagtttttctcaggcggcttaaactgaggtaatttaaaaagtagcatctggataaacgtgaagaaggaagcagttcgtaatttgaagccatcaaaatatcttaagcaataagtactcgagaaaaaaatagctagtgaagatgaaaagacgacaaagtagtatgaattattttctactcttgcctgctgtacctcaaattgtctggataacttcaaaatatcaggataacttcaaaatatctgggcaacttcaaaatgtctggataacttcaaaatatctggataacttcaaaatctggataatttaaaaatatctggataacttcaaaatatctggataactttaaactgaacgacaacatacactgttctaactgttgaattgctgttaaaatttctgtagataactcacgaatttcagtacagaacatctcaactcaaacaatatttaacatcattttggtgtgtggtatggaaacttaattaaaattcatctaaatcatggttgcgttttaattggttttcgtttgtttttttttactttgactcttttttacttggctatgtttattcggtatcggccttcataccgcgtacttcacccttttgacggagagcttctagttcttcttttgttttatcttctattgcacggatgtcttccatcgtcagaccgtgccagcggtccatccaacagaaaacttgtctatggaaatttgtaaatagccgcctttcagatttttgtataaaactttctatcctcgtctgtaaaccaaaccatttgaattctacagttactaatttataacacgtcatcacaggattgactttgtccttccaatcaggacccacgagcggtcctctgcccgtcttttgagacttaaacttcgtaggatcttcgtcatctttgtaatctcccgacgatacactatcattagcgatgtcgatgtgtaccacttctctttgtttcaatttgtcactgggtaagtcatgaacattttcttgattacctttgtctcctacgtgtaaagtttctataactaatttgaatttgtctttcatatagcctggattcgtaatgacggtcctacaatatgggtaagcattccaagcctcttcgtgtatctccaaactccccttcggtgccaggagccttatgaacgccggtactttgctggccaaatggtagattttgtaagtgtactgtccgctgttgtatttacccccgagtaaggggaaattggtgaagggttcatttttcaatacttctatcccctctccgccgccagtgttgtctttggaagcctctgccacgctgaatagttgagccacttggtactcttcgactgtgaggggtagggtcacacggtattctttaatcagcatgttttctttgctgcaattttaactattaaacatgcaaaatttcctggcacacactgactaat

SEQ ID NO: 2326 - DNA, 5990 bp, Diabrotica virgifera
  SmartBlast Evalue=1E-132; Info=Phosphatidylinositol transfer protein alpha isoform n=3 Tax=Apocrita RepID=E2A4U5_9HYME
gccggtcagggttgacacacatttatagatatagatttttttttaatatttaatttaaccagagttgatgtcatttgtataatgcgaaataaaaaaatctgtcagataatacagactgaattttattcatggtttttaaatggattcggccattccgagcgttaagtgatccctgcgcataagacttttcaaaaaatgaatgatccgagccattcatctgactgttttcggcaagccgaccccagctcatctcgagcttgacgatttacacgttaaactagagtcgaagagcaaccaaacgtatatttctctccgtaggcattaagcggcaggtacggcacatttaaatctgccgatgtttcatttggaagcatcggcagaaattgtaaaaaataatcacgccgatttagtcgcgtcgtttaactgctattgtaatttatttaagttttgaggaattgtcatttacgggacatgatgaatcggagcattcgttaaatcaaagtaattatagagaattaataaaattgtttaagaaatacgatttgaaattttccaatttttttttctgattcgaagatatttagcggcgtgtctaaaacagtacagaatgaactaatataatcaattagtttcattttgaataacgttatttaatctgagattctgaaaaccatttgcctttcgttagaagtagatgaaacttctgattatcatgtcattcacaactatcaattgttgttcgataggcgttacgtggtaatatttatgagaggtttttaggttttacagacgtcagtaaaagcaataaggtagaatatatttttggtgttttaaaggacagattaaaatttttggatatcaaaaataaattggtaaggcaaatttacgacggcgctgccgtgatgtccggtgaattgaatggtctccaggcaaaaggtaaaactattgcaccccaagctttatttactcactgtcatgcgcatagaatgaatatagttttgcaggatacgtgtaaaaaaattaaagaatatcatattttcttgccattttagctcgcctaaacggactactactgttttagaacaatttgtttaaaaaaaaaatgcaaacagtttatgaaattttaagtctcggttagttttcactgtagcaaattttcgtgaacagtgttttggaagtttttgattttattaacgaaggcgacgattttcaaagcggtgatatctcgatccgtgaagcaagcggtttgagaactttattaatattcttttaaatatttttaaagaaagtgtttgcccaaaccaatttgatattcattgttgttaaaaatcagtaaattgtcattatttattccaaaaataaaataagaaggctggtgcaaaatctcagagattttcgtaatgatagaagtttccaatatatacgcagtgacgttttggattcgcttgatattctcgaaccaccccaaaaaagacaaagtcacgatacatatctcgaaaaacgagtatattttgaaattttggattatggaacctgctattatgcaaacagatactcgtttttcgaattttgaagatttgcaaatttttgacctctttaataattcaaaatttaaaagttaccttcgccaaaaaattaccaatatatttatgtacaagttacttaaaaattatgctgatccaaatagtttcggaaagttggataagttacaaatatgtataattttatatagtaagtactgcaattcactacaacaaactgttcataaattctcttattaccactaacttctgcctcaaatgaacgggatttctcttgtctcaaaataatcaaaacgtattgtcgaaacactatgacacaagaatgtcaagtaaaccaaacaaaataaaaacaaaaacatctcctatgatgatttaagccttttaattagatggtatacacctatatgaggaggcaaaaaaatcttgccgaccctgtctctaaggccacgagccgccactggatggagcatcgctgacccaagtgtatcgagctaaaaggagactaggttcagaaataagtcaccacatattgtcaggatgaatcacaattcatcctgacaatattcgttcaaacctactctcaatgaaaataacttcaaaaatattaattttgactgttttattatgttttcaaaggaatgacggtttttattaaattctatataatcgcagataacagtttaagttgaataattaaaatagtaaaaaatatatacaacagtgtagatttttctgcagataaacaattcattaaaacgtaagtaaccgttggaactacctgtatatacaaatatatgtacttattcagtttttttctacaaaaaaagagacataaatgcaccttactaataaaaaaataatttaaaaaccactttatacttaaaaatactgaaattcaagactaggacattcggaaaaccccgtgtcacccttatccaaaacttttctttccggaatgtcggtgtctcaactcgatgagacggtcctgcattaaaatatcgtgaggcatcgctcgtaagttatacgaggtttgtctttttagttttgtatatcgccgcttagagggcgccaccaatgaaaccttccaacacaaatgtaacctcaatcttctgttgacataaatccaaagtttcattgtgatgtcgtgtaaatcaagtcaatccaaagtcgtgtaaatacaatgaattttttaaattatcaagttggacgaaaaatggatcttagtcgagaacattttcaaaacaataattttttacaattttcggagaggattatgccaacagcaatgtctcgctgaaatggtttctgtgtttgggaatgaatcatcacaccagtcaactatttctcgctggtattgtgaatttcaacgtggtcgttccagtcccagcgacgaatccagccaggtctacccaaaacagcaggcacacagcaaacattgatgcggttcgtcagctaattaaggatgactgctgtgtaacataccgggagatagaggcatctttgggcattttaaagacctcgatccaaaagatcctacatgaagaactgggtgttacgaagttgatttaccgttggatccttcatttactcacagaagagcaaaaatcggttcgcgtcaattggtatcgaaaaacattagaacggttcaacaaaggaagcccaaaaaatgtaatagcattcttagtgatgatgaatattggatttactcctacgaaccggaaaataaacgccaatccgctgtgtgggtgtttcacgatgaggaaaaatcaacaaaaacgatcatttctcgaaatgtgtcaaagaaaatagtcgctactttttttgtcaaaatctagttatgtggcaaaaattgctttagaaaatgaagaacggttacttttgattggtatataacagtttgtttaccagaagttatcgcgaaactccgacaaagcaacacacaatggtgaatcatcctagataaggacaatgtgctcacactgcccaaaagataatacgagtttttggagcttcaaaacatcgaattgctacactatccactgtatacccccgacctaagtcacaacgacttcttcacgttgccaaagatcaagatttcaatgcgtgggcagcgattccagtcatcagaagaagccatcgatgcctttaaaacagcaattttgcaggtgtcaactgaagactggaataactgttttaacaattggtttgaacgtatgcaaaagtgtatcgatcttaaaggaaatctatatcgatgtctatatatttttgtctggctatatacacaactaaaaagacaacccttgtaatggaagagaagagaatacttgaggatacaaaaaaatgtttttgtattaaattttgtaaagtatattgagtctcgttctaaaattagcaatctcagaaacagctagttaagtacatttctttatttctaaattaatttctcttcttgttaagatagagagccatttttaatgtattgactacatttggacagtttgtatgatgtttttcagtttttttttgccagattttctattttttgacaatataacagtgaatcaagattattttgagagtttgtattatctttttcagtgttttgccagaatttatattttttgacaatctaactgtgaagcaagatgaagaagcatgcttctagatgatttttttcaggattgacaagttttggcagtcaaatgttcaaaaatcgtcctagtcaaaaagttattatcagtgactactccttatcagtgtgagggatatatttcttaggtactgtaccactttgaccaattcgagatctgtctggaagatgtttatccatttttaacaacattgactactattctaccatctagatgacgtttttagccgttttattattgttacactgatttcctttaaacaatctggctattgtttccactgttcttccagtgttttcttcatatcgaaattagctgaggtaacaacatgaaaaacattttaaaaaagaatagtttttctcaggcggcttaaactgaggtaatttaaaaagtagcatctggataaacgtgaagaaggaagcagttcgtaatttgaagccatcaaaatatcttaagcaataagtactcgagaaaaaaatagctagtgaagatgaaaagacgacaaagtagtatgaattattttctactcttgcctgctgtacctcaaattgtctggataacttcaaaatatcaggataacttcaaaatatctgggcaacttcaaaatgtctggataacttcaaaatatctggataacttcaaaatctggataatttaaaaatatctggataacttcaaaatatctggataactttaaactgaacgacaacatacactgttctaactgttgaattgctgttaaaatttctgtagataactcacgaatttcagtacagaacatctcaactcaaacaatatttaacatcattttggtgtgtggtatggaaacttaattaaaattcatctaaatcatggttgcgttttaattggttttcgtttgtttttttttactttgactcttttttacttggctatgtttattcggtatcggccttcataccgcgtacttcacccttttgacggagagcttctagttcttcttttgttttatcttctattgcacggatgtcttccatcgtcagaccgtgccagcggtccatccaacagaaaacttgtctatggaaatttgtaaatagccgcctttcagatttttgtataaaactttctatcctcgtctgtaaaccaaaccatttgaattctacagttactaatttataacacgtcatcacaggattgactttgtccttccaatcaggacccacgagcggtcctctgcccgtcttttgagacttaaacttcgtaggatcttcgtcatctttgtaatctcccgacgatacactatcattagcgatgtcgatgtgtaccacttctctttgtttcaatttgtcactgggtaagtcatgaacattttcttgattacctttgtctcctacgtgtaaagtttctataactaatttgaatttgtctttcatatagcctggattcgtaatgacggtcctacaatatgggtaagcattccaagcctcttcgtgtatctccaaactccccttcggtgccaggagccttatgaacgccggtactttgctggccaaatggtagattttgtaagtgtactgtccgctgttgtatttacccccgagtaaggggaaattggtgaagggttcatttttcaatacttctatcccctctccgccgccagtgttgtctttggaagcctctgccacgctgaatagttgagccacttggtactcttcgactgtgaggggtagggtcacacggtattctttaatcagcatgttttctttgctgcaattttaactattaaacatgcaaaatttcctggcacacactgactaat

SEQ ID NO: 2327 - DNA, 5985 bp, Diabrotica virgifera
  SmartBlast Evalue=1E-132; Info=Phosphatidylinositol transfer protein alpha isoform n=3 Tax=Apocrita RepID=E2A4U5_9HYME
gccggtcagggttgacacacatttatagatatagatttttttttaatatttaatttaaccagagttgatgtcatttgtataatgcgaaataaaaaaatctgtcagataatacagactgaattttattcatggtttttaaatggattcggccattccgagcgttaagtgatccctgcgcataagacttttcaaaaaatgaatgatccgagccattcatctgactgttttcggcaagccgaccccagctcatctcgagcttgacgatttacacgttaaactagagtcgaagagcaaccaaacgtatatttctctccgtaggcattaagcggcaggtacggcacatttaaatctgccgatgtttcatttggaagcatcggcagaaattgtaaaaaataatcacgccgatttagtcgcgtcgtttaactgctattgtaatttatttaagttttgaggaattgtcatttacgggacatgatgaatcggagcattcgttaaatcaaagtaattatagagaattaataaaattgtttaagaaatacgatttgaaattttccaatttttttttctgattcgaagatatttagcggcgtgtctaaaacagtacagaatgaactaatataatcaattagtttcattttgaataacgttatttaatctgagattctgaaaaccatttgcctttcgttagaagtagatgaaacttctgattatcatgtcattcacaactatcaattgttgttcgataggcgttacgtggtaatatttatgagaggtttttaggttttacagacgtcagtaaaagcaataaggtagaatatatttttggtgttttaaaggacagattaaaatttttggatatcaaaaataaattggtaaggcaaatttacgacggcgctgccgtgatgtccggtgaattgaatggtctccaggcaaaaggtaaaactattgcaccccaagctttatttactcactgtcatgcgcatagaatgaatatagttttgcaggatacgtgtaaaaaaattaaagaatatcatattttcttgccattttagctcgcctaaacggactactactgttttagaacaatttgtttaaaaaaaaaatgcaaacagtttatgaaattttaagtctcggttagttttcactgtagcaaattttcgtgaacagtgttttggaagtttttgattttattaacgaaggcgacgattttcaaagcggtgatatctcgatccgtgaagcaagcggtttgagaactttattaatattcttttaaatatttttaaagaaagtgtttgcccaaaccaatttgatattcattgttgttaaaaatcagtaaattgtcattatttattccaaaaataaaataagaaggctggtgcaaaatctcagagattttcgtaatgatagaagtttccaatatatacgcagtgacgttttggattcgcttgatattctcgaaccaccccaaaaaagacaaagtcacgatacatatctcgaaaaacgagtatattttgaaattttggattatggaacctgctattatgcaaacagatactcgtttttcgaattttgaagatttgcaaatttttgacctctttaataattcaaaatttaaaagttaccttcgccaaaaaattaccaatatatttatgtacaagttacttaaaaattatgctgatccaaatagtttcggaaagttggataagttacaaatatgtataattttatatagtaagtactgcaattcactacaacaaactgttcataaattctcttattaccactaacttctgcctcaaatgaacgggatttctcttgtctcaaaataatcaaaacgtattgtcgaaacactatgacacaagaatgtcaagtaaaccaaacaaaataaaaacaaaaacatctcctatgatgatttaagccttttaattagatggtatacacctatatgaggaggcaaaaaaatcttgccgaccctgtctctaaggccacgagccgccactggatggagcatcgctgacccaagtgtatcgagctaaaaggagactaggttcagaaataagtcaccacatattgtcaggatgtcaattttgtcaggatgaatcacaattcatcctgacaatattcgttcaaacctactctcaatgaaaataacttcaaaaatattaattttgactgttttattatgttttcaaaggaatgacggtttttattaaattctatataatcgcagataacagtttaagttgaataattaaaatagtaaaaaatatatacaacagtgtagatttttctgcagataaacaattcattaaaacgtaagtaaccgttggaactacctgtatatacaaatatatgtacttattccgttttttctacaaaaaaagagacataaatgcaccttactaataaaaaaataatttaaaaaccactttatacttaaaaatactgaaattcaagactaggacattcggaaaaccccgtgtcacccttatccaaaacttttctttccggaatgtcggtgtctcaactcgatgagacggtcctgcattaaaatatcgtgaggcatcgctcgtaagttatatgaggtttgtctttttagttttgtatatcgccgcttagagggcgccaccaatgaaacctttcaacacaaacgtaacctcaatcttctgttgacataaatccaaagtttcattgtgatacaaggcgtgtagatacagtgaattttttaaattagcaagttggacgaaaaatggatcttagccgagaacattttcaaaacaataattttttacaattttcggagaggattatgccaacagcaatgtctcgctgaaatggtttctgtgtttgggaatgaatcatcacaccagtcaactatttctcgctggtattgtgaatttcaacgtggtcgttccagtcccagcgacgaatccagccaggtctacccaaaacagcaggcacacagcaaacattgatgcggttcgtcagctaattaaggatgactgctgtgtaacataccgggagatagaggcatctttgggcattttaaagacctcgatccaaaagatcctacatgaagaactgggtgttacgaagttgatttaccgttggatccttcatttactcacagaagagcaaaaatcggttcgcgtcaattggtatcgaaaaacattagaacggttcaacaaaggaagcccaaaaaatgtaatagcattcttagtgatgatgaatattggatttactcctacgaaccggaaaataaacgccaatccgctgtgtgggtgtttcacgatgaggaaaaatcaacaaaaacgatcatttctcgaaatgtgtcaaagaaaatagtcgctactttttttgtcaaaatctagttatgtggcaaaaattgctttagaaaatgaagaacggttacttttgattggtatataacagtttgtttaccagaagttatcgcgaaactccgacaaagcaacacacaatggtgaatcatcctagataaggacaatgtgctcacactgcccaaaagataatacgagtttttggagcttcaaaacatcgaattgctacactatccactgtatacccccgacctaagtcacaacgacttcttcacgttgccaaagatcaagatttcaatgcgtgggcagcgattccagtcatcagaagaagccatcgatgcctttaaaacagcaattttgcaggtgtcaactgaagactggaataactgttttaacaattggtttgaacgtatgcaaaagtgtatcgatcttaaaggaaatctatatcgatgtctatatatttttgtctggctatatacacaactaaaaagacaacccttgtaatggaagagaagagaatacttgaggatacaaaaaaatgtttttgtattaaattttgtaaagtatattgagtctcgttctaaaattagcaatctcagaaacagctagttaagtacatttctttatttctaaattaatttctcttcttgttaagatagagagccatttttaatgtattgactacatttggacagtttgtatgatgtttttcagtttttttttgccagattttctattttttgacaatataacagtgaatcaagattattttgagagtttgtattatctttttcagtgttttgccagaatttatattttttgacaatctaactgtgaagcaagatgaagaagcatgcttctagatgatttttttcaggattgacaagttttggcagtcaaatgttcaaaaatcgtcctagtcaaaaagttattatcagtgactactccttatcagtgtgagggatatatttcttaggtactgtaccactttgaccaattcgagatctgtctggaagatgtttatccatttttaacaacattgactactattctaccatctagatgacgtttttagccgttttattattgttacactgatttcctttaaacaatctggctattgtttccactgttcttccagtgttttcttcatatcgaaattagctgaggtaacaacatgaaaaacattttaaaaaagaatagtttttctcaggcggcttaaactgaggtaatttaaaaagtagcatctggataaacgtgaagaaggaagcagttcgtaatttgaagccatcaaaatatcttaagcaataagtactcgagaaaaaaatagctagtgaagatgaaaagacgacaaagtagtatgaattattttctactcttgcctgctgtacctcaaattgtctggataacttcaaaatatcaggataacttcaaaatatctgggcaacttcaaaatgtctggataacttcaaaatatctggataacttcaaaatctggataatttaaaaatatctggataacttcaaaatatctggataactttaaactgaacgacaacatacactgttctaactgttgaattgctgttaaaatttctgtagataactcacgaatttcagtacagaacatctcaactcaaacaatatttaacatcattttggtgtgtggtatggaaacttaattaaaattcatctaaatcatggttgcgttttaattggttttcgtttgtttttttttactttgactcttttttacttggctatgtttattcggtatcggccttcataccgcgtacttcacccttttgacggagagcttctagttcttcttttgttttatcttctattgcacggatgtcttccatcgtcagaccgtgccagcggtccatccaacagaaaacttgtctatggaaatttgtaaatagccgcctttcagatttttgtataaaactttctatcctcgtctgtaaaccaaaccatttgaattctacagttactaatttataacacgtcatcacaggattgactttgtccttccaatcaggacccacgagcggtcctctgcccgtcttttgagacttaaacttcgtaggatcttcgtcatctttgtaatctcccgacgatacactatcattagcgatgtcgatgtgtaccacttctctttgtttcaatttgtcactgggtaagtcatgaacattttcttgattacctttgtctcctacgtgtaaagtttctataactaatttgaatttgtctttcatatagcctggattcgtaatgacggtcctacaatatgggtaagcattccaagcctcttcgtgtatctccaaactccccttcggtgccaggagccttatgaacgccggtactttgctggccaaatggtagattttgtaagtgtactgtccgctgttgtatttacccccgagtaaggggaaattggtgaagggttcatttttcaatacttctatcccctctccgccgccagtgttgtctttggaagcctctgccacgctgaatagttgagccacttggtactcttcgactgtgaggggtagggtcacacggtattctttaatcagcatgttttctttgctgcaattttaactattaaacatgcaaaatttcctggcacacactgactaat

SEQ ID NO: 2328 - DNA, 5968 bp, Diabrotica virgifera
  SmartBlast Evalue=1E-132; Info=Phosphatidylinositol transfer protein alpha isoform n=3 Tax=Apocrita RepID=E2A4U5_9HYME
gccggtcagggttgacacacatttatagatatagatttttttttaatatttaatttaaccagagttgatgtcatttgtataatgcgaaataaaaaaatctgtcagataatacagactgaattttattcatggtttttaaatggattcggccattccgagcgttaagtgatccctgcgcataagacttttcaaaaaatgaatgatccgagccattcatctgactgttttcggcaagccgaccccagctcatctcgagcttgacgatttacacgttaaactagagtcgaagagcaaccaaacgtatatttctctccgtaggcattaagcggcaggtacggcacatttaaatctgccgatgtttcatttggaagcatcggcagaaattgtaaaaaataatcacgccgatttagtcgcgtcgtttaactgctattgtaatttatttaagttttgaggaattgtcatttacgggacatgatgaatcggagcattcgttaaatcaaagtaattatagagaattaataaaattgtttaagaaatacgatttgaaattttccaatttttttttctgattcgaagatatttagcggcgtgtctaaaacagtacagaatgaactaatataatcaattagtttcattttgaataacgttatttaatctgagattctgaaaaccatttgcctttcgttagaagtagatgaaacttctgattatcatgtcattcacaactatcaattgttgttcgataggcgttacgtggtaatatttatgagaggtttttaggttttacagacgtcagtaaaagcaataaggtagaatatatttttggtgttttaaaggacagattaaaatttttggatatcaaaaataaattggtaaggcaaatttacgacggcgctgccgtgatgtccggtgaattgaatggtctccaggcaaaaggtaaaactattgcaccccaagctttatttactcactgtcatgcgcatagaatgaatatagttttgcaggatacgtgtaaaaaaattaaagaatatcatattttcttgccattttagctcgcctaaacggactactactgttttagaacaatttgtttaaaaaaaaaatgcaaacagtttatgaaattttaagtctcggttagttttcactgtagcaaattttcgtgaacagtgttttggaagtttttgattttattaacgaaggcgacgattttcaaagcggtgatatctcgatccgtgaagcaagcggtttgagaactttattaatattcttttaaatatttttaaagaaagtgtttgcccaaaccaatttgatattcattgttgttaaaaatcagtaaattgtcattatttattccaaaaataaaataagaaggctggtgcaaaatctcagagattttcgtaatgatagaagtttccaatatatacgcagtgacgttttggattcgcttgatattctcgaaccaccccaaaaaagacaaagtcacgatacatatctcgaaaaacgagtatattttgaaattttggattatggaacctgctattatgcaaacagatactcgtttttcgaattttgaagatttgcaaatttttgacctctttaataattcaaaatttaaaagttaccttcgccaaaaaattaccaatatatttatgtacaagttacttaaaaattatgctgatccaaatagtttcggaaagttggataagttacaaatatgtataattttatatagtaagtactgcaattcactacaacaaactgttcataaattctcttattaccactaacttctgcctcaaatgaacgggatttctcttgtctcaaaataatcaaaacgtattgtcgaaacactatgacacaagaatgtcaagtaaaccaaacaaaataaaaacaaaaacatctcctatgatgatttaagccttttaattagatggtatacacctatatgaggaggcaaaaaaatcttgccgaccctgtctctaaggccacgagccgccactggatggagcatcgctgacccaagtgtatcgagctaaaaggagactaggttcagaaataagtcaccacatattgtcaggatgaatcacaattcatcctgacaatattcgttcaaacctactctcaatgaaaataacttcaaaaatattaattttgactgttttattatgttttcaaaggaatgacggtttttattaaattctatataatcgcagataacagtttaagttgaataattaaaatagtaaaaaatatatacaacagtgtagatttttctgcagataaacaattcattaaaacgtaagtaaccgttggaactacctgtatatacaaatatatgtacttattccgttttttctacaaaaaaagagacataaatgcaccttactaataaaaaaataatttaaaaaccactttatacttaaaaatactgaaattcaagactaggacattcggaaaaccccgtgtcacccttatccaaaacttttctttccggaatgtcggtgtctcaactcgatgagacggtcctgcattaaaatatcgtgaggcatcgctcgtaagttatatgaggtttgtctttttagttttgtatatcgccgcttagagggcgccaccaatgaaacctttcaacacaaacgtaacctcaatcttctgttgacataaatccaaagtttcattgtgatacaaggcgtgtagatacagtgaattttttaaattagcaagttggacgaaaaatggatcttagccgagaacattttcaaaacaataattttttacaattttcggagaggattatgccaacagcaatgtctcgctgaaatggtttctgtgtttgggaatgaatcatcacaccagtcaactatttctcgctggtattgtgaatttcaacgtggtcgttccagtcccagcgacgaatccagccaggtctacccaaaacagcaggcacacagcaaacattgatgcggttcgtcagctaattaaggatgactgctgtgtaacataccgggagatagaggcatctttgggcattttaaagacctcgatccaaaagatcctacatgaagaactgggtgttacgaagttgatttaccgttggatccttcatttactcacagaagagcaaaaatcggttcgcgtcaattggtatcgaaaaacattagaacggttcaacaaaggaagcccaaaaaatgtaatagcattcttagtgatgatgaatattggatttactcctacgaaccggaaaataaacgccaatccgctgtgtgggtgtttcacgatgaggaaaaatcaacaaaaacgatcatttctcgaaatgtgtcaaagaaaatagtcgctactttttttgtcaaaatctagttatgtggcaaaaattgctttagaaaatgaagaacggttacttttgattggtatataacagtttgtttaccagaagttatcgcgaaactccgacaaagcaacacacaatggtgaatcatcctagataaggacaatgtgctcacactgcccaaaagataatacgagtttttggagcttcaaaacatcgaattgctacactatccactgtatacccccgacctaagtcacaacgacttcttcacgttgccaaagatcaagatttcaatgcgtgggcagcgattccagtcatcagaagaagccatcgatgcctttaaaacagcaattttgcaggtgtcaactgaagactggaataactgttttaacaattggtttgaacgtatgcaaaagtgtatcgatcttaaaggaaatctatatcgatgtctatatatttttgtctggctatatacacaactaaaaagacaacccttgtaatggaagagaagagaatacttgaggatacaaaaaaatgtttttgtattaaattttgtaaagtatattgagtctcgttctaaaattagcaatctcagaaacagctagttaagtacatttctttatttctaaattaatttctcttcttgttaagatagagagccatttttaatgtattgactacatttggacagtttgtatgatgtttttcagtttttttttgccagattttctattttttgacaatataacagtgaatcaagattattttgagagtttgtattatctttttcagtgttttgccagaatttatattttttgacaatctaactgtgaagcaagatgaagaagcatgcttctagatgatttttttcaggattgacaagttttggcagtcaaatgttcaaaaatcgtcctagtcaaaaagttattatcagtgactactccttatcagtgtgagggatatatttcttaggtactgtaccactttgaccaattcgagatctgtctggaagatgtttatccatttttaacaacattgactactattctaccatctagatgacgtttttagccgttttattattgttacactgatttcctttaaacaatctggctattgtttccactgttcttccagtgttttcttcatatcgaaattagctgaggtaacaacatgaaaaacattttaaaaaagaatagtttttctcaggcggcttaaactgaggtaatttaaaaagtagcatctggataaacgtgaagaaggaagcagttcgtaatttgaagccatcaaaatatcttaagcaataagtactcgagaaaaaaatagctagtgaagatgaaaagacgacaaagtagtatgaattattttctactcttgcctgctgtacctcaaattgtctggataacttcaaaatatcaggataacttcaaaatatctgggcaacttcaaaatgtctggataacttcaaaatatctggataacttcaaaatctggataatttaaaaatatctggataacttcaaaatatctggataactttaaactgaacgacaacatacactgttctaactgttgaattgctgttaaaatttctgtagataactcacgaatttcagtacagaacatctcaactcaaacaatatttaacatcattttggtgtgtggtatggaaacttaattaaaattcatctaaatcatggttgcgttttaattggttttcgtttgtttttttttactttgactcttttttacttggctatgtttattcggtatcggccttcataccgcgtacttcacccttttgacggagagcttctagttcttcttttgttttatcttctattgcacggatgtcttccatcgtcagaccgtgccagcggtccatccaacagaaaacttgtctatggaaatttgtaaatagccgcctttcagatttttgtataaaactttctatcctcgtctgtaaaccaaaccatttgaattctacagttactaatttataacacgtcatcacaggattgactttgtccttccaatcaggacccacgagcggtcctctgcccgtcttttgagacttaaacttcgtaggatcttcgtcatctttgtaatctcccgacgatacactatcattagcgatgtcgatgtgtaccacttctctttgtttcaatttgtcactgggtaagtcatgaacattttcttgattacctttgtctcctacgtgtaaagtttctataactaatttgaatttgtctttcatatagcctggattcgtaatgacggtcctacaatatgggtaagcattccaagcctcttcgtgtatctccaaactccccttcggtgccaggagccttatgaacgccggtactttgctggccaaatggtagattttgtaagtgtactgtccgctgttgtatttacccccgagtaaggggaaattggtgaagggttcatttttcaatacttctatcccctctccgccgccagtgttgtctttggaagcctctgccacgctgaatagttgagccacttggtactcttcgactgtgaggggtagggtcacacggtattctttaatcagcatgttttctttgctgcaattttaactattaaacatgcaaaatttcctggcacacactgactaat

SEQ ID NO: 2329 - DNA, 1053 bp, Diabrotica virgifera
gccggtcagggttgacacacatttatagatatagatttttttttaatatttaatttaaccagagttgatgtcatttgtataatgcgaaataaaaaaatctgtcagataatacagactgaattttattcatggtttttaaatggattcggccattccgagcgttaagtgatccctgcgcataagacttttcaaaaaatgaatgatccgagccattcatctgactgttttcggcaagccgaccccagctcatctcgagcttgacgatttacacgttaaactagagtcgaagagcaaccaaacgtatatttctctccgtaggcattaagcggcaggtacggcacatttaaatctgccgatgtttcatttggaagcatcggcagaaattgtaaaaaataatcacgccgatttagtcgcgtcgtttaactgctattgtaatttatttaagttttgaggaattgtcatttacgggacatgatgaatcggagcattcgttaaatcaaagtaattatagagaattaataaaattgtttaagaaatacgatttgaaattttccaatttttttttctgattcgaagatatttagcggcgtgtctaaaacagtacagaatgaactaatataatcaattagtttcattttgaataacgttatttaatctgagattctgaaaaccatttgcctttcgttagaagtagatgaaacttctgattatcatgtcattcacaactatcaattgttgttcgataggcgttacgtggtaatatttatgagaggtttttaggttttacagacgtcagtaaaagcaataaggtagaatatatttttggtgttttaaaggacagattaaaatttttggatatcaaaaataaattgaatgaattgaatggtctccaggcaaaaggtaaaactatttcaccacaagctttatttactcactgtcatgcgcatataatgaatatagttttgcaggatacgtgtaaaaaaaatgaaagaatatcatcttttcttgccatctagctcgcctaaacggactactactgttttagaacaattt

SEQ ID NO: 2330 - DNA, 4829 bp, Diabrotica virgifera
  SmartBlast Evalue=8E-51; Info=Single Ig IL-1-related receptor (Fragment) n=1 Tax=Camponotus floridanus RepID=E2A9S7_9HYME
ccggcggacacaaatcattctcattctcgttttagttggcgtggaacatttgtgacgagaggtttaagtgaggttcggtttacaagacgcgacgagacgatcgtgttaaaacttgtgctaagtgaaaattaacatttgacatatctcgaactcattagaaattaattccttaattaaaatcgaatatattctgactacaaaaattactttaatgcattttaaaagcaagttttagtggctgattcaccggtttttttttgctaagaccatggcgatgtttagattggctttttcagtgttgctttgtttagttcctggaattttaggaatgaacaatttttgtaacagaaacaattacgagaatcttcctcggaataatatgcagtttagtaaagaggtcaactttagggagtttgctgtggtcgggaatctaaaggccctgcattgctgtgccaaagactaccacactattacatggtataaagacaataaagtctatccatggcctctagaattgtccaccatgctactgtttccagctagcgttaatcagactatctacgtccagtctgtgaaacccaccgatgcaggaaattacacttgtgtactgaagaatgatactgttttgcattcgcatacgatacaattaagactttttgatagagcaccggatgatccacaaatcacatacctgtcagaagatactgtgttatctgtaggagataatctaagactgttctgtgaagctttcgttggtctggtagacgttccagacgcacatagcgaagtgtattggaacaaattgtacccaaacagcactacatatgatgagttgccatctcatattagacatgcacaaacagaacaagaagatggccaaaccctgggagcttatatgataatagattcgatacaatctgaagatttcggagaatacgaatgcgtaatcaccaaacctggaatcaccattaaaaaatacatcaaagttattgaacgagaaatagaagtggagtatttagaccccagtcccctaccgattgcaaaattggccattttaatgactgccattttgtgtattttcgtagctgtggtggtattgtatctcaaatttggtttgaaggttcaagtacgcctcaaggacaccttgagtcctttggaggattctgatgggaaggaaaaggatgtattggtagtctatacgtcagcggactctgaattagcattgggggttttgttaccaaccttagaagaaaaatacaaatacacttgtgattctaaagagctgtgtccagaaattagtttgtggtacaaagacttgtcggaaggagaaaaatacagaagggtaattgttgtgatatcgcctgccatgctggaaggatcttgggatcctagtagactcttattagcactgaaacaattaaaaggttttggacccaatgtaattttcatttctttgaaggagcttccgaaaaccgagcctgaaattaagaatgccgaaggggaaacgttgagcgccgtcataagatcattgggggtaattgtgtgggacaggcgcgacgaagaaaaagtatggtacttactacgtctcaaactccctcccaaaagaacgggttccgaaaagaggaccacaggacccgatacaagactgcgtaataattctcaagaatctataggagaatacgttgtgtgaactggtagcttttattgtgaaaatatcgataggttgtagccaacagttttgtacgttttatgaagttacctcagagtttctgatttgtttaaagtttaaataataaaaaagattaggtacggttctgtttttttatagctttaaaccttacatttcaactttttacttttctttgaaaacaacaccacaattaaaaagaaatatatcttttcttacggttataaaaaaagatttggtttttctagctatgaattatacacactttgcaagatatgtatgagacctgatctaccttagtggctatttgtacaccataagagtaaggtaatatggacgctatagagtttaaaatgaattattgtagtaacaaagattaccaaacatcaaaacagtttgaagtgttaccagataaaatgtattggacaaatcatagacttttattatgaagacattgcctgaaattgaaactgcaggataataaatcttagcactatctttgactcttctttatcagctatatttcgttattttgaatcagaagattgggtttacctatactcaaataatattttgtatataataaaattttgtatttttttatataaataaatataatatagataaggtcagtataaaaatccatagaaaatataatataatcaatattagataacaagggaagagaatattaagatcaagttcagtaactcaagtgtagcgaagaatatatgaacaatatagtaaactattttgactatcttctagaaatataacttaaaattaaaggtgcttgaatccctacaataatttctatactattaactcgatatttaaataaaatcaagttactaatattttgaaaattttatatcattttttggttatttatgatggtcatgtatatcaacatcagttagtaataataatatcgtatggcatttttgccggggagatcctttcggatagttccagcgccaattacatctttaaccctgtttcaagtaactagtgtcgatgtacactagcccagggggaccgacggcttaacgtactctccgaggcacggtgagacggctcgtgtcattattggaaatgaaaatggtttgtctttggcagggatcgaacccacgtctactggcgtatgaggccagcgtttatgccgttacccacggccgctcacacaattagtcaaaagatcttatgaatcgtaaagacaagatttctgataatatcctactgaatgcgccatttcttactgttttgataggcataatatacaggaatgaaatagctttgtaattaatacttgtgaatacattgcatatagcatttctgccctaaagaagttatggaaatagtagatgtaatacttgtagagtctgttgtagttttcaatatatttttttactttatctttagactgtgttataatgtaaatgttgtatttgaaaaattctttatcctatacacaaaagaatggaaattgttctaaaggaactcaacttaccattatcttgaagtatagtttgtctagaaagacctctaacctttggaaaatataagactattgatattgggaaaaaacgtgacaaaacctattttgtaacaataatgcagatcttagaattatgaaaacgtacaaaactgttcatatgcaaattagacaattagaatgtgtatctgtatatatttattcctatttaatattttctttttaccttatatttgttttatttaaagttatgctgctaagattacttatacggtacgtgttgaacatattcatgttttttgagacatttaagagttgtggcgtaaaattttcttgaaagtatagatcttgtcggtgtactataagattagttaactagataaatgtgttcaattctataaaatgtgttgatgtaatagcaaattatacaattacatattttaactgtgctattaataatattgcaggttatatttatgcatacgaggtctgttccaaaaatatttttggggctttcagtgtaattgactaagcataaaggttaataacaactataacaaggtctcgaagggatccgaaatatatagagagaagataaatttgtagtattctctctatttattaaaggaaaagaacacaatgcctatgtacttctatactgcttcacatttagtcatttctgcccataaacttttgtaaaagtttacattggcgccttctgttaaccttaatttgctatatgtagcaaaacagaatagaaatgaacattgtcttacaaatgttacatgttctataagtctgttaatataccagatggatttccctcacaaaaacggatacataaatattcaaaaatgttttaattacttacttgtatattttatgtaaattggcagcaatgtttatctattatggcaggcgggtaattattttaccaggaaaagaaactggttttgactgcttcccgaatatgtcgaaagttattatttgtatctctttattttatcaacacagctggcaataaaaaaccatatttttttaattaatacatggaaaaacaacttcttagaaatatcaggtattatattataactgttcagaacatcaatattcgcgacaattttttctcttgcgtacttcgaatttttcgcaacaattacattgtatcaataatgagaatatttatttgtataatagagtattctcacggcattcgatatttatgtaaacgtgatttttgctaaccttgttgttgcattataacaacttatataaataatttatcgaaaacagacaatttactaatgagtcattattcactgctttgtcacattgtttccaaatgttaattatcagtcctttctaaattaaaagccagattatgaaaaatcgaagacagttatgaaaactcaaaaaatatccaaaactgatcacttttctgttcttttataaattgtgctcctttttagtaaattaagttttctggaataccgaagaatggctcatacaacggatcatgaatgcgatacaatatatacagtgtgtcccgaaaagattggacataaattataccagacattctggagtcaaggatagttcgattgaacctaacttaccttagtacaaatgtgcccatagttacagccc

SEQ ID NO: 2331 - DNA, 4828 bp, Diabrotica virgifera
  SmartBlast Evalue=5E-51; Info=Single Ig IL-1-related receptor (Fragment) n=1 Tax=Camponotus floridanus RepID=E2A9S7_9HYME
ccggcggacacaaatcattctcattctcgttttagttggcgtggaacatttgtgacgagaggtttaagtgaggttcggtttacaagacgcgacgagacgatcgtgttaaaacttgtgctaagtgaaaattaacatttgacatatctcgaactcattagaaattaattccttaattaaaatcgaatatattctgactacaaaaattactttaatgcattttaaaagcaagttttagtggctgattcaccggtttttttttgctaagaccatggcgatgtttagattggctttttcagtgttgctttgtttagttcctggaattttaggaatgaacaatttttgtaacagaaacaattacgagaatcttcctcggaataatatgcagtttagtaaagaggtcaactttagggagtttgctgtggtcgggaatctaaaggccctgcattgctgtgccaaagactaccacactattacatggtataaagacaataaagtctatccatggcctctagaattgtccaccatgctactgtttccagctagcgttaatcagactatctacgtccagtctgtgaaacccaccgatgcaggaaattacacttgtgtactgaagaatgatactgttttgcattcgcatacgatacaattaagactttttgatagagcaccggatgatccacaaatcacatacctgtcagaagatactgtgttatctgtaggagataatctaagactgttctgtgaagctttcgttggtctggtagacgttccagacgcacatagcgaagtgtattggaacaaattgtacccaaacagcactacatatgatgagttgccatctcatattagacatgcacaaacagaacaagaagatggccaaaccctgggagcttatatgataatagattcgatacaatctgaagatttcggagaatacgaatgcgtaatcaccaaacctggaatcaccattaaaaaatacataaaagttattgaacgagaaatagaagttgagtatttagatcccagtcccctaccaattgcgaaattggccattttaatgactgccattttgtgtcttttcgtagctgtagtggtactgtatctcaaatttggtctgaaggttcaagtacgcctaaaggacaccttaagtccattggaggattctgatgggaaggaaaaggatgtattggtagtctatacgtcagctgactctgaattagccttgggggttttgctaccaacattggaagaaaaatacaaatacacttgtgattctaaagagctgtgtccggaaattagtttgtggtacaaagacttatcggaaggagaaaaatacagaagggtaattgttgtgatatcgcctgccatgctggaaggatcttgggatccaagtagacttttattagcactgaaacaattgaaaggttttggaccgaatgtaattttcatttctttgaaggagcttccgaaaaccgagcctgaaattaagaatgccgaaggggaaacgttgagcgccgtcataagatcatgggggtaattgtgtgggacaggcgcgacgaagaaaaagtatggtacttactacgtctcaaactccctcccaaaagaacgggttccgaaaagaggaccacaggacccgatacaagactgcgtaataattctcaagaatctataggagaatacgttgtgtgaactggtagcttttattgtgaaaatatcgataggttgtagccaacagttttgtacgttttatgaagttacctcagagtttctgatttgtttaaagtttaaataataaaaaagattaggtacggttctgtttttttatagctttaaaccttacatttcaactttttacttttctttgaaaacaacaccacaattaaaaagaaatatatcttttcttacggttataaaaaaagatttggtttttctagctatgaattatacacactttgcaagatatgtatgagacctgatctaccttagtggctatttgtacaccataagagtaaggtaatatggacgctatagagtttaaaatgaattattgtagtaacaaagattaccaaacatcaaaacagtttgaagtgttaccagataaaatgtattggacaaatcatagacttttattatgaagacattgcctgaaattgaaactgcaggataataaatcttagcactatctttgactcttctttatcagctatatttcgttattttgaatcagaagattgggtttacctatactcaaataatattttgtatataataaaattttgtatttttttatataaataaatataatatagataaggtcagtataaaaatccatagaaaatataatataatcaatattagataacaagggaagagaatattaagatcaagttcagtaactcaagtgtagcgaagaatatatgaacaatatagtaaactattttgactatcttctagaaatataacttaaaattaaaggtgcttgaatccctacaataatttctatactattaactcgatatttaaataaaatcaagttactaatattttgaaaattttatatcattttttggttatttatgatggtcatgtatatcaacatcagttagtaataataatatcgtatggcatttttgccggggagatcctttcggatagttccagcgccaattacatctttaaccctgtttcaagtaactagtgtcgatgtacactagcccagggggaccgacggcttaacgtactctccgaggcacggtgagacggctcgtgtcattattggaaatgaaaatggtttgtctttggcagggatcgaacccacgtctactggcgtatgaggccagcgtttatgccgttacccacggccgctcacacaattagtcaaaagatcttatgaatcgtaaagacaagatttctgataatatcctactgaatgcgccatttcttactgttttgataggcataatatacaggaatgaaatagctttgtaattaatacttgtgaatacattgcatatagcatttctgccctaaagaagttatggaaatagtagatgtaatacttgtagagtctgttgtagttttcaatatatttttttactttatctttagactgtgttataatgtaaatgttgtatttgaaaaattctttatcctatacacaaaagaatggaaattgttctaaaggaactcaacttaccattatcttgaagtatagtttgtctagaaagacctctaacctttggaaaatataagactattgatattgggaaaaaacgtgacaaaacctattttgtaacaataatgcagatcttagaattatgaaaacgtacaaaactgttcatatgcaaattagacaattagaatgtgtatctgtatatatttattcctatttaatattttctttttaccttatatttgttttatttaaagttatgctgctaagattacttatacggtacgtgttgaacatattcatgttttttgagacatttaagagttgtggcgtaaaattttcttgaaagtatagatcttgtcggtgtactataagattagttaactagataaatgtgttcaattctataaaatgtgttgatgtaatagcaaattatacaattacatattttaactgtgctattaataatattgcaggttatatttatgcatacgaggtctgttccaaaaatatttttggggctttcagtgtaattgactaagcataaaggttaataacaactataacaaggtctcgaagggatccgaaatatatagagagaagataaatttgtagtattctctctatttattaaaggaaaagaacacaatgcctatgtacttctatactgcttcacatttagtcatttctgcccataaacttttgtaaaagtttacattggcgccttctgttaaccttaatttgctatatgtagcaaaacagaatagaaatgaacattgtcttacaaatgttacatgttctataagtctgttaatataccagatggatttccctcacaaaaacggatacataaatattcaaaaatgttttaattacttacttgtatattttatgtaaattggcagcaatgtttatctattatggcaggcgggtaattattttaccaggaaaagaaactggttttgactgcttcccgaatatgtcgaaagttattatttgtatctctttattttatcaacacagctggcaataaaaaaccatatttttttaattaatacatggaaaaacaacttcttagaaatatcaggtattatattataactgttcagaacatcaatattcgcgacaattttttctcttgcgtacttcgaatttttcgcaacaattacattgtatcaataatgagaatatttatttgtataatagagtattctcacggcattcgatatttatgtaaacgtgatttttgctaaccttgttgttgcattataacaacttatataaataatttatcgaaaacagacaatttactaatgagtcattattcactgctttgtcacattgtttccaaatgttaattatcagtcctttctaaattaaaagccagattatgaaaaatcgaagacagttatgaaaactcaaaaaatatccaaaactgatcacttttctgttcttttataaattgtgctcctttttagtaaattaagttttctggaataccgaagaatggctcatacaacggatcatgaatgcgatacaatatatacagtgtgtcccgaaaagattggacataaattataccagacattctggagtcaaggatagttcgattgaacctaacttaccttagtacaaatgtgcccatagttacagccc

SEQ ID NO: 2332 - DNA, 4562 bp, Diabrotica virgifera
  SmartBlast Evalue=7E-51; Info=Single Ig IL-1-related receptor (Fragment) n=1 Tax=Camponotus floridanus RepID=E2A9S7_9HYME
ccggcggacacaaatcattctcattctcgttttagttggcgtggaacatttgtgacgagaggtttaagtgaggttcggtttacaagacgcgacgagacgatcgtgttaaaacttgtgctaagtgaaaattaacatttgacatatctcgaactcattagaaattaattccttaattaaaatcgaatatattctgactacaaaaattactttaatgcattttaaaagcaagttttagtggctgattcaccggtttttttttgctaagaccatggcgatgtttagattggctttttcagtgttgctttgtttagttcctggaattttaggaatgaacaatttttgtaacagaaacaattacgagaatcttcctcggaataatatgcagtttagtaaagaggtcaactttagggagtttgctgtggtcgggaatctaaaggccctgcattgctgtgccaaagactaccacactattacatggtataaagacaataaagtctatccatggcctctagaattgtccaccatgctactgtttccagctagcgttaatcagactatctacgtccagtctgtgaaacccaccgatgcaggaaattacacttgtgtactgaagaatgatactgttttgcattcgcatacgatacaattaagactttttgatagagcaccggatgatccacaaatcacatacctgtcagaagatactgtgttatctgtaggagataatctaagactgttctgtgaagctttcgttggtctggtagacgttccagacgcacatagcgaagtgtattggaacaaattgtacccaaacagcactacatatgatgagttgccatctcatattagacatgcacaaacagaacaagaagatggccaaaccctgggagcttatatgataatagattcgatacaatctgaagatttcggagaatacgaatgcgtaatcaccaaacctggaatcaccattaaaaaatacatcaaagttattgaacgagaaatagaagtggagtatttagaccccagtcccctaccgattgcaaaattggccattttaatgactgccattttgtgtattttcgtagctgtggtggtattgtatctcaaatttggtttgaaggttcaagtacgcctcaaggacaccttgagtcctttggaggattctgatgggaaggaaaaggatgtattggtagtctatacgtcagcggactctgaattagcattgggggttttgttaccaaccttagaagaaaaatacaaatacacttgtgattctaaagagctgtgtccagaaattagtttgtggtacaaagacttgtcggaaggagaaaaatacagaagggtaattgttgtgatatcgcctgccatgctggaaggatcttgggatcctagtagactcttattagcactgaaacaattaaaaggttttggacccaatgtaattttcatttctttgaaggagcttccgaaaaccgagcctgaaattaagaatgccgaaggggaaacgttgagcgccgtcataagatcattgggggtaattgtgtgggacaggcgcgacgaagaaaaagtatggtacttactacgtctcaaactccctcccaaaagaacgggttccgaaaagaggaccacaggacccgatacaagactgcgtaataattctcaagaatctataggagaatacgttgtgtgaactggtagcttttattgtgaaaatatcgataggttgtagccaacagttttgtacgttttatgaagttacctcagagtttctgatttgtttaaagtttaaataataaaaaagattaggtacggttctgtttttttatagctttaaaccttacatttcaactttttacttttctttgaaaacaacaccacaattaaaaagaaatatatcttttcttacggttataaaaaaagatttggtttttctagctatgaattatacacactttgcaagatatgtatgagacctgatctaccttagtggctatttgtacaccataagagtaaggtaatatggacgctatagagtttaaaatgaattattgtagtaacaaagattaccaaacatcaaaacagtttgaagtgttaccagataaaatgtattggacaaatcatagacttttattatgaagacattgcctgaaattgaaactgcaggataataaatcttagcactatctttgactcttctttatcagctatatttcgttattttgaatcagaagattgggtttacctatactcaaataatattttgtatataataaaattttgtatttttttatataaataaatataatatagataaggtcagtataaaaatccatagaaaatataatataatcaatattagataacaagggaagagaatattaagatcaagttcagtaactcaagtgtagcgaagaatatatgaacaatatagtaaactattttgactatcttctaacttaaaattaaaggtgcttgaatccttacaataatttctatactattaacttgatatttaaataaaatcaatcaagttactaatatttttaaagtgttatatataataattttgttatttatgatggtaattatgatgtatatcaacatcaattggtcaaaagatcttatgaatcgtaaagataagttttctgataatatcgtactgaatgcgccatttcttactgttttgataggcataatatacaggaatgaaatagctttgtaattaatacttgtgaatacattgcatatagcatttctgccctaaagaagttatggaaatagtagatgtaatacttgtagagtctgttgtagttttcaatatatttttttactttatctttagactgtgttataatgtaaatgttgtatttgaaaaattctttatcctatacacaaaagaatggaaattgttctaaaggaactcaacttaccattatcttgaagtatagtttgtctagaaagacctctaacctttggaaaatataagactattgatattgggaaaaaacgtgacaaaacctattttgtaacaataatgcagatcttagaattatgaaaacgtacaaaactgttcatatgcaaattagacaattagaatgtgtatctgtatatatttattcctatttaatattttctttttaccttatatttgttttatttaaagttatgctgctaagattacttatacggtacgtgttgaacatattcatgttttttgagacatttaagagttgtggcgtaaaattttcttgaaagtatagatcttgtcggtgtactataagattagttaactagataaatgtgttcaattctataaaatgtgttgatgtaatagcaaattatacaattacatattttaactgtgctattaataatattgcaggttatatttatgcatacgaggtctgttccaaaaatatttttggggctttcagtgtaattgactaagcataaaggttaataacaactataacaaggtctcgaagggatccgaaatatatagagagaagataaatttgtagtattctctctatttattaaaggaaaagaacacaatgcctatgtacttctatactgcttcacatttagtcatttctgcccataaacttttgtaaaagtttacattggcgccttctgttaaccttaatttgctatatgtagcaaaacagaatagaaatgaacattgtcttacaaatgttacatgttctataagtctgttaatataccagatggatttccctcacaaaaacggatacataaatattcaaaaatgttttaattacttacttgtatattttatgtaaattggcagcaatgtttatctattatggcaggcgggtaattattttaccaggaaaagaaactggttttgactgcttcccgaatatgtcgaaagttattatttgtatctctttattttatcaacacagctggcaataaaaaaccatatttttttaattaatacatggaaaaacaacttcttagaaatatcaggtattatattataactgttcagaacatcaatattcgcgacaattttttctcttgcgtacttcgaatttttcgcaacaattacattgtatcaataatgagaatatttatttgtataatagagtattctcacggcattcgatatttatgtaaacgtgatttttgctaaccttgttgttgcattataacaacttatataaataatttatcgaaaacagacaatttactaatgagtcattattcactgctttgtcacattgtttccaaatgttaattatcagtcctttctaaattaaaagccagattatgaaaaatcgaagacagttatgaaaactcaaaaaatatccaaaactgatcacttttctgttcttttataaattgtgctcctttttagtaaattaagttttctggaataccgaagaatggctcatacaacggatcatgaatgcgatacaatatatacagtgtgtcccgaaaagattggacataaattataccagacattctggagtcaaggatagttcgattgaacctaacttaccttagtacaaatgtgcccatagttacagccc

SEQ ID NO: 2333 - DNA, 4561 bp, Diabrotica virgifera
  SmartBlast Evalue=4E-51; Info=Single Ig IL-1-related receptor (Fragment) n=1 Tax=Camponotus floridanus RepID=E2A9S7_9HYME
ccggcggacacaaatcattctcattctcgttttagttggcgtggaacatttgtgacgagaggtttaagtgaggttcggtttacaagacgcgacgagacgatcgtgttaaaacttgtgctaagtgaaaattaacatttgacatatctcgaactcattagaaattaattccttaattaaaatcgaatatattctgactacaaaaattactttaatgcattttaaaagcaagttttagtggctgattcaccggtttttttttgctaagaccatggcgatgtttagattggctttttcagtgttgctttgtttagttcctggaattttaggaatgaacaatttttgtaacagaaacaattacgagaatcttcctcggaataatatgcagtttagtaaagaggtcaactttagggagtttgctgtggtcgggaatctaaaggccctgcattgctgtgccaaagactaccacactattacatggtataaagacaataaagtctatccatggcctctagaattgtccaccatgctactgtttccagctagcgttaatcagactatctacgtccagtctgtgaaacccaccgatgcaggaaattacacttgtgtactgaagaatgatactgttttgcattcgcatacgatacaattaagactttttgatagagcaccggatgatccacaaatcacatacctgtcagaagatactgtgttatctgtaggagataatctaagactgttctgtgaagctttcgttggtctggtagacgttccagacgcacatagcgaagtgtattggaacaaattgtacccaaacagcactacatatgatgagttgccatctcatattagacatgcacaaacagaacaagaagatggccaaaccctgggagcttatatgataatagattcgatacaatctgaagatttcggagaatacgaatgcgtaatcaccaaacctggaatcaccattaaaaaatacataaaagttattgaacgagaaatagaagttgagtatttagatcccagtcccctaccaattgcgaaattggccattttaatgactgccattttgtgtcttttcgtagctgtagtggtactgtatctcaaatttggtctgaaggttcaagtacgcctaaaggacaccttaagtccattggaggattctgatgggaaggaaaaggatgtattggtagtctatacgtcagctgactctgaattagccttgggggttttgctaccaacattggaagaaaaatacaaatacacttgtgattctaaagagctgtgtccggaaattagtttgtggtacaaagacttatcggaaggagaaaaatacagaagggtaattgttgtgatatcgcctgccatgctggaaggatcttgggatccaagtagacttttattagcactgaaacaattgaaaggttttggaccgaatgtaattttcatttctttgaaggagcttccgaaaaccgagcctgaaattaagaatgccgaaggggaaacgttgagcgccgtcataagatcatgggggtaattgtgtgggacaggcgcgacgaagaaaaagtatggtacttactacgtctcaaactccctcccaaaagaacgggttccgaaaagaggaccacaggacccgatacaagactgcgtaataattctcaagaatctataggagaatacgttgtgtgaactggtagcttttattgtgaaaatatcgataggttgtagccaacagttttgtacgttttatgaagttacctcagagtttctgatttgtttaaagtttaaataataaaaaagattaggtacggttctgtttttttatagctttaaaccttacatttcaactttttacttttctttgaaaacaacaccacaattaaaaagaaatatatcttttcttacggttataaaaaaagatttggtttttctagctatgaattatacacactttgcaagatatgtatgagacctgatctaccttagtggctatttgtacaccataagagtaaggtaatatggacgctatagagtttaaaatgaattattgtagtaacaaagattaccaaacatcaaaacagtttgaagtgttaccagataaaatgtattggacaaatcatagacttttattatgaagacattgcctgaaattgaaactgcaggataataaatcttagcactatctttgactcttctttatcagctatatttcgttattttgaatcagaagattgggtttacctatactcaaataatattttgtatataataaaattttgtatttttttatataaataaatataatatagataaggtcagtataaaaatccatagaaaatataatataatcaatattagataacaagggaagagaatattaagatcaagttcagtaactcaagtgtagcgaagaatatatgaacaatatagtaaactattttgactatcttctaacttaaaattaaaggtgcttgaatccttacaataatttctatactattaacttgatatttaaataaaatcaatcaagttactaatatttttaaagtgttatatataataattttgttatttatgatggtaattatgatgtatatcaacatcaattggtcaaaagatcttatgaatcgtaaagataagttttctgataatatcgtactgaatgcgccatttcttactgttttgataggcataatatacaggaatgaaatagctttgtaattaatacttgtgaatacattgcatatagcatttctgccctaaagaagttatggaaatagtagatgtaatacttgtagagtctgttgtagttttcaatatatttttttactttatctttagactgtgttataatgtaaatgttgtatttgaaaaattctttatcctatacacaaaagaatggaaattgttctaaaggaactcaacttaccattatcttgaagtatagtttgtctagaaagacctctaacctttggaaaatataagactattgatattgggaaaaaacgtgacaaaacctattttgtaacaataatgcagatcttagaattatgaaaacgtacaaaactgttcatatgcaaattagacaattagaatgtgtatctgtatatatttattcctatttaatattttctttttaccttatatttgttttatttaaagttatgctgctaagattacttatacggtacgtgttgaacatattcatgttttttgagacatttaagagttgtggcgtaaaattttcttgaaagtatagatcttgtcggtgtactataagattagttaactagataaatgtgttcaattctataaaatgtgttgatgtaatagcaaattatacaattacatattttaactgtgctattaataatattgcaggttatatttatgcatacgaggtctgttccaaaaatatttttggggctttcagtgtaattgactaagcataaaggttaataacaactataacaaggtctcgaagggatccgaaatatatagagagaagataaatttgtagtattctctctatttattaaaggaaaagaacacaatgcctatgtacttctatactgcttcacatttagtcatttctgcccataaacttttgtaaaagtttacattggcgccttctgttaaccttaatttgctatatgtagcaaaacagaatagaaatgaacattgtcttacaaatgttacatgttctataagtctgttaatataccagatggatttccctcacaaaaacggatacataaatattcaaaaatgttttaattacttacttgtatattttatgtaaattggcagcaatgtttatctattatggcaggcgggtaattattttaccaggaaaagaaactggttttgactgcttcccgaatatgtcgaaagttattatttgtatctctttattttatcaacacagctggcaataaaaaaccatatttttttaattaatacatggaaaaacaacttcttagaaatatcaggtattatattataactgttcagaacatcaatattcgcgacaattttttctcttgcgtacttcgaatttttcgcaacaattacattgtatcaataatgagaatatttatttgtataatagagtattctcacggcattcgatatttatgtaaacgtgatttttgctaaccttgttgttgcattataacaacttatataaataatttatcgaaaacagacaatttactaatgagtcattattcactgctttgtcacattgtttccaaatgttaattatcagtcctttctaaattaaaagccagattatgaaaaatcgaagacagttatgaaaactcaaaaaatatccaaaactgatcacttttctgttcttttataaattgtgctcctttttagtaaattaagttttctggaataccgaagaatggctcatacaacggatcatgaatgcgatacaatatatacagtgtgtcccgaaaagattggacataaattataccagacattctggagtcaaggatagttcgattgaacctaacttaccttagtacaaatgtgcccatagttacagccc

SEQ ID NO: 2334 - DNA, 2442 bp, Diabrotica virgifera
tttgtgtatgtgccagtgttccgtatgtttgtggattgtgtgttgcataatatgtattgtgtatgattgtagatgtttctctgatgttgtacttgtttcccatcctttttaatttttctgataagccctttacacatggtattgttgtcttccttgagtctcttcttgtgagagtttcttgattgcttgtggtattttgttgttttcattctaataataataataataatatcgtatggcatttttgccggggagatcctttcggatagttccagcgccaattacatctttaaccctgtttcaagtaactagtgtcgatgtacactagcccagggggaccgacggcttaacgtactctccgaggcacggtgagacggctcgtgtcattattggaaatgaaaatggtttgtctttggcagggatcgaacccacgtctactggcgtatgaggccagcgtttatgccgttacccacggccgctcacacaattagtcaaaagatcttatgaatcgtaaagacaagatttctgataatatcctactgaatgcgccatttcttactgttttgataggcataatatacaggaatgaaatagctttgtaattaatacttgtgaatacattgcatatagcatttctgccctaaagaagttatggaaatagtagatgtaatacttgtagagtctgttgtagttttcaatatatttttttactttatctttagactgtgttataatgtaaatgttgtatttgaaaaattctttatcctatacacaaaagaatggaaattgttctaaaggaactcaacttaccattatcttgaagtatagtttgtctagaaagacctctaacctttggaaaatataagactattgatattgggaaaaaacgtgacaaaacctattttgtaacaataatgcagatcttagaattatgaaaacgtacaaaactgttcatatgcaaattagacaattagaatgtgtatctgtatatatttattcctatttaatattttctttttaccttatatttgttttatttaaagttatgctgctaagattacttatacggtacgtgttgaacatattcatgttttttgagacatttaagagttgtggcgtaaaattttcttgaaagtatagatcttgtcggtgtactataagattagttaactagataaatgtgttcaattctataaaatgtgttgatgtaatagcaaattatacaattacatattttaactgtgctattaataatattgcaggttatatttatgcatacgaggtctgttccaaaaatatttttggggctttcagtgtaattgactaagcataaaggttaataacaactataacaaggtctcgaagggatccgaaatatatagagagaagataaatttgtagtattctctctatttattaaaggaaaagaacacaatgcctatgtacttctatactgcttcacatttagtcatttctgcccataaacttttgtaaaagtttacattggcgccttctgttaaccttaatttgctatatgtagcaaaacagaatagaaatgaacattgtcttacaaatgttacatgttctataagtctgttaatataccagatggatttccctcacaaaaacggatacataaatattcaaaaatgttttaattacttacttgtatattttatgtaaattggcagcaatgtttatctattatggcaggcgggtaattattttaccaggaaaagaaactggttttgactgcttcccgaatatgtcgaaagttattatttgtatctctttattttatcaacacagctggcaataaaaaaccatatttttttaattaatacatggaaaaacaacttcttagaaatatcaggtattatattataactgttcagaacatcaatattcgcgacaattttttctcttgcgtacttcgaatttttcgcaacaattacattgtatcaataatgagaatatttatttgtataatagagtattctcacggcattcgatatttatgtaaacgtgatttttgctaaccttgttgttgcattataacaacttatataaataatttatcgaaaacagacaatttactaatgagtcattattcactgctttgtcacattgtttccaaatgttaattatcagtcctttctaaattaaaagccagattatgaaaaatcgaagacagttatgaaaactcaaaaaatatccaaaactgatcacttttctgttcttttataaattgtgctcctttttagtaaattaagttttctggaataccgaagaatggctcatacaacggatcatgaatgcgatacaatatatacagtgtgtcccgaaaagattggacataaattataccagacattctggagtcaaggatagttcgattgaacctaacttaccttagtacaaatgtgcccatagttacagccc

SEQ ID NO: 2335 - DNA, 3891 bp, Diabrotica virgifera
  SmartBlast Evalue=1E-159; Info=Cystatin n=2 Tax=Tribolium castaneum RepID=D6WPZ3_TRICA
aaatttgaagtttctcagataactaaacaatgaactaactaaaaataattatcaaaatatataaatggtatccagtccatatggtttaagcaacaatgccactggatggagtttgatttaaaccacaggttccatcgcctctataaactctgtagtatccttgttcgccccagcttttaccccaggaatttttaacgatccaataaggcacttgtttctttgtatatttggtagtatggacaccatatccaactataagaacaccatgatccaagtttttgggattgcagagtactttaaatggatgagatactcctccagcataaaactgcatcgcgtttgcatttattgctatagaaataggaccgttttgagttaaccacttggccatatcggtttcatcgtggcttatgtttagagctccagacaatctaacgacagcttcagttttgttgaagtggcatttttcgtccactccttcgtagggatactctctttctaattcaagacctcctaatttttcaatagtcctgtaagcattatccatcaaaccaccattacacccgtcatccaatttatcacaatcgactaactcttgttcggaaaatgactgtaactttttgtatttaattgcatactgtccttcgacgttaccagtggtactaaaagcccagcaactaccgcacatcccttgatctttgacttccgtaactacgttctggtcacgccagtcaaaagatgttggcagatcaatttccgggatttttgcttggtggaagggaatatcgttttcgcttcgaagatcagacctatatccatgagacgctgagaactcctcagatgtcatgtcagcaaacttggtaattttatatacggccgttccttgttcgtgcttatttagcaaatgaataagtttcaaattttctttaaatactccaaaacgatatttatgttcaactacatttctatatttcttgtcatacttggccagaaaatgttcaaatacacttgataatattgtttctacatcgttatcgtcaagtgatcttcgtaatctgaacgaatgatgttgtttttttacaagtgagtcatcatgacaagtaatatttgtttctcttccatgttcaatccaaggttggtcccaaactttgaaatcgcaaattgttgactgaccatttgcctggacaccgcattgagaagcgtcaatattgctctcttttttgcaatcggataaagctatcttggctttgatacgatggagagaaccgctgacaacctgtctagaaacctccaaaatttcgactactttaaatttgaattcatgggatgactctttatccaaatgtagcaacccatcttttaagtaacgctttacttttggatcatcttttgaaataggagatatacctcctggaacttgccttacgtgtctagaaagaggtgtgccatcctgattgacgcatttaactttatctactgtagactgtgcagtatcaacatcgttaagtttcatgtataccaaacactctgcgtagacacgattcttctcaaatatcacatctaacatgtaataatgaggatctaaatcagttacatgaatggtaacaatctgggaattttcatagccgagatgtttggcagcaatttctaagagctccttaacaacaggggaatctatctcaggcacattaggttggtaatgtaaagatctcttatgtctgttcgaatgcttatgcttcttttttttctcttccgaactggaggaatcggaagaactgtctgaatcgcttgaatcgtgattgtgcttcgaatgatgcttaccttttacttgaggttctctactatcatcatcactatctttcttgtgtttcttatgtttgtgtttatgatcgtgaccgtgatgtttgtcctttttgtgtttatgtttgtgctcatcgctatcactgtcactatcatcgctatctttgtgatggtgcttcttcttgtgatgcttcttatgtttcttgtgtttcttatgggccttactatcactatctgaggaatcactactttttgaggaatcactactatctgaggaatcgctactatctgaagaatcactactactcgaggaatcactatctgatttatttctcctaaggaccgaatgttcgtcatcgacaacttcttgttctacctgttgttcttgttgttcctgttgttcttgttgatctgtactctttgatggtcgtcgtacttcgttgatctctactacctcaatggcccttaccttgcgattttttaaaccaacttcgggaatttcatttaaaccagaatacactgggttgattgcattttttggactgctggtcttcagaaatttcatttaaaccagaatacactgggatttcatttttggacggctggtcttcagaaatttcatttaaaccaaaatacaatgggttggcgtcatttttggactgctggctctttactgagcttttcttactggacctagtatctggaataatttgggactccaagtcagacaagaagtcaggttcttcttgtctaacaactgattcttgtggcagatcgattgtctcatgaacatcaaattcttgggatattgtacagttatttttaatgatttttgagatgtccagccatctttgttccaaatattctacctcacaaatactactagtttgggctgggtccacagaacaactgggttcgctgtcttctttacggcaagatgactgaacgacttctaccaaaagtgtatattttacacctgcaactacctgttgttgaactctaaggactttgacagcaacgtgcttgaagtcatgttcagagtcgatatgacgtaaagctgcatttaccaatttttcaacgccttcagctttgggatcaacatcagtcgggcatccggcacatggttctacacgttgtactgcttctggttcagctatcggtatatcgtcagcctgtactgaattttccttttctgatttaggactatctgggataatttgagactccaaatctgacaagaagtcaggatgtaactttctgtgcactttcttcggtggaggaggatctatcggctctttaagatcaaactcttgagattttgtacaggtgttactgatgatttttgagactcccaaccatggttgctctaaatattctacgtcgcaaacacgactatcttggattgaacaatcgagattctcgctgttcttagggcaacttgttgaagcgacttcgaccgaaagtgtatatttgaaacccgcaactacctgtctttgaactctaaggactttgactgcaacatgcttggtgtcacgttcagactcgatatgacttaaggctgcatttaccaatttttgaacactttcagctttgggatcgatatcagtagggcatccggcacatccaaccttggtttgtactggttctggttcaggttcattgtcaaactgtacatcatcaatgtttccataattgtacaaattagggggaccactatcgataactacttgaccaagtgcgcccagcacacaaaatacaagcagcaaaagctgcttaaaaatcattgttttccagagatgttaacactaagattgtctacaatcaactaaactagctgccaaaaaatcttgtttattaggggactcaaaacatgacccccttatcgtattttttaaacaatttctccaacctttgtctgtcactctctacgtcaatgaaatgttgatcgcgtttttaacagtgcatagaaagaaacagaaataaatccttgcagtttgcagttttcattggcaaatgcatcatttcaataaatatattgcattagtcacccatatttgttgtgaaacacttgctcacttgcttttgttttga

SEQ ID NO: 2336 - DNA, 3892 bp, Diabrotica virgifera
  SmartBlast Evalue=1E-159; Info=Cystatin n=2 Tax=Tribolium castaneum RepID=D6WPZ3_TRICA
aaatttgaagtttctcagataactaaacaatgaactaactaaaaataattatcaaaatatataaatggtatccagtccatatggtttaagcaacaatgccactggatggagtttgatttaaaccacaggttccatcgcctctataaactctgtagtatccttgttcgccccagcttttaccccaggaatttttaacgatccaataaggcacttgtttctttgtatatttggtagtatggacaccatatccaactataagaacaccatgatccaagtttttgggattgcagagtactttaaatggatgagatactcctccagcataaaactgcatcgcgtttgcatttattgctatagaaataggaccgttttgagttaaccacttggccatatcggtttcatcgtggcttatgtttagagctccagacaatctaacgacagcttcagttttgttgaagtggcatttttcgtccactccttcgtagggatactctctttctaattcaagacctcctaatttttcaatagtcctgtaagcattatccatcaaaccaccattacacccgtcatccaatttatcacaatcgactaactcttgttcggaaaatgactgtaactttttgtatttaattgcatactgtccttcgacgttaccagtggtactaaaagcccagcaactaccgcacatcccttgatctttgacttccgtaactacgttctggtcacgccagtcaaaagatgttggcagatcaatttccgggatttttgcttggtggaagggaatatcgttttcgcttcgaagatcagacctatatccatgagacgctgagaactcctcagatgtcatgtcagcaaacttggtaattttatatacggccgttccttgttcgtgcttatttagcaaatgaataagtttcaaattttctttaaatactccaaaacgatatttatgttcaactacatttctatatttcttgtcatacttggccagaaaatgttcaaatacacttgataatattgtttctacatcgttatcgtcaagtgatcttcgtaatctgaacgaatgatgttgtttttttacaagtgagtcatcatgacaagtaatatttgtttctcttccatgttcaatccaaggttggtcccaaactttgaaatcgcaaattgttgactgaccatttgcctggacaccgcattgagaagcgtcaatattgctctcttttttgcaatcggataaagctatcttggctttgatacgatggagagaaccgctgacaacctgtctagaaacctccaaaatttcgactactttaaatttgaattcatgggatgactctttatccaaatgtagcaacccatcttttaagtaacgctttacttttggatcatcttttgaaataggagatatacctcctggaacttgccttacgtgtctagaaagaggtgtgccatcctgattgacgcatttaactttatctactgtagactgtgcagtatcaacatcgttaagtttcatgtataccaaacactctgcgtagacacgattcttctcaaatatcacatctaacatgtaataatgaggatctaaatcagttacatgaatggtaacaatctgggaattttcatagccgagatgtttggcagcaatttctaagagctccttaacaacaggggaatctatctcaggcacattaggttggtaatgtaaagatctcttatgtctgttcgaatgcttatgcttcttttttttctcttccgaactggaggaatcggaagaactgtctgaatcgcttgaatcgtgattgtgcttcgaatgatgcttaccttttacttgaggttctctactatcatcatcactatctttcttgtgtttcttatgtttgtgtttatgatcgtgaccgtgatgtttgtcctttttgtgtttatgtttgtgctcatcgctatcactgtcactatcatcgctatctttgtgatggtgcttcttcttgtgatgcttcttatgtttcttgtgtttcttatgggccttactatcactatctgaggaatcactactttttgaggaatcactactatctgaggaatcgctactatctgaagaatcactactactcgaggaatcactatctgatttatttctcctaaggaccgaatgttcgtcatcgacaacttcttgttctacctgttgttcttgttgttcctgttgttcttgttgatctgtactctttgatggtcgtcgtacttcgttgatctctactacctcaatggcccttaccttgcgattttttaaaccaacttcgggaatttcatttaaaccagaatacactgggttgattgcattttttggactgctggtcttcagaaatttcatttaaaccagaatacactgggatttcatttttggacggctggtcttcagaaatttcatttaaaccaaaatacaatgggttggcgtcatttttggactgctggctctttactgagcttttcttactggacctagtatctggaataatttgggactccaagtcagacaagaagtcaggttcttcttgtctaacaactgattcttgtggcagatcgattgtctcatgaacatcaaattcttgggatattgtacagttatttttaatgatttttgagatgtccagccatctttgttccaaatattctacctcacaaatactactagtttgggctgggtccacagaacaactgggttcgctgtcttctttacggcaagatgactgaacgacttctaccaaaagtgtatattttacacctgcaactacctgttgttgaactctaaggactttgacagcaacgtgcttgaagtcatgttcagagtcgatatgacgtaaagctgcatttaccaatttttcaacgccttcagctttgggatcaacatcagtcgggcatccggcacatggttctacacgttgtactgcttctggttcagctatcggtatatcgtcagcctgtactgaattttccttttctgatttaggactatctgggataatttgagactccaaatctgacaagaagtcaggatgtaactttctgtgcactttcttcggtggaggaggatctatcggctctttaagatcaaactcttgagattttgtacaggtgttactgatgatttttgagactcccaaccatggttgctctaaatattctacgtcgcaaacacgactatcttggactgaacaatccaaattctcggtgttcttagggcaacttgttgaagcgacttcgaccgaaagtatatattttatacccgcaactacctgtgtttgaactctaaggactttgactgcgacatgcttggtgtcacgttcagactcgatatgacttaaggctgcatttaccaatttttgaacgcctttcagctttgggatcgatatcagtagggcatccggcacatccaaccttggtttgtactggttctggttcaggttcattgtcaaactgtacatcatcaatgtttccataattgtacaaattagggggaccactatcgataactacttgaccaagtgcgcccagcacacaaaatacaagcagcaaaagctgcttaaaaatcattgttttccagagatgttaacactaagattgtctacaatcaactaaactagctgccaaaaaatcttgtttattaggggactcaaaacatgacccccttatcgtattttttaaacaatttctccaacctttgtctgtcactctctacgtcaatgaaatgttgatcgcgtttttaacagtgcatagaaagaaacagaaataaatccttgcagtttgcagttttcattggcaaatgcatcatttcaataaatatattgcattagtcacccatatttgttgtgaaacacttgctcacttgcttttgttttga

SEQ ID NO: 2337 - DNA, 3101 bp, Diabrotica virgifera
  SmartBlast Evalue=1E-165; Info=Cystatin n=2 Tax=Tribolium castaneum RepID=D6WPZ3_TRICA
aaatttgaagtttctcagataactaaacaatgaactaactaaaaataattatcaaaatatataaatggtatccagtccatatggtttaagcaacaatgccactggatggagtttgatttaaaccacaggttccatcgcctctataaactctgtagtatccttgttcgccccagcttttaccccaggaatttttaacgatccaataaggcacttgtttctttgtatatttggtagtatggacaccatatccaactataagaacaccatgatccaagtttttgggattgcagagtactttaaatggatgagatactcctccagcataaaactgcatcgcgtttgcatttattgctatagaaataggaccgttttgagttaaccacttggccatatcggtttcatcgtggcttatgtttagagctccagacaatctaacgacagcttcagttttgttgaagtggcatttttcgtccactccttcgtagggatactctctttctaattcaagacctcctaatttttcaatagtcctgtaagcattatccatcaaaccaccattacacccgtcatccaatttatcacaatcgactaactcttgttcggaaaatgactgtaactttttgtatttaattgcatactgtccttcgacgttaccagtggtactaaaagcccagcaactaccgcacatcccttgatctttgacttccgtaactacgttctggtcacgccagtcaaaagatgttggcagatcaatttccgggatttttgcttggtggaagggaatatcgttttcgcttcgaagatcagacctatatccatgagacgctgagaactcctcagatgtcatgtcagcaaacttggtaattttatatacggccgttccttgttcgtgcttatttagcaaatgaataagtttcaaattttctttaaatactccaaaacgatatttatgttcaactacatttctatatttcttgtcatacttggccagaaaatgttcaaatacacttgataatattgtttctacatcgttatcgtcaagtgatcttcgtaatctgaacgaatgatgttgtttttttacaagtgagtcatcatgacaagtaatatttgtttctcttccatgttcaatccaaggttggtcccaaactttgaaatcgcaaattgttgactgaccatttgcctggacaccgcattgagaagcgtcaatattgctctcttttttgcaatcggataaagctatcttggctttgatacgatggagagaaccgctgacaacctgtctagaaacctccaaaatttcgactactttaaatttgaattcatgggatgactctttatccaaatgtagcaacccatcttttaagtaacgctttacttttggatcatcttttgaaataggagatatacctcctggaacttgccttacgtgtctagaaagaggtgtgccatcctgattgacgcatttaactttatctactgtagactgtgcagtatcaacatcgttaagtttcatgtataccaaacactctgcgtagacacgattcttctcaaatatcacatctaacatgtaataatgaggatctaaatcagttacatgaatggtaacaatctgggaattttcatagccgagatgtttggcagcaatttctaagagctccttaacaacaggggaatctatctttactgagcttttcttactggacctagtatctggaataatttgggactccaagtcagacaagaagtcaggttcttcttgtctaacaactgattcttgtggcagatcgattgtctcatgaacatcaaattcttgggatattgtacagttatttttaatgatttttgagatgtccagccatctttgttccaaatattctacctcacaaatactactagtttgggctgggtccacagaacaactgggttcgctgtcttctttacggcaagatgactgaacgacttctaccaaaagtgtatattttacacctgcaactacctgttgttgaactctaaggactttgacagcaacgtgcttgaagtcatgttcagagtcgatatgacgtaaagctgcatttaccaatttttcaacgccttcagctttgggatcaacatcagtcgggcatccggcacatggttctacacgttgtactgcttctggttcagctatcggtatatcgtcagcctgtactgaattttccttttctgatttaggactatctgggataatttgagactccaaatctgacaagaagtcaggatgtaactttctgtgcactttcttcggtggaggaggatctatcggctctttaagatcaaactcttgagattttgtacaggtgttactgatgatttttgagactcccaaccatggttgctctaaatattctacgtcgcaaacacgactatcttggattgaacaatcgagattctcgctgttcttagggcaacttgttgaagcgacttcgaccgaaagtgtatatttgaaacccgcaactacctgtctttgaactctaaggactttgactgcaacatgcttggtgtcacgttcagactcgatatgacttaaggctgcatttaccaatttttgaacactttcagctttgggatcgatatcagtagggcatccggcacatccaaccttggtttgtactggttctggttcaggttcattgtcaaactgtacatcatcaatgtttccataattgtacaaattagggggaccactatcgataactacttgaccaagtgcgcccagcacacaaaatacaagcagcaaaagctgcttaaaaatcattgttttccagagatgttaacactaagattgtctacaatcaactaaactagctgccaaaaaatcttgtttattaggggactcaaaacatgacccccttatcgtattttttaaacaatttctccaacctttgtctgtcactctctacgtcaatgaaatgttgatcgcgtttttaacagtgcatagaaagaaacagaaataaatccttgcagtttgcagttttcattggcaaatgcatcatttcaataaatatattgcattagtcacccatatttgttgtgaaacacttgctcacttgcttttgttttga

SEQ ID NO: 2338 - DNA, 3102 bp, Diabrotica virgifera
  SmartBlast Evalue=1E-164; Info=Cystatin n=2 Tax=Tribolium castaneum RepID=D6WPZ3_TRICA
aaatttgaagtttctcagataactaaacaatgaactaactaaaaataattatcaaaatatataaatggtatccagtccatatggtttaagcaacaatgccactggatggagtttgatttaaaccacaggttccatcgcctctataaactctgtagtatccttgttcgccccagcttttaccccaggaatttttaacgatccaataaggcacttgtttctttgtatatttggtagtatggacaccatatccaactataagaacaccatgatccaagtttttgggattgcagagtactttaaatggatgagatactcctccagcataaaactgcatcgcgtttgcatttattgctatagaaataggaccgttttgagttaaccacttggccatatcggtttcatcgtggcttatgtttagagctccagacaatctaacgacagcttcagttttgttgaagtggcatttttcgtccactccttcgtagggatactctctttctaattcaagacctcctaatttttcaatagtcctgtaagcattatccatcaaaccaccattacacccgtcatccaatttatcacaatcgactaactcttgttcggaaaatgactgtaactttttgtatttaattgcatactgtccttcgacgttaccagtggtactaaaagcccagcaactaccgcacatcccttgatctttgacttccgtaactacgttctggtcacgccagtcaaaagatgttggcagatcaatttccgggatttttgcttggtggaagggaatatcgttttcgcttcgaagatcagacctatatccatgagacgctgagaactcctcagatgtcatgtcagcaaacttggtaattttatatacggccgttccttgttcgtgcttatttagcaaatgaataagtttcaaattttctttaaatactccaaaacgatatttatgttcaactacatttctatatttcttgtcatacttggccagaaaatgttcaaatacacttgataatattgtttctacatcgttatcgtcaagtgatcttcgtaatctgaacgaatgatgttgtttttttacaagtgagtcatcatgacaagtaatatttgtttctcttccatgttcaatccaaggttggtcccaaactttgaaatcgcaaattgttgactgaccatttgcctggacaccgcattgagaagcgtcaatattgctctcttttttgcaatcggataaagctatcttggctttgatacgatggagagaaccgctgacaacctgtctagaaacctccaaaatttcgactactttaaatttgaattcatgggatgactctttatccaaatgtagcaacccatcttttaagtaacgctttacttttggatcatcttttgaaataggagatatacctcctggaacttgccttacgtgtctagaaagaggtgtgccatcctgattgacgcatttaactttatctactgtagactgtgcagtatcaacatcgttaagtttcatgtataccaaacactctgcgtagacacgattcttctcaaatatcacatctaacatgtaataatgaggatctaaatcagttacatgaatggtaacaatctgggaattttcatagccgagatgtttggcagcaatttctaagagctccttaacaacaggggaatctatctttactgagcttttcttactggacctagtatctggaataatttgggactccaagtcagacaagaagtcaggttcttcttgtctaacaactgattcttgtggcagatcgattgtctcatgaacatcaaattcttgggatattgtacagttatttttaatgatttttgagatgtccagccatctttgttccaaatattctacctcacaaatactactagtttgggctgggtccacagaacaactgggttcgctgtcttctttacggcaagatgactgaacgacttctaccaaaagtgtatattttacacctgcaactacctgttgttgaactctaaggactttgacagcaacgtgcttgaagtcatgttcagagtcgatatgacgtaaagctgcatttaccaatttttcaacgccttcagctttgggatcaacatcagtcgggcatccggcacatggttctacacgttgtactgcttctggttcagctatcggtatatcgtcagcctgtactgaattttccttttctgatttaggactatctgggataatttgagactccaaatctgacaagaagtcaggatgtaactttctgtgcactttcttcggtggaggaggatctatcggctctttaagatcaaactcttgagattttgtacaggtgttactgatgatttttgagactcccaaccatggttgctctaaatattctacgtcgcaaacacgactatcttggactgaacaatccaaattctcggtgttcttagggcaacttgttgaagcgacttcgaccgaaagtatatattttatacccgcaactacctgtgtttgaactctaaggactttgactgcgacatgcttggtgtcacgttcagactcgatatgacttaaggctgcatttaccaatttttgaacgcctttcagctttgggatcgatatcagtagggcatccggcacatccaaccttggtttgtactggttctggttcaggttcattgtcaaactgtacatcatcaatgtttccataattgtacaaattagggggaccactatcgataactacttgaccaagtgcgcccagcacacaaaatacaagcagcaaaagctgcttaaaaatcattgttttccagagatgttaacactaagattgtctacaatcaactaaactagctgccaaaaaatcttgtttattaggggactcaaaacatgacccccttatcgtattttttaaacaatttctccaacctttgtctgtcactctctacgtcaatgaaatgttgatcgcgtttttaacagtgcatagaaagaaacagaaataaatccttgcagtttgcagttttcattggcaaatgcatcatttcaataaatatattgcattagtcacccatatttgttgtgaaacacttgctcacttgcttttgttttga

SEQ ID NO: 2339 - DNA, 708 bp, Diabrotica virgifera
  SmartBlast Evalue=3E-18; Info=Cystatin n=2 Tax=Tribolium castaneum RepID=D6WPZ3_TRICA
gaccgaaagtatatattttatacccgcaactacctgtgtttgaactctaaggactttgactgcaacatgcttggtgtcacgttcagactcgatatgacgtaaggctgcatttaccaatttttgaacaccttcagctttgggatcgatatcagtagggcatccgacacatccaaccttggtttgtactggttctggttcaggttcattgtcaaactgtgcagcattctctaattttgattctaatggatgttctactgtaagaactgagttaggttccaaatctaaaggaactgaatctaaaggaactggtactggctctaaaggaactataactggatctaaaagttcaaattcttgggattttgtacaattgttgctaacaatttttttgaatcccaaccatgctttttcccaatactctacttcgcaaacacgactattttgccttctatcaatataacacggtttggcgccgggtttcgcagggcaaacggttggagcgacttccaccaaaaatttgtattttatacctgctactacctgtgattgaactctaagaacttggattaaagcctgctggaccttatcttcagattcaatatgactcaaagcggcgttcaccaaaaatggtacaactttatcattaacatcgacttcggtcagacatccaagacatggttttgattcaactacgtcgtcaaactgtac

SEQ ID NO: 2340 - DNA, 2831 bp, Diabrotica virgifera
  SmartBlast Evalue=1E-168; Info="Flotillin-1, putative n=1 Tax= Pediculus humanus corporis RepID=E0VW73_PEDHC"
ttttagcttggataaccacatttattaaaataatgtacatattagagaaatatattaaggatacaaaaaatagaggtatttatgtttttatgtattcccaactccaatatctctttcaatatcatcaataaattttttaagtttcaagtgcctcacactacaaacattgcacgttgcagggttaaatacaggaaacagaccgtctcaaaaattaaaatttaaacaagcaacaattttcaaaatactaggtttgcaccaaaaactgttttattcaaaaatagaattctagaattataatgcaatccccatctaaattcagatctatcgttctcgagacgaaaaaacagaggtagtatggagttataaatactatgaagttacgttctacgttatgaaggcaaatgtttgtttaccgtattaatcaaacagaacacaaatccctctgtacttaaatgtaatttagagacacttcatttaaactggcgatataccaaatagagctaatcagagctccaccgtattgttgaaaaatttgtcaatgtatacatttgacacaaacgacaaaacatctaaaaagatgacgtctacaggaacctcacaaaaaagagaaagattttcagttgtggaggacatgtagcgtaagtaatttctacgattgacatttacaatgattataactgactcagaagtttttatggcgagaaataatttaaagtaacgtaaaaacgaaaatacaataggaactcgagtcacttcggcgtgaacaaactgatatttcaatagccgcgcaaaccgcgccactttcaaatatggcggatcttacgtcatacgtaaatgcttctgtcataaaattcccaattaaatatgtattattatatttctagcaatacattgataataccgccatcactgccatttttcttgtacaattgacatatgactcacgatatatatacgtcatacgtcttggtatataccaatgacgtatgacgtatatatcgtacgtcatatgtcaagtgtacgagaaaaatggcggcgatgaatagtcctatataatcatcgtaaatggaatactaagaatgcataaacaatcaagatgtataagagctgtctccaaaaggaaattacaaacctatcacttgtatattttccctacacttacaattaaacagaaaacctagtatttttattaacatttactaaacacaaactaactgctaaaatatttaagttctgtttcctataaaagccaatttttcacaaataataaaacataaaaataaaataacattcataattataacattcgaatagccgtaaaatcggtataatattttaaaaggtataatggattataatattggatttagctggattaacaagaacttccaaagattgaagaagctgattcaaataatattgtccttcctgtgatatttaagcggcatggaccgacttggaaatgtccacaccagtcatactcttaacaagcatcggtactttgttaacaatatcaagaatttctcctgtaagcttagcagcaccaacttcacctgttcctgtagataccatggtaatcttcttggcctgagacaaaggagcagcaacttcagcagcgacctttggtaatacgtccaggtacatatcaatcatagctgcctccttgtactctttccaagcttcggccttcttggccatctgttcggcttctgccgcggctttagcctgaatagcgaaagcttcagcttcccctcttaatcttgtagattcagcttcggcttctgcttccaaaagtactcgcttgtggttggcttcggcaattttttccaatctgaatttttctgcttctgctggtctgcgaatcgtggattctagttccctttctcgtctggcaatttcctgttcttgtactgcaatttgctgtgtcctttctaccacttgaatctgcatctgttcctccttgatcctctgcttggtcttggcagcttgcagctcgtaagccatttcagcctcggcgtttttcgtctgcacttccacatcataagcagccttcttcaattcgaagtccctctttgctttagcaatctctgtgtcgtttaagaagacggaggccattctttgttcttcggcgatggcttctttgattgttgcttctgctctagcttcggcttcaccaattcttgcgtctcgttttacttctgccgttcgggccatacccaaacttttaaggtaacccctgccatcaacggggtcctcttcatctcgaatgtccttaagcgtgtatgagacaactgtgattcccatgttgacgagatcggatgacgccacctcgaagacttgtttgctgaacttcttgcggtctttgtagatttcttccaccgtcatggaacccataatggcacgctggtggccttccagggtgtggagtgctatgagctggatttcatcttgttttttacccaaaaattgttcgcaagcggctaagagcatttcttcgttttgaccttggatttttacctgtgcaattcccgttactgatatgggaacaccttgacttgtgtacacagtggggctgtctacaataagagtcatcgtattcaacgatatcctttgtattttttgtatggagggccaaacaaaagctcgacctccgggcactaagagtggcttgctgtaacaacatcctgagattaccagtgcctcgttgggaccacaggtaacaaatccccacgtcattctatgtgaaaattaattaataaacaaatgaacactaaaacactacaaaacacacagacatacaaccatataaacacccaaaaaacaagaaggcg

SEQ ID NO: 2341 - DNA, 2160 bp, Diabrotica virgifera
ttataataataacgctttcggtcagcgtatataactcgggccgaaggccctcgatgtatacaccattgacctcaaacgttattatccttataatacccttggtaccttaataactaaaacattatagaagttttcagggactttcggccctcggtaataatgcaatatttggttctgagtttaaatttttcaaaaatacttagtagttttctcaggattcatttaaaacacattggtaattttgcgcctactcccttaatatcagatttttatatctgaagaaaagatatttgatatctaatactgtaaggtccggtattttctgttagtccttagagcagctttacacacacccggtggccgattacacggcacgagttacacggactggcgaactttcacagatttgtagataggcactagatctatactgttcgtcctctataacttttctcatgcgtcgcgattcattttcaaaccaattaagtcaaaacaaagtgaaacgaacgtcgaagtgtatatacattttgtatactgtatactattatactacacacatcggcgtacgtttcactttatgttttgacttaatttgtttgaaggatgaatcgtgacgcatgggaggggttatagcggacgaacaatatgtactgcaccgattagacacctttaaaaaaactttaaaaatgttctacctaaattcacttatgctttagttactacgcatcttatttaattaagtattaatctgctcttagtttttggttgatgttagtagcaaatgtgtaagctttttataaaacatagtttaaaagcttataaaaaatattctttctattaacgaaaaatctttttggtataactccgtctttagttattggaaaaagttacccaagacgccataaaaagcagaacatgattcttttaattaacgtttaataattacaaagtattaaagggggactgactgtaacatgtctttaaaattaaatatttttgatggggcaactataacatgatccccgatgtaataaatttttgaccgcctgtcagttggcgcatttttttaatatgtttacatttaaacctcttgcatttttagttttaagaactcaagatggtaatgatacattgtaaagttttcgttaataaaaaaatatatgcttttcgtaaacccataaatcataccttttattaaaagtttacacttttattataaattggtaataattactacgactggcaatcaattttttagaaataatttaatcaatttttttagaatttattcagttttacttctgtgtatatgtattaatatacagtgatgagcgcgctaatggccggcaaagtagcgcagaagatggaaagcatattaggttgtgagataaagagaaattaaacttgtacatgtgggaaatttagcgataaaatcctataaatttacattctatttatagtttctcacctttagacgtatcggacgagtttggcaactagccactgtgacagtgacagttttgttgacatactcctctgataggtctaaagatgggaaacaatgaagtagaatgtagatttataggttttgatcgctaaatttcccacctctactggtgtcatttctttttatctcacaactttatatgttttccaccttttgcgatattttgccggttgttggcgcgctgatcactgtatgtcactgattttatataagtcagattatattattctgtgtaatgtttcttcggtctaccatacgagacctacttttttatactgtcttacttaacacatgtacatattatacagtgatcagcgtgctaatgaccggcaatggcgcagaagatggaaagcataatacattgcgaaacaaaaaaagatgaaactagtggaggtggaaattatcgttataaatgtataaattaacattgcattacataatttcccaccttttatcaaagcagtatgacaaatgtcactgtgacagtagaattttataaaatactcctgtcacagacgttcaaaggtgggaagctatgtaatgtaatgttaattaattatatgtttatacgatactttccacctccactagtttatttcgcaatgtattgtgttttttatgttttccatcttttgcgatattttgccgattat

SEQ ID NO: 2342 - DNA, 1169 bp, Diabrotica virgifera
tatacgagtatacgtcatacgtcattggtatataccaaagacggatgacgtgtatagggcttttcattcacagtcatttgtttcgagcttctgtcatgtgtcacataatatgaatatatctacgtcatacgttatttgcatataccaatgatacaaaccaaagacgtatgacgtagatatattaatattatgtgacacatgacagaggctcgaaacaaatgacaatcgatgaaaagccctatggagagagaatgcaactttgccgtattcctcggttaattttgatgttctccgattgtgtgttatacgtatcttttgtttcatatacagtgatgagcgcgctgatgaccggcaaagtggcgcaacagatggaaaacatattaggttgtgaaataaaaagaaataaaactagtgagtggagatagaaaatttagcgacaaaaacctataaatttatattctattaattttttcccacatttagacgtatcggacgagtttggcaactagccactgtgacagtgacagttttgttgacatactcctctgataggtctaaagatgggaaacaatgaagtagaatgtagatttataggttttgatcgctaaatttcccacctctactggtgtcatttctttttatctcacaactttatatgttttccaccttttgcgatattttgccggttgttggcgcgctgatcactgtatgtcactgattttatataagtcagattatattattctgtgtaatgtttcttcggtctaccatacgagacctacttttttatactgtcttacttaacacatgtacatattatacagtgatcagcgtgctaatgaccggcaatggcgcagaagatggaaagcataatacattgcgaaacaaaaaaagatgaaactagtggaggtggaaattatcgttataaatgtataaattaacattgcattacataatttcccaccttttatcaaagcagtatgacaaatgtcactgtgacagtagaattttataaaatactcctgtcacagacgttcaaaggtgggaagctatgtaatgtaatgttaattaattatatgtttatacgatactttccacctccactagtttatttcgcaatgtattgtgttttttatgttttccatcttttgcgatattttgccgattat

SEQ ID NO: 2343 - DNA, 1191 bp, Diabrotica virgifera
tatacgagtatacgtcatacgtcattggtatataccaaagacggatgacgtgtatagggcttttcattcacagtcatttgtttcgagcttctgtcatgtgtcacataatatgaatatatctacgtcatacgttatttgcatataccaatgatacaaaccaaagacgtatgacgtagatatattaatattatgtgacacatgacagaggctcgaaacaaatgacaatcgatgaaaagccctatatatcgtacttcatgtgtcacgtgcacgagaggaatggcggtgatgaatagtattatcaatgtattgctagaaatataataatacatatttaattgggaattttatgacagaagcatttacgtatgacgtaagatccgccatatttgaaagtggcgccgtttgcacggctattgaaatatcagtttgtccatgccgaagtgactgagtttctattgtattttcgtttttacgttactttaaattaattctcgctatagaaatttgtgagtcagttataatcattgtaaatgtcaatcgtagaaattacttacgctacatgtcctccacaacttaaactctttctcttttttgtgaggttcctgtagacgtcttctttttagatgttttgtcgtttgtatcaaatgtatacattgacaaatttttcaacaatacggtggagctctgattagctctatttggtatatcgccagtttaaatgaagtgtctctaaattacatttaagtacagagggatttgtgttctgtttgattaatacggtaaacaaacatttgccttcataacgtagaacgtaacttcatagtatttataactccatactacctctgttttttcgtctcgagaacgatagatctgaatttagatggggattgcattataattctagaattctatttttaataaaacagtttttggtgcaaacctagtattttgaaaattgttgcttgtttaaattttaatttttgagacggtctgtttcctgtatttaaccctgcaacgtgcaatgtttgtagtgtgaggcacttgaaacttaaaaaatttattgatgatattgaaagagatattggagttgggaatacataaaacataaatacctctattttttgtatccttaatatatttctctaatatgtacattattttaataaatgtggttatccaagctaaaaa

SEQ ID NO: 2344 - DNA, 1191 bp, Diabrotica virgifera
ttggatagatttttgaaagtgattgaacacgtatttttcagtttttcggatccgatgtttggttcgcgaaatattcgaccgttccactacttttgggacaccctatacatcttgattgtttatgcattcttagtattccatttacgatgattatataggactattcatcgccgccatttttctcgtatacttgacatatgacgtacgatatatacgtcatacgttattggtatataacaaagacatatggcgtgtatacatcgtgcgtcatatgtcaagtgtatgagaaaaatggcggtgatgtattgctagaaatataataatacatatttaattgggaattttatgacagaagcatttacgtatgacgtaagatccgccatatttgaaagtggcgcggtttgcgcggctattgaaatatcagtttgttcacgccgaagtgactcgagttcctattgtattttcgtttttacgttactttaaattatttctcgccataaaaacttctgagtcagttataatcattgtaaatgtcaatcgtagaaattacttacgctacatgtcctccacaactgaaaatctttctcttttttgtgaggttcctgtagacgtcatctttttagatgttttgtcgtttgtgtcaaatgtatacattgacaaatttttcaacaatacggtggagctctgattagctctatttggtatatcgccagtttaaatgaagtgtctctaaattacatttaagtacagagggatttgtgttctgtttgattaatacggtaaacaaacatttgccttcataacgtagaacgtaacttcatagtatttataactccatactacctctgttttttcgtctcgagaacgatagatctgaatttagatggggattgcattataattctagaattctatttttaataaaacagtttttggtgcaaacctagtattttgaaaattgttgcttgtttaaattttaatttttgagacggtctgtttcctgtatttaaccctgcaacgtgcaatgtttgtagtgtgaggcacttgaaacttaaaaaatttattgatgatattgaaagagatattggagttgggaatacataaaacataaatacctctattttttgtatccttaatatatttctctaatatgtacattattttaataaatgtggttatccaagctaaaaa

SEQ ID NO: 2345 - DNA, 1493 bp, Diabrotica virgifera
cgattttttgcttacttataaacaattagaataactttttaaccgttaccgtagaaaaattattttttcatatttagaaagactgaatttttatacacatttagaaagaaatacaattgtcctagggcaattagggacgaagttagcccccctttttttaattcacatgttcttgcaaaataattttgcaatgtttggaattattttttgtcatttttttttaattaaattaatagtgtaaatcttcttctctcataaactatccgaagtattactgtaacttcatcattttctgacttacagtgttgcaaaaaaaattaatttgggataaacgaattaaatatcttttaaactatttgaccaattgctttgaaatttagggcataatttgggcaccagaagtctcagcattctctgtaataagagggttctaagtcaatttgtatatgagttgtgaatatttataaaggctcaaaatttatgatttgttttgaaattttctagtaaccaatgagaatagacatattcggcgagcgccacgttgaggtgttttatacgatttatgagtttcttactctcgggtttgtttggaatgcttgactttttggcaatagacaaaagaagcaaaactttccgtttttttgatcttcatttgtttataactaaacttgagtgcatagaatcggcccacttaaaaatttggtcatttttgatgtctcgtatttcctacctgttggtcgatttaggtgatttttttgaacatgttatagtctgattctttacagtatcactgtaatagtgttgttgctaaacaggtaaattttcattgtacgtaccggcataccgagttgaaattaaaacccaactatagcctcagtttttcttgacattctgttttttgattcatattcgtttatattggacaataaaaaggttgggtactttaacaagtagacatgttcttcatcaatacacggtgtttctaaataggtgcgacaggctttaaggggtaattgtgcatgaagaaaataatgacggttggctttataggacgtgtgtccgcaagtggttcgttttccagatacgggatgttgaattttttcttacaaactgaggatttattttatttctttaaaaccggttgagaaatgccaatgaaatttggtggattttaagacgtagttattgcacattttttgacatacaattgggaatttgatattcaccattagcgctcatacgtgtaatatgaccgataatattacccgtatgcacgctagtggtgagtatggagttcttaattgtatgtcaaaaaatccacaataactagctcttacaaccaaaaattcaacatcccgtatctcggaaatgaggcatttgcggacatacgtttgtgaagccaactgtcattattgtttcatgcaggattgccccttgaagtttgtcgcacttatttggaaacgccgtgtattgaggaagaacatgcctggttg

SEQ ID NO: 2346 - DNA, 1489 bp, Diabrotica virgifera
cgattttttgcttacttataaacaattagaataactttttaaccgttaccgtagaaaaattattttttcatatttagaaagactgaatttttatacacatttagaaagaaatacaattgtcctagggcaattagggacgaagttagcccccctttttttaattcacatgttcttgcaaaataattttgcaatgtttggaattattttttgtcatttttttttaattaaattaatagtgtaaatcttcttctctcataaactatccgaagtattactgtaacttcatcattttctgacttacagtgttgcaaaaaaaattaatttgggataaacgaattaaatatcttttaaactatttgaccaattgctttgaaatttagggcataatttgggcaccagaagtctcagcattctctgtaataagagggttctaagtcaatttgtatatgagttgtgaatatttataaaggctcaaaatttatgatttgttttgaaattttctagtaaccaatgagaatagacatattcggcgagcgccacgttgaggtgttttatacgatttatgagtttcttactctcgggtttgtttggaatgcttgactttttggcaatagacaaaagaagcaaaactttccgtttttttgatcttcatttgtttataactaaacttgagtgcatagaatcggcccacttaaaaatttggtcatttttgatgtctcgtatttcctacctgttggtcgatttaggtgatttttttgaacatgttatagtctgattctttacagtatcactgtaatagtgttgttgctaaacaggtaaattttcattgtacgtaccggcataccgagttgaaattaaaacccaactatagcctcagtttttcttgacattctgttttttgattcatattcgtttatgttggacaataagaagttgggtactttaacaggtagacatgttcttcatcaatacacggtgtttctgaataaatgcgacagactttaagggataattgtgcatgaaggaataatgacggttggctttataaacgtgtgtccgcaagtggttcgttttccagatacgggatgttgaattttttcttacaaactgaggatttattttatttctttaaaaccggttgagaaatgccaatgaaatttggtggattttaagacgtagttattgcacattttttgacatacaattggaatttgatattcaccattagcgctcatacgtgtaatatgaccgataatattacccgtatgcacgctagtggtgagtatggagttcttaattgtatgtcaaaaaatccacaataactagctcttacaaccaaaaattcaacatcccgtatctcggaaatgaggcatttgcggacatacgtttgtgaagccaactgtcattattgtttcatgcaggattgccccttgaagtttgtcgcacttatttggaaacgccgtgtattgaggaagaacatgcctggttg

SEQ ID NO: 2347 - DNA, 1489 bp, Diabrotica virgifera
cgattttttgcttacttataaacaattagaataactttttaaccgttaccgtagaaaaattattttttcatatttagaaagactgaatttttatacacatttagaaagaaatacaattgtcctagggcaattagggacgaagttagcccccctttttttaattcacatgttcttgcaaaataattttgcaatgtttggaattattttttgtcatttttttttaattaaattaatagtgtaaatcttcttctctcataaactatccgaagtattactgtaacttcattttctgacttgtagtgttgcaaaagaaattaatttgggataaagaattaaatatcttttaaactatttgaccaattgctttgaaatttggggcataatttgagcaccagaagtctcaccattatctgtaataagaaggttctaagttaatttatatatcagttatgaatatttataagacacaaaatttatgatttattttgcaattttctaagcaaccaatagggatagacatattcggcgagcgccacgttgaggtgttttatacgatttatgagtttcttactctcgggtttgtttggaatgcttgactttttggcaatagacaaaagaagcaaaactttccgtttttttgatcttcatttgtttataactaaacttgagtgcatagaatcggcccacttaaaaatttggtcatttttgatgtctcgtatttcctacctgttggtcgatttaggtgatttttttgaacatgttatagtctgattctttacagtatcactgtaatagtgttgttgctaaacaggtaaattttcattgtacgtaccggcataccgagttgaaattaaaacccaactatagcctcagtttttcttgacattctgttttttgattcatattcgtttatattggacaataaaaaggttgggtactttaacaagtagacatgttcttcatcaatacacggtgtttctaaataggtgcgacaggctttaaggggtaattgtgcatgaagaaaataatgacggttggctttataggacgtgtgtccgcaagtggttcgttttccagatacgggatgttgaattttttcttacaaactgaggatttattttatttctttaaaaccggttgagaaatgccaatgaaatttggtggattttaagacgtagttattgcacattttttgacatacaattgggaatttgatattcaccattagcgctcatacgtgtaatatgaccgataatattacccgtatgcacgctagtggtgagtatggagttcttaattgtatgtcaaaaaatccacaataactagctcttacaaccaaaaattcaacatcccgtatctcggaaatgaggcatttgcggacatacgtttgtgaagccaactgtcattattgtttcatgcaggattgccccttgaagtttgtcgcacttatttggaaacgccgtgtattgaggaagaacatgcctggttg

SEQ ID NO: 2348 - DNA, 1485 bp, Diabrotica virgifera
cgattttttgcttacttataaacaattagaataactttttaaccgttaccgtagaaaaattattttttcatatttagaaagactgaatttttatacacatttagaaagaaatacaattgtcctagggcaattagggacgaagttagcccccctttttttaattcacatgttcttgcaaaataattttgcaatgtttggaattattttttgtcatttttttttaattaaattaatagtgtaaatcttcttctctcataaactatccgaagtattactgtaacttcattttctgacttgtagtgttgcaaaagaaattaatttgggataaagaattaaatatcttttaaactatttgaccaattgctttgaaatttggggcataatttgagcaccagaagtctcaccattatctgtaataagaaggttctaagttaatttatatatcagttatgaatatttataagacacaaaatttatgatttattttgcaattttctaagcaaccaatagggatagacatattcggcgagcgccacgttgaggtgttttatacgatttatgagtttcttactctcgggtttgtttggaatgcttgactttttggcaatagacaaaagaagcaaaactttccgtttttttgatcttcatttgtttataactaaacttgagtgcatagaatcggcccacttaaaaatttggtcatttttgatgtctcgtatttcctacctgttggtcgatttaggtgatttttttgaacatgttatagtctgattctttacagtatcactgtaatagtgttgttgctaaacaggtaaattttcattgtacgtaccggcataccgagttgaaattaaaacccaactatagcctcagtttttcttgacattctgttttttgattcatattcgtttatgttggacaataagaagttgggtactttaacaggtagacatgttcttcatcaatacacggtgtttctgaataaatgcgacagactttaagggataattgtgcatgaaggaataatgacggttggctttataaacgtgtgtccgcaagtggttcgttttccagatacgggatgttgaattttttcttacaaactgaggatttattttatttctttaaaaccggttgagaaatgccaatgaaatttggtggattttaagacgtagttattgcacattttttgacatacaattggaatttgatattcaccattagcgctcatacgtgtaatatgaccgataatattacccgtatgcacgctagtggtgagtatggagttcttaattgtatgtcaaaaaatccacaataactagctcttacaaccaaaaattcaacatcccgtatctcggaaatgaggcatttgcggacatacgtttgtgaagccaactgtcattattgtttcatgcaggattgccccttgaagtttgtcgcacttatttggaaacgccgtgtattgaggaagaacatgcctggttg

SEQ ID NO: 2349 - DNA, 616 bp, Diabrotica virgifera
agtttttcttgacattctgttttttgattcatattcgtttatattggacaataaaaaggttgggtgctttaacaggtagacatgttcttcgtcaatgcgcggtgtttctgaataggtgcgacaaactttaggggatggttgtgcatgaaagaataatgacggttggctttgtagacgtgtgtccgcgagtggttcgttttccagatacgggatgttgaattttttcttacaaactgaggatttattttatttctttaaaaccggttgagaaatgccaatgaaatttggtggattttaagacgtagttattgcacattttttgacatacaattgggaatttgatattcaccattagcgctcatacgtgtaatatgaccgataatattacccgtatgcacgctagtggtgagtatggagttcttaattgtatgtcaaaaaatccacaataactagctcttacaaccaaaaattcaacatcccgtatctcggaaatgaggcatttgcggacatacgtttgtgaagccaactgtcattattgtttcatgcaggattgccccttgaagtttgtcgcacttatttggaaacgccgtgtattgaggaagaacatgcctggttg

SEQ ID NO: 2350 - DNA, 1497 bp, Diabrotica virgifera
  SmartBlast Evalue=4E-29; Info=Endonuclease-reverse transcriptase n=1 Tax=Bombyx mori RepID=D7F170_BOMMO
caccgaaatcggaggtgaaaaccttcagtgactgcactaatgttgttgtttgttcttattattattttattcacacgttttttagttgtatagtaggtccgataacagtgacctattttataatccagttagtaagatttgactgtttatgtcagatgatattgaaactatttatttccattaaaatttatccactggattgatatcgtgagtaaatgataaaatatgttgcgacaaaaatgtttagaaataaataataagtgagaaattatataactaattattatttaaaaataaatttgataatgtactatattgtattaagtcgatagttacttggaaattatagaaataaatcgtattacttacacccaatcaaatattagacaattttggttttgtatttattttgtcgtattgtatttatatgaacaatgtcttcacagctacgtattatatatggtgttatatattaactgcgataaattgttatttaaagacttgttgctagactcattattctttccattgaaccgatatacataggtttattctagaaagtttaataatacaattcaaatttatagtttatccccataaattaaagatattctcaaatcagatggaacacgacttctacggaacacaaaaggcagaggacaaagaaaagagatgaacgaactaataaaaacgaaccacattcagaaggaaacatgggcagactattttcgatctctgtttgctaaagataacgataacgaaccaccaacacctgaagtgacaacaaacgaagaaataaatattgaagaagcagaggtaacgaaagcattaaggaaattaaaaaatagaaaatcaccaggagaggacagaatatcgaatgaactcctaaagtatggaggacaagacctgaccaagcaattattaaaactaatccaaaaaataatagaacaaaacagaataccacaagaatggagatcaagcatcctaatacctctcttcaaaaaaggagacaaatcggacccggagaattacagaggaattaacttattaaacacaacattaaaattaacaaccaaagtgataacaaacaaattgaatgaaattataacattagcagaagaacaacaaggttttaggtcgggaaggtcatgcactgacgctatatttataatgaggcaagttcaagagaaatcgttggaatacaacaaaccggcatatttatgtttcgtggaccttaagaaagcatttgacagggtcacattaaaggacgttatccatttgttatactcgagagaggtacctctaggaataattaaaacgatcgaaaacatctaccagaacaacacaataaaagtaaaagtggaagatgaactaactgacccaattgaagccggcaatgggataagacagggggattccttgagtcctttattgttcaacctgatcatggaatgaaataataaaaaaagtaagaactaaaaaaggataccaaatggg

SEQ ID NO: 2351 - DNA, 1073 bp, Diabrotica virgifera
  SmartBlast Evalue=2E-31; Info=Endonuclease-reverse transcriptase n=1 Tax=Bombyx mori RepID=D7F170_BOMMO
aagaaaaccccgtggtttagagaggaagtgaagataagatgtgaagaaaaaaagaaagcctttttacaatacagaacaaaacaaacacaacaggcatacaaccactataaaagaattagaaacgaaacaaacactttagtcagacaataaaaagagaacactgggagagtttctcaaaacagatggaacacgacttctacggaacacaaaaggaaatatggagaatgatcagaggacaaagaaaagagatgaacgaactaataaaaacgaaccacattcagaaggaaacttgggcagactattttcgatctctgtttgctaaagataacgataacgaaccaccaacacctgaagtgacaacaaacgaagaaataaatattgaagaagcagaggtaacgaaagcattaaggaaattaaaaaatagaaaatcaccaggagaggacagaatatcgaatgaactcctaaagtatggaggacaagacctgaccaagcaattattaaaactaatccaaaaaataatagaacaaaacagaataccacaagaatggagatcaagcatcctaatacctctcttcaaaaaaggagacaaatcggacccggagaattacagaggaattaacttattaaacacaacattaaaattaacaaccaaagtgataacaaacaaattgaatgaaattataacattagcagaagaacaacaaggttttaggtcgggaaggtcatgcactgacgctatatttataatgaggcaagttcaagagaaatcgttggaatacaacaaaccggcatatttatgtttcgtggaccttaagaaagcatttgacagggtcacattaaaggacgttatccatttgttatactcgagagaggtacctctaggaataattaaaacgatcgaaaacatctaccagaacaacacaataaaagtaaaagtggaagatgaactaactgacccaattgaagccggcaatgggataagacagggggattccttgagtcctttattgttcaacctgatcatggaatgaaataataaaaaaagtaagaactaaaaaaggataccaaatggg

SEQ ID NO: 2352 - DNA, 911 bp, Diabrotica virgifera
  SmartBlast Evalue=1E-29; Info=Endonuclease-reverse transcriptase n=1 Tax=Bombyx mori RepID=D7F170_BOMMO
ggcagagtttctcaaaacagatggaacacgacttctacggaacacaaaaagaagtatggagaatgatcagagggcaaagaaaggagatgaacgaattaatacaagccgaaacacattcagaaggaaacatgggcagactacttccgatctctatttgctaaagcgacgataatgaaccaccaacacctgaagttacgacaaacgaagaaataaacatcgaggagggagaggtaaaggaagcattaagaaaattaaaaaatagaaaatctccaggagaggacagaatatcgaacgaactcctaaagtacggaggacaagatctaactaaacaactattaaaactaatacaaaaaataatagaacaaaacagaataccacaagaatggagatcaagcatcctaatacctctcttcaaaaaaggagacaaatcggacccggagaattacagaggaattaacttattaaacacaacattaaaattaacaaccaaagtgataacaaacaaattgaatgaaattataacattagcagaagaacaacaaggttttaggtcgggaaggtcatgcactgacgctatatttataatgaggcaagttcaagagaaatcgttggaatacaacaaaccggcatatttatgtttcgtggaccttaagaaagcatttgacagggtcacattaaaggacgttatccatttgttatactcgagagaggtacctctaggaataattaaaacgatcgaaaacatctaccagaacaacacaataaaagtaaaagtggaagatgaactaactgacccaattgaagccggcaatgggataagacagggggattccttgagtcctttattgttcaacctgatcatggaatgaaataataaaaaaagtaagaactaaaaaaggataccaaatggg

SEQ ID NO: 2353 - DNA, 472 bp, Diabrotica virgifera
ctttgcacactgtcagtttttgaaagcatacacatgttgccgttttgacttatatagaagtgtgtacaagtcatacactctttttcttttttttcttttattatttatatattccattgtttcactaaccgatttataccttacataaagaattcgtgtggctgttttttgaagaattcttttacagcattttgtacttcttcatccgactgaaaacgattatcttttaacgcatttttatgaataattaggaataattaaggctaaggaataattaggctaggaataattaaaacgatcgaaaacatctaccagaacaacacaataaaagtaaaagtaagatgaactaactgacccaattgaagccggcaatgggataagacagggggattccttgagtcctttattgttcaacctgatcatggaatgaaataataaaaaaagtaagaactaaaaaaggataccaaatggg

SEQ ID NO: 2354 - DNA, 506 bp, Diabrotica virgifera
  SmartBlast Evalue=2E-14; Info=Transposase n=5 Tax=Heterotremata RepID=B3CK12_9EUCA
ctttgcacactgtcagtttttgaaagcatacacatgttgccgttttgacttatatagaagtgtgtacaagtcatacactctttttcttttttttcttttattatttatatattccattgtttcactaaccgatttataccttacataaagaattcgtgtggctgttttttgaagaattcttttacagcattttgtacttcttcatccgactgaaaacgattatctttcagcgctgtttccagtggcccaaagagttgaaaatcacaaggcgatagatcgggactgtagtatggatgctctaatatccgcatcgctttcgttatagatttcactaatttggcaacataagggcgagcattgtcttgcaaaagcatgacaccatgtgagagcttatctgaatgttttcgtcgtattgcttaatagcaacatagtataagataataatgacacctagattcgtctctagcaattattgatgaaaggttgtgtctgtactccgtgagatg

SEQ ID NO: 2355 - DNA, 3940 bp, Diabrotica virgifera
  SmartBlast Evalue=0; Info="Glutamate dehydrogenase, mitochondrial n=4 Tax=Apocrita RepID=E2A6U2_9HYME"
attttaattttcaatttaataatagcagtgaggtgagataaggcttgttggtgcgtttcggtactggtattttgtcacgttggtgcttagcgcggtaattacgtaaggcgttacaactgccgggtggtgtcgggtttctatgatttggggattatatactaactaatattaaatctaacacaaattatcaaaatgttgaatttaaaaatgatttctaaatttgcgcctcttaaatcaaggagtgcggaagttagcacattacttaaagccttaccagcagcatgcaaccagctccagggaaggacttacgcggatcatgtcattccagacagactaaaggatatgcctaacaaccctaatcctaggtttttcgacatggttgaatatttcttccacaaggcctgcgttttagtagaggataaattggtggaagacttaggaaacgttaagggatccaggttgaatttggatcaaagaaaagccaaagtaaaaggtattttaaccttcatggaacaatgcgatcacattctcgaagttgcatttcccattaaaagggacaatgggcagtatgaaatcattaaagggtacagagctcaacatagcacccacagaactccatgcaaagggggtatgcgtttctctatggacgtctccagagacgaagtcaaagctttggcagccttgatgacattcaaatgcgcctgtgtagatgttccattcggaggagcgaaagctggagttaaaatcgatcacaagaaatactctgaacatgaattagaaaagatcaccaggagattcactttggaattagtcaaaaaaggatttattggacccagtattgatgtacctgctccagacatgggtaccggcgaaagagaaatgtcctggttagccgacacatatgccaaaaccattggttaccaagatataaacaaccacgcctgcactactggaaaacccatcaaccaaggtggtatccacggacgtgtctctgctaccggtcgtggagttttccatggtatcgaaaatttcagcaacgaggaaagctacatgcaaaagtgtggattgacaactggcatcagaggaaaaactgtaattatccaaggtttcggtaatgtcggtttgcacaccatgaggtacctccacagggcaggagccaaagtaattggtgttattgaatacgatggttctatcttcaatgaaaacggtattgaccccaaggaccttgaagattacagagttaccaacggtagcattaacggtttccctggagccaagaaatacgaagataacttattattccacgaatgtgatatcttggtacccgctgccactgaaaaagtgattaccaaagacaatgctgacaaagtcaaagctaaaatcattgccgaagccgccaacggaccattgacaccagccgctgatcagatcttactcaagaagaatgttctagtcattcccgatttgtatgttaacgctggtggtgtgacagtctcattctttgaatggttaaagaacatcaaccacgtctcatacggacgattgacctttaaatatgaaaaggactccaactaccatttactacaatctgtacaagaatctctcgaaaggaaatttaccgacgtaggatcaatccccatcttgccatctacacccttcaacaagagaattgctggtgcttctgaaaaagatattgtacattctggtctcagttttaccatggaacgatctgcaaaggctattaaggatacagcagaaaagtacggtcttggattggaccttcgatcggccgcctacatcaactcagtgcaaaaaatcttcctcaccctcaacgatgctggtttcgcatattaaacaattttaaccaaacttaaccaatcatttttacattcctacaaatgtgacattccattacgaatcatttttcattctaagtattaacccattccagaaacaatgttttttatgattcacaattttaattttttacttttgtgtttttatattactgttaaatatcaggatggattttataaaatgtataggtagatagaagtttagatttcttatatcaatgacaccttcaagcaaaaaatgacatggcatatgaaatatgacatgatcaagaatttaagggtagtttaaaaatatatcattttgttctaaatttgttcaaaattgattacctactattagaccgtctcgaaattagagtatactgaatatttaatagcaaaaattttaacgcagtgttaaatatctttgtagtattaaaatctcaagaggatcttcaatcaaagtctccagaacctaagtaactcctcaaagttttagtattactcaaataattccaatttctaaaatgggtaagttgatattgagggcctttgtaagcatcagcttcaagtactactagtctttttaataattctcattttgttactttttcacatacctgttaatataaaaacattttagatactttagtgtactataatgttgttattacataaatggagtatgaataatatattacagaaaataattttccattaagagatcttcaaagatcttcctacaaagggaaatacctccaggtgaaatcgtcacacacataaggaaaaatcaacacaactcactctgctttgacctaccctcttgatttggaggaattataaaacggaatcaaaatcagctttaactgtagattttaagaatataatatagctctaagggcggccgtacaaggactgttgaagcagtttaccactgagcgacatacacggactgctcgagcggtcgtcgttgatatctggagcagtcgttgactacttgagttgtcacttgttgccttgcaaccgctctcgagctgtcaacagcacgatggattttcatcgtgctgttgacagtttgaagaggtcgtgactgtgctcgagctgtcatgtgtatatcagcgaatataggattatagttcaccgtgcggtcgctggttcaagctgtccgtgtactgccgacctaagatgtgttttcaaagaatatcggatattaagaagatgaatagatgtacagtgtcaagcgaaagaaagaaaataataaattactttaaacaaatcagacaaaagaaggtcaatatctaattaataggacttaacaattcaattggatagaaatcaaaatagaaaaatcaatcctttagttttgtggagtgcattcgtctatctacccgtccgaagaattggtggaactgaaactctaacgtatagagaaaaactgacgacgattcatatatataaaagagtaatttcaaaagtcctctaccgactagtacagaggaagaacatattcatacattttctacttcctacccctccccattttgtaaaggttcacgttttctcacctttatttaatataattaaataactagggagatcatattttgagatgggtactccaaatgagaacgaaaatgatagattccaatattataacaccttcgagttgttatattgataaaaaaatgctggaagagctggacaatcataaaatgatcattcattatggatattgtatatataaagctacttaaaccataatactcaattaaatccacgtttgtatataatttattctttaaaagatctaattataagaaatccaatatcttactaccaaatttttgaattctccctaaactaaccttccccgctaaagtaaacgtattgtaccctattattgacacaataaaattgtagcaataatatccattctaaattacttttatttatgcatttaaatgtttgtaaaacaattattgtaattactagattattttatctttccagcatcaaatgctggatcatttagcggacataccatatcagtaattaatacttaatttaaattacttagtaattcagtataaagattgtttcaacag

SEQ ID NO: 2356 - DNA, 3936 bp, Diabrotica virgifera
  SmartBlast Evalue=0; Info="Glutamate dehydrogenase, mitochondrial n=4 Tax=Apocrita RepID=E2A6U2_9HYME"
attttaattttcaatttaataatagcagtgaggtgagataaggcttgttggtgcgtttcggtactggtattttgtcacgttggtgcttagcgcggtaattacgtaaggcgttacaactgccgggtggtgtcgggtttctatgatttggggattatatactaactaatattaaatctaacacaaattatcaaaatgttgaatttaaaaatgatttctaaatttgcgcctcttaaatcaaggagtgcggaagttagcacattacttaaagccttaccagcagcatgcaaccagctccagggaaggacttacgcggatcatgtcattccagacagactaaaggatatgcctaacaaccctaatcctaggtttttcgacatggttgaatatttcttccacaaggcctgcgttttagtagaggataaattggtggaagacttaggaaacgttaagggatccaggttgaatttggatcaaagaaaagccaaagtaaaaggtattttaaccttcatggaacaatgcgatcacattctcgaagttgcatttcccattaaaagggacaatgggcagtatgaaatcattaaagggtacagagctcaacatagcacccacagaactccatgcaaagggggtatgcgtttctctatggacgtctccagagacgaagtcaaagctttggcagccttgatgacattcaaatgcgcctgtgtagatgttccattcggaggagcgaaagctggagttaaaatcgatcacaagaaatactctgaacatgaattagaaaagatcaccaggagattcactttggaattagtcaaaaaaggatttattggacccagtattgatgtacctgctccagacatgggtaccggcgaaagagaaatgtcctggttagccgacacatatgccaaaaccattggttaccaagatataaacaaccacgcctgcactactggaaaacccatcaaccaaggtggtatccacggacgtgtctctgctaccggtcgtggagttttccatggtatcgaaaatttcagcaacgaggaaagctacatgcaaaagtgtggattgacaactggcatcagaggaaaaactgtaattatccaaggtttcggtaatgtcggtttgcacaccatgaggtacctccacagggcaggagccaaagtaattggtgttattgaatacgatggttctatcttcaatgaaaacggtattgaccccaaggaccttgaagattacagagttaccaacggtagcattaacggtttccctggagccaagaaatacgaagataacttattattccacgaatgtgatatcttggtacccgctgccactgaaaaagtgattaccaaagacaatgctgacaaagtcaaagctaaaatcattgccgaagccgccaacggaccattgacaccagccgctgatcagatcttactcaagaagaatgttctagtcattcccgatttgtatgttaacgctggtggtgtgacagtctcattctttgaatggttaaagaacatcaaccacgtctcatacggacgattgacctttaaatatgaaaaggactccaactaccatttactacaatctgtacaagaatctctcgaaaggaaatttaccgacgtaggatcaatccccatcttgccatctacacccttcaacaagagaattgctggtgcttctgaaaaagatattgtacattctggtctcagttttaccatggaacgatctgcaaaggctattaaggatacagcagaaaagtacggtcttggattggaccttcgatcggccgcctacatcaactcagtgcaaaaaatcttcctcaccctcaacgatgctggtttcgcatattaaacaattttaaccaaacttaaccaatcatttttacattcctacaaatgtgacattccattacgaatcatttttcattctaagtattaacccattccagaaacaatgttttttatgattcacaattttaattttttacttttgtgtttttattgtactgttaaatatcaggatgattttataaaatgtataggtagatagaagtttagatttcttatatcaatgacaccttcaagcaaaaaatgacatggcatatgaaatataacatgatcaagaatttaagggtagtttaaaaatatattattttgttctaaatttgttcaaaattgattacctactattagaccgtctcgaaattagagtatactgaatatttaataacaaaaattttaacgcagtgttaaatatttttgtagtattaaaatctcaagaggatcttcaatcaaagtctccagaacctaagtaactcaaagttttagtattactcaaataattacaatttctaaaatgggtaagttgatattgagggcctttgtaagcatcagcttcaagtactactagtcttttcaataattctcattttgttactttttcacatacctgttaatattaaaacattttagatactttagtgtactacaatgttgttattacataaatggagtatgaataatatattacagaaaataattttccattaagagatcttcaaagatcttcctacaaagggaaatacctccaggtgaaatcgtcacacacataaggaaaaatcaacacaactcactctgctttgacctaccctcttgatttggaggaattataaaacggaatcaaaatcagctttaactgtagattttaagaatataatatagctctaagggcggccgtacaaggactgttgaagcagtttaccactgagcgacatacacggactgctcgagcggtcgtcgttgatatctggagcagtcgttgactacttgagttgtcacttgttgccttgcaaccgctctcgagctgtcaacagcacgatggattttcatcgtgctgttgacagtttgaagaggtcgtgactgtgctcgagctgtcatgtgtatatcagcgaatataggattatagttcaccgtgcggtcgctggttcaagctgtccgtgtactgccgacctaagatgtgttttcaaagaatatcggatattaagaagatgaatagatgtacagtgtcaagcgaaagaaagaaaataataaattactttaaacaaatcagacaaaagaaggtcaatatctaattaataggacttaacaattcaattggatagaaatcaaaatagaaaaatcaatcctttagttttgtggagtgcattcgtctatctacccgtccgaagaattggtggaactgaaactctaacgtatagagaaaaactgacgacgattcatatatataaaagagtaatttcaaaagtcctctaccgactagtacagaggaagaacatattcatacattttctacttcctacccctccccattttgtaaaggttcacgttttctcacctttatttaatataattaaataactagggagatcatattttgagatgggtactccaaatgagaacgaaaatgatagattccaatattataacaccttcgagttgttatattgataaaaaaatgctggaagagctggacaatcataaaatgatcattcattatggatattgtatatataaagctacttaaaccataatactcaattaaatccacgtttgtatataatttattctttaaaagatctaattataagaaatccaatatcttactaccaaatttttgaattctccctaaactaaccttccccgctaaagtaaacgtattgtaccctattattgacacaataaaattgtagcaataatatccattctaaattacttttatttatgcatttaaatgtttgtaaaacaattattgtaattactagattattttatctttccagcatcaaatgctggatcatttagcggacataccatatcagtaattaatacttaatttaaattacttagtaattcagtataaagattgtttcaacag

SEQ ID NO: 2357 - DNA, 3757 bp, Diabrotica virgifera
  SmartBlast Evalue=0; Info="Glutamate dehydrogenase, mitochondrial n=4 Tax=Apocrita RepID=E2A6U2_9HYME"
attttaattttcaatttaataatagcagtgaggtgagataaggcttgttggtgcgtttcggtactggtattttgtcacgttggtgcttagcgcggtaattacgtaaggcgttacaactgccgggtggtgtcgggtttctatgatttggggattatatactaactaatattaaatctaacacaaattatcaaaatgttgaatttaaaaatgatttctaaatttgcgcctcttaaatcaaggagtgcggaagttagcacattacttaaagccttaccagcagcatgcaaccagctccagggaaggacttacgcggatcatgtcattccagacagactaaaggatatgcctaacaaccctaatcctaggtttttcgacatggttgaatatttcttccacaaggcctgcgttttagtagaggataaattggtggaagacttaggaaacgttaagggatccaggttgaatttggatcaaagaaaagccaaagtaaaaggtattttaaccttcatggaacaatgcgatcacattctcgaagttgcatttcccattaaaagggacaatgggcagtatgaaatcattaaagggtacagagctcaacatagcacccacagaactccatgcaaagggggtatgcgtttctctatggacgtctccagagacgaagtcaaagctttggcagccttgatgacattcaaatgcgcctgtgtagatgttccattcggaggagcgaaagctggagttaaaatcgatcacaagaaatactctgaacatgaattagaaaagatcaccaggagattcactttggaattagtcaaaaaaggatttattggacccagtattgatgtacctgctccagacatgggtaccggcgaaagagaaatgtcctggttagccgacacatatgccaaaaccattggttaccaagatataaacaaccacgcctgcactactggaaaacccatcaaccaaggtggtatccacggacgtgtctctgctaccggtcgtggagttttccatggtatcgaaaatttcagcaacgaggaaagctacatgcaaaagtgtggattgacaactggcatcagaggaaaaactgtaattatccaaggtttcggtaatgtcggtttgcacaccatgaggtacctccacagggcaggagccaaagtaattggtgttattgaatacgatggttctatcttcaatgaaaacggtattgaccccaaggaccttgaagattacagagttaccaacggtagcattaacggtttccctggagccaagaaatacgaagataacttattattccacgaatgtgatatcttggtacccgctgccactgaaaaagtgattaccaaagacaatgctgacaaagtcaaagctaaaatcattgccgaagccgccaacggaccattgacaccagccgctgatcagatcttactcaagaagaatgttctagtcattcccgatttgtatgttaacgctggtggtgtgacagtctcattctttgaatggttaaagaacatcaaccacgtctcatacggacgattgacctttaaatatgaaaaggactccaactaccatttactacaatctgtacaagaatctctcgaaaggaaatttaccgacgtaggatcaatccccatcttgccatctacacccttcaacaagagaattgctggtgcttctgaaaaagatattgtacattctggtctcagttttaccatggaacgatctgcaaaggctattaaggatacagcagaaaagtacggtcttggattggaccttcgatcggccgcctacatcaactcggtgcaaaaaatcttcctcaccctcaacgatgctggtttcgcatattaaataattttaaccaaacttaaccaatcattttttacattccgacagatgtaacattccattacgaatcattcttcattctaagtattaacccattccagaaacaatgctatttatgattcacaattttaatttttttaccttcgtgattttattttactgttaaatatcaagatggattttataaaatttataggtagctagaagtttagatttcttatatcaatgacaccttcaagcaaaaaatgaaatggcatatgaaatatgacattatcaagaatttaagggaagtttaaaaatatatcattttgttctaaatttgttaaaaattgattactattagatcgtctcgaaattagagtatactgaatatttaataacaaaaattttaacgcagtgttaaatatctttgtagtattaaaatctcaagaggctcttcaatcaaagtctccagaacctaagtaactcaaagttttagtattactcaaataattacaatttctaaaatggttaagttgatattgagggcctttgtaagaacttcaagaactagtcttttcaagaattctcattttgttacttttcacatacctgttgatataaaaacattttagatactttagtgtactataatgttgttattacatagatggagtatgaataatatattaaagaaaataattttccattaaggaaagggcggccgtacaaggactgttgaagcagtttaccactgagaaacatacacggactgctcgagcggtcgtcgttgatatctggagcagtcgttgactacttgagttgtcacttgttgctttgcaaccgctctcgagctgtcaacagcacgatggattttcatcgtgctgttgacagtttgaagaggtcgtgactgtgctcgagctgtcatgtgtatgtcagcgaatataggattatagttcaccgtgcggtcgctggttcaagctgtccgtgtactgccgacctaagatgcgttttcaaagaatatcggatattaagaagatgaatagatgtacagtgtcaagcgaaagaaagaaaataataaattactttaagcaaatcagacaaaagaaggtcaatatctaattaataggacttaactattcaattggatcgaaatcaaaatagaaaaatcaatcctttagttttgtggagtgcattcgtctatctacccgtccgaagaattggtggaacggaaactctaacgtatagagaaaaactgacgacgattcatatatataaaagagtaatttcaaaagtcctctaccgactagtacagaggaagaacatattcatacattttctacttcccacccctccccattttgtaaaggttcacgttttctcacctttatttaatataattaaataactagagagatcatattttgagatgggtactccaaatgagaacgaaaacgatagattccaatattataacaccttcaagttgttatattgataaaaaaaaatgcttgaatagctggacaatcataaaatgatcattcattatggatattgtatatataaagctacttaaaccataatactcaattaaatccacgtctgtatataatttattctttaaaagatctaattataagaaatccaatatcttactaccaaatttttgaattctccctaaactaaccttccccgctaaagtaaacgtattgtaccctattattgacacaataaaattgtagcaataatatccattctaaattacttttatttatgcatttaaatgtttgtaaaacaattattgtaattactagattattttatctttccagcatcaaatgctggatcatttagcggacataccatatcagtaattaatacttaatttaaattacttagtaattcagtataaagattgtttcaacag

SEQ ID NO: 2358 - DNA, 2202 bp, Diabrotica virgifera
  SmartBlast Evalue=0.000000001; Info=Histidine-rich glycoprotein n=1 Tax=Plasmodium lophurae RepID=HRPX_PLALO
cccaaggtaatgacaacagagcagctgcagaaaataatgctaacgcagatgcccaaaccgatgccgcacaaggtagcgccaatgaagccaacgcagaaaacaatgctaatgcagacgctcaaaatgatgctgcacaagctaatgataatggagctgctgcagaaaatagcggtaatgctgatgctgcccaaggtaccgacaatgaagctactgcagaaaacagtggtaatgctgaccctgcccaaggtaatgacaatggagctgctgcagaaaacaatggtaatgctaacgcagcccaatctaatgacagcgaagcagctgcagaaaataatggaaatgcagatgctcaaaatgacgccgcacaaggtactgccaatgaagccaacgcagaaaacaatgccaatgaaaatgcccaaaatgatgctgcacaagctaatgacaatgaagctgctgccgaaaacaatggtaatgccgatgctgcccaaagtaccgacaatgaagctgctgcagaaatcagtggtaatgctgacactcaaaacgatgctgcacaaggtaacgaaaacggagctgctgcagaaaacactgttgatgctgaccccgcccaaggtaatgacaatggagctgctgcagaaaacagtggtaatgccgaagctgcccaaggtagcgacaatggagctgctgcagaaaacaatggtaacgctgaccccgccgaaggtaatgaaaatggatctgctgcagagaacagtggtaatgctgatgcggctcaaggtaatgacaacggggcagctgcagaaaataatactaatgcagatacccaaaacgacgccgcacaaagttccgcaaatgatgcaaatgcagaaagtaatgctgatgcccaaaatggtgctgcacaaggtaacgacaatggcgctgctgcagaaaacactgaaaacgctgatagccaaaacgacgctgcacagaataccggcaatgaagccaacgcagaaaacaatgcgaatgtagatgttcaaaatgatgcagcacaaggtaacgaaagtcaagctgctgcagaaaacaacagtaatgctgatggtgcccaaaataataataatggacctgctgaagaaaataattctaatgcagatacccaaaatgatgctgcacaaggtaacgaaaatgggtctgctgcagaaaatactggtaacgctgatagccaaaacgacgcaggacaaggttccgctaatgcagccaacgcagataataatgctaatacagacgctcaaaatggtgctgatcaaggtaacgagaatggatctgccgcagaaaacaacggtggtgctgatggtcaaaacgaaaatggagctgctgcagcgagcagcggtaacgcagataaccaaaataataacaatagcaataatgatagcggaaacaatcaaaacaatggtagcaattccgtggaagaaaacagcaaagaagattcaggtaacgaaagtcaagaaaataaagataataatgacacgtcagaagataactctgaggaattagacagtagcgaaagggaagaggaagaaaggcgcaaggaagaggaaaagaaacaaaaggaggaagagaataataacaattctgtggaagaaaatagcaacgaagattcaaataatgaaagtcaagaagagaaagatagtaatgacacatctgaagatgactctgacgaattagatagtcgcgaacaaaaaaagaagaaggaagaagagaagaaacagcaaaaagaggaagaaaaaagacgaaagcaagaggaaaagagacagaaacaagaagagaagagacaaaaggagaaagaaaagagaaaacaaaaggaagaagaaaaaaggataaaagaacaacaaaagcgagaagaggagcgacagcgtagagaggaagaacgtctgcgacgggaagaagaacgcaaacaaagggaagaagaaagaaggaggaatgaagatcaatggatagatgcacttaagaagacaatcgagagaaaactagcatatttagactacattaagaaccagtatggaatcaatgttcaatgtgactctgaaatctgcagatgccggtgtcttcttaacaacaaccattccggttattgctcaagaacaaaagaatgtgtgtgcgtgtagaaactttaggaaaatacaaatttggcttgtatgtttttgtattatgtaaatagataattcatttagc

SEQ ID NO: 2359 - DNA, 2082 bp, Diabrotica virgifera
  SmartBlast Evalue=0.000000001; Info=Histidine-rich glycoprotein n=1 Tax=Plasmodium lophurae RepID=HRPX_PLALO
cccaaggtaatgacaacagagcagctgcagaaaataatgctaacgcagatgcccaaaccgatgccgcacaaggtagcgccaatgaagccaacgcagaaaacaatgctaatgcagacgctcaaaatgatgctgcacaagctaatgataatggagctgctgcagaaaatagcggtaatgctgatgctgcccaaggtaccgacaatgaagctactgcagaaaacagtggtaatgctgaccctgcccaaggtaatgacaatggagctgctgcagaaaacaatggtaatgctaacgcagcccaatctaatgacagcgaagcagctgcagaaaataatggaaatgcagatgctcaaaatgacgccgcacaaggtactgccaatgaagccaacgcagaaaacaatgccaatgaaaatgcccaaaatgatgctgcacaagctaatgacaatgaagctgctgccgaaaacaatggtaatgccgatgctgcccaaagtaccgacaatgaagctgctgcagaaaacagtggtaatgccgaagctgcccaaggtagcgacaatggagctgctgcagaaaacaatggtaacgctgaccccgccgaaggtaatgaaaatggatctgctgcagagaacagtggtaatgctgatgcggctcaaggtaatgacaacggggcagctgcagaaaataatactaatgcagatacccaaaacgacgccgcacaaagttccgcaaatgatgcaaatgcagaaagtaatgctgatgcccaaaatggtgctgcacaaggtaacgacaatggcgctgctgcagaaaacactgaaaacgctgatagccaaaacgacgctgcacagaataccggcaatgaagccaacgcagaaaacaatgcgaatgtagatgttcaaaatgatgcagcacaaggtaacgaaagtcaagctgctgcagaaaacaacagtaatgctgatggtgcccaaaataataataatggacctgctgaagaaaataattctaatgcagatacccaaaatgatgctgcacaaggtaacgaaaatgggtctgctgcagaaaatactggtaacgctgatagccaaaacgacgcaggacaaggttccgctaatgcagccaacgcagataataatgctaatacagacgctcaaaatggtgctgatcaaggtaacgagaatggatctgccgcagaaaacaacggtggtgctgatggtcaaaacgaaaatggagctgctgcagcgagcagcggtaacgcagataaccaaaataataacaatagcaataatgatagcggaaacaatcaaaacaatggtagcaattccgtggaagaaaacagcaaagaagattcaggtaacgaaagtcaagaaaataaagataataatgacacgtcagaagataactctgaggaattagacagtagcgaaagggaagaggaagaaaggcgcaaggaagaggaaaagaaacaaaaggaggaagagaataataacaattctgtggaagaaaatagcaacgaagattcaaataatgaaagtcaagaagagaaagatagtaatgacacatctgaagatgactctgacgaattagatagtcgcgaacaaaaaaagaagaaggaagaagagaagaaacagcaaaaagaggaagaaaaaagacgaaagcaagaggaaaagagacagaaacaagaagagaagagacaaaaggagaaagaaaagagaaaacaaaaggaagaagaaaaaaggataaaagaacaacaaaagcgagaagaggagcgacagcgtagagaggaagaacgtctgcgacgggaagaagaacgcaaacaaagggaagaagaaagaaggaggaatgaagatcaatggatagatgcacttaagaagacaatcgagagaaaactagcatatttagactacattaagaaccagtatggaatcaatgttcaatgtgactctgaaatctgcagatgccggtgtcttcttaacaacaaccattccggttattgctcaagaacaaaagaatgtgtgtgcgtgtagaaactttaggaaaatacaaatttggcttgtatgtttttgtattatgtaaatagataattcatttagc

SEQ ID NO: 2360 - DNA, 972 bp, Diabrotica virgifera
cccaaggtaatgacaacagagcagctgcagaaaataatgctaacgcagatgcccaaaccgatgccgcacaaggtagcgccaatgaagccaacgcagaaaacaatgctaatgcagacgctcaaaatgatgctgcacaagctaatgataatggagctgctgcagaaaacaacggtaatgccgatgctgcccaaggtaccgacaatgaagctgctgcagaaaacagtggcaacgagaatggaacaggcgcggaaaataatgctaatgcagatgcccaaaccgacgccgcacaaggcagcaccaatgaagccaacgcagaaaataatgccaatgcagatgtccaaaatgatgctgcacaagctaatgaaaatggagctgctgcagaaaatagcggtaatgctgatgctgcccaaggtaccgacaatggagccgctgcagaaaacactggtaatgctgaccctgcccaaggtaatgacaatggggctgctgcagaaaacagtggcaacgagaatggaacagcggcggaaaataacgctaatgcagatgtacaaaatgatgctgcacaggtgaatgacaatggtgctgctgcagaaaacaatggtaatgctgacgccgcacaatctaatgacaacggagcagctgcagaaaataatactaatgctgatgctcaaaacgacgccgcacaaggtactgccaacgaagccaacgcagaaaacaatgccaatgaaaatgcccaaaatgatgctgcacaagctaatgacaatgaagctgctgccgaaaacaatggtaatgccgatgctgcccaaagtaccgacaatgaagctgctgcagaaatcagtggtaatgctgacactcaaaacgatgctgcacaaggtaacgaaaacagagctgctgcagaaaacactgttgatgctgaccccgcccaaggtaacgacaatggcgctgctgcagaaaacactgaaaacgctgatagcc

SEQ ID NO: 2361 - DNA, 1959 bp, Diabrotica virgifera
acgtctttatatatttacaactggattgtacaacattattctaataatatacaattgaatctcgaatagctacaatccgtttaataaaaaagttattttagtaattaatttatctttgatataaatattgttatttgttaaaaataaaaatgttcaatggatttaattacttgaagttagcagcaaccattactgcatcgactattgttaaaaatctttaattcacaactaaacaatcaagttaagtcattgtttgttaaaacatagatgcctaaatatgacacttcaaagaacaatgttaataagcttacaccatgtgaactacaatatcattgtcaatacatacaccaatattgacagtacagtaagccccaaataagtaaaattttgcaagtttttaagactacactagtatttcagtctatgaatgtatagagaaagcacagaatatgtcaaagcagatgtcagatctctatatggtatccaaagaacttgcgcaacgtcaattcttcttattcgaagcttactctatacacatctatgttttaagctctaacattatttggaaataagtcaaataagggccttaaaatgctcaattagcatattgcactttgagattatttttgatgccagaaaatgttttaaaatttaagtagtttaaaaaacctaataagttaggaattaagaattaaaatctacataacaattactaagcataactacaaaataaagtgtatgtactttattcactgaaatatatttcggtgaaaaagataacaaataatataactgatataaataccactattttttggatgtagagaacatacagataatgctattcaaaatatcatttcaaatattcccatgcttccaagtgttatagtttttaaatattcatcagattcacaacctaaacaaaacagatttttaccaaagctgctacagattaatgtaacgtctcaaacgtgctgcccaaaaatgtttactatttctgtgaaaaattcaagtattaatacatttattctatacgttttagtaattccttaaggtatttattttacatttagttaaaccaatttacttctttttgacaatgtaaaccagcaaaaataaatagccaaaacaccaagctttacagaagagcacataagcgcatcctcatatgcaggatttttgcaacatttaaacatgctagtcaattcagccgagcaataatcaaaatcaatactacgctaataatccaaggcgtgtgaaaaaaaaagaagagttttaatgcctttatgaagcagcaggatgatttttgaatgctgctgcttatggttttgatacaataatcaattacaacgatttgcaaacaaaattgagtagacaagcttataaaactcaatttaggaagattttcaaagcctttatgtagcaacaacatgatttctaaattctgcttctaatggttttgatattataatgtattatatatagaatttacaaccaaaactgagtaaagaagcttataaagttcaatttaggaagattttcaaggcctttatgaagcagcaggatgatttctgaatactgctgttaatgtttttgatataataatcaattataagtatgtacttgcaaataaaactgagcagacaagcttagaaaactaaattcagaaagattttcaaggcctttctgtaccagcaggatgatttctgaattctgctgctaatagttttgatataataatgaattataaaggatttgcaaacaaaactgagtagacaagcttataaaactcaatttaagtatatctttaagacttttatacatgtaattgcacgatgctttctgaattatgttgctgattattttgatacgatattgaattataaaggatttgtagacaaaactgaggagacaagcttataaaacccaattaacgaaggtttttcaagacctttctgt

SEQ ID NO: 2362 - DNA, 1715 bp, Diabrotica virgifera
acgtctttatatatttacaactggattgtacaacattattctaataatatacaattgaatctcgaatagctacaatccgtttaataaaaaagttattttagtaattaatttatctttgatataaatattgttatttgttaaaaataaaaatgttcaatggatttaattacttgaagttagcagcaaccattactgcatcgactattgttaaaaatctttaattcacaactaaacaatcaagttaagtcattgtttgttaaaacatagatgcctaaatatgacacttcaaagaacaatgttaataagcttacaccatgtgaactacaatatcattgtcaatacatacaccaatattgacagtacagtaagccccaaataagtaaaattttgcaagtttttaagactacactagtatttcagtctatgaatgtatagagaaagcacagaatatgtcaaagcagatgtcagatctctatatggtatccaaagaacttgcgcaacgtcaattcttcttattcgaagcttactctatacacatctatgttttaagctctaacattatttggaaataagtcaaataagggccttaaaatgctcaattagcatattgcactttgagattatttttgatgccagaaaatgttttaaaatttaagtagtttaaaaaacctaataagttaggaattaagaattaaaatctacataacaattactaagcataactacaaaataaagtgtatgtactttattcactgaaatatatttcggtgaaaaagataacaaataatataactgatataaataccactattttttggatgtagagaacatacagataatgctattcaaaatatcatttcaaatattcccatgcttccaagtgttatagtttttaaatattcatcagattcacaacctaaacaaaacagatttttaccaaagctgctacagattaatgtaacgtctcaaacgtgctgcccaaaaatgtttactatttctgtgaaaaattcaagtattaatacatttattctatacgttttagtaattccttaaggtatttattttacatttagttaaaccaatttacttctttttgacaatgtaaaccagcaaaaataaatagccaaaacaccaagctttacagaagagcacataagcgcatcctcatatgcaggatttttgcaacatttaaacatgctagtcaattcagccgagcaataatcaaaatcaatactacgctaataatccaaggcgtgtgaaaaaaaaagaagagttttaatgcctttatgaagcagcaggatgatttttgaatgctgctgcttatggttttgatacaataatcaattacaacgatttgcaaacaaaattgagtagacaagcttataaaactcaatttaggaagattttcaaagcctttatgtagcaacaacatgatttctaaattctgcttctaatggttttgatattataatgtattatatatagaatttacaaccaaaactgagtaaagaagcttataaagttcaatttaggaagattttcaaggcctttatgaagcagcaggatgatttctgaatactgctgttaatgtttttgatataataatcaattataagtatttgcaaacaaaactgagcagacaagtttataaaactcaattcagaaagattctcaaggcctttatgtagcagcaggatgatttctgaatcctgccg

SEQ ID NO: 2363 - DNA, 682 bp, Diabrotica virgifera
  SmartBlast Evalue=4E-45; Info=Acaloleptin A n=1 Tax=Acalolepta luxuriosa RepID=Q76K70_ACALU
gtattggacaagaaagtactccgttggaaaatagaaaagattaacgatgaagttcaaacatggatcaacttttattctaatattcgcattaataatcttaacaggcgcccaagatgataatgaacaaagatttaaaagatcgcccaaaccagattgggaagtgaatccaggagctaaccgtgatgatgatggtaataccaatgcaggcgtccaagtgaaaaatcatggaaatgaccacgattttgaagcaggatggagcaaagtagttagtggacccgatagagctaaaccaacatggcatgtaggtggtacctggagattcaagagatcgccaaaccagattgggaagtgaatccaggagctaacggtgatggaaatggtaacactaatgctggagtagaaataagaaataaggacaaagatcatgacttccaggctggatggaacaaagttgtccatggacccaacagagctaaaccaacatggcatgtaggtggtagcttcagattcaagagatcaccaaaaccagattgggaagtacaacctggagcaaacggtgatggtaatggtaacactaacgctggtgtagaagtaagaaataagggcaaagatcatgactttcaggctggatggaacaaagttgtccatggacccaacagagctaagccaacatggcatgtag

SEQ ID NO: 2364 - DNA, 699 bp, Diabrotica virgifera
  SmartBlast Evalue=2E-48; Info=Acaloleptin A n=1 Tax=Acalolepta luxuriosa RepID=Q76K70_ACALU
aacgtttgtaactgaagacatctaagacaaagatattacaataattagtacttaatcgaataaaataaaggttctaattcgacatgaaatttactgttacttcattgtgcttattgctgatagcaatagtagcggtaacaaacgctacagatgacaaaaagaagccacaaccttgggaagtacatccagatgtcagcggtgatggcaaaaatgttaatgcaggtgtagaagtaaagaaaaatggtgagaatcacgattttgaagctggctggaacaaggttgtccatggacctaacaaaggaaagccaacttggcatgttggtggtactatacgatttaaaagatcgccaaaaccagattgggaagtacaacctggagcaaacggtgatggaaatggtaatactaacgctggtgtagaagtaagaaataagggcaaagatcatgactttcaggctggatggaacaaagttgtccatggacccaatagagctaaaccgacatggcatgtaggtggtagcttcagattcaagagatcaccaaaaccagattgggaagtacaacctggagcaaacggtgatggtaatggtaacactaacgctggtgtagaagtaagaaataagggcaaagatcatgactttcaggctggatggaacaaagttgtccatggacccaacagagctaagccaacatggcatgtag

SEQ ID NO: 2365 - DNA, 514 bp, Diabrotica virgifera
  SmartBlast Evalue=9E-43; Info=Acaloleptin A n=1 Tax=Acalolepta luxuriosa RepID=Q76K70_ACALU
ggagcaaacggtgatggtaatggtaacactaacgctggtgtagaagtaagaaataagggtaaagatcatgactttgaggctggatggagcaaagtcgtccatggacccaacagagctaaaccaacgtggcatgtgggtggtagctaccgattcaaaaggtcaccaaaaccagattgggaagtacaacctggagcaaacggtgatggaaatggtaacactaatgccggtgtagaagtaagaaataagggcaaagatcatgacttccaggctggatggaacaaagttgtccatggacccaacagagctaaaccaacatggcatgtaggtggtagcttcagattcaagagatcaccaaaaccagattgggaagtacaacctggagcaaacggtgatggtaatggtaacactaacgctggtgtagaagtaagaaataagggcaaagatcatgactttcaggctggatggaacaaagttgtccatggacccaacagagctaagccaacatggcatgtag

SEQ ID NO: 2366 - DNA, 1447 bp, Diabrotica virgifera
  misc_feature (504)..(504): n is a, c, g, or t
ttctccgcaactgagggtatcttatcaactgtatgtttttaaacaatagatgaataaaataaaatattgacagttcaaaaaagtgaaaataataacttcattgtgacacattattgcactgtgtgtagcctaattttgggctgaaacactgaaaaatgtattacatttttacaaaattttggaatatgtctaattcgtagaacaatttaacagttgtcttcaatacagatttcaatcatctacaaatagttttttaatgtaagcactgatgatgactggtaaaccagtcgaaaactggttatgtgattgtgatgtagccctttttagggattttaaatataccttttatggatttactgttttttgtattacatggtatacagccaactacaggaaaactttttccttgtggatttgacttaaatgaaaaaaactacggaattcatttatgttttacatagacccctgaattgtattatgttgcactctcacgctccgttcatnttccgacaacaggacaataattaatagtacctattcaagtgaaaaaatcttaaatttgtaacacagatgaagcacagtaacatctgtttccaataattagatggacctgtctccacaacaaatggttaaaagatacagatgttatttaagaggttgcagaagggaactacatgttcataaatcttgtatgttttctgaaatcgttttctgcagtaggtattcattaatgttttaaatacgcaaattttcaaattatttaaaaatgtctttaaataaaaagcattaaatacaaaacccactatattgatacttagtttagaaaattgatagatatttaaaaaaatagtacccttatttaaagtgtgattcctgaattattaatttcaaagttttatgtgattaatattttgacgaaaattatacataatttcaaaatttcaccttgcattattcataatagaccctacataatacacatttttgagatgaggttgttaagcagcttctaaaaacaaaaatatacatggtgtttaattaaaattaaagataatggactatgctagacttgagtgaatcaccctgtatattcaaatttatgtttaaatagtccatagttgaatttaaaagttgacgtatcctagcgttttttataattttctaaaataatgacacacgacaaaacaattttattccataagtggtttccatacattataattttaaatgatcaccctgtattattcataaagaccataaatcagattgttaagcagcttttaaacatataaaaatatacagggtgttaaaaaataaagcttatggactacggtagtcttgcatgaatcaccctgtacatataaatttatgtttaaaaagcacacattttatatatgaaaatctacggtctcagcgttttttaaaatgattaaaacaaggacagaaa

SEQ ID NO: 2367 - DNA, 1405 bp, Diabrotica virgifera
  misc_feature (504)..(504): n is a, c, g, or t
ttctccgcaactgagggtatcttatcaactgtatgtttttaaacaatagatgaataaaataaaatattgacagttcaaaaaagtgaaaataataacttcattgtgacacattattgcactgtgtgtagcctaattttgggctgaaacactgaaaaatgtattacatttttacaaaattttggaatatgtctaattcgtagaacaatttaacagttgtcttcaatacagatttcaatcatctacaaatagttttttaatgtaagcactgatgatgactggtaaaccagtcgaaaactggttatgtgattgtgatgtagccctttttagggattttaaatataccttttatggatttactgttttttgtattacatggtatacagccaactacaggaaaactttttccttgtggatttgacttaaatgaaaaaaactacggaattcatttatgttttacatagacccctgaattgtattatgttgcactctcacgctccgttcatnttccgacaacaggacaataattaatagtacctattcaagtgaaaaaatcttaaatttgtaacacagatgaagcacagtaacatctgtttccaataattagatggacctgtctccacaacaaatggttaaaagatacagatgttatttaagaggttgcagaagggaactacatgttcataaatcttgtatgttttctgaaatcgttttctgcagtaggtattcattaatgttttaaatacgcaaattttcaaattatttaaaaatgtctttaaataaaaagcattaaatacaaaacccactatattgatacttagtttagaaaattgatagatatttaaaaaaatagtacccttatttaaagtgtgatttcaaaatttcaagtgaatttcaaaatttcaccttgcattattcataatagaccctacataatacacatttttgagatgaggttgttaagcagcttctaaaaacaaaaatatacatggtgtttaattaaaattaaagataatggactatgctagacttgagtgaatcaccctgtatattcaaatttatgtttaaatagtccatagttgaatttaaaagttgacgtatcctagcgttttttataattttctaaaataatgacacacgacaaaacaattttattccataagtggtttccatacattataattttaaatgatcaccctgtattattcataaagaccataaatcagattgttaagcagcttttaaacatataaaaatatacagggtgttaaaaaataaagcttatggactacggtagtcttgcatgaatcaccctgtacatataaatttatgtttaaaaagcacacattttatatatgaaaatctacggtctcagcgttttttaaaatgattaaaacaaggacagaaa

SEQ ID NO: 2368 - DNA, 1337 bp, Diabrotica virgifera
  misc_feature (504)..(504): n is a, c, g, or t
ttctccgcaactgagggtatcttatcaactgtatgtttttaaacaatagatgaataaaataaaatattgacagttcaaaaaagtgaaaataataacttcattgtgacacattattgcactgtgtgtagcctaattttgggctgaaacactgaaaaatgtattacatttttacaaaattttggaatatgtctaattcgtagaacaatttaacagttgtcttcaatacagatttcaatcatctacaaatagttttttaatgtaagcactgatgatgactggtaaaccagtcgaaaactggttatgtgattgtgatgtagccctttttagggattttaaatataccttttatggatttactgttttttgtattacatggtatacagccaactacaggaaaactttttccttgtggatttgacttaaatgaaaaaaactacggaattcatttatgttttacatagacccctgaattgtattatgttgcactctcacgctccgttcatnttccgacaacaggacaataattaatagtacctattcaagtgaaaaaatcttaaatttgtaacacagatgaagcacagtaacatctgtttccaataattagatggacctgtctccacaacaaatggttaaaagatacagatgttatttaagaggttgcagaagggaactacatgttcataaatcttgtatgttttctgaaatcgttttctgcagtaggtattcattaatgttttaaatacgcaaattttcaaattatttaaaaatgtctttaaataaaaagcattaaatacaaaacccactatattgatacttagtttagaaaattgatagatatttaaaaaaatagtacccttatttaaagtgtgattcctgaattattaatttcaaagttttatgtgattaatattttgacgaaaattatacataatttcaaaatttcaccttgcattattcataatagaccctacataatacacatttttgagatgaggttgttaagcagcttctaaaaacaaaaatatacatggtgtttaattaaaattaaagataatggactatgctagacttgagtgaatcaccctgtatattcaaatttatgtttaaatagtccatagttgaatttaaaagttgacgtatcctagcgttttttataattttctaaaataaggagacaaacaattttgtttcataagtggtttccacacactataatttcaaaatttcaccctgtattgttcataatataccgtacatgatgtggttcggtggaatcgggttgttaagcagcttttaaaaatataaaaatatattcaagtgtattcaaatgggaagtg

SEQ ID NO: 2369 - DNA, 1295 bp, Diabrotica virgifera
  misc_feature (504)..(504): n is a, c, g, or t
ttctccgcaactgagggtatcttatcaactgtatgtttttaaacaatagatgaataaaataaaatattgacagttcaaaaaagtgaaaataataacttcattgtgacacattattgcactgtgtgtagcctaattttgggctgaaacactgaaaaatgtattacatttttacaaaattttggaatatgtctaattcgtagaacaatttaacagttgtcttcaatacagatttcaatcatctacaaatagttttttaatgtaagcactgatgatgactggtaaaccagtcgaaaactggttatgtgattgtgatgtagccctttttagggattttaaatataccttttatggatttactgttttttgtattacatggtatacagccaactacaggaaaactttttccttgtggatttgacttaaatgaaaaaaactacggaattcatttatgttttacatagacccctgaattgtattatgttgcactctcacgctccgttcatnttccgacaacaggacaataattaatagtacctattcaagtgaaaaaatcttaaatttgtaacacagatgaagcacagtaacatctgtttccaataattagatggacctgtctccacaacaaatggttaaaagatacagatgttatttaagaggttgcagaagggaactacatgttcataaatcttgtatgttttctgaaatcgttttctgcagtaggtattcattaatgttttaaatacgcaaattttcaaattatttaaaaatgtctttaaataaaaagcattaaatacaaaacccactatattgatacttagtttagaaaattgatagatatttaaaaaaatagtacccttatttaaagtgtgatttcaaaatttcaagtgaatttcaaaatttcaccttgcattattcataatagaccctacataatacacatttttgagatgaggttgttaagcagcttctaaaaacaaaaatatacatggtgtttaattaaaattaaagataatggactatgctagacttgagtgaatcaccctgtatattcaaatttatgtttaaatagtccatagttgaatttaaaagttgacgtatcctagcgttttttataattttctaaaataaggagacaaacaattttgtttcataagtggtttccacacactataatttcaaaatttcaccctgtattgttcataatataccgtacatgatgtggttcggtggaatcgggttgttaagcagcttttaaaaatataaaaatatattcaagtgtattcaaatgggaagtg

SEQ ID NO: 2370 - DNA, 1087 bp, Diabrotica virgifera
  misc_feature (144)..(144): n is a, c, g, or t
tttttgtattacatggtatacagccaactacaggaaaactttttccttgtggatttgacttaaatgaaaaaaactacggaattcatttatgttttacatagacccctgaattgtattatgttgcactctcacgctccgttcatnttccgacaacaggacaataattaatagtacctattcaagtgaaaaaatcttaaatttgtaacacagatgaagcacagtaacatctgtttccaataattagatggacctgtctccacaacaaatggttaaaagatacagatgttatttaagaggttgcagaagggaactacatgttcataaatcttgtatgttttctgaaatcgttttctgcagtaggtattcattaatgttttaaatacgcaaattttcaaattatttaaaaatgtctttaaataaaaagcattaaatacaaaacccactatattgatacttagtttagaaaattgatagatatttaaaaaaatagtacccttatttaaagtgtgattcctgaattattaatttcaaagttttatgtgattaatattttgacgaaaattatacataatttcaaaatttcaccttgcattattcataatagaccctacataatacacatttttgagatgaggttgttaagcagcttctaaaaacaaaaatatacatggtgtttaattaaaattaaagataatggactatgctagacttgagtgaatcaccctgtatattcaaatttatgtttaaatagtccatagttgaatttaaaagttgacgtatcctagcgttttttataattttctaaaataatgacacacgacaaaacaattttattccataagtggtttccatacattataattttaaatgatcaccctgtattattcataaagaccataaatcagattgttaagcagcttttaaacatataaaaatatacagggtgttaaaaaataaagcttatggactacggtagtcttgcatgaatcaccctgtacatataaatttatgtttaaaaagcacacattttatatatgaaaatctacggtctcagcgttttttaaaatgattaaaacaaggacagaaa

SEQ ID NO: 2371 - DNA, 1045 bp, Diabrotica virgifera
  misc_feature (144)..(144): n is a, c, g, or t
tttttgtattacatggtatacagccaactacaggaaaactttttccttgtggatttgacttaaatgaaaaaaactacggaattcatttatgttttacatagacccctgaattgtattatgttgcactctcacgctccgttcatnttccgacaacaggacaataattaatagtacctattcaagtgaaaaaatcttaaatttgtaacacagatgaagcacagtaacatctgtttccaataattagatggacctgtctccacaacaaatggttaaaagatacagatgttatttaagaggttgcagaagggaactacatgttcataaatcttgtatgttttctgaaatcgttttctgcagtaggtattcattaatgttttaaatacgcaaattttcaaattatttaaaaatgtctttaaataaaaagcattaaatacaaaacccactatattgatacttagtttagaaaattgatagatatttaaaaaaatagtacccttatttaaagtgtgatttcaaaatttcaagtgaatttcaaaatttcaccttgcattattcataatagaccctacataatacacatttttgagatgaggttgttaagcagcttctaaaaacaaaaatatacatggtgtttaattaaaattaaagataatggactatgctagacttgagtgaatcaccctgtatattcaaatttatgtttaaatagtccatagttgaatttaaaagttgacgtatcctagcgttttttataattttctaaaataatgacacacgacaaaacaattttattccataagtggtttccatacattataattttaaatgatcaccctgtattattcataaagaccataaatcagattgttaagcagcttttaaacatataaaaatatacagggtgttaaaaaataaagcttatggactacggtagtcttgcatgaatcaccctgtacatataaatttatgtttaaaaagcacacattttatatatgaaaatctacggtctcagcgttttttaaaatgattaaaacaaggacagaaa

SEQ ID NO: 2372 - DNA, 977 bp, Diabrotica virgifera
  misc_feature (144)..(144): n is a, c, g, or t
tttttgtattacatggtatacagccaactacaggaaaactttttccttgtggatttgacttaaatgaaaaaaactacggaattcatttatgttttacatagacccctgaattgtattatgttgcactctcacgctccgttcatnttccgacaacaggacaataattaatagtacctattcaagtgaaaaaatcttaaatttgtaacacagatgaagcacagtaacatctgtttccaataattagatggacctgtctccacaacaaatggttaaaagatacagatgttatttaagaggttgcagaagggaactacatgttcataaatcttgtatgttttctgaaatcgttttctgcagtaggtattcattaatgttttaaatacgcaaattttcaaattatttaaaaatgtctttaaataaaaagcattaaatacaaaacccactatattgatacttagtttagaaaattgatagatatttaaaaaaatagtacccttatttaaagtgtgattcctgaattattaatttcaaagttttatgtgattaatattttgacgaaaattatacataatttcaaaatttcaccttgcattattcataatagaccctacataatacacatttttgagatgaggttgttaagcagcttctaaaaacaaaaatatacatggtgtttaattaaaattaaagataatggactatgctagacttgagtgaatcaccctgtatattcaaatttatgtttaaatagtccatagttgaatttaaaagttgacgtatcctagcgttttttataattttctaaaataaggagacaaacaattttgtttcataagtggtttccacacactataatttcaaaatttcaccctgtattgttcataatataccgtacatgatgtggttcggtggaatcgggttgttaagcagcttttaaaaatataaaaatatattcaagtgtattcaaatgggaagtg

SEQ ID NO: 2373 - DNA, 935 bp, Diabrotica virgifera
  misc_feature (144)..(144): n is a, c, g, or t
tttttgtattacatggtatacagccaactacaggaaaactttttccttgtggatttgacttaaatgaaaaaaactacggaattcatttatgttttacatagacccctgaattgtattatgttgcactctcacgctccgttcatnttccgacaacaggacaataattaatagtacctattcaagtgaaaaaatcttaaatttgtaacacagatgaagcacagtaacatctgtttccaataattagatggacctgtctccacaacaaatggttaaaagatacagatgttatttaagaggttgcagaagggaactacatgttcataaatcttgtatgttttctgaaatcgttttctgcagtaggtattcattaatgttttaaatacgcaaattttcaaattatttaaaaatgtctttaaataaaaagcattaaatacaaaacccactatattgatacttagtttagaaaattgatagatatttaaaaaaatagtacccttatttaaagtgtgatttcaaaatttcaagtgaatttcaaaatttcaccttgcattattcataatagaccctacataatacacatttttgagatgaggttgttaagcagcttctaaaaacaaaaatatacatggtgtttaattaaaattaaagataatggactatgctagacttgagtgaatcaccctgtatattcaaatttatgtttaaatagtccatagttgaatttaaaagttgacgtatcctagcgttttttataattttctaaaataaggagacaaacaattttgtttcataagtggtttccacacactataatttcaaaatttcaccctgtattgttcataatataccgtacatgatgtggttcggtggaatcgggttgttaagcagcttttaaaaatataaaaatatattcaagtgtattcaaatgggaagtg

SEQ ID NO: 2374 - DNA, 413 bp, Diabrotica virgifera
ttctccgcaactgagggtatcttatcaactgtatgtttttaaacaatagatgaataaaataaaatattgacagttcaaaaaagtgaaaataataacttcattgtgacacattattgcactgtgtgtagcctaattttgggctgaaacactgaaaaatgtattacatttttacaaaattttggaatatgtctaattcgtagaacaatttaacagttgtcttcaatacagatttcaatcatctacaaatagttttttaatgtaagcactgatgatgactggtaaaccagtcgaaaactggttatgtgattgtgatgtagccctttttagggattttaaatataccttttatggatttactgttttttgtattacatggtatacagccaactacaggaaaactttttccttgtgga

SEQ ID NO: 2375 - DNA, 1418 bp, Diabrotica virgifera
  SmartBlast Evalue=2E-92; Info=nucleosome assembly protein 1- like isoform 1 n=2 Tax=Nasonia vitripennis RepID=UPI0001A46D36
agtacgaaatgatttacttatatactccttacaaaacaaattttggaaatataacagatttgggtacgctacaaaaactgtcacttcaacatgattctataattaagactgttaacaattttttacataacgtaggaagaaactaataatttatatcaaaaagccatgttaagattgatgataacattgaatttaaagccacagcggtgaataatcttattgctgtttacaattctgctgatctttgttaacttttgtagcaacctctttatcatctgagtccccatcatcttcctcatcgtcttcctcctcttcttcttcgaaatcatcctcgtcttcacacgcttctccggtgaagaagagaacagctcgtgggacgattctttctctaatataatggccgatttcgaaatcggtggtaagcaaattccttaaatcttcatctacgtcttcttctttagcgtcatctggaattgttggcggactgaagaaattaaagaacgaatcattttggacagttttggtaattgtgcgtatcacgcctctgctcttatgcttctgtttcttcttgacggttttgacggtaacgtttttgcccttgttccaatttattatgcagccagcgcacttgaatatttcggggccttcgaagctgaatgggtcatcatcttctggtgcgcatttcatatcatattcctttgtgagcacggtattagtgaagtattcatttgtggagaagtggaactcaagaatgaatttcattggatcctctttgcagataatcttgatatcattcaaatgtttgagtattggaacatcatgaggttgaaccatttcagacagtaggccgacattcctgaaaattgtgagccagaaatcaggaacgcctttttcgtcttgaggttctgtttcttttttagaatcgtctaacttaattttttctttaatggcttctggaagatcagactcatcatcagacgaccattgagattcttcatcagtgggttcgtattggccgctgacaatggtatttcttttctcgtaaagaggctggtacaacttgtggtatttacattctagattatgtacctctttgaagaatttagcttcaatattagttgcctctaattggattctctttagagccttaattcttctcttaactgaggtaggtaagagtgcaagcatcgcagcattcctctgactttgaagggcagcataaacgttagggaaatctaactgtttggatccatcaacttcctcttcttcgacagattccaaatcgtcaggacagtctccttgttcgttttcagttgccatgttgcttttttgtttagccgaaatgcttgataatttaaccaagctgcaccagtaccaaaggcggcaaatggaagaaagaaaattcggattgaccccac

SEQ ID NO: 2376 - DNA, 1413 bp, Diabrotica virgifera
  SmartBlast Evalue=2E-92; Info=nucleosome assembly protein 1- like isoform 1 n=2 Tax=Nasonia vitripennis RepID=UPI0001A46D36
gaaatgatttacttatatactccttacaaaacaaattttggaaatataacagatttgggtacgctacaaaaactgtcacttcaacatgattctataattaagactgttaacaattttttacataacgtaggaagaaactaataatttatatcaaaaagccatgttaagattgatgataacattgaatttaaagccacagcggtgaataatcttattgctgtttacaattctgctgatctttgttaacttttgtagcaacctctttatcatctgagtccccatcatcttcctcatcgtcttcctcctcttcttcttcgaaatcatcctcgtcttcacacgcttctccggtgaagaagagaacagctcgtgggacgattctttctctaatataatggccgatttcgaaatcggtggtaagcaaattccttaaatcttcatctacgtcttcttctttagcgtcatctggaattgttggcggactgaagaaattaaagaacgaatcattttggacagttttggtaattgtgcgtatcacgcctctgctcttatgcttctgtttcttcttgacggttttgacggtaacgtttttgcccttgttccaatttattatgcagccagcgcacttgaatatttcggggccttcgaagctgaatgggtcatcatcttctggtgcgcatttcatatcatattcctttgtgagcacggtattagtgaagtattcatttgtggagaagtggaactcaagaatgaatttcattggatcctctttgcagataatcttgatatcattcaaatgtttgagtattggaacatcatgaggttgaaccatttcagacagtaggccgacattcctgaaaattgtgagccagaaatcaggaacgcctttttcgtcttgaggttctgtttcttttttagaatcgtctaacttaattttttctttaatggcttctggaagatcagactcatcatcagacgaccattgagattcttcatcagtgggttcgtattggccgctgacaatggtatttcttttctcgtaaagaggctggtacaacttgtggtatttacattctagattatgtacctctttgaagaatttagcttcaatattagttgcctctaattggattctctttagagccttaattcttctcttaactgaggtaggtaagagtgcaagcatcgcagcattcctctgactttgaagggcagcataaacgttagggaaatctaactgtttggatccatcaacttcctcttcttcgacagattccaaatcgtcaggacagtctccttgttcgttttcagttgccatgttgcttttttgtttagccgaaatgcttgataatttaaccaagctgcaccagtaccaaaggcggcaaatggaagaaagaaaattcggattgaccccac

SEQ ID NO: 2377 - DNA, 1418 bp, Diabrotica virgifera
  SmartBlast Evalue=2E-92; Info=nucleosome assembly protein 1- like isoform 1 n=2 Tax=Nasonia vitripennis RepID=UPI0001A46D36
agtacgaaatgatttacttatatactccttacaaaacaaattttggaaatataacagatttgggtacgctacaaaaactgtcacttcaacatgattctataataaagactgttaacaattttttacataacgtaggaagaaactaataatttatatcaaaaagccatgttaagattgatgataacattgaatttaaagccacagcggtgaataatcttattgctgtttacaattctgcacatctttgttaacttgtgcagcaacctctttatcatctgagtccccatcatcttcctcatcgtcttcctcctcttcttcttcgaaatcatcctcgtcttcacacgcttctccggtgaagaagagaacagctcgtggaacgattctttctctaatataatggccgatttcgaaatcggtggtaagcaaattccttaaatcttcatctacgtcctcttcctttgcgtcatctggaattgttggcggactgaagaaattaaagaacgaatcattttggacagttttggtaattgtgcgtatcacgcctctgctcttatgcttctgtttcttcttgacggttttgacggtaacatttttgcccttgttccaatttattatgcagccagcgcacttaaatatttcggggccttcgaagctgaatgggtcatcatcttctggtgcgcatttcatatcatattcctttgtgagcacggtattagtgaagtattcatttgtggagaagtggaactcaagaatgaatttcattggatcctctttgcagataatcttgatatcattcaaatgtttgagtattggaacatcatgaggttgaaccatttcagacagtaggccgacattcctgaaaattgtgagccagaaatcaggaacgcctttttcgtcttgaggttctgtttcttttttagaatcgtctaacttaattttttctttaatggcttctggaagatcagactcatcatcagacgaccattgagattcttcatcagtgggttcgtattggccgctgacaatggtatttcttttctcgtaaagaggctggtacaacttgtggtatttacattctagattatgtacctctttgaagaatttagcttcaatattagttgcctctaattggattctctttagagccttaattcttctcttaactgaggtaggtaagagtgcaagcatcgcagcattcctctgactttgaagggcagcataaacgttagggaaatctaactgtttggatccatcaacttcctcttcttcgacagattccaaatcgtcaggacagtctccttgttcgttttcagttgccatgttgcttttttgtttagccgaaatgcttgataatttaaccaagctgcaccagtaccaaaggcggcaaatggaagaaagaaaattcggattgaccccac

SEQ ID NO: 2378 - DNA, 1413 bp, Diabrotica virgifera
  SmartBlast Evalue=2E-92; Info=nucleosome assembly protein 1- like isoform 1 n=2 Tax=Nasonia vitripennis RepID=UPI0001A46D36
gaaatgatttacttatatactccttacaaaacaaattttggaaatataacagatttgggtacgctacaaaaactgtcacttcaacatgattctataataaagactgttaacaattttttacataacgtaggaagaaactaataatttatatcaaaaagccatgttaagattgatgataacattgaatttaaagccacagcggtgaataatcttattgctgtttacaattctgcacatctttgttaacttgtgcagcaacctctttatcatctgagtccccatcatcttcctcatcgtcttcctcctcttcttcttcgaaatcatcctcgtcttcacacgcttctccggtgaagaagagaacagctcgtggaacgattctttctctaatataatggccgatttcgaaatcggtggtaagcaaattccttaaatcttcatctacgtcctcttcctttgcgtcatctggaattgttggcggactgaagaaattaaagaacgaatcattttggacagttttggtaattgtgcgtatcacgcctctgctcttatgcttctgtttcttcttgacggttttgacggtaacatttttgcccttgttccaatttattatgcagccagcgcacttaaatatttcggggccttcgaagctgaatgggtcatcatcttctggtgcgcatttcatatcatattcctttgtgagcacggtattagtgaagtattcatttgtggagaagtggaactcaagaatgaatttcattggatcctctttgcagataatcttgatatcattcaaatgtttgagtattggaacatcatgaggttgaaccatttcagacagtaggccgacattcctgaaaattgtgagccagaaatcaggaacgcctttttcgtcttgaggttctgtttcttttttagaatcgtctaacttaattttttctttaatggcttctggaagatcagactcatcatcagacgaccattgagattcttcatcagtgggttcgtattggccgctgacaatggtatttcttttctcgtaaagaggctggtacaacttgtggtatttacattctagattatgtacctctttgaagaatttagcttcaatattagttgcctctaattggattctctttagagccttaattcttctcttaactgaggtaggtaagagtgcaagcatcgcagcattcctctgactttgaagggcagcataaacgttagggaaatctaactgtttggatccatcaacttcctcttcttcgacagattccaaatcgtcaggacagtctccttgttcgttttcagttgccatgttgcttttttgtttagccgaaatgcttgataatttaaccaagctgcaccagtaccaaaggcggcaaatggaagaaagaaaattcggattgaccccac

SEQ ID NO: 2379 - DNA, 1418 bp, Diabrotica virgifera
  SmartBlast Evalue=2E-92; Info=nucleosome assembly protein 1- like isoform 1 n=2 Tax=Nasonia vitripennis RepID=UPI0001A46D36
agtacgaaatgatttacttatatactccttacaaaacaaattttggaaatataacagatttgggtacgctacaaaaactgtcacttcaacatgattctataattaagactgttaacaattttttacataacgtaggaagaaactaataatttatatcaaaaagccatgttaagattgatgataacattgaatttaaagccacagcggtgaataatcttattgctgtttacaattctgctgatctttgttaacttttgtagcaacctctttatcatctgagtccccatcatcttcctcatcgtcttcctcctcttcttcttcgaaatcatcctcgtcttcacacgcttctccggtgaagaagagaacagctcgtgggacgattctttctctaatataatggccgatttcgaaatcggtggtaagcaaattccttaaatcttcatctacgtcttcttctttagcgtcatctggaattgttggcggactgaagaaattaaagaacgaatcattttggacagttttggtaattgtgcgtatcacgcctctgctcttatgcttctgtttcttcttgacggttttgacggtaacgtttttgcccttgttccaatttattatgcagccagcgcacttgaatatttcggggccttcgaagctgaatgggtcatcatcttctggtgcgcatttcatatcatattcctttgtgagcacggtattagtgaagtattcatttgtggagaagtggaactcaagaatgaatttcattggatcctctttgcagataatcttgatatcattcaaatgtttgagtattggaacatcatgaggttgaaccatttcagacagtaggccgacattcctgaaaattgtgagccagaaatcaggaacgcctttttcgtcttgaggttctgtttcttttttagaatcgtctaacttaattttttctttaatggcttctggaagatcagactcatcatcagacgaccattgagattcttcatcagtgggttcgtattggccgctgacaatggtatttcttttctcgtaaagaggttggtacaacttgtggtatttacattctagattatgtacctctttgaagaatttagcttcaatattagttgcctctaattggattctctttagagccttaattcttctcttaactgaggtaggcaagagtgcaagcatcgcagcattcctctgactttgaagtgcagcataaacgttagggaaatctaactgtttggatccatcaacttcctcttcttcgacagattccaaatcgtcaggacagtctccttgttcgttttcagttgccatgttgcttttttgtttagccgaaatgcttgataatttaaccaagctgcaccagtaccaaaggcggcaaatggaagaaagaaaattcggattgaccccac

SEQ ID NO: 2380 - DNA, 1413 bp, Diabrotica virgifera
  SmartBlast Evalue=2E-92; Info=nucleosome assembly protein 1- like isoform 1 n=2 Tax=Nasonia vitripennis RepID=UPI0001A46D36
gaaatgatttacttatatactccttacaaaacaaattttggaaatataacagatttgggtacgctacaaaaactgtcacttcaacatgattctataattaagactgttaacaattttttacataacgtaggaagaaactaataatttatatcaaaaagccatgttaagattgatgataacattgaatttaaagccacagcggtgaataatcttattgctgtttacaattctgctgatctttgttaacttttgtagcaacctctttatcatctgagtccccatcatcttcctcatcgtcttcctcctcttcttcttcgaaatcatcctcgtcttcacacgcttctccggtgaagaagagaacagctcgtgggacgattctttctctaatataatggccgatttcgaaatcggtggtaagcaaattccttaaatcttcatctacgtcttcttctttagcgtcatctggaattgttggcggactgaagaaattaaagaacgaatcattttggacagttttggtaattgtgcgtatcacgcctctgctcttatgcttctgtttcttcttgacggttttgacggtaacgtttttgcccttgttccaatttattatgcagccagcgcacttgaatatttcggggccttcgaagctgaatgggtcatcatcttctggtgcgcatttcatatcatattcctttgtgagcacggtattagtgaagtattcatttgtggagaagtggaactcaagaatgaatttcattggatcctctttgcagataatcttgatatcattcaaatgtttgagtattggaacatcatgaggttgaaccatttcagacagtaggccgacattcctgaaaattgtgagccagaaatcaggaacgcctttttcgtcttgaggttctgtttcttttttagaatcgtctaacttaattttttctttaatggcttctggaagatcagactcatcatcagacgaccattgagattcttcatcagtgggttcgtattggccgctgacaatggtatttcttttctcgtaaagaggttggtacaacttgtggtatttacattctagattatgtacctctttgaagaatttagcttcaatattagttgcctctaattggattctctttagagccttaattcttctcttaactgaggtaggcaagagtgcaagcatcgcagcattcctctgactttgaagtgcagcataaacgttagggaaatctaactgtttggatccatcaacttcctcttcttcgacagattccaaatcgtcaggacagtctccttgttcgttttcagttgccatgttgcttttttgtttagccgaaatgcttgataatttaaccaagctgcaccagtaccaaaggcggcaaatggaagaaagaaaattcggattgaccccac

SEQ ID NO: 2381 - DNA, 1418 bp, Diabrotica virgifera
  SmartBlast Evalue=2E-92; Info=nucleosome assembly protein 1- like isoform 1 n=2 Tax=Nasonia vitripennis RepID=UPI0001A46D36
agtacgaaatgatttacttatatactccttacaaaacaaattttggaaatataacagatttgggtacgctacaaaaactgtcacttcaacatgattctataataaagactgttaacaattttttacataacgtaggaagaaactaataatttatatcaaaaagccatgttaagattgatgataacattgaatttaaagccacagcggtgaataatcttattgctgtttacaattctgcacatctttgttaacttgtgcagcaacctctttatcatctgagtccccatcatcttcctcatcgtcttcctcctcttcttcttcgaaatcatcctcgtcttcacacgcttctccggtgaagaagagaacagctcgtggaacgattctttctctaatataatggccgatttcgaaatcggtggtaagcaaattccttaaatcttcatctacgtcctcttcctttgcgtcatctggaattgttggcggactgaagaaattaaagaacgaatcattttggacagttttggtaattgtgcgtatcacgcctctgctcttatgcttctgtttcttcttgacggttttgacggtaacatttttgcccttgttccaatttattatgcagccagcgcacttaaatatttcggggccttcgaagctgaatgggtcatcatcttctggtgcgcatttcatatcatattcctttgtgagcacggtattagtgaagtattcatttgtggagaagtggaactcaagaatgaatttcattggatcctctttgcagataatcttgatatcattcaaatgtttgagtattggaacatcatgaggttgaaccatttcagacagtaggccgacattcctgaaaattgtgagccagaaatcaggaacgcctttttcgtcttgaggttctgtttcttttttagaatcgtctaacttaattttttctttaatggcttctggaagatcagactcatcatcagacgaccattgagattcttcatcagtgggttcgtattggccgctgacaatggtatttcttttctcgtaaagaggttggtacaacttgtggtatttacattctagattatgtacctctttgaagaatttagcttcaatattagttgcctctaattggattctctttagagccttaattcttctcttaactgaggtaggcaagagtgcaagcatcgcagcattcctctgactttgaagtgcagcataaacgttagggaaatctaactgtttggatccatcaacttcctcttcttcgacagattccaaatcgtcaggacagtctccttgttcgttttcagttgccatgttgcttttttgtttagccgaaatgcttgataatttaaccaagctgcaccagtaccaaaggcggcaaatggaagaaagaaaattcggattgaccccac

SEQ ID NO: 2382 - DNA, 1413 bp, Diabrotica virgifera
  SmartBlast Evalue=2E-92; Info=nucleosome assembly protein 1- like isoform 1 n=2 Tax=Nasonia vitripennis RepID=UPI0001A46D36
gaaatgatttacttatatactccttacaaaacaaattttggaaatataacagatttgggtacgctacaaaaactgtcacttcaacatgattctataataaagactgttaacaattttttacataacgtaggaagaaactaataatttatatcaaaaagccatgttaagattgatgataacattgaatttaaagccacagcggtgaataatcttattgctgtttacaattctgcacatctttgttaacttgtgcagcaacctctttatcatctgagtccccatcatcttcctcatcgtcttcctcctcttcttcttcgaaatcatcctcgtcttcacacgcttctccggtgaagaagagaacagctcgtggaacgattctttctctaatataatggccgatttcgaaatcggtggtaagcaaattccttaaatcttcatctacgtcctcttcctttgcgtcatctggaattgttggcggactgaagaaattaaagaacgaatcattttggacagttttggtaattgtgcgtatcacgcctctgctcttatgcttctgtttcttcttgacggttttgacggtaacatttttgcccttgttccaatttattatgcagccagcgcacttaaatatttcggggccttcgaagctgaatgggtcatcatcttctggtgcgcatttcatatcatattcctttgtgagcacggtattagtgaagtattcatttgtggagaagtggaactcaagaatgaatttcattggatcctctttgcagataatcttgatatcattcaaatgtttgagtattggaacatcatgaggttgaaccatttcagacagtaggccgacattcctgaaaattgtgagccagaaatcaggaacgcctttttcgtcttgaggttctgtttcttttttagaatcgtctaacttaattttttctttaatggcttctggaagatcagactcatcatcagacgaccattgagattcttcatcagtgggttcgtattggccgctgacaatggtatttcttttctcgtaaagaggttggtacaacttgtggtatttacattctagattatgtacctctttgaagaatttagcttcaatattagttgcctctaattggattctctttagagccttaattcttctcttaactgaggtaggcaagagtgcaagcatcgcagcattcctctgactttgaagtgcagcataaacgttagggaaatctaactgtttggatccatcaacttcctcttcttcgacagattccaaatcgtcaggacagtctccttgttcgttttcagttgccatgttgcttttttgtttagccgaaatgcttgataatttaaccaagctgcaccagtaccaaaggcggcaaatggaagaaagaaaattcggattgaccccac

SEQ ID NO: 2383 - DNA, 2099 bp, Diabrotica virgifera
  SmartBlast Evalue=1E-106; Info=Endonuclease-reverse transcriptase n=1 Tax=Bombyx mori RepID=D5LB38_BOMMO
ctctattattgaggtttctgacttaatatcattcttctgtcttttacaaacttcagtctaatcttattcctaactcggtggtttcagtatacgctgttggttccaaaactcactataagtactaaatttctttattttcggtcgatcaattgactgccatcagacagacgcatgacaaatgacagctacttgacattttataatcacctgaaatcctaccgccatctttggcaataatagggcttttcatcgattgtcatttgtttcgagcttctgtcacatgctgtacaatcggtgtataatatgaatattatacgacatctgacagaagctcgaaacaaatgactgtgaatgaaaatccctattgttggtcattcttccaattgggggttacaattatagatataataatacatagattaggccaagtcagaatctatctctctctaccggcgcttagctttctgtctctagtatatgatggccgctgccgctgtaactctgtgtctgtgtcgttccattactcccacctcttggtagatacgctcacactcgtacgacaaacaaagataactagaccactgtacttgatattggcgttacactccgatgcatatacctagcctggtctatggttaatatgtctatggttacaattagttgaaaatttcgacctgatacccatcaaccctttcaacatctgtcaaccatagttttggatgtaaattaggctatagtctgtaatccagaaacggcaaataatgaatcaaagttttggaagatttcaagggctaataaagaaccatcctttttttccatcttctttaagtgccatctccacgacagatgttggcaatcatcatagctattcgaattttagagacggctgctctgaaaagttcatttgatgtacatccgtaccaccctcaggttgcgcatctactatattctgcgtctccctatgcttctttttccttgaatctttccctgcatcatcaattggagcatgttgtatctctctctccgcgtgtaatatgtccgaaatattccaattttcttgttttgatggtatttaagatttccatttctttattcatctttctcagaacctctttgtttgtgactgtccacgatatttccagaattcttctgtagacccacagctggaatgattctagttttttcattgatacagcattcaaggtccaagcttccattccataaaacaaagtcgagaaaacgtagcacctagccaacctaactcttagctccaacttcaaatctcttgtgcagagcacttttctcattttgttaaaatttgctctagccttttctattctgattttgatttcctgtaagtaatctcctgtggagttgatcattgttccaaggtatgcatattggtcgactcgttcgatattggatccgtttatgaagagattttcgttatttctttgagttttcgatattctcataaactttgtcttcttgacattcattgttagcccgtattcttgtccaaactctgctattctggtcaccagcctctgaagatctccaatattttcagctaagatgacagtgtcatccgcatatctaatgttgttaacgggaactccatttacctttattccagctgtttcaccctcaagagcttttttcaagatctcttccgagtaggcattaaaaagaattggcgacaacacgcatccctgtctcactccacgtctgatttcaatttcctctgacagctggtcgttaacacgtacttttgctcgttgcttatagtataaattcgatataatcctgaggtcattgtagtccagcttctttgattccaggacatgcattaattgttcatgtcgtactttgtcgaatgctttattatagtcaataaaacacgcatatatatcttgattgacgtccaggcacctttgtattagtatgttaagtgaaaaaagagcttcacgagttcccaggcctttgcgaaacccaaattgcgtatcattaatgtctatgtctagtttatgatatattcggttatggatgactttcagtagcaactttagcacatgggacatcaaactaatggtgcggta

SEQ ID NO: 2384 - DNA, 2094 bp, Diabrotica virgifera
  SmartBlast Evalue=1E-75; Info=Endonuclease-reverse transcriptase n=1 Tax=Bombyx mori RepID=D5LB38_BOMMO
ctctattattgaggtttctgacttaatatcattcttctgtcttttacaaacttcagtctaatcttattcctaactcggtggtttcagtatacgctgttggttccaaaactcactataagtactaaatttctttattttcggtcgatcaattgactgccatcagacagacgcatgacaaatgacagctacttgacattttataatcacctgaaatcctaccgccatctttggcaataatagggcttttcatcgattgtcatttgtttcgagcttctgtcacatgctgtacaatcggtgtataatatgaatattatacgacatctgacagaagctcgaaacaaatgactgtgaatgaaaatccctattgttggtcattcttccaattgggggttacaattatagatataataatacatagattaggccaagtcagaatctatctctctctaccggcgcttagctttctgtctctagtatatgatggccgctgccgctgtaactctgtgtctgtgtcgttccattactcccacctcttggtagatacgctcacactcgtacgacaaacaaagataactagaccactgtacttgatattggcgttacactccgatgcatatacctagcctggtctatggttaatatgtctatggttacaattagttgaaaatttcgacctgatacccatcaaccctttcaacatctgtcaaccatagttttggatgtaaattaggctatagtctgtaatccagaaacggcaaataatgaatcaaagttttggaagatttcaagggctaataaagaaccatcctttttttccatcttctttaagtgccatctccacgacagatgttggcaatcatcatagctattcgaattttagagacggctgctctgaaaagttcatttgatgtacatccgtaccaccctcaggttgcgcatctactatattctgcgtctccctatgcttctttttccttgaatctttccctgcatcatcaattggagcatgttgtatctctctctccgcgtgtaatatgtccgaaatattccaattttcttgttttgatggtatttaagatttccatttctttattcatctttctcagaacctctttgtttgtgactgtccacgatatttccagaattcttctgtagacccacagctggaatgattctagttttttcattgatacagcattcaaggtccaagcttccattccataaaacaaagtcgagaaaacgtagcacctagccaacctaactattagctccaacttcaaatctcatgtgcaattttctgattttgttcagatttgctctagccttttctattctgattttgatttcctgtaagtaatctcctgtggagttgatcattgttccaaggtatgcatattggtcgactcgttcgatattggatccgtttatgaagagattttcgttatttctttgagttttcgatattctcataaactttgtcttcttgacattcattgttagcccgtattcttgtccaaactctgctattctggtcaccagcctctgaagatctccaatattttcagctaagatgacagtgtcatccgcatatctaatgttgttaacgggaactccatttacctttattccagctgtttcaccctcaagagcttttttcaagatctcttccgagtaggcattaaaaagaattggcgacaacacgcatccctgtctcactccacgtctgatttcaatttcctctgacagctggtcgttaacacgtacttttgctcgttgcttatagtataaattcgatataatcctgaggtcattgtagtccagcttctttgattccaggacatgcattaattgttcatgtcgtactttgtcgaatgctttattatagtcaataaaacacgcatatatatcttgattgacgtccaggcacctttgtattagtatgttaagtgaaaaaagagcttcacgagttcccaggcctttgcgaaacccaaattgcgtatcattaatgtctatgtctagtttatgatatattcggttatggatgactttcagtagcaactttagcacatgggacatcaaactaatggtgcggta

SEQ ID NO: 2385 - DNA, 1574 bp, Diabrotica virgifera
  SmartBlast Evalue=2E-44; Info=Endonuclease-reverse transcriptase n=1 Tax=Bombyx mori RepID=D5LB38_BOMMO
ctctattattgaggtttctgacttaatatcattcttctgtcttttacaaacttcagtctaatcttattcctaactcggtggtttcagtatacgctgttggttccaaaactcactataagtactaaatttctttattttcggtcgatcaattgactgccatcagacagacgcatgacaaatgacagctacttgacattttataatcacctgaaatcctaccgccatctttggcaataatagggcttttcatcgattgtcatttgtttcgagcttctgtcacatgctgtacaatcggtgtataatatgaatattatacgacatctgacagaagctcgaaacaaatgactgtgaatgaaaatccctattgttggtcattcttccaattgggggttacaattatagatataataatacatagattaggccaagtcagaatctatctctctctaccggcgcttagctttctgtctctagtatatgatggccgctgccgctgtaactctgtgtctgtgtcgttccattactcccacctcttggtagatacgctcacactcgtacgacaaacaaagataactagaccactgtacttgatattggcgttacactccgatgcatatacctagcctggtctatggttaatatgtctatggttacaattagttgaaaatttcgacctgatacccatcaaccctttcaacatctgtcaaccatagttttggatgtaaattaggctatagtctgtaatccagaaacggcaaataatgaatcaaagttttggaagatttcaagggctaataaagaaccatcctttttttccatcttctttaagtgccatctccacgacagatgttggcaatcatcatagctattcgaattttagagacggctgctctgaaaagttcatttgatgtacatccgtaccaccctcaggttgcgcatctactatattctgcgtctccctatgcttctttttccttgaatctttccctgcatcatcaattggagcatgttgtatctctctctccgcgtgtaatatgtccgaaatattccaattttcttgttttgatggtatttaagatttccatttctttattcatctttctcagaacctctttgtttgtgactgtccacgatatttccagaattcttctgtagacccacagctggaatgattctagttttttcattgatacagcattcaaggtccaagcttccattccataaaacaaagtcgagaaaacgtagcacctagccaacctaactcttagctccaacttcaaatctcttgtgcagagcacttttctcattttgttaaaatttgctctagccttttctattctgattttgatttcctgtaagtaatctcctgtggagttgatcattgttccaaggtatgcatattggtctacttgttcgacgttggttccgtttatgaggagattctcgttatttctttgagttttagatattctcataaattttgtcttcttgatgttcattgttaaaccgtattcttggctatatgtcgctattctgttaaccaatatgttaaccaatgtgtcatccgcatatct

SEQ ID NO: 2386 - DNA, 1569 bp, Diabrotica virgifera
  SmartBlast Evalue=3E-22; Info=Endonuclease-reverse transcriptase n=1 Tax=Bombyx mori RepID=D7F162_BOMMO
ctctattattgaggtttctgacttaatatcattcttctgtcttttacaaacttcagtctaatcttattcctaactcggtggtttcagtatacgctgttggttccaaaactcactataagtactaaatttctttattttcggtcgatcaattgactgccatcagacagacgcatgacaaatgacagctacttgacattttataatcacctgaaatcctaccgccatctttggcaataatagggcttttcatcgattgtcatttgtttcgagcttctgtcacatgctgtacaatcggtgtataatatgaatattatacgacatctgacagaagctcgaaacaaatgactgtgaatgaaaatccctattgttggtcattcttccaattgggggttacaattatagatataataatacatagattaggccaagtcagaatctatctctctctaccggcgcttagctttctgtctctagtatatgatggccgctgccgctgtaactctgtgtctgtgtcgttccattactcccacctcttggtagatacgctcacactcgtacgacaaacaaagataactagaccactgtacttgatattggcgttacactccgatgcatatacctagcctggtctatggttaatatgtctatggttacaattagttgaaaatttcgacctgatacccatcaaccctttcaacatctgtcaaccatagttttggatgtaaattaggctatagtctgtaatccagaaacggcaaataatgaatcaaagttttggaagatttcaagggctaataaagaaccatcctttttttccatcttctttaagtgccatctccacgacagatgttggcaatcatcatagctattcgaattttagagacggctgctctgaaaagttcatttgatgtacatccgtaccaccctcaggttgcgcatctactatattctgcgtctccctatgcttctttttccttgaatctttccctgcatcatcaattggagcatgttgtatctctctctccgcgtgtaatatgtccgaaatattccaattttcttgttttgatggtatttaagatttccatttctttattcatctttctcagaacctctttgtttgtgactgtccacgatatttccagaattcttctgtagacccacagctggaatgattctagttttttcattgatacagcattcaaggtccaagcttccattccataaaacaaagtcgagaaaacgtagcacctagccaacctaactattagctccaacttcaaatctcatgtgcaattttctgattttgttcagatttgctctagccttttctattctgattttgatttcctgtaagtaatctcctgtggagttgatcattgttccaaggtatgcatattggtctacttgttcgacgttggttccgtttatgaggagattctcgttatttctttgagttttagatattctcataaattttgtcttcttgatgttcattgttaaaccgtattcttggctatatgtcgctattctgttaaccaatatgttaaccaatgtgtcatccgcatatct

SEQ ID NO: 2387 - DNA, 1295 bp, Diabrotica virgifera
  SmartBlast Evalue=1E-120; Info=Endonuclease-reverse transcriptase n=1 Tax=Bombyx mori RepID=D5LB38_BOMMO
gatgacatcttcttctttaagtgccatctccgcggcggaggtcggcaatcatcatagctattcgattttagagacggctgctctgaaaagttcatttgatgtacatccgtaccattctctcaggttgcgcagccacgatattctgcgtctccctatgcttctttttccttgaatctttccctgcataatcaattggagcaagctgtatctctctccacgtgtaatatgtccgagatattccaattttctggttttgattgtatttaagacttccatttctttattcatctttctcagaacctctttgtttgtgacgtgttctgtccatgatattttagaattcttctatatacccacatctcgaatgattccagttttttcattgatgccgcattcaaggtccaagcttccattccgtaaaacagagtcgagaaaacgtagcacctagccaaccttattcttagctccaacttcaaatctcttgtgcagagcacttttctcattttgttaaaatttgctctagccttttctattctgattttgatttcctgtaagtaatctcctgtggagttgatcattgttccaaggtatgcatattggtcgactcgttcgatattggatccgtttatgaagagattttcgttatttctttgagttttcgatattctcataaactttgtcttcttgacattcattgttagcccgtattcttgtccaaactctgctattctggtcaccagcctctgaagatctccaatattttcagctaagatgacagtgtcatccgcatatctaatgttgttaacgggaactccatttacctttattccagctgtttcaccctcaagagcttttttcaagatctcttccgagtaggcattaaaaagaattggcgacaacacgcatccctgtctcactccacgtctgatttcaatttcctctgacagctggtcgttaacacgtacttttgctcgttgcttatagtataaattcgatataatcctgaggtcattgtagtccagcttctttgattccaggacatgcattaattgttcatgtcgtactttgtcgaatgctttattatagtcaataaaacacgcatatatatcttgattgacgtccaggcacctttgtattagtatgttaagtgaaaaaagagcttcacgagttcccaggcctttgcgaaacccaaattgcgtatcattaatgtctatgtctagtttatgatatattcggttatggatgactttcagtagcaactttagcacatgggacatcaaactaatggtgcggta

SEQ ID NO: 2388 - DNA, 1229 bp, Diabrotica virgifera
  SmartBlast Evalue=1E-84; Info=Endonuclease-reverse transcriptase n=1 Tax=Bombyx mori RepID=D5LB38_BOMMO
acctctgcgatggagatcggcaatcatcatggctattcggactgtagagaaggctgctctgaaaaattctttcagattgcgcagtcatcatattatacgttttcttatgcttctctggatctttacctgcataatcagtagaagcaagttatatctctctccacgtgtaatatgtccgagattttcttgttttgattgtacctattcaatatttccattttttattcatcttagtcagaacctctttatttgtgacgtgttctgtcaatggatattttcagattcttctatactcgattgattccagttttttcattggtgtcgcattcaagatccaagcttccgctccataaaacaaagttcgagaaaacgtagcacctagccaacctagctcttagctccaacttcaaatctcttgtgcagagcacttttctcattttgttaaaatttgctctagccttttctattctgattttgatttcctgtaagtaatctcctgtggagttgatcattgttccaaggtatgcatattggtcgactcgttcgatattggatccgtttatgaagagattttcgttatttctttgagttttcgatattctcataaactttgtcttcttgacattcattgttagcccgtattcttgtccaaactctgctattctggtcaccagcctctgaagatctccaatattttcagctaagatgacagtgtcatccgcatatctaatgttgttaacgggaactccatttacctttattccagctgtttcaccctcaagagcttttttcaagatctcttccgagtaggcattaaaaagaattggcgacaacacgcatccctgtctcactccacgtctgatttcaatttcctctgacagctggtcgttaacacgtacttttgctcgttgcttatagtataaattcgatataatcctgaggtcattgtagtccagcttctttgattccaggacatgcattaattgttcatgtcgtactttgtcgaatgctttattatagtcaataaaacacgcatatatatcttgattgacgtccaggcacctttgtattagtatgttaagtgaaaaaagagcttcacgagttcccaggcctttgcgaaacccaaattgcgtatcattaatgtctatgtctagtttatgatatattcggttatggatgactttcagtagcaactttagcacatgggacatcaaactaatggtgcggta

SEQ ID NO: 2389 - DNA, 770 bp, Diabrotica virgifera
  SmartBlast Evalue=3E-58; Info=Endonuclease-reverse transcriptase n=1 Tax=Bombyx mori RepID=D5LB38_BOMMO
gatgacatcttcttctttaagtgccatctccgcggcggaggtcggcaatcatcatagctattcgattttagagacggctgctctgaaaagttcatttgatgtacatccgtaccattctctcaggttgcgcagccacgatattctgcgtctccctatgcttctttttccttgaatctttccctgcataatcaattggagcaagctgtatctctctccacgtgtaatatgtccgagatattccaattttctggttttgattgtatttaagacttccatttctttattcatctttctcagaacctctttgtttgtgacgtgttctgtccatgatattttagaattcttctatatacccacatctcgaatgattccagttttttcattgatgccgcattcaaggtccaagcttccattccgtaaaacagagtcgagaaaacgtagcacctagccaaccttattcttagctccaacttcaaatctcttgtgcagagcacttttctcattttgttaaaatttgctctagccttttctattctgattttgatttcctgtaagtaatctcctgtggagttgatcattgttccaaggtatgcatattggtctacttgttcgacgttggttccgtttatgaggagattctcgttatttctttgagttttagatattctcataaattttgtcttcttgatgttcattgttaaaccgtattcttggctatatgtcgctattctgttaaccaatatgttaaccaatgtgtcatccgcatatct

SEQ ID NO: 2390 - DNA, 704 bp, Diabrotica virgifera
  SmartBlast Evalue=1E-22; Info=Endonuclease-reverse transcriptase n=1 Tax=Bombyx mori RepID=D5LB38_BOMMO
acctctgcgatggagatcggcaatcatcatggctattcggactgtagagaaggctgctctgaaaaattctttcagattgcgcagtcatcatattatacgttttcttatgcttctctggatctttacctgcataatcagtagaagcaagttatatctctctccacgtgtaatatgtccgagattttcttgttttgattgtacctattcaatatttccattttttattcatcttagtcagaacctctttatttgtgacgtgttctgtcaatggatattttcagattcttctatactcgattgattccagttttttcattggtgtcgcattcaagatccaagcttccgctccataaaacaaagttcgagaaaacgtagcacctagccaacctagctcttagctccaacttcaaatctcttgtgcagagcacttttctcattttgttaaaatttgctctagccttttctattctgattttgatttcctgtaagtaatctcctgtggagttgatcattgttccaaggtatgcatattggtctacttgttcgacgttggttccgtttatgaggagattctcgttatttctttgagttttagatattctcataaattttgtcttcttgatgttcattgttaaaccgtattcttggctatatgtcgctattctgttaaccaatatgttaaccaatgtgtcatccgcatatct

SEQ ID NO: 2391 - DNA, 1655 bp, Diabrotica virgifera
agaagagttacatctcgaaatgttaaagtttttttattgcatcaataccttccaaataatgacttactatggaaaaatagttacatgtgtaagtacactagtctccgagagatggcagatgtaactctttggttttcccctaactttctctacagaacgttattcgctttagaaaatacagttatatcttggaatataatagacaaaaataagttaacttaattaaaagtgtgatttatttttttgatatagagttataagttacttactctaaagtaattagggaattaaaacttgagaatggcattgtcaggttgggcgtagatttacgttcctgctatgtctaggtctcgaatgttgttttttgattggaatgtgtctgaagatattcaacctctcatcttcaccgatgagcccatagaggttgaagagagcgaaacacatttctaagagctggtgtaaaactgtaaatatagattgtagcaataaaatttaccctgtatttaaggtggtatgacacaatgttaaaatttatatagtttttaggtacagttaccgtcactatttcaaaaccaatcttcaacttaggggtatgtacgtgaactgtagactttctattttaatagtatctagttaaaatttccaaagaaagtagtatattttttataactgtacttaaaggagtccatgtcataacttacttagtaacttgtaaaaattcgttttgcataataatttttgaacttgggtagaaaataactatcagaaacgattaactatgcaaaaagctttattttaaacaaaatttcattgtccgtactgccataattttaaattaactgtacctaaaggtaaaaattttagttaaaagctgcaatctggggattttgttgaatattacagcaataagttggcatttttctagtgataaattagttccgctgtcacttaatagatgagaagatgagttcacgtgtcatttagtagatggcagcagttacgtattaaatggcgacagatgcgcgtttgccggattttaagaaaatctgcaaacaattgaaaacgagttttgtaaccacggaaatacgatgaatcacgcggttttgtttagaaaagtggccccaccccttcccagtacacattttgggccttgtatgactttcaatcataattgtataacgtcacagtgtcaacaatacaaatatacatttttatgcttgaatccgtgacgttatacaaatggttaaaagttaaacgaggctcaaaatgtctcaaagtgtttactgggggattatactagttttgacataatacatagataacataagctctagtatgttgtggggcgtatctaaatacaatttcagttttattcactttctgacaaatttaatttttatagggccgcaaataatgcattgttcggatacaagtagcgtctctttgtaaagacgatgacatcgacatttttacacacattacacatgccaatggccattagtatttgttgaggcattatcctaataaaaaaattgtagacaaaacaatattgtataatcactgattaatttatgtcaaatatttccgtaagtgtaagtatcagcatggctatcctaactttgcttgctgctattcggatagtctgttgttgatgc

SEQ ID NO: 2392 - DNA, 1587 bp, Diabrotica virgifera
gattctattcaaacaattcttcccagcccgaagtagtggatgtgtgaattgttcgtaaggggatttttccgcattctctatttcatgtgtttgttttcgtacgagtggtcgtccaaaccagtacctgtggatcttttgatcaatgagtgtgtttcaaagatctacatcttttagttttttcataaacattatcttacttactctaaagtaattagggaattaaaacttgagaatggcattgtcaggttgggcgtagatttacgttcctgctatgtctaggtctcgaatgttgttttttgattggaatgtgtctgaagatattcaacctctcatcttcaccgatgagcccatagaggttgaagagagcgaaacacatttctaagagctggtgtaaaactgtaaatatagattgtagcaataaaatttaccctgtatttaaggtggtatgacacaatgttaaaatttatatagtttttaggtacagttaccgtcactatttcaaaaccaatcttcaacttaggggtatgtacgtgaactgtagactttctattttaatagtatctagttaaaatttccaaagaaagtagtatattttttataactgtacttaaaggagtccatgtcataacttacttagtaacttgtaaaaattcgttttgcataataatttttgaacttgggtagaaaataactatcagaaacgattaactatgcaaaaagctttattttaaacaaaatttcattgtccgtactgccataattttaaattaactgtacctaaaggtaaaaattttagttaaaagctgcaatctggggattttgttgaatattacagcaataagttggcatttttctagtgataaattagttccgctgtcacttaatagatgagaagatgagttcacgtgtcatttagtagatggcagcagttacgtattaaatggcgacagatgcgcgtttgccggattttaagaaaatctgcaaacaattgaaaacgagttttgtaaccacggaaatacgatgaatcacgcggttttgtttagaaaagtggccccaccccttcccagtacacattttgggccttgtatgactttcaatcataattgtataacgtcacagtgtcaacaatacaaatatacatttttatgcttgaatccgtgacgttatacaaatggttaaaagttaaacgaggctcaaaatgtctcaaagtgtttactgggggattatactagttttgacataatacatagataacataagctctagtatgttgtggggcgtatctaaatacaatttcagttttattcactttctgacaaatttaatttttatagggccgcaaataatgcattgttcggatacaagtagcgtctctttgtaaagacgatgacatcgacatttttacacacattacacatgccaatggccattagtatttgttgaggcattatcctaataaaaaaattgtagacaaaacaatattgtataatcactgattaatttatgtcaaatatttccgtaagtgtaagtatcagcatggctatcctaactttgcttgctgctattcggatagtctgttgttgatgc

SEQ ID NO: 2393 - DNA, 1406 bp, Diabrotica virgifera
ttcagtttgggtctcacagagtcacctaactgtgagtgtggaaaagagggtgatctactacatattctcctcgaatgttcccatcaatcagtaaatataaacaaattttatgataatcttaatatattaaaaattccacttcccgtctacctgaacaatttgattttttctgaagatattaatacattaaaaacaatttacgaacatatcaaaaactgtaaatatagattgtagcaataaaatttaccctgtatttaaggtggtatgacacaatgttaaaatttatatagtttttaggtacagttaccgtcactatttcaaaaccaatcttcaacttaggggtatgtacgtgaactgtagactttctattttaatagtatctagttaaaatttccaaagaaagtagtatattttttataactgtacttaaaggagtccatgtcataacttacttagtaacttgtaaaaattcgttttgcataataatttttgaacttgggtagaaaataactatcagaaacgattaactatgcaaaaagctttattttaaacaaaatttcattgtccgtactgccataattttaaattaactgtacctaaaggtaaaaattttagttaaaagctgcaatctggggattttgttgaatattacagcaataagttggcatttttctagtgataaattagttccgctgtcacttaatagatgagaagatgagttcacgtgtcatttagtagatggcagcagttacgtattaaatggcgacagatgcgcgtttgccggattttaagaaaatctgcaaacaattgaaaacgagttttgtaaccacggaaatacgatgaatcacgcggttttgtttagaaaagtggccccaccccttcccagtacacattttgggccttgtatgactttcaatcataattgtataacgtcacagtgtcaacaatacaaatatacatttttatgcttgaatccgtgacgttatacaaatggttaaaagttaaacgaggctcaaaatgtctcaaagtgtttactgggggattatactagttttgacataatacatagataacataagctctagtatgttgtggggcgtatctaaatacaatttcagttttattcactttctgacaaatttaatttttatagggccgcaaataatgcattgttcggatacaagtagcgtctctttgtaaagacgatgacatcgacatttttacacacattacacatgccaatggccattagtatttgttgaggcattatcctaataaaaaaattgtagacaaaacaatattgtataatcactgattaatttatgtcaaatatttccgtaagtgtaagtatcagcatggctatcctaactttgcttgctgctattcggatagtctgttgttgatgc

SEQ ID NO: 2394 - DNA, 635 bp, Diabrotica virgifera
agaagagttacatctcgaaatgttaaagtttttttattgcatcaataccttccaaataatgacttactatggaaaaatagttacatgtgtaagtacactagtctccgagagatggcagatgtaactctttggttttcccctaactttctctacagaacgttattcgctttagaaaatacagttatatcttggaatataatagacaaaaataagttaacttaattaaaagtgtgatttatttttttgatatagagttataagttacttactctaaagtaattagggaattaaaacttgagaatggcattgtcaggttgggcgtagatttacgttcctgctatgtctaggtctcgaatgttgttttttgattggaatgtgtctgaagatattcaacctctcatcttcaccgatgagcccatagaggttgaagagagcgaaacacatttctaagagctggtgtaaaactgtaaatatagattgtagcaataaaatttaccctgtatttaagaaattttgttaaaacaaagcaggcatgtttgttgaaacaaaacaaacatgtttgttttgttgttatttttttataccctgtagatttaagtaattattgtatattatcattgaaaaaagaaaagaac

SEQ ID NO: 2395 - DNA, 567 bp, Diabrotica virgifera
gattctattcaaacaattcttcccagcccgaagtagtggatgtgtgaattgttcgtaaggggatttttccgcattctctatttcatgtgtttgttttcgtacgagtggtcgtccaaaccagtacctgtggatcttttgatcaatgagtgtgtttcaaagatctacatcttttagttttttcataaacattatcttacttactctaaagtaattagggaattaaaacttgagaatggcattgtcaggttgggcgtagatttacgttcctgctatgtctaggtctcgaatgttgttttttgattggaatgtgtctgaagatattcaacctctcatcttcaccgatgagcccatagaggttgaagagagcgaaacacatttctaagagctggtgtaaaactgtaaatatagattgtagcaataaaatttaccctgtatttaagaaattttgttaaaacaaagcaggcatgtttgttgaaacaaaacaaacatgtttgttttgttgttatttttttataccctgtagatttaagtaattattgtatattatcattgaaaaaagaaaagaac

SEQ ID NO: 2396 - DNA, 555 bp, Diabrotica virgifera
agaagagttacatctcgaaatgttaaagtttttttattgcatcaataccttccaaataatgacttactatggaaaaatagttacatgtgtaagtacactagtctccgagagatggcagatgtaactctttggttttcccctaactttctctacagaacgttattcgctttagaaaatacagttatatcttggaatataatagacaaaaataagttaacttaattaaaagtgtgatttatttttttgatatagagttataagttacttactctaaagtaattagggaattaaaacttgagaatggcattgtcaggttgggcgtagatttacgttcctgctatgtctaggtctcgaatgttgttttttgattggaatgtgtctgaagatattcaacctctcatcttcaccgatgagcccatagaggttgaagagagcgaaacacatttctaagagctggtgtttggatcttcgattctattcaaaaaatttttcccagcccgaagtagtggatgtgtgaattgttcgtaaggggatttttccgcattctctatttca

SEQ ID NO: 2397 - DNA, 487 bp, Diabrotica virgifera
gattctattcaaacaattcttcccagcccgaagtagtggatgtgtgaattgttcgtaaggggatttttccgcattctctatttcatgtgtttgttttcgtacgagtggtcgtccaaaccagtacctgtggatcttttgatcaatgagtgtgtttcaaagatctacatcttttagttttttcataaacattatcttacttactctaaagtaattagggaattaaaacttgagaatggcattgtcaggttgggcgtagatttacgttcctgctatgtctaggtctcgaatgttgttttttgattggaatgtgtctgaagatattcaacctctcatcttcaccgatgagcccatagaggttgaagagagcgaaacacatttctaagagctggtgtttggatcttcgattctattcaaaaaatttttcccagcccgaagtagtggatgtgtgaattgttcgtaaggggatttttccgcattctctatttca

SEQ ID NO: 2398 - DNA, 386 bp, Diabrotica virgifera
ttcagtttgggtctcacagagtcacctaactgtgagtgtggaaaagagggtgatctactacatattctcctcgaatgttcccatcaatcagtaaatataaacaaattttatgataatcttaatatattaaaaattccacttcccgtctacctgaacaatttgattttttctgaagatattaatacattaaaaacaatttacgaacatatcaaaaactgtaaatatagattgtagcaataaaatttaccctgtatttaagaaattttgttaaaacaaagcaggcatgtttgttgaaacaaaacaaacatgtttgttttgttgttatttttttataccctgtagatttaagtaattattgtatattatcattgaaaaaagaaaagaac

SEQ ID NO: 2399 - DNA, 2123 bp, Diabrotica virgifera
  SmartBlast Evalue=8E-30; Info=Gap-Pol polyprotein n=1 Tax= Schistosoma japonicum RepID=C7C1Z1_SCHJA
gattaattaaaataatttttcaattcataaattattttatttatcatgccatttattctattcacttttgttcgtaggtttctctttggctgtaatgtttcttgttggtcaaaggtttaagattttcaggacatacatttgcttaatttccacgagacagtatataattgtagtaagtttatttcatctctacgcggtcgacaggatgtcgtttgaataattactgtaaaaatggtgtcatcttgatattctacaccagcttgcatatcgtgccgtttcttcatacggtcgctagcgatctgaaggtggaaacggaccaatggcagctaatctggaaagctcaacgtaggtggcgctcgtgtagttggaggtcacgtcaacttacgtcaacatttcaaatcaatctatttccaagtaaatattgcatatttgattcgctgtgtgaattaaacttgagaaaataaaatccctcaagatattctgaggagaaaaaagtggattgtagtaataagaaggaataaatatgtgccgacaataaacgcacgtatctgcaataaacattttgttgaaacagattacgtattgcccctagattcgactgtaaaaaatagaatacttcactataaaattcagatcaaaattgattataaacgcacggattaagatatgcaattttatatacattcacactgttgccacatctacaatcgctttttatggagtgaaaatatgaaaaaatttatatttgaaataataatatagaaaaatgtgaaataggactttcggtggtgtttggcccgttgattcattaacagtgatctgtaggccattgcgaagaactgaaggtattggtcccagtctcgctggtgattggacaccatctttgtcaaatacttgccgactgtcttattcattcgctctaccatttcatccgattgcgggtaataagctgtagtccttgtcttctttatgcctagtctatcacagattccctgaaatacatcgctttcgaagttccttctttggttactatggatctccaaaggcactccaaatcggctgatgtactctttgatcaacacatctgcaatagtggcggccttctggtctggaatagcgtagatctcggcccattttgtgaagtaatctattacgaccaacatatacctacttacaatcatcttcactttctgataggagcctttattttccggtacgatccgttactcgtagcacaagtagtacatttcttacaccagtcctttacatcgttggaattattcatccaataaaaccgttcccgaattctctgaaggattttctttacaccaagatgccctcctaatggactgtcgtgtaactgacgaagtacttcggctattctgctcttttgattcaccaattgttctctccgctgaagcgtcatcattttccaatactcgttaagcaagctgtcctccatgataatagagtccctcttggcccaatacggcttgatatttcttgccaagatgatcgacgattttcttttgtccattttcgaattttctggatctaaaattggcccattcgccattttaattacttacgacactaaaacaccaaaaacagctgccctagttcatgtctcaaatatttataaatagtccagtcgggttagacgaataacaggcctaaccttgcattaggagttgccccagattttgtttttctattctttggggggacgggggggcggttaatagtagtgtagatttggaatctcggctgaattctgccgttgcgttggccgtagtcttgattttgaacgagaaccgtttttgctcaatagcttcgccattttcaacttttcgacaaaaagtgtaacaaccggaattgtagaaaatatgattttctatcatttctattcttacaaatttttcgtgccgtcgatattttccgagtgatggcggaaggtagtgacagttagagcataattattgaattatctcgtttattattggttttgcgacaaaaatgttccaatacaaaaatagagagaattaaattctacataattttgatttctttcattttttttgctaaagtttgtatttgggtagtacgtgcgcggtaatggcgcg

SEQ ID NO: 2400 - DNA, 1944 bp, Diabrotica virgifera
  SmartBlast Evalue=7E-30; Info=Gap-Pol polyprotein n=1 Tax= Schistosoma japonicum RepID=C7C1Z1_SCHJA
gattaattaaaataatttttcaattcataaattattttatttatcatgccatttattctattcacttttgttcgtaggtttctctttggctgtaatgtttcttgttggtcaaaggtttaagattttcaggacatacatttgcttaatttccacgagacagtatataattgtagtaagtttatttcatctctacgcggtcgacaggatgtcgtttgaataattactgtaaaaatggtgtcatcttgatattctacaccagcttgcatatcgtgccgtttcttcatacggtcgctagcgatctgaaggtggaaacggaccaatggcagctaatctggaaagctcaacgtaggtggcgctcgtgtagttggaggtcacgtcaacttacgtcaacatttcaaatcaatctatttccaagtaaatattgcatatttgattcgctgtgtgaattaaacttgagaaaataaaatccctcaagatattctgaggagaaaaaagtggattgtagtaataagaaggaataaatatgtgccgacaataaacgcacgtatctgcaataaacattttgttgaaacagattacgtattgcccctagattcgactgtaaaaaatagaatacttcactataaaattcagatcaaaattgattataaacgcacggattaagatatgcaattttatatacattcacactgttgccacatctacaatcgctttttatggagtgaaaatatgaaaaaatttatatttgaaataataatatagaaaaatgtgaaataggactttcggtggtgtttggcccgttgattcattaacagtgatctgtaggccattgcgaagaactgaaggtattggtcccagtctcgctggtgattggacaccatctttgtcaaatacttgccgactgtcttattcattcgctctaccatttcatccgattgcgggtaataagctgtagtccttgtcttctttatgcctagtctatcacagattccctgaaatacatcgctttcgaagttccttctttggttactatggatctccaaaggcactccaaatcggctgatgtactctttgatcaacacatctgcaatagtggcggccttctggtctggaatagcgtagatctcggcccattttgtgaagtaatctattacgaccaacatatacctacttacaatcatcttcactttctgataggagcctttattttccggtacgatccgttactcgtagcacaagtagtacatttcttacaccagtcctttacatcgttggaattattcatccaataaaaccgttcccgaattctctgaaggattttctttacaccaagatgccctcctaatggactgtcgtgtaactgacgaagtacttcggctattctgctcttttgattcaccaattgttctctccgctgaagcgtcatcattttccaatactcgttaagcaagctgtcctccatgataatagagtccctcttggcccaatacggcttgatatttcttgccaagatgatcgacgattttcttttgtccattttcgaattttctggatctaaaattggcccattcgccattttaattacttacgacactaaaacaccaaaaacagctgccctagttcatgtctcaaatatttataaatagtccagtcgggttagacgaataacaggcctaaccttgcattaggagttgccccagattttgtttttctattctttggggggacgggggggcggttaatagtagtgtagatttggaatctcggctgaattctgccgttgcgttggccgtagtcttgattttgaacgagaaccgtttttgctcaatagcttcgccattttcaacttttcgacaaaaagtgtaacaaccggaattgtagaaaatatgattttctatcatttctattcttacaaatttttcgtgccgtcgatattttccgagt

SEQ ID NO: 2401 - DNA, 1834 bp, Diabrotica virgifera
  SmartBlast Evalue=7E-50; Info=Pol polyprotein n=1 Tax= Schistosoma mansoni RepID=Q6IFU0_SCHMA
gattaattaaaataatttttcaattcataaattattttatttatcatgccatttattctattcacttttgttcgtaggtttctctttggctgtaatgtttcttgttggtcaaaggtttaagattttcaggacatacatttgcttaatttccacgagacagtatataattgtagtaagtttatttcatctctacgcggtcgacaggatgtcgtttgaataattactgtaaaaatggtgtcatcttgatattctacaccagcttgcatatcgtgccgtttcttcatacggtcgctagcgatctgaaggtggaaacggaccaatggcagctaatctggaaagctcaacgtaggtggcgctcgtgtagttggaggtcacgtcaacttacgtcaacatttcaaatcaatctatttccaagtaaatattgcatatttgattcgctgtgtgaattaaacttgagaaaataaaatccctcaagatattctgaggagaaaaaagtggattgtagtaataagaaggaataaatatgtgccgacaataaacgcacgtatctgcaataaacattttgttgaaacagattacgtattgcccctagattcgactgtaaaaaatagaatacttcactataaaattcagatcaaaattgattataaacgcacggattaagatatgcaattttatatacattcacactgttgccacatctacaatcgctttttatggagtgaaaatatgaaaaaatttatatttgaaataataatatagaaaaatgtgaaataggactttcggtggtgtttggcccgttgattcattaacagtgatctgtaggccattgcgaagaactgaaggtattggtcccagtctcgctggtgattggacaccatctttgtcaaatacttgccgactgtcttattcattcgctctaccatttcatccgattgcgggtaataagctgtagtccttgtcttctttatgcctagtctatcacagattccctgaaatacatcgctttcgaagttccttctttggttactatggatctccaaaggcactccaaatcggctgatgtactctttgatcaacacatctgcaatagtggcggccttctggtctggaatagcgtagatctcggcccattttgtgaagtaatctattacgaccaacatatacctacttacaatcatcttcactttctgataggagcctttattttccggtacgatccgttactcgtagcacaagtagtacatttcttacaccagtcctttacatcgttggaattattcatccaataaaaccgttcccgaattctctgaaggattttctttacaccaagatgccctcctaatggactgtcgtgtaactgacgaagtacttcggctattctgctctttggaatcaccaactgtgttctcctcaccgaaccatcatcattttctattactcgtttaagcaagctgtcttccaagataaatgagtcccactgggcccaatacgtcttaactactgagcctaggcttgatatttcttgccaagatggtcgacgattttcttctttccattttcgaatcttctgtaaaactggatctttttcttgttcttccttgatcttggtaggcgtccactcgtcgttgaccactgttgttcttagtactgctgcttcctttgactctgttttgttgcaatgggaacattctgctggacacggtcttctagatagagaatcagcgttcctgtggctaactccggcccgatgctcgatcttgaaatcatattcttgaagtcgttcaatccatctggctatctgaccctctggattcttaaactgcattaacca

SEQ ID NO: 2402 - DNA, 1783 bp, Diabrotica virgifera
  SmartBlast Evalue=7E-30; Info=Gap-Pol polyprotein n=1 Tax= Schistosoma japonicum RepID=C7C1Z1_SCHJA
ttacgtcaacacttcaaatcaatctatttcttagtaaatattgcatattttttcgctgtgtgaattaaacttcagaaaataaaatccctcaatgttgtgctgtgcatttgggctcaccgagaacatcaggacactgtattctgatgagaaaaaagtggattgtagcaataagaggggataaatatgtgccaacaataaatgcacgtatctgcaataaacattttgttaaaacagattacgtattgcccctagattcgactgtaaaaaatagaatacttcactataaaattcagatcaaaattgattataaacgcacggattaagatatgcaattttatatacattcacactgttgccacatctacaatcgctttttatggagtgaaaatatgaaaaaatttatatttgaaataataatatagaaaaatgtgaaataggactttcggtggtgtttggcccgttgattcattaacagtgatctgtaggccattgcgaagaactgaaggtattggtcccagtctcgctggtgattggacaccatctttgtcaaatacttgccgactgtcttattcattcgctctaccatttcatccgattgcgggtaataagctgtagtccttgtcttctttatgcctagtctatcacagattccctgaaatacatcgctttcgaagttccttctttggttactatggatctccaaaggcactccaaatcggctgatgtactctttgatcaacacatctgcaatagtggcggccttctggtctggaatagcgtagatctcggcccattttgtgaagtaatctattacgaccaacatatacctacttacaatcatcttcactttctgataggagcctttattttccggtacgatccgttactcgtagcacaagtagtacatttcttacaccagtcctttacatcgttggaattattcatccaataaaaccgttcccgaattctctgaaggattttctttacaccaagatgccctcctaatggactgtcgtgtaactgacgaagtacttcggctattctgctcttttgattcaccaattgttctctccgctgaagcgtcatcattttccaatactcgttaagcaagctgtcctccatgataatagagtccctcttggcccaatacggcttgatatttcttgccaagatgatcgacgattttcttttgtccattttcgaattttctggatctaaaattggcccattcgccattttaattacttacgacactaaaacaccaaaaacagctgccctagttcatgtctcaaatatttataaatagtccagtcgggttagacgaataacaggcctaaccttgcattaggagttgccccagattttgtttttctattctttggggggacgggggggcggttaatagtagtgtagatttggaatctcggctgaattctgccgttgcgttggccgtagtcttgattttgaacgagaaccgtttttgctcaatagcttcgccattttcaacttttcgacaaaaagtgtaacaaccggaattgtagaaaatatgattttctatcatttctattcttacaaatttttcgtgccgtcgatattttccgagtgatggcggaaggtagtgacagttagagcataattattgaattatctcgtttattattggttttgcgacaaaaatgttccaatacaaaaatagagagaattaaattctacataattttgatttctttcattttttttgctaaagtttgtatttgggtagtacgtgcgcggtaatggcgcg

SEQ ID NO: 2403 - DNA, 1604 bp, Diabrotica virgifera
  SmartBlast Evalue=6E-30; Info=Gap-Pol polyprotein n=1 Tax= Schistosoma japonicum RepID=C7C1Z1_SCHJA
ttacgtcaacacttcaaatcaatctatttcttagtaaatattgcatattttttcgctgtgtgaattaaacttcagaaaataaaatccctcaatgttgtgctgtgcatttgggctcaccgagaacatcaggacactgtattctgatgagaaaaaagtggattgtagcaataagaggggataaatatgtgccaacaataaatgcacgtatctgcaataaacattttgttaaaacagattacgtattgcccctagattcgactgtaaaaaatagaatacttcactataaaattcagatcaaaattgattataaacgcacggattaagatatgcaattttatatacattcacactgttgccacatctacaatcgctttttatggagtgaaaatatgaaaaaatttatatttgaaataataatatagaaaaatgtgaaataggactttcggtggtgtttggcccgttgattcattaacagtgatctgtaggccattgcgaagaactgaaggtattggtcccagtctcgctggtgattggacaccatctttgtcaaatacttgccgactgtcttattcattcgctctaccatttcatccgattgcgggtaataagctgtagtccttgtcttctttatgcctagtctatcacagattccctgaaatacatcgctttcgaagttccttctttggttactatggatctccaaaggcactccaaatcggctgatgtactctttgatcaacacatctgcaatagtggcggccttctggtctggaatagcgtagatctcggcccattttgtgaagtaatctattacgaccaacatatacctacttacaatcatcttcactttctgataggagcctttattttccggtacgatccgttactcgtagcacaagtagtacatttcttacaccagtcctttacatcgttggaattattcatccaataaaaccgttcccgaattctctgaaggattttctttacaccaagatgccctcctaatggactgtcgtgtaactgacgaagtacttcggctattctgctcttttgattcaccaattgttctctccgctgaagcgtcatcattttccaatactcgttaagcaagctgtcctccatgataatagagtccctcttggcccaatacggcttgatatttcttgccaagatgatcgacgattttcttttgtccattttcgaattttctggatctaaaattggcccattcgccattttaattacttacgacactaaaacaccaaaaacagctgccctagttcatgtctcaaatatttataaatagtccagtcgggttagacgaataacaggcctaaccttgcattaggagttgccccagattttgtttttctattctttggggggacgggggggcggttaatagtagtgtagatttggaatctcggctgaattctgccgttgcgttggccgtagtcttgattttgaacgagaaccgtttttgctcaatagcttcgccattttcaacttttcgacaaaaagtgtaacaaccggaattgtagaaaatatgattttctatcatttctattcttacaaatttttcgtgccgtcgatattttccgagt

SEQ ID NO: 2404 - DNA, 1494 bp, Diabrotica virgifera
  SmartBlast Evalue=5E-50; Info=Pol polyprotein n=1 Tax= Schistosoma mansoni RepID=Q6IFU0_SCHMA
ttacgtcaacacttcaaatcaatctatttcttagtaaatattgcatattttttcgctgtgtgaattaaacttcagaaaataaaatccctcaatgttgtgctgtgcatttgggctcaccgagaacatcaggacactgtattctgatgagaaaaaagtggattgtagcaataagaggggataaatatgtgccaacaataaatgcacgtatctgcaataaacattttgttaaaacagattacgtattgcccctagattcgactgtaaaaaatagaatacttcactataaaattcagatcaaaattgattataaacgcacggattaagatatgcaattttatatacattcacactgttgccacatctacaatcgctttttatggagtgaaaatatgaaaaaatttatatttgaaataataatatagaaaaatgtgaaataggactttcggtggtgtttggcccgttgattcattaacagtgatctgtaggccattgcgaagaactgaaggtattggtcccagtctcgctggtgattggacaccatctttgtcaaatacttgccgactgtcttattcattcgctctaccatttcatccgattgcgggtaataagctgtagtccttgtcttctttatgcctagtctatcacagattccctgaaatacatcgctttcgaagttccttctttggttactatggatctccaaaggcactccaaatcggctgatgtactctttgatcaacacatctgcaatagtggcggccttctggtctggaatagcgtagatctcggcccattttgtgaagtaatctattacgaccaacatatacctacttacaatcatcttcactttctgataggagcctttattttccggtacgatccgttactcgtagcacaagtagtacatttcttacaccagtcctttacatcgttggaattattcatccaataaaaccgttcccgaattctctgaaggattttctttacaccaagatgccctcctaatggactgtcgtgtaactgacgaagtacttcggctattctgctctttggaatcaccaactgtgttctcctcaccgaaccatcatcattttctattactcgtttaagcaagctgtcttccaagataaatgagtcccactgggcccaatacgtcttaactactgagcctaggcttgatatttcttgccaagatggtcgacgattttcttctttccattttcgaatcttctgtaaaactggatctttttcttgttcttccttgatcttggtaggcgtccactcgtcgttgaccactgttgttcttagtactgctgcttcctttgactctgttttgttgcaatgggaacattctgctggacacggtcttctagatagagaatcagcgttcctgtggctaactccggcccgatgctcgatcttgaaatcatattcttgaagtcgttcaatccatctggctatctgaccctctggattcttaaactgcattaacca

SEQ ID NO: 2405 - DNA, 636 bp, Diabrotica virgifera
gattaattaaaataatttttcaattcataaattattttatttatcatgccatttattctattcacttttgttcgtaggtttctctttggctgtaatgtttcttgttggtcaaaggtttaagattttcaggacatacatttgcttaatttccacgagacagtatataattgtagtaagtttatttcatctctacgcggtcgacaggatgtcgtttgaataattactgtaaaaatggtgtcatcttgatattctacaccagcttgcatatcgtgccgtttcttcatacggtcgctagcgatctgaaggtggaaacggaccaatggcagctaatctggaaagctcaacgtaggtggcgctcgtgtagttggaggtcacgtcaacttacgtcaacatttcaaatcaatctatttccaagtaaatattgcatatttgattcgctgtgtgaattaaacttgagaaaataaaatccctcaatgttgtgctatgcatttgtgcttatcgagaacatcaggacacaggtttctcaaagatattctgaagagaaaaaaatggattgtagcaataagaagaataaatatatgccgactataaacgcacgtatctgcaatagacatttgttgaaacagattacgtatt

SEQ ID NO: 2406 - DNA, 1098 bp, Diabrotica virgifera
  SmartBlast Evalue=1E-16; Info=Endonuclease-reverse transcriptase n=1 Tax=Bombyx mori RepID=D7F162_BOMMO
atttcttcctcttcttcttcttcttttttgtaagcaattctgcttattcattggcagattgatactctgccattggtactctcatctctgccgtttccagtagtcatggggttgtagctgtatcgggtcttgtttctgatgcatatgtcattattggtcttacactggctttataaattcttgacttcatctcagtgttaatatgtcggtttcgccatatagtgttattaaggcatcctgccagtctatttgctttttgtacttgatttctcacttctttgtccaggtctccgtaacttgacaatgtaatccaaggtattttacttccattacttgttcaatactgataccaatcaatttcaattttacatctgattggttctttactaattactattcgttttggttttctgtttctgatttaacttatgttaaatctgtggactaatctttgcagactatcttcatcttgggctatcaatattgcgtcgtctgcgtagcagagtatttttacttctttgtttcccattctatatcctcttcctttgttgacgtttttgatgatttcatccatgattaaattgaaaagcataggactcaatgagtatccctgccatattatactgtctatatctatagtttctgtaagtgggccatctattctgagttccattttgttattttggtagatgttttcaatggtttttgaatacagaagatggattacatctttgattctttctctgttaaatgctttcctctagtcaatcagacatagaaatgctggtatattatactctagtgatttctcagtaatttgctttatgacgcttatctcaaatacgcctagatttgcaggtacatctaatatgccagctaaattttaagcaaattgttttaaataatttctgaatttaatatattaccatgtaaataagaagtgtaacatgtaacgggtaaagtttacgattagaaaccagcacctttggtcaaaatgcttggtgatgagtttacctatttgatgtgatcagttgacggatctccaaatgatgccggtaatcagtttgctgtatcttgaagagtgtaataattttaggg

SEQ ID NO: 2407 - DNA, 1051 bp, Diabrotica virgifera
  SmartBlast Evalue=4E-16; Info=Endonuclease-reverse transcriptase n=1 Tax=Bombyx mori RepID=D7F162_BOMMO
atttcttcctcttcttcttcttcttttttgtaagcaattctgcttattcattggcagattgatactctgccattggtactctcatctctgccgtttccagtagtcatggggttgtagctgtatcgggtcttgtttctgatgcatatgtcattattggtcttacactggctttataaattcttgacttcatctcagtgttaatatgtcggtttcgccatatagtgttattaaggcatcctgccagtctatttgctttttgtacttgatttctcacttctttgtccaggtctccgtaacttgacaatgtaatccaaggtattttacttccattacttgttcaatactgataccaatcaatttcaattttacatctgattggttctttactaattactattcgttttggttttctgtttctgatttaacttatgttaaatctgtggactaatctttgcagactatcttcatcttgggctatcaatattgcgtcgtctgcgtagcagagtatttttacttctttgtttcccattctatatcctcttcctttgttgacgtttttgatgatttcatccatgattaaattgaaaagcataggactcaatgagtatccctgccatattatactgtctatatctatagtttctgtaagtgggccatctattctgagttccattttgttattttggtagatgttttcaatggtttttgaatacagaagatggattacatctttgattctttctctgttaaatgctttcctctagtcaatcagacatagaaatgctggtatattatactctagtgatttctcagtaatttgctttatgacgcttatctcaaatacgcctagatttgcaggtacatctaatatgccagctaaattttaagcaatttatttaagcttatttatataagctaagtcaaaattattgaaatcattacttatactaatataaagaaattctagtaaggatttctataaatttgaatttttgtggaaatggcgtatgttttatttttcactttttcctaaaaaattcgaaagggctct

SEQ ID NO: 2408 - DNA, 881 bp, Diabrotica virgifera
  SmartBlast Evalue=2E-23; Info=Endonuclease-reverse transcriptase n=1 Tax=Bombyx mori RepID=D7F162_BOMMO
atttcttcctcttcttcttcttcttttttgtaagcaattctgcttattcattggcagattgatactctgccattggtactctcatctctgccgtttccagtagtcatggggttgtagctgtatcgggtcttgtttctgatgcatatgtcattattggtcttacactggctttataaattcttgacttcatctcagtgttaatatgtcggtttcgccatatagtgttattaaggcatcctgccagtctatttgctttttgtacttgatttctcacttctttgtccaggtctccgtaacttgacaatgtaatccaaggtattttacttccattacttgttcaatactgataccaatcaatttcaattttacatctgattggttctttactaattactattcgttttggttttctgtttctgatttaacttatgttaaatctgtggactaatctttgcagactatcttcatcttgggctatcaatattgcgtcgtctgcgtagcagagtatttttacttctttgtttcccattctatatcctcttcctttgttgacgtttttgatgatttcatccatgattaaattgaaaagcataggactcaatgagtctccctgtcttattccgctgcctatatctataggttctgtaagttgtccatctattctgacttccattttgttgttttggtagatgttctcaatagtttttatgatatctagggggacttctctattatacagaagatggattacatctttgagtcttactctgtcaaatgctttctttaagtcaatcagacatagaaatgctggtctattatactctagtgatttctcggtaatttgctttatgacgaatattgcatctgtacacgatcttcca

SEQ ID NO: 2409 - DNA, 851 bp, Diabrotica virgifera
ttctagtaaggatttctataaatttgaattttgtggaatagcgtatgtttattttcactttttccaaaaaattcgaaagcgctctcttattttcatcataacttgcttaattttgacgctattaacttctactggagctcatttgataggtatgccaaagtactttgataagtgcattatacgtatattttataaaatgcatcgttttcccgttatttaagctttaaaacttagatttgagtaggtactcgtctaaaaaaatatacatacattcaattacccctaactcacttttaattaacatcagtttagtttcttaagctagtagtttatttcttttttattagcttcaattttggtaattagaatttttttaaaaacttatagtttatgagttattcatgaataatcggttaaaaacatggatttttctcacgaaaaattattaaaatctttgatgtttaataactcaaaaatttaaagatttattttaataattttatataacacattttgcttagaatttgaccctctatctatttatggtattatttttaataaaataattttacccccgagaaggggtgaaatcgaccccccaggataaaagcacaatttggctttatgtcacctttgttccttgaggtattctcaaactactcaccaattttcatgaaaatcaatggaggttcaacgaaatcggagacgaaaaccttcagtgactgtactacagcacctttggtcaaaatgcttggtgatgagtttacctatttgatgtgatcagttgacggatctccaaatgatgccggtaatcagtttgctgtatcttgaagagtgtaataattttaggg

SEQ ID NO: 2410 - DNA, 673 bp, Diabrotica virgifera
  SmartBlast Evalue=7E-12; Info=Endonuclease-reverse transcriptase n=1 Tax=Bombyx mori RepID=D7F162_BOMMO
cttatgttaaatctgtggactaatctttgcagactatcttcatcttgggctatcaatattgcgtcgtctgcgtagcagagtatttttacttctttgtttcccattctatatcctcttcctttgttgacgtttttgatgatttcatccatgattaaattgaaaagcataggactcaatgagtatccctgccatattatactgtctatatctatagtttctgtaagtgggccatctattctgagttccattttgttattttggtagatgttttcaatggtttttgaatacagaagatggattacatctttgattctttctctgttaaatgctttcctctagtcaatcagacatagaaatgctggtatattatactctagtgatttctcagtaatttgctttatgacgcttatctcaaatacgcctagatttgcaggtacatctaatatgccagctaaattttaagcaaattgttttaaataatttctgaatttaatatattaccatgtaaataagaagtgtaacatgtaacgggtaaagtttacgattagaaaccagcacctttggtcaaaatgcttggtgatgagtttacctatttgatgtgatcagttgacggatctccaaatgatgccggtaatcagtttgctgtatcttgaagagtgtaataattttaggg

SEQ ID NO: 2411 - DNA, 626 bp, Diabrotica virgifera
  SmartBlast Evalue=2E-11; Info=Endonuclease-reverse transcriptase n=1 Tax=Bombyx mori RepID=D7F162_BOMMO
cttatgttaaatctgtggactaatctttgcagactatcttcatcttgggctatcaatattgcgtcgtctgcgtagcagagtatttttacttctttgtttcccattctatatcctcttcctttgttgacgtttttgatgatttcatccatgattaaattgaaaagcataggactcaatgagtatccctgccatattatactgtctatatctatagtttctgtaagtgggccatctattctgagttccattttgttattttggtagatgttttcaatggtttttgaatacagaagatggattacatctttgattctttctctgttaaatgctttcctctagtcaatcagacatagaaatgctggtatattatactctagtgatttctcagtaatttgctttatgacgcttatctcaaatacgcctagatttgcaggtacatctaatatgccagctaaattttaagcaatttatttaagcttatttatataagctaagtcaaaattattgaaatcattacttatactaatataaagaaattctagtaaggatttctataaatttgaatttttgtggaaatggcgtatgttttatttttcactttttcctaaaaaattcgaaagggctct

SEQ ID NO: 2412 - DNA, 456 bp, Diabrotica virgifera
  SmartBlast Evalue=8E-19; Info=Endonuclease-reverse transcriptase n=1 Tax=Bombyx mori RepID=D7F162_BOMMO
cttatgttaaatctgtggactaatctttgcagactatcttcatcttgggctatcaatattgcgtcgtctgcgtagcagagtatttttacttctttgtttcccattctatatcctcttcctttgttgacgtttttgatgatttcatccatgattaaattgaaaagcataggactcaatgagtctccctgtcttattccgctgcctatatctataggttctgtaagttgtccatctattctgacttccattttgttgttttggtagatgttctcaatagtttttatgatatctagggggacttctctattatacagaagatggattacatctttgagtcttactctgtcaaatgctttctttaagtcaatcagacatagaaatgctggtctattatactctagtgatttctcggtaatttgctttatgacgaatattgcatctgtacacgatcttcca

SEQ ID NO: 2413 - DNA, 1234 bp, Diabrotica virgifera
aaaaccgtattggccaccatacagcccatatcagatttaaattcgattgagggagacctgggacccatttgggctgtagtgccataagacagatatttattattataacatacattttcatttttctttattattacccttccattggacacaaaataaatgatgctttcaatattttgtatatttttcctgattgtttttgaagttatacttctttaggcacgagggtgaatttttacattccctggcgcatgcgcacaccgacggtatggtattagttgctacatattttaggttatgtatcgcaaataaggtgtgcgcgaaaagaataaatatattattagtgtttttagtaaatatatttattataattttatgtctgtggatctgtcttcctccttattattgaaaatgtttattttcaattaatgtatctgtcaccgtgattgtaattatgtccgagaaatgatcgactgaatacaaaagcggtggtagctgatcggtagagcattcgcctagggatcgagaggtcccctgttcgaatcctgacaaagtcatatcctttttttttaatatttggtattctttttgttctttctaaaattagtttaatatttaaatacaatacaaaaagaactgttagtagataggtatattgatttcgttgaaatcataatatgaagttagggtatattataatagaagtataacttcttacgtgcgtagaaagtacacacacattctttttttatgacattttaaccctcaacgaacacccaccactggcaacccattgttatatttgatgtgaccgccatgtttttggtggcaaacaaactccaaactggcttcactttttgaacgtctattaaatgagtgttacccgtcctctctctttccttgtctaaggcatgaacaatgaaggaattagcgaatgaaaattgtttgcgcatcttatggttgcgacgtctagtctactctccaaatctcgcaccacctatcgacaagttttaggtgatttttagcttgcctttgtgtttaataatgaaacattaataattatcgcttataagaaattacactgatgcttagaatccccaatagtaatagtcaaagccagccgctgcttgcttatgcttatataatcagaacgaactgtaagtcagttcgttgagtattttggaggtggagagacttctggactttgtaggacttctggagaatactagagaag

SEQ ID NO: 2414 - DNA, 1046 bp, Diabrotica virgifera
aaatttactttttgaagttatacttctttaggcacgagggtgaatttttacattccctggcgcatgcgcacaccgacggtatggtattagttgctacatattttaggttatgtatcgcaaataaggtgtgcgcgaaaagaataaatatattattagtgtttttagtaaatatatttattataattttatgtctgtggatctgtcttcctccttattattgaaaatgtttattttcaattaatgtatctgtcaccgtgattgtaattatgtccgagaaatgatcgactgaatacaaaagcggtggtagctgatcggtagagcattcgcctagggatcgagaggtcccctgttcgaatcctgacaaagtcatatcctttttttttaatatttggtattctttttgttctttctaaaattagtttaatatttaaatacaatacaaaaagaactgttagtagataggtatattgatttcgttgaaatcataatatgaagttagggtatattataatagaagtataacttcttacgtgcgtagaaagtacacacacattctttttttatgacattttaaccctcaacgaacacccaccactggcaacccattgttatatttgatgtgaccgccatgtttttggtggcaaacaaactccaaactggcttcactttttgaacgtctattaaatgagtgttacccgtcctctctctttccttgtctaaggcatgaacaatgaaggaattagcgaatgaaaattgtttgcgcatcttatggttgcgacgtctagtctactctccaaatctcgcaccacctatcgacaagttttaggtgatttttagcttgcctttgtgtttaataatgaaacattaataattatcgcttataagaaattacactgatgcttagaatccccaatagtaatagtcaaagccagccgctgcttgcttatgcttatataatcagaacgaactgtaagtcagttcgttgagtattttggaggtggagagacttctggactttgtaggacttctggagaatactagagaag

SEQ ID NO: 2415 - DNA, 1012 bp, Diabrotica virgifera
aaaaccgtattggccaccatacagcccatatcagatttaaattcgattgagggagacctgggacccatttgggctgtagtgccataagacagatatttattattataacatacattttcatttttctttattattacccttccattggacacaaaataaatgatgctttcaatattttgtatatttttcctgattgtttttgaagttatacttctttaggcacgagggtgaatttttacattccctggcgcatgcgcacaccgacggtatggtattagttgctacatattttaggttatgtatcgcaaataaggtgtgcgcgaaaagaataaatatattattagtgtttttagtaaatatatttattataattttatgtctgtggatctgtcttcctccttattattgaaaatgtttattttcaattaatgtatctgtcaccgtgattgtaattatgtccgagaaatgatcgactgaatacaaaagcggtggtagctgatcggtagagcattcgcctagggatcgagaggtcccctgttcgaatcctgacaaagtcatatcttttttttaattttggtattcattttgtttttctaaaattagtttaatatttaaatacaatacaaaaaaactgtttaaagtagataggtatattgatttcgttgaaatcataatatgaagttagattatattataatagaagtataacttcttacgtgcgtacgaagtacacatacattctttttttttaatattgttgacccatatttctggatccggtcttctgcaccgtgcgcgagtattcgatcacaaaaaattggcgcgagtaacggaatgttaaggaaagatttttccaacgtccatgtcgtataacaatatggaccatacatagcacttagtcattctgtaacggagattgaaggaaagattttgaatacaaagtagcggtttaaatttaataaaagcttgccttgcttgttcgtacggcattttatttattgttgaggatccc

SEQ ID NO: 2416 - DNA, 824 bp, Diabrotica virgifera
aaatttactttttgaagttatacttctttaggcacgagggtgaatttttacattccctggcgcatgcgcacaccgacggtatggtattagttgctacatattttaggttatgtatcgcaaataaggtgtgcgcgaaaagaataaatatattattagtgtttttagtaaatatatttattataattttatgtctgtggatctgtcttcctccttattattgaaaatgtttattttcaattaatgtatctgtcaccgtgattgtaattatgtccgagaaatgatcgactgaatacaaaagcggtggtagctgatcggtagagcattcgcctagggatcgagaggtcccctgttcgaatcctgacaaagtcatatcttttttttaattttggtattcattttgtttttctaaaattagtttaatatttaaatacaatacaaaaaaactgtttaaagtagataggtatattgatttcgttgaaatcataatatgaagttagattatattataatagaagtataacttcttacgtgcgtacgaagtacacatacattctttttttttaatattgttgacccatatttctggatccggtcttctgcaccgtgcgcgagtattcgatcacaaaaaattggcgcgagtaacggaatgttaaggaaagatttttccaacgtccatgtcgtataacaatatggaccatacatagcacttagtcattctgtaacggagattgaaggaaagattttgaatacaaagtagcggtttaaatttaataaaagcttgccttgcttgttcgtacggcattttatttattgttgaggatccc

SEQ ID NO: 2417 - DNA, 584 bp, Diabrotica virgifera
aaaaccgtattggccaccatacagcccatatcagatttaaattcgattgagggagacctgggacccatttgggctgtagtgccataagacagatatttattattataacatacattttcatttttctttattattacccttccattggacacaaaataaatgatgctttcaatattttgtatatttttcctgattgtttttgaagttatacttctttaggcacgagggtgaatttttacattccctggcgcatgcgcacaccgacagtatggtattagtcgctacatcttttaagttatgtagcgcaaataaggtgtgcgtgaaaagaatatattattagtgtttttagtaaatatatttattataatttttatgtctgtggatttgtcttcctccttataagtattattgaaaatgtttattttcaattaatgtatctgtcaccgtgattgtaattatgtccgagaaatgatcgactgaatacaaaaccgtggtagctgatcggtagagcattcgcctagggatcgagaggttcgaatcctgacagtcatattcctttttttttaatttttggtattcttttt

SEQ ID NO: 2418 - DNA, 396 bp, Diabrotica virgifera
aaatttactttttgaagttatacttctttaggcacgagggtgaatttttacattccctggcgcatgcgcacaccgacagtatggtattagtcgctacatcttttaagttatgtagcgcaaataaggtgtgcgtgaaaagaatatattattagtgtttttagtaaatatatttattataatttttatgtctgtggatttgtcttcctccttataagtattattgaaaatgtttattttcaattaatgtatctgtcaccgtgattgtaattatgtccgagaaatgatcgactgaatacaaaaccgtggtagctgatcggtagagcattcgcctagggatcgagaggttcgaatcctgacagtcatattcctttttttttaatttttggtattcttttt

SEQ ID NO: 2419 - DNA, 5809 bp, Diabrotica virgifera
  SmartBlast Evalue=1E-151; Info="Mitogen-activated protein kinase ERK-A, putative n=1 Tax=Pediculus humanus corporis RepID= E0W1G6_PEDHC"
gtcggaatttaacatcagaggagtgtagaagtataacgatgggaagatagtgtgaaccaacgaaatcttttctttgtgcctaaagtagtcgtgtgaccggccgttttactctttattattcacctttaatttttcatttcaacagttcagtttaccgcggaggtttttttgtagtctcctttttgctaaacacaaaaatcaacaaatatggtcgaaaggataatagaagaaaatgaaaattacgattgcaacggcatcgtaatcaacaatggtgacagcatcgagggttgcaacgggggcgggggcaatggcagcgcctccgacagcggcgatcagatggacgctgaagctcgcgaacgagaactagttcgacgcaaggaggaagccaagagaaggaggcgtaagaagaagcgaaccggatcttcattggtgtcatcatgttttcaagatctgtataaattgaccggtgaagttctgggagaaggtgcttacgctagcgtccaaacttgcgtgagtctgttcaccgatcaagaatttgctgtgaaaattatcgacaaggtaccaggtcatgctagagctagagtttttagggaagtagagacgttccatcattgccaaggccaccccaatattattcagttaatggagtttttcgaggacgaagaaaagttttatttggtttttgaaaagatcaatggaggtcagctcctacgaaggattcaggagcacaagtttttcagcgaagccgcagcggcagagatagtgagagaagtggcctcagccttgcagtttatgcacgccaaagggattgcacacagggatttaaagcctgagaacattctttgtgtccacagggaccaactttgtccggtcaagatctgcgatttcgatttaggatctggcatccgcttccaatccagcgtttccagtcctttagcgacacctcagttattaacacctgtgggcagtgctgaatttatggcaccggaagtagtagaggcattcatcggagaatcggaaaccacatcatacgacaagaggtgcgatttatggtctttaggcgtcatcatgtacattctgctgtgcggatacccgccgttttacggaaagtgtggtagagactgtggctgggaacgaggcgataactgcaacgcctgtcaggaacttttgttccagagcatccaggaaggaagatacgatttcccggagccagagtggacgaccatatcggatgaagcaagggacctcatctcgagtctgctggtaaagaacgccagcgagcgcatcagcgcggaaaaggtgctgcagcacccgtggctgcagtgcgcaagtgatacagctgcgctaactaccccagctgtcatcaagaagaacaactctgcgttggaactgtcccagttcgcggagtccgcaatggctgtgaatagagtggtgcaacaacacttcagcatgaaattggactacttggagagaccgaacgtgtatcctgactgtcctgttcggtcaggaatgaagacgtgcgcatcggcgaagatgtttggcctgagcccgcccagcgagagcaacctcatgcgcaggcgtatcaaaggcggctcttgccagttcctcgtgccagcgcccacacccgccatacccagtccaagcggttgatgttgcccaactcgtcaaaatgttttaaaattttgaaaactaatttttttctttttcgattttttggcatttttacagagggttgattcggttatttgtgttgtgttctgttttatgatctacaacacaacaagttactgttgtttattttgtatttttctattgtaaagctggatggatcgaaatattgaggcatttcaaatattcgtaactgatgcatccgagtaccattagatttctcgccaagccatcaactcgatatttacccattaatacagttagttctcgatattaaacaaagttcacgaaacaaaatagatctgctaatataattttgacagtgactaagatgacagttctcttgttaccaacttaaagtctttggcgagaatcttaaaaaaaaacttaagcagctcaaaatatttcacactttttattgacaataataaatagatattatttattactaatttccgataaaaattagcaactgcgccaacctaatctttaagaattcacatattaattttcaaatcagaaaggtccacctactcgtagttcttgtgtttgaaataagcacatttttttctcagaagctctattttttcgttctattttttttttatttagtattacggatcagatttttcatatattatttatatttataagcaaaacaaccacttcaactaatttataggttaaacagaacattttctgttagttttgttgtgacacttaacgtgttagaggaattcattaaacgtggctgtgtgccataaatcaaaaggttataggaaaatacagaaaaagaggaaagaaagtatatatagctaccaaatattccaatatctgcaacattttcagaatcaaactgtttgactgagctcttatagcatgtagttatcgccaatactaataagtaagctttagctaaggtttacggtagtctaggagatataatatatttgatattgaaaattaatacttagagcagaacataaatgacactctacagacagataatcggcaagaatctagaaccagcaaatgacaaaattgcaaattagtgatcttcgtttatgttatcttttataataaataacgaaagaacgcgagaatataagtaatacatgtcatatgtcagttgtcatggcatatcacttgtttcattcgtcgcttatcaggatgtctgtctgttacaagatgagagatgtcgctgcggtagcagtttacaaaaaaaccattttaggtcttctaaatgttacaaataggggggatagaatgaaaattcttttttataacgaataaattgtggttgatacgaatgttcaaatctaatgattgtagaatactgtttaaagcgcaaaaaacgtttaacgagatcttctctagagcctcgtagattaaatcggctgaatcttcatcaacatcgttcgtctttgcagcgaagaatcgcgttactttgtaaaaatttgtaaatatttaggattaagaacaaataagaagtatttaataaagagcgaggctagtgtatgagattctgctgtagattaagttttgcttaataactttttaggttaagtacaaacacttgacaaggtggcaatgcgttcggttcaaaaaatgggagggtttggtatttatcgttcaatgaaatgcctgaaacgtcaacacaaacaaaaaggcaaacagtaatatatacctgtcaatttttctacttaagtttactttttggctaaaggacatcgcacacatcttgtggaaagatataatgtcgctcaaattcagtaaaatttatacgagtagattcgttttaaattaacggtcaaatcttatcattgcgccaactctgtattttcaataataagagcagaaattgatataaataaatctgaaatcaaatgggtacgtacataagttagagagagaaaaaatattttaaaatacccagctgtttgtaaatgtttaagctgttttgaatagcactcagagcaataatgattgtaactaacactttatggactccaaaaatgtgatttcgataaactttaattgcaatttgcgccgtaattaatcataattaagagttggcgcaatgataagaattgaccgttaatttggaacgaatctagtcgttaaattttattgaatttgagtgacattatattttccataagatgtgtgcgatgtcctttcattaggacgaacgtttgggcaattttctcgaacgcattgtatagctgcccgcgataaaggttgtgatatgagagtaccctttatcaaaaaaaaagtattgctatcagttaggccatgttttgatgatgcctcaatatcaattgatggttcagctgtggcctagatatatatcgcttgattttttaatacttttgtatgtgttaaaatgtagattgataccagtctacgatttgtgataataagtaagctctgacgtgcgattagaacgcacgatagactgtagacgccgtacctgctttcatttcagtgagatacggaacatttgaatgaaaggggctagaaagagcccttgggacccaagtaatacaccaaacaatagcatgtacccaaataagtaatgacataacatgctcactttaaagatggcggctttgacttcatgtgtcacttaaaatatgacagatgacatcagagcagtcattttgagggtgattgtgccaaattgttggcttattggtagagatattattattaggtggcttatgttgtggttcttctacgtactgacagtccatttgtatttaagagtcctatataagtttggatatttttttaagattttgtaatgctcaaggtaagaaatttccttatatgattggaatggtatccaaaccagggcgcgataaagcaaataccaaatcggtacataaacaacaaaaaacgctcgttgtactacaaaaaccaatcctcttaattcaaatcattaatatcatcaatcctacttaaataaaccgcgtattttgttgtttataccgactttaacattgttatcttcatgtttaaggtaaaccacgagataaatcttgtaattccatcttaacacgatttttacaacgttattttctcagtaaaattgaagtttacaatgaacgtgaagaaaagctaagtgtatcatcccagtgaattggtatttgtcacttccaactctcagggccggttgttcgagcgctaatcaacaatgatcattgtcaaatatttaattactgtcaccaaaactgtcaatgtcaactttgtttgggttgctgaaaacataattaattacaattatgagatctattattaattatgttaataattattgttatattaattgattatagactccacagactttttaacgacccaaacaaagttgacattgacagtaattaattatttgataatgatcattcttgattggcgttcgaacaaccggcccttagggttgcaaatgtgtggtggttcaagttggaccatctctgaggagtaaatgtttctgaaatgagtgtgatataataatgtatgaatgtttcctaaaaaaacgtagattccccctacaagattggagtattgtttttttttctaagattactataaggcatttattaatgtactttcacagtaccatctgtttccaatcagtttataccaaaaaacaaaaaaagcaaatatataaaaagtatatttcatggcggagatgccgtgagtgccattatttctattatgcgggctagtcagttggtaaaatatcagtatttatatcagaaagtacagtttttgttactatatatcaccctgtacgtcaatattcaaacttcaataaattgtgcggtgtttttgagttgaggcaactttgcagttaacatgttttccttcacactcgatactacattataatttatatcaacatttggaaaatatttgatattttgcaaatgactagccggtatttcgtacgtccaaggctgtacggccgttaccaatggttatggcccgtacaggattggtcgtatacaaggaattataacattgttaaaaaatttggttataacatcgttttttactacaagcaagttggcattgggtaaaaatagtgatggaaatttatgtaccaagtgtgctttaatttcttaaaaataaa

SEQ ID NO: 2420 - DNA, 5810 bp, Diabrotica virgifera
  SmartBlast Evalue=1E-151; Info="Mitogen-activated protein kinase ERK-A, putative n=1 Tax=Pediculus humanus corporis RepID= E0W1G6_PEDHC"
gtcggaatttaacatcagaggagtgtagaagtataacgatgggaagatagtgtgaaccaacgaaatcttttctttgtgcctaaagtagtcgtgtgaccggccgttttactctttattattcacctttaatttttcatttcaacagttcagtttaccgcggaggtttttttgtagtctcctttttgctaaacacaaaaatcaacaaatatggtcgaaaggataatagaagaaaatgaaaattacgattgcaacggcatcgtaatcaacaatggtgacagcatcgagggttgcaacgggggcgggggcaatggcagcgcctccgacagcggcgatcagatggacgctgaagctcgcgaacgagaactagttcgacgcaaggaggaagccaagagaaggaggcgtaagaagaagcgaaccggatcttcattggtgtcatcatgttttcaagatctgtataaattgaccggtgaagttctgggagaaggtgcttacgctagcgtccaaacttgcgtgagtctgttcaccgatcaagaatttgctgtgaaaattatcgacaaggtaccaggtcatgctagagctagagtttttagggaagtagagacgttccatcattgccaaggccaccccaatattattcagttaatggagtttttcgaggacgaagaaaagttttatttggtttttgaaaagatcaatggaggtcagctcctacgaaggattcaggagcacaagtttttcagcgaagccgcagcggcagagatagtgagagaagtggcctcagccttgcagtttatgcacgccaaagggattgcacacagggatttaaagcctgagaacattctttgtgtccacagggaccaactttgtccggtcaagatctgcgatttcgatttaggatctggcatccgcttccaatccagcgtttccagtcctttagcgacacctcagttattaacacctgtgggcagtgctgaatttatggcaccggaagtagtagaggcattcatcggagaatcggaaaccacatcatacgacaagaggtgcgatttatggtctttaggcgtcatcatgtacattctgctgtgcggatacccgccgttttacggaaagtgtggtagagactgtggctgggaacgaggcgataactgcaacgcctgtcaggaacttttgttccagagcatccaggaaggaagatacgatttcccggagccagagtggacgaccatatcggatgaagcaagggacctcatctcgagtctgctggtaaagaacgccagcgagcgcatcagcgcggaaaaggtgctgcagcacccgtggctgcagtgcgcaagtgatacagctgcgctaactaccccagctgtcatcaagaagaacaactctgcgttggaactgtcccagttcgcggagtccgcaatggctgtgaatagagtggtgcaacaacacttcagcatgaaattggactacttggagagaccgaacgtgtatcctgactgtcctgttcggtcaggaatgaagacgtgcgcatcggcgaagatgtttggcctgagcccgcccagcgagagcaacctcatgcgcaggcgtatcaaaggcggctcttgccagttcctcgtgccagcgcccacacccgccatacccagtccaagcggttgatgttgcccaactcgtcaaaatgttttaaaattttgaaaactaatttttttctttttcgattttttggcatttttacagagggttgattcggttatttgtgttgtgttctgttttatgatctacaacacaacaagttactgttgtttattttgtatttttctattgtaaagctggatggatcgaaatattgaggcatttcaaatattcgtaactgatgcatccgagtaccattagatttctcgccaagccatcaactcgatatttacccattaatacagttagttctcgatattaaacaaagttcacgaaacaaaatagatctgctaatataattttgacagtgactaagatgacagttctcttgttaccaacttaaagtctttggcgagaatcttaaaaaaaaacttaagcagctcaaaatatttcacactttttattgacaataataaatagatattatttattactaatttccgataaaaattagcaactgcgccaacctaatctttaagaattcacatattaattttcaaatcagaaaggtccacctactcgtagttcttgtgtttgaaataagcacatttttttctcagaagctctattttttcgttctattttttttttatttagtattacggatcagatttttcatatattatttatatttataagcaaaacaaccacttcaactaatttataggttaaacagaacattttctgttagttttgttgtgacacttaacgtgttagaggaattcattaaacgtggctgtgtgccataaatcaaaaggttataggaaaatacagaaaaagaggaaagaaagtatatatagctaccaaatattccaatatctgcaacattttcagaatcaaactgtttgactgagctcttatagcatgtagttatcgccaatactaataagtaagctttagctaaggtttacggtagtctaggagatataatatatttgatattgaaaattaatacttagagcagaacataaatgacactctacagacagataatcggcaagaatctagaaccagcaaatgacaaaattgcaaattagtgatcttcgtttatgttatcttttataataaataacgaaagaacgcgagaatataagtaatacatgtcatatgtcagttgtcatggcatatcacttgtttcattcgtcgcttatcaggatgtctgtctgttacaagatgagagatgtcgctgcggtagcagtttacaaaaaaaccattttaggtcttctaaatgttaacaaataggggggatagaatgaaaattcttttttataacgaataaattgtggttgatacgaatgttcaaatctaatgattttagaatactgtttaaagcgcaaaaaacgtttaacgagatcttctctagagcctcgtagattagatcggctgaatcttcatcaacatcgttcgtctttgcagcgaagaatcgcgttactttgtaaaaatttgtaaatatttaggattaagaacaaataagaagtatttaataaagagcgaggctagtgtatgagattctgctgtagattaagttttgcttaataactttttaggttaagtacaaacacttgacaaggtggcaatgcgttcggttcaaaaaatgggagggtttggtatttatcgttcaatgaaatgcctgaaacgtcaacacaaacaaaaaggcaaacagtaatatatacctgtcaatttttctacttaagtttactttttggctaaaggacatcgcacacatcttgtggaaagatataatgtcgctcaaattcagtaaaatttatacgagtagattcgttttaaattaacggtcaaatcttatcattgcgccaactctgtattttcaataataagagcagaaattgatataaataaatctgaaatcaaatgggtacgtacataagttagagagagaaaaaatattttaaaatacccagctgtttgtaaatgtttaagctgttttgaatagcactcagagcaataatgattgtaactaacactttatggactccaaaaatgtgatttcgataaactttaattgcaatttgcgccgtaattaatcataattaagagttggcgcaatgataagaattgaccgttaatttggaacgaatctagtcgttaaattttattgaatttgagtgacattatattttccataagatgtgtgcgatgtcctttcattaggacgaacgtttgggcaattttctcgaacgcattgtatagctgcccgcgataaaggttgtgatatgagagtaccctttatcaaaaaaaaagtattgctatcagttaggccatgttttgatgatgcctcaatatcaattgatggttcagctgtggcctagatatatatcgcttgattttttaatacttttgtatgtgttaaaatgtagattgataccagtctacgatttgtgataataagtaagctctgacgtgcgattagaacgcacgatagactgtagacgccgtacctgctttcatttcagtgagatacggaacatttgaatgaaaggggctagaaagagcccttgggacccaagtaatacaccaaacaatagcatgtacccaaataagtaatgacataacatgctcactttaaagatggcggctttgacttcatgtgtcacttaaaatatgacagatgacatcagagcagtcattttgagggtgattgtgccaaattgttggcttattggtagagatattattattaggtggcttatgttgtggttcttctacgtactgacagtccatttgtatttaagagtcctatataagtttggatatttttttaagattttgtaatgctcaaggtaagaaatttccttatatgattggaatggtatccaaaccagggcgcgataaagcaaataccaaatcggtacataaacaacaaaaaacgctcgttgtactacaaaaaccaatcctcttaattcaaatcattaatatcatcaatcctacttaaataaaccgcgtattttgttgtttataccgactttaacattgttatcttcatgtttaaggtaaaccacgagataaatcttgtaattccatcttaacacgatttttacaacgttattttctcagtaaaattgaagtttacaatgaacgtgaagaaaagctaagtgtatcatcccagtgaattggtatttgtcacttccaactctcagggccggttgttcgagcgctaatcaacaatgatcattgtcaaatatttaattactgtcaccaaaactgtcaatgtcaactttgtttgggttgctgaaaacataattaattacaattatgagatctattattaattatgttaataattattgttatattaattgattatagactccacagactttttaacgacccaaacaaagttgacattgacagtaattaattatttgataatgatcattcttgattggcgttcgaacaaccggcccttagggttgcaaatgtgtggtggttcaagttggaccatctctgaggagtaaatgtttctgaaatgagtgtgatataataatgtatgaatgtttcctaaaaaaacgtagattccccctacaagattggagtattgtttttttttctaagattactataaggcatttattaatgtactttcacagtaccatctgtttccaatcagtttataccaaaaaacaaaaaaagcaaatatataaaaagtatatttcatggcggagatgccgtgagtgccattatttctattatgcgggctagtcagttggtaaaatatcagtatttatatcagaaagtacagtttttgttactatatatcaccctgtacgtcaatattcaaacttcaataaattgtgcggtgtttttgagttgaggcaactttgcagttaacatgttttccttcacactcgatactacattataatttatatcaacatttggaaaatatttgatattttgcaaatgactagccggtatttcgtacgtccaaggctgtacggccgttaccaatggttatggcccgtacaggattggtcgtatacaaggaattataacattgttaaaaaatttggttataacatcgttttttactacaagcaagttggcattgggtaaaaatagtgatggaaatttatgtaccaagtgtgctttaatttcttaaaaataaa

SEQ ID NO: 2421 - DNA, 5538 bp, Diabrotica virgifera
  SmartBlast Evalue=1E-151; Info="Mitogen-activated protein kinase ERK-A, putative n=1 Tax=Pediculus humanus corporis RepID= E0W1G6_PEDHC"
gtcggaatttaacatcagaggagtgtagaagtataacgatgggaagatagtgtgaaccaacgaaatcttttctttgtgcctaaagtagtcgtgtgaccggccgttttactctttattattcacctttaatttttcatttcaacagttcagtttaccgcggaggtttttttgtagtctcctttttgctaaacacaaaaatcaacaaatatggtcgaaaggataatagaagaaaatgaaaattacgattgcaacggcatcgtaatcaacaatggtgacagcatcgagggttgcaacgggggcgggggcaatggcagcgcctccgacagcggcgatcagatggacgctgaagctcgcgaacgagaactagttcgacgcaaggaggaagccaagagaaggaggcgtaagaagaagcgaaccggatcttcattggtgtcatcatgttttcaagatctgtataaattgaccggtgaagttctgggagaaggtgcttacgctagcgtccaaacttgcgtgagtctgttcaccgatcaagaatttgctgtgaaaattatcgacaaggtaccaggtcatgctagagctagagtttttagggaagtagagacgttccatcattgccaaggccaccccaatattattcagttaatggagtttttcgaggacgaagaaaagttttatttggtttttgaaaagatcaatggaggtcagctcctacgaaggattcaggagcacaagtttttcagcgaagccgcagcggcagagatagtgagagaagtggcctcagccttgcagtttatgcacgccaaagggattgcacacagggatttaaagcctgagaacattctttgtgtccacagggaccaactttgtccggtcaagatctgcgatttcgatttaggatctggcatccgcttccaatccagcgtttccagtcctttagcgacacctcagttattaacacctgtgggcagtgctgaatttatggcaccggaagtagtagaggcattcatcggagaatcggaaaccacatcatacgacaagaggtgcgatttatggtctttaggcgtcatcatgtacattctgctgtgcggatacccgccgttttacggaaagtgtggtagagactgtggctgggaacgaggcgataactgcaacgcctgtcaggaacttttgttccagagcatccaggaaggaagatacgatttcccggagccagagtggacgaccatatcggatgaagcaagggacctcatctcgagtctgctggtaaagaacgccagcgagcgcatcagcgcggaaaaggtgctgcagcacccgtggctgcagtgcgcaagtgatacagctgcgctaactaccccagctgtcatcaagaagaacaactctgcgttggaactgtcccagttcgcggagtccgcaatggctgtgaatagagtggtgcaacaacacttcagcatgaaattggactacttggagagaccgaacgtgtatcctgactgtcctgttcggtcaggaatgaagacgtgcgcatcggcgaagatgtttggcctgagcccgcccagcgagagcaacctcatgcgcaggcgtatcaaaggcggctcttgccagttcctcgtgccagcgcccacacccgccatacccagtccaagcggttgatgttgcccaactcgtcaaaatgttttaaaattttgaaaactaatttttttctttttcgattttttggcatttttacagagggttgattcggttatttgtgttgtgttctgttttatgatctacaacacaacaagttactgttgtttattttgtatttttctattgtaaagctggatggatcgaaatattgaggcatttcaaatattcgtaactgatgcatccgagtaccattagatttctcgccaagccatcaactcgatatttacccattaatacagttagttctcgatattaaacaaagttcacgaaacaaaatagatctgctaatataattttgacagtgactaagatgacagttctcttgttaccaacttaaagtctttggcgagaatcttaaaaaaaaacttaagcagctcaaaatatttcacactttttattgacaataataaatagatattatttattactaatttccgataaaaattagcaactgcgccaacctaatctttaagaattcacatattaattttcaaatcagaaaggtccacctactcgtagttcttgtgtttgaaataagcacatttttttctcagaagctctattttttcgttctattttttttttatttagtattacggatcagatttttcatatattatttatatttataagcaaaacaaccacttcaactaatttataggttaaacagaacattttctgttagttttgttgtgacacttaacgtgttagaggaattcattaaacgtggctgtgtgccataaatcaaaaggttataggaaaatacagaaaaagaggaaagaaagtatatatagctaccaaatattccaatatctgcaacattttcagaatcaaactgtttgactgagctcttatagcatgtagttatcgccaatactaataagtaagctttagctaaggtttacggtagtctaggagatataatatatttgatattgaaaattaatacttagagcagaacataaatgacactctacagacagataatcggcaagaatctagaaccagcaaatgacaaaattgcaaattagtgatcttcgtttatgttatcttttataataaataacgaaagaacgcgagaatataagtaatacatgtcatatgtcagttgtcatggcatatcacttgtttcattcgtcgcttatcaggatgtctgtctgttacaagatgagagatgtcgctgcggtagcagtttacaaaaaaaccattttaggtcttctaaatgttacaaataggggggatagaatgaaaattcttttttataacgaataaattgtggttgatacgaatgttcaaatctaatgattgtagaatactgtttaaagcgcaaaaaacgtttaacgagatcttctctagagcctcgtagattaaatcggctgaatcttcatcaacatcgttcgtctttgcagcgaagaatcgcgttactttgtaaaaatttgtaaatatttaggattaagaacaaataagaagtatttaataaagagcgaggctagtgtatgagattctgctgtagattaagttttgcttaataactttttaggttaagtacaaacacttgacaaggtggcaatgcgttcggttcaaaaaatgggagggtttggtatttatcgttcaatgaaatgcctgaaacgtcaacacaaacaaaaaggcaaacagtaatatatacctgtcaatttttctacttaagtttactttttggctaaaggacatcgcacacatcttgtggaaagatataatgtcgctcaaattcagtaaaatttatacgagtagattcgttttaaattaacggtcaaatcttatcattgcgccaactctgtattttcaataataagagcagaaattgatataaataaatctgaaatcaaatgggtacgtacataagttagagagagaaaaaatattttaaaatacccagctgtttgtaaatgtttaagctgttttgaatagcactcagagcaataatgattgtaactaacactttatggactccaaaaatgtgatttcgataaactttaattgcaatttgcgccgtaattaatcataattaagagttggcgcaatgataagaattgaccgttaatttggaacgaatctagtcgttaaattttattgaatttgagtgacattatattttccataagatgtgtgcgatgtcctttcattaggacgaacgtttgggcaattttctcgaacgcattgtatagctgcccgcgataaaggttgtgatatgagagtaccctttatcaaaaaaaaagtattgctatcagttaggccatgttttgatgatgcctcaatatcaattgatggttcagctgtggcctagatatatatcgcttgattttttaatacttttgtatgtgttaaaatgtagattgataccagtctacgatttgtgataataagtaagctctgacgtgcgattagaacgcacgatagactgtagacgccgtacctgctttcatttcagtgagatacggaacatttgaatgaaaggggctagaaagagcccttgggacccaagtaatacaccaaacaatagcatgtacccaaataagtaatgacataacatgctcactttaaagatggcggctttgacttcatgtgtcacttaaaatatgacagatgacatcagagcagtcattttgagggtgattgtgccaaattgttggcttattggtagagatattattattaggtggcttatgttgtggttcttctacgtactgacagtccatttgtatttaagagtcctatataagtttggatatttttttaagattttgtaatgctcaaggtaagaaatttccttatatgattggaatggtatccaaaccagggcgcgataaagcaaataccaaatcggtacataaacaacaaaaaacgctcgttgtactacaaaaaccaatcctcttaattcaaatcattaatatcatcaatcctacttaaataaaccgcgtattttgttgtttataccgactttaacattgttatcttcatgtttaaggtaaaccacgagataaatcttgtaattccatcttaacacgatttttacaacgttattttctcagtaaaattgaagtttacaatgaacgtgaagaaaagctaagtgtatcatcccagtgaattggtatttgtcacttccaactctcagggttgcaaatgtgtggtggttcaagttggaccatctctgaggagtaaatgtttctgaaatgagtgtgatataataatgtatgaatgtttcctaaaaaaacgtagattccccctacaagattggagtattgtttttttttctaagattactataaggcatttattaatgtactttcacagtaccatctgtttccaatcagtttataccaaaaaacaaaaaaagcaaatatataaaaagtatatttcatggcggagatgccgtgagtgccattatttctattatgcgggctagtcagttggtaaaatatcagtatttatatcagaaagtacagtttttgttactatatatcaccctgtacgtcaatattcaaacttcaataaattgtgcggtgtttttgagttgaggcaactttgcagttaacatgttttccttcacactcgatactacattataatttatatcaacatttggaaaatatttgatattttgcaaatgactagccggtatttcgtacgtccaaggctgtacggccgttaccaatggttatggcccgtacaggattggtcgtatacaaggaattataacattgttaaaaaatttggttataacatcgttttttactacaagcaagttggcattgggtaaaaatagtgatggaaatttatgtaccaagtgtgctttaatttcttaaaaataaa

SEQ ID NO: 2422 - DNA, 5539 bp, Diabrotica virgifera
  SmartBlast Evalue=1E-151; Info="Mitogen-activated protein kinase ERK-A, putative n=1 Tax=Pediculus humanus corporis RepID= E0W1G6_PEDHC"
gtcggaatttaacatcagaggagtgtagaagtataacgatgggaagatagtgtgaaccaacgaaatcttttctttgtgcctaaagtagtcgtgtgaccggccgttttactctttattattcacctttaatttttcatttcaacagttcagtttaccgcggaggtttttttgtagtctcctttttgctaaacacaaaaatcaacaaatatggtcgaaaggataatagaagaaaatgaaaattacgattgcaacggcatcgtaatcaacaatggtgacagcatcgagggttgcaacgggggcgggggcaatggcagcgcctccgacagcggcgatcagatggacgctgaagctcgcgaacgagaactagttcgacgcaaggaggaagccaagagaaggaggcgtaagaagaagcgaaccggatcttcattggtgtcatcatgttttcaagatctgtataaattgaccggtgaagttctgggagaaggtgcttacgctagcgtccaaacttgcgtgagtctgttcaccgatcaagaatttgctgtgaaaattatcgacaaggtaccaggtcatgctagagctagagtttttagggaagtagagacgttccatcattgccaaggccaccccaatattattcagttaatggagtttttcgaggacgaagaaaagttttatttggtttttgaaaagatcaatggaggtcagctcctacgaaggattcaggagcacaagtttttcagcgaagccgcagcggcagagatagtgagagaagtggcctcagccttgcagtttatgcacgccaaagggattgcacacagggatttaaagcctgagaacattctttgtgtccacagggaccaactttgtccggtcaagatctgcgatttcgatttaggatctggcatccgcttccaatccagcgtttccagtcctttagcgacacctcagttattaacacctgtgggcagtgctgaatttatggcaccggaagtagtagaggcattcatcggagaatcggaaaccacatcatacgacaagaggtgcgatttatggtctttaggcgtcatcatgtacattctgctgtgcggatacccgccgttttacggaaagtgtggtagagactgtggctgggaacgaggcgataactgcaacgcctgtcaggaacttttgttccagagcatccaggaaggaagatacgatttcccggagccagagtggacgaccatatcggatgaagcaagggacctcatctcgagtctgctggtaaagaacgccagcgagcgcatcagcgcggaaaaggtgctgcagcacccgtggctgcagtgcgcaagtgatacagctgcgctaactaccccagctgtcatcaagaagaacaactctgcgttggaactgtcccagttcgcggagtccgcaatggctgtgaatagagtggtgcaacaacacttcagcatgaaattggactacttggagagaccgaacgtgtatcctgactgtcctgttcggtcaggaatgaagacgtgcgcatcggcgaagatgtttggcctgagcccgcccagcgagagcaacctcatgcgcaggcgtatcaaaggcggctcttgccagttcctcgtgccagcgcccacacccgccatacccagtccaagcggttgatgttgcccaactcgtcaaaatgttttaaaattttgaaaactaatttttttctttttcgattttttggcatttttacagagggttgattcggttatttgtgttgtgttctgttttatgatctacaacacaacaagttactgttgtttattttgtatttttctattgtaaagctggatggatcgaaatattgaggcatttcaaatattcgtaactgatgcatccgagtaccattagatttctcgccaagccatcaactcgatatttacccattaatacagttagttctcgatattaaacaaagttcacgaaacaaaatagatctgctaatataattttgacagtgactaagatgacagttctcttgttaccaacttaaagtctttggcgagaatcttaaaaaaaaacttaagcagctcaaaatatttcacactttttattgacaataataaatagatattatttattactaatttccgataaaaattagcaactgcgccaacctaatctttaagaattcacatattaattttcaaatcagaaaggtccacctactcgtagttcttgtgtttgaaataagcacatttttttctcagaagctctattttttcgttctattttttttttatttagtattacggatcagatttttcatatattatttatatttataagcaaaacaaccacttcaactaatttataggttaaacagaacattttctgttagttttgttgtgacacttaacgtgttagaggaattcattaaacgtggctgtgtgccataaatcaaaaggttataggaaaatacagaaaaagaggaaagaaagtatatatagctaccaaatattccaatatctgcaacattttcagaatcaaactgtttgactgagctcttatagcatgtagttatcgccaatactaataagtaagctttagctaaggtttacggtagtctaggagatataatatatttgatattgaaaattaatacttagagcagaacataaatgacactctacagacagataatcggcaagaatctagaaccagcaaatgacaaaattgcaaattagtgatcttcgtttatgttatcttttataataaataacgaaagaacgcgagaatataagtaatacatgtcatatgtcagttgtcatggcatatcacttgtttcattcgtcgcttatcaggatgtctgtctgttacaagatgagagatgtcgctgcggtagcagtttacaaaaaaaccattttaggtcttctaaatgttaacaaataggggggatagaatgaaaattcttttttataacgaataaattgtggttgatacgaatgttcaaatctaatgattttagaatactgtttaaagcgcaaaaaacgtttaacgagatcttctctagagcctcgtagattagatcggctgaatcttcatcaacatcgttcgtctttgcagcgaagaatcgcgttactttgtaaaaatttgtaaatatttaggattaagaacaaataagaagtatttaataaagagcgaggctagtgtatgagattctgctgtagattaagttttgcttaataactttttaggttaagtacaaacacttgacaaggtggcaatgcgttcggttcaaaaaatgggagggtttggtatttatcgttcaatgaaatgcctgaaacgtcaacacaaacaaaaaggcaaacagtaatatatacctgtcaatttttctacttaagtttactttttggctaaaggacatcgcacacatcttgtggaaagatataatgtcgctcaaattcagtaaaatttatacgagtagattcgttttaaattaacggtcaaatcttatcattgcgccaactctgtattttcaataataagagcagaaattgatataaataaatctgaaatcaaatgggtacgtacataagttagagagagaaaaaatattttaaaatacccagctgtttgtaaatgtttaagctgttttgaatagcactcagagcaataatgattgtaactaacactttatggactccaaaaatgtgatttcgataaactttaattgcaatttgcgccgtaattaatcataattaagagttggcgcaatgataagaattgaccgttaatttggaacgaatctagtcgttaaattttattgaatttgagtgacattatattttccataagatgtgtgcgatgtcctttcattaggacgaacgtttgggcaattttctcgaacgcattgtatagctgcccgcgataaaggttgtgatatgagagtaccctttatcaaaaaaaaagtattgctatcagttaggccatgttttgatgatgcctcaatatcaattgatggttcagctgtggcctagatatatatcgcttgattttttaatacttttgtatgtgttaaaatgtagattgataccagtctacgatttgtgataataagtaagctctgacgtgcgattagaacgcacgatagactgtagacgccgtacctgctttcatttcagtgagatacggaacatttgaatgaaaggggctagaaagagcccttgggacccaagtaatacaccaaacaatagcatgtacccaaataagtaatgacataacatgctcactttaaagatggcggctttgacttcatgtgtcacttaaaatatgacagatgacatcagagcagtcattttgagggtgattgtgccaaattgttggcttattggtagagatattattattaggtggcttatgttgtggttcttctacgtactgacagtccatttgtatttaagagtcctatataagtttggatatttttttaagattttgtaatgctcaaggtaagaaatttccttatatgattggaatggtatccaaaccagggcgcgataaagcaaataccaaatcggtacataaacaacaaaaaacgctcgttgtactacaaaaaccaatcctcttaattcaaatcattaatatcatcaatcctacttaaataaaccgcgtattttgttgtttataccgactttaacattgttatcttcatgtttaaggtaaaccacgagataaatcttgtaattccatcttaacacgatttttacaacgttattttctcagtaaaattgaagtttacaatgaacgtgaagaaaagctaagtgtatcatcccagtgaattggtatttgtcacttccaactctcagggttgcaaatgtgtggtggttcaagttggaccatctctgaggagtaaatgtttctgaaatgagtgtgatataataatgtatgaatgtttcctaaaaaaacgtagattccccctacaagattggagtattgtttttttttctaagattactataaggcatttattaatgtactttcacagtaccatctgtttccaatcagtttataccaaaaaacaaaaaaagcaaatatataaaaagtatatttcatggcggagatgccgtgagtgccattatttctattatgcgggctagtcagttggtaaaatatcagtatttatatcagaaagtacagtttttgttactatatatcaccctgtacgtcaatattcaaacttcaataaattgtgcggtgtttttgagttgaggcaactttgcagttaacatgttttccttcacactcgatactacattataatttatatcaacatttggaaaatatttgatattttgcaaatgactagccggtatttcgtacgtccaaggctgtacggccgttaccaatggttatggcccgtacaggattggtcgtatacaaggaattataacattgttaaaaaatttggttataacatcgttttttactacaagcaagttggcattgggtaaaaatagtgatggaaatttatgtaccaagtgtgctttaatttcttaaaaataaa

SEQ ID NO: 2423 - DNA, 3285 bp, Diabrotica virgifera
  SmartBlast Evalue=1E-152; Info="Mitogen-activated protein kinase ERK-A, putative n=1 Tax=Pediculus humanus corporis RepID= E0W1G6_PEDHC"
gtcggaatttaacatcagaggagtgtagaagtataacgatgggaagatagtgtgaaccaacgaaatcttttctttgtgcctaaagtagtcgtgtgaccggccgttttactctttattattcacctttaatttttcatttcaacagttcagtttaccgcggaggtttttttgtagtctcctttttgctaaacacaaaaatcaacaaatatggtcgaaaggataatagaagaaaatgaaaattacgattgcaacggcatcgtaatcaacaatggtgacagcatcgagggttgcaacgggggcgggggcaatggcagcgcctccgacagcggcgatcagatggacgctgaagctcgcgaacgagaactagttcgacgcaaggaggaagccaagagaaggaggcgtaagaagaagcgaaccggatcttcattggtgtcatcatgttttcaagatctgtataaattgaccggtgaagttctgggagaaggtgcttacgctagcgtccaaacttgcgtgagtctgttcaccgatcaagaatttgctgtgaaaattatcgacaaggtaccaggtcatgctagagctagagtttttagggaagtagagacgttccatcattgccaaggccaccccaatattattcagttaatggagtttttcgaggacgaagaaaagttttatttggtttttgaaaagatcaatggaggtcagctcctacgaaggattcaggagcacaagtttttcagcgaagccgcagcggcagagatagtgagagaagtggcctcagccttgcagtttatgcacgccaaagggattgcacacagggatttaaagcctgagaacattctttgtgtccacagggaccaactttgtccggtcaagatctgcgatttcgatttaggatctggcatccgcttccaatccagcgtttccagtcctttagcgacacctcagttattaacacctgtgggcagtgctgaatttatggcaccggaagtagtagaggcattcatcggagaatcggaaaccacatcatacgacaagaggtgcgatttatggtctttaggcgtcatcatgtacattctgctgtgcggatacccgccgttttacggaaagtgtggtagagactgtggctgggaacgaggcgataactgcaacgcctgtcaggaacttttgttccagagcatccaggaaggaagatacgatttcccggagccagagtggacgaccatatcggatgaagcaagggacctcatctcgagtctgctggtaaagaacgccagcgagcgcatcagcgcggaaaaggtgctgcagcacccgtggctgcagtgcgcaagtgatacagctgcgctaactaccccagctgtcatcaagaagaacaactctgcgttggaactgtcccagttcgcggagtccgcaatggctgtgaatagagtggtgcaacaacacttcagcatgaaattggactacttggagagaccgaacgtgtatcctgactgtcctgttcggtcaggaatgaagacgtgcgcatcggcgaagatgtttggcctgagcccgcccagcgagagcaacctcatgcgcaggcgtatcaaaggcggctcttgccagttcctcgtgccagcgcccacacccgccatacccagtccaagcggttgatgttgcccaactcgtcaaaatgttttaaaattttgaaaactaatttttttctttttcgattttttggcatttttacagagggttgattcggttatttgtgttgtgttctgttttatgatctacaacacaacaagttactgttgtttattttgtatttttctattgtaaagctggatggatcgaaatattgaggcatttcaaatattcgtaactgatgcatccgagtaccattagatttctcgccaagccatcaactcgatatttacccattaatacagttagttctcgatattaaacaaagttcacgaaacaaaatagatctgctaatataattttgacagtgactaagatgacagttctcttgttaccaacttaaagtctttggcgagaatcttaaaaaaaaacttaagcagctcaaaatatttcacactttttattgacaataataaatagatattatttattactaatttccgataaaaattagcaactgcgccaacctaatctttaagaattcacatattaattttcaaatcagaaaggtccacctactcgtagttcttgtgtttgaaataagcacatttttttctcagaagctctattttttcgttctattttttttttatttagtattacggatcagatttttcatatattatttatatttataagcaaaacaaccacttcaactaatttataggttaaacagaacattttctgttagttttgttgtgacacttaacgtgttagaggaattcattaaacgtggctgtgtgccataaatcaaaaggttataggaaaatacagaaaaagaggaaagaaagtatatatagctaccaaatattccaatatctgcaacattttcagaatcaaactgtttgactgagctcttatagcatgtagttatcgccaatactaataagtaagctttagctaaggtttacggtagtctaggagatataatatatttgatattgaaaattaatacttagagcagaacataaatgacactctacagacagataatcggcaagaatctagaaccagcaaatgacaaaattgcaaattagtgatcttcgtttatgttatcttttataataaataacgaaagaacgcgagaatataagtaatacatgtcatatgtcagttgtcatggcatatcacttgtttcattcgtcgcttatcaggatgtctgtctgttacaagatgagagatgtcgctgcggtagcagtttacaaaaaaaccattttaggtcttctaaatgttacaaataggggggatagaatgaaaattcttttttataacgaataaattgtggttgatacgaatgttcaaatctaatgattgtagaatactgtttaaagcgcaaaaaacgtttaacgagatcttctctagagcctcgtagattaaatcggctgaatcttcatcaacatcgttcgtctttgcagcgaagaatcgcgttactttgtaaaaatttgtaaatatttaggattaagaacaaataagaagtatttaataaagagcgaggctagtgtatgagattctgctgtagattaagttttgcttaataactttttaggttaagtacaaacacttgacaaggtggcaatgcgttcggttcaaaaaatgggaggg

SEQ ID NO: 2424 - DNA, 3286 bp, Diabrotica virgifera
  SmartBlast Evalue=1E-152; Info="Mitogen-activated protein kinase ERK-A, putative n=1 Tax=Pediculus humanus corporis RepID= E0W1G6_PEDHC"
gtcggaatttaacatcagaggagtgtagaagtataacgatgggaagatagtgtgaaccaacgaaatcttttctttgtgcctaaagtagtcgtgtgaccggccgttttactctttattattcacctttaatttttcatttcaacagttcagtttaccgcggaggtttttttgtagtctcctttttgctaaacacaaaaatcaacaaatatggtcgaaaggataatagaagaaaatgaaaattacgattgcaacggcatcgtaatcaacaatggtgacagcatcgagggttgcaacgggggcgggggcaatggcagcgcctccgacagcggcgatcagatggacgctgaagctcgcgaacgagaactagttcgacgcaaggaggaagccaagagaaggaggcgtaagaagaagcgaaccggatcttcattggtgtcatcatgttttcaagatctgtataaattgaccggtgaagttctgggagaaggtgcttacgctagcgtccaaacttgcgtgagtctgttcaccgatcaagaatttgctgtgaaaattatcgacaaggtaccaggtcatgctagagctagagtttttagggaagtagagacgttccatcattgccaaggccaccccaatattattcagttaatggagtttttcgaggacgaagaaaagttttatttggtttttgaaaagatcaatggaggtcagctcctacgaaggattcaggagcacaagtttttcagcgaagccgcagcggcagagatagtgagagaagtggcctcagccttgcagtttatgcacgccaaagggattgcacacagggatttaaagcctgagaacattctttgtgtccacagggaccaactttgtccggtcaagatctgcgatttcgatttaggatctggcatccgcttccaatccagcgtttccagtcctttagcgacacctcagttattaacacctgtgggcagtgctgaatttatggcaccggaagtagtagaggcattcatcggagaatcggaaaccacatcatacgacaagaggtgcgatttatggtctttaggcgtcatcatgtacattctgctgtgcggatacccgccgttttacggaaagtgtggtagagactgtggctgggaacgaggcgataactgcaacgcctgtcaggaacttttgttccagagcatccaggaaggaagatacgatttcccggagccagagtggacgaccatatcggatgaagcaagggacctcatctcgagtctgctggtaaagaacgccagcgagcgcatcagcgcggaaaaggtgctgcagcacccgtggctgcagtgcgcaagtgatacagctgcgctaactaccccagctgtcatcaagaagaacaactctgcgttggaactgtcccagttcgcggagtccgcaatggctgtgaatagagtggtgcaacaacacttcagcatgaaattggactacttggagagaccgaacgtgtatcctgactgtcctgttcggtcaggaatgaagacgtgcgcatcggcgaagatgtttggcctgagcccgcccagcgagagcaacctcatgcgcaggcgtatcaaaggcggctcttgccagttcctcgtgccagcgcccacacccgccatacccagtccaagcggttgatgttgcccaactcgtcaaaatgttttaaaattttgaaaactaatttttttctttttcgattttttggcatttttacagagggttgattcggttatttgtgttgtgttctgttttatgatctacaacacaacaagttactgttgtttattttgtatttttctattgtaaagctggatggatcgaaatattgaggcatttcaaatattcgtaactgatgcatccgagtaccattagatttctcgccaagccatcaactcgatatttacccattaatacagttagttctcgatattaaacaaagttcacgaaacaaaatagatctgctaatataattttgacagtgactaagatgacagttctcttgttaccaacttaaagtctttggcgagaatcttaaaaaaaaacttaagcagctcaaaatatttcacactttttattgacaataataaatagatattatttattactaatttccgataaaaattagcaactgcgccaacctaatctttaagaattcacatattaattttcaaatcagaaaggtccacctactcgtagttcttgtgtttgaaataagcacatttttttctcagaagctctattttttcgttctattttttttttatttagtattacggatcagatttttcatatattatttatatttataagcaaaacaaccacttcaactaatttataggttaaacagaacattttctgttagttttgttgtgacacttaacgtgttagaggaattcattaaacgtggctgtgtgccataaatcaaaaggttataggaaaatacagaaaaagaggaaagaaagtatatatagctaccaaatattccaatatctgcaacattttcagaatcaaactgtttgactgagctcttatagcatgtagttatcgccaatactaataagtaagctttagctaaggtttacggtagtctaggagatataatatatttgatattgaaaattaatacttagagcagaacataaatgacactctacagacagataatcggcaagaatctagaaccagcaaatgacaaaattgcaaattagtgatcttcgtttatgttatcttttataataaataacgaaagaacgcgagaatataagtaatacatgtcatatgtcagttgtcatggcatatcacttgtttcattcgtcgcttatcaggatgtctgtctgttacaagatgagagatgtcgctgcggtagcagtttacaaaaaaaccattttaggtcttctaaatgttaacaaataggggggatagaatgaaaattcttttttataacgaataaattgtggttgatacgaatgttcaaatctaatgattttagaatactgtttaaagcgcaaaaaacgtttaacgagatcttctctagagcctcgtagattagatcggctgaatcttcatcaacatcgttcgtctttgcagcgaagaatcgcgttactttgtaaaaatttgtaaatatttaggattaagaacaaataagaagtatttaataaagagcgaggctagtgtatgagattctgctgtagattaagttttgcttaataactttttaggttaagtacaaacacttgacaaggtggcaatgcgttcggttcaaaaaatgggaggg

SEQ ID NO: 2425 - DNA, 7931 bp, Diabrotica virgifera
  SmartBlast Evalue=0; Info=Protein lap4 n=1 Tax=Harpegnathos saltator RepID=E2BMS1_9HYME
gtgtagagcgacgtttcggtaatcgtagggaaaaggaaaacccgtgttttatcaaaaaaatgtacacaactcaaatctaaagtgattttctaagtgagtgttagttgtaaaattatgtgcgttgattagtggtagacatgtttcggtgcatacccatttttaaaggctgtaacaggcaagtggaaactgttgataagagacattgttctttaataaatgttcccgaggagatattaaggtattctaggagcctagaagagctacttttagactccaataggatacaagttcttccgaagaacttctttagacttcatagactccgcaaactcggtctaagcgataatgaaatcaacaacttgccgccagatattcaaaatttcgaacatctcgtggaattggacgtctccagaaatgatatccctgacatccccgaaagcatcggccagctgcgttcccttagagtcgcagacttcagttccaatcccatacctcgtcttccgccggccttcatccacctcaagtcactcagcgtgttgggcctcaacgatatgtcgctcacgtcgctgcctcaggatttcggccaacttacgtccctcacgtcgctcgaacttagagaaaatctgctcaaggaattgcccgcttctctgtcgaagttgaccaacctcgaaagacttgatttaggcgataatgaaattgaagaattgccatcacacataggaaaactgccagcacttcaagaactatggttagaccacaatcaattacaaagtctccctccagaaataggccaactgagcaacctaacatgcctagatctatccgaaaatcgcctagagtatctaccagaagatattgcgggcttggaaagcctaactgacttacatttatcccaaaatgtattagaaactctgcccgacggcataggaaagttagaaaaacttaccatcttgaaggtagaccaaaatagactaacatctttaaattctaacgtaggctattgccacaatctacaagaactgatcctcacagagaactttttaagcgaattacccgtagaagttggaaaattaatcaaactgacgaacttgaacgtcgataggaatagtcttactttggtacccgaagacataggcaatctctgcgagctaggcgtgttgagtttgagagataacagacttactatgttgccggacactctcggcaactgccgaagactccacgtgttggacgtttctggaaacagactgccttatctaccctatacgcttctacagttgagcctgaaggctgtttggctgagcgaaaaccaggcacaatctctactcaccttccaaactgacactgacccggatacgggtaagaccgtactgacgtgtttcctgttgccgcaacaagaataccaacctacgatagatggcgctgcgaccgaggacgaagacgacgacgactggcgggaacacgaagccagccgaacacactccgtcaaattcaccgatccgcaagagaaggacaatcgagagactccatttgtcaggcacaacactcctcatccgaaagagttaaaggctaaggcccataaacttttcggaaaaggtcaaaattcgctagaggaaagcgaacaacattccaacgacaacagtgcaaacacgcccgaggccctcaatctacatgtaaagcaggttcctgaagcgccacagataattgaacctcctccaactcggaccgactctgcagtaggtaatggacaagtggaggaaagtgagcatagccatgatgaacatgatgaagacacggatgaggaccacgtgactcttcgccgagtcggattcgtcgggggcgtgtcttcgtcgtcggacgaacgagactcgtcgtcgaaaccgagtcgactgcacaggcgcgacaccccccaccatctcaagaacaaacgaatcacgtcggtgaccatcgacaaagacaaggtggcttcgattattgcacaggcccttaaaaggaaagaagacgaaagtgacaggacgagtggcgtttcgacccctccaggctcagtctccggaggcgatcgtagttgttcttcaagtcaagctggtgattcagatgcagcagtagaactcagagaagaaaaatatgaaatccacattgaacgctcccaaactggattagggctatcgatagcaggcgggcacggctcaactcctttcaagggcgatgacgaaggcatcttcatttccagagtaaccgaaggtggtccggccgatctagcaggattaagagtaggagataaagtcataaccgtcaatagagtcaacgtcgttgacgtcagtcactacgatgcagtagaagtcttgaaagcatcaggtcctgtgttgattctagaagtaacccgagaagttaccaggttggttaagcctccgaacacgatggtagcaactaagcacagtccaacaccttctcttacgaatacgttgaacaaaagcgcaataccccctccattgcctcctcaattggaagaagaggtgcccttacaaaaagtattagtccatacaacattaattagagactcaaaaggtctcggttttagtatagcaggaggcaaaggctcccaaccctttaaggctgacaatgacgccatctacatatcacgcattaccgacggaggagtcgccgatagagacgcgaagctctctgtaggcgataaagtaatatcaataaacggcgtcgacttaacgggggcctcccacgatcaaaccgtaagcatgcttacgggattggaaagattcgtgagactggtggttgagagggaagtgcctctggagaaaaacggcgacgaggctagtccgggacctcagcaaagtccgaggttgtttggattgcccaagccgtatacgggactgtatgctgctaatagttacatggctaaccgacctggttacgcggggtatcgaagatcgatggaacttgataaaaagacttctgaatctccagagccagtaaagcctccaacgcccacccaggtgttacaagaaacgcccaaaacaaacggaatagaccacagctcgacgagagaagtccccaagccagcgccgcgtcgtatcaactctacttccagcgattcgtccacggcaccaatcaatcctacagctcaaaccgcttccagcgccaagccacaaaccaaccacaagaaaacctcttcgaattcctccctcgaggatgacacccaggacgttacgttaagtaaattaggaggatccttaggtttcagtattataggaggtacagatcattccagtattccattcggatccaaggaaccgggaattttcatctcacatttggttcctggtggtatagctgctaaaagtggtaaactcaaagttggtgacagaattttaaaagtcaatggcacagacgtcactcatgctacccatcaagaagctgttatggagcttctaagacctggagatcaaatttcgcttacaattaggcacgatccattgcccgaaggatatcaggaattgtttattgaaaaaacagataacgaaaaacttggcatgcacataaagggcggtcttcagggtcagcgaggtaatcctctggacagatcggacgaaggtattttcgtatcgaaaatcaactctgtgggggcagcaaggcgagatggaagactcaaagctggcatgagattattagaagttaatggaaagtcattattaggtgcaactcatcaagaagctgttaatgctttaagagcttgcggaaacatgattcacatggtagtttgcaaaggatatgataaaggtgatatagacagagcagtccatgagggcagattgacaagaggagggtccgttagcagtcgttcgcagagcgttagctctttagacgtaccagaagacgacctacaggacttgaaagtaaaatctgaattgcttcagttggaaaaggatgaagttgagaagcgattacagccgatccatcaagaagaagaggaattttctttagtagaagcaaaaccaccttctcctgcggataaggttttagacgtggtaagagcagtagagactctagcacacggtccgatggaaaattcagttcctccaaagtctcctaattcggaactaaaaactactacgatagttatgagcaaacatacgctagcacctcaacctaccactgacgagctaatgcatgtctctacgctaccgaaaacgacacagcctaaagtggatgtggaaacagaaagcaaaagtcactctattgacaatgaacagcatgcttccgtcactaaagatactgataacgattctttacaaaacgtgatcccacctccttccatctattctgaatgtgaacctaacaataatgtatctaatatgtactttaacaatcaacatgtacctaccaatgtaacatactcgatacctcaaccggtagttactagtgactttaattccaacacgttttcgttcaacgttccacctaatgagaatcagttccatattaacgtctacaacactatacctcagctacaaccacaagcatttagatatgattacgttcctaattttactgatataccaatcgttccttctcctgattctagtcttacatatatgcttgaagattctcaaattatcaaagttccaccgccccctcctatggacttcgacgattattccataaaatcggattcacctcctcctttaccatccacttcccctccacccctgccaaaatctccactacctacagaagacgacgacattgtatccacaaccgaaaaagttctggaaacttcagttcaagtctcaacaactacaaccataaatccaactaataaacatcatgtaactattacagaagaagaagaagttacagagtatacagaaccacctataggagcgctgaagaaaattgtagccagcttaagagacgacatcgtagctcataccactgttccaggagatgtagaggtttgtgttaccgctccaacagtagtgcaaacacaagtcagtagaacagttgatttgtcttctccaacaatagaaaatactgataaacaaatcagtcaactttgtacaaatatacacgatgctttgcaggcagctactaatatagatcgaacaatagaacaaactaacagaatgtttgtaactagtttgaccgaaacagatcggattatttcttctaaaaaacatgtatcatatctaactgatgactcagacaacatcgaagtatctatcatcccttcagaccaaggaatgttaaggaaaccaaaagatgatcaattacagccaaacaacgaatcagaatcgatcaataggaaatttgtaagaagttgggtagaaacggaagaaaggacgtcttcacttccagcaagaaaacttgtcactagcttgataatcgatacaccctcaaacgaaaagcaacaagtgcaatattcccaaatcatagcacctacaccattcaaaataacaaaacaaatttcccaaacatctgaacctcgttcacctaccactccaaccagacgaattgctcgacctcaagtccctcccccaccagtacccatcgctaaactagcttcacctccccaaattcaagccaagaaaattccacccccagtacctgccaagatttctaaattgaaccctgctcgcagtgaaaatgatttattagaccctgttggttctgtcaaaaaaagcaaccagtccgctagacctgtttcttttgtattttctgataaaaaggatttgggattcgttagcggaaatttagggaagtatggtactgtggcaaagcctccacaatctccccaacacaatgctcccaagcagtcggtgagcgatagaaagaaatttttcgaatcggcgatggaagagagccaaaaaccttctaaaccagaaaaagtctttagctatcttagtgcggacgaattagagaagttaaaagcagaagaagagagaaaaattgcaacactttcagcttccgatattaattccttacattctttacacgaattggatcattctgatggagaatcagctgaatcacaacgttcaaggccttcgagtactatcggtatagtacgtacagcaaaggcagaacgacgtctgagagatcaacttcgagaagaaggacttttgaccgacgaagacgatcctcccctctcaccagccgaagaacgcgccctccgagccgaaaagagagctgcctggagagctgccagactcaagtccctcgaacacgatgccatgcaagcgcagatggtcatcaagagtatgacggatattgttagatccggggaagtacccatgcctataacgacagaaattagtgatacagacgggcttccacaaacaaatgagttacgtccctcgagtgccgatttccccaagctggccgtgaggacgaaacccggcaacacgaccgttagagagagcgagaaggtgttgggagaaacgattacgagaaagacggaggaatacatcgacgaaaacggcgagaaacgagtgagaactgtggagtacgtagagaagctgattgagagagaggtataagaaagcaaaaattgatggcttatgaaatcagcatgactctcttttgtgcaccattctggtggaacaaatccaagaaaaaatcatatcactagaattaacgaaatacgacgacgttctgaagccgcagtcccttaaactagaccaggacgaaaacgatatcgaagaggaagaatcagtatccgaagtatctgaacctcccactcctacgacggatcaggagaaaaccctcgaatccgccgatggagccacgaacaaaagacgaagacggaaaagatccaaaaagggaaaacactagtgaataaaagcgaacatttttaatctcttgtaaaaagtagaatttttttatctgtaagttgagaattggcaacattggaaattttgaaaaatgcactacttactttctattcctacggagtgagtttgatgtatggaacgcatcaattatcttggaatcatcttgtacgatttttatagatttttgtttgtaaacggcttgtaatgcgaccgacattatagtggtatttgcattgttgtaggatcttccgattttctggaaatctaaggaactttcttattttaaatggtataccctatatatattgtgccttttgaagtcattaagaaatactcattatttttcatccaatgctccctatacctaaatgtcataattacggagttattactacatttaaattatctttgccgaagttaatacatttagatgaataagatgatatgaaaatataattggtatttcttaattacttcaaaaggcaaaaatatacagggtgatctattcgaaataagaaatttcgttaatttccagaaagcggaagatctggcgacaatgtaaataatcaatataatattggccgcattataagacccttacacacaaaaatcgtgcaagccgtttccgagataattgagccgttccataattaaaactcattttgtatattttaaaaattgccgtgttgtgaactcgtcagtctgtattttctcatgaattgtttcaccagggtggaagggatttttaaatgttaaaattatatttaaaatatatttctaaattatttttattgtacaaaatatttatagatcttaaatatttttattacgatgaatttatcgatgtatgtataaacaactttccaaggctttttttatattgtataatggagactgtgtagccgccatcttctattttattgtttattcattactaactatattatgtttcttgtatgtggaggacggctgcgcagatgttgatatagcgaatgggacaatatattatatacatgtaactaatataatacgaaagtgctttggaaaaaacaattccacgtttttaataaatgactatatatt

SEQ ID NO: 2426 - DNA, 6308 bp, Diabrotica virgifera
  SmartBlast Evalue=0; Info=Protein lap4 n=1 Tax=Harpegnathos saltator RepID=E2BMS1_9HYME
gtgtagagcgacgtttcggtaatcgtagggaaaaggaaaacccgtgttttatcaaaaaaatgtacacaactcaaatctaaagtgattttctaagtgagtgttagttgtaaaattatgtgcgttgattagtggtagacatgtttcggtgcatacccatttttaaaggctgtaacaggcaagtggaaactgttgataagagacattgttctttaataaatgttcccgaggagatattaaggtattctaggagcctagaagagctacttttagactccaataggatacaagttcttccgaagaacttctttagacttcatagactccgcaaactcggtctaagcgataatgaaatcaacaacttgccgccagatattcaaaatttcgaacatctcgtggaattggacgtctccagaaatgatatccctgacatccccgaaagcatcggccagctgcgttcccttagagtcgcagacttcagttccaatcccatacctcgtcttccgccggccttcatccacctcaagtcactcagcgtgttgggcctcaacgatatgtcgctcacgtcgctgcctcaggatttcggccaacttacgtccctcacgtcgctcgaacttagagaaaatctgctcaaggaattgcccgcttctctgtcgaagttgaccaacctcgaaagacttgatttaggcgataatgaaattgaagaattgccatcacacataggaaaactgccagcacttcaagaactatggttagaccacaatcaattacaaagtctccctccagaaataggccaactgagcaacctaacatgcctagatctatccgaaaatcgcctagagtatctaccagaagatattgcgggcttggaaagcctaactgacttacatttatcccaaaatgtattagaaactctgcccgacggcataggaaagttagaaaaacttaccatcttgaaggtagaccaaaatagactaacatctttaaattctaacgtaggctattgccacaatctacaagaactgatcctcacagagaactttttaagcgaattacccgtagaagttggaaaattaatcaaactgacgaacttgaacgtcgataggaatagtcttactttggtacccgaagacataggcaatctctgcgagctaggcgtgttgagtttgagagataacagacttactatgttgccggacactctcggcaactgccgaagactccacgtgttggacgtttctggaaacagactgccttatctaccctatacgcttctacagttgagcctgaaggctgtttggctgagcgaaaaccaggcacaatctctactcaccttccaaactgacactgacccggatacgggtaagaccgtactgacgtgtttcctgttgccgcaacaagaataccaacctacgatagatggcgctgcgaccgaggacgaagacgacgacgactggcgggaacacgaagccagccgaacacactccgtcaaattcaccgatccgcaagagaaggacaatcgagagactccatttgtcaggcacaacactcctcatccgaaagagttaaaggctaaggcccataaacttttcggaaaaggtcaaaattcgctagaggaaagcgaacaacattccaacgacaacagtgcaaacacgcccgaggccctcaatctacatgtaaagcaggttcctgaagcgccacagataattgaacctcctccaactcggaccgactctgcagtaggtaatggacaagtggaggaaagtgagcatagccatgatgaacatgatgaagacacggatgaggaccacgtgactcttcgccgagtcggattcgtcgggggcgtgtcttcgtcgtcggacgaacgagactcgtcgtcgaaaccgagtcgactgcacaggcgcgacaccccccaccatctcaagaacaaacgaatcacgtcggtgaccatcgacaaagacaaggtggcttcgattattgcacaggcccttaaaaggaaagaagacgaaagtgacaggacgagtggcgtttcgacccctccaggctcagtctccggaggcgatcgtagttgttcttcaagtcaagctggtgattcagatgcagcagtagaactcagagaagaaaaatatgaaatccacattgaacgctcccaaactggattagggctatcgatagcaggcgggcacggctcaactcctttcaagggcgatgacgaaggcatcttcatttccagagtaaccgaaggtggtccggccgatctagcaggattaagagtaggagataaagtcataaccgtcaatagagtcaacgtcgttgacgtcagtcactacgatgcagtagaagtcttgaaagcatcaggtcctgtgttgattctagaagtaacccgagaagttaccaggttggttaagcctccgaacacgatggtagcaactaagcacagtccaacaccttctcttacgaatacgttgaacaaaagcgcaataccccctccattgcctcctcaattggaagaagaggtgcccttacaaaaagtattagtccatacaacattaattagagactcaaaaggtctcggttttagtatagcaggaggcaaaggctcccaaccctttaaggctgacaatgacgccatctacatatcacgcattaccgacggaggagtcgccgatagagacgcgaagctctctgtaggcgataaagtaatatcaataaacggcgtcgacttaacgggggcctcccacgatcaaaccgtaagcatgcttacgggattggaaagattcgtgagactggtggttgagagggaagtgcctctggagaaaaacggcgacgaggctagtccgggacctcagcaaagtccgaggttgtttggattgcccaagccgtatacgggactgtatgctgctaatagttacatggctaaccgacctggttacgcggggtatcgaagatcgatggaacttgataaaaagacttctgaatctccagagccagtaaagcctccaacgcccacccaggtgttacaagaaacgcccaaaacaaacggaatagaccacagctcgacgagagaagtccccaagccagcgccgcgtcgtatcaactctacttccagcgattcgtccacggcaccaatcaatcctacagctcaaaccgcttccagcgccaagccacaaaccaaccacaagaaaacctcttcgaattcctccctcgaggatgacacccaggacgttacgttaagtaaattaggaggatccttaggtttcagtattataggaggtacagatcattccagtattccattcggatccaaggaaccgggaattttcatctcacatttggttcctggtggtatagctgctaaaagtggtaaactcaaagttggtgacagaattttaaaagtcaatggcacagacgtcactcatgctacccatcaagaagctgttatggagcttctaagacctggagatcaaatttcgcttacaattaggcacgatccattgcccgaaggatatcaggaattgtttattgaaaaaacagataacgaaaaacttggcatgcacataaagggcggtcttcagggtcagcgaggtaatcctctggacagatcggacgaaggtattttcgtatcgaaaatcaactctgtgggggcagcaaggcgagatggaagactcaaagctggcatgagattattagaagttaatggaaagtcattattaggtgcaactcatcaagaagctgttaatgctttaagagcttgcggaaacatgattcacatggtagtttgcaaaggatatgataaaggtgatatagacagagcagtccatgagggcagattgacaagaggagggtccgttagcagtcgttcgcagagcgttagctctttagacgtaccagaagacgacctacaggacttgaaagtaaaatctgaattgcttcagttggaaaaggatgaagttgagaagcgattacagccgatccatcaagaagaagaggaattttctttagtagaagcaaaaccaccttctcctgcggataaggttttagacgtggtaagagcagtagagactctagcacacggtccgatggaaaattcagttcctccaaagtctcctaattcggaactaaaaactactacgatagttatgagcaaacatacgctagcacctcaacctaccactcctccacaatctccccaacacaatgctcccaagcagtcggtgagcgatagaaagaaatttttcgaatcggcgatggaagagagccaaaaaccttctaaaccagaaaaagtctttagctatcttagtgcggacgaattagagaagttaaaagcagaagaagagagaaaaattgcaacactttcagcttccgatattaattccttacattctttacacgaattggatcattctgatggagaatcagctgaatcacaacgttcaaggccttcgagtactatcggtatagtacgtacagcaaaggcagaacgacgtctgagagatcaacttcgagaagaaggacttttgaccgacgaagacgatcctcccctctcaccagccgaagaacgcgccctccgagccgaaaagagagctgcctggagagctgccagactcaagtccctcgaacacgatgccatgcaagcgcagatggtcatcaagagtatgacggatattgttagatccggggaagtacccatgcctataacgacagaaattagtgatacagacgggcttccacaaacaaatgagttacgtccctcgagtgccgatttccccaagctggccgtgaggacgaaacccggcaacacgaccgttagagagagcgagaaggtgttgggagaaacgattacgagaaagacggaggaatacatcgacgaaaacggcgagaaacgagtgagaactgtggagtacgtagagaagctgattgagagagaggtataagaaagcaaaaattgatggcttatgaaatcagcatgactctcttttgtgcaccattctggtggaacaaatccaagaaaaaatcatatcactagaattaacgaaatacgacgacgttctgaagccgcagtcccttaaactagaccaggacgaaaacgatatcgaagaggaagaatcagtatccgaagtatctgaacctcccactcctacgacggatcaggagaaaaccctcgaatccgccgatggagccacgaacaaaagacgaagacggaaaagatccaaaaagggaaaacactagtgaataaaagcgaacatttttaatctcttgtaaaaagtagaatttttttatctgtaagttgagaattggcaacattggaaattttgaaaaatgcactacttactttctattcctacggagtgagtttgatgtatggaacgcatcaattatcttggaatcatcttgtacgatttttatagatttttgtttgtaaacggcttgtaatgcgaccgacattatagtggtatttgcattgttgtaggatcttccgattttctggaaatctaaggaactttcttattttaaatggtataccctatatatattgtgccttttgaagtcattaagaaatactcattatttttcatccaatgctccctatacctaaatgtcataattacggagttattactacatttaaattatctttgccgaagttaatacatttagatgaataagatgatatgaaaatataattggtatttcttaattacttcaaaaggcaaaaatatacagggtgatctattcgaaataagaaatttcgttaatttccagaaagcggaagatctggcgacaatgtaaataatcaatataatattggccgcattataagacccttacacacaaaaatcgtgcaagccgtttccgagataattgagccgttccataattaaaactcattttgtatattttaaaaattgccgtgttgtgaactcgtcagtctgtattttctcatgaattgtttcaccagggtggaagggatttttaaatgttaaaattatatttaaaatatatttctaaattatttttattgtacaaaatatttatagatcttaaatatttttattacgatgaatttatcgatgtatgtataaacaactttccaaggctttttttatattgtataatggagactgtgtagccgccatcttctattttattgtttattcattactaactatattatgtttcttgtatgtggaggacggctgcgcagatgttgatatagcgaatgggacaatatattatatacatgtaactaatataatacgaaagtgctttggaaaaaacaattccacgtttttaataaatgactatatatt

SEQ ID NO: 2427 - DNA, 5957 bp, Diabrotica virgifera
  SmartBlast Evalue=1E-111; Info="Leucine-rich repeat-containing protein 1, lrrc1/lap4, putative n=1 Tax=Pediculus humanus corporis RepID=E0VE14_PEDHC"
ccctcgcccgctcccaagaactaaaacctcccccacacccgatcatcaagaacaacaacaaaaaagcatctgtcaacaacaacaacaatacgattctcaaatattcagctggtgattcagatgcagcagtagaactcagagaagaaaaatatgaaatccacattgaacgctcccaaactggattagggctatcgatagcaggcgggcacggctcaactcctttcaagggcgatgacgaaggcatcttcatttccagagtaaccgaaggtggtccggccgatctagcaggattaagagtaggagataaagtcataaccgtcaatagagtcaacgtcgttgacgtcagtcactacgatgcagtagaagtcttgaaagcatcaggtcctgtgttgattctagaagtaacccgagaagttaccaggttggttaagcctccgaacacgatggtagcaactaagcacagtccaacaccttctcttacgaatacgttgaacaaaagcgcaataccccctccattgcctcctcaattggaagaagaggtgcccttacaaaaagtattagtccatacaacattaattagagactcaaaaggtctcggttttagtatagcaggaggcaaaggctcccaaccctttaaggctgacaatgacgccatctacatatcacgcattaccgacggaggagtcgccgatagagacgcgaagctctctgtaggcgataaagtaatatcaataaacggcgtcgacttaacgggggcctcccacgatcaaaccgtaagcatgcttacgggattggaaagattcgtgagactggtggttgagagggaagtgcctctggagaaaaacggcgacgaggctagtccgggacctcagcaaagtccgaggttgtttggattgcccaagccgtatacgggactgtatgctgctaatagttacatggctaaccgacctggttacgcggggtatcgaagatcgatggaacttgataaaaagacttctgaatctccagagccagtaaagcctccaacgcccacccaggtgttacaagaaacgcccaaaacaaacggaatagaccacagctcgacgagagaagtccccaagccagcgccgcgtcgtatcaactctacttccagcgattcgtccacggcaccaatcaatcctacagctcaaaccgcttccagcgccaagccacaaaccaaccacaagaaaacctcttcgaattcctccctcgaggatgacacccaggacgttacgttaagtaaattaggaggatccttaggtttcagtattataggaggtacagatcattccagtattccattcggatccaaggaaccgggaattttcatctcacatttggttcctggtggtatagctgctaaaagtggtaaactcaaagttggtgacagaattttaaaagtcaatggcacagacgtcactcatgctacccatcaagaagctgttatggagcttctaagacctggagatcaaatttcgcttacaattaggcacgatccattgcccgaaggatatcaggaattgtttattgaaaaaacagataacgaaaaacttggcatgcacataaagggcggtcttcagggtcagcgaggtaatcctctggacagatcggacgaaggtattttcgtatcgaaaatcaactctgtgggggcagcaaggcgagatggaagactcaaagctggcatgagattattagaagttaatggaaagtcattattaggtgcaactcatcaagaagctgttaatgctttaagagcttgcggaaacatgattcacatggtagtttgcaaaggatatgataaaggtgatatagacagagcagtccatgagggcagattgacaagaggagggtccgttagcagtcgttcgcagagcgttagctctttagacgtaccagaagacgacctacaggacttgaaagtaaaatctgaattgcttcagttggaaaaggatgaagttgagaagcgattacagccgatccatcaagaagaagaggaattttctttagtagaagcaaaaccaccttctcctgcggataaggttttagacgtggtaagagcagtagagactctagcacacggtccgatggaaaattcagttcctccaaagtctcctaattcggaactaaaaactactacgatagttatgagcaaacatacgctagcacctcaacctaccactgacgagctaatgcatgtctctacgctaccgaaaacgacacagcctaaagtggatgtggaaacagaaagcaaaagtcactctattgacaatgaacagcatgcttccgtcactaaagatactgataacgattctttacaaaacgtgatcccacctccttccatctattctgaatgtgaacctaacaataatgtatctaatatgtactttaacaatcaacatgtacctaccaatgtaacatactcgatacctcaaccggtagttactagtgactttaattccaacacgttttcgttcaacgttccacctaatgagaatcagttccatattaacgtctacaacactatacctcagctacaaccacaagcatttagatatgattacgttcctaattttactgatataccaatcgttccttctcctgattctagtcttacatatatgcttgaagattctcaaattatcaaagttccaccgccccctcctatggacttcgacgattattccataaaatcggattcacctcctcctttaccatccacttcccctccacccctgccaaaatctccactacctacagaagacgacgacattgtatccacaaccgaaaaagttctggaaacttcagttcaagtctcaacaactacaaccataaatccaactaataaacatcatgtaactattacagaagaagaagaagttacagagtatacagaaccacctataggagcgctgaagaaaattgtagccagcttaagagacgacatcgtagctcataccactgttccaggagatgtagaggtttgtgttaccgctccaacagtagtgcaaacacaagtcagtagaacagttgatttgtcttctccaacaatagaaaatactgataaacaaatcagtcaactttgtacaaatatacacgatgctttgcaggcagctactaatatagatcgaacaatagaacaaactaacagaatgtttgtaactagtttgaccgaaacagatcggattatttcttctaaaaaacatgtatcatatctaactgatgactcagacaacatcgaagtatctatcatcccttcagaccaaggaatgttaaggaaaccaaaagatgatcaattacagccaaacaacgaatcagaatcgatcaataggaaatttgtaagaagttgggtagaaacggaagaaaggacgtcttcacttccagcaagaaaacttgtcactagcttgataatcgatacaccctcaaacgaaaagcaacaagtgcaatattcccaaatcatagcacctacaccattcaaaataacaaaacaaatttcccaaacatctgaacctcgttcacctaccactccaaccagacgaattgctcgacctcaagtccctcccccaccagtacccatcgctaaactagcttcacctccccaaattcaagccaagaaaattccacccccagtacctgccaagatttctaaattgaaccctgctcgcagtgaaaatgatttattagaccctgttggttctgtcaaaaaaagcaaccagtccgctagacctgtttcttttgtattttctgataaaaaggatttgggattcgttagcggaaatttagggaagtatggtactgtggcaaagcctccacaatctccccaacacaatgctcccaagcagtcggtgagcgatagaaagaaatttttcgaatcggcgatggaagagagccaaaaaccttctaaaccagaaaaagtctttagctatcttagtgcggacgaattagagaagttaaaagcagaagaagagagaaaaattgcaacactttcagcttccgatattaattccttacattctttacacgaattggatcattctgatggagaatcagctgaatcacaacgttcaaggccttcgagtactatcggtatagtacgtacagcaaaggcagaacgacgtctgagagatcaacttcgagaagaaggacttttgaccgacgaagacgatcctcccctctcaccagccgaagaacgcgccctccgagccgaaaagagagctgcctggagagctgccagactcaagtccctcgaacacgatgccatgcaagcgcagatggtcatcaagagtatgacggatattgttagatccggggaagtacccatgcctataacgacagaaattagtgatacagacgggcttccacaaacaaatgagttacgtccctcgagtgccgatttccccaagctggccgtgaggacgaaacccggcaacacgaccgttagagagagcgagaaggtgttgggagaaacgattacgagaaagacggaggaatacatcgacgaaaacggcgagaaacgagtgagaactgtggagtacgtagagaagctgattgagagagaggtataagaaagcaaaaattgatggcttatgaaatcagcatgactctcttttgtgcaccattctggtggaacaaatccaagaaaaaatcatatcactagaattaacgaaatacgacgacgttctgaagccgcagtcccttaaactagaccaggacgaaaacgatatcgaagaggaagaatcagtatccgaagtatctgaacctcccactcctacgacggatcaggagaaaaccctcgaatccgccgatggagccacgaacaaaagacgaagacggaaaagatccaaaaagggaaaacactagtgaataaaagcgaacatttttaatctcttgtaaaaagtagaatttttttatctgtaagttgagaattggcaacattggaaattttgaaaaatgcactacttactttctattcctacggagtgagtttgatgtatggaacgcatcaattatcttggaatcatcttgtacgatttttatagatttttgtttgtaaacggcttgtaatgcgaccgacattatagtggtatttgcattgttgtaggatcttccgattttctggaaatctaaggaactttcttattttaaatggtataccctatatatattgtgccttttgaagtcattaagaaatactcattatttttcatccaatgctccctatacctaaatgtcataattacggagttattactacatttaaattatctttgccgaagttaatacatttagatgaataagatgatatgaaaatataattggtatttcttaattacttcaaaaggcaaaaatatacagggtgatctattcgaaataagaaatttcgttaatttccagaaagcggaagatctggcgacaatgtaaataatcaatataatattggccgcattataagacccttacacacaaaaatcgtgcaagccgtttccgagataattgagccgttccataattaaaactcattttgtatattttaaaaattgccgtgttgtgaactcgtcagtctgtattttctcatgaattgtttcaccagggtggaagggatttttaaatgttaaaattatatttaaaatatatttctaaattatttttattgtacaaaatatttatagatcttaaatatttttattacgatgaatttatcgatgtatgtataaacaactttccaaggctttttttatattgtataatggagactgtgtagccgccatcttctattttattgtttattcattactaactatattatgtttcttgtatgtggaggacggctgcgcagatgttgatatagcgaatgggacaatatattatatacatgtaactaatataatacgaaagtgctttggaaaaaacaattccacgtttttaataaatgactatatatt

SEQ ID NO: 2428 - DNA, 4334 bp, Diabrotica virgifera
  SmartBlast Evalue=1E-118; Info="Leucine-rich repeat-containing protein 1, lrrc1/lap4, putative n=1 Tax=Pediculus humanus corporis RepID=E0VE14_PEDHC"
ccctcgcccgctcccaagaactaaaacctcccccacacccgatcatcaagaacaacaacaaaaaagcatctgtcaacaacaacaacaatacgattctcaaatattcagctggtgattcagatgcagcagtagaactcagagaagaaaaatatgaaatccacattgaacgctcccaaactggattagggctatcgatagcaggcgggcacggctcaactcctttcaagggcgatgacgaaggcatcttcatttccagagtaaccgaaggtggtccggccgatctagcaggattaagagtaggagataaagtcataaccgtcaatagagtcaacgtcgttgacgtcagtcactacgatgcagtagaagtcttgaaagcatcaggtcctgtgttgattctagaagtaacccgagaagttaccaggttggttaagcctccgaacacgatggtagcaactaagcacagtccaacaccttctcttacgaatacgttgaacaaaagcgcaataccccctccattgcctcctcaattggaagaagaggtgcccttacaaaaagtattagtccatacaacattaattagagactcaaaaggtctcggttttagtatagcaggaggcaaaggctcccaaccctttaaggctgacaatgacgccatctacatatcacgcattaccgacggaggagtcgccgatagagacgcgaagctctctgtaggcgataaagtaatatcaataaacggcgtcgacttaacgggggcctcccacgatcaaaccgtaagcatgcttacgggattggaaagattcgtgagactggtggttgagagggaagtgcctctggagaaaaacggcgacgaggctagtccgggacctcagcaaagtccgaggttgtttggattgcccaagccgtatacgggactgtatgctgctaatagttacatggctaaccgacctggttacgcggggtatcgaagatcgatggaacttgataaaaagacttctgaatctccagagccagtaaagcctccaacgcccacccaggtgttacaagaaacgcccaaaacaaacggaatagaccacagctcgacgagagaagtccccaagccagcgccgcgtcgtatcaactctacttccagcgattcgtccacggcaccaatcaatcctacagctcaaaccgcttccagcgccaagccacaaaccaaccacaagaaaacctcttcgaattcctccctcgaggatgacacccaggacgttacgttaagtaaattaggaggatccttaggtttcagtattataggaggtacagatcattccagtattccattcggatccaaggaaccgggaattttcatctcacatttggttcctggtggtatagctgctaaaagtggtaaactcaaagttggtgacagaattttaaaagtcaatggcacagacgtcactcatgctacccatcaagaagctgttatggagcttctaagacctggagatcaaatttcgcttacaattaggcacgatccattgcccgaaggatatcaggaattgtttattgaaaaaacagataacgaaaaacttggcatgcacataaagggcggtcttcagggtcagcgaggtaatcctctggacagatcggacgaaggtattttcgtatcgaaaatcaactctgtgggggcagcaaggcgagatggaagactcaaagctggcatgagattattagaagttaatggaaagtcattattaggtgcaactcatcaagaagctgttaatgctttaagagcttgcggaaacatgattcacatggtagtttgcaaaggatatgataaaggtgatatagacagagcagtccatgagggcagattgacaagaggagggtccgttagcagtcgttcgcagagcgttagctctttagacgtaccagaagacgacctacaggacttgaaagtaaaatctgaattgcttcagttggaaaaggatgaagttgagaagcgattacagccgatccatcaagaagaagaggaattttctttagtagaagcaaaaccaccttctcctgcggataaggttttagacgtggtaagagcagtagagactctagcacacggtccgatggaaaattcagttcctccaaagtctcctaattcggaactaaaaactactacgatagttatgagcaaacatacgctagcacctcaacctaccactcctccacaatctccccaacacaatgctcccaagcagtcggtgagcgatagaaagaaatttttcgaatcggcgatggaagagagccaaaaaccttctaaaccagaaaaagtctttagctatcttagtgcggacgaattagagaagttaaaagcagaagaagagagaaaaattgcaacactttcagcttccgatattaattccttacattctttacacgaattggatcattctgatggagaatcagctgaatcacaacgttcaaggccttcgagtactatcggtatagtacgtacagcaaaggcagaacgacgtctgagagatcaacttcgagaagaaggacttttgaccgacgaagacgatcctcccctctcaccagccgaagaacgcgccctccgagccgaaaagagagctgcctggagagctgccagactcaagtccctcgaacacgatgccatgcaagcgcagatggtcatcaagagtatgacggatattgttagatccggggaagtacccatgcctataacgacagaaattagtgatacagacgggcttccacaaacaaatgagttacgtccctcgagtgccgatttccccaagctggccgtgaggacgaaacccggcaacacgaccgttagagagagcgagaaggtgttgggagaaacgattacgagaaagacggaggaatacatcgacgaaaacggcgagaaacgagtgagaactgtggagtacgtagagaagctgattgagagagaggtataagaaagcaaaaattgatggcttatgaaatcagcatgactctcttttgtgcaccattctggtggaacaaatccaagaaaaaatcatatcactagaattaacgaaatacgacgacgttctgaagccgcagtcccttaaactagaccaggacgaaaacgatatcgaagaggaagaatcagtatccgaagtatctgaacctcccactcctacgacggatcaggagaaaaccctcgaatccgccgatggagccacgaacaaaagacgaagacggaaaagatccaaaaagggaaaacactagtgaataaaagcgaacatttttaatctcttgtaaaaagtagaatttttttatctgtaagttgagaattggcaacattggaaattttgaaaaatgcactacttactttctattcctacggagtgagtttgatgtatggaacgcatcaattatcttggaatcatcttgtacgatttttatagatttttgtttgtaaacggcttgtaatgcgaccgacattatagtggtatttgcattgttgtaggatcttccgattttctggaaatctaaggaactttcttattttaaatggtataccctatatatattgtgccttttgaagtcattaagaaatactcattatttttcatccaatgctccctatacctaaatgtcataattacggagttattactacatttaaattatctttgccgaagttaatacatttagatgaataagatgatatgaaaatataattggtatttcttaattacttcaaaaggcaaaaatatacagggtgatctattcgaaataagaaatttcgttaatttccagaaagcggaagatctggcgacaatgtaaataatcaatataatattggccgcattataagacccttacacacaaaaatcgtgcaagccgtttccgagataattgagccgttccataattaaaactcattttgtatattttaaaaattgccgtgttgtgaactcgtcagtctgtattttctcatgaattgtttcaccagggtggaagggatttttaaatgttaaaattatatttaaaatatatttctaaattatttttattgtacaaaatatttatagatcttaaatatttttattacgatgaatttatcgatgtatgtataaacaactttccaaggctttttttatattgtataatggagactgtgtagccgccatcttctattttattgtttattcattactaactatattatgtttcttgtatgtggaggacggctgcgcagatgttgatatagcgaatgggacaatatattatatacatgtaactaatataatacgaaagtgctttggaaaaaacaattccacgtttttaataaatgactatatatt

SEQ ID NO: 2429 - DNA, 3331 bp, Diabrotica virgifera
  SmartBlast Evalue=0; Info=Protein lap4 n=1 Tax=Harpegnathos saltator RepID=E2BMS1_9HYME
gtgtagagcgacgtttcggtaatcgtagggaaaaggaaaacccgtgttttatcaaaaaaatgtacacaactcaaatctaaagtgattttctaagtgagtgttagttgtaaaattatgtgcgttgattagtggtagacatgtttcggtgcatacccatttttaaaggctgtaacaggcaagtggaaactgttgataagagacattgttctttaataaatgttcccgaggagatattaaggtattctaggagcctagaagagctacttttagactccaataggatacaagttcttccgaagaacttctttagacttcatagactccgcaaactcggtctaagcgataatgaaatcaacaacttgccgccagatattcaaaatttcgaacatctcgtggaattggacgtctccagaaatgatatccctgacatccccgaaagcatcggccagctgcgttcccttagagtcgcagacttcagttccaatcccatacctcgtcttccgccggccttcatccacctcaagtcactcagcgtgttgggcctcaacgatatgtcgctcacgtcgctgcctcaggatttcggccaacttacgtccctcacgtcgctcgaacttagagaaaatctgctcaaggaattgcccgcttctctgtcgaagttgaccaacctcgaaagacttgatttaggcgataatgaaattgaagaattgccatcacacataggaaaactgccagcacttcaagaactatggttagaccacaatcaattacaaagtctccctccagaaataggccaactgagcaacctaacatgcctagatctatccgaaaatcgcctagagtatctaccagaagatattgcgggcttggaaagcctaactgacttacatttatcccaaaatgtattagaaactctgcccgacggcataggaaagttagaaaaacttaccatcttgaaggtagaccaaaatagactaacatctttaaattctaacgtaggctattgccacaatctacaagaactgatcctcacagagaactttttaagcgaattacccgtagaagttggaaaattaatcaaactgacgaacttgaacgtcgataggaatagtcttactttggtacccgaagacataggcaatctctgcgagctaggcgtgttgagtttgagagataacagacttactatgttgccggacactctcggcaactgccgaagactccacgtgttggacgtttctggaaacagactgccttatctaccctatacgcttctacagttgagcctgaaggctgtttggctgagcgaaaaccaggcacaatctctactcaccttccaaactgacactgacccggatacgggtaagaccgtactgacgtgtttcctgttgccgcaacaagaataccaacctacgatagatggcgctgcgaccgaggacgaagacgacgacgactggcgggaacacgaagccagccgaacacactccgtcaaattcaccgatccgcaagagaaggacaatcgagagactccatttgtcaggcacaacactcctcatccgaaagagttaaaggctaaggcccataaacttttcggaaaaggtcaaaattcgctagaggaaagcgaacaacattccaacgacaacagtgcaaacacgcccgaggccctcaatctacatgtaaagcaggttcctgaagcgccacagataattgaacctcctccaactcggaccgactctgcagtaggtaatggacaagtggaggaaagtgagcatagccatgatgaacatgatgaagacacggatgaggaccacgtgactcttcgccgagtcggattcgtcgggggcgtgtcttcgtcgtcggacgaacgagactcgtcgtcgaaaccgagtcgactgcacaggcgcgacaccccccaccatctcaagaacaaacgaatcacgtcggtgaccatcgacaaagacaaggtggcttcgattattgcacaggcccttaaaaggaaagaagacgaaagtgacaggacgagtggcgtttcgacccctccaggctcagtctccggaggcgatcgtagttgttcttcaagtcaagctggtgattcagatgcagcagtagaactcagagaagaaaaatatgaaatccacattgaacgctcccaaactggattagggctatcgatagcaggcgggcacggctcaactcctttcaagggcgatgacgaaggcatcttcatttccagagtaaccgaaggtggtccggccgatctagcaggattaagagtaggagataaagtcataaccgtcaatagagtcaacgtcgttgacgtcagtcactacgatgcagtagaagtcttgaaagcatcaggtcctgtgttgattctagaagtaacccgagaagttaccaggttggttaagcctccgaacacgatggtagcaactaagcacagtccaacaccttctcttacgaatacgttgaacaaaagcgcaataccccctccattgcctcctcaattggaagaagaggtgcccttacaaaaagtattagtccatacaacattaattagagactcaaaaggtctcggttttagtatagcaggaggcaaaggctcccaaccctttaaggctgacaatgacgccatctacatatcacgcattaccgacggaggagtcgccgatagagacgcgaagctctctgtaggcgataaagtaatatcaataaacggcgtcgacttaacgggggcctcccacgatcaaaccgtaagcatgcttacgggattggaaagattcgtgagactggtggttgagagggaagtgcctctggagaaaaacggcgacgaggctagtccgggacctcagcaaagtccgaggttgtttggattgcccaagccgtatacgggactgtatgctgctaatagttacatggctaaccgacctggttacgcggggtatcgaagatcgatggaacttgataaaaagacttctgaatctccagagccagtaaagcctccaacgcccacccaggtgttacaagaaacgcccaaaacaaacggaatagaccacagctcgacgagagaagtccccaagccagcgccgcgtcgtatcaactctacttccagcgattcgtccacggcaccaatcaatcctacagctcaaaccgcttccagcgccaagccacaaaccaaccacaagaaaacctcttcgaattcctccctcgaggatgacacccaggtatttgcgaggcccatcacaagcgaagagttccaggcgatgataccgccccatttccttaaacagccccctcccgccaaaacctccccaacccccacgcgactactcctacc

SEQ ID NO: 2430 - DNA, 1357 bp, Diabrotica virgifera
  SmartBlast Evalue=6E-98; Info=Protein lap4 n=1 Tax=Camponotus floridanus RepID=E2AD26_9HYME
ccctcgcccgctcccaagaactaaaacctcccccacacccgatcatcaagaacaacaacaaaaaagcatctgtcaacaacaacaacaatacgattctcaaatattcagctggtgattcagatgcagcagtagaactcagagaagaaaaatatgaaatccacattgaacgctcccaaactggattagggctatcgatagcaggcgggcacggctcaactcctttcaagggcgatgacgaaggcatcttcatttccagagtaaccgaaggtggtccggccgatctagcaggattaagagtaggagataaagtcataaccgtcaatagagtcaacgtcgttgacgtcagtcactacgatgcagtagaagtcttgaaagcatcaggtcctgtgttgattctagaagtaacccgagaagttaccaggttggttaagcctccgaacacgatggtagcaactaagcacagtccaacaccttctcttacgaatacgttgaacaaaagcgcaataccccctccattgcctcctcaattggaagaagaggtgcccttacaaaaagtattagtccatacaacattaattagagactcaaaaggtctcggttttagtatagcaggaggcaaaggctcccaaccctttaaggctgacaatgacgccatctacatatcacgcattaccgacggaggagtcgccgatagagacgcgaagctctctgtaggcgataaagtaatatcaataaacggcgtcgacttaacgggggcctcccacgatcaaaccgtaagcatgcttacgggattggaaagattcgtgagactggtggttgagagggaagtgcctctggagaaaaacggcgacgaggctagtccgggacctcagcaaagtccgaggttgtttggattgcccaagccgtatacgggactgtatgctgctaatagttacatggctaaccgacctggttacgcggggtatcgaagatcgatggaacttgataaaaagacttctgaatctccagagccagtaaagcctccaacgcccacccaggtgttacaagaaacgcccaaaacaaacggaatagaccacagctcgacgagagaagtccccaagccagcgccgcgtcgtatcaactctacttccagcgattcgtccacggcaccaatcaatcctacagctcaaaccgcttccagcgccaagccacaaaccaaccacaagaaaacctcttcgaattcctccctcgaggatgacacccaggtatttgcgaggcccatcacaagcgaagagttccaggcgatgataccgccccatttccttaaacagccccctcccgccaaaacctccccaacccccacgcgactactcctacc

SEQ ID NO: 2431 - DNA, 2689 bp, Diabrotica virgifera
  SmartBlast Evalue=7E-14; Info=Ran-binding protein 3 n=2 Tax=Mus musculus RepID=RANB3_MOUSE
aatcaagacgaccacataaggaaattgaacacccttgatgtgttttaagaagtcaaaatgctgatgttcctaagaacaataaaaaaatactgtaagatttgcttctgtattaaaaattaaacaatgtatatggaaaagtcctactttgttattaaccctccgttactcgcacagggtgtgtgagaccggccctctaaacaacttcctgtaactctgtagtggattgctgttgctgttgattttgaattgctgctgcatatacctcttcagcaatcagtcaactgtgggtgaagtccacgtgcagtgtaaaaaagagtattgtacttttattattaggcaacacggtgcggtacaccgggtgtgagtatttctgtacgttagaattgaaagggcggtagtccaattttacagtaaatggagatatgcagccaataatacacttaaaggtgttatctttcgaatggtggttaataggtggttgtacaggcaatattactaaaattgcaagtcagatgtccactgtgaaatttgttgcaaaaagccctatgtggtacaccggtcttttttgcgtggcacactgattgttaaaaagacggtaatccaatctctatggacaaccgtatgtcagctgtgtaaaaattgaggttataagctaatgtttttgcatggtttatagataaaagtaactttttctttatcgagattaatgtgataataaataacaaccaaaaatgtctgaatcaagagcaaagaagatggttctactgagttcaatcttcatttcaagccgcctaacattgatacatgtgacacctgtgacagttttgaaactatgcaaaaagaggcagatcctaatgttgaagatattttaaagaaaaaagcagatcatttgaacgacgcagataacagatacaagttgaaaaggcaggataagataagatgcaagcagaatttaaaagaattcgtggcaatgatggatttgcaaaaatgcctccctacacctatgttaactaatggaaaatcgttttagttaaagcagttatggacatttaattttaccgtctataatgatagtactgccgaaggttcatgcttcatgtgggacgagtctattgcaaaaaggggtggcaacgagatagcttccactgtaataatgtgtttaaaaaatttaccttctacaacagaataggtaacattttggtcagacaactgctctggccaaaaccgatttttttttattttatatgtatatgtgggctgtccataacacctcagtagttagaatctatcataaatatttactcaaggggcatacacacaacgaagcagacacaatacatgcactaattgagaggaagaagaaaagactgcctactatgaatatctctgtacctacctcatgaatgggcccagtttataaggatctgcagttcgttaaaaccacttattgttaatgagatgaaaacaagtgacttttttaactttgaaaaaatgggcaaagaatcgacaagttcgtttgtgaatcggaaacggaacacagataaaattgtgcacttgaaagtcgaaagagaccaccctggcattatcttttataaaccaacattttcccaggaaaattttaaatctgtcaattttaaaatgaaaatgagaagttctctcgatgatctaccaaagacatcggaccaaataaataatgaaaattcaattccaattgatagttcaaaatataatcacctaatggaattgctagaatgggtaccttctatttaccattcctactataaatctttaaaaacaacaaaaaataaagttgtcgttaacgaaaacaattcttcatgttccgaagatgattaaatgctttttaattgaagttttatattatttttgtaatgataagttctgattataacgttctttttctaataaaatcataccaaaagggcggctgtcctatttttttttattgatatagtaccacagaacaaaaaaggctgtagtcctaaattatttattatttcaatacaaaacaacttaacgccgattatgttactgtaaaataaaatacaaagcatgctttaccactttcctttaaatcataaagctacaacatcatttgataattttaaaggcatttaaaattatggtgtacaaattaagagcactaattttgatctactgcaaaacaaactgaaagtgacttccgccctttcaattctaacgtacagaaataatatctacaaagcctgatatttaattatcactacctgctaataaatacgttttttcagtgtagacctatttaaatcacaatagaaatattatcctttttgtttttttacaaatatgtagcatactgaaatcaatcggtttttgtgggagaatcggatgatggttcggttttcttacgtttctgggcggcgatctctctttccaacctcgtctgaaggtgtgaatacagcctattcgagtcttctatattgctcatgagtagaaaaacttttatttctccactagcatccagtgctgtaactctaatacttttttcgtttgctttttctactaccatttctgcccaaattttggtattcaataggacccgcaaacttcctgatgttctaaaaaccaatcgactccctaaagcacaatttttaacgaagttgtacccgttcaggtcatttaaccttaaagt

SEQ ID NO: 2432 - DNA, 2680 bp, Diabrotica virgifera
  SmartBlast Evalue=7E-14; Info=Ran-binding protein 3 n=2 Tax=Mus musculus RepID=RANB3_MOUSE
aatcaagacgaccacataaggaaattgaacacccttgatgtgttttaagaagtcaaaatgctgatgttcctaagaacaataaaaaaatactgtaagatttgcttctgtattaaaaattaaacaatgtatatggaaaagtcctactttgttattaaccctccgttactcgcacagggtgtgtgagaccggccctctaaacaacttcctgtaactctgtagtggattgctgttgctgttgattttgaattgctgctgcatatacctcttcagcaatcagtcaactgtgggtgaagtccacgtgcagtgtaaaaaagagtattgtacttttattattaggcaacacggtgcggtacaccgggtgtgagtatttctgtacgttagaattgaaagggcggtagtccaattttacagtaaatggagatatgcagccaataatacacttaaaggtgttatctttcgaatggtggttaataggtggttgtacaggcaatattactaaaattgcaagtcagatgtccactgtgaaatttgttgcaaaaagccctatgtggtacaccggtcttttttgcgtggcacactgattgttaaaaagacggtaatccaatctctatggacaaccgtatgtcagctgtgtaaaaattgaggttataagctaatgtttttgcatggtttatagataaaagtaactttttctttatcgagattaatgtgataataaataacaaccaaaaatgtctgaatcaagagcaaagaagatggttctactgagttcaatcttcatttcaagccccctaacattgatacatgtgacagttttgaaactatgcaaaaagaggcagatcctaatgttgaagatattttaaagaaaaaagcagatcatttgaacgacgcagataacagatacaagttgaaaaggcaggataagataagatgcaagcagaatttaaaagaattcgtggcaatgatggatttgcaaaaatgcctccctacacctatgttaactaatggaaaatcgttttagttaaagcagttatggacatttaattttaccgtctataatgatagtactgccgaaggttcatgcttcatgtgggacgagtctattgcaaaaaggggtggcaacgagatagcttccactgtaataatgtgtttaaaaaatttaccttctacaacagaataggtaacattttggtcagacaactgctctggccaaaaccgatttttttttattttatatgtatatgtgggctgtccataacacctcagtagttagaatctatcataaatatttactcaaggggcatacacacaacgaagcagacacaatacatgcactaattgagaggaagaagaaaagactgcctactatgaatatctctgtacctacctcatgaatgggcccagtttataaggatctgcagttcgttaaaaccacttattgttaatgagatgaaaacaagtgacttttttaactttgaaaaaatgggcaaagaatcgacaagttcgtttgtgaatcggaaacggaacacagataaaattgtgcacttgaaagtcgaaagagaccaccctggcattatcttttataaaccaacattttcccaggaaaattttaaatctgtcaattttaaaatgaaaatgagaagttctctcgatgatctaccaaagacatcggaccaaataaataatgaaaattcaattccaattgatagttcaaaatataatcacctaatggaattgctagaatgggtaccttctatttaccattcctactataaatctttaaaaacaacaaaaaataaagttgtcgttaacgaaaacaattcttcatgttccgaagatgattaaatgctttttaattgaagttttatattatttttgtaatgataagttctgattataacgttctttttctaataaaatcataccaaaagggcggctgtcctatttttttttattgatatagtaccacagaacaaaaaaggctgtagtcctaaattatttattatttcaatacaaaacaacttaacgccgattatgttactgtaaaataaaatacaaagcatgctttaccactttcctttaaatcataaagctacaacatcatttgataattttaaaggcatttaaaattatggtgtacaaattaagagcactaattttgatctactgcaaaacaaactgaaagtgacttccgccctttcaattctaacgtacagaaataatatctacaaagcctgatatttaattatcactacctgctaataaatacgttttttcagtgtagacctatttaaatcacaatagaaatattatcctttttgtttttttacaaatatgtagcatactgaaatcaatcggtttttgtgggagaatcggatgatggttcggttttcttacgtttctgggcggcgatctctctttccaacctcgtctgaaggtgtgaatacagcctattcgagtcttctatattgctcatgagtagaaaaacttttatttctccactagcatccagtgctgtaactctaatacttttttcgtttgctttttctactaccatttctgcccaaattttggtattcaataggacccgcaaacttcctgatgttctaaaaaccaatcgactccctaaagcacaatttttaacgaagttgtacccgttcaggtcatttaaccttaaagt

SEQ ID NO: 2433 - DNA, 2421 bp, Diabrotica virgifera
aatcaagacgaccacataaggaaattgaacacccttgatgtgttttaagaagtcaaaatgctgatgttcctaagaacaataaaaaaatactgtaagatttgcttctgtattaaaaattaaacaatgtatatggaaaagtcctactttgttattaaccctccgttactcgcacagggtgtgtgagaccggccctctaaacaacttcctgtaactctgtagtggattgctgttgctgttgattttgaattgctgctgcatatacctcttcagcaatcagtcaactgtgggtgaagtccacgtgcagtgtaaaaaagagtattgtacttttattattaggcaacacggtgcggtacaccgggtgtgagtatttctgtacgttagaattgaaagggcggtagtccaattttacagtaaatggagatatgcagccaataatacacttaaaggtgttatctttcgaatggtggttaataggtggttgtacaggcaatattactaaaattgcaagtcagatgtccactgtgaaatttgttgcaaaaagccctatgtggtacaccggtcttttttgcgtggcacactgattgttaaaaagacggtaatccaatctctatggacaaccgtatgtcagctgtgtaaaaattgaggttataagctaatgtttttgcatggtttatagataaaagtaactttttctttatcgagattaatgtgataataaataacaaccaaaaatgtctgaatcaagagcaaagaagatggttctactgagttcaatcttcatttcaagccgcctaacattgatacatgtgacacctgtgacagttttgaaactatgcaaaaagaggcagatcctaatgttgaagatattttaaagaaaaaagcagatcatttgaacgacgcagataacagatacaagttgaaaaggcaggataagataagatgcaagcagaatttaaaagaattcgtggcaatgatggatttgcaaaaatgcctccctacacctatgttaactaatggaaaatcgttttagttaaagcagttatggacatttaattttaccgtctataatgatagtactgccgaaggttcatgcttcatgtgggacgagtctattgcaaaaaggggtggcaacgagatagcttccactgtaataatgtgtttaaaaaatttaccttctacaacagaataggtaacattttggtcagacaactgctctggccaaaaccgatttttttttattttatatgtatatgtgggctgtccataacacctcagtagttagaatctatcataaatatttactcaaggggcatacacacaacgaagcagacacaatacatgcactaattgagaggaagaagaaaagactgcctactatgaatatctctgtacctacctcatgaatgggcccagtttataaggatctgcagttcgttaaaaccacttattgttaatgagatgaaaacaagtgacttttttaactttgaaaaaatgggcaaagaatcgacaagttcgtttgtgaatcggaaacggaacacagataaaattgtgcacttgaaagtcgaaagagaccaccctggcattatcttttataaaccaacattttcccaggaaaattttaaatctgtcaattttaaaatgaaaatgagaagttctctcgatgatctaccaaagacatcggaccaaataaataatgaaaattcaattccaattgatagttcaaaatataatcacctaatggaattgctagaatgggtaccttctatttaccattcctactataaatctttaaaaacaacaaaaaataaagttgtcgttaacgaaaacaattcttcatgttccgaagatgattaaatgctttttaattgaagttttatattatttttgtaatgataagttctgattataacgttctttttctaataaaatcataccaaaagggcggctgtcctatttttttttattgatatagtaccacagaacaaaaaaggctgtagtcctaaattatttattatttcaatacaaaacaacttaacgccgattatgttactgtaaaataaaatacaaagcatgctttaccactttcctttaaatcataaagctacaacatcatttgataattttaaaggcatttaaaattatggtgtacaaattaagagcactaattttgatctactgcaaaacaaagtgaaagtgacttacgctctttcaattctaacgtacagatttgttcacaaatttttgtgtttggatcagatatcgatagttttaattagtaaggtaatttaagatctttttcttattttcaatgtttatatatttgtttatttatatttagatatggattacgagaaggggaagccaaaattattaaaattatttgaggaagtatcgactgacgaggaaacgtatgaagatgat

SEQ ID NO: 2434 - DNA, 2412 bp, Diabrotica virgifera
aatcaagacgaccacataaggaaattgaacacccttgatgtgttttaagaagtcaaaatgctgatgttcctaagaacaataaaaaaatactgtaagatttgcttctgtattaaaaattaaacaatgtatatggaaaagtcctactttgttattaaccctccgttactcgcacagggtgtgtgagaccggccctctaaacaacttcctgtaactctgtagtggattgctgttgctgttgattttgaattgctgctgcatatacctcttcagcaatcagtcaactgtgggtgaagtccacgtgcagtgtaaaaaagagtattgtacttttattattaggcaacacggtgcggtacaccgggtgtgagtatttctgtacgttagaattgaaagggcggtagtccaattttacagtaaatggagatatgcagccaataatacacttaaaggtgttatctttcgaatggtggttaataggtggttgtacaggcaatattactaaaattgcaagtcagatgtccactgtgaaatttgttgcaaaaagccctatgtggtacaccggtcttttttgcgtggcacactgattgttaaaaagacggtaatccaatctctatggacaaccgtatgtcagctgtgtaaaaattgaggttataagctaatgtttttgcatggtttatagataaaagtaactttttctttatcgagattaatgtgataataaataacaaccaaaaatgtctgaatcaagagcaaagaagatggttctactgagttcaatcttcatttcaagccccctaacattgatacatgtgacagttttgaaactatgcaaaaagaggcagatcctaatgttgaagatattttaaagaaaaaagcagatcatttgaacgacgcagataacagatacaagttgaaaaggcaggataagataagatgcaagcagaatttaaaagaattcgtggcaatgatggatttgcaaaaatgcctccctacacctatgttaactaatggaaaatcgttttagttaaagcagttatggacatttaattttaccgtctataatgatagtactgccgaaggttcatgcttcatgtgggacgagtctattgcaaaaaggggtggcaacgagatagcttccactgtaataatgtgtttaaaaaatttaccttctacaacagaataggtaacattttggtcagacaactgctctggccaaaaccgatttttttttattttatatgtatatgtgggctgtccataacacctcagtagttagaatctatcataaatatttactcaaggggcatacacacaacgaagcagacacaatacatgcactaattgagaggaagaagaaaagactgcctactatgaatatctctgtacctacctcatgaatgggcccagtttataaggatctgcagttcgttaaaaccacttattgttaatgagatgaaaacaagtgacttttttaactttgaaaaaatgggcaaagaatcgacaagttcgtttgtgaatcggaaacggaacacagataaaattgtgcacttgaaagtcgaaagagaccaccctggcattatcttttataaaccaacattttcccaggaaaattttaaatctgtcaattttaaaatgaaaatgagaagttctctcgatgatctaccaaagacatcggaccaaataaataatgaaaattcaattccaattgatagttcaaaatataatcacctaatggaattgctagaatgggtaccttctatttaccattcctactataaatctttaaaaacaacaaaaaataaagttgtcgttaacgaaaacaattcttcatgttccgaagatgattaaatgctttttaattgaagttttatattatttttgtaatgataagttctgattataacgttctttttctaataaaatcataccaaaagggcggctgtcctatttttttttattgatatagtaccacagaacaaaaaaggctgtagtcctaaattatttattatttcaatacaaaacaacttaacgccgattatgttactgtaaaataaaatacaaagcatgctttaccactttcctttaaatcataaagctacaacatcatttgataattttaaaggcatttaaaattatggtgtacaaattaagagcactaattttgatctactgcaaaacaaagtgaaagtgacttacgctctttcaattctaacgtacagatttgttcacaaatttttgtgtttggatcagatatcgatagttttaattagtaaggtaatttaagatctttttcttattttcaatgtttatatatttgtttatttatatttagatatggattacgagaaggggaagccaaaattattaaaattatttgaggaagtatcgactgacgaggaaacgtatgaagatgat

SEQ ID NO: 2435 - DNA, 1596 bp, Diabrotica virgifera
  SmartBlast Evalue=4E-14; Info=Ran-binding protein 3 n=2 Tax=Mus musculus RepID=RANB3_MOUSE
agatagcttccgctgtgataatgtggttaaaaaatttaccttctacaacagaagaggtaacattttggtcagacaactgctctggccaaaaccgaaatgttttttttattttgtatgtatatgtgggctgtgtatgtatatgtgtccataacacctcagtagttagaattcaccataaatatttactcaaggggcatacacacaacgaagcagacacaatacatgcactaattaagagaaagaaggacagactgcctactatgaatatttctgtacctcatgaatgggcccagtttataaggacctgcagttcgttaaaaccacttattattgtttatgagatgaaaacaagtgacgtttttaactttgaaaaaatgggcaaagaatcgacaagcccgtttgtgaatcggaaacggaacacagacaatgaaccctttctatgctctaaaattgtgcacttcaaagtcgaaagagaccaccctggcattatgttttataaaacaacattttatctctgtaattttaaatctgtcaattttaaaaggaaaatgagaagttctctcgatggtctcctaccaaagacatcggaccaaataaataatgaaaattcaattccaattgatagttcaaaatataatcacctaatggaattgctagaatgggtaccttctatttaccattcctactataaatctttaaaaacaacaaaaaataaagttgtcgttaacgaaaacaattcttcatgttccgaagatgattaaatgctttttaattgaagttttatattatttttgtaatgataagttctgattataacgttctttttctaataaaatcataccaaaagggcggctgtcctatttttttttattgatatagtaccacagaacaaaaaaggctgtagtcctaaattatttattatttcaatacaaaacaacttaacgccgattatgttactgtaaaataaaatacaaagcatgctttaccactttcctttaaatcataaagctacaacatcatttgataattttaaaggcatttaaaattatggtgtacaaattaagagcactaattttgatctactgcaaaacaaactgaaagtgacttccgccctttcaattctaacgtacagaaataatatctacaaagcctgatatttaattatcactacctgctaataaatacgttttttcagtgtagacctatttaaatcacaatagaaatattatcctttttgtttttttacaaatatgtagcatactgaaatcaatcggtttttgtgggagaatcggatgatggttcggttttcttacgtttctgggcggcgatctctctttccaacctcgtctgaaggtgtgaatacagcctattcgagtcttctatattgctcatgagtagaaaaacttttatttctccactagcatccagtgctgtaactctaatacttttttcgtttgctttttctactaccatttctgcccaaattttggtattcaataggacccgcaaacttcctgatgttctaaaaaccaatcgactccctaaagcacaatttttaacgaagttgtacccgttcaggtcatttaaccttaaagt

SEQ ID NO: 2436 - DNA, 1328 bp, Diabrotica virgifera
agatagcttccgctgtgataatgtggttaaaaaatttaccttctacaacagaagaggtaacattttggtcagacaactgctctggccaaaaccgaaatgttttttttattttgtatgtatatgtgggctgtgtatgtatatgtgtccataacacctcagtagttagaattcaccataaatatttactcaaggggcatacacacaacgaagcagacacaatacatgcactaattaagagaaagaaggacagactgcctactatgaatatttctgtacctcatgaatgggcccagtttataaggacctgcagttcgttaaaaccacttattattgtttatgagatgaaaacaagtgacgtttttaactttgaaaaaatgggcaaagaatcgacaagcccgtttgtgaatcggaaacggaacacagacaatgaaccctttctatgctctaaaattgtgcacttcaaagtcgaaagagaccaccctggcattatgttttataaaacaacattttatctctgtaattttaaatctgtcaattttaaaaggaaaatgagaagttctctcgatggtctcctaccaaagacatcggaccaaataaataatgaaaattcaattccaattgatagttcaaaatataatcacctaatggaattgctagaatgggtaccttctatttaccattcctactataaatctttaaaaacaacaaaaaataaagttgtcgttaacgaaaacaattcttcatgttccgaagatgattaaatgctttttaattgaagttttatattatttttgtaatgataagttctgattataacgttctttttctaataaaatcataccaaaagggcggctgtcctatttttttttattgatatagtaccacagaacaaaaaaggctgtagtcctaaattatttattatttcaatacaaaacaacttaacgccgattatgttactgtaaaataaaatacaaagcatgctttaccactttcctttaaatcataaagctacaacatcatttgataattttaaaggcatttaaaattatggtgtacaaattaagagcactaattttgatctactgcaaaacaaagtgaaagtgacttacgctctttcaattctaacgtacagatttgttcacaaatttttgtgtttggatcagatatcgatagttttaattagtaaggtaatttaagatctttttcttattttcaatgtttatatatttgtttatttatatttagatatggattacgagaaggggaagccaaaattattaaaattatttgaggaagtatcgactgacgaggaaacgtatgaagatgat

SEQ ID NO: 2437 - DNA, 2122 bp, Diabrotica virgifera
  SmartBlast Evalue=0; Info=Malate dehydrogenase n=1 Tax=Bombyx mori RepID=Q1HPM5_BOMMO
ggaaaatctaaatactgtatttccggaatatctacttatacattaaacatggattataacaacaatataacataaattatttattttatttattacttagtaatttattagagttttgggaatgcataaactgcaggtaaagcaggttggtagtccgtattgtacatctgagctttgatgaaagcttctttgtcttttggttcgggaagtaccgttgcattgccttcttcgtaagcgtactctagaagtcgtgttgcgattcttagtgaacaggcaacgatgctctctagtggtgggtatatccttccattttcaaggttgtcttccgttaccaaattggcgagtgcctctgctgcaaccaagaagtgttcttcgctgattttttggataccagcagtaactgtggccaatcctactccggggaatatgtatgagttgttaccttgtcctgggtaaaacgtctttccatttaaagttactggatcgaatggactgccgctggcaaagatggcagtaccatttgtttctctgtaacattcttcagctgtacattctgctttatgcgtaggattgctcagagcgaagatcacaggtcgtttgttgtttttggccatttcgcgcaaaatttctgaggtgaaagcgccacctatggctgcggctccaatcaagattgagggtttgatgctctttacgacttcagtcagtgttttcacgggtgggtgggcgtgtgcgtacatttccttgtggtggttgattcctccttcaggtctatccttaacgattaatcctttcgagtctaccatccatatttttttcctggcgtcactttcactagtaccttcctttaccattgccatggtgcacaattgagcgatacccaaattcgcttctccggctccttggaatactatcacatgatcggaaagtctagtttttgtgattcttaaagaagccaatagaccagctacggctacactagctgtaccctgaatgtcgtcgttgaaagtacaatattcgtttctgtatttttccaacaatctgaaggcgtttgagttaccaaagtcttcgaattggatcaaagtgttctggccccatcggcgtactacggcttccatgaattcatcgaggagttcatcgtactcttgtcctgtgactctcttttgtctcaaacctatatacaaaggatctttcagatgagtctcgttgttggttcctacgtctattgtgattgggaggcattgatggggcttgattccagccaaagctgtgtataaagacagtttgccgacggggattcccataccacagactccttggtctcctaaacctaagatacgttcaccgtcggtgactactattgcacggacatctgtttcaggccaatttttcataatttcatatacgtttcctttgtcgtaaattgtaacgtacatgccccggggtcttctgtaaaccaatccaaagttttgacaagctaatcctacgactggtgtatatactaagggcataatatctgttacgtatttcctgacgaaactgtagaataatttttcattgcggtccaaaagacctatcaggtacatgtatttgtttaaattatcgtctaatctgtccaaacattttttacaatgttcgatttgttgttcctgtgattttactacgggaggtaacaacccatggattccaagctgttgtctctcttcgaaggtgaatgccagacccttatttaaagcgggggttgtcaacctctccagaccggatactcctccaggaacgaggtgctctccatttccccaatttccaacccgatctctttccatggttagatttgatttgtttattgggagtggactagtaaaagtctcagttttggtgtttggtgatgttttgatgttttgttcagtctgatcgtccttgttaaaccaactccacgagctcagcatgacttaagaacttaatatattgtatcaatataagaagagagataggtgggacaaccctgtttccaatggaaaattgcaagccttttagtgtatgatctgtaacactgcaaaaattatcacgaaccgaaaatcttgcggagtatctgtcgtataaacacctcttatataaaccaccgaaa

SEQ ID NO: 2438 - DNA, 2122 bp, Diabrotica virgifera
  SmartBlast Evalue=0; Info=Malate dehydrogenase n=1 Tax=Bombyx mori RepID=Q1HPM5_BOMMO
ggaaaatctaaatactgtatttccggaatatctacttatacattaaacatggattataacaacaatataacataaattatttattttatttattacttagtaatttattagagttttgggaatgcataaactgcaggtaaagcaggttggtagtccgtattgtacatctgagctttgatgaaagcttctttgtcttttggttcgggaagtaccgttgcattgccttcttcgtaagcgtactctagaagtcgtgttgcgattcttagtgaacaggcaacgatgctctctagtggtgggtatatccttccattttcaaggttgtcttccgttaccaaattggcgagtgcctctgctgcaaccaagaagtgttcttcgctgattttttggataccagcagtaactgtggccaatcctactccggggaatatgtatgagttgttaccttgtcctgggtaaaacgtctttccatttaaagttactggatcgaatggactgccgctggcaaagatggcagtaccatttgtttctctgtaacattcttcagctgtacattctgctttatgcgtaggattgctcagagcgaagatcacaggtcgcttgttgtttttggccatttctcgcaaaatttctgaggtgaaagcgccacctatggctgcggctccaatcaagattgatggtttgatgctctttacaacttcagtcagtgtttttacgggtgggtgggcgtgtgcgtacatttccttgtggtggttgattcctccttcaggtctgtccttaactattaaaccttttgagtctaccatccatattttcttcctggcgtcactctcactagtaccttcctttaccattgccatggtgcacaattgagcgatacccaaattcgcttctcctgctccttggaatactatcacatgatcggaaagtctagtttttgtgatcctcaatgaagccaatagaccagctacggctacactagcggtaccctgaatgtcgtcgttgaaagtacaatattcatttctgtacttctccaacaatctgaatgcgtttgagttaccaaagtcttcgaattggatcaaagtgttctgaccccatcggcgtactacggcttccatgaattcatcgaggagttcatcgtactcttgtcctgtgactctcttttgtctcaaacctatatacaaaggatctttcagatgagtctcgttgttggttcctacgtctattgtgattgggaggcattgatgcggcttgattccagccaaagctgtgtataaagacagtttgccgacggggattcccataccacaggctccttggtctcctaaacctaagatacgttcaccgtcggtgactactattgcacggacatctgtttcaggccaatttttcataatttcatatacgtttcctttgtcgtatattgtaacgtacatgccccggggtcttctgtaaaccaatccaaagttttgacaagctaatcctacgactggtgtatatactaagggcataatatctgttacgtatttcctgacgaaactgtagaataatttttcattgcggtccaaaagacctatcaggtacatgtatttgtttaaattatcgtctaatctgtccaaacattttttacaatgttcgatttgttgttcctgtgattttactacgggaggtaacaacccatggattccaagctgttgtctctcttcgaaggtgaatgccagacccttatttaaagcgggggttgtcaacctctccagaccggatactcctccaggaacgaggtgctctccatttccccaatttccaacccgatctctttccatggttagatttgatttgtttattgggagtggactagtaaaagtctcagttttggtgtttggtgatgttttgatgttttgttcagtctgatcgtccttgttaaaccaactccacgagctcagcatgacttaagaacttaatatattgtatcaatataagaagagagataggtgggacaaccctgtttccaatggaaaattgcaagccttttagtgtatgatctgtaacactgcaaaaattatcacgaaccgaaaatcttgcggagtatctgtcgtataaacacctcttatataaaccaccgaaa

SEQ ID NO: 2439 - DNA, 2122 bp, Diabrotica virgifera
  SmartBlast Evalue=0; Info=Malate dehydrogenase n=1 Tax=Bombyx mori RepID=Q1HPM5_BOMMO
ggaaaatctaaatactgtatttccggaatatctacttatacattaaacatggattataacaacaatataacataaattatttattttatttattacttagtaatttattagagttttgggaatgcataaactgcaggtaaagcaggttggtagtccgtattgtacatctgagctttgatgaaagcttctttgtcttttggttcgggaagtaccgttgcattgccttcttcgtaagcgtactctagaagtcgtgttgcgattcttagtgaacaggcaacgatgctctctagtggtgggtatatccttccattttcaaggttgtcttccgttaccaaattggcgagtgcctctgctgcaaccaagaagtgttcttcgctgattttttggataccagcagtaactgtggccaatcctactccggggaatatgtatgagttgttaccttgtcctgggtaaaacgtctttccatttaaagttactggatcgaatggactgccgctggcaaagatggcagtaccatttgtttctctgtaacattcttcagctgtacattctgctttatgcgtaggattgctcagagcgaagatcacaggtcgcttgttgtttttggccatttctcgcaaaatttctgaggtgaaagcgccacctatggctgcggctccaatcaagattgatggtttgatgctctttacaacttcagtcagtgtttttacgggtgggtgggcgtgtgcgtacatttccttgtggtggttgattcctccttcaggtctgtccttaactattaaaccttttgagtctaccatccatattttcttcctggcgtcactctcactagtaccttcctttaccattgccatggtgcacaattgagcgatacccaaattcgcttctcctgctccttggaatactatcacatgatcggaaagtctagtttttgtgatcctcaatgaagccaatagaccagctacggctacactagcggtaccctgaatgtcgtcgttgaaagtacaatattcgtttctgtacttttccaacaatctgaatgcgtttgagttaccaaagtcttcgaattggatcaaagtgttctgaccccatcggcgtactacggcttccatgaattcatcgaggagttcatcgtattcttgtcctgtgactctcttttgtctcaaacctatatacaaaggatctttcagatgagtctcgttgttggttcctacgtctattgtaattgggaggcattgatggggcttgattccagccaaagctgtgtataaagacagtttgccgacggggattcccataccacaggctccttggtctcctaaacctaagatacgttcaccgtcggtgactactattgcacggacatctgtttcaggccaatttttcataatttcatatacgtttcctttgtcgtaaattgtaacgtacatgccccggggtcttctgtaaaccaatccaaagttttgacaagctaatcctacgactggtgtatatactaagggcataatatctgttacgtatttcctgacgaaactgtagaataatttttcattgcggtccaaaagacctatcaggtacatgtatttgtttaaattatcatctaatctgtccaaacattttttacaatgttcgatttgttgttcctgtgattttactacgggaggtaacaacccatggattccaagctgttgtctctcttcgaaggtgaatgccagacccttatttaaagcgggggttgtcaacctctccagaccggatactcctccaggaacgaggtgctctccatttccccaatttccaacccgatctctttccatggttagatttgatttgtttattgggagtggactagtaaaagtctcagttttggtgtttggtgatgttttgatgttttgttcagtctgatcgtccttgttaaaccaactccacgagctcagcatgacttaagaacttaatatattgtatcaatataagaagagagataggtgggacaaccctgtttccaatggaaaattgcaagccttttagtgtatgatctgtaacactgcaaaaattatcacgaaccgaaaatcttgcggagtatctgtcgtataaacacctcttatataaaccaccgaaa

SEQ ID NO: 2440 - DNA, 1857 bp, Diabrotica virgifera
  SmartBlast Evalue=0; Info=Malate dehydrogenase n=1 Tax=Bombyx mori RepID=Q1HPM5_BOMMO
ggaaaatctaaatactgtatttccggaatatctacttatacattaaacatggattataacaacaatataacataaattatttattttatttattacttagtaatttattagagttttgggaatgcataaactgcaggtaaagcaggttggtagtccgtattgtacatctgagctttgatgaaagcttctttgtcttttggttcgggaagtaccgttgcattgccttcttcgtaagcgtactctagaagtcgtgttgcgattcttagtgaacaggcaacgatgctctctagtggtgggtatatccttccattttcaaggttgtcttccgttaccaaattggcgagtgcctctgctgcaaccaagaagtgttcttcgctgattttttggataccagcagtaactgtggccaatcctactccggggaatatgtatgagttgttaccttgtcctgggtaaaacgtctttccatttaaagttactggatcgaatggactgccgctggcaaagatggcagtaccatttgtttctctgtaacattcttcagctgtacattctgctttatgcgtaggattgctcagagcgaagatcacaggtcgtttgttgtttttggccatttcgcgcaaaatttctgaggtgaaagcgccacctatggctgcggctccaatcaagattgagggtttgatgctctttacgacttcagtcagtgttttcacgggtgggtgggcgtgtgcgtacatttccttgtggtggttgattcctccttcaggtctatccttaacgattaatcctttcgagtctaccatccatatttttttcctggcgtcactttcactagtaccttcctttaccattgccatggtgcacaattgagcgatacccaaattcgcttctccggctccttggaatactatcacatgatcggaaagtctagtttttgtgattcttaaagaagccaatagaccagctacggctacactagctgtaccctgaatgtcgtcgttgaaagtacaatattcgtttctgtatttttccaacaatctgaaggcgtttgagttaccaaagtcttcgaattggatcaaagtgttctggccccatcggcgtactacggcttccatgaattcatcgaggagttcatcgtactcttgtcctgtgactctcttttgtctcaaacctatatacaaaggatctttcagatgagtctcgttgttggttcctacgtctattgtgattgggaggcattgatggggcttgattccagccaaagctgtgtataaagacagtttgccgacggggattcccataccacagactccttggtctcctaaacctaagatacgttcaccgtcggtgactactattgcacggacatctgtttcaggccaatttttcataatttcatatacgtttcctttgtcgtaaattgtaacgtacatgccccggggtcttctgtaaaccaatccaaagttttgacaagctaatcctacgactggtgtatatactaagggcataatatctgttacgtatttcctgacgaaactgtagaataatttttcattgcggtccaaaagacctatcaggtacatgtatttgtttaaattatcgtctaatctgtccaaacattttttacaatgttcgatttgttgttcctgtgattttactacgggaggtaacaacccatggattccaagctgttgtctctcttcgaaggtgaatgccagacccttatttaaagcgggggttgtcaacctctccagaccggatactcctccaggaacgaggtgctctccatttccccaatttccaacccgatctctttccatggttagatttgatttgtttattgggagtggactagta

SEQ ID NO: 2441 - DNA, 1857 bp, Diabrotica virgifera
  SmartBlast Evalue=0; Info=Malate dehydrogenase n=1 Tax=Bombyx mori RepID=Q1HPM5_BOMMO
ggaaaatctaaatactgtatttccggaatatctacttatacattaaacatggattataacaacaatataacataaattatttattttatttattacttagtaatttattagagttttgggaatgcataaactgcaggtaaagcaggttggtagtccgtattgtacatctgagctttgatgaaagcttctttgtcttttggttcgggaagtaccgttgcattgccttcttcgtaagcgtactctagaagtcgtgttgcgattcttagtgaacaggcaacgatgctctctagtggtgggtatatccttccattttcaaggttgtcttccgttaccaaattggcgagtgcctctgctgcaaccaagaagtgttcttcgctgattttttggataccagcagtaactgtggccaatcctactccggggaatatgtatgagttgttaccttgtcctgggtaaaacgtctttccatttaaagttactggatcgaatggactgccgctggcaaagatggcagtaccatttgtttctctgtaacattcttcagctgtacattctgctttatgcgtaggattgctcagagcgaagatcacaggtcgcttgttgtttttggccatttctcgcaaaatttctgaggtgaaagcgccacctatggctgcggctccaatcaagattgatggtttgatgctctttacaacttcagtcagtgtttttacgggtgggtgggcgtgtgcgtacatttccttgtggtggttgattcctccttcaggtctgtccttaactattaaaccttttgagtctaccatccatattttcttcctggcgtcactctcactagtaccttcctttaccattgccatggtgcacaattgagcgatacccaaattcgcttctcctgctccttggaatactatcacatgatcggaaagtctagtttttgtgatcctcaatgaagccaatagaccagctacggctacactagcggtaccctgaatgtcgtcgttgaaagtacaatattcatttctgtacttctccaacaatctgaatgcgtttgagttaccaaagtcttcgaattggatcaaagtgttctgaccccatcggcgtactacggcttccatgaattcatcgaggagttcatcgtactcttgtcctgtgactctcttttgtctcaaacctatatacaaaggatctttcagatgagtctcgttgttggttcctacgtctattgtgattgggaggcattgatgcggcttgattccagccaaagctgtgtataaagacagtttgccgacggggattcccataccacaggctccttggtctcctaaacctaagatacgttcaccgtcggtgactactattgcacggacatctgtttcaggccaatttttcataatttcatatacgtttcctttgtcgtatattgtaacgtacatgccccggggtcttctgtaaaccaatccaaagttttgacaagctaatcctacgactggtgtatatactaagggcataatatctgttacgtatttcctgacgaaactgtagaataatttttcattgcggtccaaaagacctatcaggtacatgtatttgtttaaattatcgtctaatctgtccaaacattttttacaatgttcgatttgttgttcctgtgattttactacgggaggtaacaacccatggattccaagctgttgtctctcttcgaaggtgaatgccagacccttatttaaagcgggggttgtcaacctctccagaccggatactcctccaggaacgaggtgctctccatttccccaatttccaacccgatctctttccatggttagatttgatttgtttattgggagtggactagta

SEQ ID NO: 2442 - DNA, 1857 bp, Diabrotica virgifera
  SmartBlast Evalue=0; Info=Malate dehydrogenase n=1 Tax=Bombyx mori RepID=Q1HPM5_BOMMO
ggaaaatctaaatactgtatttccggaatatctacttatacattaaacatggattataacaacaatataacataaattatttattttatttattacttagtaatttattagagttttgggaatgcataaactgcaggtaaagcaggttggtagtccgtattgtacatctgagctttgatgaaagcttctttgtcttttggttcgggaagtaccgttgcattgccttcttcgtaagcgtactctagaagtcgtgttgcgattcttagtgaacaggcaacgatgctctctagtggtgggtatatccttccattttcaaggttgtcttccgttaccaaattggcgagtgcctctgctgcaaccaagaagtgttcttcgctgattttttggataccagcagtaactgtggccaatcctactccggggaatatgtatgagttgttaccttgtcctgggtaaaacgtctttccatttaaagttactggatcgaatggactgccgctggcaaagatggcagtaccatttgtttctctgtaacattcttcagctgtacattctgctttatgcgtaggattgctcagagcgaagatcacaggtcgcttgttgtttttggccatttctcgcaaaatttctgaggtgaaagcgccacctatggctgcggctccaatcaagattgatggtttgatgctctttacaacttcagtcagtgtttttacgggtgggtgggcgtgtgcgtacatttccttgtggtggttgattcctccttcaggtctgtccttaactattaaaccttttgagtctaccatccatattttcttcctggcgtcactctcactagtaccttcctttaccattgccatggtgcacaattgagcgatacccaaattcgcttctcctgctccttggaatactatcacatgatcggaaagtctagtttttgtgatcctcaatgaagccaatagaccagctacggctacactagcggtaccctgaatgtcgtcgttgaaagtacaatattcgtttctgtacttttccaacaatctgaatgcgtttgagttaccaaagtcttcgaattggatcaaagtgttctgaccccatcggcgtactacggcttccatgaattcatcgaggagttcatcgtattcttgtcctgtgactctcttttgtctcaaacctatatacaaaggatctttcagatgagtctcgttgttggttcctacgtctattgtaattgggaggcattgatggggcttgattccagccaaagctgtgtataaagacagtttgccgacggggattcccataccacaggctccttggtctcctaaacctaagatacgttcaccgtcggtgactactattgcacggacatctgtttcaggccaatttttcataatttcatatacgtttcctttgtcgtaaattgtaacgtacatgccccggggtcttctgtaaaccaatccaaagttttgacaagctaatcctacgactggtgtatatactaagggcataatatctgttacgtatttcctgacgaaactgtagaataatttttcattgcggtccaaaagacctatcaggtacatgtatttgtttaaattatcatctaatctgtccaaacattttttacaatgttcgatttgttgttcctgtgattttactacgggaggtaacaacccatggattccaagctgttgtctctcttcgaaggtgaatgccagacccttatttaaagcgggggttgtcaacctctccagaccggatactcctccaggaacgaggtgctctccatttccccaatttccaacccgatctctttccatggttagatttgatttgtttattgggagtggactagta

SEQ ID NO: 2443 - DNA, 2698 bp, Diabrotica virgifera
  SmartBlast Evalue=2E-99; Info=RNA-binding protein ELAV/HU n=1 Tax=Glossina morsitans morsitans RepID=D3TN68_GLOMM
gttggcgattgataatttgatattgatatttttattatactggaaattgttagaaaattgcaaaatggctaataataatatggtacattgccaattatggatggggagtctggaacctttcatgacagaaacgtttattcttaatgctttccggaaaatgggcgagagcccccttagcgtaaaaattatgcgtaataaatttactggagaagcagcaggatactgttttgtacattttgcctctgatgaagaagctattgatgcaatgcacaaacttaactccaagcctattccaaatacaactcccacagttcgattcaggctcaacaatgccagtaattctggtagatcccttattgatagagagttttctgtgtgggttggagatttaagttcagatgtagatgattataacttgtatagagtattttcttcaaaatacaataccatcaagacagcaaaagttattttagatgccagtggttttagtaaaggatatgggttcgtaagatttggaagtgaagaggaaatgaaggacagcttagtatctatgaatggttttataggccttggaacaaaagctctgaaaatatgtaatgctgtgcctaaacccaagggactattacctggttattcaggaccttcaaaccagaatgacagtaatgacttcagtcagtattatgatccaacaacgtattggcaaaactatgcatcttggcagccaggatataataattatgaccaatcatctgaacaccaagcagcacgtgacaattcaaatgcgcattctgaaagaaaggaggatgatttggacttgatagaacacaccattcctttggatgtcgacaaaatgaatcgagagaaacttgatgcagattgtaatttatgggatgccttggagagttccaaatggttaccgtacgaaatggtagatgttgcttgatataaataatacctggttgtcaaacaaaaatatctcaatgacaactatttcatgtattttgaatttttgactttgtatggtttataggtacatttttctattacttttaaatctgttgcccatgtaggttaaatgaagaaggaaataaaaagaattttaactagtggcaattagaggtattgttgaaaataaaagataaaataagcataaaaaagtggattgtgtttgcctagcattttagagacttatttgagaaaaatgtattgatccatgaatttaacttcaaatctaatcagcttaaagtgcttagccccggcgcatattgaacctaagcgagtcacaacctgcgccggtgggacgggtgacctgtgtagttatttttctagcgtgccgcatattgaacacaagctaacccgaccgtcggctgtcgccgtaacgaatagagacgggcaaaataagtgcaaacgtgtaacggttactattgataccggttttcagtggtactgagtacaaatactgattacaaaatactgatgtatctgatccttgtactgaattgagtaggcaactaaaaaacggtagttccgtacatgtaactagtaacgttttaaaaatatcttacacgtccctagtagtcgtagcggtatgactttcgaaaacatcgaatttgatcataagcgggtgcataaaaagatatcttacactgagtattctatttctacatacctttataataacaagcataagttaaacactgcattgattgtgattgcaaaaacggttcgcatgttttaaataagatttttgctgattatgtttttgctaaaatattaaataacacaaaaaatacaattcacaaccatcatttaatttttaacgataaacaaaagtctaataaatatatgatgacaagtttaaaattgatcgactttgtcgataacagtgtcattaatagatattttttaccatgaatcattttccaatgattgtgtggatttagaaatacatactaaacaattttttgatctgtataaaggagattataattatgacacattatggtactccttatttttcaaataatatgctcttgtaaacgcataactttgatttattggctaaagccacactaactagatacttcacaagaaattaaaaataattaacatgtaaaaaattcactgttttaatcaaatatattatattgcctactattgcgcctactatattatataataaaatacatattaaaacgaataaacgaaaacttgtagagtagtgctgattgatacaacagagcaataaaatgttattcattcaagatagtgtaaaatatatcgccgcttattcatttcagatatttccatctcgcaaaacaaaaacacgtaaaaattaacatctggcgctgagtcacccgtcccaagcccaagaaaactgtacgtcgatgacaaaccttccccagctcgacctgcgaacgcatgaactgatagtaggatgcgcagaacggtctacgcaactcgccggtgccaggttgtgtctgcttaggatcaatttgcgccggtacttataataccctcaaataccatttaatataaaaatggagctacgattgtttaccactaccgcatacgaaagcatactatctaatataggtacgcacgtatttatggagttgctatggatatactactgtttacctcaactgactaatggagttgctactgtttctaaacgccttatctaggcaactaataa

SEQ ID NO: 2444 - DNA, 2678 bp, Diabrotica virgifera
  SmartBlast Evalue=2E-99; Info=RNA-binding protein ELAV/HU n=1 Tax=Glossina morsitans morsitans RepID=D3TN68_GLOMM
gttggcgattgataatttgatattgatatttttattatactggaaattgttagaaaattgcaaaatggctaataataatatggtacattgccaattatggatggggagtctggaacctttcatgacagaaacgtttattcttaatgctttccggaaaatgggcgagagcccccttagcgtaaaaattatgcgtaataaatttactggagaagcagcaggatactgttttgtacattttgcctctgatgaagaagctattgatgcaatgcacaaacttaactccaagcctattccaaatacaactcccacagttcgattcaggctcaacaatgccagtaattctggtagatcccttattgatagagagttttctgtgtgggttggagatttaagttcagatgtagatgattataacttgtatagagtattttcttcaaaatacaataccatcaagacagcaaaagttattttagatgccagtggttttagtaaaggatatgggttcgtaagatttggaagtgaagaggaaatgaaggacagcttagtatctatgaatggttttataggccttggaacaaaagctctgaaaatatgtaatgctgtgcctaaacccaagggactattacctggttattcaggaccttcaaaccagaatgacagtaatgacttcagtcagtattatgatccaacaacgtattggcaaaactatgcatcttggcagccaggatataataattatgaccaatcatctgaacaccaagcagcacgtgacaattcaaatgcgcattctgaaagaaaggaggatgatttggacttgatagaacacaccattcctttggatgtcgacaaaatgaatcgagagaaacttgatgcagattgtaatttatgggatgccttggagagttccaaatggttaccgtacgaaatggtagatgttgcttgatataaataatacctggttgtcaaacaaaaatatctcaatgacaactatttcatgtattttgaatttttgactttgtatggtttataggtacatttttctattacttttaaatctgttgcccatgtaggttaaatgaagaaggaaataaaaagaattttaactagtggcaattagaggtattgttgaaaataaaagataaaataagcataaaaaagtggattgtgtttgcctagcattttagagacttatttgagaaaaatgtattgatccatgaatttaacttcaaatctaatcagcttaaagtgcttagccccggcgcatattgaacctaagcgagtcacaacctgcgccggtgggacgggtgacctgtgtagttatttttctagcgtgccgcatattgaacacaagctaacccgaccgtcggctgtcgccgtaacgaatagagacgggcaaaataagtgcaaacgtgtaacggttactattgataccggttttcagtggtactgagtacaaatactgattacaaaatactgatgtatctgatccttgtactgaattgagtaggcaactaaaaaacggtagttccgtacatgtaactagtaacgttttaaaaatatcttacacgtccctagtagtcgtagcggtatgactttcgaaaacatcgaatttgatcataagcgggtgcataaaaagatatcttacactgagtattctatttctacatacctttataataacaagcataagttaaacactgcattgattgtgattgcaaaaacggttcgcatgttttaaataagatttttgctgattatgtttttgctaaaatattaaataacacaaaaaatacaattcacaaccatcatttaatttttaacgataaacaaaagtctaataaatatatgatgacaagtttaaaattgatcgactttgtcgataacagtgtcattaatagatattttttaccatgaatcattttccaatgattgtgtggatttagaaatacatactaaacaattttttgatctgtataaaggagattataattatgacacattatggtactccttatttttcaaataatatgctcttgtaaacgcataactttgatttattggctaaagccacactaactagatacttcacaagaaattaaaaataattaacatgtaaaaaattcactgttttaatcaaatatattatattgcctactattgcaataaaatattaaaacgaataaacgaaaacttgtagagtagtgctgattgatacaacagagcaataaaatgttattcattcaagatagtgtaaaatatatcgccgcttattcatttcagatatttccatctcgcaaaacaaaaacacgtaaaaattaacatctggcgctgagtcacccgtcccaagcccaagaaaactgtacgtcgatgacaaaccttccccagctcgacctgcgaacgcatgaactgatagtaggatgcgcagaacggtctacgcaactcgccggtgccaggttgtgtctgcttaggatcaatttgcgccggtacttataataccctcaaataccatttaatataaaaatggagctacgattgtttaccactaccgcatacgaaagcatactatctaatataggtacgcacgtatttatggagttgctatggatatactactgtttacctcaactgactaatggagttgctactgtttctaaacgccttatctaggcaactaataa

SEQ ID NO: 2445 - DNA, 1912 bp, Diabrotica virgifera
ttatttcctgttttctgatagcagtaaaatgtattttgagttaagtaggttgcacgcattcttcttttatgtcaataaatttaattaaaaataattttttttgggcaccctgtataaatgattatgataatgtttgtattgctgagtggagggttgagttacctttcagatgagcatttaaaaaaaccccattctcatttaaaaaacacgaccccgattctcatttgaaaaattgtagatgacgtcatcgcgcccagatgggtgacgtcactggtatgacgcgtatgtcaagaggtcgcaatttgaaagtaagaattgacctgtttgggatttttttccaaattcgtccattctcgagaaaatgaattattccaacctttgcgtgctcacgtatataatacacgctcattagtttccagttctggttgagctacaatagccagtcagtgattttctataaccagtttaaactacgtgttagccccggcgcatattgaacctaagcgagtcacaacctgcgccggtgggacgggtgacctgtgcagttatttttctagcgtgccgcatattgaacacaagctaacccgaccgtcggctgtcgccgtaacgaatagagacgggcaaaataagtgcaaacgtgtaacggttactattgataccggttctcagtggtactgagtacaaatactgatgtatctgatccttgtactgaattgagtaggcaactaaaaaacggtagttccgtacatgtaactagtaacgttttaaaaatatcttacacgtccctagtagtcgtagcggtatgactttcgaaaacatcgaatttgatcataagcgggtgcataaaaagatatcttacactgagtattctatttctacatacctttataataacaagcataagttaaacactgcattgattgtgattgcaaaaacggttcgcatgttttaaataagatttttgctgattatgtttttgctaaaatattaaataacacaaaaaatacaattcacaaccatcatttaatttttaacgataaacaaaagtctaataaatatatgatgacaagtttaaaattgatcgactttgtcgataacagtgtcattaatagatattttttaccatgaatcattttccaatgattgtgtggatttagaaatacatactaaacaattttttgatctgtataaaggagattataattatgacacattatggtactccttatttttcaaataatatgctcttgtaaacgcataactttgatttattggctaaagccacactaactagatacttcacaagaaattaaaaataattaacatgtaaaaaattcactgttttaatcaaatatattatattgcctactattgcgcctactatattatataataaaatacatattaaaacgaataaacgaaaacttgtagagtagtgctgattgatacaacagagcaataaaatgttattcattcaagatagtgtaaaatatatcgccgcttattcatttcagatatttccatctcgcaaaacaaaaacacgtaaaaattaacatctggcgctgagtcacccgtcccaagcccaagaaaactgtacgtcgatgacaaaccttccccagctcgacctgcgaacgcatgaactgatagtaggatgcgcagaacggtctacgcaactcgccggtgccaggttgtgtctgcttaggatcaatttgcgccggtacttataataccctcaaataccatttaatataaaaatggagctacgattgtttaccactaccgcatacgaaagcatactatctaatataggtacgcacgtatttatggagttgctatggatatactactgtttacctcaactgactaatggagttgctactgtttctaaacgccttatctaggcaactaataa

SEQ ID NO: 2446 - DNA, 1892 bp, Diabrotica virgifera
ttatttcctgttttctgatagcagtaaaatgtattttgagttaagtaggttgcacgcattcttcttttatgtcaataaatttaattaaaaataattttttttgggcaccctgtataaatgattatgataatgtttgtattgctgagtggagggttgagttacctttcagatgagcatttaaaaaaaccccattctcatttaaaaaacacgaccccgattctcatttgaaaaattgtagatgacgtcatcgcgcccagatgggtgacgtcactggtatgacgcgtatgtcaagaggtcgcaatttgaaagtaagaattgacctgtttgggatttttttccaaattcgtccattctcgagaaaatgaattattccaacctttgcgtgctcacgtatataatacacgctcattagtttccagttctggttgagctacaatagccagtcagtgattttctataaccagtttaaactacgtgttagccccggcgcatattgaacctaagcgagtcacaacctgcgccggtgggacgggtgacctgtgcagttatttttctagcgtgccgcatattgaacacaagctaacccgaccgtcggctgtcgccgtaacgaatagagacgggcaaaataagtgcaaacgtgtaacggttactattgataccggttctcagtggtactgagtacaaatactgatgtatctgatccttgtactgaattgagtaggcaactaaaaaacggtagttccgtacatgtaactagtaacgttttaaaaatatcttacacgtccctagtagtcgtagcggtatgactttcgaaaacatcgaatttgatcataagcgggtgcataaaaagatatcttacactgagtattctatttctacatacctttataataacaagcataagttaaacactgcattgattgtgattgcaaaaacggttcgcatgttttaaataagatttttgctgattatgtttttgctaaaatattaaataacacaaaaaatacaattcacaaccatcatttaatttttaacgataaacaaaagtctaataaatatatgatgacaagtttaaaattgatcgactttgtcgataacagtgtcattaatagatattttttaccatgaatcattttccaatgattgtgtggatttagaaatacatactaaacaattttttgatctgtataaaggagattataattatgacacattatggtactccttatttttcaaataatatgctcttgtaaacgcataactttgatttattggctaaagccacactaactagatacttcacaagaaattaaaaataattaacatgtaaaaaattcactgttttaatcaaatatattatattgcctactattgcaataaaatattaaaacgaataaacgaaaacttgtagagtagtgctgattgatacaacagagcaataaaatgttattcattcaagatagtgtaaaatatatcgccgcttattcatttcagatatttccatctcgcaaaacaaaaacacgtaaaaattaacatctggcgctgagtcacccgtcccaagcccaagaaaactgtacgtcgatgacaaaccttccccagctcgacctgcgaacgcatgaactgatagtaggatgcgcagaacggtctacgcaactcgccggtgccaggttgtgtctgcttaggatcaatttgcgccggtacttataataccctcaaataccatttaatataaaaatggagctacgattgtttaccactaccgcatacgaaagcatactatctaatataggtacgcacgtatttatggagttgctatggatatactactgtttacctcaactgactaatggagttgctactgtttctaaacgccttatctaggcaactaataa

SEQ ID NO: 2447 - DNA, 1539 bp, Diabrotica virgifera
ctgatatataatttcatcaatatacagactgtttatgtttcaattagatatacggactataaatgccaacactcttacctgctgcccgcctaagccccggcgtatattgaacctaagcgagtcacaacctgcgccggtgggacgggtgacctgtgtagttatttttctagcgtgccgcatattgaacacaagctaacccgaccgtcggctgtcgccgtaacgaatagagacgggcaaaataagtgcaaacgtgtaacggttactattgataccggttttcagtggtactgagtacaaatactgattacaaaatactgatgtatctgatccttgtactgaattgagtaggcaactaaaaaacggtagttccgtacatgtaactagtaacgttttaaaaatatcttacacgtccctagtagtcgtagcggtatgactttcgaaaacatcgaatttgatcataagcgggtgcataaaaagatatcttacactgagtattctatttctacatacctttataataacaagcataagttaaacactgcattgattgtgattgcaaaaacggttcgcatgttttaaataagatttttgctgattatgtttttgctaaaatattaaataacacaaaaaatacaattcacaaccatcatttaatttttaacgataaacaaaagtctaataaatatatgatgacaagtttaaaattgatcgactttgtcgataacagtgtcattaatagatattttttaccatgaatcattttccaatgattgtgtggatttagaaatacatactaaacaattttttgatctgtataaaggagattataattatgacacattatggtactccttatttttcaaataatatgctcttgtaaacgcataactttgatttattggctaaagccacactaactagatacttcacaagaaattaaaaataattaacatgtaaaaaattcactgttttaatcaaatatattatattgcctactattgcgcctactatattatataataaaatacatattaaaacgaataaacgaaaacttgtagagtagtgctgattgatacaacagagcaataaaatgttattcattcaagatagtgtaaaatatatcgccgcttattcatttcagatatttccatctcgcaaaacaaaaacacgtaaaaattaacatctggcgctgagtcacccgtcccaagcccaagaaaactgtacgtcgatgacaaaccttccccagctcgacctgcgaacgcatgaactgatagtaggatgcgcagaacggtctacgcaactcgccggtgccaggttgtgtctgcttaggatcaatttgcgccggtacttataataccctcaaataccatttaatataaaaatggagctacgattgtttaccactaccgcatacgaaagcatactatctaatataggtacgcacgtatttatggagttgctatggatatactactgtttacctcaactgactaatggagttgctactgtttctaaacgccttatctaggcaactaataa

SEQ ID NO: 2448 - DNA, 1519 bp, Diabrotica virgifera
ctgatatataatttcatcaatatacagactgtttatgtttcaattagatatacggactataaatgccaacactcttacctgctgcccgcctaagccccggcgtatattgaacctaagcgagtcacaacctgcgccggtgggacgggtgacctgtgtagttatttttctagcgtgccgcatattgaacacaagctaacccgaccgtcggctgtcgccgtaacgaatagagacgggcaaaataagtgcaaacgtgtaacggttactattgataccggttttcagtggtactgagtacaaatactgattacaaaatactgatgtatctgatccttgtactgaattgagtaggcaactaaaaaacggtagttccgtacatgtaactagtaacgttttaaaaatatcttacacgtccctagtagtcgtagcggtatgactttcgaaaacatcgaatttgatcataagcgggtgcataaaaagatatcttacactgagtattctatttctacatacctttataataacaagcataagttaaacactgcattgattgtgattgcaaaaacggttcgcatgttttaaataagatttttgctgattatgtttttgctaaaatattaaataacacaaaaaatacaattcacaaccatcatttaatttttaacgataaacaaaagtctaataaatatatgatgacaagtttaaaattgatcgactttgtcgataacagtgtcattaatagatattttttaccatgaatcattttccaatgattgtgtggatttagaaatacatactaaacaattttttgatctgtataaaggagattataattatgacacattatggtactccttatttttcaaataatatgctcttgtaaacgcataactttgatttattggctaaagccacactaactagatacttcacaagaaattaaaaataattaacatgtaaaaaattcactgttttaatcaaatatattatattgcctactattgcaataaaatattaaaacgaataaacgaaaacttgtagagtagtgctgattgatacaacagagcaataaaatgttattcattcaagatagtgtaaaatatatcgccgcttattcatttcagatatttccatctcgcaaaacaaaaacacgtaaaaattaacatctggcgctgagtcacccgtcccaagcccaagaaaactgtacgtcgatgacaaaccttccccagctcgacctgcgaacgcatgaactgatagtaggatgcgcagaacggtctacgcaactcgccggtgccaggttgtgtctgcttaggatcaatttgcgccggtacttataataccctcaaataccatttaatataaaaatggagctacgattgtttaccactaccgcatacgaaagcatactatctaatataggtacgcacgtatttatggagttgctatggatatactactgtttacctcaactgactaatggagttgctactgtttctaaacgccttatctaggcaactaataa

SEQ ID NO: 2449 - DNA, 2343 bp, Diabrotica virgifera
ctttctttatttgtgaagtttaagttcattaaatgttgttctttatttatgaatccagactttatacaatatgccagattggagtgtagttatttcaaaagtttgggccggatagctcaggcggtaggatgtctgacttccacgcagcctgaataaaatgagtaccttgggtaaaaccagtggtaataataggcggatgaagcgtagcactggccccttaccttccttgtataccgtaggtcctacaaatagcagactacccttctataatgccaaagccgcgttagctgtaaaacgggagactactattatttgtctagtttgtatgtattatatgtctagtttgtccatatttcgggccttctatgaacaaatgtccttccttttataagacagcgggtctagaagcaaacgtaaagttggagcagagttgtttagaagttataattgtatgtatgtatatactgaaactactgaaacatgtgttgtcatacaactgtttgattactattaatgcttgatatattataaacgatatctgagttatttttttttattgaatattaagaagtaatgtaacctttcaacgtgttggtcaggtcttggattttatgttcaggcattgccaaaactcaatcccatttacactaacactatagtatattattcaacgagcatgtaatgatggctattactcacgatgatgaagttagccattatatgcaagtagaatactatactttttcacgacctttttttattgggttagtagaaaaatgtaattatcaactactaacattatttaaaatcgaaagattttatttttcataagaaacatattttatataactaatgcaacactgttagaattaccctctttaagcttatgaaacaatgaaacagttgacattagtctcatttaatggcggtggctgttaaaaataagacacattttaaggcaattacacgaaaaataacgtgtggtctcaataaaaatttattgtacaatcaacagtaagtaaaacataattcattgatataaatttcatatccgtaagcccttttacggaattaatagcgattgtttattatttacctttgaataacgtaaatcttaaattgtcaaatgttgaaatttaaacgtaaaaaatatactaacccattgttacaagttaaaaatcctttaaacatttttcaaatttaattgttcatataaattacaatgaacattttattaaataaacaagtttaagtaattttatttgtaataggtatattaaaagtgccatgcaccacttgaatctaacttcaacccgtgagtaatgatccgcgagtaacttcagcccgtgagtaatgaattattactcacgggtaaagtaatgggtgttattatctatttaaaaatagcgaataatgagtatattattaaacggtcgtagaaaaaggtttttatatactaaaaccctaattttagcagaaataacctcaaaaaattgcctacaacttaccatatgaatagtagttgtatttatgttatattcgtaaaagataaagaggaaaatgtaggtacctgtaaatttcctatagtcacctgtagaccataaatcacaaaaaaatattaaaaaatcctgtataaaagttatacatatttatattaaaaagacccattcgggctacagcacagaacgttttcatgacaattccatcatcagtgatgatgacaaacctatcaacagaatttagcagcctagaagtcagtaacaagaatatgtctacattaatgaattactagaaagtcaaaaacacatcatctatacatacacaatacaaaacaaatcagaattcgatatcgaccccaaggttcaactcgaaacttggctatctacgtgcaagatcgaggccagatgagtcgcctgtcaaatttggccaaaaacagcgaccactaactgcaaaaatcgtagaaacctctttctttaatttatgatttttaaaaggccttctaatttgtaaacggtttccggagtaaaaatcgaaaggtcaaaaacaaatataaaatctgttttttattacaatcaattatggcttaatcccatataaatgtaatatttctcttaatttttccagtaatttacatagattatttcattcatagagattttgaccaatagaaagctacagaaataaaaattacagcgataatttttgataatttcccgtcgtcaagtattacgtcagatgcccttcattgctacgcataattgaacattcagtgacattaatgacaattaatgttttacaacttatcaaagagaacaccaggaacaggtttagcaaatattcagg

SEQ ID NO: 2450 - DNA, 2160 bp, Diabrotica virgifera
gaattcatacttaaaaatttgtcaattatgtgttgtacgtattggtgcttaaaagaagaagtaaacaacaagaatataccaacaatagcggataggaaaatgtgaaacgcacgtcttgagtcatacacaatacatatgcaacacacaatacacaaatacagtacgaatactcccacatacagaatctcgtaaagcatatagaaataatgcagaaacacataaaatcagaattcggtgtaccatagagctctaacacttccaccctaaggttttttctagctaaagcatggatgttccctacaacactattgccaagtatatcaacctcaattttgataagatataacctccttaacatcttggaggttatacacattttcaacataatttctttaataatcttttttgaaaacaatttccgaagtggaaacagaaacgtcaaattttttaggtaaaaatgtaattttcgttataatcaactggggttgatcccatatataatcacaatatttaataatgtatttatatttcaaaaactattcattgagttgtcatgaaataccaaaaagtaacactgtattattagaagtcgtttaacggttcaattagggaatcggcactagactgttgaacattgtgcctacttagatcttacaatttttcttgttcttttttgaaaaaagcgttgactataaactgaagaaaaatgtcaagaggttattttagcatatataaattattatgagcatctaaagaaagaaaaaataacagggaccccaagtaaaaatcaaacggaaggggcagatatggaaacattacagagttgaaaaaaatatagagatattaatgagtttgtacagaatataattatttttgttaaattgcacccaaaatcctaaaaggaaacatagaataagtaataaaatctgaaaagaccgtgaaggcaaatgtatcgtatgggattcctatataattatcgaactgattcttcttcctaatgtagagatgactctgtctgttttctgatgatctactcgtttggttagtcaaaatgcatcaaagttttacaatatctcaccctgaattacatttgatatttgagattgttttgtccaaatctgaaagatttatggaaaccaacaacctcatattacgcgtacttgcaaagtacgcttatgcatgttgattgaccataaagaatttttatcagaagggatgaaatattttaactcaatttttgttttaatacctaaatacgttttgatgttttaattttaattaaccatttttactttatatcttttatgaagtatgcagtggtactaatagagtgtaatagctgattaccaatttagtacctaaataaatttcagtttatggtcagtgcactaattttttgttagcataaattaatcaataggtagaattggaatctacagggatattacttttatctataaatgttaccgatagagatttacgttacgcgccagctaagaaaaaccactaggttgagaattacatttcttcatgtttctatcttagaaccatttcatttgtagcagtagctccatctttactctccatcatttatatcgtactaagttttaaatctttttctttgagagcttgtttccaatttcactttagcactttatttcccactaagacgtcatcatcagaatatattaaccaccgtcgaatgttaccctgtagtttctgattcctgatacactgagccctgatgcaatcctactttcacatgaaatttatcagtccttgcaacacttgttacaccctaatgcatatatccacaatctgggacttcttttttattgagtactttccacagaatctctcgaggaactttatcataagctttcccaagatcaattaatgacatacagcatttgtttctttattactatatcttttctatcagctactatactgattatttcattcatagagattttgaccaatagaaagctacagaaataaaaattacagcgataatttttgataatttcccgtcgtcaagtattacgtcagatgcccttcattgctacgcataattgaacattcagtgacattaatgacaattaatgttttacaacttatcaaagagaacaccaggaacaggtttagcaaatattcagg

SEQ ID NO: 2451 - DNA, 1883 bp, Diabrotica virgifera
gtgtgtatcttcgatatttaattcatatttaaaatagcctgtaatttttaaagcgaataatttttatcactacccaagataataatgatataaataaacataagaagatgatgaataacatagacgaaaataaaataggcattctttttttattcgccacaaaccagtagttttttttttttgacaatatctacaataaaaaatcaaattaagcaattaaacacaaatatgagataataatgaaaatgttaataatgaatacactctatagtatatttatttaacacattagatcaaacaaagtgacaaaaccggctaattccaaatagttaccatgccattaagaaaaacaaaaagatgcactttcataagaaacatattttatataactaatgcaacactgttagaattaccctctttaagcttatgaaacaatgaaacagttgacattagtctcatttaatggcggtggctgttaaaaataagacacattttaaggcaattacacgaaaaataacgtgtggtctcaataaaaatttattgtacaatcaacagtaagtaaaacataattcattgatataaatttcatatccgtaagcccttttacggaattaatagcgattgtttattatttacctttgaataacgtaaatcttaaattgtcaaatgttgaaatttaaacgtaaaaaatatactaacccattgttacaagttaaaaatcctttaaacatttttcaaatttaattgttcatataaattacaatgaacattttattaaataaacaagtttaagtaattttatttgtaataggtatattaaaagtgccatgcaccacttgaatctaacttcaacccgtgagtaatgatccgcgagtaacttcagcccgtgagtaatgaattattactcacgggtaaagtaatgggtgttattatctatttaaaaatagcgaataatgagtatattattaaacggtcgtagaaaaaggtttttatatactaaaaccctaattttagcagaaataacctcaaaaaattgcctacaacttaccatatgaatagtagttgtatttatgttatattcgtaaaagataaagaggaaaatgtaggtacctgtaaatttcctatagtcacctgtagaccataaatcacaaaaaaatattaaaaaatcctgtataaaagttatacatatttatattaaaaagacccattcgggctacagcacagaacgttttcatgacaattccatcatcagtgatgatgacaaacctatcaacagaatttagcagcctagaagtcagtaacaagaatatgtctacattaatgaattactagaaagtcaaaaacacatcatctatacatacacaatacaaaacaaatcagaattcgatatcgaccccaaggttcaactcgaaacttggctatctacgtgcaagatcgaggccagatgagtcgcctgtcaaatttggccaaaaacagcgaccactaactgcaaaaatcgtagaaacctctttctttaatttatgatttttaaaaggccttctaatttgtaaacggtttccggagtaaaaatcgaaaggtcaaaaacaaatataaaatctgttttttattacaatcaattatggcttaatcccatataaatgtaatatttctcttaatttttccagtaatttacatagattatttcattcatagagattttgaccaatagaaagctacagaaataaaaattacagcgataatttttgataatttcccgtcgtcaagtattacgtcagatgcccttcattgctacgcataattgaacattcagtgacattaatgacaattaatgttttacaacttatcaaagagaacaccaggaacaggtttagcaaatattcagg

SEQ ID NO: 2452 - DNA, 1912 bp, Diabrotica virgifera
aaacagtggtagtctacttgtactttgtcggtatcgtcacaaatcacctacctctagtctaaatggtacatacagctggcgatacagcgtcctaatggggaatttgaattatctttcagattcgctttaaaatgatggtccagctgtttttcgattcagaggagtgcactgtaacgaacgctgctgaggacgcctgaaatggtagaaacagcctgtctagcgggtgtgcaaccctctgaatcgaaaacaagcaaaaccatcatttattattattaaaaaatatttgtgacgaaatagtatattattcaacgagcatgtaatagccattacatgcaagtagaatactatactttttctacgaccttttttatttgggttagtagaaaatataattatcaactactaacattattcaaaatcaaaagattttgtttttcataagaaaatatattttatataaatatggcaacactgttagaatagccctctttgagcttacgaaacaatgaaacagacagttgacattagtgtcatggaatggaggtggcttttaaaaataagacatattttaaggcaattacacgaaaagaaacgtgtgctcttaataaaaatttattgtacagtcaacagtaagtaaaacagaattcattcgattgcttatttacctttgaataacgtaaatcttaaattgtcaaatgttgaaatttaaacgtaaaaaatatactaacccattgttacaagttaaaaatcctttaaacatttttcaaatttaattgttcatataaattacaatgaacattttattaaataaacaagtttaagtaattttatttgtaataggtatattaaaagtgccatgcaccacttgaatctaacttcaacccgtgagtaatgatccgcgagtaacttcagcccgtgagtaatgaattattactcacgggtaaagtaatgggtgttattatctatttaaaaatagcgaataatgagtatattattaaacggtcgtagaaaaaggtttttatatactaaaaccctaattttagcagaaataacctcaaaaaattgcctacaacttaccatatgaatagtagttgtatttatgttatattcgtaaaagataaagaggaaaatgtaggtacctgtaaatttcctatagtcacctgtagaccataaatcacaaaaaaatattaaaaaatcctgtataaaagttatacatatttatattaaaaagacccattcgggctacagcacagaacgttttcatgacaattccatcatcagtgatgatgacaaacctatcaacagaatttagcagcctagaagtcagtaacaagaatatgtctacattaatgaattactagaaagtcaaaaacacatcatctatacatacacaatacaaaacaaatcagaattcgatatcgaccccaaggttcaactcgaaacttggctatctacgtgcaagatcgaggccagatgagtcgcctgtcaaatttggccaaaaacagcgaccactaactgcaaaaatcgtagaaacctctttctttaatttatgatttttaaaaggccttctaatttgtaaacggtttccggagtaaaaatcgaaaggtcaaaaacaaatataaaatctgttttttattacaatcaattatggcttaatcccatataaatgtaatatttctcttaatttttccagtaatttacatagattatttcattcatagagattttgaccaatagaaagctacagaaataaaaattacagcgataatttttgataatttcccgtcgtcaagtattacgtcagatgcccttcattgctacgcataattgaacattcagtgacattaatgacaattaatgttttacaacttatcaaagagaacaccaggaacaggtttagcaaatattcagg

SEQ ID NO: 2453 - DNA, 1272 bp, Diabrotica virgifera
ctttctttatttgtgaagtttaagttcattaaatgttgttctttatttatgaatccagactttatacaatatgccagattggagtgtagttatttcaaaagtttgggccggatagctcaggcggtaggatgtctgacttccacgcagcctgaataaaatgagtaccttgggtaaaaccagtggtaataataggcggatgaagcgtagcactggccccttaccttccttgtataccgtaggtcctacaaatagcagactacccttctataatgccaaagccgcgttagctgtaaaacgggagactactattatttgtctagtttgtatgtattatatgtctagtttgtccatatttcgggccttctatgaacaaatgtccttccttttataagacagcgggtctagaagcaaacgtaaagttggagcagagttgtttagaagttataattgtatgtatgtatatactgaaactactgaaacatgtgttgtcatacaactgtttgattactattaatgcttgatatattataaacgatatctgagttatttttttttattgaatattaagaagtaatgtaacctttcaacgtgttggtcaggtcttggattttatgttcaggcattgccaaaactcaatcccatttacactaacactatagtatattattcaacgagcatgtaatgatggctattactcacgatgatgaagttagccattatatgcaagtagaatactatactttttcacgacctttttttattgggttagtagaaaaatgtaattatcaactactaacattatttaaaatcgaaagattttatttttcataagaaacatattttatataactaatgcaacactgttagaattaccctctttaagcttatgaaacaatgaaacagttgacattagtctcatttaatggcggtggctgttaaaaataagacacattttaaggcaattacacgaaaaataacgtgtggtctcaataaaaatttattgtacaatcaacagtaagtaaaacataattcattgatataaatttcatatccgtaagcccttttacggaattaatagcgattgtttatatttaccttttattaacgttaatcttaaaatgtcaaatgttgaaatttaaacgtaaaaaatatactaacccattgttacattaaaaatccgttaaacatttaaacatttttcgaatttaattgttgatataaattacaatgattaggggagtgcaattagaacgaaaacatgcattgtttcgg

SEQ ID NO: 2454 - DNA, 812 bp, Diabrotica virgifera
gtgtgtatcttcgatatttaattcatatttaaaatagcctgtaatttttaaagcgaataatttttatcactacccaagataataatgatataaataaacataagaagatgatgaataacatagacgaaaataaaataggcattctttttttattcgccacaaaccagtagttttttttttttgacaatatctacaataaaaaatcaaattaagcaattaaacacaaatatgagataataatgaaaatgttaataatgaatacactctatagtatatttatttaacacattagatcaaacaaagtgacaaaaccggctaattccaaatagttaccatgccattaagaaaaacaaaaagatgcactttcataagaaacatattttatataactaatgcaacactgttagaattaccctctttaagcttatgaaacaatgaaacagttgacattagtctcatttaatggcggtggctgttaaaaataagacacattttaaggcaattacacgaaaaataacgtgtggtctcaataaaaatttattgtacaatcaacagtaagtaaaacataattcattgatataaatttcatatccgtaagcccttttacggaattaatagcgattgtttatatttaccttttattaacgttaatcttaaaatgtcaaatgttgaaatttaaacgtaaaaaatatactaacccattgttacattaaaaatccgttaaacatttaaacatttttcgaatttaattgttgatataaattacaatgattaggggagtgcaattagaacgaaaacatgcattgtttcgg

SEQ ID NO: 2455 - DNA, 3149 bp, Diabrotica virgifera
  SmartBlast Evalue=5E-13; Info=Endonuclease-reverse transcriptase n=1 Tax=Bombyx mori RepID=D5LB38_BOMMO
aacgagaccaacgctctcttcgaaacaaacaaggacttcagacacaaatatttctccaatgacttccatagccttcctggtaactggagcgttggagagggaagaaaggtggacgaggagaaggaaatatatgaaacggaaaaactgttaggctttcagcttgatgaagttaaatcataataaggagaaaagtggttttcaagaagtaacgccaagatctgcgtctcagccaaaagcctttaacccttttggaaaatcggtgaatacctttaatttcaaggctgacagggattttattgagaactcagataaggaggatttgctaacatcagaacgttctcattttaagcctatttgtgaaaaagatgaggttcgacatcaatctaaatatgctgatggagcaacatttataatttccaataatcttgataaggtggattacaaacgaactgaaagtggtacgatgtggcttgaaacagaattcggtcagactaaaaaatattatgaatacaagacgcatgggaagcatgtttttactgattcagtggaacttattcttaagtttagtattaacgaaaatgacaaagcttgccaaacggatgattgggaatcagataacgaggtcgaaaattatactaaagttgagaataaaatgagcgtcaatgaaatgccacagtcttccacaaacaacgatgatcacttagaaaatcctcagcaccactgtgcctgccctgacctcactacagccaacgcgacaaccactgctttgaacaaggataactcttcagcttgccctacaaacctcatccaacgccctgaaagcatgctcagcgaagttgtatggaaatacgaagaaaaatcgtgcgagaaatgtcatggaaataacatggcatggagtaataatgattggtcttctagtaataaggggcaggtcgattctgattgggctgaaaatggattaagaagtatctggagtggaggagagatttgtcagaattgtttggtcctaaatggttctaacctaccccggcctgcccctaaccaccaacttcgcgaagacatcagccaagatggcgaacagcttctctctgatttaagtaccatacagaagtgctacatggacgatctacctgtcgtcgctgaacgctccttggacatcttagaactgctctcgtccggcgtcgttcccaaagaacgcaaaagaaggcactcactcacagttgatcacaatccagacacgtggagcttcgcttcgcgcatcgaagaagattgtctcatgcaattggcagctttgccagccctgagagccgtaacactgtaagaaaacacgataggttgggtgagttatgataaagtcgggaaaagaaatgaaattattgatatgtggtggaattttatagaaacttggtaggtggtccaacgttttcaattattattcttttactttgactctttattattgccgtgaaaattgtaatacatttatttaaaaacgatggttaattttaatttacattttttgagccatatttaactgttcattgctgacaacgtgtaaccaatatgaaagaaaattatatgagcgccaactatggtagtatcttcttcttcatgtaccatgtctttttagaacgttggttaccatcatagctatcttaattttagtcgtcgccggcctaaatagcatgcttgtatcaataccataccaatctcacaagtttttaaaccatgaagttattcttcgtcctggactgcatttgccttctattttcccttgcataacattttgtagctacctatatttgggacttctcattacatgtccgaaatacagtggaaccccgataacccggaagtccaacccggaccgattttcatcagacaaacatttcaacaataaaaatgtatgtaatataatatttgagagataatgtgtatttgtgtaatttgaactatacgatagaaaaaatgactcatggcacatagactaaaagactatttaaaaaattattttctaaacaatggtcttagtctccactgttcttaaataacttaacattccgattgtgaccgtattgtgtgtagtatagtcgtatttttcgcttccgttctataatcgtacctcagataggtttgtgtttgcgtgttttttgtctacgcatgagtttttttaccaagaaatgaacaatattctatactctacacaactatacgtaacttttaccatattctccggctaacccggatcggccgcgctcccgattaatccgagttatcgaggttccactgtactcaattctcttcttggtgctttttataatctcaatagtcgtgctgagacgttctattagtattgtggagtttcgaatcttctccaccaaagaaacttttaaaactccatagcaccaaatttcgaaagcctcaaggcgattgagatcaattttatttacagtccaagactcgacgccataaagtaagaccgaaaacacgtagcagcgaagtaggcggattctcaatgccaattttaggcctctattacatagtagacgactttaaaatgtattaaaatgtataatatatgtctgaattgccgatatgaatgagtcagattaaattaagttattagaagatttgttttactaagcaacatagacaaaatttatttaatttattaatattttgtatttcaataacagcttctgaagttgaagtcgaaacgtcaataaatttcatttttaacttaaattgtggcttatttcccaataaaatcgtaaattgcataagatgccacaaagaaacagcttcagaacaatacccttgttttgaagtaatctgtcaaattacacatagaaagaagtcttacttcacttttatttatcacataaataataacagataataataatgtcagataagtcccatctcccgtattatcaatacgtccccgagagaatgcttgaggatggcaactacaagctatactgggaccgcactgtgcacacagaccaaacaatggcacataatagaccagatctcgtactaagacaaacaacactaattgatgtggcgatacctaacaacaataatctacgtagtaaatttactgaaaagatcgccaagtacagagatctggaaattcaaatacgaag

SEQ ID NO: 2456 - DNA, 2067 bp, Diabrotica virgifera
aacgagaccaacgctctcttcgaaacaaacaaggacttcagacacaaatatttctccaatgacttccatagccttcctggtaactggagcgttggagagggaagaaaggtggacgaggagaaggaaatatatgaaacggaaaaactgttaggctttcagcttgatgaagttaaatcataataaggagaaaagtggttttcaagaagtaacgccaagatctgcgtctcagccaaaagcctttaacccttttggaaaatcggtgaatacctttaatttcaaggctgacagggattttattgagaactcagataaggaggatttgctaacatcagaacgttctcattttaagcctatttgtgaaaaagatgaggttcgacatcaatctaaatatgctgatggagcaacatttataatttccaataatcttgataaggtggattacaaacgaactgaaagtggtacgatgtggcttgaaacagaattcggtcagactaaaaaatattatgaatacaagacgcatgggaagcatgtttttactgattcagtggaacttattcttaagtttagtattaacgaaaatgacaaagcttgccaaacggatgattgggaatcagataacgaggtcgaaaattatactaaagttgagaataaaatgagcgtcaatgaaatgccacagtcttccacaaacaacgatgatcacttagaaaatcctcagcaccactgtgcctgccctgacctcactacagccaacgcgacaaccactgctttgaacaaggataactcttcagcttgccctacaaacctcatccaacgccctgaaagcatgctcagcgaagttgtatggaaatacgaagaaaaatcgtgcgagaaatgtcatggaaataacatggcatggagtaataatgattggtcttctagtaataaggggcaggtcgattctgattgggctgaaaatggattaagaagtatctggagtggaggagagatttgtcagaattgtttggtcctaaatggttctaacctaccccggcctgcccctaaccaccaacttcgcgaagacatcagccaagatggcgaacagcttctctctgatttaagtaccatacagaagtgctacatggacgatctacctgtcgtcgctgaacgctccttggacatcttagaactgctctcgtccggcgtcgttcccaaagaacgcaaaagaaggcactcactcacagttgatcacaatccagacacgtggagcttcgcttcgcgcatcgaagaagattgtctcatgcaattggcagctttgccagccctgagagccgtaacactgtaagaaaacacgataggttgggtgagttatgataaagtcgggaaaagaaatgaaattattgatatgtggtggaattttatagaaacttggtaggtggtccaacgttttcaattattattcttttactttgactctttattattgccgtgaaaattgtaatacatttatttaaaaacgatggttaattttaatttacattttttgagccatatttaactgttcattgctgacaacgtgtaaccaatatgaaagaaaattatatgagcgccaactatggtagtatcttcttcttcatgtaccatgtctttttagaacgttggttaccatcatagctatcttaattttagtcgtcgccggcctaaatagcatgcttgtatcaataccataccaatctcacaagtttttaaaccatgaagttattcttcgtcctggactgcatttgccttctattttcccttgcataacattttgtagctacctatatttgggacttctcattacatgtccgaaatacagtggaaccccgataacccggaagtccaacccggaccgattttcatcagacaaacatttcaacaataaaaatgtatgtaatataatatttgagagataatgtgtatttgtgtaatttgaactatacgatagtaaaaatgactcataagcacacgctggcagaaacaacagacacctgtctgtagtattcctttatttttatttcaaactgtgttagcattgtttaagaaagacta

SEQ ID NO: 2457 - DNA, 1954 bp, Diabrotica virgifera
  SmartBlast Evalue=3E-13; Info=Endonuclease-reverse transcriptase n=1 Tax=Bombyx mori RepID=D5LB38_BOMMO
atatgtttctgcatcatgactctattttaacatatagtacgtttaaaacttttaaaataacaaaatctctctgtatggacggcaacactcactttgcattaacaaacaaatagcagatctgtctaagatcgcttaatatttaaaaggtaataaatactgcaacaaccgttctcaaatctcgattgtttaattctcaaaaaatcgataaaaactacaaattttcgcaaaactgtaatccttaaaaggattacaagagggagatgcgttaaaaagtgtctcatatttatcatattcttgggaaaagcggtaagagacgccaaattagacaatggatcaggggataatatggcatcaaagaaatatcttcattaacttaacaaaaaaaattactttagttttaaatatatcaaaaacaaagatttgtggttgtgctaatgagaagtataatgcatctttgttctacagttacattcagagtggggtcaatacttttgagaaactctttcattcgaaaaacccaaaaaacacataagatgctgctgaaattaataattgaagacacgagtggaagaaggtgttatctaatcccttcagaccctatagagtctacataatctcaaaatgcattttttctaagtgttaaactatacagtggaaccccgataacccggaccgattttcatcagacaaacatttcaacaataaaaatgtatgtaatataatatttgagagataatgtgtatttgtgtaatttgaactatacgatagaaaaaatgactcatggcacatagactaaaagactatttaaaaaattattttctaaacaatggtcttagtctccactgttcttaaataacttaacattccgattgtgaccgtattgtgtgtagtatagtcgtatttttcgcttccgttctataatcgtacctcagataggtttgtgtttgcgtgttttttgtctacgcatgagtttttttaccaagaaatgaacaatattctatactctacacaactatacgtaacttttaccatattctccggctaacccggatcggccgcgctcccgattaatccgagttatcgaggttccactgtactcaattctcttcttggtgctttttataatctcaatagtcgtgctgagacgttctattagtattgtggagtttcgaatcttctccaccaaagaaacttttaaaactccatagcaccaaatttcgaaagcctcaaggcgattgagatcaattttatttacagtccaagactcgacgccataaagtaagaccgaaaacacgtagcagcgaagtaggcggattctcaatgccaattttaggcctctattacatagtagacgactttaaaatgtattaaaatgtataatatatgtctgaattgccgatatgaatgagtcagattaaattaagttattagaagatttgttttactaagcaacatagacaaaatttatttaatttattaatattttgtatttcaataacagcttctgaagttgaagtcgaaacgtcaataaatttcatttttaacttaaattgtggcttatttcccaataaaatcgtaaattgcataagatgccacaaagaaacagcttcagaacaatacccttgttttgaagtaatctgtcaaattacacatagaaagaagtcttacttcacttttatttatcacataaataataacagataataataatgtcagataagtcccatctcccgtattatcaatacgtccccgagagaatgcttgaggatggcaactacaagctatactgggaccgcactgtgcacacagaccaaacaatggcacataatagaccagatctcgtactaagacaaacaacactaattgatgtggcgatacctaacaacaataatctacgtagtaaatttactgaaaagatcgccaagtacagagatctggaaattcaaatacgaag

SEQ ID NO: 2458 - DNA, 1157 bp, Diabrotica virgifera
  SmartBlast Evalue=2E-13; Info=Endonuclease-reverse transcriptase n=1 Tax=Bombyx mori RepID=D5LB38_BOMMO
attgtgaccgtattgtgtgtagtacagtcgtatttttcgctttcgtcctataatcgtacctcagataggtttgtgtttgcgtgttttttgtctacgcatgagtttttttaccaagaaatgaacaatattcatactctatacaactatacgtaatttagatgtgtactgtgcatatatatttcatgttatttcaattataagaagtttatcaccgtattttattaacttttaccatattctccggctaacccggatcggccgcgctcccgattaatccgagttatcgaggttccactgtactcaattctcttcttggtgctttttataatctcaatagtcgtgctgagacgttctattagtattgtggagtttcgaatcttctccaccaaagaaacttttaaaactccatagcaccaaatttcgaaagcctcaaggcgattgagatcaattttatttacagtccaagactcgacgccataaagtaagaccgaaaacacgtagcagcgaagtaggcggattctcaatgccaattttaggcctctattacatagtagacgactttaaaatgtattaaaatgtataatatatgtctgaattgccgatatgaatgagtcagattaaattaagttattagaagatttgttttactaagcaacatagacaaaatttatttaatttattaatattttgtatttcaataacagcttctgaagttgaagtcgaaacgtcaataaatttcatttttaacttaaattgtggcttatttcccaataaaatcgtaaattgcataagatgccacaaagaaacagcttcagaacaatacccttgttttgaagtaatctgtcaaattacacatagaaagaagtcttacttcacttttatttatcacataaataataacagataataataatgtcagataagtcccatctcccgtattatcaatacgtccccgagagaatgcttgaggatggcaactacaagctatactgggaccgcactgtgcacacagaccaaacaatggcacataatagaccagatctcgtactaagacaaacaacactaattgatgtggcgatacctaacaacaataatctacgtagtaaatttactgaaaagatcgccaagtacagagatctggaaattcaaatacgaag

SEQ ID NO: 2459 - DNA, 872 bp, Diabrotica virgifera
atatgtttctgcatcatgactctattttaacatatagtacgtttaaaacttttaaaataacaaaatctctctgtatggacggcaacactcactttgcattaacaaacaaatagcagatctgtctaagatcgcttaatatttaaaaggtaataaatactgcaacaaccgttctcaaatctcgattgtttaattctcaaaaaatcgataaaaactacaaattttcgcaaaactgtaatccttaaaaggattacaagagggagatgcgttaaaaagtgtctcatatttatcatattcttgggaaaagcggtaagagacgccaaattagacaatggatcaggggataatatggcatcaaagaaatatcttcattaacttaacaaaaaaaattactttagttttaaatatatcaaaaacaaagatttgtggttgtgctaatgagaagtataatgcatctttgttctacagttacattcagagtggggtcaatacttttgagaaactctttcattcgaaaaacccaaaaaacacataagatgctgctgaaattaataattgaagacacgagtggaagaaggtgttatctaatcccttcagaccctatagagtctacataatctcaaaatgcattttttctaagtgttaaactatacagtggaaccccgataacccggaccgattttcatcagacaaacatttcaacaataaaaatgtatgtaatataatatttgagagataatgtgtatttgtgtaatttgaactatacgatagtaaaaatgactcataagcacacgctggcagaaacaacagacacctgtctgtagtattcctttatttttatttcaaactgtgttagcattgtttaagaaagacta

SEQ ID NO: 2460 - DNA, 1136 bp, Diabrotica virgifera
  SmartBlast Evalue=3E-34; Info=Endonuclease-reverse transcriptase n=1 Tax=Bombyx mori RepID=D5LB38_BOMMO
gttgtcttccatctccgcgttgactttcagctccgagttgccgtcgatcgtccgtaatgtaaggacagatccatctgatcatcaacccacgtgtgtagggagtcatgcgatgcctatctctacaatttcatccatcgtttggaattataattaatactgtaaatttaaaacattttcataacatattcttcttcttcaagtgccgtctcctaatcggaggttggatatcatcatcactatctttactctatccaccgctgctctaaagagttctatagaactgcatctaaaccagtcccttaaattcttaaccatgacactctccttcttcctatactccttccgcctcttatctttccctgtattatcagtcttagcatttcatatcgcgtcccctcattacgtgtcccagatattgtaactttcttatttttattgtgtttattatttcgcattctttacccatttctcgcatacttccgtgttcgttttcttctgtgtccatgctattctaagcatccttctgtaacaccacatttcaaatgactgtagcttatttatgtgttcttgctttaatgtccagctttcaagtccatattgtagtatcgagaacacgtagcatctcaaagctcttactctcagttctaagctaaggtctttgttgcagagaactgttttcatttttacaaacgcatttcttgctatttctatcctggtccttatttctgttgtttgatcatttttctctgaaatccaggttcctaggtatttgtatttatcaaccctttctatcggtacatttcccaaatgtatgcttgtttgtatgtttgttttcttaattattaccatgtatttataaaagtaatatccacataaaaatgggtcactataaatttaaaattattttcaaatgtacagggtatcccacttcttaatttgttgatgatcactttgtaatttaggtactcaaaatttgtagctacacttgagtccagacttgagtacaaacacaaaaaaaaacaaatacacgaaagcaaataaaactatatagacactaacgagtaaatgttcttaaattagtttatacaaactataccacataccatgatactataaataacaagataatatattgc

SEQ ID NO: 2461 - DNA, 1125 bp, Diabrotica virgifera
  SmartBlast Evalue=3E-34; Info=Endonuclease-reverse transcriptase n=1 Tax=Bombyx mori RepID=D5LB38_BOMMO
gttgtcttccatctccgcgttgactttcagctccgagttgccgtcgatcgtccgtaatgtaaggacagatccatctgatcatcaacccacgtgtgtagggagtcatgcgatgcctatctctacaatttcatccatcgtttggaattataattaatactgtaaatttaaaacattttcataacatattcttcttcttcaagtgccgtctcctaatcggaggttggatatcatcatcactatctttactctatccaccgctgctctaaagagttctatagaactgcatctaaaccagtcccttaaattcttaaccatgacactctccttcttcctatactccttccgcctcttatctttccctgtattatcagtcttagcatttcatatcgcgtcccctcattacgtgtcccagatattgtaactttcttatttttattgtgtttattatttcgcattctttacccatttctcgcatacttccgtgttcgttttcttctgtgtccatgctattctaagcatccttctgtaacaccacatttcaaatgactgtagcttatttatgtgttcttgctttaatgtccagctttcaagtccatattgtagtatcgagaacacgtagcatctcaaagctcttactctcagttctaagctaaggtctttgttgcagagaactgttttcatttttacaaacgcatttcttgctatttctatcctggtccttatttctgttgtttgatcatttttctctgaaatccaggttcctaggtatttgtatttatcaaccctttctatcggtacatttcccaaatgtatgcttgtttgtatgtttgttttcttaattattaccatgtatttataaaagtaatatccacataaaaatgggtcactataaatttaaaattattttcaaatgtacagggtatcccacttcttaatttgttgatgatcactttgtaatttaggtaggtactgaacaactcctacacttgagtacaaacacaaaaaaaaacaaatacacgaaagcaaataaaactatatagacactaacgagtaaatgttcttaaattagtttatacaaactataccacataccatgatactataaataacaagataatatattgc

SEQ ID NO: 2462 - DNA, 1115 bp, Diabrotica virgifera
  SmartBlast Evalue=3E-34; Info=Endonuclease-reverse transcriptase n=1 Tax=Bombyx mori RepID=D5LB38_BOMMO
tagcaggttttgaaactgatattttagaaacttgttattttgttaacacagatatccattataaagtattttttacttattatttgtttattatacatacaggttgatcaagtggtactccagagttagatatttcagttgtttaaagatacaaaaaagtaatcttcttcttcttcaagtgccgtctcctaatcggaggttggatatcatcatcactatctttactctatccaccgctgctctaaagagttctatagaactgcatctaaaccagtcccttaaattcttaaccatgacactctccttcttcctatactccttccgcctcttatctttccctgtattatcagtcttagcatttcatatcgcgtcccctcattacgtgtcccagatattgtaactttcttatttttattgtgtttattatttcgcattctttacccatttctcgcatacttccgtgttcgttttcttctgtgtccatgctattctaagcatccttctgtaacaccacatttcaaatgactgtagcttatttatgtgttcttgctttaatgtccagctttcaagtccatattgtagtatcgagaacacgtagcatctcaaagctcttactctcagttctaagctaaggtctttgttgcagagaactgttttcatttttacaaacgcatttcttgctatttctatcctggtccttatttctgttgtttgatcatttttctctgaaatccaggttcctaggtatttgtatttatcaaccctttctatcggtacatttcccaaatgtatgcttgtttgtatgtttgttttcttaattattaccatgtatttataaaagtaatatccacataaaaatgggtcactataaatttaaaattattttcaaatgtacagggtatcccacttcttaatttgttgatgatcactttgtaatttaggtactcaaaatttgtagctacacttgagtccagacttgagtacaaacacaaaaaaaaacaaatacacgaaagcaaataaaactatatagacactaacgagtaaatgttcttaaattagtttatacaaactataccacataccatgatactataaataacaagataatatattgc

SEQ ID NO: 2463 - DNA, 1104 bp, Diabrotica virgifera
  SmartBlast Evalue=3E-34; Info=Endonuclease-reverse transcriptase n=1 Tax=Bombyx mori RepID=D5LB38_BOMMO
tagcaggttttgaaactgatattttagaaacttgttattttgttaacacagatatccattataaagtattttttacttattatttgtttattatacatacaggttgatcaagtggtactccagagttagatatttcagttgtttaaagatacaaaaaagtaatcttcttcttcttcaagtgccgtctcctaatcggaggttggatatcatcatcactatctttactctatccaccgctgctctaaagagttctatagaactgcatctaaaccagtcccttaaattcttaaccatgacactctccttcttcctatactccttccgcctcttatctttccctgtattatcagtcttagcatttcatatcgcgtcccctcattacgtgtcccagatattgtaactttcttatttttattgtgtttattatttcgcattctttacccatttctcgcatacttccgtgttcgttttcttctgtgtccatgctattctaagcatccttctgtaacaccacatttcaaatgactgtagcttatttatgtgttcttgctttaatgtccagctttcaagtccatattgtagtatcgagaacacgtagcatctcaaagctcttactctcagttctaagctaaggtctttgttgcagagaactgttttcatttttacaaacgcatttcttgctatttctatcctggtccttatttctgttgtttgatcatttttctctgaaatccaggttcctaggtatttgtatttatcaaccctttctatcggtacatttcccaaatgtatgcttgtttgtatgtttgttttcttaattattaccatgtatttataaaagtaatatccacataaaaatgggtcactataaatttaaaattattttcaaatgtacagggtatcccacttcttaatttgttgatgatcactttgtaatttaggtaggtactgaacaactcctacacttgagtacaaacacaaaaaaaaacaaatacacgaaagcaaataaaactatatagacactaacgagtaaatgttcttaaattagtttatacaaactataccacataccatgatactataaataacaagataatatattgc

SEQ ID NO: 2464 - DNA, 963 bp, Diabrotica virgifera
  SmartBlast Evalue=6E-38; Info=Endonuclease-reverse transcriptase n=1 Tax=Bombyx mori RepID=D5LB38_BOMMO
gttgtcttccatctccgcgttgactttcagctccgagttgccgtcgatcgtccgtaatgtaaggacagatccatctgatcatcaacccacgtgtgtagggagtcatgcgatgcctatctctacaatttcatccatcgtttggaattataattaatactgtaaatttaaaacattttcataacatattcttcttcttcaagtgccgtctcctaatcggaggttggatatcatcatcactatctttactctatccaccgctgctctaaagagttctatagaactgcatctaaaccagtcccttaaattcttaaccatgacactctccttcttcctatactccttccgcctcttatctttccctgtattatcagtcttagcatttcatatcgcgtcccctcattacgtgtcccagatattgtaactttcttatttttattgtgtttattatttcgcattctttacccatttctcgcatacttccgtgttcgttttcttctgtgtccatgctattctaagcatccttctgtaacaccacatttcaaatgactgtagcttatttatgtgttcttgctttaatgtccagctttcaagtccatattgtagtatcgagaacacgtagcatctcaaagctcttactctcagttctaagctaaggtctttgttgcagagaactgttttcatttttacaaacgcatttcttgctatttctatcctggtccttatttctgttgtttgatcatttttctctgaaatccaggttcctaggtatttgtatttatcaaccctttctatcaggtacatttccctaatgtatgttgggttgtatgtttgttttcttagttattatcatgtatttggtctttttatgttcatttttagtccatattcttcacagaaactgtttgttttgtttagtagcaattggagttgtttagcagagcttgccataatcacggtgtcatc

SEQ ID NO: 2465 - DNA, 942 bp, Diabrotica virgifera
  SmartBlast Evalue=6E-38; Info=Endonuclease-reverse transcriptase n=1 Tax=Bombyx mori RepID=D5LB38_BOMMO
tagcaggttttgaaactgatattttagaaacttgttattttgttaacacagatatccattataaagtattttttacttattatttgtttattatacatacaggttgatcaagtggtactccagagttagatatttcagttgtttaaagatacaaaaaagtaatcttcttcttcttcaagtgccgtctcctaatcggaggttggatatcatcatcactatctttactctatccaccgctgctctaaagagttctatagaactgcatctaaaccagtcccttaaattcttaaccatgacactctccttcttcctatactccttccgcctcttatctttccctgtattatcagtcttagcatttcatatcgcgtcccctcattacgtgtcccagatattgtaactttcttatttttattgtgtttattatttcgcattctttacccatttctcgcatacttccgtgttcgttttcttctgtgtccatgctattctaagcatccttctgtaacaccacatttcaaatgactgtagcttatttatgtgttcttgctttaatgtccagctttcaagtccatattgtagtatcgagaacacgtagcatctcaaagctcttactctcagttctaagctaaggtctttgttgcagagaactgttttcatttttacaaacgcatttcttgctatttctatcctggtccttatttctgttgtttgatcatttttctctgaaatccaggttcctaggtatttgtatttatcaaccctttctatcaggtacatttccctaatgtatgttgggttgtatgtttgttttcttagttattatcatgtatttggtctttttatgttcatttttagtccatattcttcacagaaactgtttgttttgtttagtagcaattggagttgtttagcagagcttgccataatcacggtgtcatc

SEQ ID NO: 2466 - DNA, 847 bp, Diabrotica virgifera
ctccgtataatttacttaccgttgcacgtcatccgcgtcatagcccgtgacatcacattataccaacacgaaatatttaggcggtaggtgtgttcttttttagaatcattttgccgagtacactggcattacagccactagacatattttattatgtacacgtagaaataatatttagatttctattaatgttaacttaaagaaatacacaataatattttcatttaatttgtataaatggattataaagcgtttttatgaagcacatttgttcggaacacactgtaactgtaatcgaacgaaggtgatattttggcataaattgggtaacatttatttgacagttgcggtgatgacacttcatatttgtttatattctttactataagtatttgtttcattatatttactgtttttattatgtactttaatgtaagattataacttaattcttgctttctatttctaaagtttttatttatttacattgaatattaatttgttttgctgtataatccacttccgcaaaaattgtgtgatgtatttgatttaaaatgaattcaagaagtttttgtaactgggcaacaatgtcaacttagatctctaacgtaaataatgacgtgcaacggtaagtaaattagacggactgtattcgcggggtgcaagtacttggaagggaaacgagaaacgaccgtgcgcgagtcgcggagaaatattgcaactatcttaaataattcatattgtcaattgaaattgtcaaattgacgtatatttcataccgtctgtcattgaagcaagaaaattatatattgctccacaatattgatatgatatgcaattattatat

SEQ ID NO: 2467 - DNA, 811 bp, Diabrotica virgifera
ctccgtataatttacttaccgttgcacgtcatccgcgtcatagcccgtgacatcacattataccaacacgaaatatttaggcggtaggtgtgttcttttttagaatcattttgccgagtacactggcattacagccactagacatattttattatgtacacgtagaaataatatttagatttctattaatgttaacttaaagaaatacacaataatattttcatttaatttgtataaatggattataaagcgtttttatgaagcacatttgttcggaacacactgtaactgtaatcgaacgaaggtgatattttggcataaattgggtaacatttatttgacagttgcggtgatgacacttcatatttgtttatattctttactataagtatttgtttcattatatttactgtttttattatgtactttaatgtaagattataacttaattcttgctttctatttctaaagtttttatttatttacattgaatattaatttgttttgctgtataatccacttccgcaaaaattgtgtgatgtatttgatttaaaatgaattcaagaagtttttgtaactgggcaacaatgccaacttagatctctaacgtaaataatgacgtgcaacggtaagtaaattagacggactgtacaataatacaaaccaaagacgtatgacgtagatatattgatgttgtgtgacgcatgacgaggctcgaaacaaatgacaatcgatgaaaagccctatacctacaatattttactaattagtaataaatactattcagtgcatgcattaattagaataaaga

SEQ ID NO: 2468 - DNA, 805 bp, Diabrotica virgifera
cccgagacgtcacatgatatcaacacgaaatatttaggcggtaggtgtgttcttttttagaatcactttgctgagtacactggcgttacagccactaggcatattttattatatacgcgtagaaataatatttaaagatttctattaatgttaacttaaagaaatacacaataatatatttcatttaatttgtataaatggattataaagcgtttttataaaacacatttgttcggaatacattgtaactataatcgaacgaaggtgattttggcataaattgggtaacatttatttgacagttgcggtgatgacacttcatatttgtttatattctttactataagtatttgtttcattatatttactgtttttattatgtactttaatgtaagattataacttaattcttgctttctatttctaaagtttttatttatttacattgaatattaatttgttttgctgtataatccacttccgcaaaaattgtgtgatgtatttgatttaaaatgaattcaagaagtttttgtaactgggcaacaatgtcaacttagatctctaacgtaaataatgacgtgcaacggtaagtaaattagacggactgtattcgcggggtgcaagtacttggaagggaaacgagaaacgaccgtgcgcgagtcgcggagaaatattgcaactatcttaaataattcatattgtcaattgaaattgtcaaattgacgtatatttcataccgtctgtcattgaagcaagaaaattatatattgctccacaatattgatatgatatgcaattattatat

SEQ ID NO: 2469 - DNA, 769 bp, Diabrotica virgifera
cccgagacgtcacatgatatcaacacgaaatatttaggcggtaggtgtgttcttttttagaatcactttgctgagtacactggcgttacagccactaggcatattttattatatacgcgtagaaataatatttaaagatttctattaatgttaacttaaagaaatacacaataatatatttcatttaatttgtataaatggattataaagcgtttttataaaacacatttgttcggaatacattgtaactataatcgaacgaaggtgattttggcataaattgggtaacatttatttgacagttgcggtgatgacacttcatatttgtttatattctttactataagtatttgtttcattatatttactgtttttattatgtactttaatgtaagattataacttaattcttgctttctatttctaaagtttttatttatttacattgaatattaatttgttttgctgtataatccacttccgcaaaaattgtgtgatgtatttgatttaaaatgaattcaagaagtttttgtaactgggcaacaatgccaacttagatctctaacgtaaataatgacgtgcaacggtaagtaaattagacggactgtacaataatacaaaccaaagacgtatgacgtagatatattgatgttgtgtgacgcatgacgaggctcgaaacaaatgacaatcgatgaaaagccctatacctacaatattttactaattagtaataaatactattcagtgcatgcattaattagaataaaga

SEQ ID NO: 2470 - DNA, 565 bp, Diabrotica virgifera
  misc_feature (443)..(443): n is a, c, g, or t
ctccgtataatttacttaccgttgcacgtcatccgcgtcatagcccgtgacatcacattataccaacacgaaatatttaggcggtaggtgtgttcttttttagaatcattttgccgagtacactggcattacagccactagacatattttattatgtacacgtagaaataatatttagatttctattaatgttaacttaaagaaatacacaataatattttcatttaatttgtataaatggattataaagcgtttttatgaagcacatttgttcggaacacactgtaactgtaatcgaacgaaggtgatattttggcataaattggtaacatttatttgacagttgcggtgatgacacttcatatatttgtttttattctttattataagtatttgtttctttatatttacttattttattatgtactttaacggaggaatanaacttaatttttgttttgctgtataatcaatccacttccgcaaaaattatgtgatgtatttgatttaaaataaattcaagaatttttgtaattgggcaacaatgtcaacttagatctctaac

SEQ ID NO: 2471 - DNA, 343 bp, Diabrotica virgifera
ttatagtagaaaatatccatggttacagaattatatgttttttaaacgtctgcactcaactcaccggtagctttctttatagccttttatatattattatagttttatgttttttatgttgggggtaagtaaattagacggactgtattcgcggggtgcaagtacttggaagggaaacgagaaacgaccgtgcgcgagtcgcggagaaatattgcaactatcttaaataattcatattgtcaattgaaattgtcaaattgacgtatatttcataccgtctgtcattgaagcaagaaaattatatattgctccacaatattgatatgatatgcaattattatat

SEQ ID NO: 2472 - DNA, 4544 bp, Diabrotica virgifera
  SmartBlast Evalue=0; Info=Multidrug resistance-associated protein 1 n=1 Tax=Harpegnathos saltator RepID=E2B8D1_9HYME
ccagccgttcttttgggctgaaacgaacaattagcaatacgtgcacgaacagtaattcgggagtgacgccatagacgatttcgcaacagtcaaaacgcgaggcacgtggtacggaaacagtcatctcgtatgtgaccgaatattgtctgtataaaaccctatattttatatttccacctgaaactaacaatcctaactacagtccacaccctctgaaagtatattcatactctcacatatgtacaagttatcgtacagcaaagagtgatcaaattcttagagccgaatgataaaatataaattttttgggactgtcttaaccttccatagctaacacccggtcggtgagaccgttgatctctttagtacctttaaggccaaaagatatccgtatcacatatacagtgatagagcatttacgcgttttgagttatcagtgttttggtctgagagaccggtgttagagtctgcgttacttatattgaaatatgtataaaaaatgtaagtgtaaaacaggatttaactgccataaatgtaaaaattcagtttcaccaaagacttttttaattccctcaggtccacgttacttcctacgcctttagaaatatttagttcatttcttgattttgaagaccttcagagaatctatatttttctgtaaaaatactggtaaatgtcagttttgaaaatacatgccataattttgacatgtcggtctctgagacccctgttatcttctatgtgtaattagttaagaccatttagataagatgctcatccactgtaactcaaattggcgacaaaaattaatcttacttttgttactgtcagtaaccatgttattgggccagtagaaagattgtgacacttaccttttaaatacatacaacttaaacttgacaatgtcagatgatcgatgacaaatgactgatgagaaatgaccgacgacaaatgaccgatgacagatgacaaatggctgactacaggtaacagatgacgtttagtgatctgccacctgtcattttagccaattaaagtgaccctagactacgattaattaaaaaactagcacgattagtcaacattggcaacttaattgataagttaagacgttctattgcttttttggaaaatttgcttttaagctaaaccggcgtctctcgacatactggcaaatattgaattctcattggctagcagtcgcgcagggctgtcgaattctgctatcctgcctttatctagcacgatgactctgtctgagtccatgatcgtgtttaatctatgtgcgatggtaagtactgtgcattctttgaactccgttctgattgtcttttgaatgagatcgtccgtttctaaatctactgctgctgtggcttcgtccaagatgagaattttcgtttttcggagtagagctctggcgaggcagattagctgtctttggccgactgacagattttcaccgccttcggtgacttcgtgattaaggccagctggtagtcctttcacgaattctttaagatgcgcatgttccaaggacctccatacgtcttcatcgctgtgtttgttgaatgggtccaaattgatacgtagggttccagaaaacagtacggcatcttgagggataatagtaagtctagaacgaagagtgtgtaaaccaagttcgtcgatgcggattccatcgattaggatgtttccttgcgcagcttcgattattctgaataaagccaacgttagactcgattttcctgctccagttcttcctacaataccaaccttctctccacccttgatttcgaagtccagatcgtgcaaaacgagatccaaaccaggtctatatctgacggaatagtttttgaattggactgtaccttcttccggccaggctggtgacgtctgcttgctaggaatttcccaagcggcttcttgtggggcttctccgtactctttgattctttcgacagcgacgatgttggtttccacatcagacgtcattctgaccagccagttgagtgtttgtgtaatctgtagcgaataggtcacagaaagaccgaccaatcctggcgcctgatctttcttgagaacagcgaacagagcagcgaaaaatataattaagtttccaatcatttcgagcctgactgccaaccatctattcgatataattccgggataataacatatttgattcatatccactttgttttccgattccacaataaatctttcctgttgattgtacgctctgatagcatgtgctccagagacactttctccaaagtgcgaataaatcggggaacgtgacacagattctaacctctttacttgtctagaggtagccacgtagaacctttgcatgaagtagtaaatgaaacataaggggattatcactaaaataaacactggtgtggaatagctgattacagctagagtacctacgacctcgaacaaacaagaagatccgtccgaaacaaaccaaggcaattcatcatcgactacttcaacgtcttttgagaatcttgctaatacccgcccaataggaacagtatcgaaaaatgccatcggtgatctaagaaccccagagagtaactttttgtgcattataactgctgctgcaaagcaacccagttgtagtgatacgtcggtaaatattgcaggaattgcttgtccaagacctagagcaccatacaccccgagatacatatctcgtcttgcagtgtcaacggtatcgttgacgacgatcttttgatcatctgaccaaagccccaaccaaacgttggagccgacactgaaaccttggtacactaaattaaaaatcaaggtggccaacataaacaccaatccgatagacttcaagtaatgcttgtagacggcccagctgacgttgcccgtttctgctttctcggtttctattagcttctcgcctttctttggacctttcttaccgtcatctatggatagtttgtggttgcttttgtccacgctgttgaggcgttggatagatccgttgccgatgtggtcggagcctgtttctgattgagattctgagacgcgagacctgtgcctgactagttgtcttgctacttcttgagataatggtgtgtcagcgagttggtctttgagttcatcgagttctgcttcggtttcggcttcttctgtaatatgttggagaaggaattcggcgaatgctccttttctatccaggagttcctgatatgttcccgtctcggaaattctaccgtctttcagaacgatgattttttcagtttgtggcaaatacgtgattccgtgtgtgacgaggattttggttttgctttttagcaatccatggggaccgatcaccttttcgaatatgtgttttccaacgtgactatctacagcactcaacggatcatccaaaaagtatatatcagcattcgagtagactgctctggcgacgctaacacgttgtttttgacctccagataaattgatacctttttcgccgatttccgtctgatcaccagccggcaacatctccagatctggattcagggcacaagcttccaccactgcgtcatacagcgttttgtcgtagggttttccgaagaggatgttatctcgaagggtggcgttctggatccaagcttgctgggagacgtaagcgacttttccatatgagttcacacggcctgagagtttgtccatttctcctaggaacgctgagatcaaactggattttcctgaaccgactgttccgacgatggccgttagagtttttttcttgatgttaatgttgatgtccttcaagattggtccttcgccccaggagaatgtgccgttttcgatcgtaagtggctcttcagagggttcgtgcagaacattatcaggatcaagttcttcagcattcatgaatttgtttattcttttaactgacacccaagtttgtactaaatttgacaacatcatgggcaacatgctgagtggaaatcgtatgatattgaatagagagatagaaacataggctttatttgcgtctaatacatgtttttcatccaccaatacgtatgtagcgaaagtgactagagagaccaggaatggagcacaagaccagatgaacgacgtaccagcattcaaataagcagcttgtttcaacactttaatttctttatttctgattttcaatacttgatcctcaaaactgtgttcccaagcgtacagcttcaaaactttaatcccgttcaaaatttcgttcatcagcttgacacgttcatccttgttcttcatctgtttcacttgtagttttttgatcttgttagcaatgaatccattgacgggaatcagtattatcatcacagcaagtccggcgagtacagaaggtcctagttccttccagaggaaatataaggacaggcagatctgtagtggtgcagaccaaatcatgttgaggtaaccaattagatccatgaatttttgagcatcaacagccatcagattaacgatttctcctactgtgctttcttttcgggcactgtttgatatcttcaatgcttttctgtaaatcgttgata

SEQ ID NO: 2473 - DNA, 4516 bp, Diabrotica virgifera
  SmartBlast Evalue=0; Info=Multidrug resistance-associated protein 1 n=1 Tax=Harpegnathos saltator RepID=E2B8D1_9HYME
ccagccgttcttttgggctgaaacgaacaattagcaatacgtgcacgaacagtaattcgggagtgacgccatagacgatttcgcaacagtcaaaacgcgaggcacgtggtacggaaacagtcatctcgtatgtgaccgaatattgtctgtataaaaccctatattttatatttccacctgaaactaacaatcctaactacagtccacaccctctgaaagtatattcatactctcacatatgtacaagttatcgtacagcaaagagtgatcaaattcttagagccgaatgataaaatataaattttttgggactgtcttaaccttccatagctaacacccggtcggtgagaccgttgatctctttagtacctttaaggccaaaagatatccgtatcacatatacagtgatagagcatttacgcgttttgagttatcagtgttttggtctgagagaccggtgttagagtctgcgttacttatattgaaatatgtataaaaaatgtaagtgtaaaacaggatttaactgccataaatgtaaaaattcagtttcaccaaagacttttttaattccctcaggtccacgttacttcctacgcctttagaaatatttagttcatttcttgattttgaagaccttcagagaatctatatttttctgtaaaaatactggtaaatgtcagttttgaaaatacatgccataattttgacatgtcggtctctgagacccctgttatcttctatgtgtaattagttaagaccatttagataagatgctcatccactgtaactcaaattggcgacaaaaattaatcttacttttgttactgtcagtaaccatgttattgggccagtagaaagattgtgacacttaccttttaaatacatacaacttaaacttgacaatgtcagatgatcgatgacaaatgactgatgagaaatgatcgatgacagatgactgattacaggtgacgtttagtgatctgccacctgtcattttagccaattcaagtgaccctagactacgattaattaaaaaactagcacgattagtcaacattggcaacttaattgataagttaagacgttctattgcttttttggaaaatttgcttttaagctaaaccggcgtctctcgacatactggcaaatattgaattctcattggctagcagtcgcgcagggctgtcgaattctgctatcctgcctttatctagcacgatgactctgtctgagtccatgatcgtgtttaatctatgtgcgatggtaagtactgtgcattctttgaactccgttctgattgtcttttgaatgagatcgtccgtttctaaatctactgctgctgtggcttcgtccaagatgagaattttcgtttttcggagtagagctctggcgaggcagattagctgtctttggccgactgacagattttcaccgccttcggtgacttcgtgattaaggccagctggtagtcctttcacgaattctttaagatgcgcatgttccaaggacctccatacgtcttcatcgctgtgtttgttgaatgggtccaaattgatacgtagggttccagaaaacagtacggcatcttgagggataatagtaagtctagaacgaagagtgtgtaaaccaagttcgtcgatgcggattccatcgattaggatgtttccttgcgcagcttcgattattctgaataaagccaacgttagactcgattttcctgctccagttcttcctacaataccaaccttctctccacccttgatttcgaagtccagatcgtgcaaaacgagatccaaaccaggtctatatctgacggaatagtttttgaattggactgtaccttcttccggccaggctggtgacgtctgcttgctaggaatttcccaagcggcttcttgtggggcttctccgtactctttgattctttcgacagcgacgatgttggtttccacatcagacgtcattctgaccagccagttgagtgtttgtgtaatctgtagcgaataggtcacagaaagaccgaccaatcctggcgcctgatctttcttgagaacagcgaacagagcagcgaaaaatataattaagtttccaatcatttcgagcctgactgccaaccatctattcgatataattccgggataataacatatttgattcatatccactttgttttccgattccacaataaatctttcctgttgattgtacgctctgatagcatgtgctccagagacactttctccaaagtgcgaataaatcggggaacgtgacacagattctaacctctttacttgtctagaggtagccacgtagaacctttgcatgaagtagtaaatgaaacataaggggattatcactaaaataaacactggtgtggaatagctgattacagctagagtacctacgacctcgaacaaacaagaagatccgtccgaaacaaaccaaggcaattcatcatcgactacttcaacgtcttttgagaatcttgctaatacccgcccaataggaacagtatcgaaaaatgccatcggtgatctaagaaccccagagagtaactttttgtgcattataactgctgctgcaaagcaacccagttgtagtgatacgtcggtaaatattgcaggaattgcttgtccaagacctagagcaccatacaccccgagatacatatctcgtcttgcagtgtcaacggtatcgttgacgacgatcttttgatcatctgaccaaagccccaaccaaacgttggagccgacactgaaaccttggtacactaaattaaaaatcaaggtggccaacataaacaccaatccgatagacttcaagtaatgcttgtagacggcccagctgacgttgcccgtttctgctttctcggtttctattagcttctcgcctttctttggacctttcttaccgtcatctatggatagtttgtggttgcttttgtccacgctgttgaggcgttggatagatccgttgccgatgtggtcggagcctgtttctgattgagattctgagacgcgagacctgtgcctgactagttgtcttgctacttcttgagataatggtgtgtcagcgagttggtctttgagttcatcgagttctgcttcggtttcggcttcttctgtaatatgttggagaaggaattcggcgaatgctccttttctatccaggagttcctgatatgttcccgtctcggaaattctaccgtctttcagaacgatgattttttcagtttgtggcaaatacgtgattccgtgtgtgacgaggattttggttttgctttttagcaatccatggggaccgatcaccttttcgaatatgtgttttccaacgtgactatctacagcactcaacggatcatccaaaaagtatatatcagcattcgagtagactgctctggcgacgctaacacgttgtttttgacctccagataaattgatacctttttcgccgatttccgtctgatcaccagccggcaacatctccagatctggattcagggcacaagcttccaccactgcgtcatacagcgttttgtcgtagggttttccgaagaggatgttatctcgaagggtggcgttctggatccaagcttgctgggagacgtaagcgacttttccatatgagttcacacggcctgagagtttgtccatttctcctaggaacgctgagatcaaactggattttcctgaaccgactgttccgacgatggccgttagagtttttttcttgatgttaatgttgatgtccttcaagattggtccttcgccccaggagaatgtgccgttttcgatcgtaagtggctcttcagagggttcgtgcagaacattatcaggatcaagttcttcagcattcatgaatttgtttattcttttaactgacacccaagtttgtactaaatttgacaacatcatgggcaacatgctgagtggaaatcgtatgatattgaatagagagatagaaacataggctttatttgcgtctaatacatgtttttcatccaccaatacgtatgtagcgaaagtgactagagagaccaggaatggagcacaagaccagatgaacgacgtaccagcattcaaataagcagcttgtttcaacactttaatttctttatttctgattttcaatacttgatcctcaaaactgtgttcccaagcgtacagcttcaaaactttaatcccgttcaaaatttcgttcatcagcttgacacgttcatccttgttcttcatctgtttcacttgtagttttttgatcttgttagcaatgaatccattgacgggaatcagtattatcatcacagcaagtccggcgagtacagaaggtcctagttccttccagaggaaatataaggacaggcagatctgtagtggtgcagaccaaatcatgttgaggtaaccaattagatccatgaatttttgagcatcaacagccatcagattaacgatttctcctactgtgctttcttttcgggcactgtttgatatcttcaatgcttttctgtaaatcgttgata

SEQ ID NO: 2474 - DNA, 4266 bp, Diabrotica virgifera
  SmartBlast Evalue=0; Info=Multidrug resistance-associated protein 1 n=1 Tax=Harpegnathos saltator RepID=E2B8D1_9HYME
atataaattttttgggactgtcttaaccttccatagctaacacccggtcggtgagaccgttgatctctttagtacctttaaggcccaaacatatctgtaccacatatacagcgatagagcatttacgcgaatttttgagttatcagtgttttttggtctgagggaccggtgttagagtctgcgttacttatattgaaatatgtataaaaaatgtaagtgtaaaacaggatttagctgccataaaagtaaaaattcgtaaaaattcagtttaacgaaagagcttttttgatttccttaggtccacgttacttcctacgcctttagaaatatttagttcatttcttgattttgaagaccttcagagaatctatatttttctgtaaaaatactggtaaatgtcagttttgaaaatacatgccataattttgacatgtcggtctctgagacccctgttatcttctatgtgtaattagttaagaccatttagataagatgctcatccactgtaactcaaattggcgacaaaaattaatcttacttttgttactgtcagtaaccatgttattgggccagtagaaagattgtgacacttaccttttaaatacatacaacttaaacttgacaatgtcagatgatcgatgacaaatgactgatgagaaatgaccgacgacaaatgaccgatgacagatgacaaatggctgactacaggtaacagatgacgtttagtgatctgccacctgtcattttagccaattaaagtgaccctagactacgattaattaaaaaactagcacgattagtcaacattggcaacttaattgataagttaagacgttctattgcttttttggaaaatttgcttttaagctaaaccggcgtctctcgacatactggcaaatattgaattctcattggctagcagtcgcgcagggctgtcgaattctgctatcctgcctttatctagcacgatgactctgtctgagtccatgatcgtgtttaatctatgtgcgatggtaagtactgtgcattctttgaactccgttctgattgtcttttgaatgagatcgtccgtttctaaatctactgctgctgtggcttcgtccaagatgagaattttcgtttttcggagtagagctctggcgaggcagattagctgtctttggccgactgacagattttcaccgccttcggtgacttcgtgattaaggccagctggtagtcctttcacgaattctttaagatgcgcatgttccaaggacctccatacgtcttcatcgctgtgtttgttgaatgggtccaaattgatacgtagggttccagaaaacagtacggcatcttgagggataatagtaagtctagaacgaagagtgtgtaaaccaagttcgtcgatgcggattccatcgattaggatgtttccttgcgcagcttcgattattctgaataaagccaacgttagactcgattttcctgctccagttcttcctacaataccaaccttctctccacccttgatttcgaagtccagatcgtgcaaaacgagatccaaaccaggtctatatctgacggaatagtttttgaattggactgtaccttcttccggccaggctggtgacgtctgcttgctaggaatttcccaagcggcttcttgtggggcttctccgtactctttgattctttcgacagcgacgatgttggtttccacatcagacgtcattctgaccagccagttgagtgtttgtgtaatctgtagcgaataggtcacagaaagaccgaccaatcctggcgcctgatctttcttgagaacagcgaacagagcagcgaaaaatataattaagtttccaatcatttcgagcctgactgccaaccatctattcgatataattccgggataataacatatttgattcatatccactttgttttccgattccacaataaatctttcctgttgattgtacgctctgatagcatgtgctccagagacactttctccaaagtgcgaataaatcggggaacgtgacacagattctaacctctttacttgtctagaggtagccacgtagaacctttgcatgaagtagtaaatgaaacataaggggattatcactaaaataaacactggtgtggaatagctgattacagctagagtacctacgacctcgaacaaacaagaagatccgtccgaaacaaaccaaggcaattcatcatcgactacttcaacgtcttttgagaatcttgctaatacccgcccaataggaacagtatcgaaaaatgccatcggtgatctaagaaccccagagagtaactttttgtgcattataactgctgctgcaaagcaacccagttgtagtgatacgtcggtaaatattgcaggaattgcttgtccaagacctagagcaccatacaccccgagatacatatctcgtcttgcagtgtcaacggtatcgttgacgacgatcttttgatcatctgaccaaagccccaaccaaacgttggagccgacactgaaaccttggtacactaaattaaaaatcaaggtggccaacataaacaccaatccgatagacttcaagtaatgcttgtagacggcccagctgacgttgcccgtttctgctttctcggtttctattagcttctcgcctttctttggacctttcttaccgtcatctatggatagtttgtggttgcttttgtccacgctgttgaggcgttggatagatccgttgccgatgtggtcggagcctgtttctgattgagattctgagacgcgagacctgtgcctgactagttgtcttgctacttcttgagataatggtgtgtcagcgagttggtctttgagttcatcgagttctgcttcggtttcggcttcttctgtaatatgttggagaaggaattcggcgaatgctccttttctatccaggagttcctgatatgttcccgtctcggaaattctaccgtctttcagaacgatgattttttcagtttgtggcaaatacgtgattccgtgtgtgacgaggattttggttttgctttttagcaatccatggggaccgatcaccttttcgaatatgtgttttccaacgtgactatctacagcactcaacggatcatccaaaaagtatatatcagcattcgagtagactgctctggcgacgctaacacgttgtttttgacctccagataaattgatacctttttcgccgatttccgtctgatcaccagccggcaacatctccagatctggattcagggcacaagcttccaccactgcgtcatacagcgttttgtcgtagggttttccgaagaggatgttatctcgaagggtggcgttctggatccaagcttgctgggagacgtaagcgacttttccatatgagttcacacggcctgagagtttgtccatttctcctaggaacgctgagatcaaactggattttcctgaaccgactgttccgacgatggccgttagagtttttttcttgatgttaatgttgatgtccttcaagattggtccttcgccccaggagaatgtgccgttttcgatcgtaagtggctcttcagagggttcgtgcagaacattatcaggatcaagttcttcagcattcatgaatttgtttattcttttaactgacacccaagtttgtactaaatttgacaacatcatgggcaacatgctgagtggaaatcgtatgatattgaatagagagatagaaacataggctttatttgcgtctaatacatgtttttcatccaccaatacgtatgtagcgaaagtgactagagagaccaggaatggagcacaagaccagatgaacgacgtaccagcattcaaataagcagcttgtttcaacactttaatttctttatttctgattttcaatacttgatcctcaaaactgtgttcccaagcgtacagcttcaaaactttaatcccgttcaaaatttcgttcatcagcttgacacgttcatccttgttcttcatctgtttcacttgtagttttttgatcttgttagcaatgaatccattgacgggaatcagtattatcatcacagcaagtccggcgagtacagaaggtcctagttccttccagaggaaatataaggacaggcagatctgtagtggtgcagaccaaatcatgttgaggtaaccaattagatccatgaatttttgagcatcaacagccatcagattaacgatttctcctactgtgctttcttttcgggcactgtttgatatcttcaatgcttttctgtaaatcgttgata

SEQ ID NO: 2475 - DNA, 4238 bp, Diabrotica virgifera
  SmartBlast Evalue=0; Info=Multidrug resistance-associated protein 1 n=1 Tax=Harpegnathos saltator RepID=E2B8D1_9HYME
atataaattttttgggactgtcttaaccttccatagctaacacccggtcggtgagaccgttgatctctttagtacctttaaggcccaaacatatctgtaccacatatacagcgatagagcatttacgcgaatttttgagttatcagtgttttttggtctgagggaccggtgttagagtctgcgttacttatattgaaatatgtataaaaaatgtaagtgtaaaacaggatttagctgccataaaagtaaaaattcgtaaaaattcagtttaacgaaagagcttttttgatttccttaggtccacgttacttcctacgcctttagaaatatttagttcatttcttgattttgaagaccttcagagaatctatatttttctgtaaaaatactggtaaatgtcagttttgaaaatacatgccataattttgacatgtcggtctctgagacccctgttatcttctatgtgtaattagttaagaccatttagataagatgctcatccactgtaactcaaattggcgacaaaaattaatcttacttttgttactgtcagtaaccatgttattgggccagtagaaagattgtgacacttaccttttaaatacatacaacttaaacttgacaatgtcagatgatcgatgacaaatgactgatgagaaatgatcgatgacagatgactgattacaggtgacgtttagtgatctgccacctgtcattttagccaattcaagtgaccctagactacgattaattaaaaaactagcacgattagtcaacattggcaacttaattgataagttaagacgttctattgcttttttggaaaatttgcttttaagctaaaccggcgtctctcgacatactggcaaatattgaattctcattggctagcagtcgcgcagggctgtcgaattctgctatcctgcctttatctagcacgatgactctgtctgagtccatgatcgtgtttaatctatgtgcgatggtaagtactgtgcattctttgaactccgttctgattgtcttttgaatgagatcgtccgtttctaaatctactgctgctgtggcttcgtccaagatgagaattttcgtttttcggagtagagctctggcgaggcagattagctgtctttggccgactgacagattttcaccgccttcggtgacttcgtgattaaggccagctggtagtcctttcacgaattctttaagatgcgcatgttccaaggacctccatacgtcttcatcgctgtgtttgttgaatgggtccaaattgatacgtagggttccagaaaacagtacggcatcttgagggataatagtaagtctagaacgaagagtgtgtaaaccaagttcgtcgatgcggattccatcgattaggatgtttccttgcgcagcttcgattattctgaataaagccaacgttagactcgattttcctgctccagttcttcctacaataccaaccttctctccacccttgatttcgaagtccagatcgtgcaaaacgagatccaaaccaggtctatatctgacggaatagtttttgaattggactgtaccttcttccggccaggctggtgacgtctgcttgctaggaatttcccaagcggcttcttgtggggcttctccgtactctttgattctttcgacagcgacgatgttggtttccacatcagacgtcattctgaccagccagttgagtgtttgtgtaatctgtagcgaataggtcacagaaagaccgaccaatcctggcgcctgatctttcttgagaacagcgaacagagcagcgaaaaatataattaagtttccaatcatttcgagcctgactgccaaccatctattcgatataattccgggataataacatatttgattcatatccactttgttttccgattccacaataaatctttcctgttgattgtacgctctgatagcatgtgctccagagacactttctccaaagtgcgaataaatcggggaacgtgacacagattctaacctctttacttgtctagaggtagccacgtagaacctttgcatgaagtagtaaatgaaacataaggggattatcactaaaataaacactggtgtggaatagctgattacagctagagtacctacgacctcgaacaaacaagaagatccgtccgaaacaaaccaaggcaattcatcatcgactacttcaacgtcttttgagaatcttgctaatacccgcccaataggaacagtatcgaaaaatgccatcggtgatctaagaaccccagagagtaactttttgtgcattataactgctgctgcaaagcaacccagttgtagtgatacgtcggtaaatattgcaggaattgcttgtccaagacctagagcaccatacaccccgagatacatatctcgtcttgcagtgtcaacggtatcgttgacgacgatcttttgatcatctgaccaaagccccaaccaaacgttggagccgacactgaaaccttggtacactaaattaaaaatcaaggtggccaacataaacaccaatccgatagacttcaagtaatgcttgtagacggcccagctgacgttgcccgtttctgctttctcggtttctattagcttctcgcctttctttggacctttcttaccgtcatctatggatagtttgtggttgcttttgtccacgctgttgaggcgttggatagatccgttgccgatgtggtcggagcctgtttctgattgagattctgagacgcgagacctgtgcctgactagttgtcttgctacttcttgagataatggtgtgtcagcgagttggtctttgagttcatcgagttctgcttcggtttcggcttcttctgtaatatgttggagaaggaattcggcgaatgctccttttctatccaggagttcctgatatgttcccgtctcggaaattctaccgtctttcagaacgatgattttttcagtttgtggcaaatacgtgattccgtgtgtgacgaggattttggttttgctttttagcaatccatggggaccgatcaccttttcgaatatgtgttttccaacgtgactatctacagcactcaacggatcatccaaaaagtatatatcagcattcgagtagactgctctggcgacgctaacacgttgtttttgacctccagataaattgatacctttttcgccgatttccgtctgatcaccagccggcaacatctccagatctggattcagggcacaagcttccaccactgcgtcatacagcgttttgtcgtagggttttccgaagaggatgttatctcgaagggtggcgttctggatccaagcttgctgggagacgtaagcgacttttccatatgagttcacacggcctgagagtttgtccatttctcctaggaacgctgagatcaaactggattttcctgaaccgactgttccgacgatggccgttagagtttttttcttgatgttaatgttgatgtccttcaagattggtccttcgccccaggagaatgtgccgttttcgatcgtaagtggctcttcagagggttcgtgcagaacattatcaggatcaagttcttcagcattcatgaatttgtttattcttttaactgacacccaagtttgtactaaatttgacaacatcatgggcaacatgctgagtggaaatcgtatgatattgaatagagagatagaaacataggctttatttgcgtctaatacatgtttttcatccaccaatacgtatgtagcgaaagtgactagagagaccaggaatggagcacaagaccagatgaacgacgtaccagcattcaaataagcagcttgtttcaacactttaatttctttatttctgattttcaatacttgatcctcaaaactgtgttcccaagcgtacagcttcaaaactttaatcccgttcaaaatttcgttcatcagcttgacacgttcatccttgttcttcatctgtttcacttgtagttttttgatcttgttagcaatgaatccattgacgggaatcagtattatcatcacagcaagtccggcgagtacagaaggtcctagttccttccagaggaaatataaggacaggcagatctgtagtggtgcagaccaaatcatgttgaggtaaccaattagatccatgaatttttgagcatcaacagccatcagattaacgatttctcctactgtgctttcttttcgggcactgtttgatatcttcaatgcttttctgtaaatcgttgata

SEQ ID NO: 2476 - DNA, 2125 bp, Diabrotica virgifera
  SmartBlast Evalue=0; Info=Multidrug resistance-associated protein 1 n=1 Tax=Harpegnathos saltator RepID=E2B8D1_9HYME
gctagagtacctacgacctccatcaagcagtagaccacaccagacaattgaaaaggcataacttcgtcaacaatgtcaatatctttggaaaatctagcgagaatacgtcccataggaacagtgtcaaagaacgatagggggtaactcatgactcgtttcattagcattttataaagggctatagctgccgaaagacctccaatttgtatccccaaatcggcggcaaaggaaggcagggcttgtccaagacctagagcaccatacaccccgagatacatatctcgtcttgcagtgtcaacggtatcgttgacgacgatcttttgatcatctgaccaaagccccaaccaaacgttggagccgacactgaaaccttggtacactaaattaaaaatcaaggtggccaacataaacaccaatccgatagacttcaagtaatgcttgtagacggcccagctgacgttgcccgtttctgctttctcggtttctattagcttctcgcctttctttggacctttcttaccgtcatctatggatagtttgtggttgcttttgtccacgctgttgaggcgttggatagatccgttgccgatgtggtcggagcctgtttctgattgagattctgagacgcgagacctgtgcctgactagttgtcttgctacttcttgagataatggtgtgtcagcgagttggtctttgagttcatcgagttctgcttcggtttcggcttcttctgtaatatgttggagaaggaattcggcgaatgctccttttctatccaggagttcctgatatgttcccgtctcggaaattctaccgtctttcagaacgatgattttttcagtttgtggcaaatacgtgattccgtgtgtgacgaggattttggttttgctttttagcaatccatggggaccgatcaccttttcgaatatgtgttttccaacgtgactatctacagcactcaacggatcatccaaaaagtatatatcagcattcgagtagactgctctggcgacgctaacacgttgtttttgacctccagataaattgatacctttttcgccgatttccgtctgatcaccagccggcaacatctccagatctggattcagggcacaagcttccaccactgcgtcatacagcgttttgtcgtagggttttccgaagaggatgttatctcgaagggtggcgttctggatccaagcttgctgggagacgtaagcgacttttccatatgagttcacacggcctgagagtttgtccatttctcctaggaacgctgagatcaaactggattttcctgaaccgactgttccgacgatggccgttagagtttttttcttgatgttaatgttgatgtccttcaagattggtccttcgccccaggagaatgtgccgttttcgatcgtaagtggctcttcagagggttcgtgcagaacattatcaggatcaagttcttcagcattcatgaatttgtttattcttttaactgacacccaagtttgtactaaatttgacaacatcatgggcaacatgctgagtggaaatcgtatgatattgaatagagagatagaaacataggctttatttgcgtctaatacatgtttttcatccaccaatacgtatgtagcgaaagtgactagagagaccaggaatggagcacaagaccagatgaacgacgtaccagcattcaaataagcagcttgtttcaacactttaatttctttatttctgattttcaatacttgatcctcaaaactgtgttcccaagcgtacagcttcaaaactttaatcccgttcaaaatttcgttcatcagcttgacacgttcatccttgttcttcatctgtttcacttgtagttttttgatcttgttagcaatgaatccattgacgggaatcagtattatcatcacagcaagtccggcgagtacagaaggtcctagttccttccagaggaaatataaggacaggcagatctgtagtggtgcagaccaaatcatgttgaggtaaccaattagatccatgaatttttgagcatcaacagccatcagattaacgatttctcctactgtgctttcttttcgggcactgtttgatatcttcaatgcttttctgtaaatcgttgata

SEQ ID NO: 2477 - DNA, 4698 bp, Diabrotica virgifera
  SmartBlast Evalue=5E-66; Info=Translocation protein SEC62 n=1 Tax=Camponotus floridanus RepID=E2AS22_9HYME
gtcaaaataaaactataattacaaaaatggctgagaaaaagagaggcaagaaaagaaaagatgagtacgttcacccaggagaagaaatcgatgacaaaccgacaaaagaagagattaccgtcgccaaatggatgagaagtaatgttcagattaagaaaactaaatttgctaaccacaatgtggaatattttacaggagctcgagcagtcgacgcactccttaactcaccttttgcaaccaaagacgatccactcttcaagactcgagaaggtattgccgattatctccacgtcatgctaacgcacaaactcttccatcgggcacgtaaagtaccggtagacgaacaagaattgaaaggaaagaaaggcaagaaaaaagataagaaagaagataaagagaagaaggattctggagaggacgagaagaaaaaggagaaagaaaaggagaaggtgactgacgcggaaagcagtgtagttgaaggtagcaaggatcaaaagcctgaaaaagaaaagaaaaagaagaaaattaaattggaaatgcattatgaccaacgttttgaagataatttagatgcctacgtttggatatatgatccaattcctttccactattggataatcggtactttcctagttttgggagctattggaatctgtctcttccccttatggccaccatctgtcagattgggagtatactatctcagtgtggctgcagctggcttcttggtatcgattattgtattagctgttatccgtttaataatattctgtttgatatggacggtatcaatgggaaaacaccacttgtggatacttccgaatttgacagaagacgtaggattctttgcatcgttttggccgctctatacatatgaatataaaggaaacaaaggtggaaagaaaaagaaagaaaaggattccgatgcagaagacgacgataataaagaagatgagaatcctgctgaggaagaatcacaaaattcaggagtagctgaagttgtggaacctgacaatagggaccagcaactcgataacaatggatctgaaagtgagagcgaatccagccaacgatccagtacaggcaaagatttcgaaattatagagcaggaagatgttgaatcctaagcaattagaggactttaatgtttaaatctttgtgcacatactgtggtagaaaaaattatatcgggttccgtcgtgtgatttgaactaatttccatattaaatgactttctaacgataaagaattttaatagtctcttattttaatagaaaagccatctcatttgcttatctgggtgagctgtaatcctgaggaagtgtcatacgaaggttttaacccttttagctccggtggcgcatatgcgcgtccaaatgtgattatagattagggccatggacgagtttacgcgtccatggcacaacctaaaagctgaggttggaaatgttagagacgtgctgaaagggttaacattaaatcttaatttctttcgactgtgtattccaacaccacttccttcttcattataaaataaatattggtcataaggtaaataggaaagtttttataaactacctttggataagatcaaatttgttcagttctcctgctttgatgtattttacaaaaaccttgttttattatagtttcttttaaactaggaggagtaaactcaaaatacagatatacacccaataatgttactagaaaaatcaccagacttataaatattattttatattaatatgtcgtaaaagagttctaaaaacaactgtagtttatataaatgcagactaaagatctaaaaattgatggcataacgcagaaaacacaaaaaatctcctataaataacctatgaatgtaacccgtcggtctaataagcaaattgcctaagtcacatattgaaaattttacaggaaagacaaaaaacaaaaggaaaaaagtaaaaaagaggataataaaaaagtaaaggaacaaaagtaaaaaagagaaaattgcctaactccctgcaatacataattgaccaaaatgaattaaacaaaatatttacacaaactttctacttattatactatatccatattaataataataatcaaaatatatatttatttacttacattttctaacgttttcaataaaaacaacttcagaaacactgacataggcaatattcgtataaatgggtaagaacgtttggacttcagcaaaattcgtttagcgaaattggcgcgaaataaaataataatggcgcttgtgggaaatgtcaggcggtagcttttaccgtctactactagatgataccaaaaaaacaattttcgcaaaaaatggacttaggcaatttgcttattagaccgacgctatgatataacctatgaattttaaatgccaatagtgtcaaaatttcataaatgtcaatagtgtcaaaatttcataacttagtaaaataaacttgcctgcgattggactaattacaaacaagcattcgttcaatcttcgcttgtccactattggacgtagatctctctctcataattgtccatctatttcgatcttgtgtttcttgcatccaattcctatgacaacgttttagatcatcagtccaacgtgttggtagacgacctctgcttcggtagacatcatctcttggtctatattgcagtatccgccttgtcaatctattatctgttattcgagccaggtgacctgctttcatttcagtgttgctactctctctactgcatcagccactcctgttctttgtcgtagctggcggttttggatcttgtctcatagtgaaacgcccaacatagcacgctgcatcgccttttgagacacacggatcttgtgcactgttctccttgtcatggtcaacgtttccgcaccataagtcaacactggcaaaacacactgattaaaggtttttcttttaaggcatattggtatgtcacagtggcggctcgtaccactttaagaaggtagtgccacaactcgggcagccgccaaaatttttagtgacggattcacgatattgtcaaaaaaaggtatactgacaacaaaaactaaaaaaaatatgcgcggatacttttatcttatgtacatatcttaagtttattgatctgaggtgccaagcaattgtccaacattgatcaaaacagttccgtaaattaattaataataaaaacctcttaacctaccaccagcatttactgctgatagtgcttgaagtttgttattacgatttagtctctatttaccaatttataaaaataatactatttcattattcacacacatgcacaaatttttgtaatgtcacttttaaagtttacgatatatgaagttcattcttctattttttggttgcaaagttttcaatgactttataattaaaattatcaatacaatttacaaaatgcttttctgcagatagcatacctaaagcactaggtttcgatgtaaacatcgaaaaacagcgttctgcttcagatgttgatataggaatggtaactaaaatacttaaaagtttaatagtttcttcaaatgtgctttttaaaccttccctctacaataaaaccgatagcgaaacagccccagaggtagtacttaattcgtctcgctaatacagtacctacttctaattcagttttaaaccgagttttgcttaaaaattaaaattgtctccgtggttcattaagaaatgattcggagaactgatgcttataagcagaaaactcctcggacataaataaattagaagcaactaaatgtccggagaaggtagacctttgaaagatctggtactttgaatagtatgaaccattaagtatttgtctaattcggcgctaaaattgaccagctccttaaatatacctctattttctgaattttctttttcgtcgtgacctcttaaagctaactcgaaagctccacaacaccttataacatttgtagtttttttttctagcgaaaaaccaccaaaaaattttttaaaatactaatcttattgtcaattaataaattaaacttaagaaataatcaaaatattatcaaaatacccacgatcatgatgcactaaaagtttaattataaatacaaaaactttttaacagaaaatatacataataaaagcgacaaaccagcacgtaaagaaactcaaaataaatagacctggcttcataccctcgtgcctggcacagagattctaatgttaaggtatactaatagtccaatatagctctttctctgtcacttacatataatgctcgtaaaatctttctctctttgctcgtgccagtactgacttcggcgcgaaggagattctcctgtcgaatactctccgctgtcggcagggattgtattgcgcccatagttgccatattttatataatttatgaagatcaaaagaaatacacacaaaaaaattaataggaattaaaaagttttgaagataaaaaatatgtttatggatagttagcaaggtagtgccatggctctatggcactacctcacgggccgccactggtatgtcagacaatttgaaaatatggttcagcttgccgaaggctgtcacaagtcagtcttatacgacggagaagcttaacagtttggatatcttttcctatgcgaatctcatgacctaggtatttataggtcattacctggtctatggatcttgttcctatgcatatata

SEQ ID NO: 2478 - DNA, 2085 bp, Diabrotica virgifera
  SmartBlast Evalue=5E-11; Info=Novel protein (Fragment) n=2 Tax= Danio rerio RepID=Q1LV84_DANRE
caccagaccatataacctaactcaactattaagagcagaatattacaatatttatcaaattttgtacaaacatgttttatgtattagattaagtttataacctatgttttttcccttcgtgttaagccctatgtctatccgatgtccacctgtctcgtctaaatgctctgatcgacccctgagcgtcaaattgtgtcctagtctaatatcccaatttatattggaaaaaagacaatggacaaagacaaataattccaagtagaaataaaaatcgttgaaaaattagatataggtatataaaacagttctttgtaaaattggagcaggattgtgattggatacagtggcggctcgtaccactttaagaaggtagtgccacaactcgggcagccgccaaaatttttagtgacggattcacgatattgtcaaaaaaaggtatactgacaacaaaaactaaaaaaaatatgcgcggatacttttatcttatgtacatatcttaagtttattgatctgaggtgccaagcaattgtccaacattgatcaaaacagttccgtaaattaattaataataaaaacctcttaacctaccaccagcatttactgctgatagtgcttgaagtttgttattacgatttagtctctatttaccaatttataaaaataatactatttcattattcacacacatgcacaaatttttgtaatgtcacttttaaagtttacgatatatgaagttcattcttctattttttggttgcaaagttttcaatgactttataattaaaattatcaatacaatttacaaaatgcttttctgcagatagcatacctaaagcactaggtttcgatgtaaacatcgaaaaacagcgttctgcttcagatgttgatataggaatggtaactaaaatacttaaaagtttaatagtttcttcaaatgtgctttttaaaccttccctctacaataaaaccgatagcgaaacagccccagaggtagtacttaattcgtctcgctaatacagtacctacttctaattcagttttaaaccgagttttgcttaaaaattaaaattgtctccgtggttcattaagaaatgattcggagaactgatgcttataagcagaaaactcctcggacataaataaattagaagcaactaaatgtccggagaaggtagacctttgaaagatctggtactttgaatagtatgaaccattaagtatttgtctaattcggcgctaaaattgaccagctccttaaatatacctctattttctgaattttctttttcgtcgtgacctcttaaagctaactcgaaagctccacaacaccttataacatttgtagtttttttttctagcgaaaaaccaccaaaaaattttttaaaatactaatcttattgtcaattaataaattaaacttaagaaataatcaaaatattatcaaaatacccacgatcatgatgcactaaaagtttaattataaatacaaaaactttttaacagaaaatatacataataaaagcgacaaaccagcacgtaaagaaactcaaaataaatagacctggcttcataccctcgtgcctggcacagagattctaatgttaaggtatactaatagtccaatatagctctttctctgtcacttacatataatgctcgtaaaatctttctctctttgctcgtgccagtactgacttcggcgcgaaggagattctcctgtcgaatactctccgctgtcggcagggattgtattgcgcccatagttgccatattttatataatttatgaagatcaaaagaaatacacacaaaaaaattaataggaattaaaaagttttgaagataaaaaatatgtttatggatagttagcaaggtagtgccatggctctatggcactacctcacgggccgccactggtatgtcagacaatttgaaaatatggttcagcttgccgaaggctgtcacaagtcagtcttatacgacggagaagcttaacagtttggatatcttttcctatgcgaatctcatgacctaggtatttataggtcattacctggtctatggatcttgttcctatgcatatata

SEQ ID NO: 2479 - DNA, 1953 bp, Diabrotica virgifera
  SmartBlast Evalue=5E-11; Info=Novel protein (Fragment) n=2 Tax= Danio rerio RepID=Q1LV84_DANRE
aaatgttgcatgtgaggcgtgaggtatgtaccaggttccattttgccttattaagatagagtaaaaatcttataacccatctgcagtgtttctggagattgaactattgtggaaacataggtaacttggtttgtttagaaggcaaaatgacatcaaattatactagtacatgtagacctgcctatattccatatagtaaatatttgcgatttggtgtataacgcagtggcggctcgtaccactttaagaaggtagtgccagaactcggacagccgccaaaatttttagtgacggattcacgatattgtcaaaaaattatacttacaacaaaaactagaaaaatataagcgcggatacttttatcttatgtatctagatttgaggtgccaagcaattgtccaacattgatcaaaacagttccgtaaattaattaataataaaaacctcttaacctaccaccagcatttactgctgatagtgcttgaagtttgttattacgatttagtctctatttaccaatttataaaaataatactatttcattattcacacacatgcacaaatttttgtaatgtcacttttaaagtttacgatatatgaagttcattcttctattttttggttgcaaagttttcaatgactttataattaaaattatcaatacaatttacaaaatgcttttctgcagatagcatacctaaagcactaggtttcgatgtaaacatcgaaaaacagcgttctgcttcagatgttgatataggaatggtaactaaaatacttaaaagtttaatagtttcttcaaatgtgctttttaaaccttccctctacaataaaaccgatagcgaaacagccccagaggtagtacttaattcgtctcgctaatacagtacctacttctaattcagttttaaaccgagttttgcttaaaaattaaaattgtctccgtggttcattaagaaatgattcggagaactgatgcttataagcagaaaactcctcggacataaataaattagaagcaactaaatgtccggagaaggtagacctttgaaagatctggtactttgaatagtatgaaccattaagtatttgtctaattcggcgctaaaattgaccagctccttaaatatacctctattttctgaattttctttttcgtcgtgacctcttaaagctaactcgaaagctccacaacaccttataacatttgtagtttttttttctagcgaaaaaccaccaaaaaattttttaaaatactaatcttattgtcaattaataaattaaacttaagaaataatcaaaatattatcaaaatacccacgatcatgatgcactaaaagtttaattataaatacaaaaactttttaacagaaaatatacataataaaagcgacaaaccagcacgtaaagaaactcaaaataaatagacctggcttcataccctcgtgcctggcacagagattctaatgttaaggtatactaatagtccaatatagctctttctctgtcacttacatataatgctcgtaaaatctttctctctttgctcgtgccagtactgacttcggcgcgaaggagattctcctgtcgaatactctccgctgtcggcagggattgtattgcgcccatagttgccatattttatataatttatgaagatcaaaagaaatacacacaaaaaaattaataggaattaaaaagttttgaagataaaaaatatgtttatggatagttagcaaggtagtgccatggctctatggcactacctcacgggccgccactggtatgtcagacaatttgaaaatatggttcagcttgccgaaggctgtcacaagtcagtcttatacgacggagaagcttaacagtttggatatcttttcctatgcgaatctcatgacctaggtatttataggtcattacctggtctatggatcttgttcctatgcatatata

SEQ ID NO: 2480 - DNA, 1913 bp, Diabrotica virgifera
  SmartBlast Evalue=5E-11; Info=Novel protein (Fragment) n=2 Tax= Danio rerio RepID=Q1LV84_DANRE
aacaacagcttacgccaagctgcaaaaagtgcagcggctagcttgtctgagaatcataggggcaatgtcaatatgccccattgcagctctagaggcgatgctgaatattcctcccttgcagttctgcataaggagggaggcagtaaccaccgccttaaagcggcgacagcagtggcggctcgtaccactttaagaaggtagtgccacaactcgggcagccgccaaaatttttagtgacggattcacgatattgtcaaaaaaaggtatactgacaacaaaaactaaaaaaaatatgcgcggatacttttatcttatgtacatatcttaagtttattgatctgaggtgccaagcaattgtccaacattgatcaaaacagttccgtaaattaattaataataaaaacctcttaacctaccaccagcatttactgctgatagtgcttgaagtttgttattacgatttagtctctatttaccaatttataaaaataatactatttcattattcacacacatgcacaaatttttgtaatgtcacttttaaagtttacgatatatgaagttcattcttctattttttggttgcaaagttttcaatgactttataattaaaattatcaatacaatttacaaaatgcttttctgcagatagcatacctaaagcactaggtttcgatgtaaacatcgaaaaacagcgttctgcttcagatgttgatataggaatggtaactaaaatacttaaaagtttaatagtttcttcaaatgtgctttttaaaccttccctctacaataaaaccgatagcgaaacagccccagaggtagtacttaattcgtctcgctaatacagtacctacttctaattcagttttaaaccgagttttgcttaaaaattaaaattgtctccgtggttcattaagaaatgattcggagaactgatgcttataagcagaaaactcctcggacataaataaattagaagcaactaaatgtccggagaaggtagacctttgaaagatctggtactttgaatagtatgaaccattaagtatttgtctaattcggcgctaaaattgaccagctccttaaatatacctctattttctgaattttctttttcgtcgtgacctcttaaagctaactcgaaagctccacaacaccttataacatttgtagtttttttttctagcgaaaaaccaccaaaaaattttttaaaatactaatcttattgtcaattaataaattaaacttaagaaataatcaaaatattatcaaaatacccacgatcatgatgcactaaaagtttaattataaatacaaaaactttttaacagaaaatatacataataaaagcgacaaaccagcacgtaaagaaactcaaaataaatagacctggcttcataccctcgtgcctggcacagagattctaatgttaaggtatactaatagtccaatatagctctttctctgtcacttacatataatgctcgtaaaatctttctctctttgctcgtgccagtactgacttcggcgcgaaggagattctcctgtcgaatactctccgctgtcggcagggattgtattgcgcccatagttgccatattttatataatttatgaagatcaaaagaaatacacacaaaaaaattaataggaattaaaaagttttgaagataaaaaatatgtttatggatagttagcaaggtagtgccatggctctatggcactacctcacgggccgccactggtatgtcagacaatttgaaaatatggttcagcttgccgaaggctgtcacaagtcagtcttatacgacggagaagcttaacagtttggatatcttttcctatgcgaatctcatgacctaggtatttataggtcattacctggtctatggatcttgttcctatgcatatata

SEQ ID NO: 2481 - DNA, 1825 bp, Diabrotica virgifera
tggtactttaaataatatgtaggggagactgggtaacagtgagactactttttttctatttaaccataagtccactactgtgacatgtataaacaaaatttcttcaggattgtactctcacatgtgttcattacacaagaaaaagtcaaatttgaatatagctcggtttgtttagtttgtattcgacgcataaggttaagttgtcatttgtctcagtgttacccatgcatgggtaacagtgagacagtacaatatttataggaaagaaaacataaaaaaacatttaaattacaaagtatttatttatatgaaaaataaaacaaataaaaaaacaaattcaagttacaaagtacttatttattaaaaaaataggaatcggaaataacgtacatttattaaattgaaatttatctctaatgaaaaaaaatttgccgtttagtatgacgttaacaaactggccttggcaatatcatcttaatgccttttactacaaattttagaaaaaaaaaatacaaaatgtaattttttataacatctgcgtaacagtgagacatgtctcaatgtaccccgtctcactgttacccatttgccataaaatttaaaaatattatttttgttattataaaacttagtttgcattgctaaactgtgctatcatgtttactaatctatacacaatgtcatagtaatactagaaaaatcctaataattaacatgcttttataaaaaattctcaaaatccctgtattattttacttagtgcccaccaaacacactttatcacgataaatcctaaactgaaactgcacggccgccgaacatattagtaatcagtaaccagtaaatacagcaatcatgcgtaagtaataatatctccacgtggcgaaaaggagggaagatatttcaagtgtctcactgttacccatgtctcactgttacccagtctcccctacctttaagtcgttgtctaattcggcgttaaaattgaccagctccttaaatatgcctctattttctgaattttccttttcgtcgtgacctcttaaagctaactcgaaagctccacaaaaccttataacatttgtagttttttttaaatattaaaaatattcttaaaaatttaaatttcttaaaaattttcttaagatactaatcttcgttgtcaattaataaattaaacttaagaaataatcaaaatattatttatactacacccacgatcatgatgcactaaaagtttaattataaatacaaaaacttttgaacagaaaatatacataataaaagtgacaaactagcacgtaaagaaactcaacttcgtgcccggcacagagattctcattttaaggtatactaatagtccaatatagctctttctctgccacttacatagaatgatcgtaaaatctttctctctttagtcgtgccagtactgacttttgcacgaaggagattctcctgtcgaataatctccgctgtcggcagggattgtattacgcccatagttgccatattttataaaatttatgaagatcaaaagaaatgcacaaaaaaattaacaggaattaaaaagttttgaagataaaaaatatgtttatggatagttagcaaggtagtgccatggctctatggcactacctcacgggccgccactggtatgtcagacaatttgaaaatatggttcagcttgccgaaggctgtcacaagtcagtcttatacgacggagaagcttaacagtttggatatcttttcctatgcgaatctcatgacctaggtatttataggtcattacctggtctatggatcttgttcctatgcatatata

SEQ ID NO: 2482 - DNA, 2579 bp, Diabrotica virgifera
  SmartBlast Evalue=0; Info=V-type proton ATPase subunit B n=25 Tax=Pancrustacea RepID=VATB_DROME
catgacaccacgtgaatattcgataattttgcagttgctaattttttactgtctttgatagacgtctcctgtacacgtaaaaatggcttcgacgatatcggcaagacaggctaacagagaacatgttttggccgtatccagagacttcatatcccaaccaagactcacttacaaaactgtatctggtgtcaacggtccactagtaatcctcgaagatgtcaaatttcctaagttcaacgaaattgtccaactcagattatctgacggaagtttaagatcaggtcaagtacttgaagtcagcggttccaaggctgtagtacaagtattcgaaggtacatcaggtatcgatgccaaacacactgtctgtgagttcacaggagatattctcagaactccagtctctgaggatatgttgggaagagtattcaacggctctggaaaacctattgacaaaggtcccccaattctggctgaagactacctagatattcaaggacaacccatcaacccatggtcccgtatctacccagaggaaatgatccaaactggtatcactgccatcgatgtgatgaactcgattgcccgtggtcagaagattcccattttctcagctgctggtctgccacataacgatattgctgcccaaatttgtaggcaagccggtcttgtcaaaatcccaggcaaatcagttttggatgaccacgaagacaactttgccatcgtgttcgctgctatgggtgttaacatggagactgctagattcttcaaacaagatttcgaagaaaatggttctatggaaaacgtatgtttgttcttgaacttggctaacgatccaaccatcgaaagaatcatcaccccacgtcttgctctaacagccgctgaattcttggcttaccagtgcgaaaaacacgtgttagtcattttaactgacatgtcttcatacgctgaagctttgcgtgaggtatctgccgccagagaggaagtacccggtcgtcgtggtttccccggttacatgtacaccgatttggccaccatctacgaacgtgccggtcgtgtcgaaggccgtaacggttccatcactcaaatccccatcttgactatgcctaacgacgatattactcaccctattcccgatttgacaggttatattaccgaaggacagatctacgtcgaccgtcaattgcacaacaggcagatctacccaccaattaacgtactgccatctctctcacgtttgatgaagtctgctatcggcgaaggtatgaccaggaaggaccactctgacgtttctaaccaattgtatgcttgttatgctatcggtaaggacgtccaggccatgaaagccgtagtaggtgaagaagctctaacacccgacgatcttctctacctcgagttcctaacgaaattcgaaaagaacttcatcacccaaggaaactacgaaaaccgcaccgtcttcgagtctttggacatcggctggcaactactccgtatcttccctaaggaaatgttgaaacgtatccctgcaagcacattggcggaattctatccaagagactctcgtcactagttggtttatgtataaaatttatatatatttaggaagtttgttaggtttgttacaaatatgtccacttattgtatcgattattttcaattgagagatattttaccaaaacaatttgagccgatgagattctacggtgtaatttttgtaaatacttaaagagcgtgtttcaaaaatgcgcttaatataatatattatcaatacagagcaacctttttttctttattattttttcttgttgaacaatatataaagttcttgaactccctaagtggaacatagagcttcagtgaaaatgcaccatcacctcattccaagactttccttgacttcttaccaattgttggacaattataactcagattaattttactaggtgacagttccataagtaaaaatatgcaatggctatatattgcgtactaaacttaagaagaaaaattgtgtcgctctggaagaaagattacttgcataagaatgaaaatcagtgtcatattttgcgtttatgacatccctagacgatactattttttcgttactatatttttttttaaagagatcaagagcaacaatttggagactgatattcttatgcgagttgttttcctactttgtcctattttgaagagtctacaattatttacttaccatttgattaaattagatgaacataagacaatactatatttttatcatgtaagttgatattccctatgtaaattattggcacaatgtaacctccaacttgatttatacatttattttacttttgtttgtctattttttctgtaatagagtggaagaattaacattccattaaatgtcattgcccaatgtataaagcaatatacctcttaccattcgatgctttttcagtattttaattctagatggtgaacggagatttttcttgatgtaggttttgacattttcgatgttactgtaaaaatctaattttatgttaaatagattagtgtacaaaaatgtgaataaacactatacatatgttaaaaaa

SEQ ID NO: 2483 - DNA, 2573 bp, Diabrotica virgifera
  SmartBlast Evalue=0; Info=V-type proton ATPase subunit B n=25 Tax=Pancrustacea RepID=VATB_DROME
catgacaccacgtgaatattcgataattttgcagttgctaattttttactgtctttgatagacgtctcctgtacacgtaaaaatggcttcgacgatatcggcaagacaggctaacagagaacatgttttggccgtatccagagacttcatatcccaaccaagactcacttacaaaactgtatctggtgtcaacggtccactagtaatcctcgaagatgtcaaatttcctaagttcaacgaaattgtccaactcagattatctgacggaagtttaagatcaggtcaagtacttgaagtcagcggttccaaggctgtagtacaagtattcgaaggtacatcaggtatcgatgccaaacacactgtctgtgagttcacaggagatattctcagaactccagtctctgaggatatgttgggaagagtattcaacggctctggaaaacctattgacaaaggtcccccaattctggctgaagactacctagatattcaaggacaacccatcaacccatggtcccgtatctacccagaggaaatgatccaaactggtatcactgccatcgatgtgatgaactcgattgcccgtggtcagaagattcccattttctcagctgctggtctgccacataacgatattgctgcccaaatttgtaggcaagccggtcttgtcaaaatcccaggcaaatcagttttggatgaccacgaagacaactttgccatcgtgttcgctgctatgggtgttaacatggagactgctagattcttcaaacaagatttcgaagaaaatggttctatggaaaacgtatgtttgttcttgaacttggctaacgatccaaccatcgaaagaatcatcaccccacgtcttgctctaacagccgctgaattcttggcttaccagtgcgaaaaacacgtgttagtcattttaactgacatgtcttcatacgctgaagctttgcgtgaggtatctgccgccagagaggaagtacccggtcgtcgtggtttccccggttacatgtacaccgatttggccaccatctacgaacgtgccggtcgtgtcgaaggccgtaacggttccatcactcaaatccccatcttgactatgcctaacgacgatattactcaccctattcccgatttgacaggttatattaccgaaggacagatctacgtcgaccgtcaattgcacaacaggcagatctacccaccaattaacgtactgccatctctctcacgtttgatgaagtctgctatcggcgaaggtatgaccaggaaggaccactctgacgtttctaaccaattgtatgcttgttatgctatcggtaaggacgtccaggccatgaaagccgtagtaggtgaagaagctctaacacccgacgatcttctctacctcgagttcctaacgaaattcgaaaagaacttcatcacccaaggaaactacgaaaaccgcaccgtcttcgagtctttggacatcggctggcaactactccgtatcttccctaaggaaatgttgaaacgtatccctgcaagcacattggcggaattctatccaagagactctcgtcactagttggtttatgtataaaatttatatatatttaggaagtttgttaggtttgttacaaatatgtccacttattgtatcgattattttcaattgagagatattttaccaaaacaatttgagccgatgagattctacggtgtaatttttgtaaatacttaaagagcgtgtttcaaaaatgcgcttaatataatatattatcaatacagagcaacctttttttctttattattttttcttgttgaacaatatataaagttcttgaactccctaagtggaacatagagcttcagtgaaaatgcaccatcacctcattccaagactttccttgacttcttaccaattgttggacaattataactcagattaattttactaggtgacagttccataagtaaaaatatgcaatggctatatattgcgtactaaacttaagaagaaaaattgtgtcgctctggaagaaagattacttgcataagaatgaaaatcagtgtcatattttgcgtttatgacatccctagacgatactattttttcgttactatatttttttttaaagagatcaagagcaacaatttggagactgatattcttatgcgagttgttttcctactttgtcctattttgaagagtctacaattatttacttaccatttgattaaattagatgaacataagacaatactatatttttatcatgtaagttgatattccctatgtaaattattggcacaatgtaacctccaacttgatttatacatttattttacttttgtttgtctattttttctgtaatagagtggaagaattaacattccattaaatgtcattgcccaatgtataaagcaatatacctcttaccattcgatgctttttcagtattttaattctagatggtgaacggagatttttcttgatgtaggttttgacattttcgatgttactgtaaaaatctaattttatgttaaatagattagtgtacaaaaatgtgaataaacactatacatatgtt

SEQ ID NO: 2484 - DNA, 2579 bp, Diabrotica virgifera
  SmartBlast Evalue=0; Info=V-type proton ATPase subunit B n=25 Tax=Pancrustacea RepID=VATB_DROME
catgacaccacgtgaatattcgataattttgcagttgctaattttttactgtctttgatagacgtctcctgtacacgtaaaaatggcttcgacgatatcggcaagacaggctaacagagaacatgttttggccgtatccagagacttcatatcccaaccaagactcacttacaaaactgtatctggtgtcaacggtccactagtaatcctcgaagatgtcaaatttcctaagttcaacgaaattgtccaactcagattatctgacggaagtttaagatcaggtcaagtacttgaagtcagcggttccaaggctgtagtacaagtattcgaaggtacatcaggtatcgatgccaaacacactgtctgtgagttcacaggagatattctcagaactccagtctctgaggatatgttgggaagagtattcaacggctctggaaaacctattgacaaaggtcccccaattctggctgaagactacctagatattcaaggacaacccatcaacccatggtcccgtatctacccagaggaaatgatccaaactggtatcactgccatcgatgtgatgaactcgattgcccgtggtcagaagattcccattttctcagctgctggtctgccacataacgatattgctgcccaaatttgtaggcaagccggtcttgtcaaaatcccaggcaaatcagttttggatgaccacgaagacaactttgccatcgtgttcgctgctatgggtgttaacatggagactgctagattcttcaaacaagatttcgaagaaaatggttctatggaaaacgtatgtttgttcttgaacttggctaacgatccaaccatcgaaagaatcatcaccccacgtcttgctctaacagccgctgaattcttggcttaccagtgcgaaaaacacgtgttagtcattttaactgacatgtcttcatacgctgaagctttgcgtgaggtatctgccgccagagaggaagtacccggtcgtcgtggtttccccggttacatgtacaccgatttggccaccatctacgaacgtgccggtcgtgtcgaaggccgtaacggttccatcactcaaatccccatcttgactatgcctaacgacgatattactcaccctattcccgatttgacaggttatattaccgaaggacagatctacgtcgaccgtcaattgcacaacaggcagatctacccaccaattaacgtactgccatctctctcacgtttgatgaagtctgccatcggcgaaggtatgaccaggaaggaccactctgacgtttctaaccagttgtatgcttgctatgctatcggtaaggacgtccaagccatgaaagctgtagtaggtgaagaagctctaacacccgacgatcttctctacctcgagttcctaacgaaattcgaaaagaacttcatcacccaaggaaactacgaaaaccgcaccgtcttcgagtctttggacatcggctggcaactactccgtatcttccctaaggaaatgttgaaacgtatccctgcaagcacattggcggaattctatccaagagactctcgtcactagttggtttatgtataaaatttatatatatttaggaagtttgttaggtttgttacaaatatgtccacttattgtatcgattattttcaattgagagatattttaccaaaacaatttgagccgatgagattctacggtgtaatttttgtaaatacttaaagagcgtgtttcaaaaatgcgcttaatataatatattatcaatacagagcaacctttttttctttattattttttcttgttgaacaatatataaagttcttgaactccctaagtggaacatagagcttcagtgaaaatgcaccatcacctcattccaagactttccttgacttcttaccaattgttggacaattataactcagattaattttactaggtgacagttccataagtaaaaatatgcaatggctatatattgcgtactaaacttaagaagaaaaattgtgtcgctctggaagaaagattacttgcataagaatgaaaatcagtgtcatattttgcgtttatgacatccctagacgatactattttttcgttactatatttttttttaaagagatcaagagcaacaatttggagactgatattcttatgcgagttgttttcctactttgtcctattttgaagagtctacaattatttacttaccatttgattaaattagatgaacataagacaatactatatttttatcatgtaagttgatattccctatgtaaattattggcacaatgtaacctccaacttgatttatacatttattttacttttgtttgtctattttttctgtaatagagtggaagaattaacattccattaaatgtcattgcccaatgtataaagcaatatacctcttaccattcgatgctttttcagtattttaattctagatggtgaacggagatttttcttgatgtaggttttgacattttcgatgttactgtaaaaatctaattttatgttaaatagattagtgtacaaaaatgtgaataaacactatacatatgttaaaaaa

SEQ ID NO: 2485 - DNA, 2573 bp, Diabrotica virgifera
  SmartBlast Evalue=0; Info=V-type proton ATPase subunit B n=25 Tax=Pancrustacea RepID=VATB_DROME
catgacaccacgtgaatattcgataattttgcagttgctaattttttactgtctttgatagacgtctcctgtacacgtaaaaatggcttcgacgatatcggcaagacaggctaacagagaacatgttttggccgtatccagagacttcatatcccaaccaagactcacttacaaaactgtatctggtgtcaacggtccactagtaatcctcgaagatgtcaaatttcctaagttcaacgaaattgtccaactcagattatctgacggaagtttaagatcaggtcaagtacttgaagtcagcggttccaaggctgtagtacaagtattcgaaggtacatcaggtatcgatgccaaacacactgtctgtgagttcacaggagatattctcagaactccagtctctgaggatatgttgggaagagtattcaacggctctggaaaacctattgacaaaggtcccccaattctggctgaagactacctagatattcaaggacaacccatcaacccatggtcccgtatctacccagaggaaatgatccaaactggtatcactgccatcgatgtgatgaactcgattgcccgtggtcagaagattcccattttctcagctgctggtctgccacataacgatattgctgcccaaatttgtaggcaagccggtcttgtcaaaatcccaggcaaatcagttttggatgaccacgaagacaactttgccatcgtgttcgctgctatgggtgttaacatggagactgctagattcttcaaacaagatttcgaagaaaatggttctatggaaaacgtatgtttgttcttgaacttggctaacgatccaaccatcgaaagaatcatcaccccacgtcttgctctaacagccgctgaattcttggcttaccagtgcgaaaaacacgtgttagtcattttaactgacatgtcttcatacgctgaagctttgcgtgaggtatctgccgccagagaggaagtacccggtcgtcgtggtttccccggttacatgtacaccgatttggccaccatctacgaacgtgccggtcgtgtcgaaggccgtaacggttccatcactcaaatccccatcttgactatgcctaacgacgatattactcaccctattcccgatttgacaggttatattaccgaaggacagatctacgtcgaccgtcaattgcacaacaggcagatctacccaccaattaacgtactgccatctctctcacgtttgatgaagtctgccatcggcgaaggtatgaccaggaaggaccactctgacgtttctaaccagttgtatgcttgctatgctatcggtaaggacgtccaagccatgaaagctgtagtaggtgaagaagctctaacacccgacgatcttctctacctcgagttcctaacgaaattcgaaaagaacttcatcacccaaggaaactacgaaaaccgcaccgtcttcgagtctttggacatcggctggcaactactccgtatcttccctaaggaaatgttgaaacgtatccctgcaagcacattggcggaattctatccaagagactctcgtcactagttggtttatgtataaaatttatatatatttaggaagtttgttaggtttgttacaaatatgtccacttattgtatcgattattttcaattgagagatattttaccaaaacaatttgagccgatgagattctacggtgtaatttttgtaaatacttaaagagcgtgtttcaaaaatgcgcttaatataatatattatcaatacagagcaacctttttttctttattattttttcttgttgaacaatatataaagttcttgaactccctaagtggaacatagagcttcagtgaaaatgcaccatcacctcattccaagactttccttgacttcttaccaattgttggacaattataactcagattaattttactaggtgacagttccataagtaaaaatatgcaatggctatatattgcgtactaaacttaagaagaaaaattgtgtcgctctggaagaaagattacttgcataagaatgaaaatcagtgtcatattttgcgtttatgacatccctagacgatactattttttcgttactatatttttttttaaagagatcaagagcaacaatttggagactgatattcttatgcgagttgttttcctactttgtcctattttgaagagtctacaattatttacttaccatttgattaaattagatgaacataagacaatactatatttttatcatgtaagttgatattccctatgtaaattattggcacaatgtaacctccaacttgatttatacatttattttacttttgtttgtctattttttctgtaatagagtggaagaattaacattccattaaatgtcattgcccaatgtataaagcaatatacctcttaccattcgatgctttttcagtattttaattctagatggtgaacggagatttttcttgatgtaggttttgacattttcgatgttactgtaaaaatctaattttatgttaaatagattagtgtacaaaaatgtgaataaacactatacatatgtt

SEQ ID NO: 2486 - DNA, 1436 bp, Diabrotica virgifera
  SmartBlast Evalue=2E-15; Info=Endonuclease-reverse transcriptase n=1 Tax=Bombyx mori RepID=D7F162_BOMMO
cgattttgatcactaaacatgagtttgaaacgtattgacgagtagtatctgatgcatctaaggtcaagtatgataactgaagctattacaggaattattgagcttgaaaaaccgtttttcccataagaaatagatttgatcatacttatgaagcctataacttaaaaattcgaattttcccggatataaggtatacaccgttagattcgtctagagtccttctacaaacgctagttattggcgcaattcgtaggttgaaattttgagtaattgtcgaaaaaccaaaattttcaaagtttagtttttcagtttttcggctatactgagccgtgtgtatgtctgatcctgacgcttagacaccatttgaaagcttaactcaacactattgatttggtgtatttgctgttctcctgtctcttcttgaatccgaagatatatacccccaaaaaatatgccgttttgtacctaccaagtcctatagctggcttatgggtggtcaaaagtcacaaactacaccggttctgaatcggccctcactcaaacacaagaaaaaaaaaattcagatcggtttaacttttccacacacatacatatataatacatgtacaataatgtacatacatattttatatccacaaacattttcccttttttaaataaaaattgactcatatttctgagctcggtaacttttgaacggtataaccgattttcaaaattagacatgcgttggaaaggtaatgatcgcttctattagaagccgcaaaggtctggagttaaatttttgaagtttttgggagttttggggacgagaacgaaaaacagaccctaaataggaagggccgtaaaatccacacccttggaccaaaatggatggttgacatatgaatgggcgagtcttttcctgaactttaagatgggagttggcacaattttcaattcagtcagatttagaaaatcgaaaatttcgtgtatatatagtgtcgcgtgtaggggggtttgggtgggcgccactggcgagaactgccgttctctggtaattaaacgatggtagagagaaatgcgtagagataattactagggtttcgttattactaacagcagtggatgcgaagatgagatccgtcaacgcatcacaatggccagatcggcaatagccaaactcacaaaaatatggaaaaacactgatgttacaaaaaaaaacacaaaattacgccttgttcgagcgttattatttcctatcgccacctacgcttcagaaacttgtatcattaaaaagctgattcgaagcgtataatgctaattgaaatgtgagtctagggtagaatgttgcgcataccatggatcgcatatcgcaccaataattcaatccaaacgaactacaccagaacagacgcgtgctaactgtcaacagttcatgactacgaccacacaca

SEQ ID NO: 2487 - DNA, 1422 bp, Diabrotica virgifera
  SmartBlast Evalue=2E-15; Info=Endonuclease-reverse transcriptase n=1 Tax=Bombyx mori RepID=D7F162_BOMMO
cgattttgatcactaaacatgagtttgaaacgtattgacgagtagtatctgatgcatctaaggtcaagtatgataactgaagctattacaggaattattgagcttgaaaaaccgtttttcccataagaaatagatttgatcatacttatgaagcctataacttaaaaattcgaattttcccggatataaggtatacaccgttagattcgtctagagtccttctacaaacgctagttattggcgcaattcgtaggttgaaattttgagtaattgtcgaaaaaccaaaattttcaaagtttagtttttcagtttttcggctatactgagccgtgtgtatgtctgatcctgacgcttagacaccatttgaaagcttaactcaacactattgatttggtgtatttgctgttctcctgtctcttcttgaatccgaagatatatacccccaaaaaatatgccgttttgtacctaccaagtcctatagctggcttatgggtggtcaaaagtcacaaactacaccggttctgaatcggctctcaccccctcttcaaacacgaaaaaaaaattcagatcggtttaacttttccacacacatacatacatacatacatacatacatatccacaaacattttcccttttttaaataaaaattgactcatatttctgagctcggtaacttttgaacggtataaccgattttcaaaattagacatgcgttggaaaggtaatgatcgcttctattagaagccgcaaaggtctggagttaaatttttgaagtttttgggagttttggggacgagaacgaaaaacagaccctaaataggaagggccgtaaaatccacacccttggaccaaaatggatggttgacatatgaatgggcgagtcttttcctgaactttaagatgggagttggcacaattttcaattcagtcagatttagaaaatcgaaaatttcgtgtatatatagtgtcgcgtgtaggggggtttgggtgggcgccactggcgagaactgccgttctctggtaattaaacgatggtagagagaaatgcgtagagataattactagggtttcgttattactaacagcagtggatgcgaagatgagatccgtcaacgcatcacaatggccagatcggcaatagccaaactcacaaaaatatggaaaaacactgatgttacaaaaaaaaacacaaaattacgccttgttcgagcgttattatttcctatcgccacctacgcttcagaaacttgtatcattaaaaagctgattcgaagcgtataatgctaattgaaatgtgagtctagggtagaatgttgcgcataccatggatcgcatatcgcaccaataattcaatccaaacgaactacaccagaacagacgcgtgctaactgtcaacagttcatgactacgaccacacaca

SEQ ID NO: 2488 - DNA, 1437 bp, Diabrotica virgifera
  SmartBlast Evalue=2E-15; Info=Endonuclease-reverse transcriptase n=1 Tax=Bombyx mori RepID=D7F162_BOMMO
cgattttgatcactaaacatgagtttgaaacgtattgacaagtagtatctgatgcatctaaggtcaagtatgataactgaagctattacaggaattattgagcttgaaaaaccgttttttttcataagaaatagatttgatcatacttatgaagcctataacttaaaaattcgaattttcccggatataaggtatacaccgttagattcgtctagagtccttctacaaacgctagttattggcgcaattcgtaggttgaaattttgagtaattgtcgaaaaaccaaaattttcaaagtttagtttttcagtttttcggctatactgagccgtgtgtatgtctgatcctgacagcttagacaccgtttgaaagcttaactcaacgctattaatttggtgtatttactgttctcctgtctcctcttgaaccgaagatatatactgccaaaaaatatgccgttttgtacctaccaagtcctatagctggcttatggatagtcaaaactcacaaactacaccggttctgaatcggccctcactcaaacacaagaaaaaaaaaattcagatcggtttaacttttccacacacatacatatataatacatgtacaataatgtacatacatattttatatccacaaacattttcccttttttaaataaaaattgactcatatttctgagctcggtaacttttgaacggtataaccgattttcaaaattagacatgcgttggaaaggtaatgatcgcttctattagaagccgcaaaggtctggagttaaatttttgaagtttttgggagttttggggacgagaacgaaaaacagaccctaaataggaagggccgtaaaatccacacccttggaccaaaatggatggttgacatatgaatgggcgagtcttttcctgaactttaagatgggagttggcacaattttcaattcagtcagatttagaaaatcgaaaatttcgtgtatatatagtgtcgcgtgtaggggggtttgggtgggcgccactggcgagaactgccgttctctggtaattaaacgatggtagagagaaatgcgtagagataattactagggtttcgttattactaacagcagtggatgcgaagatgagatccgtcaacgcatcacaatggccagatcggcaatagccaaactcacaaaaatatggaaaaacactgatgttacaaaaaaaaacacaaaattacgccttgttcgagcgttattatttcctatcgccacctacgcttcagaaacttgtatcattaaaaagctgattcgaagcgtataatgctaattgaaatgtgagtctagggtagaatgttgcgcataccatggatcgcatatcgcaccaataattcaatccaaacgaactacaccagaacagacgcgtgctaactgtcaacagttcatgactacgaccacacaca

SEQ ID NO: 2489 - DNA, 1423 bp, Diabrotica virgifera
  SmartBlast Evalue=2E-15; Info=Endonuclease-reverse transcriptase n=1 Tax=Bombyx mori RepID=D7F162_BOMMO
cgattttgatcactaaacatgagtttgaaacgtattgacaagtagtatctgatgcatctaaggtcaagtatgataactgaagctattacaggaattattgagcttgaaaaaccgttttttttcataagaaatagatttgatcatacttatgaagcctataacttaaaaattcgaattttcccggatataaggtatacaccgttagattcgtctagagtccttctacaaacgctagttattggcgcaattcgtaggttgaaattttgagtaattgtcgaaaaaccaaaattttcaaagtttagtttttcagtttttcggctatactgagccgtgtgtatgtctgatcctgacagcttagacaccgtttgaaagcttaactcaacgctattaatttggtgtatttactgttctcctgtctcctcttgaaccgaagatatatactgccaaaaaatatgccgttttgtacctaccaagtcctatagctggcttatggatagtcaaaactcacaaactacaccggttctgaatcggctctcaccccctcttcaaacacgaaaaaaaaattcagatcggtttaacttttccacacacatacatacatacatacatacatacatatccacaaacattttcccttttttaaataaaaattgactcatatttctgagctcggtaacttttgaacggtataaccgattttcaaaattagacatgcgttggaaaggtaatgatcgcttctattagaagccgcaaaggtctggagttaaatttttgaagtttttgggagttttggggacgagaacgaaaaacagaccctaaataggaagggccgtaaaatccacacccttggaccaaaatggatggttgacatatgaatgggcgagtcttttcctgaactttaagatgggagttggcacaattttcaattcagtcagatttagaaaatcgaaaatttcgtgtatatatagtgtcgcgtgtaggggggtttgggtgggcgccactggcgagaactgccgttctctggtaattaaacgatggtagagagaaatgcgtagagataattactagggtttcgttattactaacagcagtggatgcgaagatgagatccgtcaacgcatcacaatggccagatcggcaatagccaaactcacaaaaatatggaaaaacactgatgttacaaaaaaaaacacaaaattacgccttgttcgagcgttattatttcctatcgccacctacgcttcagaaacttgtatcattaaaaagctgattcgaagcgtataatgctaattgaaatgtgagtctagggtagaatgttgcgcataccatggatcgcatatcgcaccaataattcaatccaaacgaactacaccagaacagacgcgtgctaactgtcaacagttcatgactacgaccacacaca

SEQ ID NO: 2490 - DNA, 950 bp, Diabrotica virgifera
  SmartBlast Evalue=1E-15; Info=Endonuclease-reverse transcriptase n=1 Tax=Bombyx mori RepID=D7F162_BOMMO
ttttgtacctacaaagtcctatagctggcttatgggtggtcaaaagtcacaaactacaccggttctaaatcggccctgaccccctctttaaatacagagaaaaaatatcaaatcggtttaactttcaaacacacatacatacatatccacaaacattttcccttttttaaataaaaattgactcatatttctgagctcggtaacttttgaacggtataaccgattttcaaaattagacatgcgttggaaaggtaatgatcgcttctattagaagccgcaaaggtctggagttaaattttcgaagtttttgggagttttggggacgagaacgaaaaacagaccctaaataggaagggccgtaaaatccacacccttggaccaaaatggatggttgacatatgaatgggcgagtcttttcctgaactttaagatgggagttggcacaattttcaattcagtcagatttagaaaatcgaaaatttcgtgtatatatagtgtcgcgtgtaggggggtttgggtgggcgccactggcgagaactgccgttctctggtaattaaacgatggtagagagaaatgcgtagagataattactagggtttcgttattactaacagcagtggatgcgaagatgagatccgtcaacgcatcacaatggccagatcggcaatagccaaactcacaaaaatatggaaaaacactgatgttacaaaaaaaaacacaaaattacgccttgttcgagcgttattatttcctatcgccacctacgcttcagaaacttgtatcattaaaaagctgattcgaagcgtataatgctaattgaaatgtgagtctagggtagaatgttgcgcataccatggatcgcatatcgcaccaataattcaatccaaacgaactacaccagaacagacgcgtgctaactgtcaacagttcatgactacgaccacacaca

SEQ ID NO: 2491 - DNA, 1137 bp, Diabrotica virgifera
  SmartBlast Evalue=1E-76; Info="Aldose reductase, putative n=1 Tax=Pediculus humanus corporis RepID=E0VMR6_PEDHC"
aaattttaataatttatttttcaatactatcaaatatttcatttttacaagcaactactgacgaccagtcttctgacagttttttcgttgtttcttttttcgtcatgcttattaacttttgtatggatactctgggtgttctttaattttgggattaaaaacatccatacggaacagtcttccatctacgtctttatccaaagcttccaaagctttcaggtcttcggcatcaagtgtaaaatccaagaaattgaagttttgcttcactctctctggttttacactctttggaataacaacgatgtcattttgagttaaatatcttaatagtacgtgactggtagctttgttgtgtttttcggcgattttggttaccactggatcagcaagaaggctggggatttgtacttccttgccgagtcttttcataaatacgtttaatccaggtgatcctagtgagccgtaagatacgacgacgatgttgtgcttcttgcaataatccctaagttttttctgctggtagtaaacgtgcagttccacttgagtgttggctggttgaattctacaattcttcactattctgtcgatctggtttacgttgaagttggagataccgatggttctggttcttttcgcatctacttgctcttccattttcttccaaacagccagatggtcagtaggtagaggttccattggctttccagcttcaacaaatttcatgtatatgggagaatgcaccaagtacaaatcaacatagtccagctgaagcttctgtaaggattctttaagagctgtttcgacgagatcgggatggatgtgtgtcattggaagcttggtagtaatgaaaatatcttctctcttaagtttgccagacgtcaaccatttgttgagaactttgccgatgacatgctcgttttggtatgcagatgcagtatcgatgtggcggtatccagtttccagagctgcctcaacggcagcttccaattcttcttcattggtagcctgccatgttcctagccccactatggggattttcacaccaccaatcattgtcagagacatttttgtttgataataaacaactggagacaccgactgtagaactctagcaattaaactgttacacaatgattc

SEQ ID NO: 2492 - DNA, 1136 bp, Diabrotica virgifera
  SmartBlast Evalue=9E-77; Info="Aldose reductase, putative n=1 Tax=Pediculus humanus corporis RepID=E0VMR6_PEDHC"
aaattttaataatttatttttcaatactatcaaatatttcatttttacaagcaactactgacgaccagtcttctgacagttttttcgttgtttcttttttcgtcatgcttattaacttttgtatggatactctgggtgttctttaattttgggattaaaaacatccatacggaacagtcttccatctacgtctttatccaaagcttccaaagctttcaggtcttcggcatcaagtgtaaaatccaagaaattgaagttttgcttcactctctctggttttacactctttggaataacaacgatgtcattttgagttaaatatcttaatagtacgtgactggtagctttgttgtgtttttcggcgattttggttaccactggatcagcaagaaggctggggatttgtacttccttgccgagtcttttcataaatacgtttaatccaggtgatcctagtgagccgtaagatacgacgacgatgttgtgcttcttgcaataatccctaagttttttctgctggtagtaaacgtgcagttccacttgagtgttggctggttgaattctacaattcttcactattctgtcgatctggtttacgttgaagttggagataccgatggttctggttcttttcgcatctacttgctcttccattttcttccaaacagccagatggtcagtaggtagaggttccattggctttccagcttcaacaaatttcatgtatatgggagaatgcaccaagtacaaatcaacatagtccagctgaagcttctgtaaggattctttaagagctgtttcgacgagatcgggatggatgtgtgtcattggaagcttggtagtaatgaaaatatcttctctcttaagtttgccagacgtcaaccatttgttgagaactttgccgatgacatgctcgttttggtatgcagatgcagtatcgatgtggcggtatccagtttccagagctgcctcaacggcagcttccaattcttcttcattggtagcctgccatgttcctagccccactatggggatctttacaccaccaatcattgtcagagacatttttgtttgataataaacaactggagacactgactatacaactctagcaattaaactgttacacaatgatt

SEQ ID NO: 2493 - DNA, 1132 bp, Diabrotica virgifera
  SmartBlast Evalue=3E-74; Info="Aldose reductase, putative n=1 Tax=Pediculus humanus corporis RepID=E0VMR6_PEDHC"
aaattttaataatttatttttcaatactatcaaatatttcatttttacaagcaactactgacgaccagtcttctgacagttttttcgttgtttcttttttcgtcatgcttattaacttttgtatggatactctgggtgttctttaattttgggattaaaaacatccatacggaacagtcttccatctacgtctttatccaaagcttccaaagctttcaggtcttcggcatcaagtgtaaaatccaagaaattgaagttttgcttcactctctctggttttacactctttggaataacaacgatgtcattttgagttaaatatcttaatagtacgtgactggtagctttgttgtgtttttcggcgattttggttaccactggatcagcaagaaggctggggatttgtacttccttgccgagtcttttcataaatacgtttaatccaggtgatcctagtgagccgtaagatacgacgacgatgttgtgcttcttgcaataatccctaagttttttctgctggtagtaaacgtgcagttccacttgagtgttggctggttgaattctacaattcttcactattctgtcgatctggtttacgttgaagttggagataccgatggttctggttcttttcgcatctacttgctcttccattttcttccaaacagccagatggtcagtaggtagaggttccattggctttccagcttcaacaaatttcatgtatatgggagaatgcaccaagtacaaatcaacatagtccagctgaagcttctgtaaggattctttaagagctgtttcgacgagatcgggatggatgtgtgtcattggaagcttggtagtaatgaaaatatcttctctcttaagtttgccagacgccaaccatttatttagaactttgccgatgacatgctcgttttggtatgcagatgcagtatctatgtggcggtatccagtttccagagctgcctcaacggcaccttccaattcttcttcattggtagcctgccatgttcctagccccactatggggatctttacaccaccaatcattgtcagagacatttttgtttgataataaacaactggagacactgactatacaactctagcaattaaactgttacacaat

SEQ ID NO: 2494 - DNA, 1136 bp, Diabrotica virgifera
  SmartBlast Evalue=1E-64; Info=Alcohol dehydrogenase [NADP+] n=1 Tax=Camponotus floridanus RepID=E2A7P0_9HYME
aaattttaataatttatttttcaatactatcaaatatttcatttttacaagcaactactgacgaccagtcttctgacagttttttcgttgtttcttttttcgtcatgcttattaacttttgtatggatactctgggtgttctttaattttgggattaaaaacatccatacggaacagtcttccatctacgtctttatccaaagcttccaaagctttcaggtcttcggcatcaagtgtaaaatccaagaaattgaagttttgcttcactctctctggttttacactctttggaataacaacgatgtcattttgagttaaatatcttaatagtacgtgactggtagctttgttgtgtttttcggcgattttggttaccactggatcagcaagaaggctggggatttgtacttccttgccgagtttttcataaatacgtttaatccaggtgatcctagtgagccgtaagaaacgacgacgatgttgtgcttcttgcaataatctctaagttttttctgctggtagtaaacgtgcagttccacttgagtgttggctggttgaattctacaattcttcactattctgtcgatctggtttacgttgaagttggagagaccgatggttctggttcttttcgcatctacttgctcttccattttcttccaaacagccagatggtcagtaggtaggggttccattggctttccagcttcaacaaatttcatgtatatgggagaatgcaccaagtacaaatcaacatagtccagctgaagcttctgtaaggattctttaagagctgtttcgacgagatcgggatggatgtgtgtcattggaagcttggtagtaatgaaaatatcttctctcttaagtttgccagacgtcaaccatttgttgagaactttgccgatgacatgctcgttttggtatgcagatgcagtatcgatgtggcggtatccagtttccaaagctgcctcaacggcagcttccaattcttcttcattggtagcctgccatgttcctagccccactatggggattttcacaccaccaatcattgtcagagacatttttgtttgataataaacaactggagacaccgactgtagaactctagcaattaaactgttacacaatgattc

SEQ ID NO: 2495 - DNA, 1135 bp, Diabrotica virgifera
  SmartBlast Evalue=1E-64; Info=Alcohol dehydrogenase [NADP+] n=1 Tax=Camponotus floridanus RepID=E2A7P0_9HYME
aaattttaataatttatttttcaatactatcaaatatttcatttttacaagcaactactgacgaccagtcttctgacagttttttcgttgtttcttttttcgtcatgcttattaacttttgtatggatactctgggtgttctttaattttgggattaaaaacatccatacggaacagtcttccatctacgtctttatccaaagcttccaaagctttcaggtcttcggcatcaagtgtaaaatccaagaaattgaagttttgcttcactctctctggttttacactctttggaataacaacgatgtcattttgagttaaatatcttaatagtacgtgactggtagctttgttgtgtttttcggcgattttggttaccactggatcagcaagaaggctggggatttgtacttccttgccgagtttttcataaatacgtttaatccaggtgatcctagtgagccgtaagaaacgacgacgatgttgtgcttcttgcaataatctctaagttttttctgctggtagtaaacgtgcagttccacttgagtgttggctggttgaattctacaattcttcactattctgtcgatctggtttacgttgaagttggagagaccgatggttctggttcttttcgcatctacttgctcttccattttcttccaaacagccagatggtcagtaggtaggggttccattggctttccagcttcaacaaatttcatgtatatgggagaatgcaccaagtacaaatcaacatagtccagctgaagcttctgtaaggattctttaagagctgtttcgacgagatcgggatggatgtgtgtcattggaagcttggtagtaatgaaaatatcttctctcttaagtttgccagacgtcaaccatttgttgagaactttgccgatgacatgctcgttttggtatgcagatgcagtatcgatgtggcggtatccagtttccaaagctgcctcaacggcagcttccaattcttcttcattggtagcctgccatgttcctagccccactatggggatctttacaccaccaatcattgtcagagacatttttgtttgataataaacaactggagacactgactatacaactctagcaattaaactgttacacaatgatt

SEQ ID NO: 2496 - DNA, 1341 bp, Diabrotica virgifera
tatataaatatttggccctagttactagtagtttcagatttcctggtgcatgatagtgatgtaacgaatattcgtattcgcatttgcgaatattcgcatcttttttaatattgaaatgaatatcagaaaaaaaagtaatttgaagataatattaggttaataaaatcaaaatatcttcacttctcatctttttttattaaggaaaggtaacttaacttcgtataatcacattatcagcctttactttattttattatttggtcttttttattaagccttaagattccttaagaatcagatttatttacactagatgtcaattaacttctcattataaatttagaaaatattacaaaaatagaatcaaatttaaaaaaactgaatattcgcatccgtattcgcaaatgtcgtagcagatatttgcattcgtattcgcgaatgttcaaaaaatgacattcgttacatcactactcacctccactttttttaaatttcacaggagaggtaaaaaactttttattttttatctttaagactattaggaaaatatctgtttttatgtattctttggttttagtatttactatataagctgatgaatatttaaaaagtttttttaattatgaaagacctagaaaccgcaattttttgaaaaagagatgacccgttttcataatgaacaggtatttacagatcatgtggtagaatgggaaaaggagtcatttctaggagatgactccttttcaaactgaactgatttgcggggtatgctgtgcttacggtaataatattgaaattgacccgttttcatatggaatagacgtgtctatgtgtattaaatacaaattcgacagaaagtggaaatgtcaaaaaagtggagataaccccttttcacaatgaccgattcaattgcatctttaaccctgtttcaagtagctaatgtcgatgcacagtagccaaaggggaccgacgcctttaggtgaacggttcgttttcttgtaaaaatgaaaatgtcgtggtttgtgccgagactcgaactcgtgcgctctggcttatgaggccagtatcaactgcagagttacggccgttcataatttgttacaaattaaactttaacgaaagttggagtggagaaacatctagcgatcgtgttccttactatagcatttgagattacagactggagaaaaatcttaaatgtactccacgtatatcatacgatatacagtggaaattagcattaagattcatattcaatggagaaaaccttacaagtgtgaaatttgttacaataataatgtagcgaaagagctaccgcaagtaacaggctccatctctaca

SEQ ID NO: 2497 - DNA, 1300 bp, Diabrotica virgifera
tatataaatatttggccctagttactagtagtttcagatttcctggtgcatgatagtgatgtaacgaatattcgtattcgcatttgcgaatattcgcatcttttttaatattgaaatgaatatcagaaaaaaaagtaatttgaagataatattaggttaataaaatcaaaatatcttcacttctcatctttttttattaaggaaaggtaacttaacttcgtataatcacattatcagcctttactttattttattatttggtcttttttattaagccttaagattccttaagaatcagatttatttacactagatgtcaattaacttctcattataaatttagaaaatattacaaaaatagaatcaaatttaaaaaaactgaatattcgcatccgtattcgcaaatgtcgtagcagatatttgcattcgtattcgcgaatgttcaaaaaatgacattcgttacatcactactcacctccactttttttaaatttcacaggagaggtaaaaaactttttattttttatctttaagactattaggaaaatatctgtttttatgtattctttggttttagtatttactatataagctgatgaatatttaaaaagtttttttaattatgaaagacctagaaaccgcaattttttgaaaaagagatgacccgttttcataatgaacaggtatttacagatcatgtggtagaatgggaaaaggagtcatttctaggagatgactccttttcaaactgaactgatttgcggggtatgctgtgcttacggtaataatattgaaattgacccgttttcatatggaatagacgtgtctatgtgtattaaatacaaattcgacagaaagtggaaatgtcaaaaaagtggagataaccccttttcacaatgaccgattcaattgcatctttaaccctgtttcaagtagctaatgtcgatgcacagtagccaaaggggaccgacgcctttaggtgaacggttcgttttcttgtaaaaatgaaaatgtcgtggtttgtgccgagactcgaactcgtgcgctctggcttatgaggccagtatcaactgcagagttacggccgttccataacatctagtaatcgtgttccttactataacatttgagattacagactggagaaaaatcttaaatgtactccacgtatatcatacgatatacagtggaaattagcattaagattcatattcaatggagaaaaccttacaagtgtgaaatttgttacaataataatgtagcgaaagagctaccgcaagtaacaggctccatctctaca

SEQ ID NO: 2498 - DNA, 1004 bp, Diabrotica virgifera
atgaagcacgggtaaagattcgcggactcaactgtaacaaacgatttacagtggagatcagcataaatattcatattcaatggagaaaaaccttacaaatgtgaaatttgttacaataattgaatcagtaattttgaaaaggtcacctccccttttttaaatttcacaggagcggtaaaaaactttttatctttaagactattaggaaaatatctgtttttatgtattctttggttttagtatttactatataagctgatgaatatttaaaaagtttttttaattatgaaagacctagaaaccgcaattttttgaaaaagagatgacccgttttcataatgaacaggtatttacagatcatgtggtagaatgggaaaaggagtcatttctaggagatgactccttttcaaactgaactgatttgcggggtatgctgtgcttacggtaataatattgaaattgacccgttttcatatggaatagacgtgtctatgtgtattaaatacaaattcgacagaaagtggaaatgtcaaaaaagtggagataaccccttttcacaatgaccgattcaattgcatctttaaccctgtttcaagtagctaatgtcgatgcacagtagccaaaggggaccgacgcctttaggtgaacggttcgttttcttgtaaaaatgaaaatgtcgtggtttgtgccgagactcgaactcgtgcgctctggcttatgaggccagtatcaactgcagagttacggccgttcataatttgttacaaattaaactttaacgaaagttggagtggagaaacatctagcgatcgtgttccttactatagcatttgagattacagactggagaaaaatcttaaatgtactccacgtatatcatacgatatacagtggaaattagcattaagattcatattcaatggagaaaaccttacaagtgtgaaatttgttacaataataatgtagcgaaagagctaccgcaagtaacaggctccatctctaca

SEQ ID NO: 2499 - DNA, 963 bp, Diabrotica virgifera
atgaagcacgggtaaagattcgcggactcaactgtaacaaacgatttacagtggagatcagcataaatattcatattcaatggagaaaaaccttacaaatgtgaaatttgttacaataattgaatcagtaattttgaaaaggtcacctccccttttttaaatttcacaggagcggtaaaaaactttttatctttaagactattaggaaaatatctgtttttatgtattctttggttttagtatttactatataagctgatgaatatttaaaaagtttttttaattatgaaagacctagaaaccgcaattttttgaaaaagagatgacccgttttcataatgaacaggtatttacagatcatgtggtagaatgggaaaaggagtcatttctaggagatgactccttttcaaactgaactgatttgcggggtatgctgtgcttacggtaataatattgaaattgacccgttttcatatggaatagacgtgtctatgtgtattaaatacaaattcgacagaaagtggaaatgtcaaaaaagtggagataaccccttttcacaatgaccgattcaattgcatctttaaccctgtttcaagtagctaatgtcgatgcacagtagccaaaggggaccgacgcctttaggtgaacggttcgttttcttgtaaaaatgaaaatgtcgtggtttgtgccgagactcgaactcgtgcgctctggcttatgaggccagtatcaactgcagagttacggccgttccataacatctagtaatcgtgttccttactataacatttgagattacagactggagaaaaatcttaaatgtactccacgtatatcatacgatatacagtggaaattagcattaagattcatattcaatggagaaaaccttacaagtgtgaaatttgttacaataataatgtagcgaaagagctaccgcaagtaacaggctccatctctaca

SEQ ID NO: 2500 - DNA, 688 bp, Diabrotica virgifera
tatataaatatttggccctagttactagtagtttcagatttcctggtgcatgatagtgatgtaacgaatattcgtattcgcatttgcgaatattcgcatcttttttaatattgaaatgaatatcagaaaaaaaagtaatttgaagataatattaggttaataaaatcaaaatatcttcacttctcatctttttttattaaggaaaggtaacttaacttcgtataatcacattatcagcctttactttattttattatttggtcttttttattaagccttaagattccttaagaatcagatttatttacactagatgtcaattaacttctcattataaatttagaaaatattacaaaaatagaatcaaatttaaaaaaactgaatattcgcatccgtattcgcaaatgtcgtagcagatatttgcattcgtattagcgaatgttcaaaaaatgacattccttacatcactagtgcatgaagatgataactgtaaatatcatttacagaaactcgatagaagaaggcgttaaaagcagttaacattttcttccacttcagtcatgtgaaatataacctaacaaagatgacaaaagtgacagtattggttttatggtgagtttccgtaaaattaaagagaattatggaaatagatggatttcacagaaaaagtaaatagacccgaagttag

SEQ ID NO: 2501 - DNA, 1589 bp, Diabrotica virgifera
tttccttctacttttccctgtaagattagttgcagcagtctatatctctcgttgttcctcatcatgcgaccgaggtattcgattttagctgcttttattgtggttaacaaaaccacaaaaaaaacggttatttcaaaaccgatattcggtttttagtcgatagccaatacccaataggttacaatgttacacttacaatacactttagtttgctattatcgatatcgacactatcgaaagaatatatcgatatacagagtgtcccggaaaatagtgcgttcctttaaggtatggagagaatacacaatttagaacaaaaaagtcctataacatttttttctaaagttaaccgtttccaaaaaaaagttaacattgttttccatatacctgtattttaatgtttggaaattttaataaactggcaacatcgtacgcactacggaataataacagataataagaactcgtttgtgattgtgattacagtatttaaaataatccaacctaatagtgggtaactacttatgtatttactatttgtttactaaaattattttcttttgaaatgtattgaaatacctattgcataattttaaacgaattacacatcttttaacataaaaacacatcttttaactgaactagtattatgtatttagtaaggtttaaatgggttgaatgctgagtattgctgagggctttaactgaattacatagttttaatagtttacagtggaacttaaatacaccagataatgtctcagtaatttgtttacttgtgaactgaaataactaagttgtacttacttgaaaataattattataccgaatagatgtttcaagtaacctttcacaaacaccattcataggtaataacataataggtaatacactcactattcgaaaacattttcggcattgacactaaacaggattctttaaaactatctgtttactatctatcttctatctatttacatgggactgtctatgcttaaatttgcgtaccgcacatagttgtcagatttaaatttgcctaccaaaatgtattttaattttttggtcaaacggttgcatttagaaaaaaatgttataagagttttttgttctacatggtgccttctacctatacctttaaggaacgcactattttccgggacaccctgtataaacctacttttattcgtatttttagtacatttctgatttttcgccccaccttgtggttaacgtaacaagtgttttcttaatgccggtaaggtatctcttaatattaatattttagagtacctgattcagtatttttaattacaacaatattagggatccatacgaacgtccttttacgaaagagaaactatagaaagcccacccatagttccaaatatcaatctttaatttttaacattgatacttttttggataatcgatatagctgtcaacaaaaatcatcttctactgtcctgtgataactaaaattagtacagtcgaacccgcttattggaatagcattcgtgccaaggaaaagtattcctataaccgggatattttaataaccgatcattgttagctagtagaaacgtttcgga

SEQ ID NO: 2502 - DNA, 1270 bp, Diabrotica virgifera
tttccttctacttttccctgtaagattagttgcagcagtctatatctctcgttgttcctcatcatgcgaccgaggtattcgattttagctgcttttattgtggttaacaaaaccacaaaaaaaacggttatttcaaaaccgatattcggtttttagtcgatagccaatacccaataggttacaatgttacacttacaatacactttagtttgctattatcgatatcgacactatcgaaagaatatatcgatatacagagtgtcccggaaaatagtgcgttcctttaaggtatggagagaatacacaatttagaacaaaaaagtcctataacatttttttctaaagttaaccgtttccaaaaaaaagttaacattgttttccatatacctgtattttaatgtttggaaattttaataaactggcaacatcgtacgcactacggaataataacagataataagaactcgtttgtgattgtgattacagtatttaaaataatccaacctaatagtgggtaactacttatgtatttactatttgtttactaaaattattttcttttgaaatgtattgaaatacctattgcataattttaaacgaattacacatcttttaacataaaaacacatcttttaactgaactagtattatgtatttagtaaggtttaaatgggttgaatgctgagtattgctgagggctttaactgaattacatagttttaatagtttacagtggaacttaaatacaccagataatgtctcagtaatttgtttacttgtgaactgaaataactaagttgtacttacttgaaaataattattataccgaatagatgtttcaagtaacctttcacaaacaccattcataggtaataacataataggtaatacactcactattcgaaaacattttcggcattgacactaaacaggattctttaaaactatctgtttactatctatcttctatctatttacatgggactgtctatgcttaaatttgcgtaccgcacatagttgtcagatttaaatttgcctaccaaaatgtattttaattttttggtcaaacggttgcatttagaaaaaaatgttataagagttttttgttctacatggtgccttctacctatacctttaaggaacgcactattttccgggacaccctgtatatgtttatggtttggcttttacattgtctgcatctccttcttgacttctcagattgcggtattacaatgtggatcactctgtcagctctaattccttcggc

SEQ ID NO: 2503 - DNA, 774 bp, Diabrotica virgifera
aagccgacgatatgcaaattgaagtatggcaacaaagcgcaactcaaaaatctacagattaaaaaagtaggtttgtaggtcagttgcatatggtaggtaaaataatgtaaatatcaaccaaacccatatccattatttacaggtaggtacctacgatgtcaacaaccccaaaaatcacacctcaaagtaaataaacaaggggttattaggttaaatttccacagtcacagcaagttcttctaggctacgttgccatgtcattcaaatttatgaaaataaaaattcacttacagtggaacctcgattatccgtcagggcaccagaccaagggtatgacggataatcgaaaagacggttaacagaacattaaaaaaaaataacatagttcatatagctcttaaattgtatttgtatgttttatttgacaatataagaggtatttatgttagtacagtcgaattagtttgatttaaaatattccgaattctttgtttgttttcttgttactttacattttgcaagtgctgaatttcttaatcgacgtaaaatcatcaaatctaataattattgtgccgtgcgtttttattttcggcttgcgattctaaaaatagaactctaaaagcatggtatcatttatcgttacctatttaaattgaaatttaatccagaggcctgaataagaacaaaacttatttacataaaaaatgcggtggtggcattactgcacgtgtacatttcaacgaatttcgtttggcttatcgcaatgctcaaaca

SEQ ID NO: 2504 - DNA, 675 bp, Diabrotica virgifera
tttccttctacttttccctgtaagattagttgcagcagtctatatctctcgttgttcctcatcatgcgaccgaggtattcgattttagctgcttttattgtggttaacaaaaccacaaaaaaaacggttatttcaaaaccgatattcggtttttagtcgatagccaatacccaataggttacaatgttacacttacaatacactttagtttgctattatcgatatcgacactatcgaaagaatatatcgatatacagagtgtcccggaaaatagtgcgttcctttaaggtatggagagaatacacaatttagaacaaaaaagtcctataacatttttttctaaagttaaccgtttccaagaaaaaaattacattgttctccatataagtgaatttttattttcataaatttgaatgacatggcaacgtagcctagaagaacttgctgtgactgtggaaatttaacctaataaccccttgtttatttactttgaggtgtgatttttggggttgttgacatcgtaggtacctacctgctaaataatggatatgggtttggttgatatttacattattttacctaccatatgcaactgacctacaaacctacttttttaatctgtagatttttgagttgcgctttgttgccatacttcaatttgcatatcgtcggctt

SEQ ID NO: 2505 - DNA, 476 bp, Diabrotica virgifera
tttccttctacttttccctgtaagattagttgcagcagtctatatctctcgttgttcctcatcatgcgaccgaggtattcgattttagctgcttttattgtggttaacaaaaccacaaaaaaaacggttatttcaaaaccgatattcggtttttagtcgatagccaatacccaataggttacaatgttacacttacaatacactttagtttgctattatcgatatcgacactatcgaaagaatatatcgatatacagagtgtcccggaaaatagtgcgttcctttaaggtatggagagaatacacaatttagaacaaaaaagtcctataacacttctttctaaagtcaaccgtttccaaaaaaaattaaattgttctccatataagcgaacttttattttcataaaatttaaaaatttggcatccctgtacaagaactgttagtgatttaggttattgacaccaaaaaaatgtagg

SEQ ID NO: 2506 - DNA, 1187 bp, Diabrotica virgifera
catgacaaattaaacaaacataaaaatatctatacttggtgatacgtaactttacggagtacctcggtagctctaaatcttcaggtgtggattcttaatagattttaaatataatagaaactcaattgctcggggacgccataaaaaatgaaagacggaacatacttaaaacttcaaaaaaataactaaactaaaaagttaataaaaatatatagttattatgagatacaaacacatttacataaatagtacaaaaaggttagtttccatgaaaagtttcagcaaaactaaataaacttccaaatgattctgctcatattgacttttaaataacttttgatgtatttaggattatctttagcacttaatccataactgcttacaaaaagaaacttaggtagtgtacatactctacactaaaataaactggctctttgcctaacagcgccatttggcttgtaactaggaagtcacgaaaggagtacagtttctaacactacataggtactacttctaatactctaccttttcaggaactacaaaaaaacttgattaagaactacgtcagaacttaatttcgaacttaactttctcagaaaaccgccaaagcggcttctgccgaggctcaaccaacctctctacttgaatgcccaaatttgagttcttaatctcacaacttgaatgaatctcctcaaaccaaaacgcttccttccaaaacccactccatttctctcattctaccctactcatccaatcaaccaataagaaaaacgttcaatccttccttctttcatcattgactaataaaaaaataactaagcttcctacatgtactatcgaccaatagggaaaaacaaatatattttaagcccaacctacttagtagggaaccatcaaaaaatcatttcgcaagtcagcaaaactcacttagttctacagttctcaagaaaaatactgcgagtgtacaatcctacacctgcgcttctctgataccaaagcagcacgtatgtgtatctaactcccaagattcgtggagccaaaacgatcattagctacaatgtaactcttctttacatcacaaactgactgttaaaagttcaattatcgagcgataatataaacacagaaaaccgaaattagacatgactgcaaataatataacgtatttctttaacaaaactgataaa

SEQ ID NO: 2507 - DNA, 1082 bp, Diabrotica virgifera
atggatctcttgtagacaatataagagattctgtttacaaaaaacaataaaaaaggtttacaaacaataccttgtcatatagtcctgtccttattcttcacgttgtgaatatccaaagcacgcacttttcactgaatttagataaacaatagtacaaaaatgtttattttaatgaaaagtttcagcaaaactaaataaactttcaaatctgctcatattgacttttaaataacttttgaggtatttaggattatctttagcacttaatccataactgcttccgaaaagaaacttaggtagtgtcgtatacactaaaataaactggctctttgcctaacagcgccatttggcttgtaactaggaagtcacgaaaggagtacagtttctaacactacataggtactacttctaatactctaccttttcaggaactacaaaaaaacttgattaagaactacgtcagaacttaatttcgaacttaactttctcagaaaaccgccaaagcggcttctgccgaggctcaaccaacctctctacttgaatgcccaaatttgagttcttaatctcacaacttgaatgaatctcctcaaaccaaaacgcttccttccaaaacccactccatttctctcattctaccctactcatccaatcaaccaataagaaaaacgttcaatccttccttctttcatcattgactaataaaaaaataactaagcttcctacatgtactatcgaccaatagggaaaaacaaatatattttaagcccaacctacttagtagggaaccatcaaaaaatcatttcgcaagtcagcaaaactcacttagttctacagttctcaagaaaaatactgcgagtgtacaatcctacacctgcgcttctctgataccaaagcagcacgtatgtgtatctaactcccaagattcgtggagccaaaacgatcattagctacaatgtaactcttctttacatcacaaactgactgttaaaagttcaattatcgagcgataatataaacacagaaaaccgaaattagacatgactgcaaataatataacgtatttctttaacaaaactgataaa

SEQ ID NO: 2508 - DNA, 840 bp, Diabrotica virgifera
atggatctcttgtagacaatataagagattctgtttacaaaaaacaataaaaaaggtttacaaacaataccttgtcatatagtcctgtccttattcttcacgttgtgaatatccaaagcacgcacttttcactgaatttagataaacaatagtacaaaaatgtttattttaatgaaaagtttcagcaaaactaaataaactttcaaatctgctcatattgacttttaaataacttttgaggtatttaggattatctttagcacttaatccataactgcttccgaaaagaaacttaggtagtgtcgtatacactaaaataaacaagagtggcattttctagtttctcacactacattttcaggaacctaaaaatttgattaaaaactacgtcagaacttaatctttgaacttaactttctcagaaaaccgccaagcgactgctgccgaggctctaccaacctctctacttggatgcccaaacttgaattccttctatctcaccacttgaatgaatcgccctaaaccaaaacgcttccttccaaaaacccactccatttctctcattccaacctactcatccaatcaaccaataagaaaaaagtttaatccttccttctttcatcattgaccaacagaaaaaaacaaaacatgtcctaaatccaacctctttggtagggaattatactctttggccaatagggtcatttagccatgtcagcgatccttacttagctccaacattttgaagaaaggtattgctgagtcctcaattaacacccgcgctttctgatattgatattagcacgcattgtgtacctagactccaaagacttctggcgc

SEQ ID NO: 2509 - DNA, 759 bp, Diabrotica virgifera
gtagtgtagtatacactaaaataaactggctctttgcctaacagcggcatttggcttgtgactaggaagtcacgaaacgagaacagcttctcacactacattttcaggaacttaaaaaacttgattaagaactacgtcagaacttaatttcgaacttaactttctcagaaaaccgccaaagcggcttctgccgaggctcaaccaacctctctacttgaatgcccaaatttgagttcttaatctcacaacttgaatgaatctcctcaaaccaaaacgcttccttccaaaacccactccatttctctcattctaccctactcatccaatcaaccaataagaaaaacgttcaatccttccttctttcatcattgactaataaaaaaataactaagcttcctacatgtactatcgaccaatagggaaaaacaaatatattttaagcccaacctacttagtagggaaccatcaaaaaatcatttcgcaagtcagcaaaactcacttagttctacagttctcaagaaaaatactgcgagtgtacaatcctacacctgcgcttctctgataccaaagcagcacgtatgtgtatctaactcccaagattcgtggagccaaaacgatcattagctacaatgtaactcttctttacatcacaaactgactgttaaaagttcaattatcgagcgataatataaacacagaaaaccgaaattagacatgactgcaaataatataacgtatttctttaacaaaactgataaa

SEQ ID NO: 2510 - DNA, 656 bp, Diabrotica virgifera
atggatctcttgtagacaatataagagattctgtttacaaaaaacaataaaaaaggtttacaaacaataccttgtcatatagtcctgtccttattcttcacgttgtgaatatccaaagcacgcacttttcactgaatttagataaacaatagtacaaaaatgtttattttaatgaaaagtttcagcaaaactaaataaactttcaaatctgctcatattgacttttaaatatttaaataacttataattaacttcttgaagtatttattattaatattgacacctaatgcatgactttatccatgactgcttcaaaaaaacttagtgtattacacactaaaactaaccagctttttgcctgaacgcatcaacaccatgatttcttcataaaacttcgaaatcggctacattctcacttaagttctcaatcaaacttccacttcaaaagctcaaactaaaaattcaactcaactcttcagaaaccgccataagcggtctccgaccgaagctacaaccaagctctgacttcaacttccaaaacttgaatcctttaatctcacaacttgaatgcatctcctcaaaccaaaacgcttccttccaaagacccactccatttctctcattctactctactcatccaatcaaccaataagaaa

SEQ ID NO: 2511 - DNA, 1029 bp, Diabrotica virgifera
  SmartBlast Evalue=2E-15; Info=Encapsulation-relating protein variant a n=2 Tax=Anoplophora glabripennis RepID=A5YRY5_ANOGL
ttttaacaaagtatttttaacttttattacttttttgacttaataattaaagaggtatatttttctacagtctttagtaggtcttgtcggttgagggagtgtatgatttgccagcaattttttgttgggccaaggaggaccacatgttggaccaggggttggcaggagtggcactaattcctgatgggtagagtccttggttaacaccgtaagctcctccgtatccaccaagattgttgtagttgttgtatccatatccgtaaggggagtatgaagggtatgggtactgctcaggtgattggtagtatgagggtactgtggtgtctacggggtatccaggatttctaagtggttgttggtttccatactgagtaacaccgttgttgaagtctcttaagctgcggatgacgtcataaacaccagcgctaagctgaccagattttacgtagtagtcgactttggttaagagttctccataggatttggcatcggttgcctcttggtgttcgctgaagatttcttgaagtaattgagcttgagttttcgattttccttcctttcctttgtactctttggtgtctttggagtttttgctgtcttttttgtctttggtggagctgcttctcttggctctgtcttcttcgtcagtgttgtattgctcagacaagcttggttcgactaggctgatggttctttcgttggtttcgccatttactgagatcttcttgactgctccgtatggtccattgattgagatttcaatgtcttttggtccagtgcctccaatggcgtttgagatgacgattttcttaccattttctcccaagatggtgagagtgccatcgtcgttgatggtgacttgcttgccggtaccaaaggtaagggcacagctgagtgcgatgactgaaaggaataccaaagctgacttcatcttgacgaactaaagactgatgttctgcctaaccggtattgtcttttatatggtttgcattgtttttcttcgtgatttaaggaatattttattatctt

SEQ ID NO: 2512 - DNA, 1025 bp, Diabrotica virgifera
  SmartBlast Evalue=2E-15; Info=Encapsulation-relating protein variant a n=2 Tax=Anoplophora glabripennis RepID=A5YRY5_ANOGL
aacaaagtatttttaacttttattacttttttgacttaataattaaagaggtatatttttctacagtctttagtaggtcttgtcggttgagggagtgtatgatttgccagcaattttttgttgggccaaggaggaccacatgttggaccaggggttggcaggagtggcactaattcctgatgggtagagtccttggttaacaccgtaagctcctccgtatccaccaagattgttgtagttgttgtatccatatccgtaaggggagtatgaagggtatgggtactgctcaggtgattggtagtatgagggtactgtggtgtctacggggtatccaggatttctaagtggttgttggtttccatactgagtaacaccgttgttgaagtctcttaagctgcggatgacgtcataaacaccagcgctaagctgaccagattttacgtagtagtcgactttggttaagagttctccataggatttggcatcggttgcctcttggtgttcgctgaagatttcttgaagtaattgagcttgagttttcgattttccttcctttcctttgtactctttggtgtctttggagtttttgctgtcttttttgtctttggtggagctgcttctcttggctctgtcttcttcgtcagtgttgtattgctcagacaagcttggttcgactaggctgatggttctttcgttggtttcgccatttactgagatcttcttgactgctccgtatggtccattgattgagatttcaatgtcttttggtccagtgcctccaatggcgtttgagatgacgattttcttaccattttctcccaagatggtgagagtgccatcgtcgttgatggtgacttgcttgccggtaccaaaggtaagggcacagctgagtgcgatgactgaaaggaataccaaagctgacttcatcttgacgaactaaagactgatgttctgcctaaccggtattgtcttttatatggtttgcattgtttttcttcgtgatttaaggaatattttattatctt

SEQ ID NO: 2513 - DNA, 1029 bp, Diabrotica virgifera
  SmartBlast Evalue=2E-15; Info=Encapsulation-relating protein variant a n=2 Tax=Anoplophora glabripennis RepID=A5YRY5_ANOGL
ttttaacaaagtatttttaacttttattacttttttgacttaataattaaagaggtatatttttctacagtctttagtaggtcttgtcggttgagggagtgtatgatttgccagcaattttttgttgggccaaggaggaccacatgttggaccaggggttggcaggagtggcactaattcctgatgggtagagtccttggttaacaccgtaagctcctccgtatccaccaagattgttgtagttgttgtatccatatccgtaaggggagtatgaagggtatgggtactgctcaggtgattggtagtatgagggtactgtggtgtctacggggtatccaggatttctaagtggttgttggtttccatactgagtaacaccgttgttgaagtctcttaagctgcggatgacgtcataaacaccagcgctaagctgaccagattttacgtagtagtcgactttggttaagaggtctccataggacttggcatcggttgcctcttggtgttcgctgaagatttcctgtaataattgagcttgagttttcgattttccttcctttcctttgtactctttggtgtctttggagtttttgctgtcttttttgtctttggtggagctgcttctcttggctctgtcttcttcgtcagtgttgtattgctcagacaagcttggttcgacgaggttgatggttctttcgttggtttcgccatttactgagatctttttgactgctccgtatggtccattgattgagatttcaatgtcttttggtccagtgcctccaatggcgtttgagatgacgattttcttaccattttctcccaagatggtgagagtgccatcgtcgttgatggtgacttgcttgccggtaccaaaggtaagggcacagctgagtgcgatgactgaaaggaataccaaagctgacttcatcttgacgaactaaagactgatgttctgcctaaccggtattgtcttttatatggtttgcattgtttttcttcgtgatttaaggaatattttattatctt

SEQ ID NO: 2514 - DNA, 1025 bp, Diabrotica virgifera
  SmartBlast Evalue=2E-15; Info=Encapsulation-relating protein variant a n=2 Tax=Anoplophora glabripennis RepID=A5YRY5_ANOGL
aacaaagtatttttaacttttattacttttttgacttaataattaaagaggtatatttttctacagtctttagtaggtcttgtcggttgagggagtgtatgatttgccagcaattttttgttgggccaaggaggaccacatgttggaccaggggttggcaggagtggcactaattcctgatgggtagagtccttggttaacaccgtaagctcctccgtatccaccaagattgttgtagttgttgtatccatatccgtaaggggagtatgaagggtatgggtactgctcaggtgattggtagtatgagggtactgtggtgtctacggggtatccaggatttctaagtggttgttggtttccatactgagtaacaccgttgttgaagtctcttaagctgcggatgacgtcataaacaccagcgctaagctgaccagattttacgtagtagtcgactttggttaagaggtctccataggacttggcatcggttgcctcttggtgttcgctgaagatttcctgtaataattgagcttgagttttcgattttccttcctttcctttgtactctttggtgtctttggagtttttgctgtcttttttgtctttggtggagctgcttctcttggctctgtcttcttcgtcagtgttgtattgctcagacaagcttggttcgacgaggttgatggttctttcgttggtttcgccatttactgagatctttttgactgctccgtatggtccattgattgagatttcaatgtcttttggtccagtgcctccaatggcgtttgagatgacgattttcttaccattttctcccaagatggtgagagtgccatcgtcgttgatggtgacttgcttgccggtaccaaaggtaagggcacagctgagtgcgatgactgaaaggaataccaaagctgacttcatcttgacgaactaaagactgatgttctgcctaaccggtattgtcttttatatggtttgcattgtttttcttcgtgatttaaggaatattttattatctt

SEQ ID NO: 2515 - DNA, 1145 bp, Diabrotica virgifera
cttattcattcagtccagtcgatacaagcaagcaagatgaaaaagtaaaagtaaaaagttaagatgtgtttcacgccaaatatggtttttttgtactttttcaagtggcctgataaataattattgttccatatattatatatgtgtgtatatatgtgtatattatatattgtatatatatatgtatatatgtgtatatatatatgtgtatatatatatatatgccagtataaggatataatcgaatataaatattaatttcttcaatcggacgtaaatacctacccgtattggaattcaagttttaaattgtaattataaaacttcaaacacaactggtgctgcaaattacttcaaaatgagtgaaattacactatatctttggaaaccgaagctgccatgttccgttggccatattgcaatgcagtttccagatggcgaatacattagcttttggccaagcacttgtaaatcaattacagctaaaggcagaggctgttctatgtcatacaaagaggacataggcataaacaaggagaaacgggaagctgataaaatattgaagcttcccagcagcataattaatcaagaagatgcaatcaattggtggaacgattatttgtgctcttcttctactaattacaacctggtcgcagtcaactgcgctacctctgtgttcaattgcctcgttcagggtggtattttatcgaactgtgcctaatctttatcgtccgaattacttccagaagataacacctaatggggtatttcgcttggcttgtaaagctgaacatttgatgaatgaagcttaaaaattaattttatattttgaaaaatattcaatacctgtattcttactttatatatgcatataatatgtaattcaagttatgtcccataaaaaagcaaaaaaattattaaaaattatatgtagttatttaggataaaaaaaaatgttttcaactgatttttcagttgatttataacgaaatctttactatttccgtactattgtatttttggcatattataattagttatattaacgtatttaaggttttatatttctcatataacgcagtaggagacaatgttataaataaacatcttgaaattacaaattataatacataataaataaatca

SEQ ID NO: 2516 - DNA, 1067 bp, Diabrotica virgifera
atatatatatgtgtatatatatatatatatgtgtatatatgtgtatatatgtatgtatatgtatatattgttgtatatatatatgttatatatatatgtgtatatatatatatgtgtatatatatatgtgtatatatatatatatgccagtataaggatataatcgaatataaatattaatttcttcaatcggacgtaaatacctacccgtattggaattcaagttttaaattgtaattataaaacttcaaacacaactggtgctgcaaattacttcaaaatgagtgaaattacactatatctttggaaaccgaagctgccatgttccgttggccatattgcaatgcagtttccagatggcgaatacattagcttttggccaagcacttgtaaatcaattacagctaaaggcagaggctgttctatgtcatacaaagaggacataggcataaacaaggagaaacgggaagctgataaaatattgaagcttcccagcagcataattaatcaagaagatgcaatcaattggtggaacgattatttgtgctcttcttctactaattacaacctggtcgcagtcaactgcgctacctctgtgttcaattgcctcgttcagggtggtattttatcgaactgtgcctaatctttatcgtccgaattacttccagaagataacacctaatggggtatttcgcttggcttgtaaagctgaacatttgatgaatgaagcttaaaaattaattttatattttgaaaaatattcaatacctgtattcttactttatatatgcatataatatgtaattcaagttatgtcccataaaaaagcaaaaaaattattaaaaattatatgtagttatttaggataaaaaaaaatgttttcaactgatttttcagttgatttataacgaaatctttactatttccgtactattgtatttttggcatattataattagttatattaacgtatttaaggttttatatttctcatataacgcagtaggagacaatgttataaataaacatcttgaaattacaaattataatacataataaataaatca

SEQ ID NO: 2517 - DNA, 1080 bp, Diabrotica virgifera
aaacttacttattctaattctattcattcagtccagtcgatacaagcaagcaagatgagaaagtaaaagtaaaaagttaagatgtgtttcacgccaaatatggtttttttgtactttttcaagtggcctgataaataattattgttccatatatatatgccagtataaggatataatcgaatataaatattaatttcttcaatcggacgtaaatacctacccgtattggaattcaagttttaaattgtaattataaaacttcaaacacaactggtgctgcaaattacttcaaaatgagtgaaattacactatatctttggaaaccgaagctgccatgttccgttggccatattgcaatgcagtttccagatggcgaatacattagcttttggccaagcacttgtaaatcaattacagctaaaggcagaggctgttctatgtcatacaaagaggacataggcataaacaaggagaaacgggaagctgataaaatattgaagcttcccagcagcataattaatcaagaagatgcaatcaattggtggaacgattatttgtgctcttcttctactaattacaacctggtcgcagtcaactgcgctacctctgtgttcaattgcctcgttcagggtggtattttatcgaactgtgcctaatctttatcgtccgaattacttccagaagataacacctaatggggtatttcgcttggcttgtaaagctgaacatttgatgaatgaagcttaaaaattaattttatattttgaaaaatattcaatacctgtattcttactttatatatgcatataatatgtaattcaagttatgtcccataaaaaagcaaaaaaattattaaaaattatatgtagttatttaggataaaaaaaaatgttttcaactgatttttcagttgatttataacgaaatctttactatttccgtactattgtatttttggcatattataattagttatattaacgtatttaaggttttatatttctcatataacgcagtaggagacaatgttataaataaacatcttgaaattacaaattataatacataataaataaatca

SEQ ID NO: 2518 - DNA, 273 bp, Diabrotica virgifera
cttattcattcagtccagtcgatacaagcaagcaagatgaaaaagtaaaagtaaaaagttaagatgtgtttcacgccaaatatggtttttttgtactttttcaagtggcctgataaataattattgttccatatatatatatgtgtatatatatatatgtgtatatatatatatgtgtatatatgtgtatatatatatttatatatatatgtagtatatatgtatatatatgtgtatatatatgtgtgtatatatatatgtgtatatatatat

SEQ ID NO: 2519 - DNA, 245 bp, Diabrotica virgifera
cttattcattcagtccagtcgatacaagcaagcaagatgaaaaagtaaaagtaaaaagttaagatgtgtttcacgccaaatatggtttttttgtactttttcaagtggcctgataaataattattgttccatatatatattttatatatgtgtatatatatgtgtatatatatgtgtatatatatatatatatgtgtatatatatgtatatatatatatgtgtatatatatatatgtgtatatat

SEQ ID NO: 2520 - DNA, 899 bp, Diabrotica virgifera
  SmartBlast Evalue=6E-12; Info=Endonuclease-reverse transcriptase n=1 Tax=Schistosoma japonicum RepID=C7C208_SCHJA
aaataataaaaaaagtaagaactaaaaaaggataccaaatgggagaaaaacaacttaaaataatctgctatgcagacgatgcaatactaatctctcaaagtgaagatgatttacaacgtatgctgcaccaatttaacataaccgccagaaaatttaacatgttaatttccccaaaaaagacaaaatgcatggttataacagcaaatccaataagatgtaaattggagctggaggtcagataatagaacaagtgatggagtttaaatatctaggcatcacactatctagctacggaaggctcgaaacagaagtggaagatcaagtgaatagagcaaacagagccgcaggttgcctgaatgacacaatatggagaaataaaaatatcggaaaagaaatgaaagacagaatttacaaaacagtcatcagaccaataatgacatacgcggcagaaacacgacccagcacagagaggacaaaaagattgctcgaaacaacagaaatgaaaaccctccgaaaaatcgatggtaagactctatgggacagagctagaagtacagatatacgacggagatgcaaggtggaaacattaataactgggtaagaaacagaagaatagaatggaatgaccacataagccgaatgacaacaacaaatagagtagtaagacagcgagagacggttccccaataggaagacgatcagtgggaagaccacgaaaacgatggaacgacaacttactagaggcacattgaaggaatagacatcggagtcatgacgtttacaaacaactaacattgtcagttgagtgattataattatttccaagggcaccctgaccaaaggtgattttcaattgaacaaacgtatacaacatataggttgaacgtgttcatttatac

SEQ ID NO: 2521 - DNA, 895 bp, Diabrotica virgifera
  SmartBlast Evalue=6E-12; Info=Endonuclease-reverse transcriptase n=1 Tax=Schistosoma japonicum RepID=C7C208_SCHJA
aaataataaaaaaagtaagaactaaaaaaggataccaaatgggagaaaaacaacttaaaataatctgctatgcagacgatgcaatactaatctctcaaagtgaagatgatttacaacgtatgctgcaccaatttaacataaccgccagaaaatttaacatgttaatttccccaaaaaagacaaaatgcatggttataacagcaaatccaataagatgtaaattggagctggaggtcagataatagaacaagtgatggagtttaaatatctaggcatcacactatctagctacggaaggctcgaaacagaagtggaagatcaagtgaatagagcaaacagagccgcaggttgcctgaatgacacaatatggagaaataaaaatatcggaaaagaaatgaaagacagaatttacaaaacagtcatcagaccaataatgacatacgcggcagaaacacgacccagcacagagaggacaaaaagattgctcgaaacaacagaaatgaaaaccctccgaaaaatcgatggtaagactctatgggacagagctagaagtacagatatacgacggagatgcaaggtggaaacattaataactgggtaagaaacagaagaatagaatggaatgaccacataagccgaatgacaacaacaaatagagtagtaagacagcgagagacggttccccaataggaagacgatcagtgggaagaccacgaaaacgatggaacgacaacttactagaggcacattgaaaaacagacggagtcatgtctatacaaaaagaagaagaagactatttagttttgccgtatcggaaacagaacaatgtatatacactatttccgttaacattaattgcacgcatggtcacagagttgccgtattgttgggatag

SEQ ID NO: 2522 - DNA, 745 bp, Diabrotica virgifera
  SmartBlast Evalue=3E-22; Info=Endonuclease-reverse transcriptase n=1 Tax=Bombyx mori RepID=D7F171_BOMMO
aaataataaaaaaagtaagaactaaaaaaggataccaaatgggagaaaaacaacttaaaataatctgctatgcagacgatgcaatactaatctctcaaagtgaagatgatttacaacgtatgctgcaccaatttaacataaccgccagaaaatttaacatgttaatttccccaaaaaagacaaaatgcatggttataacagcaaatccaataagatgtaaattggagctggagggtcagataatagaacaagtgatggagtttaaatacctaggcatcacactatctagctacggaaagctcgaaacagaagtggaagatcaagtgaatagagcaaacagagccgcaggttgcctgaatgaaacaatatggagaaataaaaacatcggaaaagaagtgaaaggcagaatttacaaaacagtcatcagaccaataatgacatacgcggcagaaacacgacctgatacagaaaggacaaaaagaatgctagaaacagcagagatgaaaacattgcgaaaaatcgatggtaagacgatgtgggatagagctagaagtgcagatatacgaaggagatgcaaggtggacaacattaataactgggtgaaaagcagaagagtagaatggaacgaccacataagccgaatgacaacaaatagagtagtaaggacggcgagagacggttcccccaataggaagacgatcagtgggaagaccacgaaaacgatgaatgacaacttactggaggc

SEQ ID NO: 2523 - DNA, 742 bp, Diabrotica virgifera
  SmartBlast Evalue=3E-21; Info=Endonuclease-reverse transcriptase n=1 Tax=Schistosoma japonicum RepID=C7C208_SCHJA
aataataaaaaagtgagaacaaaaaaggataccaaatgggagaaaaacaacttaaaataatctgctatgctgacgacgcaatactaatctctcaaagtgaagatgatttacaacgtatgctgcacgaatttaatataaccgctagaaaatttaacatgttaatttccccaaaaaagactaaatgcatggttataacagcagatctaataaggtgtaaattagagctggagggtcaaataatagaacaagtcatggagtttaaatatctaggcatcacactatgcagctacggaaagctcgaaacagaagtggaagatcaagtgaatagagcaaacagagccgcaggttgcctgaatgaaacaatatggagaaataaaaacatcggaaaagaagtgaaaggcagaatttacaaaacagtcatcagaccaataatgacatacgcggcagaaacacgacctgatacagaaaggacaaaaagaatgctagaaacagcagagatgaaaacattgcgaaaaatcgatggtaagacgatgtgggatagagctagaagtgcagatatacgaaggagatgcaaggtggacaacattaataactgggtgaaaagcagaagagtagaatggaacgaccacataagccgaatgacaacaaatagagtagtaaggacggcgagagacggttcccccaataggaagacgatcagtgggaagaccacgaaaacgatgaatgacaacttactggaggc

SEQ ID NO: 2524 - DNA, 285 bp, Diabrotica virgifera
aaataataaaaaaagtaagaactaaaaaaggataccaaatgggagaaaaacaacttaaaataatctgctatgcagacgatgcaatactaatctctcaaagtgaagatgatttacaacgtatgctgcaccaatttaacataaccgccagaaaatttaacatgttaatttccccaaaaaagacaaaatgcatggttataacagcaaatccaataagatgtaaattggagctggagggtcagataatagaacaagtgatggagtttaaatacctaggcatcacactaa

SEQ ID NO: 2525 - DNA, 965 bp, Diabrotica virgifera
atttagagtgggcataatcaacaatggcttccaaaactgttcttttcggactcttggtagtccttttggtcaaccactctttggctagagatctgactgtctgccccaactcagacaaagcaaccaaagctgtatacgacaaagaagtagcaacatccgttgtaggaagcaccatccgtgttagagtaccagacagcttgttcttgaagaaaccaatcacctgcattgttattgtggacaataaccaagcgatagcgtacctgaagtagaagatggtggtgttgacagtacatgggtgaccgtaaacattgctcccgccatcaccgaacttctcagctacagaatccaagtgtataccaaccaataaataatttaaatattgtaatatatttaagtagaattgtgatataaagtttaatgtgtgcataattttgttaatatttctttctagttcatgttttaattattaggagaacgtttattttttttatgggaaataagccacaattttaataaaaaatgaatttattaacgttttgtaaaatcgtttttagtaaagtcgtcccaggaacgcaactcataaatattggcaatatcattttaaagtcttctactttaaaatgtataatatattctgaattgccgatataaatgagtcagattaaataaattattagaagaatttttttactaagcaacaacatttttgtttaattcattaatattttttgtattttgacaacggcacccgatttggacgtcgaaacgttaataaaatcattttttttagtaaaattgtggcttatttcccattgaaaactagttaattgcaaaaatgccacaagaaaatagcttcagaacaacattaataggaaaaaatattatttggccaaaactgtggtaagtacctatatattttaccttaaataaacttacgttttaaatactgaaattttgtaatataa

SEQ ID NO: 2526 - DNA, 477 bp, Diabrotica virgifera
atttagagtgggcataatcaacaatggcttccaaaactgttcttttcggactcttggtagtccttttggtcaaccactctttggctagagatctgactgtctgccccaactcagacaaagcaaccaaagctgtatacgacaaagaagtagcaacatccgttgtaggaagcaccatccgtgttagagtaccagacagcttgttcttgaagaaaccaatcacctgcattgttattgtggacaataaccacagcgatagcgtacctgaagtagaagatggtggtgttgacagtacatgggtgaccgtaaacattgctcccgccattaccgaactgctcagctacagaatccaagtgtacaccaatgaataaatatagattattgtaatatgtctgaattatgtaaagtggtgctaatataaatatatattaattatatatattaatatatattaattaataaataatataaatttgttaa

SEQ ID NO: 2527 - DNA, 415 bp, Diabrotica virgifera
atttagagtgggcataatcaacaatggcttccaaaactgttcttttcggactcttggtagtccttttggtcaaccactctttggctagagatctgactgtctgccccaactcagacaaagcaaccaaagctgtatacgacaaagaagtagcaacatccgttgtaggaagcaccatccgtgttagagtaccagacagcttgttcttgaagaaaccaatcacctgcattgttattgtggacaataaccacagcgatagcgtacctgaagtagaagatggtggtgttgacagtacatgggtgaccgtaaacattgctcccgccattaccgaactgctcagctacagaatccaagtgtacaccaatgaataaatatagattattgtaatatgtctgaattatgtaaagtggtgctaata

SEQ ID NO: 2528 - DNA, 527 bp, Diabrotica virgifera
aaaacattaatgaatcaaacaaaaatgctgttgctcagtaaaaaattcttccaataatttatttaatattcttgagttggggttgatttcatgtaatcgaatgaactatctttcagtaaagtcgtcccaggaacgcaactcataaatattggcaatatcattttaaagtcttctactttaaaatgtataatatattctgaattgccgatataaatgagtcagattaaataaattattagaagaatttttttactaagcaacaacatttttgtttaattcattaatattttttgtattttgacaacggcacccgatttggacgtcgaaacgttaataaaatcattttttttagtaaaattgtggcttatttcccattgaaaactagttaattgcaaaaatgccacaagaaaatagcttcagaacaacattaataggaaaaaatattatttggccaaaactgtggtaagtacctatatattttaccttaaataaacttacgttttaaatactgaaattttgtaatataa

SEQ ID NO: 2529 - DNA, 1107 bp, Diabrotica virgifera
  SmartBlast Evalue=1E-126; Info=Aldo-keto reductase n=2 Tax= Aedes aegypti RepID=Q17DM5_AEDAE
tggtttgattgcacagttagcgaaggacgttacgtaatttgttgaacggcaatcatcatggctaaggtacccaatgtcaagttcaacaacggagaagtatttcccgcctatggtctaggcacatggaagtcaaagcctggtgaggttacccaagctgttaaggatgccctcgacatcggctaccgtcacatcgattgtgcccatgtctacggaaacgaaccagaagtaggagctgccttgaaggccaaacttgccgatggtacagttaaacgtggagacatctacatcaccagcaaactctggaacactttccacagacccgacttggtagaaccagccgttaggaccacattaaagaacttgggtcttgaatacttggacttgtacttgattcactggccttttgctcttaaggaagacggagaccttttcccagtaaatgccgatggcagcacagcctacagtaccgtggattacgtggacacatggaaagccatggaggctctagtcaagaagggtcttgtcaaatcaattggtatttccaacttcaacaaacgtcaaactgaacgtattctcgccaactgtacaatcaaaccagttaccaaccaggttgaaatccacccatacttaaaccaacaaaaactcatcgactatctcgaatccaaagacatcgtcgtcacagcctacagcccattgggatcacccgacaggccatgggccaaacctggtgacccacaacttttggatgaccctaaaatcaagaagatcgccgataaatacaataagactcccgctcaggtagtcttgaggtacgccgttcaaagaggattgatcgtcattccaaaatccgtaaccaaatccaggattcaacagaactttaacatctgggacttcaatctcaccaacgcagacgttgctgccctcaacagtttcgactgcaatggcagaatctgcccatatgacgatgccgttacccacaaggaccatccattcgtcaacgatgaatactaaactggaaaaacaactaacattcatcattacattactcaaaatgtaaccaaaatctttaattttatattaaaatatattttgtgttaataaaaaaaa

SEQ ID NO: 2530 - DNA, 1107 bp, Diabrotica virgifera
  SmartBlast Evalue=1E-126; Info=Aldo-keto reductase n=2 Tax= Aedes aegypti RepID=Q17DM5_AEDAE
tggtttgattgcacagttagcgaaggacgttacgtaatttgttgaacggcaatcatcatggctaaggtacccaatgtcaagttcaacaacggagaagtatttcccgcctatggtctaggcacatggaagtcaaagcctggtgatgttactcaagctgtgaaggatgccctcgacatcggctaccgtcacatcgattgcgcccatgtctacggaaacgaaccagaagtaggtgctgccttgaaggccaaacttgccgatggcacagtcaaacgtgaagacatctacatcaccagcaaactctggaacaccttccacagacctgacttggtagaaccagccgttagaaccacattgaagaacttgggtcttgagtacttggacttgtacttgattcactggccttttgctcttaaggaagacggagaccttttcccagtaaatgccgatggcagcacagcctacagtaccgtggattacgtggacacatggaaagccatggaggctctagtcaagaagggtcttgtcaaatcaattggtatttccaacttcaacaaacgtcaaactgaacgtattctcgccaactgtacaatcaaaccagttaccaaccaggttgaaatccacccatacttaaaccaacaaaaactcatcgactatctcgaatccaaagacatcgtcgtcacagcctacagcccattgggatcacccgacaggccatgggccaaacctggtgacccacaacttttggatgaccctaaaatcaagaagatcgccgataaatacaataagactcccgctcaggtagtcttgaggtacgccgttcaaagaggattgatcgtcattccaaaatccgtaaccaaatccaggattcaacagaactttaacatctgggacttcaatctcaccaacgcagacgttgctgccctcaacagtttcgactgcaatggcagaatctgcccatatgacgatgccgttacccacaaggaccatccattcgtcaacgatgaatactaaactggaaaaacaactaacattcatcattacattactcaaaatgtaaccaaaatctttaattttatattaaaatatattttgtgttaataaaaaaaa

SEQ ID NO: 2531 - DNA, 5612 bp, Diabrotica virgifera
  SmartBlast Evalue=0; Info=Niemann-Pick C1 protein n=1 Tax= Harpegnathos saltator RepID=E2C5L5_9HYME
ttttaaacaagtccaagtttttggctatataaacaacactataataaaaagcattgtagaaggaaaaccatgcatttaaattctgatggatgcggggttaaatatacttctcatttcttcttaaaatacattagtcatcaacttttttgcagaatatctcgcttagtttgaacgtaatcgacatttagtatgctcattttaaaggacttttcaagcactacaaaagttattggtatcattatacacgtaagatcgacagtttctctgttgtttcaagttgaatacaccaatttgagcatgcagcaaaaaatcaagctcttcttaccatccatgtccctctttgtattttaactagaagatttatgaaggaacgaatctctttgtttttataacctacagaaatattttaaatagtttttttgttggatgcatggtttttgaggtaatcgcagggatccgtccgagggggtgtcgtttttcagtgagaagtggccaattttcaaccacgaatggctcaggaagtgttgagttttcaaggaatagttgtagaacagtttttgcttaaaaataggatctctagtctcttccgtggctattttggccaaaacatttttcacccccgagaaggggtgggaaccacccccaagataaaagtcgcacatcggcatagggtagactttgtttcttgagctattacctacttactgtggaaatatcaagaaaatcgatgtagtaggattgaattcggagccaattaccctctcattgactgccctataaggtatgtagaggtggacctttacatagacattaatgaaacgattgaaggccttcgagtcgaggatctaccgacgaatatttcggataagttgggttgatggaataagaaatgcaatagttttacacggaatgaaaaacagcacaagaataacaaaaattcgaaagttacaatatttcggccatgtaatgagacatccagagaagagtggtatcaagagacatccgctaatctgtttcgagctgctttagacaaaattactatttccaatataattgccaacatttgatgatcggcagcgtactgaaagaagaaaaaggtttgaatgatctgagggtattactggaaaattttaaatacatgttttaacaatcaatatattacatttttgagttgtttcatactactgagcttcaaataaaagttttataaataaatctcatcagaaatactccattggtcataccaccctcgcagtaaaaagttcttttgtaaggcactaacattgggaaatcaatgtcacacgattgtccaccactaatcactattagtcactatcgattacaataaaaaacggcccacattatctttaggaacgttgtatggactcgtatgaatgactggacgtggacggcagtaatggcgatacaagcgttggttccatactctcctccgttggttccgacactcccaaatgtgctcgatggaaatatctaactttgttggtgttactcatgctctgtcgaaaaacgtttcctggaaagccttgtgactacttcgatgcttctccaacttctctttattaaccggcgaccctataaaactaagtaaaactggcaagaatatgagcccgtgagcggctcccaataagacgattcccaagtacatcctgaagtagaagacttggaagatctgcgatttggcgaagtacagcacgatgataccaccgaacttcgtcagcgtaatacccgaaaacactgaactgcccatcgttgtgagagcatcagcagctctctccaatctagtgggcttcatagacatggagaagctatggaccagatgggagcaaaactctactgagattcctactgccattactaaattgaccagggaaactgcgtttagagtgatgtgccaccagtacatgaggcctcccaggttcactaggatcatcgtaattgtaattattactacgatgctggaaaatatgtcgaaacccatcaggaagaatgtcacgacgaatatggccagcaaacttataccaacactgaaaagagtgtccgaccacatcgtcaaatactgctcgtagaacacataaaacactgagtagggaaacacttcaacgccaatggtatctgtgagattggctgctatctttctcgatgatctcatgctttcgtaataatcctccgaagacttcaaaattgtatggtaagtcatgaaataggaagctccaacggtagatagcttggtggtagcattggtcttatagtttactccttgaccgtaaacggcgtgacctcctttagggcaattttcatctggattgtcccttaagaagaacgacacgtagcgttgaaaatcttctggcaccggtcggttttccaccccttggaatttgatgttgcacattttgcacacaaagcctttagtattatgcggacaaaagctgctatcgttggcatattttttgcagcatttatcattttctgcccagtcaaagtagtcgtctatccaactagaagaaggtttggcaatgtatgtatcttctggatctttactagcggcatatatttgagcaaccacggaattactcttgcagtatctaccagtacatatcaggttctgagctttgacgtcactgtagttaagtcctccttttactacaaagtatactgggggtcccatacttaaatattcattcaggtacttgaaatatttcaacacaaaactatcttcgggcatggacagctcctgatctagaccaatttcgatataaggaactacagctattgaagaacacagccatccgaagaacaaaatcaccacagcacatctgacagctttgttcattaatgttggtacataaagatatttgaagaaggagtagaggagaccttcttgaccacccgttgagttaggttcgtttatcttcgaagctcgaaggaaacagaatatgtcaaacctattggcagactgccttataatgtccaagctcatcaaactgacaaaacaagtgatctggagcaagaaatcgaacaacaacgccataccagcgtacaaagcgaaagctttaacagctggcatatcagacaaacttcccaagaagaagcagcaactttccgaaacgctggtcaacagcatcgacggtccaacatgccctagagtcctgccgatatgttctgcgtgagtttcgttaggtttcctgctgtctctctggtgagtttgtactaaaataaagatgttatccactcctacggccagcaccaagaaggggatcacttcgatgatgataagggtggctgggactccgatgtaaccgaatataccaactgatgacaccactgatgctagtacgataaaaactccaccaagacctagagttattttactgtccactaaaagcctagaccaattatttatttgtcccaaagagatagcgatgtaggcaaacataatcatgtaggaaatgagaatagttacaacgtcagattgactttctctctctagctcatcttcgatggatctctctgaagtaaacgcgatatccatatattcaggcttttccgtcgctgtccaatttttcataaagtcaacgaatttttcctcccattgtaaagcttgagataacatacttttgttatggtgattgttaacgatgaacgttagtatgacagtgttagcttttttataatccgggtgtttggctaaggtctctcctggttccaaaaagcctcctagggctattgctggatcaactatgcctccgtacggtgcgagacagtcatagggagatgttgagcatgagataaatttattcaaataatcgccgtccaaatttgcaacattatttttatagtatccccagatactctgcacgacacattctgacactttagtctcgttctggccctcatttctcaacggagcaaaacatatcttgtccaggctgtgatcgctgtcttttccaatggactgtatcttcatttgtaaatccagaacagatttcaagaaagtcgcgttgaaagcaggaccgaacttcaaaacttcatcggtgttattgaaggtgatgtctggcagattgattgctctgatgatgacttgttctgtacggtagaacggttcgaagtgactgtcgaagaaatctttttcgacgcggcttctagaagatggggaagcccagagttccactggatctgtgataatttttaaatatttgattccacacccgagactgaccaccataagagttcctagtaagagaacagttaggggcctctgagcacaaaaagttccccatttctcaaatgacttttgcaaaaatatatcgaagttggcgcccaacttttcaatacaagacaaggcttcgattggcccagcatttttcatctctggtgcttgttcccctggtgtctgaagaggactcgcttctgtatctgctacagcaacttcatatgatcctacagacactgagtaatttctgttgtgtataaaattgaaaagaagaaacagagaggaactgataataaataccatggtcatgatgaaaacgtaaccatctaggccggcgattttgaatggttttgggggaggagtgggtggaggtggtgctgggcagctgtcttcgcagtcgacacaactgcatggaggtgacttaccatctacagacttgctgcaaggaattatatcggcagtcagaggcgtgtatccattggtaggaccagtagcgttgatgaaatcaatgtggaacggtacacccggtgtatttggatagtctcctaaagtgtggtaccatctcagaggattacacttttcggcgccatattggccacacataaggttcattacctttcctccagtcactggtacactgacttccttgcaggaattgtaagcaccctccatataggtgttatccaagtatacatccacatctgtgatgtacgttttattcgtttctggatttagttctgtggtattgacatgcatgaatttggattgtgttggggaacaggtaaagtgacaaaacgtcttcacgaagttgttcatacaggaggggcatctgctcagcagagactgggcttgttggagattgctgtccaggagttggagctgctcggcgtcgcagcaagtggcgtctggcgaaatatatggacatcttcttttaagtatactaatggcgtctgtatcattaagtggcttagccgtaccattatatacacaatttttacttaagccgtcttcgtctgtatagcagacgccgtaccatatacagtgaccacctgcatcttgactagcttcatcggccttattagctacagcgaaaaacactagcaatataatggaacatctaagcttggcagccttgaacattttgcacctgaacactttggactataactacctaataaaaattgattttatattttaattaaaatcatgaagaatgaatcatccacctgttttagttaatggacaggtctaaacgaaaacaaagggacgggtggtcattaaacaatcactgcccgacgagaacaatacgacgactgataagcttatctactacaaacatttgttcaaagtatgatcatttcgtagtggtgtaatgtgtaat

SEQ ID NO: 2532 - DNA, 5612 bp, Diabrotica virgifera
  SmartBlast Evalue=0; Info=Niemann-Pick C1 protein n=1 Tax= Harpegnathos saltator RepID=E2C5L5_9HYME
ttttaaacaagtccaagtttttggctatataaacaacactataataaaaagcattgtagaaggaaaaccatgcatttaaattctgatggatgcggggttaaatatacttctcatttcttcttaaaatacattagtcatcaacttttttgcagaatatctcgcttagtttgaacgtaatcgacatttagtatgctcattttaaaggacttttcaagcactacaaaagttattggtatcattatacacgtaagatcgacagtttctctgttgtttcaagttgaatacaccaatttgagcatgcagcaaaaaatcaagctcttcttaccatccatgtccctctttgtattttaactagaagatttatgaaggaacgaatctctttgtttttataacctacagaaatattttaaatagtttttttgttggatgcatggtttttgaggtaatcgcagggatccgtccgagggggtgtcgtttttcagtgagaagtggccaattttcaaccacgaatggctcaggaagtgttgagttttcaaggaatagttgtagaacagtttttgcttaaaaataggatctctagtctcttccgtggctattttggccaaaacatttttcacccccgagaaggggtgggaaccacccccaagataaaagtcgcacatcggcatagggtagactttgtttcttgagctattacctacttactgtggaaatatcaagaaaatcgatgtagtaggattgaattcggagccaattaccctctcattgactgccctataaggtatgtagaggtggacctttacatagacattaatgaaacgattgaaggccttcgagtcgaggatctaccgacgaatatttcggataagttgggttgatggaataagaaatgcaatagttttacacggaatgaaaaacagcacaagaataacaaaaattcgaaagttacaatatttcggccatgtaatgagacatccagagaagagtggtatcaagagacatccgctaatctgtttcgagctgctttagacaaaattactatttccaatataattgccaacatttgatgatcggcagcgtactgaaagaagaaaaaggtttgaatgatctgagggtattactggaaaattttaaatacatgttttaacaatcaatatattacatttttgagttgtttcatactactgagcttcaaataaaagttttataaataaatctcatcagaaatactccattggtcataccaccctcgcagtaaaaagttcttttgtaaggcactaacattgggaaatcaatgtcacacgattgtccaccactaatcactattagtcactatcgattacaataaaaaacggcccacattatctttaggaacgttgtatggactcgtatgaatgactggacgtggacggcagtaatggcgatacaagcgttggttccatactctcctccgttggttccgacactcccaaatgtgctcgatggaaatatctaactttgttggtgttactcatgctctgtcgaaaaacgtttcctggaaagccttgtgactacttcgatgcttctccaacttctctttattaaccggcgaccctataaaactaagtaaaactggcaagaatatgagcccgtgagcggctcccaataagacgattcccaagtacatcctgaagtagaagacttggaagatctgcgatttggcgaagtacagcacgatgataccaccgaacttcgtcagcgtaatacccgaaaacactgaactgcccatcgttgtgagagcatcagcagctctctccaatctagtgggcttcatagacatggagaagctatggaccagatgggagcaaaactctactgagattcctactgccattactaaattgaccagggaaactgcgtttagagtgatgtgccaccagtacatgaggcctcccaggttcactaggatcatcgtaattgtaattattactacgatgctggaaaatatgtcgaaacccatcaggaagaatgtcacgacgaatatggccagcaaacttataccaacactgaaaagagtgtccgaccacatcgtcaaatactgctcgtagaacacataaaacactgagtagggaaacacttcaacgccaatggtatctgtgagattggctgctatctttctcgatgatctcatgctttcgtaataatcctccgaagacttcaaaattgtatggtaagtcatgaaataggaagctccaacggtagatagcttggtggtagcattggtcttatagtttactccttgaccgtaaacggcgtgacctcctttagggcaattttcatctggattgtcccttaagaagaacgacacgtagcgttgaaaatcttctggcaccggtcggttttccaccccttggaatttgatgttgcacattttgcacacaaagcctttagtattatgcggacaaaagctgctatcgttggcatattttttgcagcatttatcattttctgcccagtcaaagtagtcgtctatccaactagaagaaggtttggcaatgtatgtatcttctggatctttactagcggcatatatttgagcaaccacggaattactcttgcagtatctaccagtacatatcaggttctgagctttgacgtcactgtagttaagtcctccttttactacaaagtatactgggggtcccatacttaaatattcattcaggtacttgaaatatttcaacacaaaactatcttcgggcatggacagctcctgatctagaccaatttcgatataaggaactacagctattgaagaacacagccatccgaagaacaaaatcaccacagcacatctgacagctttgttcattaatgttggtacataaagatatttgaagaaggagtagaggagaccttcttgaccacccgttgagttaggttcgtttatcttcgaagctcgaaggaaacagaatatgtcaaacctattggcagactgccttataatgtccaagctcatcaaactgacaaaacaagtgatctggagcaagaaatcgaacaacaacgccataccagcgtacaaagcgaaagctttaacagctggcatatcagacaaacttcccaagaagaagcagcaactttccgaaacgctggtcaacagcatcgacggtccaacatgccctagagtcctgccgatatgttctgcgtgagtttcgttaggtttcctgctgtctctctggtgagtttgtactaaaataaagatgttatccactcctacggccagcaccaagaaggggatcacttcgatgatgataagggtggctgggactccgatgtaaccgaatataccaactgatgacaccactgatgctagtacgataaaaactccaccaagacctagagttattttactgtccactaaaagcctagaccaattatttatttgtcccaaagagatagcgatgtaggcaaacataatcatgtaggaaatgagaatagttacaacgtcagattgactttctctctctagctcatcttcgatggatctctctgaagtaaacgcgatatccatatattcaggcttttccgtcgctgtccaatttttcataaagtcaacgaatttttcctcccattgtaaagcttgagataacatacttttgttatggtgattgttaacgatgaacgttagtatgacagtgttagcttttttataatccgggtgtttggctaaggtctctcctggttccaaaaagcctcctagggctattgctggatcaactatgcctccgtacggtgcgagacagtcatagggagatgttgaacaagagataaatttattcaaatagtcgccgtccaaattcgcaacattatttttatagtatccccagatactctgcacgacacattctgacactttagtcccgttctggccctcatttctcaacggagcaaaacagatcttgtccaggctgtgatcgctgtcttttccaatggactgtatcctcatttgtaaatccagaacagatttcaagaaagtcgcgttgaaagcaggaccgaacttcaaaacttcatcggtgttattgaaggtgatgtctggcagattgattgctctgatgatgacttgttctgtacggtagaagggttcgaagtgactgtcgaagaaatctttttcgacgcggcttctagaagatggggaagcccagagttccactggatctgtgataatttttaaatatttgattccacacccgagactgaccaccataagagttcctagtaagagaacagttaggggcctctgagcacaaaaagttccccatttctcaaatgacttttgcaaaaatatatcgaagttggcgcccaacttttcaatacaagacaaggcttcgattggcccagcatttttcatctctggtgcttgttcccctggtgtctgaagaggactcgcttctgtatctgctacagcaacttcatatgatcctacagacactgagtaatttctgttgtgtataaaattgaaaagaagaaacagagaggaactgataataaataccatggtcatgatgaaaacgtaaccatctaggccggcgattttgaatggttttgggggaggagtgggtggaggtggtgctgggcagctgtcttcgcagtcgacacaactgcatggaggtgacttaccatctacagacttgctgcaaggaattatatcggcagtcagaggcgtgtatccattggtaggaccagtagcgttgatgaaatcaatgtggaacggtacacccggtgtatttggatagtctcctaaagtgtggtaccatctcagaggattacacttttcggcgccatattggccacacataaggttcattacctttcctccagtcactggtacactgacttccttgcaggaattgtaagcaccctccatataggtgttatccaagtatacatccacatctgtgatgtacgttttattcgtttctggatttagttctgtggtattgacatgcatgaatttggattgtgttggggaacaggtaaagtgacaaaacgtcttcacgaagttgttcatacaggaggggcatctgctcagcagagactgggcttgttggagattgctgtccaggagttggagctgctcggcgtcgcagcaagtggcgtctggcgaaatatatggacatcttcttttaagtatactaatggcgtctgtatcattaagtggcttagccgtaccattatatacacaatttttacttaagccgtcttcgtctgtatagcagacgccgtaccatatacagtgaccacctgcatcttgactagcttcatcggccttattagctacagcgaaaaacactagcaatataatggaacatctaagcttggcagccttgaacattttgcacctgaacactttggactataactacctaataaaaattgattttatattttaattaaaatcatgaagaatgaatcatccacctgttttagttaatggacaggtctaaacgaaaacaaagggacgggtggtcattaaacaatcactgcccgacgagaacaatacgacgactgataagcttatctactacaaacatttgttcaaagtatgatcatttcgtagtggtgtaatgtgtaat

SEQ ID NO: 2533 - DNA, 2598 bp, Diabrotica virgifera
  SmartBlast Evalue=9E-77; Info=Endonuclease-reverse transcriptase n=1 Tax=Bombyx mori RepID=D5LB38_BOMMO
ttttaaacaagtccaagtttttggctatataaacaacactataataaaaagcattgtagaaggaaaaccatgcatttaaattctgatggatgcggggttaaatatacttctcatttcttcttaaaatacattagtcatcaacttttttgcagaatatctcgcttagtttgaacgtaatcgacatttagtatgctcattttaaaggacttttcaagcactacaaaagttattggtatcattatacacgtaagatcgacagtttctctgttgtttcaagttgaatacaccaatttgagcatgcagcaaaaaatcaagctcttcttaccatccatgtccctctttgtattttaactagaagatttatgaaggaacgaatctctttgtttttataacctacagaaatattttaaatagtttttttgttggatgcatggtttttgaggtaatcgcagggatccgtccgagggggtgtcgtttttcagtgagaagtggccaattttcaaccacgaatggctcaggaagtgttgagttttcaaggaatagttgtagaacagtttttgcttacaattgggttctctagcagcttccgtggttgttttaaccaagaagttttttactcccgagaaggggtgggaaccgcccccgagataaaggcgcacatcggcatagggtagaccttgaattaggagataagtagaggctatccccaaaatttcattaaaatccatgcttcttcttcttaaggtgccgagaccgtttgtcgatcgttggctctcatgttgcccagcatattaacaatcattgtcttatttacagccgcacgaaatagttcagtgctagttttcccaaaccattggcgtaggtttttaagccaagaagttgtacggcggcccacacttctttttcccattattttaccttgcatgacaaggtgaagtatgtcatatttttctgggtgacgcattatatgaccaaagtattccaatttgcgccttttaaccgtgttcactacttcgcaacttttattcaaacgttgcaaaaccctttcgtttgtgactctttctacccaactgatcttcagaatacggcggtagacccacatctcaaatgcttctaggttttttaaaagcgattctgtcagtgtccatgcttcaaccccgtaaagtagtactgggaatatataacatcgaaccattcttatgcgaagttccaaatttagatcatgactgcacaggattttcttaaatttcataaaacttgttcttgctttggcaattctactttttatttctgtactagggttccagctttcattaatatgagtacccagatatacaagattacttactcgttcaattgagtcattaccgattgttacgttatagttattattatttacggctgcctgtttactaataaccataaactttgtttttcttgcgttgagtttgagtccatatgtcgcgcagaatgccaccattcggttcaataacgcttgaagatgttcaattgatcctgtcagtaacaaggtgtcatctgcgtatctgatattgttcataagcataccattaatcagtattccctcttttgcgttttacaacacttcaattaagattgtttcagagtaaagattaaacaacattggtgacaatatacagccttgtcgaaaatccatgcagtaggatggaattcggaggtaatatcctatttttgctcccatttactggcatattactatatgttttaaattataatagaaaaactaaaccattggaaacaatgttttcatcatttgtcttaaatatgtatgaatttaagggcgtaggcgcaaaatcttggtttaaatgcattgatttttttcgaattctgagaaaactaataaatctttttaaaggatttaaacgcagaatgaaagattgcattattgctgagggccgaaagtctcttagaataaacaaaaagtttcttttgaatgaaatattcacactaaattttctctttttttttgacccctgtaacttattaaaataaacattatagaagttttcagggactatctgccctcggtaatagtgcaatctttcattctgcatttaaatttttcgttcaaaaatacctattagttttctcaggattcgaaaaaaatgaatgcatttacatagcattggaccaagattttgcgcctaccctcttaagatgttgatcttagaacgttccataaatactcgatgttgttgagatcagaactgttgggtgaccttggaaagtctgctccatctactttagaaaactttagaatacaacagcacatcttgaaatattatcttgaattacgacaggacgtggacggcatgtgccgtagaacaatagacgacgcacgtccccgttatcgctccgttccgatgtactgtaaattagctaatgattttcatatgacatgattcttcaacgagccgtccacgttccgtcgtaagataaatcagccttaaatcgtacttttcagatcttcgataatcttactttcattcctttcgatatgattttcaaatattgttgataccttaaattgtttccaggagctataggtctggatcccgc

SEQ ID NO: 2534 - DNA, 819 bp, Diabrotica virgifera
ttttaaacaagtccaagtttttggctatataaacaacactataataaaaagcattgtagaaggaaaaccatgcatttaaattctgatggatgcggggttaaatatacttctcatttcttcttaaaatacattagtcatcaacttttttgcagaatatctcgcttagtttgaacgtaatcgacatttagtatgctcattttaaaggacttttcaagcactacaaaagttattggtatcattatacacgtaagatcgacagtttctctgttgtttcaagttgaatacaccaatttgagcatgcagcaaaaaatcaagctcttcttaccatccatgtccctctttgtattttaactagaagatttatgaaggaacgaatctctttgtttttataacctacagaaatattttaaatagtttttttgttggatgcatggtttttgaggtaatcgcagggatccgtccgagggggtgtcgtttttcagtgagaagtggccaattttcaaccacgaatggctcaggaagtgttgagttttcaaggaatagttgtagaacagtttttgcttaaaaataggatctctagtctcttccgtggctattttggccaaaacatttttcacccccgagaaggggtgggaaccacccccaagataaaagtcgcacatcggcatagggtagactttgtttcttgagctattccctacttactgtgaaaatatcaagtaaatcgatgtagtaggatggaattcggagccaaataccctcattgactgccctaatagtatcggtgcaatttatgagttatagtgagctaggctgcta

SEQ ID NO: 2535 - DNA, 3561 bp, Diabrotica virgifera
  SmartBlast Evalue=1E-83; Info=Endonuclease-reverse transcriptase n=1 Tax=Bombyx mori RepID=D7F170_BOMMO
aacaagtctcttaacaacctgacattgcgtaaaagaaaaattatgaaaagtgctacatagttgctgtatgtacgtctatttcacatgcacaaaatttaaataaagtgcatggcatgaaaactgtaaaacttatttttgtcttttccaagcctcttacttaaatctgatgaaatacattatttaaaaagtaaaaaattttgtttttttatcaatccattaaatttatggttttattttggggtttttcttccccttggtaaaaattatatttactaatgtgtaggccactaatcaatttttgccaactaacgaaatataataattttattagatatcgattatatgaatatttttattttccggataccaatataatcaagaaactgggaactttacaaataactgaaaatcaatttaaataaaagtaaatagtttaataattttcctctaaactataaaaatcacttagtttcttttagtcataattcattcatttgtactattctcaaatttcattcgcgttcgtattacgaacgcatagacgggactatgctttactctgttgctgacgtcatgcgccaatcggacgagcttacgtaactagaatatcagggtgtgcatatttccgggtcccggtgaattcgtatctattttaatcccccatcctaattacaggccaactggcaactctggtgcgcaggtaatttttagataacccattaactaccggtgaattggtaactttcattttttaagtattgttgataatctaatatcggtattccaggtatttagcgctgcactcctagaaaatggaaaaaatggcacaggaagtgaaaccgatgatgaaacgaaacgcaaaagagaaaacttggatgattgttttaatagaagtaaaattaaaaaacggtcaccaagcaaagcaggcaacgaaaacaaggaagacatggaaaatgttatgattacaataatgaaagagctaatgaataaaaacgatgaaatgcttcaggaaataaaacaaataaggaaagaataacaacaaaccaataaagagttaatgggtgtaaaagcagagaaacaaaaactaaaaaaagaagtaaaacagctacatgaatgaatggagcaactggagaaatttagcaaaaagaaaagcttgatcgtaactgggttgaaagtagaaacaaatgattataagaaattaaaagaagaaatggaaaatttcagagcccaagagttgcaaatacaaataaaactaagaagtgcaacaaaaataggagaaacagtatgcgcaatagaaacagaagcttcacggataaaatggaaatcctaaacaagaaacgtaaactaaaacagcataaagatcgtatctatataaacaacgattggacatcgaaagaaaaagaaatacaaaaggaaataactaaaatagcaaaggacgaaagaagcaaaggtaagcaaacgaaaatcggctacaagaaattaatagtgaatggcaaaatctagatatgggacgaagagagagaacagctgatagaaaattcaaaaaactaataaacgaagaacagcggctgaaatatgatattgacatggcaaaaaaagctcggaaatgcaaacggttaacgaaaacaaaataacgcacacaaaataaagaaagaatctcaataagaagaaaagaacaaaacccattagaatgggatcttggaatattagaaccatgctggcagtaggtaagatgcaagaaatagctcttgaaatgaaaaaataccaactagaaatcctagccgtacaggaaatacgatggaagaaagaaggaaaaattgagaagaaaaactttagcatgtattattcgggagaaaacaaacagggaacgaatggtacggcatttatggtgaacaaaaaaatgagggaaaaagtgatacaattcaaagcagttaatgaaaggatatcttacataagaaaataaacaagccaacatctcgatagtcaattgctatgcacccaccgaagaagcaaaccaagaagataaaacagaattctaagacatcctggaagaaacctgtgaaaatattccgaggaatgacatattaataatattgggtgatttcaatgcaaagatcggaaaggaggactataatcgtaatgtagctggcaaagaaaccattcatgaaactacgaatgataatggaggagaaatctgcaacctagcagcagcaacaaacacatatatagttagtactgggcataaacataaaaaagaacacaaaataacatggatgataccaggaagaatggatggaaaccaaataaatcatactctaatttcgaaaaagtggacacaaatagtacaagacgtaaggtcatatagaggggcaaatggaggcactgaccacatattgttgatagcaaaacttaagatgaaaataatcaaagcaaataatcataaggaaggaaaaaggaggaaatggaatatagccaatctgaaaacgcaagaaacaaagcaacaatatacagaacaactggaacagaaattgggtcagtacgagcacatagaaatagaaggagaatggaaaaacataaagaacagcataatagagacagcagaacaaataataggattccaaaaaaacaaagaatcgaaagaatggtttgatgaggaatgtcaccaaaaaagtcaactgaagcacctcgcaagaaacaaatggctacaaagtgccgaacaggaacaactggaccaatatagaaaagaaaaacaagaagcattgaaactctatagaagaaagaagaacacatggatctctgaacaaatgcaagaattagaaacgaataataaagacaacaagaaattgttcgaatagataaaacaacaacacagtaccaaaaaatctgtcacaaaaataaacaaaaaagattgggaaaaacatttcacggacctatacaaaaacgacaataaggcatattcagaggatgaggatataagagataacagagatgaagaggaagtcgcacctacttattaggaattcatggaggtattaaaacaactaaaagtaaacaaaacgccagggccagatgaaatcaacaacgaactgatcatcaacggcggagaggagctcacgaagcgaatgcacaagttaatggttacaatttggaaggacgaaagcatgcccatagaatggaaaaacggacacatcgcaccaatctttaagaaaggagatccaactaagtgctgcaactacagaccaattatgctactaaatacaacgtataagatattgaccacaattataagaaaccgactaaatcaatacacagaggaaattgtgggaccatatcaacagggttttagaacaatagatcaaaggaagatcgacaatgggtgcaatgcacgtgctgacgcgggcaattgaaggaagctgtgagcatggcatagaattgcacatgctattcatcgacttccaacgggccttcagcagcatatacagacagcaattattggaagaaatgaaaaaaatggagatgccggcagggttaataagactaactagaatgacaataaaagac

SEQ ID NO: 2536 - DNA, 3561 bp, Diabrotica virgifera
  SmartBlast Evalue=3E-85; Info=Endonuclease-reverse transcriptase n=1 Tax=Bombyx mori RepID=D7F170_BOMMO
aacaagtctcttaacaacctgacattgcgtaaaagaaaaattatgaaaagtgctacatagttgctgtatgtacgtctatttcacatgcacaaaatttaaataaagtgcatggcatgaaaactgtaaaacttatttttgtcttttccaagcctcttacttaaatctgatgaaatacattatttaaaaagtaaaaaattttgtttttttatcaatccattaaatttatggttttattttggggtttttcttccccttggtaaaaattatatttactaatgtgtaggccactaatcaatttttgccaactaacgaaatataataattttattagatatcgattatatgaatatttttattttccggataccaatataatcaagaaactgggaactttacaaataactgaaaatcaatttaaataaaagtaaatagtttaataattttcctctaaactataaaaatcacttagtttcttttagtcataattcattcatttgtactattctcaaatttcattcgcgttcgtattacgaacgcatagacgggactatgctttactctgttgctgacgtcatgcgccaatcggacgagcttacgtaactagaatatcagggtgtgcatatttccgggtcccggtgaattcgtatctattttaatcccccatcctaattacaggccaactggcaactctggtgcgcaggtaatttttagataacccattaactaccggtgaattggtaactttcattttttaagtattgttgataatctaatatcggtattccaggtatttagcgctgcactcctagaaaatggaaaaaatggcacaggaagtgaaaccgatgatgaaacgaaacgcaaaagagaaaacttggatgattgttttaatagaagtaaaattaaaaaacggtcaccaagcaaagcaggcaacgaaaacaaggaagacatggaaaatgttatgattacaataatgaaagagctaatgaataaaaacgatgaaatgcttcaggaaataaaacaaataaggaaagaataacaacaaaccaataaagagttaatgggtgtaaaagcagagaaacaaaaactaaaaaaagaagtaaaacagctacatgaatgaatggagcaactggagaaatttagcaaaaagaaaagcttgatcgtaactgggttgaaagtagaaacaaatgattataagaaattaaaagaagaaatggaaaatttcagagcccaagagttgcaaatacaaataaaactaagaagtgcaacaaaaataggagaaacagtatgcgcaatagaaacagaagcttcacggataaaatggaaatcctaaacaagaaacgtaaactaaaacagcataaagatcgtatctatataaacaacgattggacatcgaaagaaaaagaaatacaaaaggaaataactaaaatagcaaaggacgaaagaagcaaaggtaagcaaacgaaaatcggctacaagaaattaatagtgaatggcaaaatctagatatgggacgaagagagagaacagctgatagaaaattcaaaaaactaataaacgaagaacagcggctgaaatatgatattgacatggcaaaaaaagctcggaaatgcaaacggttaacgaaaacaaaataacgcacacaaaataaagaaagaatctcaataagaagaaaagaacaaaacccattagaatgggatcttggaatattagaaccatgctggcagtaggtaagatgcaagaaatagctcttgaaatgaaaaaataccaactagaaatcctagccgtacaggaaatacgatggaagaaagaaggaaaaattgagaagaaaaactttagcatgtattattcgggagaaaacaaacagggaacgaatggtacggcatttatggtgaacaaaaaaatgagggaaaaagtgatacaattcaaagcagttaatgaaaggatatcttacataagaaaataaacaagccaacatctcgatagtcaattgctatgcacccaccgaagaagcaaacgaagaagataaagcagaattctacgacatcctggaagaaacctgtgaagatattccgaggaatgacatattaataatattgggtgatttcaatgcaaagatcggaaaggaggactataatcgtaatgtagttggcaaagaaaccattcatgaaactacgaatgataatggaggagaaatctgcaacctagcagcagcaacaaacacatatatagttagtactgggcataaacataaaaaagaacacaaaataacatggatgataccaggaagaatggatggaaaccaaataaatcatactctaatttcgaaaaagtggacacaaatagtacaagacgtaaggtcatatagaggggcaaatggaggcactgaccacatattgttgatagcaaaacttaagatgaaaataatcaaagcaaataatcataaggaaggaaaaaggaggaaatggaatatagccaatctgaaaacgcaagaaacaaagcaacaatatacagaacaactggaacagaaattgggtcagtacgagcacatagaaatagaaggagaatggaaaaacataaagaacagcataatagagacagcagaacaaataataggattccaaaaaaacaaagaatcgaaagaatggtttgatgaggaatgtcaccaaaaaagtcaactgaagcacctcgcaagaaacaaatggctacaaagtgccgaacaggaacaactggaccaatatagaaaagaaaaacaagaagcattgaaactctatagaagaaagaagaacacatggatctctgaacaaatgcaagaattagaaacgaataataaagacaacaagaaattgttcgaatagataaaacaacaacacagtaccaaaaaatctgtcacaaaaataaacaaaaaagattgggaaaaacatttcacggacctatacaaaaacgacaataaggcatattcagaggatgaggatataagagataacagagatgaagaggaagtcgcacctacttattaggaattcatggaggtattaaaacaactaaaagtaaacaaaacgccagggccagatgaaatcaacaacgaactgatcatcaacggcggagaggagctcacgaagcgaatgcacaagttaatggttacaatttggaaggacgaaagcatgcccatagaatggaaaaacggacacatcgcaccaatctttaagaaaggagatccaactaagtgctgcaactacagaccaattatgctactaaatacaacgtataagatattgaccacaattataagaaaccgactaaatcaatacacagaggaaattgtgggaccatatcaacagggttttagaacaatagatcaaaggaagatcgacaatgggtgcaatgcacgtgctgacgcgggcaattgaaggaagctgtgagcatggcatagaattgcacatgctattcatcgacttccaacgggccttcagcagcatatacagacagcaattattggaagaaatgaaaaaaatggagatgccggcagggttaataagactaactagaatgacaataaaagac

SEQ ID NO: 2537 - DNA, 1452 bp, Diabrotica virgifera
aacaagtctcttaacaacctgacattgcgtaaaagaaaaattatgaaaagtgctacatagttgctgtatgtacgtctatttcacatgcacaaaatttaaataaagtgcatggcatgaaaactgtaaaacttatttttgtcttttccaagcctcttacttaaatctgatgaaatacattatttaaaaagtaaaaaattttgtttttttatcaatccattaaatttatggttttattttggggtttttcttccccttggtaaaaattatatttactaatgtgtaggccactaatcaatttttgccaactaacgaaatataataattttattagatatcgattatatgaatatttttattttccggataccaatataatcaagaaactgggaactttacaaataactgaaaatcaatttaaataaaagtaaatagtttaataattttcctctaaactataaaaatcacttagtttcttttagtcataattcattcatttgtactattctcaaatttcattcgcgttcgtattacgaacgcatagacgggactatgctttactctgttgctgacgtcatgcgccaatcggacgagcttacgtaactagaatatcagggtgtgcatatttccgggtcccggtgaattcgtatctattttaatcccccatcctaattacaggccaactggcaactctggtgcgcaggtaatttttagataacccattaactaccggtgaattggtaactttcattttttaagtattgttgataatctaatatcggtattccaggtatttagcgctgcactcctagaaaatggaaaaaatggcacaggaagtgaaaccgatgatgaaacgaaacgcaaaagagaaaacttggatgattgttttaatagaagtaaaattaaaaaacggtcaccaagcaaagcaggcaacgaaaacaaggaagacatggaaaatgttatgattacaataatgaaagagctaatgaataaaaacgatgaaatgcttcaggaaataaaacaaataaggaaagaataacaacaaaccaataaagagttaatgggtgtaaaagcagagaaacaaaaactaaaaaaagaagtaaaacagctacatgaatgaatggagcaactggagaaatttagcaaaaagaaaagcttgatcgtaactgggttgaaagtagaaacaaatgattataagaaattaaaagaagaaatggaaaatttcagagcccaagagttgcaaatacaaataaaactaagaagtgcaacaaaaataggagaaacagtatgcgcaatagaaacagaagcttcacggataaaatgaaaatcctaaacaagaaacgtaaactaaaacagcataaagattggacatcgaaagaaaaaagaaatacaaaaggaaataactaaaatagcaaaggacgaaataagcaaaggtaagcaaacgaaaatcggcta

SEQ ID NO: 2538 - DNA, 358 bp, Diabrotica virgifera
agatccaactgagtgctgcaactgcggaccagttatgctactgaatacaacgtataagatattgacatattgaccacaattgtgggaagccgactggatcgatacacagaggaaattgtgggaccatatcaacagggttttagaacaatagatcaaaggaagatcgacaatgggtgcaatgcacgtgctgacgcgggcaattgaaggaagctgtgagcatggcatagaattgcacatgctattcatcgacttccaacgggccttcagcagcatatacagacagcaattattggaagaaatgaaaaaaatggagatgccggcagggttaataagactaactagaatgacaataaaagac

SEQ ID NO: 2539 - DNA, 1003 bp, Diabrotica virgifera
  SmartBlast Evalue=5E-34; Info=23 kDa integral membrane protein n=1 Tax=Camponotus floridanus RepID=E2B227_9HYME
tgtctagaaaaacgaagatgtttattagagaaacatgttaacatactaattagttcacttaaataattaagacttttattttccttaaggctgaatatttctttgagaaacctcagtacctgaatcttctttccctgttctttatactgctggacaagcagagtgaaaatacacaaccaataacctcgagggctgacagtgccagaagagttattccaataacgttcatggctttattaagaaaatcgtaaaactctgttttgcatccatccgtatattgtttgttatttgaatccaaacatgattttggtatactagctccccaaaatgatggaccgtcaggaccacagcattcaaattctttttgaattaaatctgttaattcgtgtttattctggtccttagctctattaaacaaagtatccagttgcttgttcacttgggttttgaaattatctttatcctttatttctataaaagcaaagactccaacggcgatttgaagcaaaaatattaccaacaatattacaccgtacgttgtaagcaaacatgggctttctctaatggctccacagcatccaaagaatgcgatgacaaatattattgagcctactacaatggtcagtatgggagctacgcctattgagctgtattcttctggtatagcttcagtaaaatcatttatgtttagtttgtatagtactcctacgacgattaaagcaagaccaccgagagcaaaaatgatattcgccccaaacacaaacaatttcacaatcccttcggcacaacccatcgctgttccgcacatattgacgctagtcgctagtttctgttatctactttttcacagtctaacgaataaacgaagcaccgatggattccacaataatacagataaagtgataagaatacacctatatttatatacgaccctataatacctattttgataaagtgtagaaggtttggttataacgaattaaaatattaactagaaatttgg

SEQ ID NO: 2540 - DNA, 1003 bp, Diabrotica virgifera
  SmartBlast Evalue=6E-34; Info=23 kDa integral membrane protein n=1 Tax=Camponotus floridanus RepID=E2B227_9HYME
tgtctagaaaaacgaagatgtttattagagaaacatgttaacatactaattagttcacttaaataattaagacttttattttccttaaggctgaatatttctttgagaaacctcagtacctgaatcttctttccctgttctttatactgctggacaagcagagtgaaaatacacaaccaataacctcgagggctgacagtgccagaagagttattccaataacgttcatggctttattaagaaaatcgtaaaactctgttttgcatccatccgtatattgtttgttatttgaatccaaacatgattttggtatactagctccccaaaatgatggaccgtcaggaccacagcattcaaattctttttgaattaaatctgttaattcgtgtttattctggtccttagctctattaaacaatctatccagttgcttgttcacttgggttttgaaattatctttatcctttatttctataaaagcaaatactccaacggcgatttgaagcaaaaatattaccaacaatattacaccgtacgttgtgagcaaacatgggctttctctgatggctccacagcatccaaagaatgcgatgacaaatattattgagcctactacaatggtcagtatgggagctacgcctattgagctgtattcgtctggtatggcttcagtaaaatcatttatgtttagtttgtatagtactcctacgactattagagcaagaccaccgagagcaaaaatgatattcgccccaaacacaaacaatttcacaatcccttcggcacaacccatcgctgttccgcacatattgacgctagtcgctagtttctgttatctactttttcacagtctaacgaataaacgaagcaccgatggattccacaataatacagataaagtgataagaatacacctatatttatatacgaccctataatacctattttgataaagtgtagaaggtttggttataacgaattaaaatattaactagaaatttgg

SEQ ID NO: 2541 - DNA, 846 bp, Diabrotica virgifera
  SmartBlast Evalue=4E-34; Info=23 kDa integral membrane protein n=1 Tax=Camponotus floridanus RepID=E2B227_9HYME
tgtctagaaaaacgaagatgtttattagagaaacatgttaacatactaattagttcacttaaataattaagacttttattttccttaaggctgaatatttctttgagaaacctcagtacctgaatcttctttccctgttctttatactgctggacaagcagagtgaaaatacacaaccaataacctcgagggctgacagtgccagaagagttattccaataacgttcatggctttattaagaaaatcgtaaaactctgttttgcatccatccgtatattgtttgttatttgaatccaaacatgattttggtatactagctccccaaaatgatggaccgtcaggaccacagcattcaaattctttttgaattaaatctgttaattcgtgtttattctggtccttagctctattaaacaaagtatccagttgcttgttcacttgggttttgaaattatctttatcctttatttctataaaagcaaagactccaacggcgatttgaagcaaaaatattaccaacaatattacaccgtacgttgtaagcaaacatgggctttctctaatggctccacagcatccaaagaatgcgatgacaaatattattgagcctactacaatggtcagtatgggagctacgcctattgagctgtattcttctggtatagcttcagtaaaatcatttatgtttagtttgtatagtactcctacgacgattaaagcaagaccaccgagtgcaaaggtaaaattggcaccagatacaaaaaacttaatacagctctctgaaaaagccatgatgacaccttaaattaaatatttgacacagaacactgaacggtattacaact

SEQ ID NO: 2542 - DNA, 853 bp, Diabrotica virgifera
  SmartBlast Evalue=5E-34; Info=23 kDa integral membrane protein n=1 Tax=Camponotus floridanus RepID=E2B227_9HYME
tgtctagaaaaacgaagatgtttattagagaaacatgttaacatactaattagttcacttaaataattaagacttttattttccttaaggctgaatatttctttgagaaacctcagtacctgaatcttctttccctgttctttatactgctggacaagcagagtgaaaatacacaaccaataacctcgagggctgacagtgccagaagagttattccaataacgttcatggctttattaagaaaatcgtaaaactctgttttgcatccatccgtatattgtttgttatttgaatccaaacatgattttggtatactagctccccaaaatgatggaccgtcaggaccacagcattcaaattctttttgaattaaatctgttaattcgtgtttattctggtccttagctctattaaacaatctatccagttgcttgttcacttgggttttgaaattatctttatcctttatttctataaaagcaaatactccaacggcgatttgaagcaaaaatattaccaacaatattacaccgtacgttgtgagcaaacatgggctttctctgatggctccacagcatccaaagaatgcgatgacaaatattattgagcctactacaatggtcagtatgggagctacgcctattgagctgtattcgtctggtatggcttcagtaaaatcatttatgtttagtttgtatagtactcctacgactattagagcaagaccaccgagtgcaaaggtaaaatttgccccagatacaaaaaacttaatacagctctctgaaaaagccatgatgacaccttaaattaaatatttgacacagaacactgaacggtattacaacttatttac

SEQ ID NO: 2543 - DNA, 751 bp, Diabrotica virgifera
gcaaaaagtttcactagtaatgccactagaggtcaagttatttgtggtcatctgattgaatacaaccaataaaaccaacattatactgaaaacagatcccatgggctgttttcactcaatcatgtagctatggatacctacatttcgtttcatttcgattttgacatttcaaatattcaatatttcaaaatgtcacgatttggttgtaatactgatgagaatattcatgaaattatcgaatcaaatataccaaagaatactgtttacagtaaaaaatttgtatggaaagcgtttatggacttataaaaattacggggcataacaatcccaactcaataaaaccgtacttgaacattgacgaagaacatcataataaaattattaacagcatgcgtagtggaaatacatcttcatcagttatagaaactaacatgtctggatcttcattaaatttttctaattgttcctttgttaattgcacatttaaataaattgtttctgctctgtattttttttcataaccagcaaaaaattttctatccgaataaccctcgaacattgacaaatgctcaaaaattttttaacaactttctcaagcttgttgcttacaggcaacagacctccgcctacggcgtcggtctgtttccaagcaacaagctttcgaaatctgttataaaattttttcgaacaattatcaatgtccttgggttattactactgaaaatggccaattttcaaccacgaatatctc

SEQ ID NO: 2544 - DNA, 750 bp, Diabrotica virgifera
gcaaaaagtttcactagtaatgccactagaggtcaagttatttgtggtcatctgattgaatacaaccaataaaaccaacattatactgaaaacagatcccatgggctgttttcactcaatcatgtagctatggatacctacatttcgtttcatttcgattttgacatttcaaatattcaatatttcaaaatgtcacgatttggttgtaatactgatgagaatattcatgaaattatcgaatcaaatataccaaagaatactgtttacagtaaaaaatttgtatggaaagcgtttatggacttttgcaatgatagaaaatatgaattagatggaaatcggacggtggaagaattggcgtcgattttaaaggattgggctgtgaatatgagaagaaaagatggtacagagtttaaagaagctactgtatataaattatcaatcttcattaaatttttctaattgttcctttgttaattgcacatttaaataaattgtttctgctctgtattttttttcataaccagcaaaaaattttctatccgaataaccctcgaacattgacaaatgctcaaaaattttttaacaactttctcaagcttgttgcttacaggcaacagacctccgcctacggcgtcggtctgtttccaagcaacaagctttcgaaatctgttataaaattttttcgaacaattatcaatgtccttgggttattactactgaaaatggccaattttcaaccacgaatatctc

SEQ ID NO: 2545 - DNA, 537 bp, Diabrotica virgifera
caatcatgtagctatggatacctacatttcgtttcatttcgattttgacatttcaaatattcaatatttcaaaatgtcacgatttggttgtaatactgatgggcataacaatcccaactcaataaaaccgtacttgaacattgacgaagaacatcataataaaattattaacagcatgcgtagtggaaatacatcttcatcagttatagaaactaacatgtctggatcttcattaaatttttctaattgttcctttgttaattgcacatttaaataaattgtttctgctctgtattttttttcataaccagcaaaaaattttctatccgaataaccctcgaacattgacaaatgctcaaaaattttttaacaactttctcaagcttgttgcttacaggcaacagacctccgcctacggcgtcggtctgtttccaagcaacaagctttcgaaatctgttataaaattttttcgaacaattatcaatgtccttgggttattactactgaaaatggccaattttcaaccacgaatatctc

SEQ ID NO: 2546 - DNA, 556 bp, Diabrotica virgifera
gcaaaaagtttcactagtaatgccactagaggtcaagttatttgtggtcatctgattgaatacaaccaataaaaccaacattatactgaaaacagatcccatgggctgttttcactcaatcatgtagctatggatacctacatttcgtttcatttcaattttgacatttcaaatattcaatatttcaaaatgtcacgatttggttgtaatactgatgagaatattaatgaaattgttattaattttatatcagcaaaaaattttctatccgaataaccctcgaacattgataaatgctcaaaaatttcttaacaactttctcaagcttgttgcttacaggcaacagacctccgcctatggcgtcggtctgtttccaaggaacaagcttttgaaatctgttacaaaaatttctcgaacaattatcaatgtcctctggttattactactgaacacctgttataaaaagtacatgtgaaacaattttcataaaaaaatactgaaaattaaacgatttattcgccatccactagcaccgcgaaaataaaaacatagctcc

SEQ ID NO: 2547 - DNA, 567 bp, Diabrotica virgifera
ccacaattaaagatattgtgaaatacaattctaaaacatgaataccgcattggttttgactcttttgttttgcgtcggtcttaccgtcaacgccaaaacagctaatatgccagagaaacctacccatcatccccccacccctgagcccgagcctgacccagaggagtttcagtgcgatgcttgcataacgtttgcaactgttatcgatgagttggtcgaagagagattaccattggacgaagttgaaagagatgccagcttaatatgccgcatattaccaggtaccttaggagaattttgcgaacaacacttacttccaaaagttgacaaaatctacgaagaatgccacaagcatgaacctcaagatgtatgtgatcgtttggacttctgttagagagacattaaaaaaaatgttagaatactgtacatacatatatttaaaaaagtgtaaaataaatttttaaatcaaatcgatgcaattgatttttataactaaagcagcgtttttcaacctgtacgacgcaggtccaaaagaccatcatagctctgttgttcccgtttatatct

SEQ ID NO: 2548 - DNA, 470 bp, Diabrotica virgifera
ccacaattaaagatattgtgaaatacaattctaaaacatgaataccgcattggttttgactcttttgttttgcgtcggtcttaccgtcaacgccaaaacagctaatatgccagagaaacctacccatcatccccccacccctgagcccgagcctgacccagaggagtttcagtgcgatgcttgcataacgtttgcaactgttatcgatgagttggtcgaagagagattaccattggacgaagttgaaagagatgccagcttaatatgccgcatattaccaggtaccttaggagaattttgcgaacaacacttacttccaaaagttgacaaaatctacgaagaatgccacaagcatgaacctcaagatgtatgtgatcgtttggacttctgttagagagacattaaaaaaattgttacaatactgtaaatacatacttaaaaaagtgtaaaataaattttaaatcaaaaaa

SEQ ID NO: 2549 - DNA, 470 bp, Diabrotica virgifera
ccacaattaaagatattgtgaaatacaattctaaaacatgaataccgcattggttttgactcttttgttttgcgtcggtcttaccgtcaacgccaaaacagctaatatgccagagaaacctacccatcatccccccacccctgagcccgagcctgacccagaggagtttcagtgcgatgcttgcataacgtttacaactgttatcgatgagttggtcgaagagagattaccattggacgaagttgaaagagatgccagcttaatatgcagcatattaccaggtgccttaggagaattttgcgaacaacacttacttccaaaagttgacaaaatctacgaagaatgccacaagcatgaacctcaagatgtatgtgatcgtttggacttctgttagagagacattaaaaaaattgttacaatactgtacatacatacttaaaaaagtgtaaaataaattttaaatcaaaaaa

SEQ ID NO: 2550 - DNA, 736 bp, Diabrotica virgifera
  SmartBlast Evalue=0.000000008; Info=Endonuclease-reverse transcriptase n=1 Tax=Bombyx mori RepID=D7F157_BOMMO
taagcttcatgagcagtgttttatccatcaaatgtccctcttttcatttctttagtatgtaatacatcatagtgttgtatattattctttttgtttgatgttttatatgtttctatcagaacgcagaattcaatactcctattgactgggacctaagctagattttcaccaagcactagagctagccgaatttaggagaggctttaaaaacaaatgaccgtctacaagtaataaattccttagggaaagacatagaataaaacaagccattgatattaatatttgtaaactttgagacgtccaacaagcattgggctgcatccagcataattcatcttaagagttcttacagattgcagtattgaaaatttacgatggcgacattttcacaagtgttaagtaatctgggccacagaattaaattagaaagggacaattaaacaacagagatatacaggagaatagagatactatgggaagcctacggaaaattgagggaagactttaaattagatattcctttttatttgaaaaggaaggttttaatgagtgtgtactcaaagttctaacatatagagcagaaacattgacccttaccagaacagtgatcaattaaattaactggtacagagagagattagtgttaaatatgttcctcagaaacagagttttaaatcaaatagaagacaagctggtattgtggactcagttaaaacaattacaacgttgaaatgta

SEQ ID NO: 2551 - DNA, 758 bp, Diabrotica virgifera
tcatagatcataaacgatgaagctggttctaggaacgctgttcctaggtgtcctgattttcaataaagcttctccccggcaaatcagttatggaaaactagaaagactacaagatgccttgaaaagattttcgataaacgatattaacttgttgcccaatgaaaacgataggcttaaacaaaccactcctgaaaaacgaggttgtatgtatcttataggcgaaagttgcagtaatggacgtgtgccaggtgcaggagctgacagcgactggataagaaatggaggaaatgttcctggaaaacgaacttggaaattgttcgattttcacaatctcccaattttatcaggaaaacgttgtgtaaatcttttagacgagagctgtagtaacggaggagcttctggtgcgggagatgacagtgactggataaatggtggaaacagtcctggaaagagaagtttaaacgtcatggatgatcataatgttccctttgttccatatagtggcagaataacacctggtaaacgttgcgttaacctcttagatgagagctgtagtaacggaggggcttctggagcaggagatgatagtgactggataaatggtggaaacagtcctggaaagagaagtttagatgtcttatcaaattataatggtaacaaataacccgacaaatgtcattgatctggtagataagctattataaaactcaaaagtaaactttgcaaaaattttgttatcaataaactatttattttaa

SEQ ID NO: 2552 - DNA, 462 bp, Diabrotica virgifera
tggatgatcataatgttccctttgttccatatagtggcagaataacacctggtaaacgttgtgtgaatcttttagatgagagctgtagtaacggaggggcttctggagcaggagatgatagtgactggataaatggtggaaacagtcctggaaagagaagtttaaacgtcatggatgatcataatgttccctttgttccatatagtggcagaataacacctggtaaacgttgcgttaacctcttagatgagagctgtagtaacggaggggcttctggagcaggagatgatagtgactggataaatggtggaaacagtcctggaaagagaagtttagatgtcttatcaaattataatggtaacaaataacccgacaaatgtcattgatctggtagataagctattataaaactcaaaagtaaactttgcaaaaattttgttatcaataaactatttattttaa

SEQ ID NO: 2553 - DNA, 456 bp, Diabrotica virgifera
  misc_feature (62)..(62): n is a, c, g, or t
aacttggaaattgttcgattttcacaatctcccaatttttatcaggaaaacgttgtgtaaancttttagacgagagctgtagtaacggaggagcttctggtgcgggagatgacagtgactggataaatggtggaaacagtcctggaaaaagaaatttaaacgtcatggatgatcataatgttccctttgttccatatagtggcagaataacacctggtaaacgttgcgttaacctcttagatgagagctgtagtaacggaggggcttctggagcaggagatgatagtgactggataaatggtggaaacagtcctggaaagagaagtttagatgtcttatcaaattataatggtaacaaataacccgacaaatgtcattgatctggtagataagctattataaaactcaaaagtaaactttgcaaaaattttgttatcaataaactatttattttaa

SEQ ID NO: 2554 - DNA, 598 bp, Diabrotica virgifera
ttggtgatctttccgggccccattcaaatacgggcccgaggcaggtgcctcacgggcctagtggtaaaataggccctgtaaatactaggacagagttttgaattacaaggagaatttttcaaattggttgatatcttccggtcgcgcattggtcgtgaaatttgaaaaattggttgtttttgaaattttttaaaaacaaaaaatattttatccccttttgctataccgcgtacatctttccttgagaggtcaggtttaaaataaagcaaagaaaaaaggtatattgacatattccagtcgcgcatcgtccataaaatattaaaaatatcgtttttgctattttcttctttgaaagtacaacgcttttaataatataaaaccaacttaacggccctacttttcatgtgccaggcacaagacttaaataaaaaaaaaacaactgaattgcaataaaaatgcaataaaaaatttcaaaaacaacaatttttttagattttgcggccggtgcgcgaccgaaagatatcgagcaatttgaaaaattctttttgtagtttgaaactctatcctggtagcaacttttccgcggtggagcagcacg

SEQ ID NO: 2555 - DNA, 442 bp, Diabrotica virgifera
caagaacaaaaacttagtgaaattgacagaaaagtggatgaattgtccactataatcagagggcaacaaaaaagtacagatataactgatgatgaagttcatacgaaattacctctatccaccttagaagaactaggagacgttgaaaagctactagaaaatgctacaaatctagacaactttgttatttacatgcgtcaggtgggaggttttgattacaaggaaagtgtcaggagatgcttgaaaaaaatcttcaatgatcaattagcagttatctacagttttcaaggtcataaggggaaaaatccctttaataagactctaatttgcactgccgtaataaaatctatattgaaactacatatagattgtacatctaaggaagtcgaagtagccataagcaaatggctgacaaaagccaaagagaggatgaagaaaaacg

SEQ ID NO: 2556 - DNA, 405 bp, Diabrotica virgifera
ttggtgatctttccgggccccattcaaatacgggcccgaggcaggtgcctcacgggcctagtggtaaaataggccctctatccaccttagaagaactaggagacgttgaaaagctactagaaaatgctacaaatctagacaactttgttatttacatgcgtcaggtgggaggttttgattacaaggaaagtgtcaggagatgcttgaaaaaaatcttcaatgatcaattagcagttatctacagttttcaaggtcataaggggaaaaatccctttaataagactctaatttgcactgccgtaataaaatctatattgaaactacatatagattgtacatctaaggaagtcgaagtagccataagcaaatggctgacaaaagccaaagagaggatgaagaaaaacg

SEQ ID NO: 2557 - DNA, 1245 bp, Diabrotica virgifera
  SmartBlast Evalue=0; Info=Cathepsin L-like proteinase n=1 Tax= Diabrotica virgifera virgifera RepID=Q70EW8_DIAVI
caaacattttgtttacgtgtagttttgtaagatattttttaataaacaaaatcacaatataaaagcagatttttgtatctcagcaggcatacagtgttcagttctattataaaacggtttaacagtttttaaaagttaatatgaaggttctaatctttattttcctggcaaccgccgctgttcaggcattaaatgataaagaagaatgggtgcaatttaaggttaaaaataacaaaagttacagaagctatgttgaagaacaaacacgattcagaatttttcaagaaaatctgagaaaaatcgaaaatcacaatgaaaaatataacaatggagagtctacttttaagtttggtgttaccaaatttgcagacctaactgaaaaagaatttctggacctgttggtgctatctaaaaatgcaaggcctaatagaactcatgctacacatttgctagccccactaagagatctaccatcagcattagattggagagacaagggagctgtaactgaggtaaaagatcaaggaatgtgtggctcttgttggacctttagtacaactgggtcagtagaaggagctcattttcttaaaactggaaatctggtatccttaagtgaacaaaatctagtagattgcgcaaaagacacttgctatgggtgtggaggtggctggatggacaaagctctggaatatatcgaaaaaggaggaataatgtctgagaaggattatccttacgaaggcgtggatgacaactgtagatttgatatttccaaagtagctgccaagatcagtaactttacttacattaagaaaaatgatgaagaagatcttaaaaacgcagttgctgcaaaaggtcccatatcagtagctattgatgcttctgctacattccagttatatgtatcaggcatacttgatgatacggaatgctctaatgaatttgactcattgaatcatggtgtactagttgttggatatggcacagaaaatggaaaagactactggatcgtcaaaaactcctggggagtaaactggggaatggatggatatattcggatgagcagaaataagaataaccaatgtggtattactactgacggcgtatatccaaacatttaaggacatgtttttttagaattattcgttgtttcggtcactttaataatttgtttctttttaagtaatccttaaaaaattaggttatttttttttaattaaaataaagtgcatatttattaagtcaaaa

SEQ ID NO: 2558 - DNA, 1245 bp, Diabrotica virgifera
  SmartBlast Evalue=0; Info=Cathepsin L-like proteinase n=1 Tax= Diabrotica virgifera virgifera RepID=Q70EW8_DIAVI
caaacattttgtttacgtgtagttttgtaagatattttttaataaacaaaatcacaatataaaagcagatttttgtatctcagcaggcatacagtgttcagttctattataaaacggtttaacagtttttaaaagttaatatgaaggttctaatctttattttcctggcaaccgccgctgttcaggcattaaatgataaagaagaatgggtgcaatttaaggttaaaaataacaaaagttacagaagctatgttgaagaacaaacacgattcagaatttttcaagaaaatctgagaaaaatcgaaaatcacaatgaaaaatataacaatggagagtctacttttaagtttggtgttaccaaatttgcagacctaactgaaaaagaatttctggacctgttggtgctatctaaaaatgcaaggcctaatagaactcatgctacacatttgctagccccactaagagatctaccatcagcattagattggagagacaagggagctgtaactgaggtaaaagatcaaggaatgtgtggctcttgttggacctttagtacaactgggtcagtagaaggagctcattttcttaaaactggaaatctggtatccttaagtgaacaaaatctagtagattgcgcaaaagacacttgctatgggtgtggaggtggctggatggacaaagctctggaatatatcgaaaaaggaggaataatgtctgagaaggattatccttacgaaggcgtggatgacaactgtagatttgatatttccaaagtagctgccaagatcagtaactttatttatattaagaaaaacgatgaagaagatcttaaaaacgcagttgctgcaaaaggtcccatatcagtagctattgatgcttctgctacattccagctttatgtatcaggaatacttgatgatacggagtgctctaatgaatttgactcattgaatcatggtgtactagttgttggatatggcacagaaaagggaaaagactactggatcgtcaaaaactcctggggagtaaactggggaatggatggatatattcggatgagccgaaacaagaataaccaatgtggtattactactgacggcgtatatcctactatttaaagtcatatatttttttagaattttttgtttctgttaagtagtgtaatgattttgttttgtttttaactaatccttaagcgattaggttatttttaaattaaaataaagtggatattacgtcaaaaaa

SEQ ID NO: 2559 - DNA, 1241 bp, Diabrotica virgifera
  SmartBlast Evalue=0; Info=Cathepsin L-like proteinase n=1 Tax= Diabrotica virgifera virgifera RepID=Q70EW8_DIAVI
caaacattttgtttacgtgtagttttgtaagatattttttaataaacaaaatcacaatataaaagcagatttttgtatctcagcaggcatacagtgttcagttctattataaaacggtttaacagtttttaaaagttaatatgaaggttctaatctttattttcctggcaaccgccgctgttcaggcattaaatgataaagaagaatgggtgcaatttaaggttaaaaataacaaaagttacagaagctatgttgaagaacaaacacgattcagaatttttcaagaaaatctgagaaaaatcgaaaatcacaatgaaaaatataacaatggagagtctacttttaagtttggtgttaccaaatttgcagacctaactgaaaaagaatttctggacctgttggtgctatctaaaaatgcaaggcctaatagaactcatgctacacatttgctagccccactaagagatctaccatcagcattagattggagagacaagggagctgtaactgaggtaaaagatcaaggaatgtgtggctcttgttggacctttagtacaactgggtcagtagaaggagctcattttcttaaaactggaaatctggtatccttaagtgaacaaaatctagtagattgcgcaaaagacacttgctatgggtgtggaggtggctggatggacaaagctctggaatatatcgaaaaaggaggaataatgtctgagaaggattatccttacgaaggcgtggatgacaactgtagatttgatatttccaaagtagctgccaagatcagtaactttacttacattaagaaaaatgatgaagaagatcttaaaaacgcagttgctgcaaaaggtcccatatcagtagctattgatgcttctgctacattccagttatatgtatcaggcatacttgatgatacggaatgctctaatgaatttgactcattgaatcatggtgtactagttgttggatatggcacagaaaatggaaaagactactggatcgtcaaaaactcctggggagtaaactggggaatggatggatatattcggatgagcagaaataagaataaccaatgtggtattactactgacggcgtatatccaaacatttaaggacatgtttttttagaattattcgttgtttcggtcactttaataatttgtttctttttaagtaatccttaaaaaattaggttatttttttttaattaaaataaagtgcatatttattaagtc

SEQ ID NO: 2560 - DNA, 1205 bp, Diabrotica virgifera
  SmartBlast Evalue=0; Info=Cathepsin L-like proteinase n=1 Tax= Diabrotica virgifera virgifera RepID=Q70EW8_DIAVI
ttcagttttgttataaagcggtggaaaagtttttaaaagttaaggcaaacccataattatttgctcagtaatattattatgtatattatttctccttatagatgaggttctaatctttattttcctggcaaccgccgctgttcaggcattaaatgataaagaagaatgggtgcaatttaaggttaaaaataacaaaagttacagaagctatgttgaagaacaaacacgattcagaatttttcaagaaaatctgagaaaaatcgaaaatcacaatgaaaaatataacaatggagagtctacttttaagtttggtgttaccaaatttgcagacctaactgaaaaagaatttctggacctgttggtgctatctaaaaatgcaaggcctaatagaactcatgctacacatttgctagccccactaagagatctaccatcagcattagattggagagacaagggagctgtaactgaggtaaaagatcaaggaatgtgtggctcttgttggacctttagtacaactgggtcagtagaaggagctcattttcttaaaactggaaatctggtatccttaagtgaacaaaatctagtagattgcgcaaaagacacttgctatgggtgtggaggtggctggatggacaaagctctggaatatatcgaaaaaggaggaataatgtctgagaaggattatccttacgaaggcgtggatgacaactgtagatttgatatttccaaagtagctgccaagatcagtaactttacttacattaagaaaaatgatgaagaagatcttaaaaacgcagttgctgcaaaaggtcccatatcagtagctattgatgcttctgctacattccagttatatgtatcaggcatacttgatgatacggaatgctctaatgaatttgactcattgaatcatggtgtactagttgttggatatggcacagaaaatggaaaagactactggatcgtcaaaaactcctggggagtaaactggggaatggatggatatattcggatgagcagaaataagaataaccaatgtggtattactactgacggcgtatatccaaacatttaaggacatgtttttttagaattattcgttgtttcggtcactttaataatttgtttctttttaagtaatccttaaaaaattaggttatttttttttaattaaaataaagtgcatatttattaagtcaaaa

SEQ ID NO: 2561 - DNA, 1205 bp, Diabrotica virgifera
  SmartBlast Evalue=0; Info=Cathepsin L-like proteinase n=1 Tax= Diabrotica virgifera virgifera RepID=Q70EW8_DIAVI
ttcagttttgttataaagcggtggaaaagtttttaaaagttaaggcaaacccataattatttgctcagtaatattattatgtatattatttctccttatagatgaggttctaatctttattttcctggcaaccgccgctgttcaggcattaaatgataaagaagaatgggtgcaatttaaggttaaaaataacaaaagttacagaagctatgttgaagaacaaacacgattcagaatttttcaagaaaatctgagaaaaatcgaaaatcacaatgaaaaatataacaatggagagtctacttttaagtttggtgttaccaaatttgcagacctaactgaaaaagaatttctggacctgttggtgctatctaaaaatgcaaggcctaatagaactcatgctacacatttgctagccccactaagagatctaccatcagcattagattggagagacaagggagctgtaactgaggtaaaagatcaaggaatgtgtggctcttgttggacctttagtacaactgggtcagtagaaggagctcattttcttaaaactggaaatctggtatccttaagtgaacaaaatctagtagattgcgcaaaagacacttgctatgggtgtggaggtggctggatggacaaagctctggaatatatcgaaaaaggaggaataatgtctgagaaggattatccttacgaaggcgtggatgacaactgtagatttgatatttccaaagtagctgccaagatcagtaactttatttatattaagaaaaacgatgaagaagatcttaaaaacgcagttgctgcaaaaggtcccatatcagtagctattgatgcttctgctacattccagctttatgtatcaggaatacttgatgatacggagtgctctaatgaatttgactcattgaatcatggtgtactagttgttggatatggcacagaaaagggaaaagactactggatcgtcaaaaactcctggggagtaaactggggaatggatggatatattcggatgagccgaaacaagaataaccaatgtggtattactactgacggcgtatatcctactatttaaagtcatatatttttttagaattttttgtttctgttaagtagtgtaatgattttgttttgtttttaactaatccttaagcgattaggttatttttaaattaaaataaagtggatattacgtcaaaaaa

SEQ ID NO: 2562 - DNA, 1201 bp, Diabrotica virgifera
  SmartBlast Evalue=0; Info=Cathepsin L-like proteinase n=1 Tax= Diabrotica virgifera virgifera RepID=Q70EW8_DIAVI
ttcagttttgttataaagcggtggaaaagtttttaaaagttaaggcaaacccataattatttgctcagtaatattattatgtatattatttctccttatagatgaggttctaatctttattttcctggcaaccgccgctgttcaggcattaaatgataaagaagaatgggtgcaatttaaggttaaaaataacaaaagttacagaagctatgttgaagaacaaacacgattcagaatttttcaagaaaatctgagaaaaatcgaaaatcacaatgaaaaatataacaatggagagtctacttttaagtttggtgttaccaaatttgcagacctaactgaaaaagaatttctggacctgttggtgctatctaaaaatgcaaggcctaatagaactcatgctacacatttgctagccccactaagagatctaccatcagcattagattggagagacaagggagctgtaactgaggtaaaagatcaaggaatgtgtggctcttgttggacctttagtacaactgggtcagtagaaggagctcattttcttaaaactggaaatctggtatccttaagtgaacaaaatctagtagattgcgcaaaagacacttgctatgggtgtggaggtggctggatggacaaagctctggaatatatcgaaaaaggaggaataatgtctgagaaggattatccttacgaaggcgtggatgacaactgtagatttgatatttccaaagtagctgccaagatcagtaactttacttacattaagaaaaatgatgaagaagatcttaaaaacgcagttgctgcaaaaggtcccatatcagtagctattgatgcttctgctacattccagttatatgtatcaggcatacttgatgatacggaatgctctaatgaatttgactcattgaatcatggtgtactagttgttggatatggcacagaaaatggaaaagactactggatcgtcaaaaactcctggggagtaaactggggaatggatggatatattcggatgagcagaaataagaataaccaatgtggtattactactgacggcgtatatccaaacatttaaggacatgtttttttagaattattcgttgtttcggtcactttaataatttgtttctttttaagtaatccttaaaaaattaggttatttttttttaattaaaataaagtgcatatttattaagtc

SEQ ID NO: 2563 - DNA, 1202 bp, Diabrotica virgifera
  SmartBlast Evalue=0; Info=Cathepsin L-like proteinase n=1 Tax= Diabrotica virgifera virgifera RepID=Q70EW8_DIAVI
ttcagttctattataaaacggtttaacagtttttaaaagttaatgtaagccaataattatttgctcaataacaatattctattttttctcattatagatgaaggttctaatctttattttcctggcaaccgccgctgttcaggcattaaatgataaagaagaatgggtgcaatttaaggttaaaaataacaaaagttacagaagctatgttgaagaacaaacacgattcagaatttttcaagaaaatctgagaaaaatcgaaaatcacaatgaaaaatataacaatggagagtctacttttaagtttggtgttaccaaatttgcagacctaactgaaaaagaatttctggacctgttggtgctatctaaaaatgcaaggcctaatagaactcatgctacacatttgctagccccactaagagatctaccatcagcattagattggagagacaagggagctgtaactgaggtaaaagatcaaggaatgtgtggctcttgttggacctttagtacaactgggtcagtagaaggagctcattttcttaaaactggaaatctggtatccttaagtgaacaaaatctagtagattgcgcaaaagacacttgctatgggtgtggaggtggctggatggacaaagctctggaatatatcgaaaaaggaggaataatgtctgagaaggattatccttacgaaggcgtggatgacaactgtagatttgatatttccaaagtagctgccaagatcagtaactttacttacattaagaaaaatgatgaagaagatcttaaaaacgcagttgctgcaaaaggtcccatatcagtagctattgatgcttctgctacattccagttatatgtatcaggcatacttgatgatacggaatgctctaatgaatttgactcattgaatcatggtgtactagttgttggatatggcacagaaaatggaaaagactactggatcgtcaaaaactcctggggagtaaactggggaatggatggatatattcggatgagcagaaataagaataaccaatgtggtattactactgacggcgtatatccaaacatttaaggacatgtttttttagaattattcgttgtttcggtcactttaataatttgtttctttttaagtaatccttaaaaaattaggttatttttttttaattaaaataaagtgcatatttattaagtcaaaa

SEQ ID NO: 2564 - DNA, 1202 bp, Diabrotica virgifera
  SmartBlast Evalue=0; Info=Cathepsin L-like proteinase n=1 Tax= Diabrotica virgifera virgifera RepID=Q70EW8_DIAVI
ttcagttctattataaaacggtttaacagtttttaaaagttaatgtaagccaataattatttgctcaataacaatattctattttttctcattatagatgaaggttctaatctttattttcctggcaaccgccgctgttcaggcattaaatgataaagaagaatgggtgcaatttaaggttaaaaataacaaaagttacagaagctatgttgaagaacaaacacgattcagaatttttcaagaaaatctgagaaaaatcgaaaatcacaatgaaaaatataacaatggagagtctacttttaagtttggtgttaccaaatttgcagacctaactgaaaaagaatttctggacctgttggtgctatctaaaaatgcaaggcctaatagaactcatgctacacatttgctagccccactaagagatctaccatcagcattagattggagagacaagggagctgtaactgaggtaaaagatcaaggaatgtgtggctcttgttggacctttagtacaactgggtcagtagaaggagctcattttcttaaaactggaaatctggtatccttaagtgaacaaaatctagtagattgcgcaaaagacacttgctatgggtgtggaggtggctggatggacaaagctctggaatatatcgaaaaaggaggaataatgtctgagaaggattatccttacgaaggcgtggatgacaactgtagatttgatatttccaaagtagctgccaagatcagtaactttatttatattaagaaaaacgatgaagaagatcttaaaaacgcagttgctgcaaaaggtcccatatcagtagctattgatgcttctgctacattccagctttatgtatcaggaatacttgatgatacggagtgctctaatgaatttgactcattgaatcatggtgtactagttgttggatatggcacagaaaagggaaaagactactggatcgtcaaaaactcctggggagtaaactggggaatggatggatatattcggatgagccgaaacaagaataaccaatgtggtattactactgacggcgtatatcctactatttaaagtcatatatttttttagaattttttgtttctgttaagtagtgtaatgattttgttttgtttttaactaatccttaagcgattaggttatttttaaattaaaataaagtggatattacgtcaaaaaa

SEQ ID NO: 2565 - DNA, 1198 bp, Diabrotica virgifera
  SmartBlast Evalue=0; Info=Cathepsin L-like proteinase n=1 Tax= Diabrotica virgifera virgifera RepID=Q70EW8_DIAVI
ttcagttctattataaaacggtttaacagtttttaaaagttaatgtaagccaataattatttgctcaataacaatattctattttttctcattatagatgaaggttctaatctttattttcctggcaaccgccgctgttcaggcattaaatgataaagaagaatgggtgcaatttaaggttaaaaataacaaaagttacagaagctatgttgaagaacaaacacgattcagaatttttcaagaaaatctgagaaaaatcgaaaatcacaatgaaaaatataacaatggagagtctacttttaagtttggtgttaccaaatttgcagacctaactgaaaaagaatttctggacctgttggtgctatctaaaaatgcaaggcctaatagaactcatgctacacatttgctagccccactaagagatctaccatcagcattagattggagagacaagggagctgtaactgaggtaaaagatcaaggaatgtgtggctcttgttggacctttagtacaactgggtcagtagaaggagctcattttcttaaaactggaaatctggtatccttaagtgaacaaaatctagtagattgcgcaaaagacacttgctatgggtgtggaggtggctggatggacaaagctctggaatatatcgaaaaaggaggaataatgtctgagaaggattatccttacgaaggcgtggatgacaactgtagatttgatatttccaaagtagctgccaagatcagtaactttacttacattaagaaaaatgatgaagaagatcttaaaaacgcagttgctgcaaaaggtcccatatcagtagctattgatgcttctgctacattccagttatatgtatcaggcatacttgatgatacggaatgctctaatgaatttgactcattgaatcatggtgtactagttgttggatatggcacagaaaatggaaaagactactggatcgtcaaaaactcctggggagtaaactggggaatggatggatatattcggatgagcagaaataagaataaccaatgtggtattactactgacggcgtatatccaaacatttaaggacatgtttttttagaattattcgttgtttcggtcactttaataatttgtttctttttaagtaatccttaaaaaattaggttatttttttttaattaaaataaagtgcatatttattaagtc

SEQ ID NO: 2566 - DNA, 2035 bp, Diabrotica virgifera
  SmartBlast Evalue=0; Info=Encapsulation-relating protein n=1 Tax=Diabrotica virgifera virgifera RepID=D7EYY4_DIAVI
caagttgaacataacagcgacaagatgggagagaaattcgaactgaaaacagcagggaacctgatccctcacatagggaacaccgaagaatcaattagagcattcatagacgcaattgaactgtacgatgaatttgatttgatctctattgcactttcgggcgatgaaaaaattaagatgtattgcaattatttaatagataattacatatctgaggagtcactaatacagcacgacgatgaaggtattagttcttctttctttagtcgcattcagcgctgctctaccaacacttcttggtagaaccgctctggtcaaagaagatggaactgttactctcaccgactctagaggataccaactggtaatcctcaagagtgttaccgatcccagacaagtcgaagttattctcaggagtccaaacacaagaacccagatgttccaagttggggaaccacttagaactagagaaactatcgaccgtactctcgttggagtttcagcttaccaaaactataaccaagctgatattcttactgatattttccgtcagtatgaaggtactcttgacgacaccaaatactacagccttcttaacagaatccaaatgttagttgaagctggactcattaatgaaaccatctacgatatcatcagagactgggatcttaaacaccgtgtacaaggaattagtgacattgtccccacccaaggagtaaatactcttcgtcaatacgttggacaagttggagatgttatgccccttggtgaaaatgtacaatctggaatctacagaaactggaacctcgaccaagacttgctccaaaactattctccactcagacatttccaaactcttcttggacaaatccaacagcaacgacaacttcaacaaggtttattgaggcaacagcaatatttacctcaacaatatttatctggagaatatcgtcttgaagatcaaatgaacactaaccaaatcttgaaccaaatctacagacaacaacttggacaatctccattgaaccgttatttggtaaacatgagacttgtaaatggacaaaaagtatacgaagttcctgaagaattcgttaacattcaacttctcgaacaacttaccgctcaacaagaaatgatcaaccaaagatgggctcaaatgatggaaagaagacaaccaatcactgaagacgttcactctcagcaacatctgattaaccaacagatcgaaaaacttattgaacaattagcttaccatcaaaatctcattacacgtgaagttgaacaatacattgttaaaggacaagtagttccccagcaacttgtttaccaacagagattggtttaccaacaagttcatgaagtaattgaacgtttatactaccaacagctcttcatgactcgcctagccgaaaacataactgaagtcggtactatttcccttcaaagatggattttacagcacaatattattaacgagcagatccaacaattgatccaacaagttttgtaccaacaaactcacgtaaggcaacaaatccaagtattgattcaacaaggacaggttatcccacaggaactcgtcctctaccaaagaattacctaccaaaatgttgaaagagttcttcaagttttgattaaacaattcgtctatcaacaaacctacttcaaacagttgattcaacttttgggacaacaaagatacgccgttccccaagaattggtttcccaatacttcaccatttacagccaattacttcaattggttcaacacggagatgttgtaccccaagaattggtctaccaacaaagacttatccaccaacagattgtacttatgctccaacaattgaaagttgttccccaacaagtaatggcccagagggttcctaccacacaacaagaacgtttgtggcaaactcaaaacctttaccaaactctaccacgcgtgtattaaaaactgctttatttgtaatttgttgttaaaatgtttgttataattgttgaaaataaataaacatttgtttttgcaaaaaaa

SEQ ID NO: 2567 - DNA, 2034 bp, Diabrotica virgifera
  SmartBlast Evalue=0; Info=Encapsulation-relating protein n=1 Tax=Diabrotica virgifera virgifera RepID=D7EYY4_DIAVI
caagttgaacataacagcgacaagatgggagagaaattcgaactgaaaacagcagggaacctgatccctcacatagggaacaccgaagaatcaattagagcattcatagacgcaattgaactgtacgatgaatttgatttgatctctattgcactttcgggcgatgaaaaaattaagatgtattgcaattatttaatagataattacatatctgaggagtcactaatacagcacgacgatgaaggtattagttcttctttctttagtcgcattcagcgctgctctaccaacacttcttggtagaaccgctctggtcaaagaagatggaactgttactctcaccgactctagaggataccaactggtaatcctcaagagtgttgccgatcccagtcaagtcgaagttgttctcagaagtccaaacacaagaacccagatgttccaagttggggaaccacttagaactggagaagctatcgaccgtaccctcgttggtgtttcacggtaccaaaacaacaaccaaggtgatattcttactgatattttccgtcagtatgaaggtactcttgacgacaccaaatactacagccttcttaacagaatccaaatgttagttgaagctggactcattaatgaaaccatctacgatatcatcagagactgggatcttaaacaccgtgtacaaggaattagtgacattgtccccacccaaggagtaatactcttcgtcaatacgttggacaagttggagatgttatgccccttggtgaaaatgtacaatctggaatctacagaaactggaacctcgaccaagacttgctccaaaactattctccactcagacatttccaaactcttcttggacaaatccaacagcaacgacaacttcaacaaggtttattgaggcaacagcaatatttacctcaacaatatttatctggagaatatcgtcttgaagatcaaatgaacactaaccaaatcttgaaccaaatctacagacaacaacttggacaatctccattgaaccgttatttggtaaacatgagacttgtaaatggacaaaaagtatacgaagttcctgaagaattcgttaacattcaacttctcgaacaacttaccgctcaacaagaaatgatcaaccaaagatgggctcaaatgatggaaagaagacaaccaatcactgaagacgttcactctcagcaacatctgattaaccaacagatcgaaaaacttattgaacaattagcttaccatcaaaatctcattacacgtgaagttgaacaatacattgttaaaggacaagtagttccccagcaacttgtttaccaacagagattggtttaccaacaagttcatgaagtaattgaacgtttatactaccaacagctcttcatgactcgcctagccgaaaacataactgaagtcggtactatttcccttcaaagatggattttacagcacaatattattaacgagcagatccaacaattgatccaacaagttttgtaccaacaaactcacgtaaggcaacaaatccaagtattgattcaacaaggacaggttatcccacaggaactcgtcctctaccaaagaattacctaccaaaatgttgaaagagttcttcaagttttgattaaacaattcgtctatcaacaaacctacttcaaacagttgattcaacttttgggacaacaaagatacgccgttccccaagaattggtttcccaatacttcaccatttacagccaattacttcaattggttcaacacggagatgttgtaccccaagaattggtctaccaacaaagacttatccaccaacagattgtacttatgctccaacaattgaaagttgttccccaacaagtaatggcccagagggttcctaccacacaacaagaacgtttgtggcaaactcaaaacctttaccaaactctaccacgcgtgtattaaaaactgctttatttgtaatttgttgttaaaatgtttgttataattgttgaaaataaataaacatttgtttttgcaaaaaaa

SEQ ID NO: 2568 - DNA, 2027 bp, Diabrotica virgifera
  SmartBlast Evalue=0; Info=Encapsulation-relating protein n=1 Tax=Diabrotica virgifera virgifera RepID=D7EYY4_DIAVI
caagttgaacataacagcgacaagatgggagagaaattcgaactgaaaacagcagggaacctgatccctcacatagggaacaccgaagaatcaattagagcattcatagacgcaattgaactgtacgatgaatttgatttgatctctattgcactttcgggcgatgaaaaaattaagatgtattgcaattatttaatagataattacatatctgaggagtcactaatacagcacgacgatgaaggtattagttcttctttctttagtcgcattcagcgctgctctaccaacacttcttggtagaaccgctctggtcaaagaagatggaactgttactctcaccgactctagaggataccaactggtaatcctcaagagtgttaccgatcccagacaagtcgaagttattctcaggagtccaaacacaagaacccagatgttccaagttggggaaccacttagaactagagaaactatcgaccgtactctcgttggagtttcagcttaccaaaactataaccaagctgatattcttactgatattttccgtcagtatgaaggtactcttgacgacaccaaatactacagccttcttaacagaatccaaatgttagttgaagctggactcattaatgaaaccatctacgatatcatcagagactgggatcttaaacaccgtgtacaaggaattagtgacattgtccccacccaaggagtaaatactcttcgtcaatacgctggacaagttggagatgttatgccccttggtgaaaatgtacaatctgtaatctacagaaactggaacctcgaccaagacttgctccaaaactattctccactcaggcatttccaaactcttcttggacaaatccaacagcaacgtgaacttcaacaaggtttattgagccaacagcaatatttacctcaacaatatttatctggagaatatcttcttgaagatcaaatgaacactaatcaaatcttgaaccaaatctacagacagcaacttggacaatctccattgaaccgttatttggtaaacatgagacttgtaaacggacaacaagtatacgaagttcctgaagaattcgttaacgttcaacttctcgaacaactcaccgctaaacaagaaattatcaaccaaaaatggactcaaatgatggaaagaagacaaccaatcactgaagacgttcaacatcagcaacaactgattaaccaacagatcgaaagacttattgaacaattagcttaccatcaaaacctcattacacgtgaagttgaacaatacattgttaaaggacaagtagttcctcagcaacttgtctaccaacagagattggtttaccaacaagttcatgaggtaattgaacgtttatactaccaacagctcttcatgactcgcctagccgaaaacattactgaagtcggtaccatttcccttcaaagatggattttacaacataatattattaacgaacagatccaacaattgatccaacaagttttgtatcaacaaacccacgtaaggcaacaaatccaagtattgattcaacaaggagaggttatcccacatgaactcgtcctgtaccaaagaattacttaccaagatgttgaaagagttcttcaagttttgattaaacaattcgtatatcaacaaacctacttcaaacagttgattcaacttttgggacaacaaagatacgccgttccccaagaattggtttcccaatacttcactatttacacccaattagttcaattgatccaacacggagatgttgtaccccaagaattgatctaccaacaaagactaatccaccaacagattgtacttatgctccaacaattgaaagttgttccccaacaagtaatgacccagatggttcctaccacacaagaacgtttgtggcaaactcaataccaaactctaccacgcgtgtattaaaaactgctttatttgtaatttgttgttaaaatgtttgttataattgttgaaaatatataaacatttgttttttcaaataaaa

SEQ ID NO: 2569 - DNA, 2027 bp, Diabrotica virgifera
  SmartBlast Evalue=0; Info=Encapsulation-relating protein n=1 Tax=Diabrotica virgifera virgifera RepID=D7EYY4_DIAVI
caagttgaacataacagcgacaagatgggagagaaattcgaactgaaaacagcagggaacctgatccctcacatagggaacaccgaagaatcaattagagcattcatagacgcaattgaactgtacgatgaatttgatttgatctctattgcactttcgggcgatgaaaaaattaagatgtattgcaattatttaatagataattacatatctgaggagtcactaatacagcacgacgatgaaggtattagttcttctttctttagtcgcattcagcgctgctctaccaacacttcttggtagaaccgctctggtcaaagaagatggaactgttactctcaccgactctagaggataccaactggtaatcctcaagagtgttgccgatcccagtcaagtcgaagttgttctcagaagtccaaacacaagaacccagatgttccaagttggggaaccacttagaactggagaagctatcgaccgtaccctcgttggtgtttcacggtaccaaaacaacaaccaaggtgatattcttactgatattttccgtcagtatgaaggtactcttgacgacaccaaatactacagccttcttaacagaatccaaatgttagttgaagctggactcattaatgaaaccatctacgatatcatcagagactgggatcttaaacaccgtgtacaaggaattagtgacattgtccccacccaaggagtaaatactcttcgtcaatacgctggacaagttggagatgttatgccccttggtgaaaatgtacaatctgtaatctacagaaactggaacctcgaccaagacttgctccaaaactattctccactcaggcatttccaaactcttcttggacaaatccaacagcaacgtgaacttcaacaaggtttattgagccaacagcaatatttacctcaacaatatttatctggagaatatcttcttgaagatcaaatgaacactaatcaaatcttgaaccaaatctacagacagcaacttggacaatctccattgaaccgttatttggtaaacatgagacttgtaaacggacaacaagtatacgaagttcctgaagaattcgttaacgttcaacttctcgaacaactcaccgctaaacaagaaattatcaaccaaaaatggactcaaatgatggaaagaagacaaccaatcactgaagacgttcaacatcagcaacaactgattaaccaacagatcgaaagacttattgaacaattagcttaccatcaaaacctcattacacgtgaagttgaacaatacattgttaaaggacaagtagttcctcagcaacttgtctaccaacagagattggtttaccaacaagttcatgaggtaattgaacgtttatactaccaacagctcttcatgactcgcctagccgaaaacattactgaagtcggtaccatttcccttcaaagatggattttacaacataatattattaacgaacagatccaacaattgatccaacaagttttgtatcaacaaacccacgtaaggcaacaaatccaagtattgattcaacaaggagaggttatcccacatgaactcgtcctgtaccaaagaattacttaccaagatgttgaaagagttcttcaagttttgattaaacaattcgtatatcaacaaacctacttcaaacagttgattcaacttttgggacaacaaagatacgccgttccccaagaattggtttcccaatacttcactatttacacccaattagttcaattgatccaacacggagatgttgtaccccaagaattgatctaccaacaaagactaatccaccaacagattgtacttatgctccaacaattgaaagttgttccccaacaagtaatgacccagatggttcctaccacacaagaacgtttgtggcaaactcaataccaaactctaccacgcgtgtattaaaaactgctttatttgtaatttgttgttaaaatgtttgttataattgttgaaaatatataaacatttgttttttcaaataaaa

SEQ ID NO: 2570 - DNA, 1810 bp, Diabrotica virgifera
  SmartBlast Evalue=0; Info=Encapsulation-relating protein n=1 Tax=Diabrotica virgifera virgifera RepID=D7EYY4_DIAVI
atacagcacgacgatgaaggtattagttcttctttctttagtcgcattcagcgctgctctaccaacacttcttggtagaaccgctctggtcaaagaagatggaactgttactctcaccgactctagaggataccaactggtaatcctcaagagtgttaccgatcccagacaagtcgaagttattctcaggagtccaaacacaagaacccagatgttccaagttggggaaccacttagaactagagaaactatcgaccgtactctcgttggagtttcagcttaccaaaactataaccaagctgatattcttactgatattttccgtcagtatgaaggtactcttgacgacaccaaatactacagccttcttaacagaatccaaatgttagttgaagctggactcattaatgaaaccatctacgatatcatcagagactgggatcttaaacaccgtgtacaaggaattagtgacattgtccccacccaaggagtaaatactcttcgtcaatacgttggacaagttggagatgttatgccccttggtgaaaatgtacaatctggaatctacagaaactggaacctcgaccaagacttgctccaaaactattctccactcagacatttccaaactcttcttggacaaatccaacagcaacgacaacttcaacaaggtttattgaggcaacagcaatatttacctcaacaatatttatctggagaatatcgtcttgaagatcaaatgaacactaaccaaatcttgaaccaaatctacagacaacaacttggacaatctccattgaaccgttatttggtaaacatgagacttgtaaatggacaaaaagtatacgaagttcctgaagaattcgttaacattcaacttctcgaacaacttaccgctcaacaagaaatgatcaaccaaagatgggctcaaatgatggaaagaagacaaccaatcactgaagacgttcactctcagcaacatctgattaaccaacagatcgaaaaacttattgaacaattagcttaccatcaaaatctcattacacgtgaagttgaacaatacattgttaaaggacaagtagttccccagcaacttgtttaccaacagagattggtttaccaacaagttcatgaagtaattgaacgtttatactaccaacagctcttcatgactcgcctagccgaaaacataactgaagtcggtactatttcccttcaaagatggattttacagcacaatattattaacgagcagatccaacaattgatccaacaagttttgtaccaacaaactcacgtaaggcaacaaatccaagtattgattcaacaaggacaggttatcccacaggaactcgtcctctaccaaagaattacctaccaaaatgttgaaagagttcttcaagttttgattaaacaattcgtctatcaacaaacctacttcaaacagttgattcaacttttgggacaacaaagatacgccgttccccaagaattggtttcccaatacttcaccatttacagccaattacttcaattggttcaacacggagatgttgtaccccaagaattggtctaccaacaaagacttatccaccaacagattgtacttatgctccaacaattgaaagttgttccccaacaagtaatggcccagagggttcctaccacacaacaagaacgtttgtggcaaactcaaaacctttaccaaactctaccacgcgtgtattaaaaactgctttatttgtaatttgttgttaaaatgtttgttataattgttgaaaataaataaacatttgtttttgcaaaaaaa

SEQ ID NO: 2571 - DNA, 1809 bp, Diabrotica virgifera
  SmartBlast Evalue=0; Info=Encapsulation-relating protein n=1 Tax=Diabrotica virgifera virgifera RepID=D7EYY4_DIAVI
atacagcacgacgatgaaggtattagttcttctttctttagtcgcattcagcgctgctctaccaacacttcttggtagaaccgctctggtcaaagaagatggaactgttactctcaccgactctagaggataccaactggtaatcctcaagagtgttgccgatcccagtcaagtcgaagttgttctcagaagtccaaacacaagaacccagatgttccaagttggggaaccacttagaactggagaagctatcgaccgtaccctcgttggtgtttcacggtaccaaaacaacaaccaaggtgatattcttactgatattttccgtcagtatgaaggtactcttgacgacaccaaatactacagccttcttaacagaatccaaatgttagttgaagctggactcattaatgaaaccatctacgatatcatcagagactgggatcttaaacaccgtgtacaaggaattagtgacattgtccccacccaaggagtaatactcttcgtcaatacgttggacaagttggagatgttatgccccttggtgaaaatgtacaatctggaatctacagaaactggaacctcgaccaagacttgctccaaaactattctccactcagacatttccaaactcttcttggacaaatccaacagcaacgacaacttcaacaaggtttattgaggcaacagcaatatttacctcaacaatatttatctggagaatatcgtcttgaagatcaaatgaacactaaccaaatcttgaaccaaatctacagacaacaacttggacaatctccattgaaccgttatttggtaaacatgagacttgtaaatggacaaaaagtatacgaagttcctgaagaattcgttaacattcaacttctcgaacaacttaccgctcaacaagaaatgatcaaccaaagatgggctcaaatgatggaaagaagacaaccaatcactgaagacgttcactctcagcaacatctgattaaccaacagatcgaaaaacttattgaacaattagcttaccatcaaaatctcattacacgtgaagttgaacaatacattgttaaaggacaagtagttccccagcaacttgtttaccaacagagattggtttaccaacaagttcatgaagtaattgaacgtttatactaccaacagctcttcatgactcgcctagccgaaaacataactgaagtcggtactatttcccttcaaagatggattttacagcacaatattattaacgagcagatccaacaattgatccaacaagttttgtaccaacaaactcacgtaaggcaacaaatccaagtattgattcaacaaggacaggttatcccacaggaactcgtcctctaccaaagaattacctaccaaaatgttgaaagagttcttcaagttttgattaaacaattcgtctatcaacaaacctacttcaaacagttgattcaacttttgggacaacaaagatacgccgttccccaagaattggtttcccaatacttcaccatttacagccaattacttcaattggttcaacacggagatgttgtaccccaagaattggtctaccaacaaagacttatccaccaacagattgtacttatgctccaacaattgaaagttgttccccaacaagtaatggcccagagggttcctaccacacaacaagaacgtttgtggcaaactcaaaacctttaccaaactctaccacgcgtgtattaaaaactgctttatttgtaatttgttgttaaaatgtttgttataattgttgaaaataaataaacatttgtttttgcaaaaaaa

SEQ ID NO: 2572 - DNA, 1802 bp, Diabrotica virgifera
  SmartBlast Evalue=0; Info=Encapsulation-relating protein n=1 Tax=Diabrotica virgifera virgifera RepID=D7EYY4_DIAVI
atacagcacgacgatgaaggtattagttcttctttctttagtcgcattcagcgctgctctaccaacacttcttggtagaaccgctctggtcaaagaagatggaactgttactctcaccgactctagaggataccaactggtaatcctcaagagtgttaccgatcccagacaagtcgaagttattctcaggagtccaaacacaagaacccagatgttccaagttggggaaccacttagaactagagaaactatcgaccgtactctcgttggagtttcagcttaccaaaactataaccaagctgatattcttactgatattttccgtcagtatgaaggtactcttgacgacaccaaatactacagccttcttaacagaatccaaatgttagttgaagctggactcattaatgaaaccatctacgatatcatcagagactgggatcttaaacaccgtgtacaaggaattagtgacattgtccccacccaaggagtaaatactcttcgtcaatacgctggacaagttggagatgttatgccccttggtgaaaatgtacaatctgtaatctacagaaactggaacctcgaccaagacttgctccaaaactattctccactcaggcatttccaaactcttcttggacaaatccaacagcaacgtgaacttcaacaaggtttattgagccaacagcaatatttacctcaacaatatttatctggagaatatcttcttgaagatcaaatgaacactaatcaaatcttgaaccaaatctacagacagcaacttggacaatctccattgaaccgttatttggtaaacatgagacttgtaaacggacaacaagtatacgaagttcctgaagaattcgttaacgttcaacttctcgaacaactcaccgctaaacaagaaattatcaaccaaaaatggactcaaatgatggaaagaagacaaccaatcactgaagacgttcaacatcagcaacaactgattaaccaacagatcgaaagacttattgaacaattagcttaccatcaaaacctcattacacgtgaagttgaacaatacattgttaaaggacaagtagttcctcagcaacttgtctaccaacagagattggtttaccaacaagttcatgaggtaattgaacgtttatactaccaacagctcttcatgactcgcctagccgaaaacattactgaagtcggtaccatttcccttcaaagatggattttacaacataatattattaacgaacagatccaacaattgatccaacaagttttgtatcaacaaacccacgtaaggcaacaaatccaagtattgattcaacaaggagaggttatcccacatgaactcgtcctgtaccaaagaattacttaccaagatgttgaaagagttcttcaagttttgattaaacaattcgtatatcaacaaacctacttcaaacagttgattcaacttttgggacaacaaagatacgccgttccccaagaattggtttcccaatacttcactatttacacccaattagttcaattgatccaacacggagatgttgtaccccaagaattgatctaccaacaaagactaatccaccaacagattgtacttatgctccaacaattgaaagttgttccccaacaagtaatgacccagatggttcctaccacacaagaacgtttgtggcaaactcaataccaaactctaccacgcgtgtattaaaaactgctttatttgtaatttgttgttaaaatgtttgttataattgttgaaaatatataaacatttgttttttcaaataaaa

SEQ ID NO: 2573 - DNA, 1802 bp, Diabrotica virgifera
  SmartBlast Evalue=0; Info=Encapsulation-relating protein n=1 Tax=Diabrotica virgifera virgifera RepID=D7EYY4_DIAVI
atacagcacgacgatgaaggtattagttcttctttctttagtcgcattcagcgctgctctaccaacacttcttggtagaaccgctctggtcaaagaagatggaactgttactctcaccgactctagaggataccaactggtaatcctcaagagtgttgccgatcccagtcaagtcgaagttgttctcagaagtccaaacacaagaacccagatgttccaagttggggaaccacttagaactggagaagctatcgaccgtaccctcgttggtgtttcacggtaccaaaacaacaaccaaggtgatattcttactgatattttccgtcagtatgaaggtactcttgacgacaccaaatactacagccttcttaacagaatccaaatgttagttgaagctggactcattaatgaaaccatctacgatatcatcagagactgggatcttaaacaccgtgtacaaggaattagtgacattgtccccacccaaggagtaaatactcttcgtcaatacgctggacaagttggagatgttatgccccttggtgaaaatgtacaatctgtaatctacagaaactggaacctcgaccaagacttgctccaaaactattctccactcaggcatttccaaactcttcttggacaaatccaacagcaacgtgaacttcaacaaggtttattgagccaacagcaatatttacctcaacaatatttatctggagaatatcttcttgaagatcaaatgaacactaatcaaatcttgaaccaaatctacagacagcaacttggacaatctccattgaaccgttatttggtaaacatgagacttgtaaacggacaacaagtatacgaagttcctgaagaattcgttaacgttcaacttctcgaacaactcaccgctaaacaagaaattatcaaccaaaaatggactcaaatgatggaaagaagacaaccaatcactgaagacgttcaacatcagcaacaactgattaaccaacagatcgaaagacttattgaacaattagcttaccatcaaaacctcattacacgtgaagttgaacaatacattgttaaaggacaagtagttcctcagcaacttgtctaccaacagagattggtttaccaacaagttcatgaggtaattgaacgtttatactaccaacagctcttcatgactcgcctagccgaaaacattactgaagtcggtaccatttcccttcaaagatggattttacaacataatattattaacgaacagatccaacaattgatccaacaagttttgtatcaacaaacccacgtaaggcaacaaatccaagtattgattcaacaaggagaggttatcccacatgaactcgtcctgtaccaaagaattacttaccaagatgttgaaagagttcttcaagttttgattaaacaattcgtatatcaacaaacctacttcaaacagttgattcaacttttgggacaacaaagatacgccgttccccaagaattggtttcccaatacttcactatttacacccaattagttcaattgatccaacacggagatgttgtaccccaagaattgatctaccaacaaagactaatccaccaacagattgtacttatgctccaacaattgaaagttgttccccaacaagtaatgacccagatggttcctaccacacaagaacgtttgtggcaaactcaataccaaactctaccacgcgtgtattaaaaactgctttatttgtaatttgttgttaaaatgtttgttataattgttgaaaatatataaacatttgttttttcaaataaaa

SEQ ID NO: 2574 - DNA, 2513 bp, Diabrotica virgifera
caacactaagagacgccgatctccgaattttctcgcctttttgcccctcgaaaatccgaaaaaatggtttatgaaagcgatttttacacgaccaggaggccctatcgtgccactccttccgtttcgtcttacactatttcgggtgtgccttctcgacaagtcagggtattgccgggattagggaaggttcacgtaacgtatacatacgaccgcatcgtaccgtacgtggggcacaagcggcttacggtcgtaacggcccctcccagagtatggggaacgcgaccaagtgttcttcagcgcgaattcgaccgtatcgagaacaaaatccgtccttggaccggttattccgcgactaatcgctacctcaactccaactccgctgtgagaacttactacgtaaattacccaataacaggatcagattactacgattactactactcgctcaattcaccctcaacgtattattctccaaggctatatagatggtactcttcttggccaagggaataccgtacatattggcccatgtacagaacctacctcagtagatatttgagaaactattaccaaaatctcgactggcccagttactactggtctacttatctaccctacaccaaaaacttggactacgaatttagcgatatcgaaaacaaaatcgataatcttcgaaaaacgatttacttggactacccctatccaatcaaggctgtggattatacttactacccgcaatcttacaaaagctacaccccgctttcgctctactatgactactactggcccctcagcagtcttaaccgctatagctcctactggccttactatccataccacagatacttgtactacaagtatactttgccttccgatagatattaccatttaaaaggaatattcgatgacgagacgagacttattcgcgctcaaacggcgtctctgttgaaacggattcatgacccggttcctcgtgtccaacgatacagctggcccgcggtcgctgcaaaatacgataatggtcttccggccagactacataacgacaactacatccaccggttgttagtgacctcgcctaactctaaaaccgaatacaccacctattacacggaacccgttaaaaaatatatcggagccggtcatttagctgctgtttcctacgcaggcgacagagtatacagccgcaggccccacatctacctctacgaagatcccttgaagaatgacatccaacttttgagctactacatcaacaagttcaagcaggagaaagctattactgcaagcagtgagcctgctaaagctgccattgaatcctgctcgtgctacccgcaagtttactgcaaagagattggaagatgatgaggaagcagcaaaggaaatgcagaaacttcgagaggccagagctgcaagattggcgttcataaatgaggaggaaaagattgaaagatcgtcggtagcagtggatgatgcggtaaaagccaagaagaagaaagaggacgagaggttagcagaagaaaaggccttggcagaagaacaagcaaggcgagaggcccaaaccaagaaggaggaagctgcaagaaaagctgagttggctagacaagacgaacttgctgcacaagctgccgctgaaaaagctgccgagctagaacgacaagctgaacaggcacgcaaacaggaattggctaaacaggctgaaatagaaaaggctcgcaaggctgaagaagagcgcttacgtcaagaagaacaacgcagacaagaagaagaagctaaagcagaagaaacaagaaagcagcaagaacgacttgaagaattagctcgccaagctgaagaagaaaaacaagccgagctcgcccgacaagcagaagagcttgccgaattagcgaggcaagaggctgaattagctgagcaggccaaacgagaagcagaattagctgaattagccagacaagaagaagaactagccgaattagccagacaacaagcagaattagaagaattagaacgaaaagaaaaggaattggccgaacttgcagaaaaggcaagagaggaagctgaggctgctcaaagagaagctgacgaagctgctagacaacaacaagaagaagaggaacaactcgttgcaactactacagctgacgaggctgacaaagctgaggaagaattagctaagcagcaagctgaattagaagaattagctaaacaggaagaagaattggctgagttagaaagacagcaagctgaattagatgcactagaagcggaagcgaaagctcttgaagctgaaaatgagccacaacctgaacccgaagaagaagacgaagaaacacaaaagcaaagagaaatggacgaacttattcaacaaaaatatgaattagctgaattggaaagacagcaggctgagcttgatgctcttgaagcagaagccaaggcaatgttaggagatgacttggaacctgcaggtgcttacgatgatgaagacgagcctgcaatagctgaagatactccag

SEQ ID NO: 2575 - DNA, 2480 bp, Diabrotica virgifera
caacactaagagacgccgatctccgaattttctcgcctttttgcccctcgaaaatccgaaaaaatggtttatgaaagcgatttttacacgaccaggaggccctatcgtgccactccttccgtttcgtcttacactatttcgggtgtgccttctcgacaagtcagggtattgccgggattagggaaggttcacgtaacgtatacatacgaccgcatcgtaccgtacgtggggcacaagcggcttacggtcgtaacggcccctcccagagtatggggaacgcgaccaagtgttcttcagcgcgaattcgaccgtatcgagaacaaaatccgtccttggaccggttattccgcgactaatcgctacctcaactccaactccgctgtgagaacttactacgtaaattacccaataacaggatcagattactacgattactactactcgctcaattcaccctcaacgtattattctccaaggctatatagatggtactcttcttggccaagggaataccgtacatattggcccatgtacagaacctacctcagtagatatttgagaaactattaccaaaatctcgactggcccagttactactggtctacttatctaccctacaccaaaaacttggactacgaatttagcgatatcgaaaacaaaatcgataatcttcgaaaaacgatttacttggactacccctatccaatcaaggctgtggattatacttactacccgcaatcttacaaaagctacaccccgctttcgctctactatgactactactggcccctcagcagtcttaaccgctatagctcctactggccttactatccataccacagatacttgtactacaagtatactttgccttccgatagatattaccatttaaaaggaatattcgatgacgagacgagacttattcgcgctcaaacggcgtctctgttgaaacggattcatgacccggttcctcgtgtccaacgatacagctggcccgcggtcgctgcaaaatacgataatggtcttccggccagactacataacgacaactacatccaccggttgttagtgacctcgcctaactctaaaaccgaatacaccacctattacacggaacccgttaaaaaatatatcggcgacagagtatacagccgcaggccccacatctacctctacgaagatcccttgaagaatgacatccaacttttgagctactacatcaacaagttcaagcaggagaaagctattactgcaagcagtgagcctgctaaagctgccattgaatcctgctcgtgctacccgcaagtttactgcaaagagattggaagatgatgaggaagcagcaaaggaaatgcagaaacttcgagaggccagagctgcaagattggcgttcataaatgaggaggaaaagattgaaagatcgtcggtagcagtggatgatgcggtaaaagccaagaagaagaaagaggacgagaggttagcagaagaaaaggccttggcagaagaacaagcaaggcgagaggcccaaaccaagaaggaggaagctgcaagaaaagctgagttggctagacaagacgaacttgctgcacaagctgccgctgaaaaagctgccgagctagaacgacaagctgaacaggcacgcaaacaggaattggctaaacaggctgaaatagaaaaggctcgcaaggctgaagaagagcgcttacgtcaagaagaacaacgcagacaagaagaagaagctaaagcagaagaaacaagaaagcagcaagaacgacttgaagaattagctcgccaagctgaagaagaaaaacaagccgagctcgcccgacaagcagaagagcttgccgaattagcgaggcaagaggctgaattagctgagcaggccaaacgagaagcagaattagctgaattagccagacaagaagaagaactagccgaattagccagacaacaagcagaattagaagaattagaacgaaaagaaaaggaattggccgaacttgcagaaaaggcaagagaggaagctgaggctgctcaaagagaagctgacgaagctgctagacaacaacaagaagaagaggaacaactcgttgcaactactacagctgacgaggctgacaaagctgaggaagaattagctaagcagcaagctgaattagaagaattagctaaacaggaagaagaattggctgagttagaaagacagcaagctgaattagatgcactagaagcggaagcgaaagctcttgaagctgaaaatgagccacaacctgaacccgaagaagaagacgaagaaacacaaaagcaaagagaaatggacgaacttattcaacaaaaatatgaattagctgaattggaaagacagcaggctgagcttgatgctcttgaagcagaagccaaggcaatgttaggagatgacttggaacctgcaggtgcttacgatgatgaagacgagcctgcaatagctgaagatactccag

SEQ ID NO: 2576 - DNA, 2000 bp, Diabrotica virgifera
  SmartBlast Evalue=1E-12; Info=Fau n=1 Tax=Drosophila yakuba RepID=B4PLC9_DROYA
caacactaagagacgccgatctccgaattttctcgcctttttgcccctcgaaaatccgaaaaaatggtttatgaaagcgatttttacacgaccaggaggccctatcgtgccactccttccgtttcgtcttacactatttcgggtgtgccttctcgacaagtcagggtattgccgggattagggaaggttcacgtaacgtatacatacgaccgcatcgtaccgtacgtggggcacaagcggcttacggtcgtaacggcccctcccagagtatggggaacgcgaccaagtgttcttcagcgcgaattcgaccgtatcgagaacaaaatccgtccttggaccggttattccgcgactaatcgctacctcaactccaactccgctgtgatattcgatgacgagacgagacttattcgcgctcaaacggcgtctctgttgaaacggattcatgacccggttcctcgtgtccaacgatacagctggcccgcggtcgctgcaaaatacgataatggtcttccggccagactacataacgacaactacatccaccggttgttagtgacctcgcctaactctaaaaccgaatacaccacctattacacggaacccgttaaaaaatatatcggagccggtcatttagctgctgtttcctacgcaggcgacagagtatacagccgcaggccccacatctacctctacgaagatcccttgaagaatgacatccaacttttgagctactacatcaacaagttcaagcaggagaaagctattactgcaagcagtgagcctgctaaagctgccattgaatcctgctcgtgctacccgcaagtttactgcaaagagattggaagatgatgaggaagcagcaaaggaaatgcagaaacttcgagaggccagagctgcaagattggcgttcataaatgaggaggaaaagattgaaagatcgtcggtagcagtggatgatgcggtaaaagccaagaagaagaaagaggacgagaggttagcagaagaaaaggccttggcagaagaacaagcaaggcgagaggcccaaaccaagaaggaggaagctgcaagaaaagctgagttggctagacaagacgaacttgctgcacaagctgccgctgaaaaagctgccgagctagaacgacaagctgaacaggcacgcaaacaggaattggctaaacaggctgaaatagaaaaggctcgcaaggctgaagaagagcgcttacgtcaagaagaacaacgcagacaagaagaagaagctaaagcagaagaaacaagaaagcagcaagaacgacttgaagaattagctcgccaagctgaagaagaaaaacaagccgagctcgcccgacaagcagaagagcttgccgaattagcgaggcaagaggctgaattagctgagcaggccaaacgagaagcagaattagctgaattagccagacaagaagaagaactagccgaattagccagacaacaagcagaattagaagaattagaacgaaaagaaaaggaattggccgaacttgcagaaaaggcaagagaggaagctgaggctgctcaaagagaagctgacgaagctgctagacaacaacaagaagaagaggaacaactcgttgcaactactacagctgacgaggctgacaaagctgaggaagaattagctaagcagcaagctgaattagaagaattagctaaacaggaagaagaattggctgagttagaaagacagcaagctgaattagatgcactagaagcggaagcgaaagctcttgaagctgaaaatgagccacaacctgaacccgaagaagaagacgaagaaacacaaaagcaaagagaaatggacgaacttattcaacaaaaatatgaattagctgaattggaaagacagcaggctgagcttgatgctcttgaagcagaagccaaggcaatgttaggagatgacttggaacctgcaggtgcttacgatgatgaagacgagcctgcaatagctgaagatactccag

SEQ ID NO: 2577 - DNA, 1967 bp, Diabrotica virgifera
caacactaagagacgccgatctccgaattttctcgcctttttgcccctcgaaaatccgaaaaaatggtttatgaaagcgatttttacacgaccaggaggccctatcgtgccactccttccgtttcgtcttacactatttcgggtgtgccttctcgacaagtcagggtattgccgggattagggaaggttcacgtaacgtatacatacgaccgcatcgtaccgtacgtggggcacaagcggcttacggtcgtaacggcccctcccagagtatggggaacgcgaccaagtgttcttcagcgcgaattcgaccgtatcgagaacaaaatccgtccttggaccggttattccgcgactaatcgctacctcaactccaactccgctgtgatattcgatgacgagacgagacttattcgcgctcaaacggcgtctctgttgaaacggattcatgacccggttcctcgtgtccaacgatacagctggcccgcggtcgctgcaaaatacgataatggtcttccggccagactacataacgacaactacatccaccggttgttagtgacctcgcctaactctaaaaccgaatacaccacctattacacggaacccgttaaaaaatatatcggcgacagagtatacagccgcaggccccacatctacctctacgaagatcccttgaagaatgacatccaacttttgagctactacatcaacaagttcaagcaggagaaagctattactgcaagcagtgagcctgctaaagctgccattgaatcctgctcgtgctacccgcaagtttactgcaaagagattggaagatgatgaggaagcagcaaaggaaatgcagaaacttcgagaggccagagctgcaagattggcgttcataaatgaggaggaaaagattgaaagatcgtcggtagcagtggatgatgcggtaaaagccaagaagaagaaagaggacgagaggttagcagaagaaaaggccttggcagaagaacaagcaaggcgagaggcccaaaccaagaaggaggaagctgcaagaaaagctgagttggctagacaagacgaacttgctgcacaagctgccgctgaaaaagctgccgagctagaacgacaagctgaacaggcacgcaaacaggaattggctaaacaggctgaaatagaaaaggctcgcaaggctgaagaagagcgcttacgtcaagaagaacaacgcagacaagaagaagaagctaaagcagaagaaacaagaaagcagcaagaacgacttgaagaattagctcgccaagctgaagaagaaaaacaagccgagctcgcccgacaagcagaagagcttgccgaattagcgaggcaagaggctgaattagctgagcaggccaaacgagaagcagaattagctgaattagccagacaagaagaagaactagccgaattagccagacaacaagcagaattagaagaattagaacgaaaagaaaaggaattggccgaacttgcagaaaaggcaagagaggaagctgaggctgctcaaagagaagctgacgaagctgctagacaacaacaagaagaagaggaacaactcgttgcaactactacagctgacgaggctgacaaagctgaggaagaattagctaagcagcaagctgaattagaagaattagctaaacaggaagaagaattggctgagttagaaagacagcaagctgaattagatgcactagaagcggaagcgaaagctcttgaagctgaaaatgagccacaacctgaacccgaagaagaagacgaagaaacacaaaagcaaagagaaatggacgaacttattcaacaaaaatatgaattagctgaattggaaagacagcaggctgagcttgatgctcttgaagcagaagccaaggcaatgttaggagatgacttggaacctgcaggtgcttacgatgatgaagacgagcctgcaatagctgaagatactccag

SEQ ID NO: 2578 - DNA, 1634 bp, Diabrotica virgifera
  SmartBlast Evalue=0.000000006; Info=Fau n=1 Tax=Drosophila yakuba RepID=B4PLC9_DROYA
caacactaagagacgccgatctccgaattttctcgcctttttgcccctcgaaaatccgaaaaaatggtttatgaaagcgatttttacacgaccaggaggccctatcgtgccactccttccgtttcgtcttacactatttcgggtgtgccttctcgacaagtcagggtattgccgggattagggaaggttcacgtaacgtatacatacgaccgcatcgtaccgtacgtggggcacaagcggcttacggtcgtaacggcccctcccagagtatggggaacgcgaccaagtgttcttcagcgcgaattcgaccgtatcgagaacaaaatccgtccttggaccggttattccgcgactaatcgctacctcaactccaactccgctgtgagaacttactacgtaaattacccaataacaggatcagattactacgattactactactcgctcaattcaccctcaacgtattattctccaaggctatatagatggtactcttcttggccaagggaataccgtacatattggcccatgtacagaacctacctcagtagatatttgagaaactattaccaaaatctcgactggcccagttactactggtctacttatctaccctacaccaaaaacttggactacgaatttagcgatatcgaaaacaaaatcgataatcttcgaaaaacgatttacttggactacccctatccaatcaaggctgtggattatacttactacccgcaatcttacaaaagctacaccccgctttcgctctactatgactactactggcccctcagcagtcttaaccgctatagctcctactggccttactatccataccacagatacttgtactacaagtatactttgccttccgatagatattaccatttaaaaggaatattcgatgacgagacgagacttattcgcgctcaaacggcgtctctgttgaaacggattcatgacccggttcctcgtgtccaacgatacagctggcccgcggtcgctgcaaaatacgataatggtcttccggccagactacataacgacaactacatccaccggttgttagtgacctcgcctaactctaaaaccgaatacaccacctattacacggaacccgttaaaaaatatatcggagccggtcatttagctgctgtttcctacgcaggcgacagagtatacagccgcaggccccacatctacctctacgaagatcccttgaagaatgacatccaacttttgagctactacatcaacaagttcaagcaggagaaagctattactgcaagcagtgagcctgctaaagctgcaaaagttgagaaagctcagtctcctgagaaagaacaagagaagccagaaatcacagaaattaccgaataaccaaaacctctccgtctaataatttctactacctacattcttctttcctgctaatcttattttattaactgaatttaattatgtgcacataattgattgtattttttatatatagtttattttgaagagatgtactgccatgttgagttacgtacgtaaaacaaattatttttattgttatttttgcacagaagattgtgttttgtgagatggttatattttgggcactgtgttcaataaaatctattttgatt

SEQ ID NO: 2579 - DNA, 1601 bp, Diabrotica virgifera
caacactaagagacgccgatctccgaattttctcgcctttttgcccctcgaaaatccgaaaaaatggtttatgaaagcgatttttacacgaccaggaggccctatcgtgccactccttccgtttcgtcttacactatttcgggtgtgccttctcgacaagtcagggtattgccgggattagggaaggttcacgtaacgtatacatacgaccgcatcgtaccgtacgtggggcacaagcggcttacggtcgtaacggcccctcccagagtatggggaacgcgaccaagtgttcttcagcgcgaattcgaccgtatcgagaacaaaatccgtccttggaccggttattccgcgactaatcgctacctcaactccaactccgctgtgagaacttactacgtaaattacccaataacaggatcagattactacgattactactactcgctcaattcaccctcaacgtattattctccaaggctatatagatggtactcttcttggccaagggaataccgtacatattggcccatgtacagaacctacctcagtagatatttgagaaactattaccaaaatctcgactggcccagttactactggtctacttatctaccctacaccaaaaacttggactacgaatttagcgatatcgaaaacaaaatcgataatcttcgaaaaacgatttacttggactacccctatccaatcaaggctgtggattatacttactacccgcaatcttacaaaagctacaccccgctttcgctctactatgactactactggcccctcagcagtcttaaccgctatagctcctactggccttactatccataccacagatacttgtactacaagtatactttgccttccgatagatattaccatttaaaaggaatattcgatgacgagacgagacttattcgcgctcaaacggcgtctctgttgaaacggattcatgacccggttcctcgtgtccaacgatacagctggcccgcggtcgctgcaaaatacgataatggtcttccggccagactacataacgacaactacatccaccggttgttagtgacctcgcctaactctaaaaccgaatacaccacctattacacggaacccgttaaaaaatatatcggcgacagagtatacagccgcaggccccacatctacctctacgaagatcccttgaagaatgacatccaacttttgagctactacatcaacaagttcaagcaggagaaagctattactgcaagcagtgagcctgctaaagctgcaaaagttgagaaagctcagtctcctgagaaagaacaagagaagccagaaatcacagaaattaccgaataaccaaaacctctccgtctaataatttctactacctacattcttctttcctgctaatcttattttattaactgaatttaattatgtgcacataattgattgtattttttatatatagtttattttgaagagatgtactgccatgttgagttacgtacgtaaaacaaattatttttattgttatttttgcacagaagattgtgttttgtgagatggttatattttgggcactgtgttcaataaaatctattttgatt

SEQ ID NO: 2580 - DNA, 1121 bp, Diabrotica virgifera
  SmartBlast Evalue=6E-13; Info=Fau n=1 Tax=Drosophila yakuba RepID=B4PLC9_DROYA
caacactaagagacgccgatctccgaattttctcgcctttttgcccctcgaaaatccgaaaaaatggtttatgaaagcgatttttacacgaccaggaggccctatcgtgccactccttccgtttcgtcttacactatttcgggtgtgccttctcgacaagtcagggtattgccgggattagggaaggttcacgtaacgtatacatacgaccgcatcgtaccgtacgtggggcacaagcggcttacggtcgtaacggcccctcccagagtatggggaacgcgaccaagtgttcttcagcgcgaattcgaccgtatcgagaacaaaatccgtccttggaccggttattccgcgactaatcgctacctcaactccaactccgctgtgatattcgatgacgagacgagacttattcgcgctcaaacggcgtctctgttgaaacggattcatgacccggttcctcgtgtccaacgatacagctggcccgcggtcgctgcaaaatacgataatggtcttccggccagactacataacgacaactacatccaccggttgttagtgacctcgcctaactctaaaaccgaatacaccacctattacacggaacccgttaaaaaatatatcggagccggtcatttagctgctgtttcctacgcaggcgacagagtatacagccgcaggccccacatctacctctacgaagatcccttgaagaatgacatccaacttttgagctactacatcaacaagttcaagcaggagaaagctattactgcaagcagtgagcctgctaaagctgcaaaagttgagaaagctcagtctcctgagaaagaacaagagaagccagaaatcacagaaattaccgaataaccaaaacctctccgtctaataatttctactacctacattcttctttcctgctaatcttattttattaactgaatttaattatgtgcacataattgattgtattttttatatatagtttattttgaagagatgtactgccatgttgagttacgtacgtaaaacaaattatttttattgttatttttgcacagaagattgtgttttgtgagatggttatattttgggcactgtgttcaataaaatctattttgatt

SEQ ID NO: 2581 - DNA, 1088 bp, Diabrotica virgifera
caacactaagagacgccgatctccgaattttctcgcctttttgcccctcgaaaatccgaaaaaatggtttatgaaagcgatttttacacgaccaggaggccctatcgtgccactccttccgtttcgtcttacactatttcgggtgtgccttctcgacaagtcagggtattgccgggattagggaaggttcacgtaacgtatacatacgaccgcatcgtaccgtacgtggggcacaagcggcttacggtcgtaacggcccctcccagagtatggggaacgcgaccaagtgttcttcagcgcgaattcgaccgtatcgagaacaaaatccgtccttggaccggttattccgcgactaatcgctacctcaactccaactccgctgtgatattcgatgacgagacgagacttattcgcgctcaaacggcgtctctgttgaaacggattcatgacccggttcctcgtgtccaacgatacagctggcccgcggtcgctgcaaaatacgataatggtcttccggccagactacataacgacaactacatccaccggttgttagtgacctcgcctaactctaaaaccgaatacaccacctattacacggaacccgttaaaaaatatatcggcgacagagtatacagccgcaggccccacatctacctctacgaagatcccttgaagaatgacatccaacttttgagctactacatcaacaagttcaagcaggagaaagctattactgcaagcagtgagcctgctaaagctgcaaaagttgagaaagctcagtctcctgagaaagaacaagagaagccagaaatcacagaaattaccgaataaccaaaacctctccgtctaataatttctactacctacattcttctttcctgctaatcttattttattaactgaatttaattatgtgcacataattgattgtattttttatatatagtttattttgaagagatgtactgccatgttgagttacgtacgtaaaacaaattatttttattgttatttttgcacagaagattgtgttttgtgagatggttatattttgggcactgtgttcaataaaatctattttgatt

SEQ ID NO: 2582 - DNA, 3983 bp, Diabrotica virgifera
  SmartBlast Evalue=0; Info=Canalicular multispecific organic anion transporter 2 n=1 Tax=Culex quinquefasciatus RepID=B0W304_ CULQU
attatgtatcatttttatatacatttatcatttttttccattttatatagtgccacccgttttcaaatatctttacttaaattgaagttcatcatattatactcttcagttttgtttgagagtggcacattttgacatgttgacatacaagtcagtgcattgtccagacatttaagtattaacgaattcattaaactcaatatatcggcacatagaacttaataaaaagagtatataaaaagtaaataaaaagtgacgcaaaatgtaaattatagttaatacttttggcatcggcatattatagtataaaaatttgtaaaatggtaatcttgaacataagatatgcgccttagttagcagttatcgcattgagtaaaatataagactagagtttaaaattaattaaccttaatataattaacgttaaaataaatcaatgtaacatacttaatggcaacaaaatttctaacaatctaattgtttttgtactctttgatttagtaatttttactctggtaatgcatttagtttttgataactatctgaagcaatttttcttagctgttcagctgttgttctaccagtttcagcaaccatactgtaaaaaactccgttttattttgaaggagtaagtgagggtgatcaaattcagatatttgtccagcgtccataactaatactttatcagagtccatgattgtgttcagtctatgtgcgacggttatcacagtgcaatctgagaactttcttctgatagttttctggattaaagcgtcagtctgtggatctacattagccgtagcttcatccaacataagaactttgttatttttaagaatagctcttgccaagcaaatcaactgtctctgtccaacactgtaattggaacctctatccatgactctattttccaatcggttaataacattagcaggatcttttagttctacgtcttgtatagctttatacaaaacttcgtctgaatattcttcgaatgggtccaagttgtatcttaaagttcctgaaaatagcactgggtcttggggaataatcgagatttttaaacggagatcattgaggctaatgtctttggtgtcgatgtcatcgattttaattgaaccttcaattggggctagtctaaagagtgcctgaattaaggaagattttcctgcaccggttctgccaacaactccaaccttctccttgggttgaatgcttaggttaagatgtttcaaaaccaatggtcccccttcaaaataccttaaacatgtatctttaaaagtaatttctcctttctgtggccattctttcgcaggttttttaggaccgactggttgtggttctttgtctaaacttttgtattctaatattctctctacactcataagttgattggttacttcggcagattggcgcataccccattgtaaaaagtttgccagtgctgttgcttgagtaatcgccaaacctacttcacctcctcttaaattaaaagtttctccgaataacaataaacaaaaagtaagtactgctaaaaatattgtacagaaacaatccaagtaaaatccaaatgcagtactggaaactataaacatataccatgcacttgaatgatagtcttgatgatgatcaaattcgtccataagagtgctttgcgctccaaaggctcttatagttgtcagaccttcaattgtagctcttaaatgtgtaaaaactgggcttctcattattccttctaaccttttaatattcttagaggattttaaatatatatgtctcattacaccaaacactgcacttaaaactcctatcaaaattaagaagtaagggttaactacaataatcagtacaagagatccacacatagatagaagaatctgtgaagaatccaatattgctttaggcaataattcatcgacagctcccatatccttagaaaacctgttaagaattcttcctccaggatttgtgtcgaagaatctcattgtagcatcaataacattatcgaaaattgtgccatgaagttttttcgagctcaacatagccattttataaaagaagaaagaccttgtcatagcaaggacaaaaagagctcctaagataactgaatatatataaaggcaattatctgttgttaattcgatggatgggatgatgaacctaggtgcagtagaattcaaagattcagacgagtttctgaattcctctacattcacccagtaacttacccagtaatccgtcccactggcagctaactgagtaccgagatatagtagaacgcatatgaaaacagcaaatacattagaacctgctaacatgtatttaaataacaaagaaccgcccacttttcccttcgatgattgttcctgaaggtctttgacatcaaactctggttctttttcagcttcctcttcgtcaaagtcgacatcgtttgataaaagagtatccgcaatactcaattcacttattatacttgacattgaatcttttcgacttctttgtgatagttgcctagaatatttctgtctctctggtttcttctcttccttattttctggttcagctgttaagagttttgcgtacacattgtcactatttgccaaaaagttgaaagttccttcatcttcgatgcgaccattatttaaaataatgatgttgtcagcatccttcagatagtgtacttgatgggtaactaaaattctcgtcctgcttgccaaatagccattaatacattttcatataaatgtttggaaacatgtatatctacagcggataacggatcatccaagagatagacatctgcttctctatacactgctcttgctaaattaatcctagccttctgaccaccactcaaagatgatcctctatcacctacgagagttaaatctccatttggaaactgttcaaaatctttttctaaagaacaagcttgtataacttcctggtatctctttttatcatattcttcaccaaaaagaatgttttgacgaacagtggctgcaaatacccacggttcctgggagcataggagatttgaccttgtactctcatttcgccttgggtgatgtccagttcacctagtaaggtttgcaataaagaactctttccactacctacaggtccaataattcctatcaactgtccatcttgaacatttaaatttatattctcgagagcattgtcgctaaaacttaaattccattttacagttaaatttttcaaactgataatttccttaaaatcgtctacacttttgacattgccgttcataccagaagttgatctattgggatcgtactcttcgtttagaaggaaatctctgattctccgaacagctaccaaacattctgctatttctgatactcctctagtaaacatggtggacatagccattgaaataacgttgaagtaagacattacaacgaaaaccattgaggctgtgattggttcgttcgacaaaataacagtaagcaaagtacagaataacgccaatctagttgtgaacaggttcaatgccataaatgaagctctcacatacgcagattttgtaatgattttgatttcatttcgtctagcaatccgtatgaccttcctgaacggtatttcccatgcgtacattttgattacttgaattcctgagatgatttcgtccattagcctgactctctcgtctgttttcatagctgtctgttttctgtattttgcagatagctttccagtgtatgtttgaataggaactatcacaaaaaccgccacaaccccaactattccagcatatccagttctttggtataataaaaccattactataagtgacaatacaggtgcgatccatatttgatgaatgagtaaactgacgagatcaaatcgactgacatcgttggataggaggttgaccagtttccctgaagctgtttctcccaaggctgttttgctcaattttaaggactttctatatataacagcacaacaagctgctc

SEQ ID NO: 2583 - DNA, 3647 bp, Diabrotica virgifera
  SmartBlast Evalue=0; Info=Canalicular multispecific organic anion transporter 2 n=1 Tax=Culex quinquefasciatus RepID=B0W304_ CULQU
aaaatgtaagatatatttattattttttaaaaaacaattttatagtataaaaacattgtaaaaggacacttttttaagtacgaagtgaatttttaaatttggtttaatataatcattaaagattaatcaaagagtcttaattattcttaagtttacaaaatattcgttattactctggtagtgcttgtagtttttgataactatcggaagcaattttttttgagctgttcagctgttgctcttccagtttcacaaaccatgcttttaaaaaactccgttttattttgaaggagtaagtgagggtgatcaaattcagatatttgtccagcgtccataactaatactttatcagagtccatgattgtgttcagtctatgtgcgacggttatcacagtgcaatctgagaactttcttctgatagttttctggattaaagcgtcagtctgtggatctacattagccgtagcttcatccaacataagaactttgttatttttaagaatagctcttgccaagcaaatcaactgtctctgtccaacactgtaattggaacctctatccatgactctattttccaatcggttaataacattagcaggatcttttagttctacgtcttgtatagctttatacaaaacttcgtctgaatattcttcgaatgggtccaagttgtatcttaaagttcctgaaaatagcactgggtcttggggaataatcgagatttttaaacggagatcattgaggctaatgtctttggtgtcgatgtcatcgattttaattgaaccttcaattggggctagtctaaagagtgcctgaattaaggaagattttcctgcaccggttctgccaacaactccaaccttctccttgggttgaatgcttaggttaagatgtttcaaaaccaatggtcccccttcaaaataccttaaacatgtatctttaaaagtaatttctcctttctgtggccattctttcgcaggttttttaggaccgactggttgtggttctttgtctaaacttttgtattctaatattctctctacactcataagttgattggttacttcggcagattggcgcataccccattgtaaaaagtttgccagtgctgttgcttgagtaatcgccaaacctacttcacctcctcttaaattaaaagtttctccgaataacaataaacaaaaagtaagtactgctaaaaatattgtacagaaacaatccaagtaaaatccaaatgcagtactggaaactataaacatataccatgcacttgaatgatagtcttgatgatgatcaaattcgtccataagagtgctttgcgctccaaaggctcttatagttgtcagaccttcaattgtagctcttaaatgtgtaaaaactgggcttctcattattccttctaaccttttaatattcttagaggattttaaatatatatgtctcattacaccaaacactgcacttaaaactcctatcaaaattaagaagtaagggttaactacaataatcagtacaagagatccacacatagatagaagaatctgtgaagaatccaatattgctttaggcaataattcatcgacagctcccatatccttagaaaacctgttaagaattcttcctccaggatttgtgtcgaagaatctcattgtagcatcaataacattatcgaaaattgtgccatgaagttttttcgagctcaacatagccattttataaaagaagaaagaccttgtcatagcaaggacaaaaagagctcctaagataactgaatatatataaaggcaattatctgttgttaattcgatggatgggatgatgaacctaggtgcagtagaattcaaagattcagacgagtttctgaattcctctacattcacccagtaacttacccagtaatccgtcccactggcagctaactgagtaccgagatatagtagaacgcatatgaaaacagcaaatacattagaacctgctaacatgtatttaaataacaaagaaccgcccacttttcccttcgatgattgttcctgaaggtctttgacatcaaactctggttctttttcagcttcctcttcgtcaaagtcgacatcgtttgataaaagagtatccgcaatactcaattcacttattatacttgacattgaatcttttcgacttctttgtgatagttgcctagaatatttctgtctctctggtttcttctcttccttattttctggttcagctgttaagagttttgcgtacacattgtcactatttgccaaaaagttgaaagttccttcatcttcgatgcgaccattatttaaaataatgatgttgtcagcatccttcagatagtgtacttgatgggtaactaaaattctcgtcctgcttgccaaatagccattaatacattttcatataaatgtttggaaacatgtatatctacagcggataacggatcatccaagagatagacatctgcttctctatacactgctcttgctaaattaatcctagccttctgaccaccactcaaagatgatcctctatcacctacgagagttaaatctccatttggaaactgttcaaaatctttttctaaagaacaagcttgtataacttcctggtatctctttttatcatattcttcaccaaaaagaatgttttgacgaacagtggctgcaaatacccacggttcctgggagcataggagatttgaccttgtactctcatttcgccttgggtgatgtccagttcacctagtaaggtttgcaataaagaactctttccactacctacaggtccaataattcctatcaactgtccatcttgaacatttaaatttatattctcgagagcattgtcgctaaaacttaaattccattttacagttaaatttttcaaactgataatttccttaaaatcgtctacacttttgacattgccgttcataccagaagttgatctattgggatcgtactcttcgtttagaaggaaatctctgattctccgaacagctaccaaacattctgctatttctgatactcctctagtaaacatggtggacatagccattgaaataacgttgaagtaagacattacaacgaaaaccattgaggctgtgattggttcgttcgacaaaataacagtaagcaaagtacagaataacgccaatctagttgtgaacaggttcaatgccataaatgaagctctcacatacgcagattttgtaatgattttgatttcatttcgtctagcaatccgtatgaccttcctgaacggtatttcccatgcgtacattttgattacttgaattcctgagatgatttcgtccattagcctgactctctcgtctgttttcatagctgtctgttttctgtattttgcagatagctttccagtgtatgtttgaataggaactatcacaaaaaccgccacaaccccaactattccagcatatccagttctttggtataataaaaccattactataagtgacaatacaggtgcgatccatatttgatgaatgagtaaactgacgagatcaaatcgactgacatcgttggataggaggttgaccagtttccctgaagctgtttctcccaaggctgttttgctcaattttaaggactttctatatataacagcacaacaagctgctc

SEQ ID NO: 2584 - DNA, 5284 bp, Diabrotica virgifera
  SmartBlast Evalue=2E-96; Info=Ras-related protein Rab-7a n=4 Tax=Apocrita RepID=E2A0E7_9HYME
atttcacattcactcattcacataacaaataaacacggaaaaagaaacgccattttctggttgtcataggttgtacgcagttaaattttttgtgataaaacttagtgttcctttgttatcaattaacatatataaaaatagtaatggctagtcggaagaagactttgttgaaggtcatcatcctgggtgattccagtgtgggaaagacttccttgatgaaccagtacgtaaataggaaattctccaaccaatacaaagcgaccataggtgctgatttccttacaaaagaactcacagtggacgatcgaactgttacaatgcaaatatgggatactgcaggtcaggaaaggtttcagtccttaggtgtagccttttacagaggggcagactgctgtgtgttagtatttgatgtaacttcccccacctcattcaaatccctggacagttggcgagacgaattcctcatccaagcatcgccccgagagccagaaaacttcccattcgtcctcctaggaaacaaagtcgacctcgagccgagggcgatctcgcccaagagggcgcaacaatggtgccaatcaaagaacaacatcccctatttcgagacatcggccaaagatggcttgaacgtggaacaggcctttttggccatcgctaaaaacgctcttgcccaacagaacacaacggtcgatctctataacgaattccctgatgagatcaagctcacgaaggcacagaaaaccaacaccaacggtgatagttgcgcttgctagattaatttaatttctacatattcttcggtatttaagatggaaccgagagaccacggcataagtgtttagtattggttaatggactatctcataccccaagattttactcactggttactatcggttacagttctttccaaccttgaactataacagagattagcctctattgaaccacaccttgtatttcgattataataaaaaaagctactaattttccattttgtgataattaattatggcattaactatcaatgtacatataaacgtggtggtagaaaattgggtgtaaaaattattttacttcagtttattgcccgttgttagattctttttgatatgtgactaactaatggatgtatggacttgaatcttggctcgtttatttattttcagtatatcttccggggtgtatatttaaacgatcgttctattgaacaatacttacaatagggttaaaaccaacagtaacatggtccaaaagctttcatggcccaaaagtacttccttaatggtggatgagtaaatatatggattgcgtatacattattaggctacaaatgtatcactttaattgatattttgcaaacaatacaacgaattcgtgtactttacaatgtacagtccaattccttatttgtcgtaaatttaatatctattttgagaaattaaaaaaaaagaatatagactttgacaatcatcctagaagttattatcagttaaaaactggtcaatccagaccaatgaatagaaacaaaggtacatgctagtgtgactggatcgcaaaaaggcattagatagcttaggactgacttatttgtgtacaatcttcgtgtgttgatacatggaaagttaatacatgaaaatattaatacatgaaaatattaaaatcaacaatgaaaagaatttcctgtagtcagctttaaaccataattcacaaaaatttattaaaaatcatgtatcaaaggtatatttatattaaaaaagacatcacagaacgttttcgaaataattccatcaccagtgctgcttacgaggtatacatggttgagccactaaaaatatctgagtgaaaaccctttaaatggtataaaggtattataaaattaaattgttgtatttaatattatgtgatgtttgaacttttactttattttatatcacggcaacgcataactcacaactatgtgggtctatagctctggggaaacttcactgaatggatagatagcaactgatagaaaatattattccctttttggtccggcactactggtcgaactagtttgtggtcacttcctgtattgagatgataggattgtgactttgattattactatgtggtttgtgagtatgcaatcagtttcatccaatgtcttaaatatataattgatccactgaagcagctaatgtcattaagatagaagaacccaaaaaacagaaaatatttgtgaaaacctttacaatagaaactaacagagaaaaactgaataaactgtttgcacaggaataggttactgtttgctggatttttatatgtacatatgaaataatatgtgccttttgattttaacctcgattgtaaatttaaacacaattttaccattatagaatgtatataatcacctaaaatgtctttatatttttaatattataaactctatattttattttatttaatgtccgactggtatattatttgacaaataatcatttcgaagtcagttaagtatgatattataatattttgaaaaataacgccctagggcattaaatttaaataactagttaaatactgttaagttgacaaataacaacctaagtaaaactatggttaccacaattattacgttacgactattgctggtaaatgtacttatttgaaaactaattaattcaaaattcattcaaattttttgcatataaagaataatttagtcggacattaaacgttgaaggcaccacggtattataataataacgctttcggtcaacgtatatccctcggtccaaaggccctcggtatatgcaccattgacctcaagcgttattatccttataatacccttggtaccttaataactataagtacaagaagattccactataatattgttacaaattaagaaagtaacatattagatatattcaatcctttatatctctgaaaatattaaaaaagcatacatctgatttacaaaagaaataagttgtaaaaatgcataagctctcagctgtaaatgtttttttgtgtcctttagtattattccagtgtttttaatatatctcataatattggaatattttttaaagtttaattaagtaaaggaataaagtaaaaagagtcaaaagcatcaattaaaaaaaaaactcgtgtgatgacagctttaggcctaaatattgggtggtaaacctttttatccagtcattttattaatgcccgtaattgccccaaaactgttgtgatcatatcgtctaaatatacacccccttttacactgaaaacaatgttttgttctgagcttcagatgtgataagttttaatatgtagtgtaaaatatttaaaaaaaaagtctcacgaggatattgttttctttgcttatattagatctattcaccgcaatatttttaaatgtatataaaataaaaaatgatgttatttatattgtagatgccttaaagttatttctagaattttagtaatatttgtactaaatattaaaggcgagggttttgtaaaatcatctttcgttttatatgtagcaacgtaattttatataatgtctaatagatcttctataagaacgtggaaacaaaaaaagtatatatgataggagctacctacatatatgtagtcagctgtaaacatctatatttggacatacgttcccccatttagctgtattttggagagattggacatcataaaaaaatatattatcaatataatcgtacatgaatggattaaaattttaacttcaattaattatttattgtcccttctccttatacagtgatgagcgcgctaatgaccggaaaattgacgcaaaagatcgaaaacatattaagttgtgagatggaaatatgaaactattagaggtgagaaatttagcaatagaaacgtgtaaattggtgtttcccacctttagacatatcggacgagtttgacaactaaccctgtgacagtgacagtttttttttggcttcgactatattcattcagccagtctcaatcaaaagtaaatgtattaaagatattgccaattagtgaaacatggttattataataatattacaattttttacttcttattttacctactcattacagctaatatacatactatgttaataaatattatattgtttatcaagaaatttattatacttaatgtttatcaagaacacagtgtatacattttacaaataaaaatattaatatttaaaataaatgcattctgttttgtattttttttttgttttgtttttgtcactacggtaagatgttaacccggttcaacccctcggaggtttaaatcctcttagtgatttttttctttaaaaatttttttatttttttttaacatattttacaaatacctgtaactaattacaataatattttactatccgacaagaaagataccaaacagtcaaaaattttctttttattcagtgacagaataaagagaatatttacagggacatatttacagttgacatactcctatcctctgataagtctaaaggtcggaaacaatcaatataaagtaaatttatacgtttctatcgctaaatttctcacctctactagtttcatctctttttatctcataacttaatatgtttttcaccttttgcgttattttgccggtgattagcatgctcatcactggagacctagactagaaaagacaaaactcgcgaatccatcaccgtcattcgtcatactactatatttgtttgatatatttcgttatataaggaaaaggggcttaatttcatagttttgtaagtagaaaagagaatcaatatcaaaaataattcgtgaataacgctataattgtacaaacatccaattggcgtactataccaacataattttctatttaatggtgaacgctgataaattttttattctcacgttcttatttctactctaattactaacagatagcaatttaagtggtcttataatatacatttgtatagagatggagttgacaacatttaacctcctatgacagttaaatagagcagatatatatttttcaagttccctcgtgtttagagacactatttaattttctgttagtaacattcatatcacagttttttctattggtttaagtagattagaaaatttacagtagaatgtcagtttcaaagagttttctttacggactaacaaaaaaaaacactccctaatttgaattgttaagtaaatattgtttgttttattgtagtatgttataaaaattgtatattgcaggaattcataaaataaatataac

SEQ ID NO: 2585 - DNA, 4933 bp, Diabrotica virgifera
  SmartBlast Evalue=2E-96; Info=Ras-related protein Rab-7a n=4 Tax=Apocrita RepID=E2A0E7_9HYME
atttcacattcactcattcacataacaaataaacacggaaaaagaaacgccattttctggttgtcataggttgtacgcagttaaattttttgtgataaaacttagtgttcctttgttatcaattaacatatataaaaatagtaatggctagtcggaagaagactttgttgaaggtcatcatcctgggtgattccagtgtgggaaagacttccttgatgaaccagtacgtaaataggaaattctccaaccaatacaaagcgaccataggtgctgatttccttacaaaagaactcacagtggacgatcgaactgttacaatgcaaatatgggatactgcaggtcaggaaaggtttcagtccttaggtgtagccttttacagaggggcagactgctgtgtgttagtatttgatgtaacttcccccacctcattcaaatccctggacagttggcgagacgaattcctcatccaagcatcgccccgagagccagaaaacttcccattcgtcctcctaggaaacaaagtcgacctcgagccgagggcgatctcgcccaagagggcgcaacaatggtgccaatcaaagaacaacatcccctatttcgagacatcggccaaagatggcttgaacgtggaacaggcctttttggccatcgctaaaaacgctcttgcccaacagaacacaacggtcgatctctataacgaattccctgatgagatcaagctcacgaaggcacagaaaaccaacaccaacggtgatagttgcgcttgctagattaatttaatttctacatattcttcggtatttaagatggaaccgagagaccacggcataagtgtttagtattggttaatggactatctcataccccaagattttactcactggttactatcggttacagttctttccaaccttgaactataacagagattagcctctattgaaccacaccttgtatttcgattataataaaaaaagctactaattttccattttgtgataattaattatggcattaactatcaatgtacatataaacgtggtggtagaaaattgggtgtaaaaattattttacttcagtttattgcccgttgttagattctttttgatatgtgactaactaatggatgtatggacttgaatcttggctcgtttatttattttcagtatatcttccggggtgtatatttaaacgatcgttctattgaacaatacttacaatagggttaaaaccaacagtaacatggtccaaaagctttcatggcccaaaagtacttccttaatggtggatgagtaaatatatggattgcgtatacattattaggctacaaatgtatcactttaattgatattttgcaaacaatacaacgaattcgtgtactttacaatgtacagtccaattccttatttgtcgtaaatttaatatctattttgagaaattaaaaaaaaagaatatagactttgacaatcatcctagaagttattatcagttaaaaactggtcaatccagaccaatgaatagaaacaaaggtacatgctagtgtgactggatcgcaaaaaggcattagatagcttaggactgacttatttgtgtacaatcttcgtgtgttgatacatggaaagttaatacatgaaaatattaatacatgaaaatattaaaatcaacaatgaaaagaatttcctgtagtcagctttaaaccataattcacaaaaatttattaaaaatcatgtatcaaaggtatatttatattaaaaaagacatcacagaacgttttcgaaataattccatcaccagtgctgcttacgaggtatacatggttgagccactaaaaatatctgagtgaaaaccctttaaatggtataaaggtattataaaattaaattgttgtatttaatattatgtgatgtttgaacttttactttattttatatcacggcaacgcataactcacaactatgtgggtctatagctctggggaaacttcactgaatggatagatagcaactgatagaaaatattattccctttttggtccggcactactggtcgaactagtttgtggtcacttcctgtattgagatgataggattgtgactttgattattactatgtggtttgtgagtatgcaatcagtttcatccaatgtcttaaatatataattgatccactgaagcagctaatgtcattaagatagaagaacccaaaaaacagaaaatatttgtgaaaacctttacaatagaaactaacagagaaaaactgaataaactgtttgcacaggaataggttactgtttgctggatttttatatgtacatatgaaataatatgtgccttttgattttaacctcgattgtaaatttaaacacaattttaccattatagaatgtatataatcacctaaaatgtctttatatttttaatattataaactctatattttattttatttaatgtccgactggtatattatttgacaaataatcatttcgaagtcagttaagtatgatattataatattttgaaaaataacgccctagggcattaaatttaaataactagttaaatactgttaagttgacaaataacaacctaagtaaaactatggttaccacaattattacgttacgactattgctggtaaatgtacttatttgaaaactaattaattcaaaattcattcaaattttttgcatataaagaataatttagtcggacattaaacgttgaaggcaccacggtattataataataacgctttcggtcaacgtatatccctcggtccaaaggccctcggtatatgcaccattgacctcaagcgttattatccttataatacccttggtaccttaataactataagtacaagaagattccactataatattgttacaaattaagaaagtaacatattagatatattcaatcctttatatctctgaaaatattaaaaaagcatacatctgatttacaaaagaaataagttgtaaaaatgcataagctctcagctgtaaatgtttttttgtgtcctttagtattattccagtgtttttaatatatctcataatattggaatattttttaaagtttaattaagtaaaggaataaagtaaaaagagtcaaaagcatcaattaaaaaaaaaactcgtgtgatgacagctttaggcctaaatattgggtggtaaacctttttatccagtcattttattaatgcccgtaattgccccaaaactgttgtgatcatatcgtctaaatatacacccccttttacactgaaaacaatgttttgttctgagcttcagatgtgataagttttaatatgtagtgtaaaatatttaaaaaaaaagtctcacgaggatattgttttctttgcttatattagatctattcaccgcaatatttttaaatgtatataaaataaaaaatgatgttatttatattgtagatgccttaaagttatttctagaattttagtaatatttgtactaaatattaaaggcgagggttttgtaaaatcatctttcgttttatatgtagcaacgtaattttatataatgtctaatagatcttctataagaacgtggaaacaaaaaaagtatatatgataggagctacctacatatatgtagtcagctgtaaacatctatatttggacatacgttcccccatttagctgtattttggagagattggacatcataaaaaaatatattatcaatataatcgtacatgaatggattaaaattttaacttcaattaattatttattgtcccttctccttatacagtgatgagcgcgctaatgaccggaaaattgacgcaaaagatcgaaaacatattaagttgtgagatggaaatatgaaactattagaggtgagaaatttagcaatagaaacgtgtaaattggtgtttcccacctttagacatatcggacgagtttgacaactaaccctgtgacagtgacagtttttttttggcttcgactatattcattcagccagtctcaatcaaaagtaaatgtattaaagatattgccaattagtgaaacatggttattataataatattacaattttttacttcttattttacctactcattacagctaatatacatactatgttaataaatattatattgtttatcaagaaatttattatacttaatgtttatcaagaacacagtgtatacattttacaaataaaaatattaatatttaaaataaatgcattctgttttgtattttttttttgttttgtttttgtcactacggtaagatgttaacccggttcaacccctcggaggtttaaatcctcttagtgatttttttctttaaaaatttttttatttttttttaacatattttacaaatacctgtaactaattacaataatattttactatccgacaagaaagataccaaacagtcaaaaattttctttttattcagtgacagaataaagagaatatttacagggagtgggatgttctggtctataattcttttaattaggtgattggttaggtgtttatgctttttgcattcaaaaaatatgtggttcaagtcacttttaacctcacattcttgacaaatattcgaatctaatatgtttattttaaataaatgtgcaggataacatgcatgtccaaatctaattctactaatggtggatatgtatttgcgagggagggtgaaattcttataccaaggttttccggaataatcggttgtatcaaactgtattgtgttgttgatatgttacagtacctttcccagtgtgttttccagctcttcatctgttcagatcttaagcaagcaaaagcatctagaatgcagggctgacatttggttactgtttcatggatgagggaatttttagctaattggtctctatgctcattatgtgtaagtcctgaatgtgctttgatccacataa

SEQ ID NO: 2586 - DNA, 4724 bp, Diabrotica virgifera
  SmartBlast Evalue=2E-96; Info=Ras-related protein Rab-7a n=4 Tax=Apocrita RepID=E2A0E7_9HYME
atttcacattcactcattcacataacaaataaacacggaaaaagaaacgccattttctggttgtcataggttgtacgcagttaaattttttgtgataaaacttagtgttcctttgttatcaattaacatatataaaaatagtaatggctagtcggaagaagactttgttgaaggtcatcatcctgggtgattccagtgtgggaaagacttccttgatgaaccagtacgtaaataggaaattctccaaccaatacaaagcgaccataggtgctgatttccttacaaaagaactcacagtggacgatcgaactgttacaatgcaaatatgggatactgcaggtcaggaaaggtttcagtccttaggtgtagccttttacagaggggcagactgctgtgtgttagtatttgatgtaacttcccccacctcattcaaatccctggacagttggcgagacgaattcctcatccaagcatcgccccgagagccagaaaacttcccattcgtcctcctaggaaacaaagtcgacctcgagccgagggcgatctcgcccaagagggcgcaacaatggtgccaatcaaagaacaacatcccctatttcgagacatcggccaaagatggcttgaacgtggaacaggcctttttggccatcgctaaaaacgctcttgcccaacagaacacaacggtcgatctctataacgaattccctgatgagatcaagctcacgaaggcacagaaaaccaacaccaacggtgatagttgcgcttgctagattaatttaatttctacatattcttcggtatttaagatggaaccgagagaccacggcataagtgtttagtattggttaatggactatctcataccccaagattttactcactggttactatcggttacagttctttccaaccttgaactataacagagattagcctctattgaaccacaccttgtatttcgattataataaaaaaagctactaattttccattttgtgataattaattatggcattaactatcaatgtacatataaacgtggtggtagaaaattgggtgtaaaaattattttacttcagtttattgcccgttgttagattctttttgatatgtgactaactaatggatgtatggacttgaatcttggctcgtttatttattttcagtatatcttccggggtgtatatttaaacgatcgttctattgaacaatacttacaatagggttaaaaccaacagtaacatggtccaaaagctttcatggcccaaaagtacttccttaatggtggatgagtaaatatatggattgcgtatacattattaggctacaaatgtatcactttaattgatattttgcaaacaatacaacgaattcgtgtactttacaatgtacagtccaattccttatttgtcgtaaatttaatatctattttgagaaattaaaaaaaaagaatatagactttgacaatcatcctagaagttattatcagttaaaaactggtcaatccagaccaatgaatagaaacaaaggtacatgctagtgtgactggatcgcaaaaaggcattagatagcttaggactgacttatttgtgtacaatcttcgtgtgttgatacatggaaagttaatacatgaaaatattaatacatgaaaatattaaaatcaacaatgaaaagaatttcctgtagtcagctttaaaccataattcacaaaaatttattaaaaatcatgtatcaaaggtatatttatattaaaaaagacatcacagaacgttttcgaaataattccatcaccagtgctgcttacgaggtatacatggttgagccactaaaaatatctgagtgaaaaccctttaaatggtataaaggtattataaaattaaattgttgtatttaatattatgtgatgtttgaacttttactttattttatatcacggcaacgcataactcacaactatgtgggtctatagctctggggaaacttcactgaatggatagatagcaactgatagaaaatattattccctttttggtccggcactactggtcgaactagtttgtggtcacttcctgtattgagatgataggattgtgactttgattattactatgtggtttgtgagtatgcaatcagtttcatccaatgtcttaaatatataattgatccactgaagcagctaatgtcattaagatagaagaacccaaaaaacagaaaatatttgtgaaaacctttacaatagaaactaacagagaaaaactgaataaactgtttgcacaggaataggttactgtttgctggatttttatatgtacatatgaaataatatgtgccttttgattttaacctcgattgtaaatttaaacacaattttaccattatagaatgtatataatcacctaaaatgtctttatatttttaatattataaactctatattttattttatttaatgtccgactggtatattatttgacaaataatcatttcgaagtcagttaagtatgatattataatattttgaaaaataacgccctagggcattaaatttaaataactagttaaatactgttaagttgacaaataacaacctaagtaaaactatggttaccacaattattacgttacgactattgctggtaaatgtacttatttgaaaactaattaattcaaaattcattcaaattttttgcatataaagaataatttagtcggacattaaacgttgaaggcaccacggtattataataataacgctttcggtcaacgtatatccctcggtccaaaggccctcggtatatgcaccattgacctcaagcgttattatccttataatacccttggtaccttaataactataagtacaagaagattccactataatattgttacaaattaagaaagtaacatattagatatattcaatcctttatatctctgaaaatattaaaaaagcatacatctgatttacaaaagaaataagttgtaaaaatgcataagctctcagctgtaaatgtttttttgtgtcctttagtattattccagtgtttttaatatatctcataatattggaatattttttaaagtttaattaagtaaaggaataaagtaaaaagagtcaaaagcatcaattaaaaaaaaaactcgtgtgatgacagctttaggcctaaatattgggtggtaaacctttttatccagtcattttattaatgcccgtaattgccccaaaactgttgtgatcatatcgtctaaatatacacccccttttacactgaaaacaatgttttgttctgagcttcagatgtgataagttttaatatgtagtgtaaaatatttaaaaaaaaagtctcacgaggatattgttttctttgcttatattagatctattcaccgcaatatttttaaatgtatataaaataaaaaatgatgttatttatattgtagatgccttaaagttatttctagaattttagtaatatttgtactaaatattaaaggcgagggttttgtaaaatcatctttcgttttatatgtagcaacgtaattttatataatgtctaatagatcttctataagaacgtggaaacaaaaaaagtatatatgataggagctacctacatatatgtagtcagctgtaaacatctatatttggacatacgttcccccatttagctgtattttggagagattggacatcataaaaaaatatattatcaatataatcgtacatgaatggattaaaattttaacttcaattaattatttattgtcccttctccttatacagtgatgagcgcgctaatgaccggaaaattgacgcaaaagatcgaaaacatattaagttgtgagatggaaatatgaaactattagaggtgagaaatttagcaatagaaacgtgtaaattggtgtttcccacctttagacatatcggacgagtttgacaactaaccctgtgacagtgacagtttttttttggcttcgactatattcattcagccagtctcaatcaaaagtaaatgtattaaagatattgccaattagtgaaacatggttattataataatattacaattttttacttcttattttacctactcattacagctaatatacatactatgttaataaatattatattgtttatcaagaaatttattatacttaatgtttatcaagaacacagtgtatacattttacaaataaaaatattaatatttaaaataaatgcattctgttttgtattttttttttgttttgtttttgtcactacggtaagatgttaacccggttcaacccctcggaggtttaaatcctcttagtgatttttttctttaaaaatttttttatttttttttaacatattttacaaatacctgtaactaattacaataatattttactatccgacaagaaagataccaaacagtcaaaaattttctttttattcagtgacagaataaagagaatatttacagggagtgggatgttctggtctataattcttttaattaggtgattggttaggtgtttatgctttttgcattcttcttcttcttcttcctttattgggttatatccctcgggataattcgcccagcttacaccagggaaatactcttgtcttgctctgggcagtcgaatattccaaatatatatgttaaagcctcaatttttttttttaatatatattagcaggaacatcttcgtatagggccagacagtcccta

SEQ ID NO: 2587 - DNA, 3051 bp, Diabrotica virgifera
ttttggtaaaatgttgtaacttatagacgaaaattcttaaaatcggaaaaaaataaataaattgagaaaaaaattggtcagatttacataaattttgttattctatccatatagaaattaaaacaattgttacatactatagtagttggactgagtgtcataaaaaccttgtatttttactcatttctttgggctctttttagttttatttttacataagttgttaacgttaatgtccgactggtatattatttgacaaataatgacatgatttcgaagtcagttaagaatgatataatgccctagagcattaaatttaaataactagttaattactgtcaagttgacaaataacaacctaagtaaaactatggttaccacaattacgttacgactattgctggtaaatgtacttatttgaaaactaattaattcaaaattcattcaaattttttgcatataaagaataatttagtcggacattaaacgttgaaggcaccacggtattataataataacgctttcggtcaacgtatatccctcggtccaaaggccctcggtatatgcaccattgacctcaagcgttattatccttataatacccttggtaccttaataactataagtacaagaagattccactataatattgttacaaattaagaaagtaacatattagatatattcaatcctttatatctctgaaaatattaaaaaagcatacatctgatttacaaaagaaataagttgtaaaaatgcataagctctcagctgtaaatgtttttttgtgtcctttagtattattccagtgtttttaatatatctcataatattggaatattttttaaagtttaattaagtaaaggaataaagtaaaaagagtcaaaagcatcaattaaaaaaaaaactcgtgtgatgacagctttaggcctaaatattgggtggtaaacctttttatccagtcattttattaatgcccgtaattgccccaaaactgttgtgatcatatcgtctaaatatacacccccttttacactgaaaacaatgttttgttctgagcttcagatgtgataagttttaatatgtagtgtaaaatatttaaaaaaaaagtctcacgaggatattgttttctttgcttatattagatctattcaccgcaatatttttaaatgtatataaaataaaaaatgatgttatttatattgtagatgccttaaagttatttctagaattttagtaatatttgtactaaatattaaaggcgagggttttgtaaaatcatctttcgttttatatgtagcaacgtaattttatataatgtctaatagatcttctataagaacgtggaaacaaaaaaagtatatatgataggagctacctacatatatgtagtcagctgtaaacatctatatttggacatacgttcccccatttagctgtattttggagagattggacatcataaaaaaatatattatcaatataatcgtacatgaatggattaaaattttaacttcaattaattatttattgtcccttctccttatacagtgatgagcgcgctaatgaccggaaaattgacgcaaaagatcgaaaacatattaagttgtgagatggaaatatgaaactattagaggtgagaaatttagcaatagaaacgtgtaaattggtgtttcccacctttagacatatcggacgagtttgacaactaaccctgtgacagtgacagtttttttttggcttcgactatattcattcagccagtctcaatcaaaagtaaatgtattaaagatattgccaattagtgaaacatggttattataataatattacaattttttacttcttattttacctactcattacagctaatatacatactatgttaataaatattatattgtttatcaagaaatttattatacttaatgtttatcaagaacacagtgtatacattttacaaataaaaatattaatatttaaaataaatgcattctgttttgtattttttttttgttttgtttttgtcactacggtaagatgttaacccggttcaacccctcggaggtttaaatcctcttagtgatttttttctttaaaaatttttttatttttttttaacatattttacaaatacctgtaactaattacaataatattttactatccgacaagaaagataccaaacagtcaaaaattttctttttattcagtgacagaataaagagaatatttacagggacatatttacagttgacatactcctatcctctgataagtctaaaggtcggaaacaatcaatataaagtaaatttatacgtttctatcgctaaatttctcacctctactagtttcatctctttttatctcataacttaatatgtttttcaccttttgcgttattttgccggtgattagcatgctcatcactggagacctagactagaaaagacaaaactcgcgaatccatcaccgtcattcgtcatactactatatttgtttgatatatttcgttatataaggaaaaggggcttaatttcatagttttgtaagtagaaaagagaatcaatatcaaaaataattcgtgaataacgctataattgtacaaacatccaattggcgtactataccaacataattttctatttaatggtgaacgctgataaattttttattctcacgttcttatttctactctaattactaacagatagcaatttaagtggtcttataatatacatttgtatagagatggagttgacaacatttaacctcctatgacagttaaatagagcagatatatatttttcaagttccctcgtgtttagagacactatttaattttctgttagtaacattcatatcacagttttttctattggtttaagtagattagaaaatttacagtagaatgtcagtttcaaagagttttctttacggactaacaaaaaaaaacactccctaatttgaattgttaagtaaatattgtttgttttattgtagtatgttataaaaattgtatattgcaggaattcataaaataaatataac

SEQ ID NO: 2588 - DNA, 2700 bp, Diabrotica virgifera
ttttggtaaaatgttgtaacttatagacgaaaattcttaaaatcggaaaaaaataaataaattgagaaaaaaattggtcagatttacataaattttgttattctatccatatagaaattaaaacaattgttacatactatagtagttggactgagtgtcataaaaaccttgtatttttactcatttctttgggctctttttagttttatttttacataagttgttaacgttaatgtccgactggtatattatttgacaaataatgacatgatttcgaagtcagttaagaatgatataatgccctagagcattaaatttaaataactagttaattactgtcaagttgacaaataacaacctaagtaaaactatggttaccacaattacgttacgactattgctggtaaatgtacttatttgaaaactaattaattcaaaattcattcaaattttttgcatataaagaataatttagtcggacattaaacgttgaaggcaccacggtattataataataacgctttcggtcaacgtatatccctcggtccaaaggccctcggtatatgcaccattgacctcaagcgttattatccttataatacccttggtaccttaataactataagtacaagaagattccactataatattgttacaaattaagaaagtaacatattagatatattcaatcctttatatctctgaaaatattaaaaaagcatacatctgatttacaaaagaaataagttgtaaaaatgcataagctctcagctgtaaatgtttttttgtgtcctttagtattattccagtgtttttaatatatctcataatattggaatattttttaaagtttaattaagtaaaggaataaagtaaaaagagtcaaaagcatcaattaaaaaaaaaactcgtgtgatgacagctttaggcctaaatattgggtggtaaacctttttatccagtcattttattaatgcccgtaattgccccaaaactgttgtgatcatatcgtctaaatatacacccccttttacactgaaaacaatgttttgttctgagcttcagatgtgataagttttaatatgtagtgtaaaatatttaaaaaaaaagtctcacgaggatattgttttctttgcttatattagatctattcaccgcaatatttttaaatgtatataaaataaaaaatgatgttatttatattgtagatgccttaaagttatttctagaattttagtaatatttgtactaaatattaaaggcgagggttttgtaaaatcatctttcgttttatatgtagcaacgtaattttatataatgtctaatagatcttctataagaacgtggaaacaaaaaaagtatatatgataggagctacctacatatatgtagtcagctgtaaacatctatatttggacatacgttcccccatttagctgtattttggagagattggacatcataaaaaaatatattatcaatataatcgtacatgaatggattaaaattttaacttcaattaattatttattgtcccttctccttatacagtgatgagcgcgctaatgaccggaaaattgacgcaaaagatcgaaaacatattaagttgtgagatggaaatatgaaactattagaggtgagaaatttagcaatagaaacgtgtaaattggtgtttcccacctttagacatatcggacgagtttgacaactaaccctgtgacagtgacagtttttttttggcttcgactatattcattcagccagtctcaatcaaaagtaaatgtattaaagatattgccaattagtgaaacatggttattataataatattacaattttttacttcttattttacctactcattacagctaatatacatactatgttaataaatattatattgtttatcaagaaatttattatacttaatgtttatcaagaacacagtgtatacattttacaaataaaaatattaatatttaaaataaatgcattctgttttgtattttttttttgttttgtttttgtcactacggtaagatgttaacccggttcaacccctcggaggtttaaatcctcttagtgatttttttctttaaaaatttttttatttttttttaacatattttacaaatacctgtaactaattacaataatattttactatccgacaagaaagataccaaacagtcaaaaattttctttttattcagtgacagaataaagagaatatttacagggagtgggatgttctggtctataattcttttaattaggtgattggttaggtgtttatgctttttgcattcaaaaaatatgtggttcaagtcacttttaacctcacattcttgacaaatattcgaatctaatatgtttattttaaataaatgtgcaggataacatgcatgtccaaatctaattctactaatggtggatatgtatttgcgagggagggtgaaattcttataccaaggttttccggaataatcggttgtatcaaactgtattgtgttgttgatatgttacagtacctttcccagtgtgttttccagctcttcatctgttcagatcttaagcaagcaaaagcatctagaatgcagggctgacatttggttactgtttcatggatgagggaatttttagctaattggtctctatgctcattatgtgtaagtcctgaatgtgctttgatccacataa

SEQ ID NO: 2589 - DNA, 2491 bp, Diabrotica virgifera
ttttggtaaaatgttgtaacttatagacgaaaattcttaaaatcggaaaaaaataaataaattgagaaaaaaattggtcagatttacataaattttgttattctatccatatagaaattaaaacaattgttacatactatagtagttggactgagtgtcataaaaaccttgtatttttactcatttctttgggctctttttagttttatttttacataagttgttaacgttaatgtccgactggtatattatttgacaaataatgacatgatttcgaagtcagttaagaatgatataatgccctagagcattaaatttaaataactagttaattactgtcaagttgacaaataacaacctaagtaaaactatggttaccacaattacgttacgactattgctggtaaatgtacttatttgaaaactaattaattcaaaattcattcaaattttttgcatataaagaataatttagtcggacattaaacgttgaaggcaccacggtattataataataacgctttcggtcaacgtatatccctcggtccaaaggccctcggtatatgcaccattgacctcaagcgttattatccttataatacccttggtaccttaataactataagtacaagaagattccactataatattgttacaaattaagaaagtaacatattagatatattcaatcctttatatctctgaaaatattaaaaaagcatacatctgatttacaaaagaaataagttgtaaaaatgcataagctctcagctgtaaatgtttttttgtgtcctttagtattattccagtgtttttaatatatctcataatattggaatattttttaaagtttaattaagtaaaggaataaagtaaaaagagtcaaaagcatcaattaaaaaaaaaactcgtgtgatgacagctttaggcctaaatattgggtggtaaacctttttatccagtcattttattaatgcccgtaattgccccaaaactgttgtgatcatatcgtctaaatatacacccccttttacactgaaaacaatgttttgttctgagcttcagatgtgataagttttaatatgtagtgtaaaatatttaaaaaaaaagtctcacgaggatattgttttctttgcttatattagatctattcaccgcaatatttttaaatgtatataaaataaaaaatgatgttatttatattgtagatgccttaaagttatttctagaattttagtaatatttgtactaaatattaaaggcgagggttttgtaaaatcatctttcgttttatatgtagcaacgtaattttatataatgtctaatagatcttctataagaacgtggaaacaaaaaaagtatatatgataggagctacctacatatatgtagtcagctgtaaacatctatatttggacatacgttcccccatttagctgtattttggagagattggacatcataaaaaaatatattatcaatataatcgtacatgaatggattaaaattttaacttcaattaattatttattgtcccttctccttatacagtgatgagcgcgctaatgaccggaaaattgacgcaaaagatcgaaaacatattaagttgtgagatggaaatatgaaactattagaggtgagaaatttagcaatagaaacgtgtaaattggtgtttcccacctttagacatatcggacgagtttgacaactaaccctgtgacagtgacagtttttttttggcttcgactatattcattcagccagtctcaatcaaaagtaaatgtattaaagatattgccaattagtgaaacatggttattataataatattacaattttttacttcttattttacctactcattacagctaatatacatactatgttaataaatattatattgtttatcaagaaatttattatacttaatgtttatcaagaacacagtgtatacattttacaaataaaaatattaatatttaaaataaatgcattctgttttgtattttttttttgttttgtttttgtcactacggtaagatgttaacccggttcaacccctcggaggtttaaatcctcttagtgatttttttctttaaaaatttttttatttttttttaacatattttacaaatacctgtaactaattacaataatattttactatccgacaagaaagataccaaacagtcaaaaattttctttttattcagtgacagaataaagagaatatttacagggagtgggatgttctggtctataattcttttaattaggtgattggttaggtgtttatgctttttgcattcttcttcttcttcttcctttattgggttatatccctcgggataattcgcccagcttacaccagggaaatactcttgtcttgctctgggcagtcgaatattccaaatatatatgttaaagcctcaatttttttttttaatatatattagcaggaacatcttcgtatagggccagacagtcccta

SEQ ID NO: 2590 - DNA, 3764 bp, Diabrotica virgifera
  SmartBlast Evalue=5E-40; Info=Kinectin n=1 Tax=Harpegnathos saltator RepID=E2B375_9HYME
aaaaactacagctcttcaaacgtactgaagatatctaatacggtaccatgttgaagggacataccaaatgtagtcaaatggtttgtcagctgttctggagttattggataagatattatcttcaaaaggtgtagcccaatatggaaacctttttggatcggacttatgccaaattgttaatgttgaaagaagatgaaggggaagtacccaaaaactacatatcttcaaatgaactgaagaaatctgatacggtaccatgttgaatgggcataccaaatgtagtcaatggtttgtcaactgtctttgagttattgaataatgtattatcatcttcaaatagctgtagcctagtagggaagcatttttggagataatttataccaaattgttaatgttaaaagaggacgaacgagaagtacccaaaaactacagctcttcaaacgtactgaagatacctgatacggtaccaggttgaagggacataccaaatgtagtcaaatggtttgtcaactgttctggagttattggataagatatccaaatggttcttcaactgtcttatagttattgacctaatccccagtttccaccattttacaaatttatagattgttttttcattttgaggattaagcaaaatacacttgtcaaaacataaatttgagcaccggattgaaaaataaaactgattttacccgagtggaaaccaaccaccttgtagaacccatttctaagaaactattgccgcgaaatactagtaaagtaaacttaaaaatacaaataaacatagaaaaagttattgcacacgcaacaaaaacataaaaggaatgataacgcatactattatgtaaattatttcgttaaaattatgtgttaagtaaatagtgtaaatctagtgttatttttcaacgtttataatctttaacaacttattcttgatttctctccgcctttttaaatacttcgttggcttataaattgttgccgcagctgttaccatcacagtacaaaaactgacaccccatatttgaacaaatgttggcgtttcttacattggatacgtcaagaaaagaaggtccatttgaagaattattacaattttgtgctttaatacaaactcctacgtctccgtttttagtttgttctaatctaagttgttctcgtaaatgattcacctcctctgacagtttttctattgtagctgtcgagtcggcttgcgtgctacgttgtgtcttttgacttttaagcagttggcactcttctaaaagcttctttttctcttcgacttccttcgataagaggttttctaaatttacaagttttgattgcaactgcgatagatgactagcttttaaattctctagttctgcttctttcgcagctaactgacccctccacgtcatttcttcttgctctacacgtttttggagttcgtttaacaagccctccgtgtcgtctatagtatttttgtagtgctcaatttgcgcctgcaattttatcacttcggaagatttctgaggagaagaatgttgcgaactgtgttgttgctcttctttgagagatctgacgtacttctcgatcagtttagcacattgatcctgccagtcgctagagttgagcgtctttaaggcttcgatgtcggggaatagccgttgcatgaattgtttctgggaatcctgctctttacttatgatctccgaagacaattgattattcttcgttttctgttcctccaactctttttgtatcaattggtattttttgtttgatgtttccaattctgtcttgtactttcgttcgttctgttgtaattcctcgatcttcgacgacagttcgttacgggttgaagataattcgttacttaaattgaggatttcgacttcgtgtttgtttttgctgtccggtatatcacccaggccgttgagctcttccttggttttctggagatctgctttgagctgtgctattatcttagttgcttccgctttttcactgttggcgttatgcaacagcccgttaagttgagaaactgtatgttccaggtttcgttgctcttcgaattgcttctgctgcgaagtgttcaaacttgacatctctctcgtccagtcgttttccttgcgtatataaatttccaatttcttttgggcgtcgtgcatcgaatctttcaatgtggcaatctgcatcagcaagttttggttttgatgatctttgtccacggcgagttgttgaagttgttgattggaatttgcggcgtcgtttaattcagtcctcaatttcattataataccttcactctcctgcacttgcggaatgctaacttcatattgctggacttgcatctgcaaggcattgttgtcgtccatcagtttgcgtgtcttcatcatctcggcgctgagttcattttgaatttgctgcatcttctgagccgcgacttgataccgattggcggccgcttggatttctatctgtttgttttgcatcgattcctccaataagcgcagtttctgttgaagttgtgatttttctgcctgttgttcgcttcttatctctctcaacttggcctgagcgccgacaagtgcctgttgttcgtcgacgagggctttttctttctcggcgagttgtcttttcagcttttgaactggatcggatttaccctcactccaatcatcgataactgcaggagcctcaagctgcttgtttagtaatagatcaataagatattgtatctcagtcttagacaattcagctttacgcaccgagttaattagtccgtctcgttctgcagataattgctgtttagtgttaaactcgcttttctttttcttcttttctttaccggtatttgcgacgatgccgttcgtctgcggaaccgccggaataacttcgatgatgactttctcttctaccttttcttctggaggtggcgccggtttctcttgcttgccgacttcggtctgttgggtcttcgcgtttttcttgtttttggcagtcacgccgacttcagtcgtttgtttcttctcttttactaccttctctttgaccggttcttgtttgaaaatgtcgtctctactgttggatctcaacaactcgaagtcgtcttttggttgaatctcttcaaaatgattagcaatcggagcttcaacgacttccagagcgattctctggggcgactgttcctttttcaccagaatcggacgaacctttttcacctttttcttgtttgactccttactggatgctagtttcagctcctctgtgatgatgacttcttcagtttcttctttgaattccacgtgaagtttactaggatgggcattttctttattttcagtattttctgactcatttacgtcattttcttggacaggtttttccttgggctttttatttgcctttttgcttttcttctctttaggcttggattttgtgcccagtaagatattagtttgctgcctttgctcagctagtgcctcttcataactcttctccttgattccaaacttatacaccacaaataatagaaaagatgcaacagcaaagagggctatgaatattagaatggtcaaatccattttcctgtgttatatataatgtatgatattcgccactgtatctttatttaaaacactacaaaaataatgagctgtacaatcacaatttttaataaaaatataataaatctacataaattaacgagtttatggaagtaaagaacttctatcttacagcttttacagtctagaaactagaataccttaataaag

SEQ ID NO: 2591 - DNA, 3653 bp, Diabrotica virgifera
  SmartBlast Evalue=5E-40; Info=Kinectin n=1 Tax=Harpegnathos saltator RepID=E2B375_9HYME
aaaaactacagctcttcaaacgtactgaagatatctaatacggtaccatgttgaagggacataccaaatgtagtcaaatggtttgtcagctgttctggagttattggataagatattatcttcaaaaggtgtagcccaatatggaaacctttttggatcggacttatgccaaattgttaatgttgaaagaagatgaaggggaagtacccaaaaactacatatcttcaaatgaactgaagaaatctgatacggtaccatgttgaatgggcataccaaatgtagtcaatggtttgtcaactgtctttgagttattgaataatgtattatcatcttcaaatagctgtagcctagtagggaagcatttttggagataatttataccaaattgttaatgttaaaagaggacgaacgagaagtacccaaaaactacagctcttcaaacgtactgaagatacctgatacggtaccaggttgaagggacataccaaatgtagtcaaatggtttgtcaactgttctggagttattggataagatatccaaatggttcttcaactgtcttatagttattgacctaatccccagtttccaccattttacaaatttatagattgttttttcattttgaggattaagcaaaatacacttgtcaaaacataaatttgagcaccggattgaaaaataaaactgattttacccgagtggaaaccaaccaccttgtagaacccatttctaagaaactattgccgcgaaatactagtaaagtaaacttaaaaatacaaataaacatagaaaaagttattgcacacgcaacaaaaacataaaaggaatgataacgcatactattatgtaaattatttcgttaaaattatgtgttaagtaaatagtgtaaatctagtgttatttttcaacgtttataatctttaacaacttattcttgatttctctccgcgtcaagaaaagaaggtccatttgaagaattattacaattttgtgctttaatacaaactcctacgtctccgtttttagtttgttctaatctaagttgttctcgtaaatgattcacctcctctgacagtttttctattgtagctgtcgagtcggcttgcgtgctacattgtgtcttttgacttttaagcagttggcactcttctaaaagcttctttttctcttcgacttccttcgataagaggttttctaaatttacaagttttgattgcaactgcgatagatgactagcttttaaattctctagttctgcttctttcgcagctaactgacccctccacgtcatttcttcttgctctacacgtttttggagttcgtttaacaagccctccgtgtcgtctatagtatttttgtagtgctcaatttgcgcctgcaattttatcacttcggaagatttctgaggagaagaatgttgcgaactgtgttgttgctcttctttgagagatctgacgtacttctcgatcagtttagcacattgatcctgccagtcgctagagttgagcgtctttaaggcttcgatgtcggggaatagccgttgcatgaattgtttctgggaatcctgctctttacttatgatctccgaagacaattgattattcttcgttttctgttcctccaactctttttgtatcaattggtattttttgtttgatgtttccaattctgtcttgtactttcgttcgttctgttgtaattcctcgatcttcgacgacagttcgttacgggttgaagataattcgttacttaaattgaggatttcgacttcgtgtttgtttttgctgtccggtatatcacccaggccgttgagctcttccttggttttctggagatctgctttgagctgtgctattatcttagttgcttccgctttttcactgttggcgttatgcaacagcccgttaagttgagaaactgtatgttccaggtttcgttgctcttcgaattgcttctgctgcgaagtgttcaaacttgacatctctctcgtccagtcgttttccttgcgtatataaatttccaatttcttttgggcgtcgtgcatcgaatctttcaatgtggcaatctgcatcagcaagttttggttttgatgatctttgtccacggcgagttgttgaagttgttgattggaatttgcggcgtcgtttaattcagtcctcaatttcattataataccttcactctcctgcacttgcggaatgctaacttcatattgctggacttgcatctgcaaggcattgttgtcgtccatcagtttgcgtgtcttcatcatctcggcgctgagttcattttgaatttgctgcatcttctgagccgcgacttgataccgattggcggccgcttggatttctatctgtttgttttgcatcgattcctccaataagcgcagtttctgttgaagttgtgatttttctgcctgttgttcgcttcttatctctctcaacttggcctgagcgccgacaagtgcctgttgttcgtcgacgagggctttttctttctcggcgagttgtcttttcagcttttgaactggatcggatttaccctcactccaatcatcgataactgcaggagcctcaagctgcttgtttagtaatagatcaataagatattgtatctcagtcttagacaattcagctttacgcaccgagttaattagtccgtctcgttctgcagataattgctgtttagtgttaaactcgcttttctttttcttcttttctttaccggtatttgcgacgatgccgttcgtctgcggaaccgccggaataacttcgatgatgactttctcttctaccttttcttctggaggtggcgccggtttctcttgcttgccgacttcggtctgttgggtcttcgcgtttttcttgtttttggcagtcacgccgacttcagtcgtttgtttcttctcttttactaccttctctttgaccggttcttgtttgaaaatgtcgtctctactgttggatctcaacaactcgaagtcgtcttttggttgaatctcttcaaaatgattagcaatcggagcttcaacgacttccagagcgattctctggggcgactgttcctttttcaccagaatcggacgaacctttttcacctttttcttgtttgactccttactggatgctagtttcagctcctctgtgatgatgacttcttcagtttcttctttgaattccacgtgaagtttactaggatgggcattttctttattttcagtattttctgactcatttacgtcattttcttggacaggtttttccttgggctttttatttgcctttttgcttttcttctctttaggcttggattttgtgcccagtaagatattagtttgctgcctttgctcagctagtgcctcttcataactcttctccttgattccaaacttatacaccacaaataatagaaaagatgcaacagcaaagagggctatgaatattagaatggtcaaatccattttcctgtgttatatataatgtatgatattcgccactgtatctttatttaaaacactacaaaaataatgagctgtacaatcacaatttttaataaaaatataataaatctacataaattaacgagtttatggaagtaaagaacttctatcttacagcttttacagtctagaaactagaataccttaataaag

SEQ ID NO: 2592 - DNA, 3617 bp, Diabrotica virgifera
  SmartBlast Evalue=1E-34; Info=Kinectin n=1 Tax=Harpegnathos saltator RepID=E2B375_9HYME
aaaaactacagctcttcaaacgtactgaagatatctaatacggtaccatgttgaagggacataccaaatgtagtcaaatggtttgtcagctgttctggagttattggataagatattatcttcaaaaggtgtagcccaatatggaaacctttttggatcggacttatgccaaattgttaatgttgaaagaagatgaaggggaagtacccaaaaactacatatcttcaaatgaactgaagaaatctgatacggtaccatgttgaatgggcataccaaatgtagtcaatggtttgtcaactgtctttgagttattgaataatgtattatcatcttcaaatagctgtagcctagtagggaagcatttttggagataatttataccaaattgttaatgttaaaagaggacgaacgagaagtacccaaaaactacagctcttcaaacgtactgaagatacctgatacggtaccaggttgaagggacataccaaatgtagtcaaatggtttgtcaactgttctggagttattggataagatatccaaatggttcttcaactgtcttatagttattgacctaatccccagtttccaccattttacaaatttatagattgttttttcattttgaggattaagcaaaatacacttgtcaaaacataaatttgagcaccggattgaaaaataaaactgattttacccgagtggaaaccaaccaccttgtagaacccatttctaagaaactattgccgcgaaatactagtaaagtaaacttaaaaatacaaataaacatagaaaaagttattgcacacgcaacaaaaacataaaaggaatgataacgcatactattatgtaaattatttcgttaaaattatgtgttaagtaaatagtgtaaatctagtgttatttttcaacgtttataatctttaacaacttattcttgatttctctccgcctttttaaatacttcgttggcttataaattgttgccgcagctgttaccatcacagtacaaaaactgacaccccatatttgaacaaatgttggcgtttcttacattggatacgtcaagaaaagaaggtccatttgaagaattattacaattttgtgctttaatacaaactcctacgtctccgtttttagtttgttctaatctaagttgttctcgtaaatgattcacctcctctgacagtttttctattgtagctgtcgagtcggcttgcgtgctacgttgtgtcttttgacttttaagcagttggcactcttctaaaagcttctttttctcttcgacttccttcgataagaggttttctaaatttacaagttttgattgcaactgcgatagatgactagcttttaaattctctagttctgcttctttcgcagctaactgacccctccacgtcatttcttcttgctctacacgtttttggagttcgtttaacaagccctccgtgtcgtctatagtatttttgtagtgctcaatttgcgcctgcaattttatcacttcggaagatttctgaggagaagaatgttgcgaactgtgttgttgctcttctttgagagatctgacgtacttctcgatcagtttagcacattgatcctgccagtcgctagagttgagcgtctttaaggcttcgatgtcggggaatagccgttgcatgaattgtttctgggaatcctgctctttacttatgatctccgaagacaattgattattcttcgttttctgttcctccaactctttttgtatcaattggtattttttgtttgatgtttccaattctgtcttgtactttcgttcgttctgttgtaattcctcgatcttcgacgacagttcgttacgggttgaagataattcgttacttaaattgaggatttcgacttcgtgtttgtttttgctgtccggtatatcacccaggccgttgagctcttccttggttttctggagatctgctttgagctgtgctattatcttagttgcttccgctttttcactgttggcgttatgcaacagcccgttaagttgagaaactgtatgttccaggtttcgttgctcttcgaattgcttctgctgcgaagtgttcaaacttgacatctctctcgtccagtcgttttccttgcgtatataaatttccaatttcttttgggcgtcgtgcatcgaatctttcaatgtggcaatctgcatcagcaagttttggttttgatgatctttgtccacggcgagttgttgaagttgttgattggaatttgcggcgtcgtttaattcagtcctcaatttcattataataccttcactctcctgcacttgcggaatgctaacttcatattgctggacttgcatctgcaaggcattgttgtcgtccatcagtttgcgtgtcttcatcatctcggcgctgagttcattttgaatttgctgcatcttctgagccgcgacttgataccgattggcggccgcttggatttctatctgtttgttttgcatcgattcctccaataagcgcagtttctgttgaagttgtgatttttctgcctgttgttcgcttcttatctctctcaacttggcctgagcgccgacaagtgcctgttgttcgtcgacgagggctttttctttctcggcgagttgtcttttcagcttttgaactggatcggatttaccctcactccaatcatcgataactgcaggagcctcaagctgcttgtttagtaatagatcaataagatattgtatctcagtcttagacaattcagctttacgcaccgagttaattagtccgtctcgttctgcagataattgctgtttagtgttaaactcgcttttctttttcttcttttctttaccggtatttgcgacgatgccgttcgtctgcggaaccgccggaataacttcgatgatgactttctcttctaccttttcttctggaggtggcgccggtttctcttgcttgccgacttcggtctgttgggtcttcgcgtttttcttgtttttggcagtcacgccgacttcagtcgtttgtttcttctcttttactaccttctctttgaccggttcttgtttgaaaatgtcgtctctcttgtttgactccttactggatgctagtttcagctcctctgtgatgatgacttcttcagtttcttctttgaattccacgtgaagtttactaggatgggcattttctttattttcagtattttctgactcatttacgtcattttcttggacaggtttttccttgggctttttatttgcctttttgcttttcttctctttaggcttggattttgtgcccagtaagatattagtttgctgcctttgctcagctagtgcctcttcataactcttctccttgattccaaacttatacaccacaaataatagaaaagatgcaacagcaaagagggctatgaatattagaatggtcaaatccattttcctgtgttatatataatgtatgatattcgccactgtatctttatttaaaacactacaaaaataatgagctgtacaatcacaatttttaataaaaatataataaatctacataaattaacgagtttatggaagtaaagaacttctatcttacagcttttacagtctagaaactagaataccttaataaag

SEQ ID NO: 2593 - DNA, 3506 bp, Diabrotica virgifera
  SmartBlast Evalue=1E-34; Info=Kinectin n=1 Tax=Harpegnathos saltator RepID=E2B375_9HYME
aaaaactacagctcttcaaacgtactgaagatatctaatacggtaccatgttgaagggacataccaaatgtagtcaaatggtttgtcagctgttctggagttattggataagatattatcttcaaaaggtgtagcccaatatggaaacctttttggatcggacttatgccaaattgttaatgttgaaagaagatgaaggggaagtacccaaaaactacatatcttcaaatgaactgaagaaatctgatacggtaccatgttgaatgggcataccaaatgtagtcaatggtttgtcaactgtctttgagttattgaataatgtattatcatcttcaaatagctgtagcctagtagggaagcatttttggagataatttataccaaattgttaatgttaaaagaggacgaacgagaagtacccaaaaactacagctcttcaaacgtactgaagatacctgatacggtaccaggttgaagggacataccaaatgtagtcaaatggtttgtcaactgttctggagttattggataagatatccaaatggttcttcaactgtcttatagttattgacctaatccccagtttccaccattttacaaatttatagattgttttttcattttgaggattaagcaaaatacacttgtcaaaacataaatttgagcaccggattgaaaaataaaactgattttacccgagtggaaaccaaccaccttgtagaacccatttctaagaaactattgccgcgaaatactagtaaagtaaacttaaaaatacaaataaacatagaaaaagttattgcacacgcaacaaaaacataaaaggaatgataacgcatactattatgtaaattatttcgttaaaattatgtgttaagtaaatagtgtaaatctagtgttatttttcaacgtttataatctttaacaacttattcttgatttctctccgcgtcaagaaaagaaggtccatttgaagaattattacaattttgtgctttaatacaaactcctacgtctccgtttttagtttgttctaatctaagttgttctcgtaaatgattcacctcctctgacagtttttctattgtagctgtcgagtcggcttgcgtgctacattgtgtcttttgacttttaagcagttggcactcttctaaaagcttctttttctcttcgacttccttcgataagaggttttctaaatttacaagttttgattgcaactgcgatagatgactagcttttaaattctctagttctgcttctttcgcagctaactgacccctccacgtcatttcttcttgctctacacgtttttggagttcgtttaacaagccctccgtgtcgtctatagtatttttgtagtgctcaatttgcgcctgcaattttatcacttcggaagatttctgaggagaagaatgttgcgaactgtgttgttgctcttctttgagagatctgacgtacttctcgatcagtttagcacattgatcctgccagtcgctagagttgagcgtctttaaggcttcgatgtcggggaatagccgttgcatgaattgtttctgggaatcctgctctttacttatgatctccgaagacaattgattattcttcgttttctgttcctccaactctttttgtatcaattggtattttttgtttgatgtttccaattctgtcttgtactttcgttcgttctgttgtaattcctcgatcttcgacgacagttcgttacgggttgaagataattcgttacttaaattgaggatttcgacttcgtgtttgtttttgctgtccggtatatcacccaggccgttgagctcttccttggttttctggagatctgctttgagctgtgctattatcttagttgcttccgctttttcactgttggcgttatgcaacagcccgttaagttgagaaactgtatgttccaggtttcgttgctcttcgaattgcttctgctgcgaagtgttcaaacttgacatctctctcgtccagtcgttttccttgcgtatataaatttccaatttcttttgggcgtcgtgcatcgaatctttcaatgtggcaatctgcatcagcaagttttggttttgatgatctttgtccacggcgagttgttgaagttgttgattggaatttgcggcgtcgtttaattcagtcctcaatttcattataataccttcactctcctgcacttgcggaatgctaacttcatattgctggacttgcatctgcaaggcattgttgtcgtccatcagtttgcgtgtcttcatcatctcggcgctgagttcattttgaatttgctgcatcttctgagccgcgacttgataccgattggcggccgcttggatttctatctgtttgttttgcatcgattcctccaataagcgcagtttctgttgaagttgtgatttttctgcctgttgttcgcttcttatctctctcaacttggcctgagcgccgacaagtgcctgttgttcgtcgacgagggctttttctttctcggcgagttgtcttttcagcttttgaactggatcggatttaccctcactccaatcatcgataactgcaggagcctcaagctgcttgtttagtaatagatcaataagatattgtatctcagtcttagacaattcagctttacgcaccgagttaattagtccgtctcgttctgcagataattgctgtttagtgttaaactcgcttttctttttcttcttttctttaccggtatttgcgacgatgccgttcgtctgcggaaccgccggaataacttcgatgatgactttctcttctaccttttcttctggaggtggcgccggtttctcttgcttgccgacttcggtctgttgggtcttcgcgtttttcttgtttttggcagtcacgccgacttcagtcgtttgtttcttctcttttactaccttctctttgaccggttcttgtttgaaaatgtcgtctctcttgtttgactccttactggatgctagtttcagctcctctgtgatgatgacttcttcagtttcttctttgaattccacgtgaagtttactaggatgggcattttctttattttcagtattttctgactcatttacgtcattttcttggacaggtttttccttgggctttttatttgcctttttgcttttcttctctttaggcttggattttgtgcccagtaagatattagtttgctgcctttgctcagctagtgcctcttcataactcttctccttgattccaaacttatacaccacaaataatagaaaagatgcaacagcaaagagggctatgaatattagaatggtcaaatccattttcctgtgttatatataatgtatgatattcgccactgtatctttatttaaaacactacaaaaataatgagctgtacaatcacaatttttaataaaaatataataaatctacataaattaacgagtttatggaagtaaagaacttctatcttacagcttttacagtctagaaactagaataccttaataaag

SEQ ID NO: 2594 - DNA, 1978 bp, Diabrotica virgifera
  SmartBlast Evalue=3E-15; Info=Kinectin n=1 Tax=Harpegnathos saltator RepID=E2B375_9HYME
aaaaactacagctcttcaaacgtactgaagatatctaatacggtaccatgttgaagggacataccaaatgtagtcaaatggtttgtcagctgttctggagttattggataagatattatcttcaaaaggtgtagcccaatatggaaacctttttggatcggacttatgccaaattgttaatgttgaaagaagatgaaggggaagtacccaaaaactacatatcttcaaatgaactgaagaaatctgatacggtaccatgttgaatgggcataccaaatgtagtcaatggtttgtcaactgtctttgagttattgaataatgtattatcatcttcaaatagctgtagcctagtagggaagcatttttggagataatttataccaaattgttaatgttaaaagaggacgaacgagaagtacccaaaaactacagctcttcaaacgtactgaagatacctgatacggtaccaggttgaagggacataccaaatgtagtcaaatggtttgtcaactgttctggagttattggataagatatccaaatggttcttcaactgtcttatagttattgacctaatccccagtttccaccattttacaaatttatagattgttttttcattttgaggattaagcaaaatacacttgtcaaaacataaatttgagcaccggattgaaaaataaaactgattttacccgagtggaaaccaaccaccttgtagaacccatttctaagaaactattgccgcgaaatactagtaaagtaaacttaaaaatacaaataaacatagaaaaagttattgcacacgcaacaaaaacataaaaggaatgataacgcatactattatgtaaattatttcgttaaaattatgtgttaagtaaatagtgtaaatctagtgttatttttcaacgtttataatctttaacaacttattcttgatttctctccgcctttttaaatacttcgttggcttataaattgttgccgcagctgttaccatcacagtacaaaaactgacaccccatatttgaacaaatgttggcgtttcttacattggatacgtcaagaaaagaaggtccatttgaagaattattacaattttgtgctttaatacaaactcctacgtctccgtttttagtttgttctaatctaagttgttctcgtaaatgattcacctcctctgacagtttttctattgtagctgtcgagtcggcttgcgtgctacgttgtgtcttttgacttttaagcagttggcactcttctaaaagcttctttttctcttcgacttccttcgataagaggttttctaaatttacaagttttgattgcaactgcgatagatgactagcttttaaattctctagttctgcttctttcgcagctaactgacccctccacgtcatttcttcttgctctacacgtttttggagttcgtttaacaagccctccgtgtcgtctatagtatttttgtagtgctcaatttgcgcctgcaattttatcacttcggaagatttctgaggagaagaatgttgcgaactgtgttgttgctcttctttgagagatctgacgtacttctcgatcagtttagcacattgatcctgccagtcgctagagttgagcgtctttaaggcttcgatgtcggggaatagccgttgcatgaattgtttctgggaatcctgctctttacttatgatctccgaagacaattgtttaacgtcaatatctggctttttgctcggttctttattcttgttttcggctgcatttaacgcttccatcactttccagttctttgtgcgcaactcattattcttcgttttctgttcctccaactctttttgtatcaattggtattttttgtttgatgtttccaattctgtcttgtactttcgttcgttctgttgtaattcctcgatcttcgacgacagttcgttacgggttgaagataattcgttacttaaattgaggatttcgactt

SEQ ID NO: 2595 - DNA, 1867 bp, Diabrotica virgifera
  SmartBlast Evalue=3E-15; Info=Kinectin n=1 Tax=Harpegnathos saltator RepID=E2B375_9HYME
aaaaactacagctcttcaaacgtactgaagatatctaatacggtaccatgttgaagggacataccaaatgtagtcaaatggtttgtcagctgttctggagttattggataagatattatcttcaaaaggtgtagcccaatatggaaacctttttggatcggacttatgccaaattgttaatgttgaaagaagatgaaggggaagtacccaaaaactacatatcttcaaatgaactgaagaaatctgatacggtaccatgttgaatgggcataccaaatgtagtcaatggtttgtcaactgtctttgagttattgaataatgtattatcatcttcaaatagctgtagcctagtagggaagcatttttggagataatttataccaaattgttaatgttaaaagaggacgaacgagaagtacccaaaaactacagctcttcaaacgtactgaagatacctgatacggtaccaggttgaagggacataccaaatgtagtcaaatggtttgtcaactgttctggagttattggataagatatccaaatggttcttcaactgtcttatagttattgacctaatccccagtttccaccattttacaaatttatagattgttttttcattttgaggattaagcaaaatacacttgtcaaaacataaatttgagcaccggattgaaaaataaaactgattttacccgagtggaaaccaaccaccttgtagaacccatttctaagaaactattgccgcgaaatactagtaaagtaaacttaaaaatacaaataaacatagaaaaagttattgcacacgcaacaaaaacataaaaggaatgataacgcatactattatgtaaattatttcgttaaaattatgtgttaagtaaatagtgtaaatctagtgttatttttcaacgtttataatctttaacaacttattcttgatttctctccgcgtcaagaaaagaaggtccatttgaagaattattacaattttgtgctttaatacaaactcctacgtctccgtttttagtttgttctaatctaagttgttctcgtaaatgattcacctcctctgacagtttttctattgtagctgtcgagtcggcttgcgtgctacattgtgtcttttgacttttaagcagttggcactcttctaaaagcttctttttctcttcgacttccttcgataagaggttttctaaatttacaagttttgattgcaactgcgatagatgactagcttttaaattctctagttctgcttctttcgcagctaactgacccctccacgtcatttcttcttgctctacacgtttttggagttcgtttaacaagccctccgtgtcgtctatagtatttttgtagtgctcaatttgcgcctgcaattttatcacttcggaagatttctgaggagaagaatgttgcgaactgtgttgttgctcttctttgagagatctgacgtacttctcgatcagtttagcacattgatcctgccagtcgctagagttgagcgtctttaaggcttcgatgtcggggaatagccgttgcatgaattgtttctgggaatcctgctctttacttatgatctccgaagacaattgtttaacgtcaatatctggctttttgctcggttctttattcttgttttcggctgcatttaacgcttccatcactttccagttctttgtgcgcaactcattattcttcgttttctgttcctccaactctttttgtatcaattggtattttttgtttgatgtttccaattctgtcttgtactttcgttcgttctgttgtaattcctcgatcttcgacgacagttcgttacgggttgaagataattcgttacttaaattgaggatttcgactt

SEQ ID NO: 2596 - DNA, 4292 bp, Diabrotica virgifera
  SmartBlast Evalue=4E-52; Info=Acyl-CoA-binding domain- containing protein 5 n=1 Tax=Camponotus floridanus RepID=E2AP57_ 9HYME
gtttgtcatgttgacatgaatgaagaatacataaggaagaattaaaatctacagttgtcctttataaacatgacgaccgaacaaaaatttaatgctgctgtgaatgtcattcgaagtttaccaaaaaatggttcctaccaacccagtaatgaattgatgcttagattttacgcatattttaaacaagctacaaacggaacatgcacaggatcacgccccgctttttgggatcttgtaggaagagcaaagtatgacgcttggaagagccttggagatatgcccaaacaagaggcaatgacaaaatatgtcgatgaattacattcgatagtagaaactatgagctattcagataaggtagctaatttcctagaagctcctaccaatgaattagatgcaataaacttcgacgacttggagttaattgctggagatgttatcgaaagagttagatcacaacctaattcacctttagcatcaagagaaggttctccaattaggtttggttctaaaagtcccagtgtaggatcaactccgtctgttgctcccagtactccagatgactcagatcacagtgatgatgaatatattgacacgatagagaatccagatcccccaagaatgaacatatctcacgatggtattccaaacggatacatacaaacaccacaaaatcaacatatttcaagatcaaaaattaaatccactacaaacgtagacgtgtcacaggaaatatctttggctgtacagagcctgcgagcggatatcgaaaatatatcgaagaaagttaattcattggaaaatgcaaataggttggtagcgaaacgacaaaagagattatttccaggagtccctaacaatttcttagcttttgtcatagcatggccttttatagccacatttatcatgaatcgatattggtatcgaaggaatctttaggaaaatttgaacaagtgtgaagtttagatacctgatactgtaggacaaaactagtcttttaatataaaattgttttttcaaagtagatggtcgaagatagcgatttataagaacttaacattgacaaaaggcctgctactaatagacaaaaaataaataatcatccaaggaaacaaaatatacatttaattttatagctaactataatataacgtgattaatgttgcaaaacactttttcttttcgtatattagtgaaaataacgtataaataaaagtaattgtgcctttattgtaactattatttatagatagatatatatcatgctgagaagaatatctagagatattcttttcagcgtgatgttcacgacgcttcagattcaatttaaaagatattttgcctcggtatttttatctttcttgaaaaatacttttcatgtttaatagaccatacaagcacatacaagagaaattttagtggtgcgatgaagtattttatttctggaggactttttatcaagaatatctgcttctatggaacaaaatcctgctcaaaagaccaaatatgatgctcgcctcttatgctagatatcacacagtgagatgttcagagtcaagaagatttttccatcgagttgttgactgctgtttcacgtttcttttgcatctggtatctagtactacttgtaaataatcaattatttttatgactagatatgactgcttttatttttatcatgatatcaaaattgatacgtaaatttttaattaccacagtttgaaattttgttctttttaaaggaagatttttatattagtgtaaaaatatagtggcgcatgtcacctcacaaggcacatcgccgaagaaacaaatcgatacatttcaatagcagttaacataggagaggatcgcacctcgccaggcatctcgctatttgtttttaatatgcgatgatgcctggcgaggtgcgttgcttcactatatttctacacttagaaacgaataaacggcacatgctattacgtttttctgtaaacactttcattttgagcggtcgaataaatagaaatagtgtaatgagtgatagcaaacaaatgttagaatcaaaaacagatgaaagaaaaaggctaccagaacaataactattttaagctactgagccattttgaaaacactgaaaataattcagtatcactcaaacattttatcactcaatcccaatcgccattgttctctatcataacacatgtcttcgttcaagcttctttctctaatttccctatgattccctttatcccgcttttcctaggtcttcctcttttccgccgtccgtttggtgcccaccgcagtacttgcttggggtctttcgtcttccatatgttgtacacgtggccaaaccatcttagttgccttgtttttatatcgtcaattatagtgtgctttacatccattatttctaatattcttgtatttctaatttatctcttcttgatataccagtggctcgtctccagaagtccatttcagttgttctgatcaaattttcggatttttctttaactttgctgctatatgttataatgctcttaacaatgctgttatacatgttatgcttattttctttggagatactttgatgccataggattgtgttcaataatgcgatagctttccttccttgtgtgcacctttcttggatattcttgtccaatgttccatcttgtgtaattttaagacccaagtatttatattcctgacagtgattaatagttatttcattttccaacgctagatcctgctgtatacctccgaagcacatatattccgttttttggtgttcacttctaaaccccagctccggtactcttctatgatttttcgggtcatatattcaatatcgtgataatcctgggccataagaatctgatcatccgcaaaacatagagtgtatagcatgttatcatcatttagcggtatacccatattcttacatttccttttccaggatttcaaaacttgctctaaatatattttaaatagtgtcggcgatagacagcagccctgtttaagacccttattcacttcaaatcctgacgagatttccttgcctagcttaacttttgctatattatgttggtatagatttttacagctttaatgagcttcagattgatgttagttttttcgagggcttcccaaagtttactttatggcacagtgtcggatgcttttttttaagtatatgtacactaaatgaaattcttaattgtaggctatttgtttgtctattaactgtgttacacaatataggtggtcagtggtggatctgccagcacggaagccggcttgctcttcggcctctaaatctttttattcttcttctactttttacataattatagtaatggtattcttctgtaatattattggtttgttgcatcatcacgccacaccttgtagtcgatggaaataaatattatgtaagtgtttcagacatacagaaaaaaatggtcatcacaccgaatatggtctatcgattatctccgatagttttatttaaaaaataagctctgtagaagcggttttaaaaatacaatgttccaattaaaggaaccatctccgttttgttaggttttatatcattttgtttccaaatgtaacaaaataagatagtttctttcattaaagcattgtactgtgaaaacggccttcagtatggaatcttaaacatgaagtaagtaatttgttgattaattttggtttatttctaacaagatacttcataataaccgacggaccacataaaatatttacagaatcttatgtatgattttgcacataagtataaaaacattctgcaaatttttcaatataaaatcaagtaattattatcaaacccagtaaagcccatctctaatttaagtatttagtggtatatcaatattatggcagttaatgtaccactacgtagtaagtattttgcaatgtttcttaaatgttatggttatagctaaaccatctcaaatggacgttaaaaaattattctggtatctaaattcttcataattaaacggtaatgtcttaaatataatcaagctggttcaattttaggggatttttaattgtaggtggtctcagccaatatccatattgatatgtaaaggttgtaaagattattttattttctattgttggtgatatttaagtaaacttatacaatgtcatatttttattgttatgtatatatgaagttttatattattttggtttaaaataaacgattggaagtgcttgatagtattttgatccgaccatgcacaaaataatctttcgagtatattaattttgaactc

SEQ ID NO: 2597 - DNA, 4252 bp, Diabrotica virgifera
  SmartBlast Evalue=4E-52; Info=Acyl-CoA-binding domain- containing protein 5 n=1 Tax=Camponotus floridanus RepID=E2AP57_ 9HYME
gtttgtcatgttgacatgaatgaagaatacataaggaagaattaaaatctacagttgtcctttataaacatgacgaccgaacaaaaatttaatgctgctgtgaatgtcattcgaagtttaccaaaaaatggttcctaccaacccagtaatgaattgatgcttagattttacgcatattttaaacaagctacaaacggaacatgcacaggatcacgccccgctttttgggatcttgtaggaagagcaaagtatgacgcttggaagagccttggagatatgcccaaacaagaggcaatgacaaaatatgtcgatgaattacattcgatagtagaaactatgagctattcagataaggtagctaatttcctagaagctcctaccaatgaattagatgcaataaacttcgacgacttggagttaattgctggagatgttatcgaaagagttagatcacaacctaattcacctttagcatcaagagaaggttctccaattaggtttggttctaaaagtcccagtgtaggatcaactccgtctgttgctcccagtactccagatgactcagatcacagtgatgatgaatatattgacacgatagagaatccagatcccccaagaatgaacatatctcacgatggtattccaaacggatacatacaaacaccacaaaatcaacatatttcaagatcaaaaattaaatccactacaaacgtagacgtgtcacaggaaatatctttggctgtacagagcctgcgagcggatatcgaaaatatatcgaagaaagttaattcattggaaaatgcaaataggttggtagcgaaacgacaaaagagattatttccaggagtccctaacaatttcttagcttttgtcatagcatggccttttatagccacatttatcatgaatcgatattggtatcgaaggaatctttaggaaaatttgaacaagtgtgaagtttagatacctgatactgtaggacaaaactagtcttttaatataaaattgttttttcaaagtagatggtcgaagatagcgatttataagaacttaacattgacaaaaggcctgctactaatagacaaaaaataaataatcatccaaggaaacaaaatatacatttaattttatagctaactataatataacgtgattataacgtataaataaaagtaattgtgcctttattgtaactattatttatagatagatatatatcatgctgagaagaatatctagagatattcttttcagcgtgatgttcacgacgcttcagattcaatttaaaagatattttgcctcggtatttttatctttcttgaaaaatacttttcatgtttaatagaccatacaagcacatacaagagaaattttagtggtgcgatgaagtattttatttctggaggactttttatcaagaatatctgcttctatggaacaaaatcctgctcaaaagaccaaatatgatgctcgcctcttatgctagatatcacacagtgagatgttcagagtcaagaagatttttccatcgagttgttgactgctgtttcacgtttcttttgcatctggtatctagtactacttgtaaataatcaattatttttatgactagatatgactgcttttatttttatcatgatatcaaaattgatacgtaaatttttaattaccacagtttgaaattttgttctttttaaaggaagatttttatattagtgtaaaaatatagtggcgcatgtcacctcacaaggcacatcgccgaagaaacaaatcgatacatttcaatagcagttaacataggagaggatcgcacctcgccaggcatctcgctatttgtttttaatatgcgatgatgcctggcgaggtgcgttgcttcactatatttctacacttagaaacgaataaacggcacatgctattacgtttttctgtaaacactttcattttgagcggtcgaataaatagaaatagtgtaatgagtgatagcaaacaaatgttagaatcaaaaacagatgaaagaaaaaggctaccagaacaataactattttaagctactgagccattttgaaaacactgaaaataattcagtatcactcaaacattttatcactcaatcccaatcgccattgttctctatcataacacatgtcttcgttcaagcttctttctctaatttccctatgattccctttatcccgcttttcctaggtcttcctcttttccgccgtccgtttggtgcccaccgcagtacttgcttggggtctttcgtcttccatatgttgtacacgtggccaaaccatcttagttgccttgtttttatatcgtcaattatagtgtgctttacatccattatttctaatattcttgtatttctaatttatctcttcttgatataccagtggctcgtctccagaagtccatttcagttgttctgatcaaattttcggatttttctttaactttgctgctatatgttataatgctcttaacaatgctgttatacatgttatgcttattttctttggagatactttgatgccataggattgtgttcaataatgcgatagctttccttccttgtgtgcacctttcttggatattcttgtccaatgttccatcttgtgtaattttaagacccaagtatttatattcctgacagtgattaatagttatttcattttccaacgctagatcctgctgtatacctccgaagcacatatattccgttttttggtgttcacttctaaaccccagctccggtactcttctatgatttttcgggtcatatattcaatatcgtgataatcctgggccataagaatctgatcatccgcaaaacatagagtgtatagcatgttatcatcatttagcggtatacccatattcttacatttccttttccaggatttcaaaacttgctctaaatatattttaaatagtgtcggcgatagacagcagccctgtttaagacccttattcacttcaaatcctgacgagatttccttgcctagcttaacttttgctatattatgttggtatagatttttacagctttaatgagcttcagattgatgttagttttttcgagggcttcccaaagtttactttatggcacagtgtcggatgcttttttttaagtatatgtacactaaatgaaattcttaattgtaggctatttgtttgtctattaactgtgttacacaatataggtggtcagtggtggatctgccagcacggaagccggcttgctcttcggcctctaaatctttttattcttcttctactttttacataattatagtaatggtattcttctgtaatattattggtttgttgcatcatcacgccacaccttgtagtcgatggaaataaatattatgtaagtgtttcagacatacagaaaaaaatggtcatcacaccgaatatggtctatcgattatctccgatagttttatttaaaaaataagctctgtagaagcggttttaaaaatacaatgttccaattaaaggaaccatctccgttttgttaggttttatatcattttgtttccaaatgtaacaaaataagatagtttctttcattaaagcattgtactgtgaaaacggccttcagtatggaatcttaaacatgaagtaagtaatttgttgattaattttggtttatttctaacaagatacttcataataaccgacggaccacataaaatatttacagaatcttatgtatgattttgcacataagtataaaaacattctgcaaatttttcaatataaaatcaagtaattattatcaaacccagtaaagcccatctctaatttaagtatttagtggtatatcaatattatggcagttaatgtaccactacgtagtaagtattttgcaatgtttcttaaatgttatggttatagctaaaccatctcaaatggacgttaaaaaattattctggtatctaaattcttcataattaaacggtaatgtcttaaatataatcaagctggttcaattttaggggatttttaattgtaggtggtctcagccaatatccatattgatatgtaaaggttgtaaagattattttattttctattgttggtgatatttaagtaaacttatacaatgtcatatttttattgttatgtatatatgaagttttatattattttggtttaaaataaacgattggaagtgcttgatagtattttgatccgaccatgcacaaaataatctttcgagtatattaattttgaactc

SEQ ID NO: 2598 - DNA, 3130 bp, Diabrotica virgifera
  SmartBlast Evalue=3E-52; Info=Acyl-CoA-binding domain- containing protein 5 n=1 Tax=Camponotus floridanus RepID=E2AP57_ 9HYME
gtttgtcatgttgacatgaatgaagaatacataaggaagaattaaaatctacagttgtcctttataaacatgacgaccgaacaaaaatttaatgctgctgtgaatgtcattcgaagtttaccaaaaaatggttcctaccaacccagtaatgaattgatgcttagattttacgcatattttaaacaagctacaaacggaacatgcacaggatcacgccccgctttttgggatcttgtaggaagagcaaagtatgacgcttggaagagccttggagatatgcccaaacaagaggcaatgacaaaatatgtcgatgaattacattcgatagtagaaactatgagctattcagataaggtagctaatttcctagaagctcctaccaatgaattagatgcaataaacttcgacgacttggagttaattgctggagatgttatcgaaagagttagatcacaacctaattcacctttagcatcaagagaaggttctccaattaggtttggttctaaaagtcccagtgtaggatcaactccgtctgttgctcccagtactccagatgactcagatcacagtgatgatgaatatattgacacgatagagaatccagatcccccaagaatgaacatatctcacgatggtattccaaacggatacatacaaacaccacaaaatcaacatatttcaagatcaaaaattaaatccactacaaacgtagacgtgtcacaggaaatatctttggctgtacagagcctgcgagcggatatcgaaaatatatcgaagaaagttaattcattggaaaatgcaaataggttggtagcgaaacgacaaaagagattatttccaggagtccctaacaatttcttagcttttgtcatagcatggccttttatagccacatttatcatgaatcgatattggtatcgaaggaatctttaggaaaatttgaacaagtgtgaagtttagatacctgatactgtaggacaaaactagtcttttaatataaaattgttttttcaaagtagatggtcgaagatagcgatttataagaacttaacattgacaaaaggcctgctactaatagacaaaaaataaataatcatccaaggaaacaaaatatacatttaattttatagctaactataatataacgtgattaatgttgcaaaacactttttcttttcgtatattagtgaaaataacgtataaataaaagtaattgtgcctttattgtaactattatttatagatagatatatatcatgctgagaagaatatctagagatattcttttcagcgtgatgttcacgacgcttcagattcaatttaaaagatattttgcctcggtatttttatctttcttgaaaaatacttttcatgtttaatagaccatacaagcacatacaagagaaattttagtggtgcgatgaagtattttatttctggaggactttttatcaagaatatctgcttctatggaacaaaatcctgctcaaaagaccaaatatgatgctcgcctcttatgctagatatcacacagtgagatgttcagagtcaagaagatttttccatcgagttgttgactgctgtttcacgtttcttttgcatctggtatctagtactacttgtaaataatcaattatttttatgactagatatgactgcttttatttttatcatgatatcaaaattgatacgtaaatttttaattaccacagtttgaaattttgttctttttaaaggaagatttttatattagtgtaaaaatatagtggcgcatgtcacctcacaaggcacatcgccgaagaaacaaatcgatacatttcaatagcagttaacataggagaggatcgcacctcgccaggcatctcgctatttgtttttaatatgcgatgatgcctggcgaggtgcgttgcttcactatatttctacacttagaaacgaataaacggcacatgctattacgtttttctgtaaacactttcattttgagcggtcgaataaatagaaatagtgtaatgagtgatagcaaacaaatgttagaatcaaaaacagatgaaagaaaaaggctaccagaacaataactattttaagctactgagccattttgaaaacactgaaaataattcagtatcactcaaacattttatcactcaatcccaatcgccattgttctctatcataacacatgtcttcgttcaagcttctttctctaatttccctatgattccctttatcccgcttttcctaggtcttcctcttttccgccgtccgtttggtgcccaccgcagtacttgcttggggtctttcgtcttccatatgttgtacacgtggccaaaccatcttagttgccttgtttttatatcgtcaattatagtgtgctttacatccattatttctaatattcttgtatttctaatttatctcttcttgatataccagtggctcgtctccagaagtccatttcagttgttctgatcaaattttcggatttttctttaactttgctgctatatgttataatgctcttaacaatgctgttatacatgttatgcttattttctttggagatactttgatgccataggattgtgttcaataatgcgatagctttccttccttgtgtgcacctttcttggatattcttgtccaatgttccatcttgtgtaattttaagacccaagtatttatattcctgacagtgattaatagttatttcattttccaacgctagatcctgctgtatacctccgaagcacatatattccgttttttggtgttcacttctaaaccccagctccggtactcttctatgatttttcgggtcatatattcaatatcgtgataatcctgggccataagaatctgatcatccgcaaaacatagagtgtatagcatgttatcatcatttagcggtatacccatattcttatatttccttttccaggatttcaaaacttgctcaaatatattttaaatagtgtcggtgatagacatcagccctgttttagacccttattcacttccaatcctgacgagatttccttgcctagcttaggaagctaggtaatttagcttagttaattaaaattaatgaaatcgtgatatggtaatagctatttgtataacgggg

SEQ ID NO: 2599 - DNA, 3090 bp, Diabrotica virgifera
  SmartBlast Evalue=3E-52; Info=Acyl-CoA-binding domain- containing protein 5 n=1 Tax=Camponotus floridanus RepID=E2AP57_ 9HYME
gtttgtcatgttgacatgaatgaagaatacataaggaagaattaaaatctacagttgtcctttataaacatgacgaccgaacaaaaatttaatgctgctgtgaatgtcattcgaagtttaccaaaaaatggttcctaccaacccagtaatgaattgatgcttagattttacgcatattttaaacaagctacaaacggaacatgcacaggatcacgccccgctttttgggatcttgtaggaagagcaaagtatgacgcttggaagagccttggagatatgcccaaacaagaggcaatgacaaaatatgtcgatgaattacattcgatagtagaaactatgagctattcagataaggtagctaatttcctagaagctcctaccaatgaattagatgcaataaacttcgacgacttggagttaattgctggagatgttatcgaaagagttagatcacaacctaattcacctttagcatcaagagaaggttctccaattaggtttggttctaaaagtcccagtgtaggatcaactccgtctgttgctcccagtactccagatgactcagatcacagtgatgatgaatatattgacacgatagagaatccagatcccccaagaatgaacatatctcacgatggtattccaaacggatacatacaaacaccacaaaatcaacatatttcaagatcaaaaattaaatccactacaaacgtagacgtgtcacaggaaatatctttggctgtacagagcctgcgagcggatatcgaaaatatatcgaagaaagttaattcattggaaaatgcaaataggttggtagcgaaacgacaaaagagattatttccaggagtccctaacaatttcttagcttttgtcatagcatggccttttatagccacatttatcatgaatcgatattggtatcgaaggaatctttaggaaaatttgaacaagtgtgaagtttagatacctgatactgtaggacaaaactagtcttttaatataaaattgttttttcaaagtagatggtcgaagatagcgatttataagaacttaacattgacaaaaggcctgctactaatagacaaaaaataaataatcatccaaggaaacaaaatatacatttaattttatagctaactataatataacgtgattataacgtataaataaaagtaattgtgcctttattgtaactattatttatagatagatatatatcatgctgagaagaatatctagagatattcttttcagcgtgatgttcacgacgcttcagattcaatttaaaagatattttgcctcggtatttttatctttcttgaaaaatacttttcatgtttaatagaccatacaagcacatacaagagaaattttagtggtgcgatgaagtattttatttctggaggactttttatcaagaatatctgcttctatggaacaaaatcctgctcaaaagaccaaatatgatgctcgcctcttatgctagatatcacacagtgagatgttcagagtcaagaagatttttccatcgagttgttgactgctgtttcacgtttcttttgcatctggtatctagtactacttgtaaataatcaattatttttatgactagatatgactgcttttatttttatcatgatatcaaaattgatacgtaaatttttaattaccacagtttgaaattttgttctttttaaaggaagatttttatattagtgtaaaaatatagtggcgcatgtcacctcacaaggcacatcgccgaagaaacaaatcgatacatttcaatagcagttaacataggagaggatcgcacctcgccaggcatctcgctatttgtttttaatatgcgatgatgcctggcgaggtgcgttgcttcactatatttctacacttagaaacgaataaacggcacatgctattacgtttttctgtaaacactttcattttgagcggtcgaataaatagaaatagtgtaatgagtgatagcaaacaaatgttagaatcaaaaacagatgaaagaaaaaggctaccagaacaataactattttaagctactgagccattttgaaaacactgaaaataattcagtatcactcaaacattttatcactcaatcccaatcgccattgttctctatcataacacatgtcttcgttcaagcttctttctctaatttccctatgattccctttatcccgcttttcctaggtcttcctcttttccgccgtccgtttggtgcccaccgcagtacttgcttggggtctttcgtcttccatatgttgtacacgtggccaaaccatcttagttgccttgtttttatatcgtcaattatagtgtgctttacatccattatttctaatattcttgtatttctaatttatctcttcttgatataccagtggctcgtctccagaagtccatttcagttgttctgatcaaattttcggatttttctttaactttgctgctatatgttataatgctcttaacaatgctgttatacatgttatgcttattttctttggagatactttgatgccataggattgtgttcaataatgcgatagctttccttccttgtgtgcacctttcttggatattcttgtccaatgttccatcttgtgtaattttaagacccaagtatttatattcctgacagtgattaatagttatttcattttccaacgctagatcctgctgtatacctccgaagcacatatattccgttttttggtgttcacttctaaaccccagctccggtactcttctatgatttttcgggtcatatattcaatatcgtgataatcctgggccataagaatctgatcatccgcaaaacatagagtgtatagcatgttatcatcatttagcggtatacccatattcttatatttccttttccaggatttcaaaacttgctcaaatatattttaaatagtgtcggtgatagacatcagccctgttttagacccttattcacttccaatcctgacgagatttccttgcctagcttaggaagctaggtaatttagcttagttaattaaaattaatgaaatcgtgatatggtaatagctatttgtataacgggg

SEQ ID NO: 2600 - DNA, 2262 bp, Diabrotica virgifera
  SmartBlast Evalue=5E-23; Info=Endonuclease-reverse transcriptase n=1 Tax=Bombyx mori RepID=D7F176_BOMMO
tttttatttatatatatgtatatatatgtgtgtatatatatatgtatatatgtatatatatgtgtatatatatatataatcgggttcataaacgttctacaacgtcttccgattcccaatcgccattgctctcgatcgtagcacatgtcttcgttcaagcctctttctctgatttccctacggattccttctatccagcttttcctaggtcttcctcttttccgccgtccttttggtgcccatcgtagcacttgcttgggtaatctgtcttcttccatacgttgtacgtgaccaaaccatcttagttgctttgtttttatatcgtccattattgtatgctttacatccattatctccaatattcttgtatttctgattttttgtattcttgatataccagcagatcttctccagaagtccatttcagttgttctgagcatattttcggatttttctttaagtggccaaacttcgctgctgtatgttataatgctcttaacaatgctgttatacatgttatgcttattttctttggagatactttgatgccataggattgtgttcaataatgcgatagctttccttccttgtgtgcacctttcttggatattcttgtccaatgttccatcttgtgtaattttaagacccaagtatttatattcctgacagtgattaatagttatttcattttccaacgctagatcctgctgtatacctccgaagcacatatattccgttttttggtgttcacttctaaaccccagctccggtactcttctatgatttttcgggtcatatattcaatatcgtgataatcctgggccataagaatctgatcatccgcaaaacatagagtgtatagcatgttatcatcatttagcggtatacccatattcttacatttccttttccaggatttcaaaacttgctctaaatatattttaaatagtgtcggcgatagacagcagccctgtttaagacccttattcacttcaaatcctgacgagatttccttgcctagcttaacttttgctatattatgttggtatagatttttacagctttaatgagcttcagattgatgttagttttttcgagggcttcccaaagtttactttatggcacagtgtcggatgcttttttttaagtatatgtacactaaatgaaattcttaattgtaggctatttgtttgtctattaactgtgttacacaatataggtggtcagtggtggatctgccagcacggaagccggcttgctcttcggcctctaaatctttttattcttcttctactttttacataattatagtaatggtattcttctgtaatattattggtttgttgcatcatcacgccacaccttgtagtcgatggaaataaatattatgtaagtgtttcagacatacagaaaaaaatggtcatcacaccgaatatggtctatcgattatctccgatagttttatttaaaaaataagctctgtagaagcggttttaaaaatacaatgttccaattaaaggaaccatctccgttttgttaggttttatatcattttgtttccaaatgtaacaaaataagatagtttctttcattaaagcattgtactgtgaaaacggccttcagtatggaatcttaaacatgaagtaagtaatttgttgattaattttggtttatttctaacaagatacttcataataaccgacggaccacataaaatatttacagaatcttatgtatgattttgcacataagtataaaaacattctgcaaatttttcaatataaaatcaagtaattattatcaaacccagtaaagcccatctctaatttaagtatttagtggtatatcaatattatggcagttaatgtaccactacgtagtaagtattttgcaatgtttcttaaatgttatggttatagctaaaccatctcaaatggacgttaaaaaattattctggtatctaaattcttcataattaaacggtaatgtcttaaatataatcaagctggttcaattttaggggatttttaattgtaggtggtctcagccaatatccatattgatatgtaaaggttgtaaagattattttattttctattgttggtgatatttaagtaaacttatacaatgtcatatttttattgttatgtatatatgaagttttatattattttggtttaaaataaacgattggaagtgcttgatagtattttgatccgaccatgcacaaaataatctttcgagtatattaattttgaactc

SEQ ID NO: 2601 - DNA, 1100 bp, Diabrotica virgifera
  SmartBlast Evalue=2E-15; Info=Endonuclease-reverse transcriptase n=1 Tax=Bombyx mori RepID=D7F169_BOMMO
tttttatttatatatatgtatatatatgtgtgtatatatatatgtatatatgtatatatatgtgtatatatatatataatcgggttcataaacgttctacaacgtcttccgattcccaatcgccattgctctcgatcgtagcacatgtcttcgttcaagcctctttctctgatttccctacggattccttctatccagcttttcctaggtcttcctcttttccgccgtccttttggtgcccatcgtagcacttgcttgggtaatctgtcttcttccatacgttgtacgtgaccaaaccatcttagttgctttgtttttatatcgtccattattgtatgctttacatccattatctccaatattcttgtatttctgattttttgtattcttgatataccagcagatcttctccagaagtccatttcagttgttctgagcatattttcggatttttctttaagtggccaaacttcgctgctgtatgttataatgctcttaacaatgctgttatacatgttatgcttattttctttggagatactttgatgccataggattgtgttcaataatgcgatagctttccttccttgtgtgcacctttcttggatattcttgtccaatgttccatcttgtgtaattttaagacccaagtatttatattcctgacagtgattaatagttatttcattttccaacgctagatcctgctgtatacctccgaagcacatatattccgttttttggtgttcacttctaaaccccagctccggtactcttctatgatttttcgggtcatatattcaatatcgtgataatcctgggccataagaatctgatcatccgcaaaacatagagtgtatagcatgttatcatcatttagcggtatacccatattcttatatttccttttccaggatttcaaaacttgctcaaatatattttaaatagtgtcggtgatagacatcagccctgttttagacccttattcacttccaatcctgacgagatttccttgcctagcttaggaagctaggtaatttagcttagttaattaaaattaatgaaatcgtgatatggtaatagctatttgtataacgggg

SEQ ID NO: 2602 - DNA, 2597 bp, Diabrotica virgifera
  SmartBlast Evalue=3E-70; Info=High mobility group protein DSP1 n=1 Tax=Harpegnathos saltator RepID=E2C895_9HYME
gaagccgtgtattagttgttcgaaagcttgaaagggtttagtacaagccttgcaacagcatcaacagatactttcacaagctccaatacctcacaaaggaagaatgccccgtgctaaggctgacgctaggcccagaggccgcatgactgcttatgctttctttgtacaaacatgcagagaagagcacaaaaagaaacatcccgaagagaacgtcgtcttcgctgaattctcgaagaaatgcgccgaaaggtggaagaccatgttggacaaggaaaagaaacgtttccacgaaatggccgaaaacgacaagaaacgttacgacaccgaaatgcagagctacactcctcccaagggagagaagcaacgcggcaaaaagaggaagcaaataaaagatcccaacgcacccaaacggtctttatctgctttcttctggttcagcaatgatgaacgcggtaaagttaaggctcaaaatcctgaatatggtgttggagacattgccaaagaattgggtagaaggtgggctgaagcagatcaagaggccaagggcaaatatgaggctttggctgataaagacaaagccagatatgaaaaagaaatgactgcatataaaaagaagaacaatcccgccttgcaacaagtgggacacccagtacctgaggaagacgtagatgaagaagatgaggaggtagatgaagatgaagacgagtaaacctgtaagataacctctctcgttttaagtcgccttctcattcctctattgtaaatatacatgttagcaagtgtattaatcaagttctcattttttattttttacccgaaacgaaaatgtgtgtacttacaaaactgacagtgtgtgagtgaccgacagatatccgcctttcattcatatttttttatttttttaatctgtcatatcctcaagggcattagcttacattgtaataaactgatgtgtaacggatacttttttgtaatttgtaaaaaaagcaactagaccactgacttgtattttaacattcattaacgactgaactcagacgggttaattttgctgctgttgtgagcaaatgtcctaaatacatctcatccaacaatttccattttatttttttaacgaaataatacaagaatgtgtgtagtgtattttttatgattcgacatggaattttcttcctcagcactgtcgttattcaaaggatagtgcaaagggtattcccgaatggggcttcgttataattcagttggtgttagctctttcggaggccctgtagttcgtaaacaaaaatttttctgttggggttgcaaattgacatcagttctgtttgaattagttttagttttaacacttttgtatcaaaaaagacaataaaatttgacatacaataaatggggctgagcgaagaagttcaggtttatttgtaagcgattgaaactttcacccgcttggattaatataacaaaaagtgtaaccatgttgattttgccataattttaatatagttaaaaagactaccgtaccctttttgcaggaatcgtttttccaagggtgaattttgacaatccattattcattaaaataattaataaattcaaatctttgatcaaagtcgtttgcaatttcaatttttcttttatattttgtagtatctgtatcctccagttatttatttataaaaaactgttcttttaagttgtatcacttttagtgtaatgtactctcttcattaaataaaaaacaaaataaattgttccccctacggtatttgcagagcagaatgtgtttttgttttcactataagaatgttcataccaaagttctgggaatgatcgctggagctcattttggcataatcgtttccatgatttgtttatagtatgttcaaagtggacaatatttttaagatggatattctttgtatagaatttgttgatttaaagacagaaatgggtttatgagggtatagaacaatggatcatcaatcatagataaattctaaaatctaaggaaatacaattttttggcacaagatcagccactacttgttgtgtattgttcttgtaataatttttattatgtgtttccccattagggatcattgtgttgatcgtggcattaaagtgttcagctaaaaatatggtccatttcaatgtaggtgaaattatccacagtattatgacaaccaatacgtaccctctaatatattctttgttacatttagaagtacaatgataaactgtgattttacaataaaaatgatatattagatggtttccgttagtacacaatttataatttcgcttacattacacccacaaaccacttccactaacagttttttctataaaattgttaactacgtttgacactttactcctgtcaaaactggtgtaccatatttacaacaaatatattaactacttattagttgtacttcattgtatttttaatgttaatatttaaatttgtgtgttcattaaatggacttgaggtttcatccttcatcagattgctctgtgttattttagggagaaggaaatagaaagcaatgtttgttttttatatctgataggaataataaaaaaataataaaattttc

SEQ ID NO: 2603 - DNA, 2599 bp, Diabrotica virgifera
  SmartBlast Evalue=3E-70; Info=High mobility group protein DSP1 n=1 Tax=Harpegnathos saltator RepID=E2C895_9HYME
gaagccgtgtattagttgttcgaaagcttgaaagggtttagtacaagccttgcaacagcatcaacagatactttcacaagctccaatacctcacaaaggaagaatgccccgtgctaaggctgacgctaggcccagaggccgcatgactgcttatgctttctttgtacaaacatgcagagaagagcacaaaaagaaacatcccgaagagaacgtcgtcttcgctgaattctcgaagaaatgcgccgaaaggtggaagaccatgttggacaaggaaaagaaacgtttccacgaaatggccgaaaacgacaagaaacgttacgacaccgaaatgcagagctacactcctcccaagggagagaagcaacgcggcaaaaagaggaagcaaataaaagatcccaacgcacccaaacggtctttatctgctttcttctggttcagcaatgatgaacgcggtaaagttaaggctcaaaatcctgaatatggtgttggagacattgccaaagaattgggtagaaggtgggctgaagcagatcaagaggccaagggcaaatatgaggctttggctgataaagacaaagccagatatgaaaaagaaatgactgcatataaaaagaagaacaatcccgccttgcaacaagtgggacacccagtacctgaggaagacgtagatgaagaagatgaggaggtagatgaagatgaagacgagtaaacctgtaagataacctctctcgttttaagtcgccttctcattcctctattgtaaatatacatgttagcaagtgtattaatcaagttctcattttttattttttacccgaaacgaaaatgtgtgtacttacaaaactgacagtgtgtgagtgaccgacagatatccgcctttcattcatatttttttatttttttaatctgtcatatcctcaagggcattagcttacattgtaataaactgatgtgtaacggatacttttttgtaatttgtaaaaaaagcaactagaccactgacttgtattttaacattcattaacgactgaactcagacgggttaattttgctgctgttgtgagcaaatgtcctaaatacatctcatccaacaatttccattttatttttttaacgaaataatacaagaatgtgtgtagtgtattttttatgattcgacatggaattttcttcctcagcactgtcgttattcaaaggatagtgcaaagggtattcccgaatggggcttcgttataattcagttggtgttagctctttcggaggccctgtagttcgtaaacaaaaatttttctgttggggttgcaaattgacatcagttctgtttgaattagttttagttttaacacttttgtatcaaaaaagacaataaaatttgacatacaataaatggggctgagcgaagaagttcaggtttatttgtaagcgattgaaactttcacccgcttggattaatataacaaaaagtgtaaccatgttgattttgccataattttaatatagttaaaaagactaccgtaccctttttgcaggaatcgtttttccaagggtgaattttgacaatccattattcattaaaataattaataaattcaaatctttgatcaaagtcgtttgcaatttcaatttttcttttatattttgtagtatctgtatcctccagttatttatttataaaaaactgttcttttaagttgtatcacttttagtgtaatgtactctcttcattaaataaaaaacaaaataaattgttccccctacggtatttgcagagcagaatgtgtttttgttttcactataagaatgttcataccaaagttctgggaatgatcgctggagctcattttggcataatcgtttccatgatttgtttatagtatgttcaaagtggacaatatttttaagatggatattctttgtatagaatttgttgatttaaagacagaaatgggtttatgagggtataaaacaatggatcatcaatcatagatacacaatctagaatctaaggaaatacaattttttggcacaagatcagccactacttgttgtgtattgttcttgtaataatttttattatgtgtttccccattagggatcattgtgttgatcgtggcattaaagtgttcagctaaaaatatggtccatttcaatgtaggtgaaattatccacagtattatgacaaccaatacgtaccctctaatatattctttgttacatttagaagtacaatgataaactgtgattttacaataaaaatgatatattagatggtttccgttagtacacaatttataatttcgcttacattacacccacaaaccacttccactaacagttttttctataaaattgttaactacgtttgacactttactcctgtcaaaactggtgtaccatatttacaacaaatatattaactacttattagttgtacttcattgtatttttaatgttaatatttaaatttgtgtgttcattaaatggacttgaggtttcatccttcatcagattgctctgtgttattttagggagaaggaaatagaaagcaatgtttgttttttatatctgataggaataataaaaaaataataaaattttc

SEQ ID NO: 2604 - DNA, 2596 bp, Diabrotica virgifera
  SmartBlast Evalue=3E-70; Info=High mobility group protein DSP1 n=1 Tax=Harpegnathos saltator RepID=E2C895_9HYME
gaagccgtgtattagttgttcgaaagcttgaaagggtttagtacaagccttgcaacagcatcaacagatactttcacaagctccaatacctcacaaaggaagaatgccccgtgctaaggctgacgctaggcccagaggccgcatgactgcttatgctttctttgtacaaacatgcagagaagagcacaaaaagaaacatcccgaagagaacgtcgtcttcgctgaattctcgaagaaatgcgccgaaaggtggaagaccatgttggacaaggaaaagaaacgtttccacgaaatggccgaaaacgacaagaaacgttacgacaccgaaatgcagagctacactcctcccaagggagagaagcaacgcggcaaaaagaggaagcaaataaaagatcccaacgcacccaaacggtctttatctgctttcttctggttcagcaatgatgaacgcggtaaagttaaggctcaaaatcctgaatatggtgttggagacattgccaaagaattgggtagaaggtgggctgaagcagatcaagaggccaagggcaaatatgaggctttggctgataaagacaaagccagatatgaaaaagaaatgactgcatataaaaagaagaacaatcccgccttgcaacaagtgggacacccagtacctgaggaagacgtagatgaagaagatgaggaggtagatgaagatgaagacgagtaaacctgtaagataacctctctcgttttaagtcgccttctcattcctctattgtaaatatacatgttagcaagtgtattaatcaagttctcattttttattttttacccgaaacgaaaatgtgtgtacttacaaaactgacagtgtgtgagtgaccgacagatatccgcctttcattcatatttttttatttttttaatctgtcatatcctcaagggcattagcttacattgtaataaactgatgtgtaacggatacttttttgtaatttgtaaaaaaagcaactagaccactgacttgtattttaacattcattaacgactgaactcagacgggttaattttgctgctgttgtgagcaaatgtcctaaatacatctcatccaacaatttccattttatttttttaacgaaataatacaagaatgtgtgtagtgtattttttatgattcgacatggaattttcttcctcagcactgtcgttattcaaaggatagtgcaaagggtattcccgaatggggcttcgttataattcagttggtgttagctctttcggaggccctgtagttcgtaaacaaaaatttttctgttggggttgcaaattgacatcagttctgtttgaattagttttagttttaacacttttgtatcaaaaaagacaataaaatttgacatacaataaatggggctgagcgaagaagttcaggtttatttgtaagcgattgaaactttcacccgcttggattaatataacaaaaagtgtaaccatgttgattttgccataattttaatatagttaaaaagactaccgtaccctttttgcaggaatcgtttttccaagggtgaattttgacaatccattattcattaaaataattaataaattcaaatctttgatcaaagtcgtttgcaatttcaatttttcttttatattttgtagtatctgtatcctccagttatttatttataaaaaactgttcttttaagttgtatcacttttagtgtaatgtactctcttcattaaataaaaaacaaaataaattgttccccctacggtatttgcagagcagaatgtgtttttgttttcactataagaatgttcataccaaagttctgggaatgatcgctggagctcattttggcataatcgtttccatgatttgtttatagtatgttcaaagtggacaatatttttaagatggatattctttgtatagaatttgttgatttaaagacagaaatgggtttatgagggtatagaacaatggatcatcaatcatagataaattctaaaatctaaggaaatacaattttttggcacaagatcagccactacttgtttgtattgttcttgtaataatttttataatgtgtttccccattagggatcattgtgttgatcgtggcattaaagtgttcagctaaaaatatggtccatttcaatgtaggtgaaattatccacagtattatgacaaccaatacgtaccctctaatatattctttgttacatttagaagtacaatgataaactgtgattttacaataaaaatgatatattagatggtttccgttagtacacaatttataatttcgcttacattacacccacaaaccacttccactaacagttttttctataaaattgttaactacgtttgacactttactcctgtcaaaactggtgtaccatatttacaacaaatatattaactacttattagttgtacttcattgtatttttaatgttaatatttaaatttgtgtgttcattaaatggacttgaggtttcatccttcatcagattgctctgtgttattttagggagaaggaaatagaaagcaatgtttgttttttatatctgataggaataataaaaaaataataaaattttc

SEQ ID NO: 2605 - DNA, 2575 bp, Diabrotica virgifera
  SmartBlast Evalue=3E-70; Info=High mobility group protein DSP1 n=1 Tax=Harpegnathos saltator RepID=E2C895_9HYME
aaagcttgaaagggtttagtacaagccttgcaacagcatcaacagatactttcacaagctccaatacctcacaaaggaagaatgccccgtgctaaggctgacgctaggcccagaggccgcatgactgcttatgctttctttgtacaaacatgcagagaagagcacaaaaagaaacatcccgaagagaacgtcgtcttcgctgaattctcgaagaaatgcgccgaaaggtggaagaccatgttggacaaggaaaagaaacgtttccacgaaatggctgaaaacgacaagaaacgttacgacaccgaaatgcagagctacactcctcccaagggagagaagcaacgcggcaaaaagaggaagcaaataaaagatcccaacgcacccaaacggtctttatctgctttcttctggttcagcaatgatgaacgcggtaaagttaaggctcaaaatcctgaatatggtgttggagacattgccaaagaattgggtagaaggtgggctgaagcagatcaagaggccaagggcaaatatgaggctttggctgataaagacaaagccagatatgaaaaagaaatgactgcatataaaaagaagaacaatcccgccttgcaacaagtgggacacccagtacctgaggaagacgtagatgaagaagatgaggaggtagatgaagatgaagacgagtaaacctgtaagataacctctctcgttttaagtcgccttctcattcctctattgtaaatatacatgttagcaagtgtattaatcaagttctcattttttattttttacccgaaacgaaaatgtgtgtacttacaaaactgacagtgtgtgagtgaccgacagatatccgcctttcattcatatttttttatttttttaatctgtcatatcctcaagggcattagcttacattgtaataaactgatgtgtaacggatacttttttgtaatttgtaaaaaaagcaactagaccactgacttgtattttaacattcattaacgactgaactcagacgggttaattttgctgctgttgtgagcaaatgtcctaaatacatctcatccaacaatttccattttatttttttaacgaaataatacaagaatgtgtgtagtgtattttttatgattcgacatggaattttcttcctcagcactgtcgttattcaaaggatagtgcaaagggtattcccgaatggggcttcgttataattcagttggtgttagctctttcggaggccctgtagttcgtaaacaaaaatttttctgttggggttgcaaattgacatcagttctgtttgaattagttttagttttaacacttttgtatcaaaaaagacaataaaatttgacatacaataaatggggctgagcgaagaagttcaggtttatttgtaagcgattgaaactttcacccgcttggattaatataacaaaaagtgtaaccatgttgattttgccataattttaatatagttaaaaagactaccgtaccctttttgcaggaatcgtttttccaagggtgaattttgacaatccattattcattaaaataattaataaattcaaatctttgatcaaagtcgtttgcaatttcaatttttcttttatattttgtagtatctgtatcctccagttatttatttataaaaaactgttcttttaagttgtatcacttttagtgtaatgtactctcttcattaaataaaaaacaaaataaattgttccccctacggtatttgcagagcagaatgtgtttttgttttcactataagaatgttcataccaaagttctgggaatgatcgctggagctcattttggcataatcgtttccatgatttgtttatagtatgttcaaagtggacaatatttttaagatggatattctttgtatagaatttgttgatttaaagacagaaatgggtttatgagggtatagaacaatggatcatcaatcatagataaattctaaaatctaaggaaatacaattttttggcacaagatcagccactacttgttgtgtattgttcttgtaataatttttattatgtgtttccccattagggatcattgtgttgatcgtggcattaaagtgttcagctaaaaatatggtccatttcaatgtaggtgaaattatccacagtattatgacaaccaatacgtaccctctaatatattctttgttacatttagaagtacaatgataaactgtgattttacaataaaaatgatatattagatggtttccgttagtacacaatttataatttcgcttacattacacccacaaaccacttccactaacagttttttctataaaattgttaactacgtttgacactttactcctgtcaaaactggtgtaccatatttacaacaaatatattaactacttattagttgtacttcattgtatttttaatgttaatatttaaatttgtgtgttcattaaatggacttgaggtttcatccttcatcagattgctctgtgttattttagggagaaggaaatagaaagcaatgtttgttttttatatctgataggaataataaaaaaataataaaattttc

SEQ ID NO: 2606 - DNA, 2577 bp, Diabrotica virgifera
  SmartBlast Evalue=3E-70; Info=High mobility group protein DSP1 n=1 Tax=Harpegnathos saltator RepID=E2C895_9HYME
aaagcttgaaagggtttagtacaagccttgcaacagcatcaacagatactttcacaagctccaatacctcacaaaggaagaatgccccgtgctaaggctgacgctaggcccagaggccgcatgactgcttatgctttctttgtacaaacatgcagagaagagcacaaaaagaaacatcccgaagagaacgtcgtcttcgctgaattctcgaagaaatgcgccgaaaggtggaagaccatgttggacaaggaaaagaaacgtttccacgaaatggctgaaaacgacaagaaacgttacgacaccgaaatgcagagctacactcctcccaagggagagaagcaacgcggcaaaaagaggaagcaaataaaagatcccaacgcacccaaacggtctttatctgctttcttctggttcagcaatgatgaacgcggtaaagttaaggctcaaaatcctgaatatggtgttggagacattgccaaagaattgggtagaaggtgggctgaagcagatcaagaggccaagggcaaatatgaggctttggctgataaagacaaagccagatatgaaaaagaaatgactgcatataaaaagaagaacaatcccgccttgcaacaagtgggacacccagtacctgaggaagacgtagatgaagaagatgaggaggtagatgaagatgaagacgagtaaacctgtaagataacctctctcgttttaagtcgccttctcattcctctattgtaaatatacatgttagcaagtgtattaatcaagttctcattttttattttttacccgaaacgaaaatgtgtgtacttacaaaactgacagtgtgtgagtgaccgacagatatccgcctttcattcatatttttttatttttttaatctgtcatatcctcaagggcattagcttacattgtaataaactgatgtgtaacggatacttttttgtaatttgtaaaaaaagcaactagaccactgacttgtattttaacattcattaacgactgaactcagacgggttaattttgctgctgttgtgagcaaatgtcctaaatacatctcatccaacaatttccattttatttttttaacgaaataatacaagaatgtgtgtagtgtattttttatgattcgacatggaattttcttcctcagcactgtcgttattcaaaggatagtgcaaagggtattcccgaatggggcttcgttataattcagttggtgttagctctttcggaggccctgtagttcgtaaacaaaaatttttctgttggggttgcaaattgacatcagttctgtttgaattagttttagttttaacacttttgtatcaaaaaagacaataaaatttgacatacaataaatggggctgagcgaagaagttcaggtttatttgtaagcgattgaaactttcacccgcttggattaatataacaaaaagtgtaaccatgttgattttgccataattttaatatagttaaaaagactaccgtaccctttttgcaggaatcgtttttccaagggtgaattttgacaatccattattcattaaaataattaataaattcaaatctttgatcaaagtcgtttgcaatttcaatttttcttttatattttgtagtatctgtatcctccagttatttatttataaaaaactgttcttttaagttgtatcacttttagtgtaatgtactctcttcattaaataaaaaacaaaataaattgttccccctacggtatttgcagagcagaatgtgtttttgttttcactataagaatgttcataccaaagttctgggaatgatcgctggagctcattttggcataatcgtttccatgatttgtttatagtatgttcaaagtggacaatatttttaagatggatattctttgtatagaatttgttgatttaaagacagaaatgggtttatgagggtataaaacaatggatcatcaatcatagatacacaatctagaatctaaggaaatacaattttttggcacaagatcagccactacttgttgtgtattgttcttgtaataatttttattatgtgtttccccattagggatcattgtgttgatcgtggcattaaagtgttcagctaaaaatatggtccatttcaatgtaggtgaaattatccacagtattatgacaaccaatacgtaccctctaatatattctttgttacatttagaagtacaatgataaactgtgattttacaataaaaatgatatattagatggtttccgttagtacacaatttataatttcgcttacattacacccacaaaccacttccactaacagttttttctataaaattgttaactacgtttgacactttactcctgtcaaaactggtgtaccatatttacaacaaatatattaactacttattagttgtacttcattgtatttttaatgttaatatttaaatttgtgtgttcattaaatggacttgaggtttcatccttcatcagattgctctgtgttattttagggagaaggaaatagaaagcaatgtttgttttttatatctgataggaataataaaaaaataataaaattttc

SEQ ID NO: 2607 - DNA, 2574 bp, Diabrotica virgifera
  SmartBlast Evalue=3E-70; Info=High mobility group protein DSP1 n=1 Tax=Harpegnathos saltator RepID=E2C895_9HYME
aaagcttgaaagggtttagtacaagccttgcaacagcatcaacagatactttcacaagctccaatacctcacaaaggaagaatgccccgtgctaaggctgacgctaggcccagaggccgcatgactgcttatgctttctttgtacaaacatgcagagaagagcacaaaaagaaacatcccgaagagaacgtcgtcttcgctgaattctcgaagaaatgcgccgaaaggtggaagaccatgttggacaaggaaaagaaacgtttccacgaaatggctgaaaacgacaagaaacgttacgacaccgaaatgcagagctacactcctcccaagggagagaagcaacgcggcaaaaagaggaagcaaataaaagatcccaacgcacccaaacggtctttatctgctttcttctggttcagcaatgatgaacgcggtaaagttaaggctcaaaatcctgaatatggtgttggagacattgccaaagaattgggtagaaggtgggctgaagcagatcaagaggccaagggcaaatatgaggctttggctgataaagacaaagccagatatgaaaaagaaatgactgcatataaaaagaagaacaatcccgccttgcaacaagtgggacacccagtacctgaggaagacgtagatgaagaagatgaggaggtagatgaagatgaagacgagtaaacctgtaagataacctctctcgttttaagtcgccttctcattcctctattgtaaatatacatgttagcaagtgtattaatcaagttctcattttttattttttacccgaaacgaaaatgtgtgtacttacaaaactgacagtgtgtgagtgaccgacagatatccgcctttcattcatatttttttatttttttaatctgtcatatcctcaagggcattagcttacattgtaataaactgatgtgtaacggatacttttttgtaatttgtaaaaaaagcaactagaccactgacttgtattttaacattcattaacgactgaactcagacgggttaattttgctgctgttgtgagcaaatgtcctaaatacatctcatccaacaatttccattttatttttttaacgaaataatacaagaatgtgtgtagtgtattttttatgattcgacatggaattttcttcctcagcactgtcgttattcaaaggatagtgcaaagggtattcccgaatggggcttcgttataattcagttggtgttagctctttcggaggccctgtagttcgtaaacaaaaatttttctgttggggttgcaaattgacatcagttctgtttgaattagttttagttttaacacttttgtatcaaaaaagacaataaaatttgacatacaataaatggggctgagcgaagaagttcaggtttatttgtaagcgattgaaactttcacccgcttggattaatataacaaaaagtgtaaccatgttgattttgccataattttaatatagttaaaaagactaccgtaccctttttgcaggaatcgtttttccaagggtgaattttgacaatccattattcattaaaataattaataaattcaaatctttgatcaaagtcgtttgcaatttcaatttttcttttatattttgtagtatctgtatcctccagttatttatttataaaaaactgttcttttaagttgtatcacttttagtgtaatgtactctcttcattaaataaaaaacaaaataaattgttccccctacggtatttgcagagcagaatgtgtttttgttttcactataagaatgttcataccaaagttctgggaatgatcgctggagctcattttggcataatcgtttccatgatttgtttatagtatgttcaaagtggacaatatttttaagatggatattctttgtatagaatttgttgatttaaagacagaaatgggtttatgagggtatagaacaatggatcatcaatcatagataaattctaaaatctaaggaaatacaattttttggcacaagatcagccactacttgtttgtattgttcttgtaataatttttataatgtgtttccccattagggatcattgtgttgatcgtggcattaaagtgttcagctaaaaatatggtccatttcaatgtaggtgaaattatccacagtattatgacaaccaatacgtaccctctaatatattctttgttacatttagaagtacaatgataaactgtgattttacaataaaaatgatatattagatggtttccgttagtacacaatttataatttcgcttacattacacccacaaaccacttccactaacagttttttctataaaattgttaactacgtttgacactttactcctgtcaaaactggtgtaccatatttacaacaaatatattaactacttattagttgtacttcattgtatttttaatgttaatatttaaatttgtgtgttcattaaatggacttgaggtttcatccttcatcagattgctctgtgttattttagggagaaggaaatagaaagcaatgtttgttttttatatctgataggaataataaaaaaataataaaattttc

SEQ ID NO: 2608 - DNA, 3650 bp, Diabrotica virgifera
  SmartBlast Evalue=2E-59; Info=Pol-like protein n=1 Tax= Biomphalaria glabrata RepID=A3FMR3_BIOGL
tgaaaatggttattcatttttgatttacatgtttactttgattggagtacgaagggaaccattctcgttggaactttaccgcgctgagcagatgggacgtgaattataaattgtaaaattccctcatcttccttagtcttagcatccgttatggcttgtaaattgtagaagcctcggaggtgttaccagagaaggttcccattgttttgggtctggtagcacgtagaatagcatttttggattttgctttgtgtgctattagattgaaaactttagttttttttaattctgtatttccaatggttggccacatagatggccctgtcatttgctataattaagtcttgttctgtgcaggtctctctcatctctgtgcatgatagtagatgccggctggtctgaaccgcgccacagtcgcaggtatcgtcctcctggtatccccattttttcaggttactagcacaacgtgaaacgccggttcttagtctgtttagcgctttccaagtcggatacggtaaattgtgtccagcagccatttcctccgagggaggaaaatgtgtcgcggtagctgacgcttgccataggtgtattcggcgcgtctctggcgcttcggggatggatcttgatgttttcaggaagcttttccgagatcttagtctgcttggctgagtttggtggtcatataaggggtgtcttcggtccgtctcctgctttttccgttctacctctgacgtgaccttcctcctgataggtggtggagcaattccagcaatggggtatacctcttcgataggtgtcggtttcaggcaacccgatattatacggaccgtttcatttagagccacgtcgacgttctttgcgtgagcagagtttgcccatactggtgctccaaactccgcggccgaaaaacataatgccaaggcagaagtgcggagagtgtgtggttgtgctccccattttgtattagttagcttgcggatgatattatttctggcacttactttcttcttgacatcttgacagtggtatcggtaagacagagttctatccagacggacgccaaggtattttggcgtcttgttgtgttccagcatctgaccacgccattccacctccagcgaccttcgggcatgcttgtttctcaggtggaaagcacatacctgggtttttgtgggattgggtttcagatggtttttatcatagtatagagctaagtctcccagggcatctgtcagtttcacttcgacttcattgaaggttcttccctgagctgccacagctgtatcatcagcgtaaataaattgccttgtttgttggtgtatgggttggtcgttggtgtatatgttgtatagaatcggcgcgaggacacttccctgtggtagcccatttttttggtccctccaccgactgttcttggactggagcgttacgtagaagcgtctattctggaggagacatttcactaaccttgttagtcggaaatcctttgtagtttcgtagagttttgcgagtagccgttgatggttaactgtgtcataggcggcagttaggtctatgaacgctactcctgttatttccttccgttcaaaaccatcttcaatatgttgggtgagattaagaatttgactgcagcagcactttccgggtctgaatcctgcttgttctggaataattttagtctccacatattctgcgatccggttcagtatcattctttcaaaggccttgaaaaggtggcacaagagagatacaggtctaaaactctttgtatccgccggatccttccctggttttaagagggctaccactctagctttcctccagattttggggatttgtaatgtacggatgcagcaattcatcatttttacgagccactctacggtttttagtccaaagttctttatttgctctgttcgtatgtcgtccaggccagccgctttattatctttcatttgatggatcgcgcctctcatctcctctagacaaaaagaggtacctagaacatctctttcttcgtcgatattccgttgagctctcaccttgttctttcttgatgtcgtcttaccgttcattagaagatgatgggctatctgatcgggtgtgacttctgtcatgttgactgccggagcagcgggatcgttgccaagattccgaatcagcttccaggcacgtctgctgttttgtttcatgtccagactcgtgaccagcttgcaccacctttccgttctgttggcggatatcgcatgtaacatttcctccccagcctgtattgtcgcttccgagaaagggtcttcttcatatagctgttcgtatcttttaagtaggggtttagattcttcattgagccccgctatgtactcagttcgacaacctctagggataaatttccgtgatacttgctttacgatttctacaaatttatcgtatgaatcagggcaaggttctagctgggaaacttcttgatccaatgtttcagagaatttttcccattttgctttagtaaagttgaaccttctcttgaaaggaacaatttcgtatctgattgccgcgttggaaagacaaattattggtctgtgctgtgtctttgggagggcgcttccaacgatttttgtcacctggtctccaattctgtcgctgacaaatatattgtctgggttataacctctgcgccatcttccgctgttgaacgacgcaggctgctttggatcgtgaataagttttaggttcatgctttcagcccatttttctagttcttcgccattggaatctgtttcgttataaccccacgcgacactatgacagttgaagtcacccagtacgaatttgatttgctgtgattgaaagttattcggttcctcaaaagcaaagtcagcgtttggtggtttgtagattgacgttactgtacaggagtttatctccactgtgaggatctcgatgtcattttgatctgttagagatgtggatgctacgtcgatatctggtctgacgaagactgcgctaccatattggtcgtgtggtctctccagtatgagcttcataccccgaatccttggtctgcggcttgcagtacctctatgggtttcttgaaccagtagaacatcgacaccatgttctctgcacatattagacaataggtcttctttatctgctgatagtccttcaatattaattgaggtcgtcatcaaaaatggccttgataaagaccgttttgattttgattgcatctgtgttgttggtgcaccggtgttgaaaggattagccgaccttactcgtttccaggggacgcccgattgtattcacaagtgatcacaatctacgtggaggctcctttcatgtcccctatttttcgataaagatataataaaaatatgacttaataaatgcattaacaaatatattcaaattcttgccagaaactaacaatttgtagattacactgatggctttggtatctgattcgatcgtaacttcttgatgtcgaatggtacagctgttgacttctcttgacctgggctcgatggatggcctcaggtcagtgcagctctagtttactggtggtgttggtcgctgcagtctagttgcgatgcatcctgtcgtctttgcctgaagagtagcatcaccggtgatgaaggcaggtggctcccgaa

SEQ ID NO: 2609 - DNA, 3600 bp, Diabrotica virgifera
  SmartBlast Evalue=2E-51; Info=Pol-like protein n=1 Tax= Biomphalaria glabrata RepID=A3FMR3_BIOGL
tgaaaatggttattcatttttgatttacatgtttactttgattggagtacgaagggaaccattctcgttggaactttaccgcgctgagcagatgggacgtgaattataaattgtaaaattccctcatcttccttagtcttagcatccgttatggcttgtaaattgtagaagcctcggaggtgttaccagagaaggttcccattgttttgggtctggtagcacgtagaatagcatttttggattttgctttgtgtgctattagattgaaaactttagttttttttaattctgtatttccaatggttggccacatagatggccctgtcatttgctataattaagtcttgttctgtgcaggtctctctcatctctgtgcatgatagtagatgccggctggtctgaaccgcgccacagtcgcaggtatcgtcctcctggtatccccattttttcaggttactagcacaacgtgaaacgccggttcttagtctgtttagcgctttccaagtcggatacggtaaattgtgtccagcagccatttcctccgagggaggaaaatgtgtcgcggtagctgacgcttgccataggtgtattcggcgcgtctctggcgcttcggggatggatcttgatgttttcaggaagcttttccgagatcttagtctgcttggctgagtttggtggtcatataaggggtgtcttcggtccgtctcctgctttttccgttctacctctgacgtgaccttcctcctgataggtggtggagcaattccagcaatggggtatacctcttcgataggtgtcggtttcaggcaacccgatattatacggaccgtttcatttagagccacgtcgacgttctttgcgtgagcagagtttgcccatactggtgctccaaactccgcggccgaaaaacataatgccaaggcagaagtgcggagagtgtgtggttgtgctccccattttgtattagttagcttgcggatgatattatttctggcacttactttcttcttgacatcttgacagtggtatcggtaagacagagttctatccagacggacgccaaggtattttggcgtcttgttgtgttccagcatctgaccacgccattccacctccagcgaccttcgggcatgcttgtttctcaggtggaaagcacatacctgggtttttgtgggattgggtttcagatggtttttatcatagtatagagctaagtctcccagggcatctgtcagtttcacttcgacttcattgaaggttcttccctgagctgccacagctgtatcatcagcgtaaataaattgccttgtttgttggtgtatgggttggtcgttggtgtatatgttgtatagaatcggcgcgaggacacttccctgtggtagcccattttttggtccctccaccgactgttcttgtccttattagtcggaaatcctttgtagtttcgtagagttttgcgagtagccgttgatggttaactgtgtcataggcggcagttaggtctatgaacgctactcctgttatttccttccgttcaaaaccatcttcaatatgttgggtgagattaagaatttgactgcagcagcactttccgggtctgaatcctgcttgttctggaataattttagtctccacatattctgcgatccggttcagtatcattctttcaaaggccttgaaaaggtggcacaagagagatacaggtctaaaactctttgtatccgccggatccttccctggttttaagagggctaccactctagctttcctccagattttggggatttgtaatgtacggatgcagcaattcatcatttttacgagccactctacggtttttagtccaaagttctttatttgctctgttcgtatgtcgtccaggccagccgctttattatctttcatttgatggatcgcgcctctcatctcctctagacaaaaagaggtacctagaacatctctttcttcgtcgatattccgttgagctctcaccttgttctttcttgatgtcgtcttaccgttcattagaagatgatgggctatctgatcgggtgtgacttctgtcatgttgactgccggagcagcgggatcgttgccaagattccgaatcagcttccaggcacgtctgctgttttgtttcatgtccagactcgtgaccagcttgcaccacctttccgttctgttggcggatatcgcatgtaacatttcctccccagcctgtattgtcgcttccgagaaagggtcttcttcatatagctgttcgtatcttttaagtaggggtttagattcttcattgagccccgctatgtactcagttcgacaacctctagggataaatttccgtgatacttgctttacgatttctacaaatttatcgtatgaatcagggcaaggttctagctgggaaacttcttgatccaatgtttcagagaatttttcccattttgctttagtaaagttgaaccttctcttgaaaggaacaatttcgtatctgattgccgcgttggaaagacaaattattggtctgtgctgtgtctttgggagggcgcttccaacgatttttgtcacctggtctccaattctgtcgctgacaaatatattgtctgggttataacctctgcgccatcttccgctgttgaacgacgcaggctgctttggatcgtgaataagttttaggttcatgctttcagcccatttttctagttcttcgccattggaatctgtttcgttataaccccacgcgacactatgacagttgaagtcacccagtacgaatttgatttgctgtgattgaaagttattcggttcctcaaaagcaaagtcagcgtttggtggtttgtagattgacgttactgtacaggagtttatctccactgtgaggatctcgatgtcattttgatctgttagagatgtggatgctacgtcgatatctggtctgacgaagactgcgctaccatattggtcgtgtggtctctccagtatgagcttcataccccgaatccttggtctgcggcttgcagtacctctatgggtttcttgaaccagtagaacatcgacaccatgttctctgcacatattagacaataggtcttctttatctgctgatagtccttcaatattaattgaggtcgtcatcaaaaatggccttgataaagaccgttttgattttgattgcatctgtgttgttggtgcaccggtgttgaaaggattagccgaccttactcgtttccaggggacgcccgattgtattcacaagtgatcacaatctacgtggaggctcctttcatgtcccctatttttcgataaagatataataaaaatatgacttaataaatgcattaacaaatatattcaaattcttgccagaaactaacaatttgtagattacactgatggctttggtatctgattcgatcgtaacttcttgatgtcgaatggtacagctgttgacttctcttgacctgggctcgatggatggcctcaggtcagtgcagctctagtttactggtggtgttggtcgctgcagtctagttgcgatgcatcctgtcgtctttgcctgaagagtagcatcaccggtgatgaaggcaggtggctcccgaa

SEQ ID NO: 2610 - DNA, 3370 bp, Diabrotica virgifera
  SmartBlast Evalue=2E-59; Info=Pol-like protein n=1 Tax= Biomphalaria glabrata RepID=A3FMR3_BIOGL
tttaaattctgtatttccaatggttggccacatagatggccctgtcatttgctataattaagtcttgttctgtgcaggtctctctcatctctgtgcatgatagtagatgccggctggtctgaaccgcgccacagtcgcaggtatcgtcctcctggtatccccattttttcaggttactagcacaacgtgaaacgccggttcttagtctgtttagcgctttccaagtcggatacggtaaattgtgtccagcagccatttcctccgagggaggaaaatgtgtcgcggtagctgacgcttgccataggtgtattcggcgcgtctctggcgcttcggggatggatcttgatgttttcaggaagcttttccgagatcttagtctgcttggctgagtttggtggtcatataaggggtgtcttcggtccgtctcctgctttttccgttctacctctgacgtgaccttcctcctgataggtggtggagcaattccagcaatggggtatacctcttcgataggtgtcggtttcaggcaacccgatattatacggaccgtttcatttagagccacgtcgacgttctttgcgtgagcagagtttgcccatactggtgctccaaactccgcggccgaaaaacataatgccaaggcagaagtgcggagagtgtgtggttgtgctccccattttgtattagttagcttgcggatgatattatttctggcacttactttcttcttgacatcttgacagtggtatcggtaagacagagttctatccagacggacgccaaggtattttggcgtcttgttgtgttccagcatctgaccacgccattccacctccagcgaccttcgggcatgcttgtttctcaggtggaaagcacatacctgggtttttgtgggattgggtttcagatggtttttatcatagtatagagctaagtctcccagggcatctgtcagtttcacttcgacttcattgaaggttcttccctgagctgccacagctgtatcatcagcgtaaataaattgccttgtttgttggtgtatgggttggtcgttggtgtatatgttgtatagaatcggcgcgaggacacttccctgtggtagcccatttttttggtccctccaccgactgttcttggactggagcgttacgtagaagcgtctattctggaggagacatttcactaaccttgttagtcggaaatcctttgtagtttcgtagagttttgcgagtagccgttgatggttaactgtgtcataggcggcagttaggtctatgaacgctactcctgttatttccttccgttcaaaaccatcttcaatatgttgggtgagattaagaatttgactgcagcagcactttccgggtctgaatcctgcttgttctggaataattttagtctccacatattctgcgatccggttcagtatcattctttcaaaggccttgaaaaggtggcacaagagagatacaggtctaaaactctttgtatccgccggatccttccctggttttaagagggctaccactctagctttcctccagattttggggatttgtaatgtacggatgcagcaattcatcatttttacgagccactctacggtttttagtccaaagttctttatttgctctgttcgtatgtcgtccaggccagccgctttattatctttcatttgatggatcgcgcctctcatctcctctagacaaaaagaggtacctagaacatctctttcttcgtcgatattccgttgagctctcaccttgttctttcttgatgtcgtcttaccgttcattagaagatgatgggctatctgatcgggtgtgacttctgtcatgttgactgccggagcagcgggatcgttgccaagattccgaatcagcttccaggcacgtctgctgttttgtttcatgtccagactcgtgaccagcttgcaccacctttccgttctgttggcggatatcgcatgtaacatttcctccccagcctgtattgtcgcttccgagaaagggtcttcttcatatagctgttcgtatcttttaagtaggggtttagattcttcattgagccccgctatgtactcagttcgacaacctctagggataaatttccgtgatacttgctttacgatttctacaaatttatcgtatgaatcagggcaaggttctagctgggaaacttcttgatccaatgtttcagagaatttttcccattttgctttagtaaagttgaaccttctcttgaaaggaacaatttcgtatctgattgccgcgttggaaagacaaattattggtctgtgctgtgtctttgggagggcgcttccaacgatttttgtcacctggtctccaattctgtcgctgacaaatatattgtctgggttataacctctgcgccatcttccgctgttgaacgacgcaggctgctttggatcgtgaataagttttaggttcatgctttcagcccatttttctagttcttcgccattggaatctgtttcgttataaccccacgcgacactatgacagttgaagtcacccagtacgaatttgatttgctgtgattgaaagttattcggttcctcaaaagcaaagtcagcgtttggtggtttgtagattgacgttactgtacaggagtttatctccactgtgaggatctcgatgtcattttgatctgttagagatgtggatgctacgtcgatatctggtctgacgaagactgcgctaccatattggtcgtgtggtctctccagtatgagcttcataccccgaatccttggtctgcggcttgcagtacctctatgggtttcttgaaccagtagaacatcgacaccatgttctctgcacatattagacaataggtcttctttatctgctgatagtccttcaatattaattgaggtcgtcatcaaaaatggccttgataaagaccgttttgattttgattgcatctgtgttgttggtgcaccggtgttgaaaggattagccgaccttactcgtttccaggggacgcccgattgtattcacaagtgatcacaatctacgtggaggctcctttcatgtcccctatttttcgataaagatataataaaaatatgacttaataaatgcattaacaaatatattcaaattcttgccagaaactaacaatttgtagattacactgatggctttggtatctgattcgatcgtaacttcttgatgtcgaatggtacagctgttgacttctcttgacctgggctcgatggatggcctcaggtcagtgcagctctagtttactggtggtgttggtcgctgcagtctagttgcgatgcatcctgtcgtctttgcctgaagagtagcatcaccggtgatgaaggcaggtggctcccgaa

SEQ ID NO: 2611 - DNA, 3320 bp, Diabrotica virgifera
  SmartBlast Evalue=2E-51; Info=Pol-like protein n=1 Tax= Biomphalaria glabrata RepID=A3FMR3_BIOGL
tttaaattctgtatttccaatggttggccacatagatggccctgtcatttgctataattaagtcttgttctgtgcaggtctctctcatctctgtgcatgatagtagatgccggctggtctgaaccgcgccacagtcgcaggtatcgtcctcctggtatccccattttttcaggttactagcacaacgtgaaacgccggttcttagtctgtttagcgctttccaagtcggatacggtaaattgtgtccagcagccatttcctccgagggaggaaaatgtgtcgcggtagctgacgcttgccataggtgtattcggcgcgtctctggcgcttcggggatggatcttgatgttttcaggaagcttttccgagatcttagtctgcttggctgagtttggtggtcatataaggggtgtcttcggtccgtctcctgctttttccgttctacctctgacgtgaccttcctcctgataggtggtggagcaattccagcaatggggtatacctcttcgataggtgtcggtttcaggcaacccgatattatacggaccgtttcatttagagccacgtcgacgttctttgcgtgagcagagtttgcccatactggtgctccaaactccgcggccgaaaaacataatgccaaggcagaagtgcggagagtgtgtggttgtgctccccattttgtattagttagcttgcggatgatattatttctggcacttactttcttcttgacatcttgacagtggtatcggtaagacagagttctatccagacggacgccaaggtattttggcgtcttgttgtgttccagcatctgaccacgccattccacctccagcgaccttcgggcatgcttgtttctcaggtggaaagcacatacctgggtttttgtgggattgggtttcagatggtttttatcatagtatagagctaagtctcccagggcatctgtcagtttcacttcgacttcattgaaggttcttccctgagctgccacagctgtatcatcagcgtaaataaattgccttgtttgttggtgtatgggttggtcgttggtgtatatgttgtatagaatcggcgcgaggacacttccctgtggtagcccattttttggtccctccaccgactgttcttgtccttattagtcggaaatcctttgtagtttcgtagagttttgcgagtagccgttgatggttaactgtgtcataggcggcagttaggtctatgaacgctactcctgttatttccttccgttcaaaaccatcttcaatatgttgggtgagattaagaatttgactgcagcagcactttccgggtctgaatcctgcttgttctggaataattttagtctccacatattctgcgatccggttcagtatcattctttcaaaggccttgaaaaggtggcacaagagagatacaggtctaaaactctttgtatccgccggatccttccctggttttaagagggctaccactctagctttcctccagattttggggatttgtaatgtacggatgcagcaattcatcatttttacgagccactctacggtttttagtccaaagttctttatttgctctgttcgtatgtcgtccaggccagccgctttattatctttcatttgatggatcgcgcctctcatctcctctagacaaaaagaggtacctagaacatctctttcttcgtcgatattccgttgagctctcaccttgttctttcttgatgtcgtcttaccgttcattagaagatgatgggctatctgatcgggtgtgacttctgtcatgttgactgccggagcagcgggatcgttgccaagattccgaatcagcttccaggcacgtctgctgttttgtttcatgtccagactcgtgaccagcttgcaccacctttccgttctgttggcggatatcgcatgtaacatttcctccccagcctgtattgtcgcttccgagaaagggtcttcttcatatagctgttcgtatcttttaagtaggggtttagattcttcattgagccccgctatgtactcagttcgacaacctctagggataaatttccgtgatacttgctttacgatttctacaaatttatcgtatgaatcagggcaaggttctagctgggaaacttcttgatccaatgtttcagagaatttttcccattttgctttagtaaagttgaaccttctcttgaaaggaacaatttcgtatctgattgccgcgttggaaagacaaattattggtctgtgctgtgtctttgggagggcgcttccaacgatttttgtcacctggtctccaattctgtcgctgacaaatatattgtctgggttataacctctgcgccatcttccgctgttgaacgacgcaggctgctttggatcgtgaataagttttaggttcatgctttcagcccatttttctagttcttcgccattggaatctgtttcgttataaccccacgcgacactatgacagttgaagtcacccagtacgaatttgatttgctgtgattgaaagttattcggttcctcaaaagcaaagtcagcgtttggtggtttgtagattgacgttactgtacaggagtttatctccactgtgaggatctcgatgtcattttgatctgttagagatgtggatgctacgtcgatatctggtctgacgaagactgcgctaccatattggtcgtgtggtctctccagtatgagcttcataccccgaatccttggtctgcggcttgcagtacctctatgggtttcttgaaccagtagaacatcgacaccatgttctctgcacatattagacaataggtcttctttatctgctgatagtccttcaatattaattgaggtcgtcatcaaaaatggccttgataaagaccgttttgattttgattgcatctgtgttgttggtgcaccggtgttgaaaggattagccgaccttactcgtttccaggggacgcccgattgtattcacaagtgatcacaatctacgtggaggctcctttcatgtcccctatttttcgataaagatataataaaaatatgacttaataaatgcattaacaaatatattcaaattcttgccagaaactaacaatttgtagattacactgatggctttggtatctgattcgatcgtaacttcttgatgtcgaatggtacagctgttgacttctcttgacctgggctcgatggatggcctcaggtcagtgcagctctagtttactggtggtgttggtcgctgcagtctagttgcgatgcatcctgtcgtctttgcctgaagagtagcatcaccggtgatgaaggcaggtggctcccgaa

SEQ ID NO: 2612 - DNA, 977 bp, Diabrotica virgifera
tgaaaatggttattcatttttgatttacatgtttactttgattggagtacgaagggaaccattctcgttggaactttaccgcgctgagcagatgggacgtgaattataaattgtaaaattccctcatcttccttagtcttagcatccgttatggcttgtaaattgtagaagcctcggaggtgttaccagagaaggttcccattgttttgggtctggtagcacgtagaatagcatttttggattttgctttgtgtgctattagattgaaaactttagttttttttaattctgtatttccaatggttggccacatagatggccctgtcatttgctataattaagtcttgttctgtgcaggtctctctcatctctgtgcatgatagtagatgccggctggtctgaaccgcgccacagtcgcaggtatcgtcctcctggtatccccattttttcaggttactagcacaacgtgaaacgccggttcttagtctgtttagcgctttccaagtcggatacggtaaattgtgtccagcagccatttcctccgagggaggaaaatgtgtcgcggtagctgacgcttgccataggtgtattcggcgcgtctctggcgcttcggggatggatcttgatgttttcaggaagcttttccgagatcttggtctgcttggctgagtttggtggtcatataaggggtgtcttcggtccgtctcctgcttttttcgttctacctctgacgtgaccttcctcctgatacgtggtggagcaattccagctatggggtatacctcttcgataggtgtcggtttcaggcaacccgatattataagaaccgtttcatttagagccacgtcgacgttctttgcgtgagcagagtttgcccatactggtgcccaaactcctggtgtggttgtgctccccattttgtattagttagcttgcggatgatattatttctggcacttactttcttcttgacatct

SEQ ID NO: 2613 - DNA, 697 bp, Diabrotica virgifera
tttaaattctgtatttccaatggttggccacatagatggccctgtcatttgctataattaagtcttgttctgtgcaggtctctctcatctctgtgcatgatagtagatgccggctggtctgaaccgcgccacagtcgcaggtatcgtcctcctggtatccccattttttcaggttactagcacaacgtgaaacgccggttcttagtctgtttagcgctttccaagtcggatacggtaaattgtgtccagcagccatttcctccgagggaggaaaatgtgtcgcggtagctgacgcttgccataggtgtattcggcgcgtctctggcgcttcggggatggatcttgatgttttcaggaagcttttccgagatcttggtctgcttggctgagtttggtggtcatataaggggtgtcttcggtccgtctcctgcttttttcgttctacctctgacgtgaccttcctcctgatacgtggtggagcaattccagctatggggtatacctcttcgataggtgtcggtttcaggcaacccgatattataagaaccgtttcatttagagccacgtcgacgttctttgcgtgagcagagtttgcccatactggtgcccaaactcctggtgtggttgtgctccccattttgtattagttagcttgcggatgatattatttctggcacttactttcttcttgacatct

SEQ ID NO: 2614 - DNA, 3949 bp, Diabrotica virgifera
  SmartBlast Evalue=1E-98; Info="Tob1 protein, putative n=1 Tax= Pediculus humanus corporis RepID=E0V9H7_PEDHC"
gtgagtgctaaaacacagtgatcgtactagtccaaaacatcttttatattttctacttttatatctaattgtatagtttcgttatttttattacttagaagtttatattttctcatcgttttatacgcttctgatttgtatattggctataagaaactcacaagaactgaacaaaaacacgtaccttaatttcacaaagaaacggaatagaagcaaacataacttacccttaaaaacaaaagaaatcaatgtgtttataaattttcccaacgaagaacccactacatctacacattctcaaaatgcatattgaagtgcaagtagctctaaattttgtaatttcgtacctgtacaacaaactcccgaggaggcgagtaaatatattcggcgaagagttggaaaaagccttaaaagagaaattccagggccactggtatccagacaagccgtacaaaggctccgctttcagatgcctaaagacaggtgacccaatcgacaaagttctagagagggcagccagagaaagtggtgttcccatcaccgatatcttggaaaaccttccccaagaattggcagtttgggttgatcccggtgaagttagctaccgcattggagaaaagggagctgtcaaaatcctatttagcgacaaaggtgacccacaagacgagcattccgcagaccgagaagtcaccaaaactttcaaccccgaagctcagtgcttccgacccatcgagtgcgtcacatcaagcatgaataacttgagcatttctcccaaaacgcttactccgttcacggccaatcctccgcaaaacaaccctgtgggagcgcaactacaccaacagataccgatttcacagcataacggaaaccacggaaaccaggccccgcccaataaccacatcaatcaattgtcgccaccttccttagcaccatcaccaactttgaacacctcttacaaaggctcgccatcgcccgtaccggcattcatacccagaactactacgcccttaaccttcactacggctacctttgctcaaacgaaatttggtagcactaagttgaaaacaagcagcaaaagagctaatagaatgtctcccaccgaattctcaaactacatcaagcaaagagcaatgcaacaacaactccatcaacaagccccgcaccactccccagcaggtcgcgcactgtcccccgacccatccacatattatttccctcacggccactatcccccgcaattcccccctagatccgtgtttgagtcttccaaccaatttttgagtcccgacgtttattccggcaagctgccgttcgagcactcaacacccttgggaccatattatcccaacaacggacaggtaggggcaccaccgtcagctcccaccactccccaggacaatgggaaactggacaactggccctatcccaccgctgggcagtaccagcatctgctcgttgctaactgaggagcttcataggcgcgggatctttttctgtctgatagaagtatttgtttgaggggtctttaaggtttaaaaggtgctgtataattaaataataaatgtctagttctccacgtgaaatgatatttttgaaataaatctatagattacgtatatatacttatcagaacatgttagtattatctttattttgttcacgtgttgaataggtgttccattttatattaggctaataatatctacacgtactcttactaagcaatttatctgttggtcgtcgcaatcataaactgtttttataataagcggacaatctgagaatattatcacagtaattcgagaagtcctaaagtgaattacccagttacgaatgtgtttaatcaaaaaaaaaagatattttacatgttttttgttaattttcaaattgtacaggtagggcattggtctaaccagtatgtgatctctaaaaatcaaatgttgtaaacagattatatcacaacatctttgaagttactcagtaaccaataactgatattatatatatggtcctttgagccggatcataaaaaaaaacctaatcgagaacgttatgagttaagcatccttacatcataattttaaagtttcatacttcaataactaaacgtattcttagttttctagttatgtaattgtatttatatttaaaacgtaaaatatcattttagagattaaacacgaagtgtatgtcaccttttgtaacaaaaacgtgcactccaatcacgtgcaccaaaaaaattttaatacttcttacttaaacctcatactacaacccccaaactacgctttgcttttccttactactgtatttttgatatttgtgtgataatgataatatagtaaaaacacaaaatcattatttgataaaactaaaacaaatgggttatgtaaaataaatgataaaatgactagtaccttcacttgagcccatgatattgtctctagagtaatactgtgtgtatcgttttaccgatgtgtgcaatatttataaatgtttttatggattagtagttaatgataaatatgtagaaaattttgttaatgttggtagatgatttattgtaaaaacacgtagattgttcgaacgacgagaacttcacgacacggattcaatctaatcagcaatttttacatttttttacaatttgaatatttgaacagcaaatctacaatagttaaatgaagaataattatcaaactatcattattcataatgagaagcatagggcttttcatcgattgtcatttgtttcgagcttctgtcacatgttgtataatctgtgtataacattaatatacacggattataaatgacatgtgacagaggctcgaaacaaatgactgtgaatgaaaagccctattgaaaagccttattagcattatgtcaataaaacttcacgtcataacgtcagttggtatagggcttttcattcacagtcatttgtttcgagcttctgtcatgtgtcgtctaatattagtatatctacgtcatacgttattggtattgccaatgatacaaataagacgtatgacgtggatatgttgatgttatgtgacacatgacggaggctcgaaacaaatgacaatcgatgaaaagccctattaacaagcacttggcagtaacatataaacaaactggacattaagtcataaaaacttcctcatttcgtgctataatatgaacaaaaactattaacaatgtcaataaaacttgacatccggtcacaaaaatgtcgccatttagtgctagatcaacaaaacagtcaacattattattaaaacaaccattattcagtattctaccaggaaaacagtatatacctatagcacttttctaaacgaacaaaagtggaacatttgattgacacttgatcgtaacattatcattttatagtgaaatcataaaatatctgatttagtatgttgacatatgacatatatcaacaaaactggctattcggttataaaacagttataaaccaaaactggtcatatggtcatgaaagtgttattattatgtaatatactaacaaaaaacagcattatattataacattaccactgactattgatgctacgtgaataaccgaacattttatcataaaagaactactagtaagtgatctgtaaaagtcaaagatttatttataaaaagtcacaatcaatggtatagctacataactggtcataaactattattacgtgctatatcaacaaccacaggatattatatcatagcagttccactcaccagtactgtcaataaaaattgacatttggtgataaaaaatgtcaaatgtgatgatattttaacacttaatgaaataggtagggaaccatagaaactttctattcaaattggtctgtaggtttgtcaaagatggagaagataccaaaaatggcctaaataaatatacatagacccgtaaatgtgaaacaaaatgtgt

SEQ ID NO: 2615 - DNA, 3263 bp, Diabrotica virgifera
  SmartBlast Evalue=1E-32; Info="Tob1 protein, putative n=1 Tax= Pediculus humanus corporis RepID=E0V9H7_PEDHC"
gaccgagaagtcaccaaaactttcaaccccgaagctcagtgcttccgacccatcgagtgcgtcacatcaagcatgaataacttgagcatttctcccaaaacgcttactccgttcacggccaatcctccgcaaaacaaccctgtgggagcgcaactacaccaacagatatcgattccacagcataacggaaaccaggccccgcccaataaccacatcaatcaattgtcgccaccttccttagcaccatcaccaactttgaacacctcttacaaaggctcgccatcgcccgtaccggcattcatacccagaactactacgcccttaaccttcactacggctacctttgctcaaacgaaatttggtagcactaagttgaaaacaagcagcaaaagagctaatagaatgtctcccaccgaattctcaaactacatcaagcaaagagcaatgcaacaacaactccatcaacaagccccgcaccactccccagcaggtcgcgcactgtcccccgacccatccacatattatttccctcacggccactatcccccgcaattcccccctagatccgtgtttgagtcttccaaccaatttttgagtcccgacgtttattccggcaagctgccgttcgagcactcaacacccttgggaccatattatcccaacaacggacaggtaggggcaccaccgtcagctcccaccactccccaggacaatgggaaactggacaactggccctatcccaccgctgggcagtaccagcatctgctcgttgctaactgaggagcttcataggcgcgggatctttttctgtctgatagaagtatttgtttgaggggtctttaaggtttaaaaggtgctgtataattaaataataaatgtctagttctccacgtgaaatgatatttttgaaataaatctatagattacgtatatatacttatcagaacatgttagtattatctttattttgttcacgtgttgaataggtgttccattttatattaggctaataatatctacacgtactcttactaagcaatttatctgttggtcgtcgcaatcataaactgtttttataataagcggacaatctgagaatattatcacagtaattcgagaagtcctaaagtgaattacccagttacgaatgtgtttaatcaaaaaaaaaagatattttacatgttttttgttaattttcaaattgtacaggtagggcattggtctaaccagtatgtgatctctaaaaatcaaatgttgtaaacagattatatcacaacatctttgaagttactcagtaaccaataactgatattatatatatggtcctttgagccggatcataaaaaaaaacctaatcgagaacgttatgagttaagcatccttacatcataattttaaagtttcatacttcaataactaaacgtattcttagttttctagttatgtaattgtatttatatttaaaacgtaaaatatcattttagagattaaacacgaagtgtatgtcaccttttgtaacaaaaacgtgcactccaatcacgtgcaccaaaaaaattttaatacttcttacttaaacctcatactacaacccccaaactacgctttgcttttccttactactgtatttttgatatttgtgtgataatgataatatagtaaaaacacaaaatcattatttgataaaactaaaacaaatgggttatgtaaaataaatgataaaatgactagtaccttcacttgagcccatgatattgtctctagagtaatactgtgtgtatcgttttaccgatgtgtgcaatatttataaatgtttttatggattagtagttaatgataaatatgtagaaaattttgttaatgttggtagatgatttattgtaaaaacacgtagattgttcgaacgacgagaacttcacgacacggattcaatctaatcagcaatttttacatttttttacaatttgaatatttgaacagcaaatctacaatagttaaatgaagaataattatcaaactatcattattcataatgagaagcatagggcttttcatcgattgtcatttgtttcgagcttctgtcacatgttgtataatctgtgtataacattaatatacacggattataaatgacatgtgacagaggctcgaaacaaatgactgtgaatgaaaagccctattgaaaagccttattagcattatgtcaataaaacttcacgtcataacgtcagttggtatagggcttttcattcacagtcatttgtttcgagcttctgtcatgtgtcgtctaatattagtatatctacgtcatacgttattggtattgccaatgatacaaataagacgtatgacgtggatatgttgatgttatgtgacacatgacggaggctcgaaacaaatgacaatcgatgaaaagccctattaacaagcacttggcagtaacatataaacaaactggacattaagtcataaaaacttcctcatttcgtgctataatatgaacaaaaactattaacaatgtcaataaaacttgacatccggtcacaaaaatgtcgccatttagtgctagatcaacaaaacagtcaacattattattaaaacaaccattattcagtattctaccaggaaaacagtatatacctatagcacttttctaaacgaacaaaagtggaacatttgattgacacttgatcgtaacattatcattttatagtgaaatcataaaatatctgatttagtatgttgacatatgacatatatcaacaaaactggctattcggttataaaacagttataaaccaaaactggtcatatggtcatgaaagtgttattattatgtaatatactaacaaaaaacagcattatattataacattaccactgactattgatgctacgtgaataaccgaacattttatcataaaagaactactagtaagtgatctgtaaaagtcaaagatttatttataaaaagtcacaatcaatggtatagctacataactggtcataaactattattacgtgctatatcaacaaccacaggatattatatcatagcagttccactcaccagtactgtcaataaaaattgacatttggtgataaaaaatgtcaaatgtgatgatattttaacacttaatgaaataggtagggaaccatagaaactttctattcaaattggtctgtaggtttgtcaaagatggagaagataccaaaaatggcctaaataaatatacatagacccgtaaatgtgaaacaaaatgtgt

SEQ ID NO: 2616 - DNA, 3166 bp, Diabrotica virgifera
  SmartBlast Evalue=1E-98; Info="Tob1 protein, putative n=1 Tax= Pediculus humanus corporis RepID=E0V9H7_PEDHC"
gtgagtgctaaaacacagtgatcgtactagtccaaaacatcttttatattttctacttttatatctaattgtatagtttcgttatttttattacttagaagtttatattttctcatcgttttatacgcttctgatttgtatattggctataagaaactcacaagaactgaacaaaaacacgtaccttaatttcacaaagaaacggaatagaagcaaacataacttacccttaaaaacaaaagaaatcaatgtgtttataaattttcccaacgaagaacccactacatctacacattctcaaaatgcatattgaagtgcaagtagctctaaattttgtaatttcgtacctgtacaacaaactcccgaggaggcgagtaaatatattcggcgaagagttggaaaaagccttaaaagagaaattccagggccactggtatccagacaagccgtacaaaggctccgctttcagatgcctaaagacaggtgacccaatcgacaaagttctagagagggcagccagagaaagtggtgttcccatcaccgatatcttggaaaaccttccccaagaattggcagtttgggttgatcccggtgaagttagctaccgcattggagaaaagggagctgtcaaaatcctatttagcgacaaaggtgacccacaagacgagcattccgcagaccgagaagtcaccaaaactttcaaccccgaagctcagtgcttccgacccatcgagtgcgtcacatcaagcatgaataacttgagcatttctcccaaaacgcttactccgttcacggccaatcctccgcaaaacaaccctgtgggagcgcaactacaccaacagataccgatttcacagcataacggaaaccacggaaaccaggccccgcccaataaccacatcaatcaattgtcgccaccttccttagcaccatcaccaactttgaacacctcttacaaaggctcgccatcgcccgtaccggcattcatacccagaactactacgcccttaaccttcactacggctacctttgctcaaacgaaatttggtagcactaagttgaaaacaagcagcaaaagagctaatagaatgtctcccaccgaattctcaaactacatcaagcaaagagcaatgcaacaacaactccatcaacaagccccgcaccactccccagcaggtcgcgcactgtcccccgacccatccacatattatttccctcacggccactatcccccgcaattcccccctagatccgtgtttgagtcttccaaccaatttttgagtcccgacgtttattccggcaagctgccgttcgagcactcaacacccttgggaccatattatcccaacaacggacaggtaggggcaccaccgtcagctcccaccactccccaggacaatgggaaactggacaactggccctatcccaccgctgggcagtaccagcatctgctcgttgctaactgaggagcttcataggcgcgggatctttttctgtctgatagaagtatttgtttgaggggtctttaaggtttaaaaggtgctgtataattaaataataaatgtctagttctccacgtgaaatgatatttttgaaataaatctatagattacgtatatatacttatcagaacatgttagtattatctttattttgttcacgtgttgaataggtgttccattttatattaggctaataatatctacacgtactcttactaagcaatttatctgttggtcgtcgcaatcataaactgtttttataataagcggacaatctgagaatattatcacagtaattcgagaagtcctaaagtgaattacccagttacgaatgtgtttaatcaaaaaaaaaagatattttacatgttttttgttaattttcaaattgtacaggtagggcattggtctaaccagtatgtgatctctaaaaatcaaatgttgtaaacagattatatcacaacatctttgaagttactcagtaaccaataactgatattatatatatggtcctttgagccggatcataaaaaaaaacctaatcgagaacgttatgagttaagcatccttacatcataattttaaagtttcatacttcaataactaaacgtattcttagttttctagttatgtaattgtatttatatttaaaacgtaaaatatcattttagagattaaacacgaagtgtatgtcaccttttgtaacaaaaacgtgcactccaatcacgtgcaccaaaaaaattttaatacttcttacttaaacctcatactacaacccccaaactacgctttgcttttccttactactgtatttttgatatttgtgtgataatgataatatagtaaaaacacaaaatcattatttgataaaactaaaacaaatgggttatgtaaaataaatgataaaatgactagtaccttcacttgagcccatgatattgtctctagagtaatactgtgtgtatcgttttaccgatgtgtgcaatatttataaatgtttttatggattagtagttaatgataaatatgtagaaaattttgttaatgttggtagatgatttattgtaaaaacacgtagattgttcgaacgacgagaacttcacgacacggattcaatctaatcagcaatttttacatttttttacaatttgaatatttgaacagcaaatctacaatagttaaatgaagaataattatcaaactatcattattcataatgagaagcatagggcttttcatcgattgtcatttgtttcgagcttctgtcacatgttgtataatctgtgtataacattaatatacacggattataaatgacatgtgacagaggctcgaaacaaatgactgtgaatgaaaagccctattgaaaagccttattagcattatgtcaataaaacttcacgtcataacgtcagttggtatagggcttttcattcacagtcatttgtttcgagcttctgtcatgtgtcgtctaatattaatatatctacgtcatacgttattggtattgccaatgatacaaaataaagacgtatgacgtagatatattaatattatgtgacacatgacaggggctcgaaacaaatgacaatcgatgaaaagccctattaacaagcacttggcagtaacatataaacaaactggacattaagtcataaaaacttcct

SEQ ID NO: 2617 - DNA, 2480 bp, Diabrotica virgifera
  SmartBlast Evalue=8E-33; Info="Tob1 protein, putative n=1 Tax= Pediculus humanus corporis RepID=E0V9H7_PEDHC"
gaccgagaagtcaccaaaactttcaaccccgaagctcagtgcttccgacccatcgagtgcgtcacatcaagcatgaataacttgagcatttctcccaaaacgcttactccgttcacggccaatcctccgcaaaacaaccctgtgggagcgcaactacaccaacagatatcgattccacagcataacggaaaccaggccccgcccaataaccacatcaatcaattgtcgccaccttccttagcaccatcaccaactttgaacacctcttacaaaggctcgccatcgcccgtaccggcattcatacccagaactactacgcccttaaccttcactacggctacctttgctcaaacgaaatttggtagcactaagttgaaaacaagcagcaaaagagctaatagaatgtctcccaccgaattctcaaactacatcaagcaaagagcaatgcaacaacaactccatcaacaagccccgcaccactccccagcaggtcgcgcactgtcccccgacccatccacatattatttccctcacggccactatcccccgcaattcccccctagatccgtgtttgagtcttccaaccaatttttgagtcccgacgtttattccggcaagctgccgttcgagcactcaacacccttgggaccatattatcccaacaacggacaggtaggggcaccaccgtcagctcccaccactccccaggacaatgggaaactggacaactggccctatcccaccgctgggcagtaccagcatctgctcgttgctaactgaggagcttcataggcgcgggatctttttctgtctgatagaagtatttgtttgaggggtctttaaggtttaaaaggtgctgtataattaaataataaatgtctagttctccacgtgaaatgatatttttgaaataaatctatagattacgtatatatacttatcagaacatgttagtattatctttattttgttcacgtgttgaataggtgttccattttatattaggctaataatatctacacgtactcttactaagcaatttatctgttggtcgtcgcaatcataaactgtttttataataagcggacaatctgagaatattatcacagtaattcgagaagtcctaaagtgaattacccagttacgaatgtgtttaatcaaaaaaaaaagatattttacatgttttttgttaattttcaaattgtacaggtagggcattggtctaaccagtatgtgatctctaaaaatcaaatgttgtaaacagattatatcacaacatctttgaagttactcagtaaccaataactgatattatatatatggtcctttgagccggatcataaaaaaaaacctaatcgagaacgttatgagttaagcatccttacatcataattttaaagtttcatacttcaataactaaacgtattcttagttttctagttatgtaattgtatttatatttaaaacgtaaaatatcattttagagattaaacacgaagtgtatgtcaccttttgtaacaaaaacgtgcactccaatcacgtgcaccaaaaaaattttaatacttcttacttaaacctcatactacaacccccaaactacgctttgcttttccttactactgtatttttgatatttgtgtgataatgataatatagtaaaaacacaaaatcattatttgataaaactaaaacaaatgggttatgtaaaataaatgataaaatgactagtaccttcacttgagcccatgatattgtctctagagtaatactgtgtgtatcgttttaccgatgtgtgcaatatttataaatgtttttatggattagtagttaatgataaatatgtagaaaattttgttaatgttggtagatgatttattgtaaaaacacgtagattgttcgaacgacgagaacttcacgacacggattcaatctaatcagcaatttttacatttttttacaatttgaatatttgaacagcaaatctacaatagttaaatgaagaataattatcaaactatcattattcataatgagaagcatagggcttttcatcgattgtcatttgtttcgagcttctgtcacatgttgtataatctgtgtataacattaatatacacggattataaatgacatgtgacagaggctcgaaacaaatgactgtgaatgaaaagccctattgaaaagccttattagcattatgtcaataaaacttcacgtcataacgtcagttggtatagggcttttcattcacagtcatttgtttcgagcttctgtcatgtgtcgtctaatattaatatatctacgtcatacgttattggtattgccaatgatacaaaataaagacgtatgacgtagatatattaatattatgtgacacatgacaggggctcgaaacaaatgacaatcgatgaaaagccctattaacaagcacttggcagtaacatataaacaaactggacattaagtcataaaaacttcct

SEQ ID NO: 2618 - DNA, 1155 bp, Diabrotica virgifera
cacgacacggattcaatctaatcagcaatttttacatttttttacaatttgaatatttgaacagcaaatctacaatagttaaatgaagaataattatcaaactatcattattcataatgagaagcatagggcttttcatcgattgtcatttgtttcgagcttctgtcatgtgtcgtctaatattagtatatctacgtcatacgttattggtattgccaatgatacaaataagacgtatgacgtggatatgttgatgttatgtgacacatgacggaggctcgaaacaaatgacaatcgatgaaaagccctattaacaagcacttggcagtaacatataaacaaactggacattaagtcataaaaacttcctcatttcgtgctataatatgaacaaaaactattaacaatgtcaataaaacttgacatccggtcacaaaaatgtcgccatttagtgctagatcaacaaaacagtcaacattattattaaaacaaccattattcagtattctaccaggaaaacagtatatacctatagcacttttctaaacgaacaaaagtggaacatttgattgacacttgatcgtaacattatcattttatagtgaaatcataaaatatctgatttagtatgttgacatatgacatatatcaacaaaactggctattcggttataaaacagttataaaccaaaactggtcatatggtcatgaaagtgttattattatgtaatatactaacaaaaaacagcattatattataacattaccactgactattgatgctacgtgaataaccgaacattttatcataaaagaactactagtaagtgatctgtaaaagtcaaagatttatttataaaaagtcacaatcaatggtatagctacataactggtcataaactattattacgtgctatatcaacaaccacaggatattatatcatagcagttccactcaccagtactgtcaataaaaattgacatttggtgataaaaaatgtcaaatgtgatgatattttaacacttaatgaaataggtagggaaccatagaaactttctattcaaattggtctgtaggtttgtcaaagatggagaagataccaaaaatggcctaaataaatatacatagacccgtaaatgtgaaacaaaatgtgt

SEQ ID NO: 2619 - DNA, 372 bp, Diabrotica virgifera
cacgacacggattcaatctaatcagcaatttttacatttttttacaatttgaatatttgaacagcaaatctacaatagttaaatgaagaataattatcaaactatcattattcataatgagaagcatagggcttttcatcgattgtcatttgtttcgagcttctgtcatgtgtcgtctaatattaatatatctacgtcatacgttattggtattgccaatgatacaaaataaagacgtatgacgtagatatattaatattatgtgacacatgacaggggctcgaaacaaatgacaatcgatgaaaagccctattaacaagcacttggcagtaacatataaacaaactggacattaagtcataaaaacttcct

SEQ ID NO: 2620 - DNA, 3422 bp, Diabrotica virgifera
atttgaggacttcaaaaatgtctggttatgtaaaaccaaaaaccccattaatataaagatcgatataaagataatataaagatcgaaataatctacatccttcacctaagggactggctaagaacatttaacaatgaaccaactatttcatatattcaaggttaactaaaaaacattagtagaaaaaacgatttaccggttaattttttattcctcttccactgatggtactcccatccttactccaggaaacccgtactccaggaaacaagtggtggtaactttttactatacttccaaacttagttgaaataaaaattaatttcgaagaaattaaccgccatttacggtactaaccaccaacaccaacctgtcaacctcgcagccaccggccaagtgcctctcattcctcccacagtcagcgaggaaaacgtcaaactctcacggaacacgaattaaacgacaaggaacggttcaacaactatgttccgtacagtgtgacgtcacatgagaagtcctttacgataaattaaagaatttaaatgggaggtcaagagaaaataattatttttttaaaaataattacagcgctaaaaatgataatataacgggtggaccgttacaatcccctcctactcgggaaaaaaaattttttaccaaaaaaaattttttttttttttaaacttctaaaatattaacaactaaatttacaatagtctaacaatccacgttgattcgcaagattacttctaaatataaactaatggtcaaggaaaaataaatcaatacatgactcaaactcatactaaaatgttactatgttactctctgctaccaaatattaacatatattgctcaaaagtcaaaacaaaactaaatattgtactaaagttcataataataactagtgtcgaattgggcactaaaaccaaaattgaactatccatggacatcagatttataaaggatatatccaagaacggaacaaccaggaaaaggtgtgagccaattcgaaccatatcaaaagtaaatgtaccaaagtgaataaaaaaaatcagtaactaaaataggtaaagaattgaacactttatccaaaactgaactaacaatggacaccagattcataatagtatatccagagaagaacaatcaggaagatttatggaacaattctcactaatgtcaaataataccaataataaacataccaaaggaatccaaaactcaataaccaaaataaatgtggaatcggacacttaatccaaagtcgaactatcagtggacaccagattcataaaaggcatatccaaagaagaacgaccaggcaaatttatggaccaattcacaccaatactaaaccacataacagatcaggtctacgtacacccacatccggtaatacgaacctatccaactaaatacacaaaataaatgaagaatcggacacttatccagaatcggactatcaatggacaccagatttatataggagtatatccaaagaagaacgatcaggcaaatttatggaccaattcttactaatactaaataaactaaattattggatccaatggtaactaatactgaacaaaataaataaattaggtctacatacaccctcatccggtaatatgaacctatctgaactaagtaatccaaaataagtcagacaaaaattactaacagactaagtaacagagatgtaaccaaactaaatcaaaggtaagataaatactctctattcggtagggatacaccggtcacgaattaataaagaaacaaacgaatcggcaggtcgattgtaatattttaggtataccagtaacataagcgtagatctcgggtgcgtagagggccaatatctatttaattattgaatttttagtaattttttgattaaaatttaataaacaggataatttaaggaaaaataataagataaacaataaaatacaatgcacccttgttagaaatacctttcttagcaaaaacttaatactaacttaggagtaagattatgcaaaacacctgactagaacattttcccgagcagatgcgaagagacttccttgactaaaagaacaattaggatttacccgcaagtaatattttaaatacgaaaaaatatatagattagtgccgattcgatatgcggtctaccatccaatatgcggtctaccgcagagtaactaattcgttatgtggtctatcacagagtagttatttcgatatgcggccaccactaaataatgttaatgcattcagtaaattttgcaactactcgtatatacagtatggtgcaaatgaaaggaataaattctccacttcgcaaaccgatgacattagggaaaatcccgaaacaggtcgatttctttttttaaattatgatattttgaatgaagtaaaagacagacgtactctcaatcatttattgtaacttccgacgaccggtttcgctctctaaagtatgcagagcatcttcaggtcaacggttacaagtaactaaatgattcggttacaaggaggtactacctcagtattcattaacatgatatatctgcttaagttatgctaacgggatatggtggaatagacggagaatgttgcaaaggtaaaaaagtttatggaatttgggaatttttgagggtgaagagatagttggtgaaagacaaccaacaaatctgtaccggctttaaagatttttatttctatttattaaaagatttttgtttttatttatatttattaaagacttctatttattagtgtatgtgttagtgtaagactaacaacgtttggatcaaaacgggtcgatatctaatatgtatgttagatgtggacgtgcagctgtaacctaaattgttaaagtcaatactccttgatgttttaatgagaggagtagtggtcgtaaaaagaatgaaaaatcggaaagcttaaaaattatagctaaaagggtatattagcagtcatatagtaataacagtaataaatgtgaattgatagacaacaatgtaggtacatgaaattgagatataaattaaagggtgagaattagagtagaaaagaaaagaaaggaagggattaaaattcagttgaaagtaattgattgtaaattgagactatgtattattgatataagcagtgaagaaacattaataaactattgaaacagataaaagaaaggaatagtaataaaatatattttgggggtatacctacattgtgttttaaaatctgtcaataaacccattcaacatatgatattttggcatacatatcacactagtgtcgccatccatctgggggtgatgacgcaatcgatgacttttttcaaatgagaataggggtcgagcgctagctcacttgaaaggtcattaaactcaccactttaggcatataaacattcacacaattatccgtac

SEQ ID NO: 2621 - DNA, 2990 bp, Diabrotica virgifera
aacgagagacgcttctccgccaaggtaaacgtcaaactctctcagaaaacgaaatcattctcgataggtggagtacgttccatcaccgaggtatgacgtcaccccagtagtcctatacgagaaattagagaatttaaatggagaccgagggaaaataattataataataattaaagagctaattttgtaacgtgaccgttacaatccccttctactcgggaaaaaattttatccataaatttttttcctaaacttcaaaatattaacaactaaatttacaatagtctaacaatccacgttgattcgcaagattacttctaaatataaactaatggtcaaggaaaaataaatcaatacatgactcaaactcatactaaaatgttactatgttactctctgctaccaaatattaacatatattgctcaaaagtcaaaacaaaactaaatattgtactaaagttcataataataactagtgtcgaattgggcactaaaaccaaaattgaactatccatggacatcagatttataaaggatatatccaagaacggaacaaccaggaaaaggtgtgagccaattcgaaccatatcaaaagtaaatgtaccaaagtgaataaaaaaaatcagtaactaaaataggtaaagaattgaacactttatccaaaactgaactaacaatggacaccagattcataatagtatatccagagaagaacaatcaggaagatttatggaacaattctcactaatgtcaaataataccaataataaacataccaaaggaatccaaaactcaataaccaaaataaatgtggaatcggacacttaatccaaagtcgaactatcagtggacaccagattcataaaaggcatatccaaagaagaacgaccaggcaaatttatggaccaattcacaccaatactaaaccacataacagatcaggtctacgtacacccacatccggtaatacgaacctatccaactaaatacacaaaataaatgaagaatcggacacttatccagaatcggactatcaatggacaccagatttatataggagtatatccaaagaagaacgatcaggcaaatttatggaccaattcttactaatactaaataaactaaattattggatccaatggtaactaatactgaacaaaataaataaattaggtctacatacaccctcatccggtaatatgaacctatctgaactaagtaatccaaaataagtcagacaaaaattactaacagactaagtaacagagatgtaaccaaactaaatcaaaggtaagataaatactctctattcggtagggatacaccggtcacgaattaataaagaaacaaacgaatcggcaggtcgattgtaatattttaggtataccagtaacataagcgtagatctcgggtgcgtagagggccaatatctatttaattattgaatttttagtaattttttgattaaaatttaataaacaggataatttaaggaaaaataataagataaacaataaaatacaatgcacccttgttagaaatacctttcttagcaaaaacttaatactaacttaggagtaagattatgcaaaacacctgactagaacattttcccgagcagatgcgaagagacttccttgactaaaagaacaattaggatttacccgcaagtaatattttaaatacgaaaaaatatatagattagtgccgattcgatatgcggtctaccatccaatatgcggtctaccgcagagtaactaattcgttatgtggtctatcacagagtagttatttcgatatgcggccaccactaaataatgttaatgcattcagtaaattttgcaactactcgtatatacagtatggtgcaaatgaaaggaataaattctccacttcgcaaaccgatgacattagggaaaatcccgaaacaggtcgatttctttttttaaattatgatattttgaatgaagtaaaagacagacgtactctcaatcatttattgtaacttccgacgaccggtttcgctctctaaagtatgcagagcatcttcaggtcaacggttacaagtaactaaatgattcggttacaaggaggtactacctcagtattcattaacatgatatatctgcttaagttatgctaacgggatatggtggaatagacggagaatgttgcaaaggtaaaaaagtttatggaatttgggaatttttgagggtgaagagatagttggtgaaagacaaccaacaaatctgtaccggctttaaagatttttatttctatttattaaaagatttttgtttttatttatatttattaaagacttctatttattagtgtatgtgttagtgtaagactaacaacgtttggatcaaaacgggtcgatatctaatatgtatgttagatgtggacgtgcagctgtaacctaaattgttaaagtcaatactccttgatgttttaatgagaggagtagtggtcgtaaaaagaatgaaaaatcggaaagcttaaaaattatagctaaaagggtatattagcagtcatatagtaataacagtaataaatgtgaattgatagacaacaatgtaggtacatgaaattgagatataaattaaagggtgagaattagagtagaaaagaaaagaaaggaagggattaaaattcagttgaaagtaattgattgtaaattgagactatgtattattgatataagcagtgaagaaacattaataaactattgaaacagataaaagaaaggaatagtaataaaatatattttgggggtatacctacattgtgttttaaaatctgtcaataaacccattcaacatatgatattttggcatacatatcacactagtgtcgccatccatctgggggtgatgacgcaatcgatgacttttttcaaatgagaataggggtcgagcgctagctcacttgaaaggtcattaaactcaccactttaggcatataaacattcacacaattatccgtac

SEQ ID NO: 2622 - DNA, 2704 bp, Diabrotica virgifera
agtctaacaatccacgttgattcgcaagattaccactaagcataaactaaggttcaaggaaaaataaatacatatatgactcaaactcatgctaaaatgttactatgttactctctgttaccaatattaatgaattgcttcaaaaaccaaacaaactaaatattgtactaaagttcataataataactagtgtcgaattgggcactaaaaccaaaattgaactatccatggacatcagatttataaaggatatatccaaggacggaacaaccaggaaaaggtgtgagccaattcgaaccatatcaaaagtaaatgtaccaaagtgaataaaaaaaatcagtaactaaaataggtaaagaattgaacactttatccaaaactgaactaacaatggacaccagattcataatagtatatccagagaagaacaatcaggaagatttatggaacaattctcactaatgtcaaataataccaataataaacataccaaaggaatccaaaactcaataaccaaaataaatgtggaatcggacacttaatccaaagtcgaactatcagtggacaccagattcataaaaggcatatccaaagaagaacgaccaggcaaatttatggaccaattcacaccaatactaaaccacataacagatcaggtctacgtacacccacatccggtaatacgaacctatccaactaaatacacaaaataaatgaagaatcggacacttatccagaatcggactatcaatggacaccagatttatataggagtatatccaaagaagaacgatcaggcaaatttatggaccaattcttactaatactaaataaactaaattattggatccaatggtaactaatactgaacaaaataaataaattaggtctacatacaccctcatccggtaatatgaacctatctgaactaagtaatccaaaataagtcagacaaaaattactaacagactaagtaacagagatgtaaccaaactaaatcaaaggtaagataaatactctctattcggtagggatacaccggtcacgaattaataaagaaacaaacgaatcggcaggtcgattgtaatattttaggtataccagtaacataagcgtagatctcgggtgcgtagagggccaatatctatttaattattgaatttttagtaattttttgattaaaatttaataaacaggataatttaaggaaaaataataagataaacaataaaatacaatgcacccttgttagaaatacctttcttagcaaaaacttaatactaacttaggagtaagattatgcaaaacacctgactagaacattttcccgagcagatgcgaagagacttccttgactaaaagaacaattaggatttacccgcaagtaatattttaaatacgaaaaaatatatagattagtgccgattcgatatgcggtctaccatccaatatgcggtctaccgcagagtaactaattcgttatgtggtctatcacagagtagttatttcgatatgcggccaccactaaataatgttaatgcattcagtaaattttgcaactactcgtatatacagtatggtgcaaatgaaaggaataaattctccacttcgcaaaccgatgacattagggaaaatcccgaaacaggtcgatttctttttttaaattatgatattttgaatgaagtaaaagacagacgtactctcaatcatttattgtaacttccgacgaccggtttcgctctctaaagtatgcagagcatcttcaggtcaacggttacaagtaactaaatgattcggttacaaggaggtactacctcagtattcattaacatgatatatctgcttaagttatgctaacgggatatggtggaatagacggagaatgttgcaaaggtaaaaaagtttatggaatttgggaatttttgagggtgaagagatagttggtgaaagacaaccaacaaatctgtaccggctttaaagatttttatttctatttattaaaagatttttgtttttatttatatttattaaagacttctatttattagtgtatgtgttagtgtaagactaacaacgtttggatcaaaacgggtcgatatctaatatgtatgttagatgtggacgtgcagctgtaacctaaattgttaaagtcaatactccttgatgttttaatgagaggagtagtggtcgtaaaaagaatgaaaaatcggaaagcttaaaaattatagctaaaagggtatattagcagtcatatagtaataacagtaataaatgtgaattgatagacaacaatgtaggtacatgaaattgagatataaattaaagggtgagaattagagtagaaaagaaaagaaaggaagggattaaaattcagttgaaagtaattgattgtaaattgagactatgtattattgatataagcagtgaagaaacattaataaactattgaaacagataaaagaaaggaatagtaataaaatatattttgggggtatacctacattgtgttttaaaatctgtcaataaacccattcaacatatgatattttggcatacatatcacactagtgtcgccatccatctgggggtgatgacgcaatcgatgacttttttcaaatgagaataggggtcgagcgctagctcacttgaaaggtcattaaactcaccactttaggcatataaacattcacacaattatccgtac

SEQ ID NO: 2623 - DNA, 1930 bp, Diabrotica virgifera
  misc_feature (1914)..(1914): n is a, c, g, or t
atttgaggacttcaaaaatgtctggttatgtaaaaccaaaaaccccattaatataaagatcgatataaagataatataaagatcgaaataatctacatccttcacctaagggactggctaagaacatttaacaatgaaccaactatttcatatattcaaggttaactaaaaaacattagtagaaaaaacgatttaccggttaattttttattcctcttccactgatggtactcccatccttactccaggaaacccgtactccaggaaacaagtggtggtaactttttactatacttccaaacttagttgaaataaaaattaatttcgaagaaattaaccgccatttacggtactaaccaccaacaccaacctgtcaacctcgcagccaccggccaagtgcctctcattcctcccacagtcagcgaggaaaacgtcaaactctcacggaacacgaattaaacgacaaggaacggttcaacaactatgttccgtacagtgtgacgtcacatgagaagtcctttacgataaattaaagaatttaaatgggaggtcaagagaaaataattatttttttaaaaataattacagcgctaaaaatgataatataacgggtggaccgttacaatcccctcctactcgggaaaaaaaattttttaccaaaaaaaattttttttttttttaaacttctaaaatattaacaactaaatttacaatagtctaacaatccacgttgattcgcaagattacttctaaatataaactaatggtcaaggaaaaataaatcaatacatgactcaaactcatactaaaatgttactatgttactctctgctaccaaatattaacatatattgctcaaaagtcaaaacaaaactaaatattgtactaaagttcataataataactagtgtcgaattgggcactaaaaccaaaattgaactatccatggacatcagatttataaaggatatatccaagaacggaacaaccaggaaaaggtgtgagccaattcgaaccatatcaaaagtaaatgtaccaaagtgaataaaaaaaatcagtaactaaaataggtaaagaattgaacactttatccaaaactgaactaacaatggacaccagattcataatagtatatccagagaagaacaatcaggaagatttatggaacaattctcactaatgtcaaataataccaataataaacataccaaaggaatccaaaactcaataaccaaaataaatgtggaatcggacacttaatccaaagtcgaactatcagtggacaccagattcataaaaggcatatccaaagaagaacgaccaggcaaatttatggaccaattcacaccaatactaaaccacataacagatcaggtctacgtacacccacatccggtaatacgaacctatccaactaaatacacaaaataaatgaagaatcggacacttatccagaatcggactatcaatggacaccagatttatataggagtatatccaaagaagaacgatcaggcaaatttatggaccaattcttactaatactaaataaactaaattattggatccaatggtaactaatactgaacaaaataaataaattaggtctacatacaccctcatccggtaatatgaacctatctgaactaagtaatccaaaataagtcagacaaaaattactaacagactaagtaacagagatgtaaccaaactaaatcaaaggtaagataaatacctaaagtgtattgactaaagtattctagaaaatacataacttaattcgtgctggtattcgcgaactatagcatgttgctacaacagatgtatgagaataaccagacacagataaggtactaatataagaataagtaagaaagaaaacagaatgaatagtgaacttacaaggtctatggnactatgataaataata

SEQ ID NO: 2624 - DNA, 1498 bp, Diabrotica virgifera
  misc_feature (1482)..(1482): n is a, c, g, or t
aacgagagacgcttctccgccaaggtaaacgtcaaactctctcagaaaacgaaatcattctcgataggtggagtacgttccatcaccgaggtatgacgtcaccccagtagtcctatacgagaaattagagaatttaaatggagaccgagggaaaataattataataataattaaagagctaattttgtaacgtgaccgttacaatccccttctactcgggaaaaaattttatccataaatttttttcctaaacttcaaaatattaacaactaaatttacaatagtctaacaatccacgttgattcgcaagattacttctaaatataaactaatggtcaaggaaaaataaatcaatacatgactcaaactcatactaaaatgttactatgttactctctgctaccaaatattaacatatattgctcaaaagtcaaaacaaaactaaatattgtactaaagttcataataataactagtgtcgaattgggcactaaaaccaaaattgaactatccatggacatcagatttataaaggatatatccaagaacggaacaaccaggaaaaggtgtgagccaattcgaaccatatcaaaagtaaatgtaccaaagtgaataaaaaaaatcagtaactaaaataggtaaagaattgaacactttatccaaaactgaactaacaatggacaccagattcataatagtatatccagagaagaacaatcaggaagatttatggaacaattctcactaatgtcaaataataccaataataaacataccaaaggaatccaaaactcaataaccaaaataaatgtggaatcggacacttaatccaaagtcgaactatcagtggacaccagattcataaaaggcatatccaaagaagaacgaccaggcaaatttatggaccaattcacaccaatactaaaccacataacagatcaggtctacgtacacccacatccggtaatacgaacctatccaactaaatacacaaaataaatgaagaatcggacacttatccagaatcggactatcaatggacaccagatttatataggagtatatccaaagaagaacgatcaggcaaatttatggaccaattcttactaatactaaataaactaaattattggatccaatggtaactaatactgaacaaaataaataaattaggtctacatacaccctcatccggtaatatgaacctatctgaactaagtaatccaaaataagtcagacaaaaattactaacagactaagtaacagagatgtaaccaaactaaatcaaaggtaagataaatacctaaagtgtattgactaaagtattctagaaaatacataacttaattcgtgctggtattcgcgaactatagcatgttgctacaacagatgtatgagaataaccagacacagataaggtactaatataagaataagtaagaaagaaaacagaatgaatagtgaacttacaaggtctatggnactatgataaataata

SEQ ID NO: 2625 - DNA, 1212 bp, Diabrotica virgifera
  misc_feature (1196)..(1196): n is a, c, g, or t
agtctaacaatccacgttgattcgcaagattaccactaagcataaactaaggttcaaggaaaaataaatacatatatgactcaaactcatgctaaaatgttactatgttactctctgttaccaatattaatgaattgcttcaaaaaccaaacaaactaaatattgtactaaagttcataataataactagtgtcgaattgggcactaaaaccaaaattgaactatccatggacatcagatttataaaggatatatccaaggacggaacaaccaggaaaaggtgtgagccaattcgaaccatatcaaaagtaaatgtaccaaagtgaataaaaaaaatcagtaactaaaataggtaaagaattgaacactttatccaaaactgaactaacaatggacaccagattcataatagtatatccagagaagaacaatcaggaagatttatggaacaattctcactaatgtcaaataataccaataataaacataccaaaggaatccaaaactcaataaccaaaataaatgtggaatcggacacttaatccaaagtcgaactatcagtggacaccagattcataaaaggcatatccaaagaagaacgaccaggcaaatttatggaccaattcacaccaatactaaaccacataacagatcaggtctacgtacacccacatccggtaatacgaacctatccaactaaatacacaaaataaatgaagaatcggacacttatccagaatcggactatcaatggacaccagatttatataggagtatatccaaagaagaacgatcaggcaaatttatggaccaattcttactaatactaaataaactaaattattggatccaatggtaactaatactgaacaaaataaataaattaggtctacatacaccctcatccggtaatatgaacctatctgaactaagtaatccaaaataagtcagacaaaaattactaacagactaagtaacagagatgtaaccaaactaaatcaaaggtaagataaatacctaaagtgtattgactaaagtattctagaaaatacataacttaattcgtgctggtattcgcgaactatagcatgttgctacaacagatgtatgagaataaccagacacagataaggtactaatataagaataagtaagaaagaaaacagaatgaatagtgaacttacaaggtctatggnactatgataaataata

SEQ ID NO: 2626 - DNA, 3243 bp, Diabrotica virgifera
  SmartBlast Evalue=0.000000005; Info=Seminal fluid protein HACP060 (Fragment) n=1 Tax=Heliconius erato RepID=D9HQ61_9NEOP
gttaaaggaagataatgttcatcgttgtacattttggttatgttagcatcatcaatgttttgtcctaacatagagttaactaatttttcgataaaatcttgaacttgttctttacttttttgaacatgatccttattttttagttgactagattccataacattattagaatccatagaaaagtcctttttgttgggttgaattgcatataatattccttgaaaccaggactctggtggtcgaagacagtttttacaggtccaaacattttgttgttcgtcgaaattggcacaacgtttttgacagacattcttttgacattttgagcatgatacgctgcaatcacctcctaatatgtgatctatagaccgaaaatactctccacagacgtcgcaatgcaggttacttttactcttacgactacttttcctttgggacccataagccaaaacatagcatactccagatataatcccagcgacaacactaactcctagccctgttgaaacggcaaacgacaccatatctgcaggcattttccaaataccctcccgcactaaaaacacttttcttgtaaaatccattcaataaaaattttctcataaaatcaactacaggcaaaacctctacgaagacgatgaacgcgaaatattcacaaacttttgtttacttttagtgcgatcgcgtaacaattcttcttccgatacatttctacatgcattcactgggtctcgtccaaagaagtatttgaagcatttaaaaaatgcgacgactagatgcagatacttaaatctaacagcatagaagattggctacatactgattccagtttcggatcacgaaaatacgttgacagagttactcttacgataaaacaagatatcgaagaagtatctcacgccagcgattcagatcatgaaggcaacgaagacgatgacaatgagtacttccgtagcaaatcgtcattttggagcgatgatgagcccaactggtttttacagaagcgaacttttcaaggaacgcattcaccggtaccggtaccaatgttggtgccgaatccaacaatagaagcaaaggtactaataggtgataaagaagtagacgatacctcagacttatcagacgtagaatcggaatacggagatacagaaatagtcccagcacgacacagcctacttgtcaattccaaaacacttataggaggaaaaaacccattgcaaaatggagtcggagatgtggaatccgaaagtgaatcttctgctgattcgggtgtaaaagaagtcgatagaggccagtctgtatacgatgaatccgaatttacggatagagcagaaggcggcagtcaaaatgaagatgaacatcatacgtcttttgtgtctaaagcagatattacaatagatgacgataacgtagaagatgcatcactgatgtcagtatacagcaacacagaacaggaagcagaatacacagagagatatgcatcactaccaagaaaaatagaaaaaataccagatcctgacccaaggtcttcagaaaaaattagaaacgattacacgaactacgaaacagtaaataaagtggaagatgacgataaggaagctgaagaagtgagactggtacaaaagcatttttcaggtagttacagtaaacgggagaaagaaaaatggaaaaatgccgtagaaatgaaaaataatccctattctaaagaaaatatagaaaaaaggataaaacgatctaatagtggagtagactcgatatttgggcctgattactatgccaaaatggcgtcctctccatcaggaaccaaaggaaaggtaaaagaacttgtatggccacctattgggagtgaagaatcggaagatactgttgatttcattgaaaaagacgaaattcaacaggtaccaccaaaacacatttcaacaacgtacatagcagcagaagaaaccaaagacaattttaaagcatttccggttatagtagaacccgtagaagcatctttatcgtcacagacaagtttacctccaaaatcacctctgcacggatcagagatgacaagtttgacaagcgatagtgatttgagttacgtacacgtttatgatgtggaaaatgctgtaataaccaaaaaaacaagagaccaaccggtcaattcagaacctgagaagaataaccgatttgtaaaaggtacaaccactacgactagaaggtttgttaacaatccaccccttaaaaaatataaaagtgaaacagatttgctcgaagattcattttatactccacctaaagtgctggcgaggaaaaaagacaacacattaatttcaaaaatttatttggaccctcatgttagaagttttgctttaagtaatagggaacacttacctgtaaataatacgataccaacttttagaacccagttgagttctccagagatggtcctggattacaaagcttaccattcggacgatggactaagcttaaggcacagcaaaaggtacttcagttcacaggaagatttactcagctcaaattctattgaagttcacaatggaacaatgactcacacagcaaaaatgtcatttagctcagaagatgaacaatttttagaaaagaatccagtttttagcacagctccagcaaatagacggatatacagttcgagcgaggatttactttctactgatgagactgattattcaaagaaaaaggacaacacactcatatcaaaaatttatcaacaacctcatgttcggcaatatgctctggctgctagaccaactatcccagtaaaagaagaaaaacggatcgaaaaatccattagttcggaagatgaagtgcttatagagatcacaaaagcacccaaagttagttctccgaaagtttggccagacgttgaaacgcagttcgaaacgatgaatattaaagaaaaggaacctgttacaaacgaacacgataatgaaaatgatccaggtgttgaagaaatagctagaaaaaaaattgtgcacaactttctccaaaaatattctacttcaagtacaaacctgaaaataacagatagtaaggaagatataaataacgaagaggatattactatttctgtgaaagatttaagaaagaggttcgaaaaaaatcagcccaaaaataatatagtatccagcttaacggctagaagtttatcaaagcaaatgaaagaggaattacgaaattgaacatagaaatattcaacaattcgactgtgccactcacccg

SEQ ID NO: 2627 - DNA, 3015 bp, Diabrotica virgifera
  SmartBlast Evalue=8E-11; Info=Seminal fluid protein HACP060 (Fragment) n=1 Tax=Heliconius erato RepID=D9HQ61_9NEOP
gagataagatgagagtgtaccgcaacgtttcttaaaaggtgcctgcataaatcgtattgtgataccatcgccaaaaagtagttttaatataagaagaatctgtgattttaagttttaacatgttcttagtaattttatcaagtgttgttgccacggtgtggactttatttgcagctggattgtatttttatcattatattattgaagttgttttagatcttcctttaaccggccaacaatcaccatgtacagcacatgcagcattaaagcagctcatagaaaaacttctccaggaagtagcaaatttaccacaattacagcgacctcaacaggggacagcaataccaccagatctgaataatagaacatacgaggacttacttgctacggccatattaaataaggttatatcaaattcccaaaatgctcgtccgtcatcttcagctgcaagcgtttctagtagaatatcaaactcctcccacattaaagaggataaaggattcttcttcggagaagaaacgttggacagcaaatggaggcatccagatgtagaaacaacgtcagtttcaagcatagaagattggctacatactgattccagtttcggatcacgaaaatacgttgacagagttactcttacgataaaacaagatatcgaagaagtatctcacgccagcgattcagatcatgaaggcaacgaagacgatgacaatgagtacttccgtagcaaatcgtcattttggagcgatgatgagcccaactggtttttacagaagcgaacttttcaaggaacgcattcaccggtaccggtaccaatgttggtgccgaatccaacaatagaagcaaaggtactaataggtgataaagaagtagacgatacctcagacttatcagacgtagaatcggaatacggagatacagaaatagtcccagcacgacacagcctacttgtcaattccaaaacacttataggaggaaaaaacccattgcaaaatggagtcggagatgtggaatccgaaagtgaatcttctgctgattcgggtgtaaaagaagtcgatagaggccagtctgtatacgatgaatccgaatttacggatagagcagaaggcggcagtcaaaatgaagatgaacatcatacgtcttttgtgtctaaagcagatattacaatagatgacgataacgtagaagatgcatcactgatgtcagtatacagcaacacagaacaggaagcagaatacacagagagatatgcatcactaccaagaaaaatagaaaaaataccagatcctgacccaaggtcttcagaaaaaattagaaacgattacacgaactacgaaacagtaaataaagtggaagatgacgataaggaagctgaagaagtgagactggtacaaaagcatttttcaggtagttacagtaaacgggagaaagaaaaatggaaaaatgccgtagaaatgaaaaataatccctattctaaagaaaatatagaaaaaaggataaaacgatctaatagtggagtagactcgatatttgggcctgattactatgccaaaatggcgtcctctccatcaggaaccaaaggaaaggtaaaagaacttgtatggccacctattgggagtgaagaatcggaagatactgttgatttcattgaaaaagacgaaattcaacaggtaccaccaaaacacatttcaacaacgtacatagcagcagaagaaaccaaagacaattttaaagcatttccggttatagtagaacccgtagaagcatctttatcgtcacagacaagtttacctccaaaatcacctctgcacggatcagagatgacaagtttgacaagcgatagtgatttgagttacgtacacgtttatgatgtggaaaatgctgtaataaccaaaaaaacaagagaccaaccggtcaattcagaacctgagaagaataaccgatttgtaaaaggtacaaccactacgactagaaggtttgttaacaatccaccccttaaaaaatataaaagtgaaacagatttgctcgaagattcattttatactccacctaaagtgctggcgaggaaaaaagacaacacattaatttcaaaaatttatttggaccctcatgttagaagttttgctttaagtaatagggaacacttacctgtaaataatacgataccaacttttagaacccagttgagttctccagagatggtcctggattacaaagcttaccattcggacgatggactaagcttaaggcacagcaaaaggtacttcagttcacaggaagatttactcagctcaaattctattgaagttcacaatggaacaatgactcacacagcaaaaatgtcatttagctcagaagatgaacaatttttagaaaagaatccagtttttagcacagctccagcaaatagacggatatacagttcgagcgaggatttactttctactgatgagactgattattcaaagaaaaaggacaacacactcatatcaaaaatttatcaacaacctcatgttcggcaatatgctctggctgctagaccaactatcccagtaaaagaagaaaaacggatcgaaaaatccattagttcggaagatgaagtgcttatagagatcacaaaagcacccaaagttagttctccgaaagtttggccagacgttgaaacgcagttcgaaacgatgaatattaaagaaaaggaacctgttacaaacgaacacgataatgaaaatgatccaggtgttgaagaaatagctagaaaaaaaattgtgcacaactttctccaaaaatattctacttcaagtacaaacctgaaaataacagatagtaaggaagatataaataacgaagaggatattactatttctgtgaaagatttaagaaagaggttcgaaaaaaatcagcccaaaaataatatagtatccagcttaacggctagaagtttatcaaagcaaatgaaagaggaattacgaaattgaacatagaaatattcaacaattcgactgtgccactcacccg

SEQ ID NO: 2628 - DNA, 2064 bp, Diabrotica virgifera
  SmartBlast Evalue=0.000000003; Info=Seminal fluid protein HACP060 (Fragment) n=1 Tax=Heliconius erato RepID=D9HQ61_9NEOP
gttaaaggaagataatgttcatcgttgtacattttggttatgttagcatcatcaatgttttgtcctaacatagagttaactaatttttcgataaaatcttgaacttgttctttacttttttgaacatgatccttattttttagttgactagattccataacattattagaatccatagaaaagtcctttttgttgggttgaattgcatataatattccttgaaaccaggactctggtggtcgaagacagtttttacaggtccaaacattttgttgttcgtcgaaattggcacaacgtttttgacagacattcttttgacattttgagcatgatacgctgcaatcacctcctaatatgtgatctatagaccgaaaatactctccacagacgtcgcaatgcaggttacttttactcttacgactacttttcctttgggacccataagccaaaacatagcatactccagatataatcccagcgacaacactaactcctagccctgttgaaacggcaaacgacaccatatctgcaggcattttccaaataccctcccgcactaaaaacacttttcttgtaaaatccattcaataaaaattttctcataaaatcaactacaggcaaaacctctacgaagacgatgaacgcgaaatattcacaaacttttgtttacttttagtgcgatcgcgtaacaattcttcttccgatacatttctacatgcattcactgggtctcgtccaaagaagtatttgaagcatttaaaaaatgcgacgactagatgcagatacttaaatctaacagcatagaagattggctacatactgattccagtttcggatcacgaaaatacgttgacagagttactcttacgataaaacaagatatcgaagaagtatctcacgccagcgattcagatcatgaaggcaacgaagacgatgacaatgagtacttccgtagcaaatcgtcattttggagcgatgatgagcccaactggtttttacagaagcgaacttttcaaggaacgcattcaccggtaccggtaccaatgttggtgccgaatccaacaatagaagcaaaggtactaataggtgataaagaagtagacgatacctcagacttatcagacgtagaatcggaatacggagatacagaaatagtcccagcacgacacagcctacttgtcaattccaaaacacttataggaggaaaaaacccattgcaaaatggagtcggagatgtggaatccgaaagtgaatcttctgctgattcgggtgtaaaagaagtcgatagaggccagtctgtatacgatgaatccgaatttacggatagagcagaaggcggcagtcaaaatgaagatgaacatcatacgtcttttgtgtctaaagcagatattacaatagatgacgataacgtagaagatgcatcactgatgtcagtatacagcaacacagaacaggaagcagaatacacagagagatatgcatcactaccaagaaaaatagaaaaaataccagatcctgacccaaggtcttcagaaaaaattagaaacgattacacgaactacgaaacagtaaataaagtggaagatgacgataaggaagctgaagaagtgagactggtacaaaagcatttttcaggtagttacagtaaacgggagaaagaaaaatggaaaaatgccgtagaaatgaaaaataatccctattctaaagaaaatatagaaaaaaggataaaacgatctaatagtggagtagactcgatatttgggcctgattactatgccaaaatggcgtcctctccatcaggaaccaaaggaaaggtaagtctcgacggcaagctcaacgaaattgaagaaataacaacctattctagcctcccaagaagtctctatacaccaaaaacatccagcaggcattttgttaagaacccattgttaaattttccagaacttaattctaaagaatgaagtgatgaattgtgaaatgtagcgttagctatgctcaattatttaaaacaatttaggttaataattatacaagtaaaaccatagtaaaacttgggacagaatg

SEQ ID NO: 2629 - DNA, 1836 bp, Diabrotica virgifera
  SmartBlast Evalue=5E-11; Info=Seminal fluid protein HACP060 (Fragment) n=1 Tax=Heliconius erato RepID=D9HQ61_9NEOP
gagataagatgagagtgtaccgcaacgtttcttaaaaggtgcctgcataaatcgtattgtgataccatcgccaaaaagtagttttaatataagaagaatctgtgattttaagttttaacatgttcttagtaattttatcaagtgttgttgccacggtgtggactttatttgcagctggattgtatttttatcattatattattgaagttgttttagatcttcctttaaccggccaacaatcaccatgtacagcacatgcagcattaaagcagctcatagaaaaacttctccaggaagtagcaaatttaccacaattacagcgacctcaacaggggacagcaataccaccagatctgaataatagaacatacgaggacttacttgctacggccatattaaataaggttatatcaaattcccaaaatgctcgtccgtcatcttcagctgcaagcgtttctagtagaatatcaaactcctcccacattaaagaggataaaggattcttcttcggagaagaaacgttggacagcaaatggaggcatccagatgtagaaacaacgtcagtttcaagcatagaagattggctacatactgattccagtttcggatcacgaaaatacgttgacagagttactcttacgataaaacaagatatcgaagaagtatctcacgccagcgattcagatcatgaaggcaacgaagacgatgacaatgagtacttccgtagcaaatcgtcattttggagcgatgatgagcccaactggtttttacagaagcgaacttttcaaggaacgcattcaccggtaccggtaccaatgttggtgccgaatccaacaatagaagcaaaggtactaataggtgataaagaagtagacgatacctcagacttatcagacgtagaatcggaatacggagatacagaaatagtcccagcacgacacagcctacttgtcaattccaaaacacttataggaggaaaaaacccattgcaaaatggagtcggagatgtggaatccgaaagtgaatcttctgctgattcgggtgtaaaagaagtcgatagaggccagtctgtatacgatgaatccgaatttacggatagagcagaaggcggcagtcaaaatgaagatgaacatcatacgtcttttgtgtctaaagcagatattacaatagatgacgataacgtagaagatgcatcactgatgtcagtatacagcaacacagaacaggaagcagaatacacagagagatatgcatcactaccaagaaaaatagaaaaaataccagatcctgacccaaggtcttcagaaaaaattagaaacgattacacgaactacgaaacagtaaataaagtggaagatgacgataaggaagctgaagaagtgagactggtacaaaagcatttttcaggtagttacagtaaacgggagaaagaaaaatggaaaaatgccgtagaaatgaaaaataatccctattctaaagaaaatatagaaaaaaggataaaacgatctaatagtggagtagactcgatatttgggcctgattactatgccaaaatggcgtcctctccatcaggaaccaaaggaaaggtaagtctcgacggcaagctcaacgaaattgaagaaataacaacctattctagcctcccaagaagtctctatacaccaaaaacatccagcaggcattttgttaagaacccattgttaaattttccagaacttaattctaaagaatgaagtgatgaattgtgaaatgtagcgttagctatgctcaattatttaaaacaatttaggttaataattatacaagtaaaaccatagtaaaacttgggacagaatg

SEQ ID NO: 2630 - DNA, 1635 bp, Diabrotica virgifera
ataaagcttaatgatcagtagaccgggactagattactcgaaaagttggtgcaaataaattaaatttttaacaaattttgaaaaataacatggctaaatcaatgctggatcttatgtttgaggagaaaaataagtcaaaacaacatcgatttgggcctgattactatgccaaaatggcgtcctctccatcaggaaccaaaggaaaggtaaaagaacttgtatggccacctattgggagtgaagaatcggaagatactgttgatttcattgaaaaagacgaaattcaacaggtaccaccaaaacacatttcaacaacgtacatagcagcagaagaaaccaaagacaattttaaagcatttccggttatagtagaacccgtagaagcatctttatcgtcacagacaagtttacctccaaaatcacctctgcacggatcagagatgacaagtttgacaagcgatagtgatttgagttacgtacacgtttatgatgtggaaaatgctgtaataaccaaaaaaacaagagaccaaccggtcaattcagaacctgagaagaataaccgatttgtaaaaggtacaaccactacgactagaaggtttgttaacaatccaccccttaaaaaatataaaagtgaaacagatttgctcgaagattcattttatactccacctaaagtgctggcgaggaaaaaagacaacacattaatttcaaaaatttatttggaccctcatgttagaagttttgctttaagtaatagggaacacttacctgtaaataatacgataccaacttttagaacccagttgagttctccagagatggtcctggattacaaagcttaccattcggacgatggactaagcttaaggcacagcaaaaggtacttcagttcacaggaagatttactcagctcaaattctattgaagttcacaatggaacaatgactcacacagcaaaaatgtcatttagctcagaagatgaacaatttttagaaaagaatccagtttttagcacagctccagcaaatagacggatatacagttcgagcgaggatttactttctactgatgagactgattattcaaagaaaaaggacaacacactcatatcaaaaatttatcaacaacctcatgttcggcaatatgctctggctgctagaccaactatcccagtaaaagaagaaaaacggatcgaaaaatccattagttcggaagatgaagtgcttatagagatcacaaaagcacccaaagttagttctccgaaagtttggccagacgttgaaacgcagttcgaaacgatgaatattaaagaaaaggaacctgttacaaacgaacacgataatgaaaatgatccaggtgttgaagaaatagctagaaaaaaaattgtgcacaactttctccaaaaatattctacttcaagtacaaacctgaaaataacagatagtaaggaagatataaataacgaagaggatattactatttctgtgaaagatttaagaaagaggttcgaaaaaaatcagcccaaaaataatatagtatccagcttaacggctagaagtttatcaaagcaaatgaaagaggaattacgaaattgaacatagaaatattcaacaattcgactgtgccactcacccg

SEQ ID NO: 2631 - DNA, 456 bp, Diabrotica virgifera
ataaagcttaatgatcagtagaccgggactagattactcgaaaagttggtgcaaataaattaaatttttaacaaattttgaaaaataacatggctaaatcaatgctggatcttatgtttgaggagaaaaataagtcaaaacaacatcgatttgggcctgattactatgccaaaatggcgtcctctccatcaggaaccaaaggaaaggtaagtctcgacggcaagctcaacgaaattgaagaaataacaacctattctagcctcccaagaagtctctatacaccaaaaacatccagcaggcattttgttaagaacccattgttaaattttccagaacttaattctaaagaatgaagtgatgaattgtgaaatgtagcgttagctatgctcaattatttaaaacaatttaggttaataattatacaagtaaaaccatagtaaaacttgggacagaatg

SEQ ID NO: 2632 - DNA, 3205 bp, Diabrotica virgifera
  SmartBlast Evalue=1E-104; Info=Plasma glutamate carboxypeptidase n=1 Tax=Camponotus floridanus RepID=E2ALP2_ 9HYME
caatctccttcctgtgtaatccatttggtctgattatgtggttgtcaacaattgccgtgttggtgtgtgcatcactatctaatgcactttcctgcaatttgtcttcggatctgcttaaagaaattcgttcttaccaaggaacagttgaccagatcataaatgcaactacacaaggactattcaagggcaaaacctacgatgaactggcgtattttgttgataagtttggagccagacaagcaggaagccaggtattggaagattcaatagattatttactggatctgatgcaatcgacaggatatgacctagataatgttcatggagaaaatgttaccattccgcattggattaggggaactcaaacatgtgagatgctgtcgccaagaaaagctaacattccagtactaaccctcggtggttctgtgtctaccttagccaatggattcgaggcagaggcaatagttgtaaaagacttcgacgaattggacagagtttctgacaaagtaaaaggcaagattgtggtgtacaacaacgaatatattacatatggggtatctgtagcttacaggagtaaaggaccaagtaaggcagctaagtatggagcaatagcgaccttgataaggtctgtaacaccgttttccttaaatacactccatactggtcaaactgcatacgaagactccataccaaagatagcagcagcttcaataacaagagaacatgctaacatgttccaaagaatgcaggatcgtggtgacaaaatagtattaaaactcaacatccaaacccaaaatttggatccagttacatcaagaaacgtcgttgcagaaattaagggatcaagagatcctgaaaaagtagttctagtatctggccatattgacagttgggacgtaggtgtaggagctatggacgatggagggggtgcttttatttcttggtatgctttgcgcgtacttaaagctcttggtttaaaaccaaaaaggactctaagatctgtgctttggacagctgaagaaccgggattgattggtgtccaagcctatggccaagcccacaaagacgaattggacaaacatatttttgtaatggaatctgatgaaggagtttttacacctttgggtatagaatatgttgctggtgatgagggaggttgtattctggaggaaatactaaaattgctgactccaatagacgcaacacaggccaaattagtcgagttcgcaggatctgatattacaatctggaggaacattttaccaactgcaaatttgctgagtcggaatgaaaattacttttggtatcatcactctgaggccgacaccatggacgttttagataccgcagccttagataaggccacagcattatgggcttccgtagcatacatacttgctgatctgaacaaagatttcccaagacaagtaccaaaattaaatatagtgttgccatcagtactgcacgtttagatttagtttaatttatttgtattatttgtatatcattcatcatcatcatcaatggcgttacaactcttcgtgagtctttgtcgcgtttaatattgtcttccatgtttgtctgtcctgtatatcattaaccccctattaaaaaatattacctcactcttgagactttttttgttcagtcattcatgttgagtctgccaaatgcctcaaaaaatatgggcctgcaagtaaacgaggagaaaactaagatgatggcatcaacacccaacaatagagccacaaacatcggtcaccaattcacggttgataactctacctttgaagtggtggaccaattcacatactgaggctccttgatcaccaaggagaacgtcattattgcgtttattaaatggatgaacatccatttattaatatattataatactttcattatgtataccataatatcactttaatgatattacgaacactgttcactgagtcaacgaactctattcagtgaaacaacaacgtcgttaattgaccgacgaagactattcgttatgtcaacaagagtgttatttctcctaacgtatactgcttcatgcatccaataaatttcgtttatttctacagttctttccgtttattcttacaattaattctgttcattccaacaataaatacggttattctgacaagcaacaaaaatactaattagttttcccaggattcgaaaaaaatgaatacgataatagatacacgaaaacttccttccagtatggactacatttgaaaacgaaatgaaattattcggcacttcggcagaggtaacatcattgtttaacaaagaattcttttttaaacaatggtaacacagagaaactcggggtatcacggtaaggaaaagccgttacatttcaaatggtcaagcaaaacatttattgtctcaacaactacgatttattgtcaccatgaacgcattgattgtggttattaaacgcagtagtagattgattaatgcattcgttgtcacaacaatcaagtttacatctctacaataatcatatattactctatattaacaacatttgtacattgttttaatgaaatctgtacgttgtcacgataaaccaaggtaattgcttatcatctacgaaatcaagaaagtgttttactgccagaattactatttttattaaatatacgaaactaacttattggctgaataaattgagtgttattgaataatgtagtctagttattttcacaattattattcaatcattgtgacaataaccaaatacattcatcaatgtctaaaagttcgttgaaacaaaaaattaattgttgttacaacgaaatactattcaataatcactgttaatcaatatttactaactaaatttttttgagtgtaacctctatatttacaaaacgccctctcccgaaaattttccgaaatagaaaagttgtctgactcgacatgaatggctgaataaataagtcccatgagggaggtaataatttttttagtagtagacccaaggactatctgttttaaaaacatcatcttgcggtggtaaatttactttttttgaagatttactttttgatatacatatagtatgtgtagttcatatgattcatgttaaatcaaacgaagctacaccaaaaaagagttctttttagacgatccttctgtatctatagtccagtcaatgaccattttcccgcataattttctgagcctg

SEQ ID NO: 2633 - DNA, 2691 bp, Diabrotica virgifera
  SmartBlast Evalue=1E-104; Info=Plasma glutamate carboxypeptidase n=1 Tax=Camponotus floridanus RepID=E2ALP2_ 9HYME
caatctccttcctgtgtaatccatttggtctgattatgtggttgtcaacaattgccgtgttggtgtgtgcatcactatctaatgcactttcctgcaatttgtcttcggatctgcttaaagaaattcgttcttaccaaggaacagttgaccagatcataaatgcaactacacaaggactattcaagggcaaaacctacgatgaactggcgtattttgttgataagtttggagccagacaagcaggaagccaggtattggaagattcaatagattatttactggatctgatgcaatcgacaggatatgacctagataatgttcatggagaaaatgttaccattccgcattggattaggggaactcaaacatgtgagatgctgtcgccaagaaaagctaacattccagtactaaccctcggtggttctgtgtctaccttagccaatggattcgaggcagaggcaatagttgtaaaagacttcgacgaattggacagagtttctgacaaagtaaaaggcaagattgtggtgtacaacaacgaatatattacatatggggtatctgtagcttacaggagtaaaggaccaagtaaggcagctaagtatggagcaatagcgaccttgataaggtctgtaacaccgttttccttaaatacactccatactggtcaaactgcatacgaagactccataccaaagatagcagcagcttcaataacaagagaacatgctaacatgttccaaagaatgcaggatcgtggtgacaaaatagtattaaaactcaacatccaaacccaaaatttggatccagttacatcaagaaacgtcgttgcagaaattaagggatcaagagatcctgaaaaagtagttctagtatctggccatattgacagttgggacgtaggtgtaggagctatggacgatggagggggtgcttttatttcttggtatgctttgcgcgtacttaaagctcttggtttaaaaccaaaaaggactctaagatctgtgctttggacagctgaagaaccgggattgattggtgtccaagcctatggccaagcccacaaagacgaattggacaaacatatttttgtaatggaatctgatgaaggagtttttacacctttgggtatagaatatgttgctggtgatgagggaggttgtattctggaggaaatactaaaattgctgactccaatagacgcaacacaggccaaattagtcgagttcgcaggatctgatattacaatctggaggaacattttaccaactgcaaatttgctgagtcggaatgaaaattacttttggtatcatcactctgaggccgacaccatggacgttttagataccgcagccttagataaggccacagcattatgggcttccgtagcatacatacttgctgatctgaacaaagatttcccaagacaagtaccaaaattaaatatagtgttgccatcagtactgcacgtttagatttagtttaatttatttgtattatttgtatatcattcatcatcatcatcaatggcgttacaactcttcgtgagtctttgtcgcgtttaatattgtcttccatgtttgtctgtcctgtatatcattaaccccctattaaaaaatattacctcactcttgagactttttttgttcagtcattcatgttgagtctgccaaatgcctcaaaaaatatgggcctgcaagtaaacgaggagaaaactaagatgatggcatcaacacccaacaatagagccacaaacatcggtcaccaattcacggttgataactctacctttgaagtggtggaccaattcacatactgaggctccttgatcaccaaggagaacgtcattattgcgtttattaaatggatgaacatccatttattaatatattataatactttcattatgtataccataatatcactttaatgatattacgaacactgttcactgagtcaacgaactctattcagtgaaacaacaacgtcgttaattgaccgacgaagactattcgttatgtcaacaagagtgttatttctcctaacgtatactgcttcatgcatccaataaatttcgtttatttctacagttctttccgtttattcttacaattaattctgttcattccaacaataaatacggttattctgacaagcaacaaaaatactaattagttttcccaggattcgaaaaaaatgaatacgataatagatacacgaaaacttccttccagtatggactacatttgaaaacgaaatgaaattattcggcacttcggcagaggtaacatcattgtttaacaaagaattcttttttaaacaatggtaacacagagaaactcggggtatcacggtaaggaaaagccgttacatttcaaatggtcaagcaaaacatttattgtctcaacaactacgatttattgtcaccatgaacgcattgattgtggttattaaacgcagtagtagattgattaatgcattcgttgtcacaacaatcaagtttacatctctacaataatcatatattactctatattaacaacatttgtacattgttttaatgaaatctgtacgttgtcacgataaaccaaggtaattgcttgtcatctacgaaatcaagaacgtgagttgctgccagaattaacagtatttattcaatatacgaaactaagttactggctgaataaattgagt

SEQ ID NO: 2634 - DNA, 2032 bp, Diabrotica virgifera
tttgcaggattgtttgacaaaatacttacaatttactgaatattgtctgacaaatttttaagggtactctacttcagttgtcggacgcaccaaaatttagtacactcaacgaaaaaggtacgtaatattaataaaaatcatactgaagtaaaaacttcttttgtatattggtataaaagtttattaaaaacataaaagtcctccaaaaggatttgcaaaacgttttcaatctgaatcagatcatcctcagtgcgttctgcttcacaaaagaaactagcaacttatttaaaaaggttacatcgatataaatggtttacataacaattaagtgatatttgtagcgactccaagtcgatgttacaagatgaaatgtgctaggagtgctcaaagggcaacatggttccctgctcgttaagaactcgtggttcttgccagttcaatggacacagaccaactgattaataaaaaccaattaataaaaatgttaattcagacaacaaaagcactacttaaaattcgtccaattcttcgttttattggaacaacaaataaaagcgatgttcatcaacaaataaaaaaataaaagccatgttcatcaattcattattttcaacaaataaaaaaataaaagcgatggtcatcaattcactattttcgttagttgatccaatgtattgcgtttattaaatggatgaacatccatttattaatatattataatactttcattatgtataccataatatcactttaatgatattacgaacactgttcactgagtcaacgaactctattcagtgaaacaacaacgtcgttaattgaccgacgaagactattcgttatgtcaacaagagtgttatttctcctaacgtatactgcttcatgcatccaataaatttcgtttatttctacagttctttccgtttattcttacaattaattctgttcattccaacaataaatacggttattctgacaagcaacaaaaatactaattagttttcccaggattcgaaaaaaatgaatacgataatagatacacgaaaacttccttccagtatggactacatttgaaaacgaaatgaaattattcggcacttcggcagaggtaacatcattgtttaacaaagaattcttttttaaacaatggtaacacagagaaactcggggtatcacggtaaggaaaagccgttacatttcaaatggtcaagcaaaacatttattgtctcaacaactacgatttattgtcaccatgaacgcattgattgtggttattaaacgcagtagtagattgattaatgcattcgttgtcacaacaatcaagtttacatctctacaataatcatatattactctatattaacaacatttgtacattgttttaatgaaatctgtacgttgtcacgataaaccaaggtaattgcttatcatctacgaaatcaagaaagtgttttactgccagaattactatttttattaaatatacgaaactaacttattggctgaataaattgagtgttattgaataatgtagtctagttattttcacaattattattcaatcattgtgacaataaccaaatacattcatcaatgtctaaaagttcgttgaaacaaaaaattaattgttgttacaacgaaatactattcaataatcactgttaatcaatatttactaactaaatttttttgagtgtaacctctatatttacaaaacgccctctcccgaaaattttccgaaatagaaaagttgtctgactcgacatgaatggctgaataaataagtcccatgagggaggtaataatttttttagtagtagacccaaggactatctgttttaaaaacatcatcttgcggtggtaaatttactttttttgaagatttactttttgatatacatatagtatgtgtagttcatatgattcatgttaaatcaaacgaagctacaccaaaaaagagttctttttagacgatccttctgtatctatagtccagtcaatgaccattttcccgcataattttctgagcctg

SEQ ID NO: 2635 - DNA, 1518 bp, Diabrotica virgifera
tttgcaggattgtttgacaaaatacttacaatttactgaatattgtctgacaaatttttaagggtactctacttcagttgtcggacgcaccaaaatttagtacactcaacgaaaaaggtacgtaatattaataaaaatcatactgaagtaaaaacttcttttgtatattggtataaaagtttattaaaaacataaaagtcctccaaaaggatttgcaaaacgttttcaatctgaatcagatcatcctcagtgcgttctgcttcacaaaagaaactagcaacttatttaaaaaggttacatcgatataaatggtttacataacaattaagtgatatttgtagcgactccaagtcgatgttacaagatgaaatgtgctaggagtgctcaaagggcaacatggttccctgctcgttaagaactcgtggttcttgccagttcaatggacacagaccaactgattaataaaaaccaattaataaaaatgttaattcagacaacaaaagcactacttaaaattcgtccaattcttcgttttattggaacaacaaataaaagcgatgttcatcaacaaataaaaaaataaaagccatgttcatcaattcattattttcaacaaataaaaaaataaaagcgatggtcatcaattcactattttcgttagttgatccaatgtattgcgtttattaaatggatgaacatccatttattaatatattataatactttcattatgtataccataatatcactttaatgatattacgaacactgttcactgagtcaacgaactctattcagtgaaacaacaacgtcgttaattgaccgacgaagactattcgttatgtcaacaagagtgttatttctcctaacgtatactgcttcatgcatccaataaatttcgtttatttctacagttctttccgtttattcttacaattaattctgttcattccaacaataaatacggttattctgacaagcaacaaaaatactaattagttttcccaggattcgaaaaaaatgaatacgataatagatacacgaaaacttccttccagtatggactacatttgaaaacgaaatgaaattattcggcacttcggcagaggtaacatcattgtttaacaaagaattcttttttaaacaatggtaacacagagaaactcggggtatcacggtaaggaaaagccgttacatttcaaatggtcaagcaaaacatttattgtctcaacaactacgatttattgtcaccatgaacgcattgattgtggttattaaacgcagtagtagattgattaatgcattcgttgtcacaacaatcaagtttacatctctacaataatcatatattactctatattaacaacatttgtacattgttttaatgaaatctgtacgttgtcacgataaaccaaggtaattgcttgtcatctacgaaatcaagaacgtgagttgctgccagaattaacagtatttattcaatatacgaaactaagttactggctgaataaattgagt

SEQ ID NO: 2636 - DNA, 1153 bp, Diabrotica virgifera
aatcatactaaattttttcttttccacccctgtgacttattaaaataatcattatagaggttctcagggacttcagaccctcgataatactgtaatattttattttgcgtttgaattttcaaaaataataattagttttctcaggattcggaaaaaattaaatgcgtttgaaagaattcgaccgaaatttcacgataatagacacacaaaaacttcctttcactacggactacacttgaaaacgaaatgcaattattattcggcatttcggtaacacagagaagctaggggtatcacgataaggaaaagccgttaactttcaaatggtcaagcaaaacatttattgtctcaacaactacgatttattgtcaccatgaacgcattgattgtggttattaaacgcagtagtagattgattaatgcattcgttgtcacaacaatcaagtttacatctctacaataatcatatattactctatattaacaacatttgtacattgttttaatgaaatctgtacgttgtcacgataaaccaaggtaattgcttatcatctacgaaatcaagaaagtgttttactgccagaattactatttttattaaatatacgaaactaacttattggctgaataaattgagtgttattgaataatgtagtctagttattttcacaattattattcaatcattgtgacaataaccaaatacattcatcaatgtctaaaagttcgttgaaacaaaaaattaattgttgttacaacgaaatactattcaataatcactgttaatcaatatttactaactaaatttttttgagtgtaacctctatatttacaaaacgccctctcccgaaaattttccgaaatagaaaagttgtctgactcgacatgaatggctgaataaataagtcccatgagggaggtaataatttttttagtagtagacccaaggactatctgttttaaaaacatcatcttgcggtggtaaatttactttttttgaagatttactttttgatatacatatagtatgtgtagttcatatgattcatgttaaatcaaacgaagctacaccaaaaaagagttctttttagacgatccttctgtatctatagtccagtcaatgaccattttcccgcataattttctgagcctg

SEQ ID NO: 2637 - DNA, 639 bp, Diabrotica virgifera
aatcatactaaattttttcttttccacccctgtgacttattaaaataatcattatagaggttctcagggacttcagaccctcgataatactgtaatattttattttgcgtttgaattttcaaaaataataattagttttctcaggattcggaaaaaattaaatgcgtttgaaagaattcgaccgaaatttcacgataatagacacacaaaaacttcctttcactacggactacacttgaaaacgaaatgcaattattattcggcatttcggtaacacagagaagctaggggtatcacgataaggaaaagccgttaactttcaaatggtcaagcaaaacatttattgtctcaacaactacgatttattgtcaccatgaacgcattgattgtggttattaaacgcagtagtagattgattaatgcattcgttgtcacaacaatcaagtttacatctctacaataatcatatattactctatattaacaacatttgtacattgttttaatgaaatctgtacgttgtcacgataaaccaaggtaattgcttgtcatctacgaaatcaagaacgtgagttgctgccagaattaacagtatttattcaatatacgaaactaagttactggctgaataaattgagt

SEQ ID NO: 2638 - DNA, 3103 bp, Diabrotica virgifera
  SmartBlast Evalue=0; Info=Signal recognition particle receptor subunit alpha-like protein n=2 Tax=Formicidae RepID=E2B3Y8_9HYME
gtgcttgtcagggggtgacgtgttaatttaataaacaattactgcattgggcaaaatgttggatttatttacaatttttagtaaaggaggcatagtattatggtgcttccaaagtacaaatcaaatattcactccttctgttaatgctttaataaagaatgtcattttacaggaaagaagtggtgtaaaaacattcgaccacgatgggttaattctccagtataagttagacaatgagttcgacttagtatttgttgttgcataccaaaagatactgcagctgtcttatgtagacaaatttctgaatgatattcatcttgaattcagagacaagtataaaaatgagcttactgagaagttgtattttcaagattttagctttgtggatacttataattccacattaaagtcggctgagaattggtctaaggttcaattaaagcagccgaaacagatgaggacttttgaggagtcttttaaatctaaaaagactgtttcatctatgatagaaaggaagggtgaagaaaaaccacagaaaccaattaaaaagaaggaagtgaacttcagtactgaggaaaaaactattgcacctccatcacctcaatctcagaagaatggacttattgatgaagaaaccttagctatgaatagagcaaaatttgcaaagaagatgcagaaaaagaaaccagaggcaaagaagagtcctaaaagtcctcctgcagaaaaagcgggcaaaaaacccagggtatgggatttaagcgggtctaacaaggatgtggatctattggaacgaacaacagatagacctgaagatgccagaagtaattatacaccagatgctgatatggttggtcaaatgaaaggtgtaattaaagatctagaagtggaatcttctgatgaagaatacgaagacgaggaagaagttgaaaccgttcaacagagcaaaccagcccccaaaggaggaatgttctctatctttagaggtctagtcggttcaaagaacctgaccaaatctgatatggaaccggttttggagaagatgaaagaccatcttattgctaaaaatgttgctgcagatatttcggaaaagctttgtgattccgtcgcaactaaattggagggaaaagtattggggaccttcgatagtgttgctacgactgtgaagaatactctaaatgaatctttggtacaaattttaagtccaaaaagaagggttgacattcttagagattgcatggaagcgcaaaaggctaacagaccttatgtcatgactttttgtggtgtaaatggtgtgggaaaatcaacaaacctcgcgaaaatctgtttttggttgatcgaaaacaacatgcgggtacttatagcagcttgtgatacgttcagggctggagcggttgaacaacttcgaactcatatgagacatctcaatgcccttcatccagccgataggcacggaggacgcgaaatggtccagttgtatgaaaaaggatacggtaaagatgctgcgggtatagccatggaagcaattaagtttgctagggattctagaatcgacgttgtgttaattgataccgctggaagaatgcaagataacgagcctttgatgagagccttaaccaagctgattaaagttaatgaacctgatctggtactcttcgtaggagaagctcttgttggtaatgaagccgtcgatcagttggtaaaattcaatcaagctcttgcagattattcatctagtactaatccacacatcatagatggcattgtattaaccaaattcgacacaattgatgataaggttggagctgcaatatcaatgacgtatataactggtcaacctatagtttttgttggaactggtcaaacctatacagacttgaaagccttaaatgcgaaaacggtggtgcattcgctcatgaagtaatttattcttaaaaagatgccttaattattatcattctaaatcgttaaacgaagttctaaggtcgaaagatgagacattagataattgtgattttattttcatttcagagttttaacgtattttatttgcctctttatgaagtcggctcatgtgtttcaaattgtaagaagacatatttgatatttttcaatcccattagcaatttatatggactttgcataatgtgcaatgcttataaatgatgaaacaatagataagctataaaattgaaaattaatttttgtgaaaaatctattttaggatcactcaaatttgaacatttttcatatcgtttttattatacatttctttgtaaacaatacagactagactaaggaatataagttaatgaatttcaataatatgaatagttataagttgttatatgtatgtataacttacagcttacaggggtctaggacgtttcatcgccgccgtttcgatgccgccagttcgatgccgatgccggccgattcatcgccagtcaattaatcgctatctgatatatttccgaattttcgacagttacaattattatttatttttagtattaattaggaattctaggaaatgcgagatatgacggcgctgaaatggactggcgatgaatcggcggcatcgaaacggcggcgatgaaccggcggccatgaaacgtcccattccggcttacagttactaatatttggcacgtttcaaaatcttttaataaaaatatgttggaataggattgaaaccgtcgactttttggatatcctttttacattctattttcacacatttcttgcaagttttacgttaagaaaattttaagtatgtattacaatatcttctttagcagattcttagttttcctatattcgcctgtcttgagctgcctgggagaagaggcagtctcttcctgcctcttctttaatatcgttgatccaccttttttgctgtcttgctaagccttgtttatgtgctgctctttgtagccattgtattattctctttgctcacttttctctttctcttgtccacatgtcctgtccatttccatttagattttgcgacatcttcgatattatcttttacattggttctatcttcttagatctctaattacaattatattaaacattttttttataaattgtctcatct

SEQ ID NO: 2639 - DNA, 2817 bp, Diabrotica virgifera
  SmartBlast Evalue=0; Info=Signal recognition particle receptor subunit alpha-like protein n=2 Tax=Formicidae RepID=E2B3Y8_9HYME
gtgcttgtcagggggtgacgtgttaatttaataaacaattactgcattgggcaaaatgttggatttatttacaatttttagtaaaggaggcatagtattatggtgcttccaaagtacaaatcaaatattcactccttctgttaatgctttaataaagaatgtcattttacaggaaagaagtggtgtaaaaacattcgaccacgatgggttaattctccagtataagttagacaatgagttcgacttagtatttgttgttgcataccaaaagatactgcagctgtcttatgtagacaaatttctgaatgatattcatcttgaattcagagacaagtataaaaatgagcttactgagaagttgtattttcaagattttagctttgtggatacttataattccacattaaagtcggctgagaattggtctaaggttcaattaaagcagccgaaacagatgaggacttttgaggagtcttttaaatctaaaaagactgtttcatctatgatagaaaggaagggtgaagaaaaaccacagaaaccaattaaaaagaaggaagtgaacttcagtactgaggaaaaaactattgcacctccatcacctcaatctcagaagaatggacttattgatgaagaaaccttagctatgaatagagcaaaatttgcaaagaagatgcagaaaaagaaaccagaggcaaagaagagtcctaaaagtcctcctgcagaaaaagcgggcaaaaaacccagggtatgggatttaagcgggtctaacaaggatgtggatctattggaacgaacaacagatagacctgaagatgccagaagtaattatacaccagatgctgatatggttggtcaaatgaaaggtgtaattaaagatctagaagtggaatcttctgatgaagaatacgaagacgaggaagaagttgaaaccgttcaacagagcaaaccagcccccaaaggaggaatgttctctatctttagaggtctagtcggttcaaagaacctgaccaaatctgatatggaaccggttttggagaagatgaaagaccatcttattgctaaaaatgttgctgcagatatttcggaaaagctttgtgattccgtcgcaactaaattggagggaaaagtattggggaccttcgatagtgttgctacgactgtgaagaatactctaaatgaatctttggtacaaattttaagtccaaaaagaagggttgacattcttagagattgcatggaagcgcaaaaggctaacagaccttatgtcatgactttttgtggtgtaaatggtgtgggaaaatcaacaaacctcgcgaaaatctgtttttggttgatcgaaaacaacatgcgggtacttatagcagcttgtgatacgttcagggctggagcggttgaacaacttcgaactcatatgagacatctcaatgcccttcatccagccgataggcacggaggacgcgaaatggtccagttgtatgaaaaaggatacggtaaagatgctgcgggtatagccatggaagcaattaagtttgctagggattctagaatcgacgttgtgttaattgataccgctggaagaatgcaagataacgagcctttgatgagagccttaaccaagctgattaaagttaatgaacctgatctggtactcttcgtaggagaagctcttgttggtaatgaagccgtcgatcagttggtaaaattcaatcaagctcttgcagattattcatctagtactaatccacacatcatagatggcattgtattaaccaaattcgacacaattgatgataaggttggagctgcaatatcaatgacgtatataactggtcaacctatagtttttgttggaactggtcaaacctatacagacttgaaagccttaaatgcgaaaacggtggtgcattcgctcatgaagtaatttattcttaaaaagatgccttaattattatcattctaaatcgttaaacgaagttctaaggtcgaaagatgagacattagataattgtgattttattttcatttcagagttttaacgtattttatttgcctctttatgaagtcggctcatgtgtttcaaattgtaagaagacatatttgatatttttcaatcccattagcaatttatatggactttgcataatgtgcaatgcttataaatgatgaaacaatagataagctataaaattgaaaattaatttttgtgaaaaatctattttaggatcactcaaatttgaacatttttcatatcgtttttattatacatttctttgtaaacaatacagactagactaaggaatataagttaatgaatttcaataatatgaatagttataagttgttatatgtatgtataacttacagcttacaggggtctaggacgtttcatcgccgccgtttcgatgccgccagttcgatgccgatgccggccgattcatcgccagtcaattaatcgctatctgatatatttccgaattttcgacagttacaattattagttatttttagtattaattaggaattctaggaaatgcgagatatgacggcgatgaaatggactggcgatgaaccggcggcatcgaaacggccggcgatgaaccggcggcatcgaaacgtcccattccgattatttcgtaccttacagtacagaaatgaatatgtatttaatcgttacatcttgttaatgtcataaaatcgacgaaaaaatatttattgtattattattaacaatataagcagtaattattcttaaatttttataagattgtcaaaaatctttagtaaaaccttttaagtaaactaataagaaaactaaaa

SEQ ID NO: 2640 - DNA, 2690 bp, Diabrotica virgifera
  SmartBlast Evalue=0; Info=Signal recognition particle receptor subunit alpha-like protein n=2 Tax=Formicidae RepID=E2B3Y8_9HYME
gtgcttgtcagggggtgacgtgttaatttaataaacaattactgcattgggcaaaatgttggatttatttacaatttttagtaaaggaggcatagtattatggtgcttccaaagtacaaatcaaatattcactccttctgttaatgctttaataaagaatgtcattttacaggaaagaagtggtgtaaaaacattcgaccacgatgggttaattctccagtataagttagacaatgagttcgacttagtatttgttgttgcataccaaaagatactgcagctgtcttatgtagacaaatttctgaatgatattcatcttgaattcagagacaagtataaaaatgagcttactgagaagttgtattttcaagattttagctttgtggatacttataattccacattaaagtcggctgagaattggtctaaggttcaattaaagcagccgaaacagatgaggacttttgaggagtcttttaaatctaaaaagactgtttcatctatgatagaaaggaagggtgaagaaaaaccacagaaaccaattaaaaagaaggaagtgaacttcagtactgaggaaaaaactattgcacctccatcacctcaatctcagaagaatggacttattgatgaagaaaccttagctatgaatagagcaaaatttgcaaagaagatgcagaaaaagaaaccagaggcaaagaagagtcctaaaagtcctcctgcagaaaaagcgggcaaaaaacccagggtatgggatttaagcgggtctaacaaggatgtggatctattggaacgaacaacagatagacctgaagatgccagaagtaattatacaccagatgctgatatggttggtcaaatgaaaggtgtaattaaagatctagaagtggaatcttctgatgaagaatacgaagacgaggaagaagttgaaaccgttcaacagagcaaaccagcccccaaaggaggaatgttctctatctttagaggtctagtcggttcaaagaacctgaccaaatctgatatggaaccggttttggagaagatgaaagaccatcttattgctaaaaatgttgctgcagatatttcggaaaagctttgtgattccgtcgcaactaaattggagggaaaagtattggggaccttcgatagtgttgctacgactgtgaagaatactctaaatgaatctttggtacaaattttaagtccaaaaagaagggttgacattcttagagattgcatggaagcgcaaaaggctaacagaccttatgtcatgactttttgtggtgtaaatggtgtgggaaaatcaacaaacctcgcgaaaatctgtttttggttgatcgaaaacaacatgcgggtacttatagcagcttgtgatacgttcagggctggagcggttgaacaacttcgaactcatatgagacatctcaatgcccttcatccagccgataggcacggaggacgcgaaatggtccagttgtatgaaaaaggatacggtaaagatgctgcgggtatagccatggaagcaattaagtttgctagggattctagaatcgacgttgtgttaattgataccgctggaagaatgcaagataacgagcctttgatgagagccttaaccaagctgattaaagttaatgaacctgatctggtactcttcgtaggagaagctcttgttggtaatgaagccgtcgatcagttggtaaaattcaatcaagctcttgcagattattcatctagtactaatccacacatcatagatggcattgtattaaccaaattcgacacaattgatgataaggttggagctgcaatatcaatgacgtatataactggtcaacctatagtttttgttggaactggtcaaacctatacagacttgaaagccttaaatgcgaaaacggtggtgcattcgctcatgaagtaatttattcttaaaaagatgccttaattattatcattctaaatcgttaaacgaagttctaaggtcgaaagatgagacattagataattgtgattttattttcatttcagagttttaacgtattttatttgcctctttatgaagtcggctcatgtgtttcaaattgtaagaagacatatttgatatttttcaatcccattagcaatttatatggactttgcataatgtgcaatgcttataaatgatgaaacaatagataagctataaaattgaaaattaatttttgtgaaaaatctattttaggatcactcaaatttgaacatttttcatatcgtttttattatacatttctttgtaaacaatacagactagactaaggaatataagttaatgaatttcaataatatgaatagttataagttgttatatgtatgtataacttacagcttacaggggtctaggacgtttcatcgccgccgtttcgatgccgccagttcgatgccgatgccggccgattcatcgccagtcaattaatcgctatctgatatatttccgaattttcgacagttacaattattagttatttttagtattaattaggaattctaggaaatgcgagatatgacggcgatgaaatggactggcgatgaaccggcggcatcgaaacgtcccattccgcactctactcatcaatagtctctagattctcagagtacaggcttagctcatatttttcactaaaataatttaaggtcttctaattattgtctgg

SEQ ID NO: 2641 - DNA, 1074 bp, Diabrotica virgifera
aatattcgtatgtcctctctcacttctagcataatcagctctaaacgagtaagaatatgctccaaaactatgatattaaagaaatttgtctcaaaatgattgagttacagtacaatcttaaactcgagaataattttttttaatgtttgaaagcgttttataactcgaaaaccgtcatttctgaatgcttcatcaatattattctttaaaatgtttttagttatcacagaacattaaattatttacctaacagtacctacctattattaggttgtttcagtaacttttattattctgtgaatgacatctgtcacatttaacattgatagacgtttattttgtgtttgttgatagcactctacgggtctaggacgtttcatcgccgccatttcgatgccggccgattcatcgccagtcaattaatcgctatctgatatatttccgaattttcgacagttacaattattatttatttttagtattaattaggaattctaggaaatgcgagatatgacggcgctgaaatggactggcgatgaatcggcggcatcgaaacggcggcgatgaaccggcggccatgaaacgtcccattccggcttacagttactaatatttggcacgtttcaaaatcttttaataaaaatatgttggaataggattgaaaccgtcgactttttggatatcctttttacattctattttcacacatttcttgcaagttttacgttaagaaaattttaagtatgtattacaatatcttctttagcagattcttagttttcctatattcgcctgtcttgagctgcctgggagaagaggcagtctcttcctgcctcttctttaatatcgttgatccaccttttttgctgtcttgctaagccttgtttatgtgctgctctttgtagccattgtattattctctttgctcacttttctctttctcttgtccacatgtcctgtccatttccatttagattttgcgacatcttcgatattatcttttacattggttctatcttcttagatctctaattacaattatattaaacattttttttataaattgtctcatct

SEQ ID NO: 2642 - DNA, 788 bp, Diabrotica virgifera
aatattcgtatgtcctctctcacttctagcataatcagctctaaacgagtaagaatatgctccaaaactatgatattaaagaaatttgtctcaaaatgattgagttacagtacaatcttaaactcgagaataattttttttaatgtttgaaagcgttttataactcgaaaaccgtcatttctgaatgcttcatcaatattattctttaaaatgtttttagttatcacagaacattaaattatttacctaacagtacctacctattattaggttgtttcagtaacttttattattctgtgaatgacatctgtcacatttaacattgatagacgtttattttgtgtttgttgatagcactctacgggtctaggacgtttcatcgccgccatttcgatgccggccgattcatcgccagtcaattaatcgctatctgatatatttccgaattttcgacagttacaattattagttatttttagtattaattaggaattctaggaaatgcgagatatgacggcgatgaaatggactggcgatgaaccggcggcatcgaaacggccggcgatgaaccggcggcatcgaaacgtcccattccgattatttcgtaccttacagtacagaaatgaatatgtatttaatcgttacatcttgttaatgtcataaaatcgacgaaaaaatatttattgtattattattaacaatataagcagtaattattcttaaatttttataagattgtcaaaaatctttagtaaaaccttttaagtaaactaataagaaaactaaaa

SEQ ID NO: 2643 - DNA, 661 bp, Diabrotica virgifera
aatattcgtatgtcctctctcacttctagcataatcagctctaaacgagtaagaatatgctccaaaactatgatattaaagaaatttgtctcaaaatgattgagttacagtacaatcttaaactcgagaataattttttttaatgtttgaaagcgttttataactcgaaaaccgtcatttctgaatgcttcatcaatattattctttaaaatgtttttagttatcacagaacattaaattatttacctaacagtacctacctattattaggttgtttcagtaacttttattattctgtgaatgacatctgtcacatttaacattgatagacgtttattttgtgtttgttgatagcactctacgggtctaggacgtttcatcgccgccatttcgatgccggccgattcatcgccagtcaattaatcgctatctgatatatttccgaattttcgacagttacaattattagttatttttagtattaattaggaattctaggaaatgcgagatatgacggcgatgaaatggactggcgatgaaccggcggcatcgaaacgtcccattccgcactctactcatcaatagtctctagattctcagagtacaggcttagctcatatttttcactaaaataatttaaggtcttctaattattgtctgg

SEQ ID NO: 2644 - DNA, 1824 bp, Diabrotica virgifera
  SmartBlast Evalue=1E-106; Info="Heterogeneous nuclear ribonucleoprotein 27C, putative n=1 Tax=Pediculus humanus corporis RepID=E0VDG5_PEDHC"
gtattgtattcctatcgtagttgttaattaggatagttcttaacgttagatttaaattaattttaagtttagtgtaagaagtcttaattataatggaagagtatgagtacggacagccacaccaaagtagcatagctccatacattgatgactctcatcctggatacaagctctttgtgggaggattatcctgggagacgacccaggataatttacaaagatacttctccagatatggggaagtaattgactgtgtggtcatgaagaatgcagaatctggaagatcgaggggatttggcttcgtcacattttcagatccagccaatgtaaatgttgttttacagaatggaccacatactctggatggaaggacaattgatcccaaaccatgtaacccaagaacactgcagaagccaaagaaaggtgggggttatcccaaagtatttttgggaggtttgccatcaaatgttactgagactgacctcagaagttttttcacaagatttggaaaggttatggaagtagttataatgtatgatcaagaaaagaaaaaatcaagaggatttggttttctgtccttcgaggatgaggaagcagttgatagatgtgtacaagagcattttgttaatttaaatggaaagcaggtggagatcaagaaggctgaaccgcgcgatggatctggtggtaacaaaatgggcggagacccagcgtcagcgtggggacctcctcaagctccaatggggatgatgcaaggccccaatggacagatgggtggccctccaatgaacatcggcgcgccgatgggtcccaatatgatgcaaagctaccaaggttggggcacctcgccacagcaacaaagctatgcaagctatggcacaccatctggacctggttcttatcaaggatggggagctcctccagcacctcaaggcccgcctccacaatggggcaataactacggtggaccaccacaacaacaaggttatggttcttatggtccaagtgcgggtagtggaacagccaattggaatagttggaatgtggctcaaagtaacggttcgagtggcccctcaggttacatcgctggcgatatgtactccagaggtcaatcggggccagctggtcctggtacaccgagcggtccccccaacatgtcatcgtcaggcaccaattcaaagcccggatctgactacaattatgcaggttatggatcatattcgaccgaagcaggttacggcgccccaccaaggtcatatggcagtgacgcaggctcccaagtaggaggatattcatcgcaacccccaaatccaggtgctaaacatttcaatgattttaaagagtggcccagttcttgacaaccttttgataatctctatacagccagtgtgactcctacacaggttccgctcaacagcacagttccaaaaaatattagaatctttttcaaaaccacaatttttccttccgatatggaacagtcaggctggttggcggagcctaatgcaggagtcacattgaagcatgtcaacaacttaaataatatgggtatatgttataacagttggaaacgtgttggcttgataaacatgaagagagcagccggactggtcactcctgccaaactcaattactctgattagacagacaaatgattcaccggcatcttcaccatctgttagtttagcatcactgttgtagtcgatgtccgctactgcacgaacggacttactcttgttgttctctgtttattttaatttttttttaataaatatttgattagtttatttctgaacttgataatcgaattagtgaaaggcgacgggc

SEQ ID NO: 2645 - DNA, 1793 bp, Diabrotica virgifera
  SmartBlast Evalue=1E-106; Info="Heterogeneous nuclear ribonucleoprotein 27C, putative n=1 Tax=Pediculus humanus corporis RepID=E0VDG5_PEDHC"
cttgtagttggtgagtggcgagtgtaaccggctggattgaaataaaagtagtaaaagtgttttcaaatcggcgtggaaaaatagcatgcgaatgttgcgactaaaacaagagattatggatgatgatgaaaagggcaagctctttgtgggaggattatcctgggagacgacccaggataatttacaaagatacttctccagatatggggaagtaattgactgtgtggtcatgaagaatgcagaatctggaagatcgaggggatttggcttcgtcacattttcagatccagccaatgtaaatgttgttttacagaatggaccacatactctggatggaaggacaattgatcccaaaccatgtaacccaagaacactgcagaagccaaagaaaggtgggggttatcccaaagtatttttgggaggtttgccatcaaatgttactgagactgacctcagaagttttttcacaagatttggaaaggttatggaagtagttataatgtatgatcaagaaaagaaaaaatcaagaggatttggttttctgtccttcgaggatgaggaagcagttgatagatgtgtacaagagcattttgttaatttaaatggaaagcaggtggagatcaagaaggctgaaccgcgcgatggatctggtggtaacaaaatgggcggagacccagcgtcagcgtggggacctcctcaagctccaatggggatgatgcaaggccccaatggacagatgggtggccctccaatgaacatcggcgcgccgatgggtcccaatatgatgcaaagctaccaaggttggggcacctcgccacagcaacaaagctatgcaagctatggcacaccatctggacctggttcttatcaaggatggggagctcctccagcacctcaaggcccgcctccacaatggggcaataactacggtggaccaccacaacaacaaggttatggttcttatggtccaagtgcgggtagtggaacagccaattggaatagttggaatgtggctcaaagtaacggttcgagtggcccctcaggttacatcgctggcgatatgtactccagaggtcaatcggggccagctggtcctggtacaccgagcggtccccccaacatgtcatcgtcaggcaccaattcaaagcccggatctgactacaattatgcaggttatggatcatattcgaccgaagcaggttacggcgccccaccaaggtcatatggcagtgacgcaggctcccaagtaggaggatattcatcgcaacccccaaatccaggtgctaaacatttcaatgattttaaagagtggcccagttcttgacaaccttttgataatctctatacagccagtgtgactcctacacaggttccgctcaacagcacagttccaaaaaatattagaatctttttcaaaaccacaatttttccttccgatatggaacagtcaggctggttggcggagcctaatgcaggagtcacattgaagcatgtcaacaacttaaataatatgggtatatgttataacagttggaaacgtgttggcttgataaacatgaagagagcagccggactggtcactcctgccaaactcaattactctgattagacagacaaatgattcaccggcatcttcaccatctgttagtttagcatcactgttgtagtcgatgtccgctactgcacgaacggacttactcttgttgttctctgtttattttaatttttttttaataaatatttgattagtttatttctgaacttgataatcgaattagtgaaaggcgacgggc

SEQ ID NO: 2646 - DNA, 1746 bp, Diabrotica virgifera
  SmartBlast Evalue=1E-101; Info="Heterogeneous nuclear ribonucleoprotein 27C, putative n=1 Tax=Pediculus humanus corporis RepID=E0VDG5_PEDHC"
gtattgtattcctatcgtagttgttaattaggatagttcttaacgttagatttaaattaattttaagtttagtgtaagaagtcttaattataatggaagagtatgagtacggacagccacaccaaagtagcatagctccatacattgatgactctcatcctggatacaagctctttgtgggaggattatcctgggagacgacccaggataatttacaaagatacttctccagatatggggaagtaattgactgtgtggtcatgaagaatgcagaatctggaagatcgaggggatttggcttcgtcacattttcagatccagccaatgtaaatgttgttttacagaatggaccacatactctggatggaaggacaattgatcccaaaccatgtaacccaagaacactgcagaagccaaagaaaggtgggggttatcccaaagtatttttgggaggtttgccatcaaatgttactgagactgacctcagaagttttttcacaagatttggaaaggttatggaagtagttataatgtatgatcaagaaaagaaaaaatcaagaggatttggttttctgtccttcgaggatgaggaagcagttgatagatgtgtacaagagcattttgttaatttaaatggaaagcaggtggagatcaagaaggctgaaccgcgcgatggatctggtggtaacaaaatgggcggagacccagcgtcagcgtggggacctcctcaagctccaatggggatgatgcaaggccccaatggacagatgggtggccctccaatgaacatcggcgcgccgatgggtcccaatatgatgcaaagctaccaaggttggggcacctcgccacagcaacaaagctatgcaagctatggcacaccatctggacctggttcttatcaaggatggggagctcctccagcacctcaaggcccgcctccacaatggggcaataactacggtggaccaccacaacaacaaggttatggttcttatggttacatcgctggcgatatgtactccagaggtcaatcggggccagctggtcctggtacaccgagcggtccccccaacatgtcatcgtcaggcaccaattcaaagcccggatctgactacaattatgcaggttatggatcatattcgaccgaagcaggttacggcgccccaccaaggtcatatggcagtgacgcaggctcccaagtaggaggatattcatcgcaacccccaaatccaggtgctaaacatttcaatgattttaaagagtggcccagttcttgacaaccttttgataatctctatacagccagtgtgactcctacacaggttccgctcaacagcacagttccaaaaaatattagaatctttttcaaaaccacaatttttccttccgatatggaacagtcaggctggttggcggagcctaatgcaggagtcacattgaagcatgtcaacaacttaaataatatgggtatatgttataacagttggaaacgtgttggcttgataaacatgaagagagcagccggactggtcactcctgccaaactcaattactctgattagacagacaaatgattcaccggcatcttcaccatctgttagtttagcatcactgttgtagtcgatgtccgctactgcacgaacggacttactcttgttgttctctgtttattttaatttttttttaataaatatttgattagtttatttctgaacttgataatcgaattagtgaaaggcgacgggc

SEQ ID NO: 2647 - DNA, 1715 bp, Diabrotica virgifera
  SmartBlast Evalue=1E-101; Info="Heterogeneous nuclear ribonucleoprotein 27C, putative n=1 Tax=Pediculus humanus corporis RepID=E0VDG5_PEDHC"
cttgtagttggtgagtggcgagtgtaaccggctggattgaaataaaagtagtaaaagtgttttcaaatcggcgtggaaaaatagcatgcgaatgttgcgactaaaacaagagattatggatgatgatgaaaagggcaagctctttgtgggaggattatcctgggagacgacccaggataatttacaaagatacttctccagatatggggaagtaattgactgtgtggtcatgaagaatgcagaatctggaagatcgaggggatttggcttcgtcacattttcagatccagccaatgtaaatgttgttttacagaatggaccacatactctggatggaaggacaattgatcccaaaccatgtaacccaagaacactgcagaagccaaagaaaggtgggggttatcccaaagtatttttgggaggtttgccatcaaatgttactgagactgacctcagaagttttttcacaagatttggaaaggttatggaagtagttataatgtatgatcaagaaaagaaaaaatcaagaggatttggttttctgtccttcgaggatgaggaagcagttgatagatgtgtacaagagcattttgttaatttaaatggaaagcaggtggagatcaagaaggctgaaccgcgcgatggatctggtggtaacaaaatgggcggagacccagcgtcagcgtggggacctcctcaagctccaatggggatgatgcaaggccccaatggacagatgggtggccctccaatgaacatcggcgcgccgatgggtcccaatatgatgcaaagctaccaaggttggggcacctcgccacagcaacaaagctatgcaagctatggcacaccatctggacctggttcttatcaaggatggggagctcctccagcacctcaaggcccgcctccacaatggggcaataactacggtggaccaccacaacaacaaggttatggttcttatggttacatcgctggcgatatgtactccagaggtcaatcggggccagctggtcctggtacaccgagcggtccccccaacatgtcatcgtcaggcaccaattcaaagcccggatctgactacaattatgcaggttatggatcatattcgaccgaagcaggttacggcgccccaccaaggtcatatggcagtgacgcaggctcccaagtaggaggatattcatcgcaacccccaaatccaggtgctaaacatttcaatgattttaaagagtggcccagttcttgacaaccttttgataatctctatacagccagtgtgactcctacacaggttccgctcaacagcacagttccaaaaaatattagaatctttttcaaaaccacaatttttccttccgatatggaacagtcaggctggttggcggagcctaatgcaggagtcacattgaagcatgtcaacaacttaaataatatgggtatatgttataacagttggaaacgtgttggcttgataaacatgaagagagcagccggactggtcactcctgccaaactcaattactctgattagacagacaaatgattcaccggcatcttcaccatctgttagtttagcatcactgttgtagtcgatgtccgctactgcacgaacggacttactcttgttgttctctgtttattttaatttttttttaataaatatttgattagtttatttctgaacttgataatcgaattagtgaaaggcgacgggc

SEQ ID NO: 2648 - DNA, 1660 bp, Diabrotica virgifera
  SmartBlast Evalue=1E-106; Info="Heterogeneous nuclear ribonucleoprotein 27C, putative n=1 Tax=Pediculus humanus corporis RepID=E0VDG5_PEDHC"
ggcaagctctttgtgggaggattatcctgggagacgacccaggataatttacaaagatacttctccagatatggggaagtaattgactgtgtggtcatgaagaatgcagaatctggaagatcgaggggatttggcttcgtcacattttcagatccagccaatgtaaatgttgttttacagaatggaccacatactctggatggaaggacaattgatcccaaaccatgtaacccaagaacactgcagaagccaaagaaaggtgggggttatcccaaagtatttttgggaggtttgccatcaaatgttactgagactgacctcagaagttttttcacaagatttggaaaggttatggaagtagttataatgtatgatcaagaaaagaaaaaatcaagaggatttggttttctgtccttcgaggatgaggaagcagttgatagatgtgtacaagagcattttgttaatttaaatggaaagcaggtggagatcaagaaggctgaaccgcgcgatggatctggtggtaacaaaatgggcggagacccagcgtcagcgtggggacctcctcaagctccaatggggatgatgcaaggccccaatggacagatgggtggccctccaatgaacatcggcgcgccgatgggtcccaatatgatgcaaagctaccaaggttggggcacctcgccacagcaacaaagctatgcaagctatggcacaccatctggacctggttcttatcaaggatggggagctcctccagcacctcaaggcccgcctccacaatggggcaataactacggtggaccaccacaacaacaaggttatggttcttatggtccaagtgcgggtagtggaacagccaattggaatagttggaatgtggctcaaagtaacggttcgagtggcccctcaggttacatcgctggcgatatgtactccagaggtcaatcggggccagctggtcctggtacaccgagcggtccccccaacatgtcatcgtcaggcaccaattcaaagcccggatctgactacaattatgcaggttatggatcatattcgaccgaagcaggttacggcgccccaccaaggtcatatggcagtgacgcaggctcccaagtaggaggatattcatcgcaacccccaaatccaggtgctaaacatttcaatgattttaaagagtggcccagttcttgacaaccttttgataatctctatacagccagtgtgactcctacacaggttccgctcaacagcacagttccaaaaaatattagaatctttttcaaaaccacaatttttccttccgatatggaacagtcaggctggttggcggagcctaatgcaggagtcacattgaagcatgtcaacaacttaaataatatgggtatatgttataacagttggaaacgtgttggcttgataaacatgaagagagcagccggactggtcactcctgccaaactcaattactctgattagacagacaaatgattcaccggcatcttcaccatctgttagtttagcatcactgttgtagtcgatgtccgctactgcacgaacggacttactcttgttgttctctgtttattttaatttttttttaataaatatttgattagtttatttctgaacttgataatcgaattagtgaaaggcgacgggc

SEQ ID NO: 2649 - DNA, 1582 bp, Diabrotica virgifera
  SmartBlast Evalue=1E-101; Info="Heterogeneous nuclear ribonucleoprotein 27C, putative n=1 Tax=Pediculus humanus corporis RepID=E0VDG5_PEDHC"
ggcaagctctttgtgggaggattatcctgggagacgacccaggataatttacaaagatacttctccagatatggggaagtaattgactgtgtggtcatgaagaatgcagaatctggaagatcgaggggatttggcttcgtcacattttcagatccagccaatgtaaatgttgttttacagaatggaccacatactctggatggaaggacaattgatcccaaaccatgtaacccaagaacactgcagaagccaaagaaaggtgggggttatcccaaagtatttttgggaggtttgccatcaaatgttactgagactgacctcagaagttttttcacaagatttggaaaggttatggaagtagttataatgtatgatcaagaaaagaaaaaatcaagaggatttggttttctgtccttcgaggatgaggaagcagttgatagatgtgtacaagagcattttgttaatttaaatggaaagcaggtggagatcaagaaggctgaaccgcgcgatggatctggtggtaacaaaatgggcggagacccagcgtcagcgtggggacctcctcaagctccaatggggatgatgcaaggccccaatggacagatgggtggccctccaatgaacatcggcgcgccgatgggtcccaatatgatgcaaagctaccaaggttggggcacctcgccacagcaacaaagctatgcaagctatggcacaccatctggacctggttcttatcaaggatggggagctcctccagcacctcaaggcccgcctccacaatggggcaataactacggtggaccaccacaacaacaaggttatggttcttatggttacatcgctggcgatatgtactccagaggtcaatcggggccagctggtcctggtacaccgagcggtccccccaacatgtcatcgtcaggcaccaattcaaagcccggatctgactacaattatgcaggttatggatcatattcgaccgaagcaggttacggcgccccaccaaggtcatatggcagtgacgcaggctcccaagtaggaggatattcatcgcaacccccaaatccaggtgctaaacatttcaatgattttaaagagtggcccagttcttgacaaccttttgataatctctatacagccagtgtgactcctacacaggttccgctcaacagcacagttccaaaaaatattagaatctttttcaaaaccacaatttttccttccgatatggaacagtcaggctggttggcggagcctaatgcaggagtcacattgaagcatgtcaacaacttaaataatatgggtatatgttataacagttggaaacgtgttggcttgataaacatgaagagagcagccggactggtcactcctgccaaactcaattactctgattagacagacaaatgattcaccggcatcttcaccatctgttagtttagcatcactgttgtagtcgatgtccgctactgcacgaacggacttactcttgttgttctctgtttattttaatttttttttaataaatatttgattagtttatttctgaacttgataatcgaattagtgaaaggcgacgggc

SEQ ID NO: 2650 - DNA, 2014 bp, Diabrotica virgifera
  SmartBlast Evalue=1E-142; Info=Zinc transporter 1 n=2 Tax= Formicidae RepID=E2A5R6_9HYME
ttattatcaatcttataaataaaattttgtaacctggctataatatttttaatatgttacgtgtcccggtattttgaattgctttatcgattttgttgtgttttttgctctaaccaactaggaaagcttcacaaccatccaaaattctatacacgacctgactagaatttcactgaataacgatcaaagagcaaattgaaacactgaatactttatacacttcccaatgtcgttatgtctcaccaaaaatcgtaattttgtaggacgactttacacaacaatattaaattaaatctatcccctgaatgtgcattgggagccacgtagggtacaatcacagtctggttggagtccgttttctttaaggaggacgccttcctccatttcgttcatctcctcgttaccgactttgggtttctgaactgagtttctttgacggaccatgtacggcgtgttgtttggagatggtgagtctctgccctgttttgaaggtccacaacaggtattcctgacgcaattgtcattaaggctgtcacctttcgggcagtctaatacacaatcttcggtcataggttcctgtactgtcgtcgaagtggtcggtatatcggtgtagtctatgaattccggttgtatcgttgtcgaatgaatcccttcattgtggaagaattctttcaccttttctgcgattttcatgtactcagaaagattcctacacctgatatgagctgaagctataattctatcgccggccaactgccagacgtggaattcgtggactgccagaacgccgtccactttcgacagcagcctgctttggatagcgtcgacttgaatgtgagtcggaactgtttgaagcaaaataagtgccgagtctcttaatagcggccataccgaattcaagattaataaaactaaaagaacactgagagctggatcaatgtaatatttatatttccagtcggttaaccagaacactaacgcagatactatcacaataaccgaaccgagagcatcagacaaaacgtgcaagaacactccgcgcatgttcatctgaccagctgaatgactgtgggtcagagctttctcacctaattgggttgtcggtggaggaggactaggaaacgtttcgtcgttctcgttgtcgtccgttatcgctagttgggttagtctatttctactatgggacagtcttccgtgtgaatgaccatgggaactaccatgttcatgaaatagtaataatccgactaagttgactaagagaccaattcctccgacgattactaacaactgaggattgtgaatatactctatttcgataaacctcttgcaggcttctacggttatagaaaaacataaagctactaaaaatacggcgttgaccaaggcgcccaacacttcagctctcgcccaaccgaaggtattcttcgaccatttctttggtgacatcttaacggataaaaaagctacaactaatgctgcgacgtcgctcagcatatgaaaactatctgccactaaggccattgaatttgttatataacctacgactatttctacgaagaagaaaaacgtcgtaagccataacatcgacagcaagcgacattttttcccagagaatcttcccatatcagcttaagtttcttgtgtcaatgttgtctcatcatccagattgaagatatatttcacacagtaatcagacgaatatatctgattaccgacaaaaaggggcactgcctgatatattggagaacaatggtaaaatgttaccaaaatagaacctcagttctattaacaatgtgatttccagaagtcttacaaaaaaatgtggactcgtcacttgttattttcgataaattaaaaaataaaacagttatgtcaggcgaaacgtatgaacgaatttagtttaaatattcggaaaacataaaatcaatttggaaaatttgtcacaacaatttttctctgcagaaatgaaatttactttactgtaatcacccgtgagtgtccgtcacaactgtca

SEQ ID NO: 2651 - DNA, 1943 bp, Diabrotica virgifera
  SmartBlast Evalue=1E-143; Info=Zinc transporter 1 n=2 Tax= Formicidae RepID=E2A5R6_9HYME
ttattatcaatcttataaataaaattttgtaacctggctataatatttttaatatgttacgtgtcccggtattttgaattgctttatcgattttgttgtgttttttgctctaaccaactaggaaagcttcacaaccatccaaaattctatacacgacctgactagaatttcactgaataacgatcaaagagcaaattgaaacactgaatactttatacacttcccaatgtcgttatgtctcaccaaaaatcgtaattttgtaggacgactttacacaacaatattaaattaaatctatcccctgaatgtgcattgggagccacgtagggtacaatcacagtctggttggagtccgttttctttaaggaggacgccttcctccatttcgttcatctcctcgttaccgactttgggtttctgaactgagtttctttgacggaccatgtacggcgtgttgtttggagatggtgagtctctgccctgttttgaaggtccacaacaggtattcctgacgcaattgtcattaaggctgtcacctttcgggcagtctaatacacaatcttcggtcataggttcctgtactgtcgtcgaagtggtcggtatatcggtgtagtctatgaattccggttgtatcgttgtcgaatgaatcccttcattgtggaagaattctttcaccttttctgcgattttcatgtactcagaaagattcctacacctgatatgagctgaagctataattctatcgccggccaactgccagacgtggaattcgtggactgccagaacgccgtccactttcgacagcagcctgctttggatagcgtcgacttgaatgtgagtcggaactgtttgaagcaaaataagtgccgagtctcttaatagcggccataccgaattcaagattaataaaactaaaagaacactgagagctggatcaatgtaatatttatatttccagtcggttaaccagaacactaacgcagatactatcacaataaccgaaccgagagcatcagacaaaacgtgcaagaacactccgcgcatgttcatctgaccagctgaatgactgtgggtcagagctttctcacctaattgggttgtcggtggaggaggactaggaaacgtttcgtcgttctcgttgtcgtccgttatcgctagttgggttagtctatttctactatgggacagtcttccgtgtgaatgaccatgggaactaccatgttcatgaaatagtaataatccgactaagttgactaagagaccaattcctccgacgattactaacaactgaggattgtgaatatactctatttcgataaacctcttgcaggcttctacggttatagaaaaacataaagctactaaaaatacggcgttgaccaaggcgcccaacacttcagctctcgcccaaccgaaggtattcttcgaccatttctttggtgacatcttaacggataaaaaagctacaactaatgctgcgacgtcgctcagcatatgaaaactatctgccactaaggccattgaatttgttatataacctacgactatttctacgaagaagaaaaacgtcgtaagccataacatcgacagcaagcgacattttttcccagagaatcttcccatatcagctcatttattattccaccaaaattaaacaacaaggcactataaacccttaatttatcacttttattcctgcatctgcaaccgatgatacatattattatgtagattcttaaagatagtgatttgtctatttagaaacaacaaacatgaaaccggagacttcttcttatacaaatttattttcgccttgaataataacagcaacagcaaggcacgacagcattacgcgttatcacgaataataataatcgagcgattaatcatttgtacacacggcacatagtaccccaaaaagtatgtcctttctcacgccgcga

SEQ ID NO: 2652 - DNA, 1903 bp, Diabrotica virgifera
  SmartBlast Evalue=1E-143; Info=Zinc transporter 1 n=2 Tax= Formicidae RepID=E2A5R6_9HYME
ttattatcaatcttataaataaaattttgtaacctggctataatatttttaatatgttacgtgtcccggtattttgaattgctttatcgattttgttgtgttttttgctctaaccaactaggaaagcttcacaaccatccaaaattctatacacgacctgactagaatttcactgaataacgatcaaagagcaaattgaaacactgaatactttatacacttcccaatgtcgttatgtctcaccaaaaatcgtaattttgtaggacgactttacacaacaatattaaattaaatctatcccctgaatgtgcattgggagccacgtagggtacaatcacagtctggttggagtccgttttctttaaggaggacgccttcctccatttcgttcatctcctcgttaccgactttgggtttctgaactgagtttctttgacggaccatgtacggcgtgttgtttggagatggtgagtctctgccctgttttgaaggtccacaacaggtattcctgacgcaattgtcattaaggctgtcacctttcgggcagtctaatacacaatcttcggtcataggttcctgtactgtcgtcgaagtggtcggtatatcggtgtagtctatgaattccggttgtatcgttgtcgaatgaatcccttcattgtggaagaattctttcaccttttctgcgattttcatgtactcagaaagattcctacacctgatatgagctgaagctataattctatcgccggccaactgccagacgtggaattcgtggactgccagaacgccgtccactttcgacagcagcctgctttggatagcgtcgacttgaatgtgagtcggaactgtttgaagcaaaataagtgccgagtctcttaatagcggccataccgaattcaagattaataaaactaaaagaacactgagagctggatcaatgtaatatttatatttccagtcggttaaccagaacactaacgcagatactatcacaataaccgaaccgagagcatcagacaaaacgtgcaagaacactccgcgcatgttcatctgaccagctgaatgactgtgggtcagagctttctcacctaattgggttgtcggtggaggaggactaggaaacgtttcgtcgttctcgttgtcgtccgttatcgctagttgggttagtctatttctactatgggacagtcttccgtgtgaatgaccatgggaactaccatgttcatgaaatagtaataatccgactaagttgactaagagaccaattcctccgacgattactaacaactgaggattgtgaatatactctatttcgataaacctcttgcaggcttctacggttatagaaaaacataaagctactaaaaatacggcgttgaccaaggcgcccaacacttcagctctcgcccaaccgaaggtattcttcgaccatttctttggtgacatcttaacggataaaaaagctacaactaatgctgcgacgtcgctcagcatatgaaaactatctgccactaaggccattgaatttgttatataacctacgactatttctacgaagaagaaaaacgtcgtaagccataacatcgacagcaagcgacattttttcccagagaatcttcccatatcagctcatttattattccaccaaaattaaacaacaatgcactattaacccttaatttatcacttttattccggtatctagtgatttgtctatttagaaacaacaaacatgaaaccggagacttcttcttatacaaatttattttcgccttgaataataacagcaacagcaaggcacgacagcattacgcgttatcacgaataataataatcgagcgattaatcatttgtacacacggcacatagtaccccaaaaagtatgtcctttctcacgccgcga

SEQ ID NO: 2653 - DNA, 1708 bp, Diabrotica virgifera
  SmartBlast Evalue=1E-143; Info=Zinc transporter 1 n=2 Tax= Formicidae RepID=E2A5R6_9HYME
tgtgcattgggagccacgtagggtacaatcacagtctggttggagtccgttttctttaaggaggacgccttcctccatttcgttcatctcctcgttaccgactttgggtttctgaactgagtttctttgacggaccatgtacggcgtgttgtttggagatggtgagtctctgccctgttttgaaggtccacaacaggtattcctgacgcaattgtcattaaggctgtcacctttcgggcagtctaatacacaatcttcggtcataggttcctgtactgtcgtcgaagtggtcggtatatcggtgtagtctatgaattccggttgtatcgttgtcgaatgaatcccttcattgtggaagaattctttcaccttttctgcgattttcatgtactcagaaagattcctacacctgatatgagctgaagctataattctatcgccggccaactgccagacgtggaattcgtggactgccagaacgccgtccactttcgacagcagcctgctttggatagcgtcgacttgaatgtgagtcggaactgtttgaagcaaaataagtgccgagtctcttaatagcggccataccgaattcaagattaataaaactaaaagaacactgagagctggatcaatgtaatatttatatttccagtcggttaaccagaacactaacgcagatactatcacaataaccgaaccgagagcatcagacaaaacgtgcaagaacactccgcgcatgttcatctgaccagctgaatgactgtgggtcagagctttctcacctaattgggttgtcggtggaggaggactaggaaacgtttcgtcgttctcgttgtcgtccgttatcgctagttgggttagtctatttctactatgggacagtcttccgtgtgaatgaccatgggaactaccatgttcatgaaatagtaataatccgactaagttgactaagagaccaattcctccgacgattactaacaactgaggattgtgaatatactctatttcgataaacctcttgcaggcttctacggttatagaaaaacataaagctactaaaaatacggcgttgaccaaggcgcccaacacttcagctctcgcccaaccgaaggtattcttcgaccatttctttggtgacatcttaacggataaaaaagctacaactaatgctgcgacgtcgctcagcatatgaaaactatctgccactaaggccattgaatttgttatataacctacgactatttctacgaagaagaaaaacgtcgtaagccataacatcgacagcaagcgacattttttcccagagaatcttcccatatcagcttaagtttcttgtgtcaatgttgtctcatcatccagattgaagatatatttcacacagtaatcagacgaatatatctgattaccgacaaaaaggggcactgcctgatatattggagaacaatggtaaaatgttaccaaaatagaacctcagttctattaacaatgtgatttccagaagtcttacaaaaaaatgtggactcgtcacttgttattttcgataaattaaaaaataaaacagttatgtcaggcgaaacgtatgaacgaatttagtttaaatattcggaaaacataaaatcaatttggaaaatttgtcacaacaatttttctctgcagaaatgaaatttactttactgtaatcacccgtgagtgtccgtcacaactgtca

SEQ ID NO: 2654 - DNA, 1637 bp, Diabrotica virgifera
  SmartBlast Evalue=1E-143; Info=Zinc transporter 1 n=2 Tax= Formicidae RepID=E2A5R6_9HYME
tgtgcattgggagccacgtagggtacaatcacagtctggttggagtccgttttctttaaggaggacgccttcctccatttcgttcatctcctcgttaccgactttgggtttctgaactgagtttctttgacggaccatgtacggcgtgttgtttggagatggtgagtctctgccctgttttgaaggtccacaacaggtattcctgacgcaattgtcattaaggctgtcacctttcgggcagtctaatacacaatcttcggtcataggttcctgtactgtcgtcgaagtggtcggtatatcggtgtagtctatgaattccggttgtatcgttgtcgaatgaatcccttcattgtggaagaattctttcaccttttctgcgattttcatgtactcagaaagattcctacacctgatatgagctgaagctataattctatcgccggccaactgccagacgtggaattcgtggactgccagaacgccgtccactttcgacagcagcctgctttggatagcgtcgacttgaatgtgagtcggaactgtttgaagcaaaataagtgccgagtctcttaatagcggccataccgaattcaagattaataaaactaaaagaacactgagagctggatcaatgtaatatttatatttccagtcggttaaccagaacactaacgcagatactatcacaataaccgaaccgagagcatcagacaaaacgtgcaagaacactccgcgcatgttcatctgaccagctgaatgactgtgggtcagagctttctcacctaattgggttgtcggtggaggaggactaggaaacgtttcgtcgttctcgttgtcgtccgttatcgctagttgggttagtctatttctactatgggacagtcttccgtgtgaatgaccatgggaactaccatgttcatgaaatagtaataatccgactaagttgactaagagaccaattcctccgacgattactaacaactgaggattgtgaatatactctatttcgataaacctcttgcaggcttctacggttatagaaaaacataaagctactaaaaatacggcgttgaccaaggcgcccaacacttcagctctcgcccaaccgaaggtattcttcgaccatttctttggtgacatcttaacggataaaaaagctacaactaatgctgcgacgtcgctcagcatatgaaaactatctgccactaaggccattgaatttgttatataacctacgactatttctacgaagaagaaaaacgtcgtaagccataacatcgacagcaagcgacattttttcccagagaatcttcccatatcagctcatttattattccaccaaaattaaacaacaaggcactataaacccttaatttatcacttttattcctgcatctgcaaccgatgatacatattattatgtagattcttaaagatagtgatttgtctatttagaaacaacaaacatgaaaccggagacttcttcttatacaaatttattttcgccttgaataataacagcaacagcaaggcacgacagcattacgcgttatcacgaataataataatcgagcgattaatcatttgtacacacggcacatagtaccccaaaaagtatgtcctttctcacgccgcga

SEQ ID NO: 2655 - DNA, 1597 bp, Diabrotica virgifera
  SmartBlast Evalue=1E-143; Info=Zinc transporter 1 n=2 Tax= Formicidae RepID=E2A5R6_9HYME
tgtgcattgggagccacgtagggtacaatcacagtctggttggagtccgttttctttaaggaggacgccttcctccatttcgttcatctcctcgttaccgactttgggtttctgaactgagtttctttgacggaccatgtacggcgtgttgtttggagatggtgagtctctgccctgttttgaaggtccacaacaggtattcctgacgcaattgtcattaaggctgtcacctttcgggcagtctaatacacaatcttcggtcataggttcctgtactgtcgtcgaagtggtcggtatatcggtgtagtctatgaattccggttgtatcgttgtcgaatgaatcccttcattgtggaagaattctttcaccttttctgcgattttcatgtactcagaaagattcctacacctgatatgagctgaagctataattctatcgccggccaactgccagacgtggaattcgtggactgccagaacgccgtccactttcgacagcagcctgctttggatagcgtcgacttgaatgtgagtcggaactgtttgaagcaaaataagtgccgagtctcttaatagcggccataccgaattcaagattaataaaactaaaagaacactgagagctggatcaatgtaatatttatatttccagtcggttaaccagaacactaacgcagatactatcacaataaccgaaccgagagcatcagacaaaacgtgcaagaacactccgcgcatgttcatctgaccagctgaatgactgtgggtcagagctttctcacctaattgggttgtcggtggaggaggactaggaaacgtttcgtcgttctcgttgtcgtccgttatcgctagttgggttagtctatttctactatgggacagtcttccgtgtgaatgaccatgggaactaccatgttcatgaaatagtaataatccgactaagttgactaagagaccaattcctccgacgattactaacaactgaggattgtgaatatactctatttcgataaacctcttgcaggcttctacggttatagaaaaacataaagctactaaaaatacggcgttgaccaaggcgcccaacacttcagctctcgcccaaccgaaggtattcttcgaccatttctttggtgacatcttaacggataaaaaagctacaactaatgctgcgacgtcgctcagcatatgaaaactatctgccactaaggccattgaatttgttatataacctacgactatttctacgaagaagaaaaacgtcgtaagccataacatcgacagcaagcgacattttttcccagagaatcttcccatatcagctcatttattattccaccaaaattaaacaacaatgcactattaacccttaatttatcacttttattccggtatctagtgatttgtctatttagaaacaacaaacatgaaaccggagacttcttcttatacaaatttattttcgccttgaataataacagcaacagcaaggcacgacagcattacgcgttatcacgaataataataatcgagcgattaatcatttgtacacacggcacatagtaccccaaaaagtatgtcctttctcacgccgcga

SEQ ID NO: 2656 - DNA, 1725 bp, Diabrotica virgifera
  misc_feature (110)..(112): n is a, c, g, or t
  SmartBlast Evalue=3E-27; Info=Endonuclease-reverse transcriptase n=1 Tax=Bombyx mori RepID=D5LB38_BOMMO
gaaagacaacccaggcaaccaagtgacgtcatataacgtcgaggaaacgtcagctttggttgaatatacacacgtatttgaacataacattacgtcatatagacgtattnnntaggtgattttaaatacgtaagattaatgacgttaaaatacgtttaaacaacgttttcatttcagacagccaagtgtgacttcaaacaatttcgtttataacgttgttcataagaaatttctcattgttgttcataagaaatttattgtttacatggtttgtatcttgtgtgataaaataagacttttcatttagatatttagttgaagaaacttgttaattgagagatttttatcgtttttgctcagtgagttagtttaatgcagtaattcttcttgtcaactatttgaggttatgtttatttgtttttgatgtatattttctgttaatgaactaattatgtgttatcgagtttaattaaattaatttttagcctacattttatgttacctatttttatactattttgaaacatctgaaagaggtcactttttgaaagtattaaagacttgattttaccgacggcgacgtgtaaaagtcgtcatctttttgacgtttgaaaatcgtcacaatctcgacgtgaaaaaaacgtaggtacaatgacgttttaaaatcgtcacaattatgacctcaaatcgatgagacaaatacacgtgattttcaacgtcagtactacgtctagaaacacgttaattggtcatttttacgacgtgttatctacgttataaaaacgttgtttggttgcctgggttgtgtactaccaaaaacatttgatacagttcaacattgaaaaatgatggatgttctaacaaaagctcaaatggattgataaagaccggcgtataatacaaaatttatactggaaccaatcagccacaataagaacaaatcttggagatgaaccgacggaagcgatccagattctgtgaggcgttagacaaggatgtatactttcacctatattactttaacctatattcagaggaaatatttagtgaagccttggaaaattgcgaatatggaatacttctaaatggagaacgcctaaacaacatccgctatgcagacgacaccgttatttttgcagacagtttgaacagtttacagcaactaataaacaaagtaaatgaagtaagtgaaagatttggacttcaagtaaaatatcaaaaactaaatttatggtcatcagcaaaaataaaattacagacgtccaactgcttatcaagaatacgccagtggaccgagtaaaacagtttacctatcttggaacaatagtaaacgaacaatgggatcactcacaagaagtaaaatgtagaatagagaaggctaggagtgcattcaaaagcatgtccaaactctttgaaagccacaacctcaatctcgagataaaagtaaggctcctacgatgttatatcttctcaatattatactacggagttaaatcctggacactcattgaagcgatggagaaaaacttaaaaccttcgaggtgtgactatacattcaaatccaaatgaccaaagaatggggaaagaaagagaagagacgtatacgattacaaggagaaagttagaatatcacggacacataatgagaaacggcactaaatacagattactgaaaataatccttcaaacctgaggaaatggtttcaatttatgcacttatgcaac

SEQ ID NO: 2657 - DNA, 1694 bp, Diabrotica virgifera
  misc_feature (110)..(112): n is a, c, g, or t
  SmartBlast Evalue=3E-36; Info=Endonuclease-reverse transcriptase n=1 Tax=Bombyx mori RepID=D5LB38_BOMMO
gaaagacaacccaggcaaccaagtgacgtcatataacgtcgaggaaacgtcagctttggttgaatatacacacgtatttgaacataacattacgtcatatagacgtattnnntaggtgattttaaatacgtaagattaatgacgttaaaatacgtttaaacaacgttttcatttcagacagccaagtgtgacttcaaacaatttcgtttataacgttgttcataagaaatttctcattgttgttcataagaaatttattgtttacatggtttgtatcttgtgtgataaaataagacttttcatttagatatttagttgaagaaacttgttaattgagagatttttatcgtttttgctcagtgagttagtttaatgcagtaattcttcttgtcaactatttgaggttatgtttatttgtttttgatgtatattttctgttaatgaactaattatgtgttatcgagtttaattaaattaatttttagcctacattttatgttacctatttttatactattttgaaacatctgaaagaggtcactttttgaaagtattaaagacttgattttaccgacggcgacgtgtaaaagtcgtcatctttttgacgtttgaaaatcgtcacaatctcgacgtgaaaaaaacgtaggtacaatgacgttttaaaatcgtcacaattatgacctcaaatcgatgagacaaatacacgtgattttcaacgtcagtactacgtctagaaacacgttaattggtcatttttacgacgtgttatctacgttataaaaacgttgtttggttgcctgggttgtgtactaccaaaaacatttgatacagttcaacattgaaaaatgatggatgttctaacaaaagctcaaatggattgataaagaccggcgtataatacaaaatttatactggaaccaatcagccacaataagaacaaatcttggagatgaaccgacggaagcgatccagattctgtgaggcgttagacaaggatgtatactttcacctatattactttaacctatattcagaggaaatatttagtgaagccttggaaaattgcgaatatggaatacttctaaatggagaacgcctaaacaacatccgctatgcagacgacaccgttatttttgcagacagtttgaacagtttacagcaactaataaacaaagtaaatgaagtaagtgaaagatttggacttcaagtaaaatatcaaaaactaaatttatggtcatcagcaaaaataaaattacagacgtccaactgcttatcaagaatacgccagtggaccgagtaaaacagtttacctatcttggaacaatagtaaacgaacaatgggatcactcacaagaagtaaaatgtagaatagagaaggctaggagtgcattcaaaagcatgtccaaactctttgaaagccacaacctcaatctcgagataaaagtaaggctcctacgatgttatatcttctcaatattatactacggagttgaatcctggacactcactgaagcaatggagaaaaaacttgaagccttcgagatgtggctatacaggcgaatcctaagatatcatggacggacaagataaccaacgagaccgtattacgaagagtgggcaaagaaagagaggtgatgtataccattaaaaaggagaaagttagaatatctcggacacataatgagaaacggcac

SEQ ID NO: 2658 - DNA, 1682 bp, Diabrotica virgifera
  SmartBlast Evalue=3E-27; Info=Endonuclease-reverse transcriptase n=1 Tax=Bombyx mori RepID=D5LB38_BOMMO
taaacattacgtcatatagacgtcttttgtaggtgattttaaatacgtaagattaatcacgttaaaatacgtttaaaaaagtttcattttagacagccaagtctgacgtcacaaaattgggaggagcttaaaaaagcttgtttgtattcaagtttgtattgactccaaacaatttcgtttataacgctgttaataagaaatttctcatttattgtttacgtggtttgtgtcttgtgtgataaaataagacttttcatttagatatttagatttagatatttgaagaaacgtgttaattttttatcgtttttgctcagtgagttagtttaatgcagtaattcttcttgtcaactatttgaggttatgtttatttgtttttgatgtatattttctgttaatgaactaattatgtgttatcgagtttaattaaattaatttttagcctacattttatgttacctatttttatactattttgaaacatctgaaagaggtcactttttgaaagtattaaagacttgattttaccgacggcgacgtgtaaaagtcgtcatctttttgacgtttgaaaatcgtcacaatctcgacgtgaaaaaaacgtaggtacaatgacgttttaaaatcgtcacaattatgacctcaaatcgatgagacaaatacacgtgattttcaacgtcagtactacgtctagaaacacgttaattggtcatttttacgacgtgttatctacgttataaaaacgttgtttggttgcctgggttgtgtactaccaaaaacatttgatacagttcaacattgaaaaatgatggatgttctaacaaaagctcaaatggattgataaagaccggcgtataatacaaaatttatactggaaccaatcagccacaataagaacaaatcttggagatgaaccgacggaagcgatccagattctgtgaggcgttagacaaggatgtatactttcacctatattactttaacctatattcagaggaaatatttagtgaagccttggaaaattgcgaatatggaatacttctaaatggagaacgcctaaacaacatccgctatgcagacgacaccgttatttttgcagacagtttgaacagtttacagcaactaataaacaaagtaaatgaagtaagtgaaagatttggacttcaagtaaaatatcaaaaactaaatttatggtcatcagcaaaaataaaattacagacgtccaactgcttatcaagaatacgccagtggaccgagtaaaacagtttacctatcttggaacaatagtaaacgaacaatgggatcactcacaagaagtaaaatgtagaatagagaaggctaggagtgcattcaaaagcatgtccaaactctttgaaagccacaacctcaatctcgagataaaagtaaggctcctacgatgttatatcttctcaatattatactacggagttaaatcctggacactcattgaagcgatggagaaaaacttaaaaccttcgaggtgtgactatacattcaaatccaaatgaccaaagaatggggaaagaaagagaagagacgtatacgattacaaggagaaagttagaatatcacggacacataatgagaaacggcactaaatacagattactgaaaataatccttcaaacctgaggaaatggtttcaatttatgcacttatgcaac

SEQ ID NO: 2659 - DNA, 1651 bp, Diabrotica virgifera
  SmartBlast Evalue=3E-36; Info=Endonuclease-reverse transcriptase n=1 Tax=Bombyx mori RepID=D5LB38_BOMMO
taaacattacgtcatatagacgtcttttgtaggtgattttaaatacgtaagattaatcacgttaaaatacgtttaaaaaagtttcattttagacagccaagtctgacgtcacaaaattgggaggagcttaaaaaagcttgtttgtattcaagtttgtattgactccaaacaatttcgtttataacgctgttaataagaaatttctcatttattgtttacgtggtttgtgtcttgtgtgataaaataagacttttcatttagatatttagatttagatatttgaagaaacgtgttaattttttatcgtttttgctcagtgagttagtttaatgcagtaattcttcttgtcaactatttgaggttatgtttatttgtttttgatgtatattttctgttaatgaactaattatgtgttatcgagtttaattaaattaatttttagcctacattttatgttacctatttttatactattttgaaacatctgaaagaggtcactttttgaaagtattaaagacttgattttaccgacggcgacgtgtaaaagtcgtcatctttttgacgtttgaaaatcgtcacaatctcgacgtgaaaaaaacgtaggtacaatgacgttttaaaatcgtcacaattatgacctcaaatcgatgagacaaatacacgtgattttcaacgtcagtactacgtctagaaacacgttaattggtcatttttacgacgtgttatctacgttataaaaacgttgtttggttgcctgggttgtgtactaccaaaaacatttgatacagttcaacattgaaaaatgatggatgttctaacaaaagctcaaatggattgataaagaccggcgtataatacaaaatttatactggaaccaatcagccacaataagaacaaatcttggagatgaaccgacggaagcgatccagattctgtgaggcgttagacaaggatgtatactttcacctatattactttaacctatattcagaggaaatatttagtgaagccttggaaaattgcgaatatggaatacttctaaatggagaacgcctaaacaacatccgctatgcagacgacaccgttatttttgcagacagtttgaacagtttacagcaactaataaacaaagtaaatgaagtaagtgaaagatttggacttcaagtaaaatatcaaaaactaaatttatggtcatcagcaaaaataaaattacagacgtccaactgcttatcaagaatacgccagtggaccgagtaaaacagtttacctatcttggaacaatagtaaacgaacaatgggatcactcacaagaagtaaaatgtagaatagagaaggctaggagtgcattcaaaagcatgtccaaactctttgaaagccacaacctcaatctcgagataaaagtaaggctcctacgatgttatatcttctcaatattatactacggagttgaatcctggacactcactgaagcaatggagaaaaaacttgaagccttcgagatgtggctatacaggcgaatcctaagatatcatggacggacaagataaccaacgagaccgtattacgaagagtgggcaaagaaagagaggtgatgtataccattaaaaaggagaaagttagaatatctcggacacataatgagaaacggcac

SEQ ID NO: 2660 - DNA, 1327 bp, Diabrotica virgifera
  SmartBlast Evalue=2E-27; Info=Endonuclease-reverse transcriptase n=1 Tax=Bombyx mori RepID=D5LB38_BOMMO
ctggtacaatcatgcagaatcaatgttgattctagcgcacaagtgatcttaaacaagtggtagtatatctttgacacatgggacgtaggcctataggtttcatgttacctatttttttatactattttgaaacatctgaaagaggtcactttttgaaaatattaaagacgtgattttaccgacgtgtaaaagtcgtcatctttttgacgtttgaaaatcgtcacaatctcgacgtgaaaaaaacgtaggtacaatgacgttttaaaatcgtcacaattatgacctcaaatcgatgagacaaatacacgtgattttcaacgtcagtactacgtctagaaacacgttaattggtcatttttacgacgtgttatctacgttataaaaacgttgtttggttgcctgggttgtgtactaccaaaaacatttgatacagttcaacattgaaaaatgatggatgttctaacaaaagctcaaatggattgataaagaccggcgtataatacaaaatttatactggaaccaatcagccacaataagaacaaatcttggagatgaaccgacggaagcgatccagattctgtgaggcgttagacaaggatgtatactttcacctatattactttaacctatattcagaggaaatatttagtgaagccttggaaaattgcgaatatggaatacttctaaatggagaacgcctaaacaacatccgctatgcagacgacaccgttatttttgcagacagtttgaacagtttacagcaactaataaacaaagtaaatgaagtaagtgaaagatttggacttcaagtaaaatatcaaaaactaaatttatggtcatcagcaaaaataaaattacagacgtccaactgcttatcaagaatacgccagtggaccgagtaaaacagtttacctatcttggaacaatagtaaacgaacaatgggatcactcacaagaagtaaaatgtagaatagagaaggctaggagtgcattcaaaagcatgtccaaactctttgaaagccacaacctcaatctcgagataaaagtaaggctcctacgatgttatatcttctcaatattatactacggagttaaatcctggacactcattgaagcgatggagaaaaacttaaaaccttcgaggtgtgactatacattcaaatccaaatgaccaaagaatggggaaagaaagagaagagacgtatacgattacaaggagaaagttagaatatcacggacacataatgagaaacggcactaaatacagattactgaaaataatccttcaaacctgaggaaatggtttcaatttatgcacttatgcaac

SEQ ID NO: 2661 - DNA, 1296 bp, Diabrotica virgifera
  SmartBlast Evalue=2E-36; Info=Endonuclease-reverse transcriptase n=1 Tax=Bombyx mori RepID=D5LB38_BOMMO
ctggtacaatcatgcagaatcaatgttgattctagcgcacaagtgatcttaaacaagtggtagtatatctttgacacatgggacgtaggcctataggtttcatgttacctatttttttatactattttgaaacatctgaaagaggtcactttttgaaaatattaaagacgtgattttaccgacgtgtaaaagtcgtcatctttttgacgtttgaaaatcgtcacaatctcgacgtgaaaaaaacgtaggtacaatgacgttttaaaatcgtcacaattatgacctcaaatcgatgagacaaatacacgtgattttcaacgtcagtactacgtctagaaacacgttaattggtcatttttacgacgtgttatctacgttataaaaacgttgtttggttgcctgggttgtgtactaccaaaaacatttgatacagttcaacattgaaaaatgatggatgttctaacaaaagctcaaatggattgataaagaccggcgtataatacaaaatttatactggaaccaatcagccacaataagaacaaatcttggagatgaaccgacggaagcgatccagattctgtgaggcgttagacaaggatgtatactttcacctatattactttaacctatattcagaggaaatatttagtgaagccttggaaaattgcgaatatggaatacttctaaatggagaacgcctaaacaacatccgctatgcagacgacaccgttatttttgcagacagtttgaacagtttacagcaactaataaacaaagtaaatgaagtaagtgaaagatttggacttcaagtaaaatatcaaaaactaaatttatggtcatcagcaaaaataaaattacagacgtccaactgcttatcaagaatacgccagtggaccgagtaaaacagtttacctatcttggaacaatagtaaacgaacaatgggatcactcacaagaagtaaaatgtagaatagagaaggctaggagtgcattcaaaagcatgtccaaactctttgaaagccacaacctcaatctcgagataaaagtaaggctcctacgatgttatatcttctcaatattatactacggagttgaatcctggacactcactgaagcaatggagaaaaaacttgaagccttcgagatgtggctatacaggcgaatcctaagatatcatggacggacaagataaccaacgagaccgtattacgaagagtgggcaaagaaagagaggtgatgtataccattaaaaaggagaaagttagaatatctcggacacataatgagaaacggcac

SEQ ID NO: 2662 - DNA, 2603 bp, Diabrotica virgifera
ggcagatggcgcataaatcgtttacttttcaatgtttttttatataattttttatgcatgtatttctttttataatgaatgctcatgcaaattttcaaaacaacaactggtacagtactttttattttggaaattcccaaaagaatgtatgaattttgtacttttgcactaggacagcctcttaaccaaactagtgttttttgaactgtacaacaaaattcagcattatacagggtgtcccggaaaatggtgcgttccttcaaggtacgggctaagtgcaccatttaaagcaaaaaagtctgataaaattttttgtaaagtcaaccgttttcaaaaaaataatttattaattttaatgcatttgattaatgtccacagaaatgcaaatacagccggcaacgctgcgttccttcttctgtgtaaaaataattttactgaactcaactatcatgaatcatcgaccattaggcataatattatgtattgataaaatactgatagcagtgatagaaaaacagcataatatttgtgtttattaaatatctaataaataaggtttgtatagtgttttaacttacatgaaaagtttttattacaatcaacaaacaagctacgtcttcaagaaatatctatccttagaacatgttacaaaaaatttgagtattacatttctccattcaatcttctgggaagttcgagtggttcaatcagatgattactaataatcccagcccatacattaatacttttggcattataaagtaaaacacacacacacaccatttctcgtaaaacaagctttatctgcacacaacactttacacattttgttttgaaaccatctacaaatccttaaacttcgaggtaaatcgccttggtgtacctaaatcttgcactaattatacactataggtacgtaattaacatgatacttgcgatcgaaatcatgacaataccacaacaatacgatgtattctcgggttacaggtaattatgatatgactgtttgtgtttacaattttaaatatcttcgctatgtcaaaataaataaaactgccgggttgccaaatgtaaattttagtaaaagacattattttatttttttgaggcaacagatgactttagaaaaaaatttataagaaagttttcttttaaatggtgcattctacccacacttttaaggacgcactattttcgggacaccctgtataaaactaacccagctcaaccagagaattcggtggaatattgtctcttcaaggacgtctcttcaatgttgccgatataaaagatcactctggcacatctgaaatcatagcagtcaatactatattcagtattttatatgttcagttcttcgcattcgaatactgtgtaaataaattaagctaagtgaaacttgttttacataaagaggatcaggattacgtaggatcatcatttcaaaatatcgcataatgtataataaataatcaattgttgccacatattaacaaagagtatattaggttaggttactgcatcaattaattttttgttactttagtttcaggttatgttttatttttgtattaaggggataacataagataagatacaatcctggcttctaatattttatacttctaaacaagtttcattttgcagattactattgacgtaaaatcttgtttccttattgatatgatcatgtcaatataaagcttaattaagtgcgaatgatacaggcggtaggttttggaaagaagaaaacaggcggcgatagtgttttgcttggaaacactacctccaaaataaggcatcacgactgacgaatttactgcattagaacgcaacaacaatctgtacatgtcaagcattcaaattaactgtctataagtgtatattaaaaaaaaattagattagttaatataagcctcattagtcatgggaataaaatattttcgatttcaaaattataaagtttttaaaaaatacttgccatttgatattattatcggaaatgttttattgcctaattttttattgatttttctttggtcaataccgttaatagtattccaaaaagcgacataggtcatgattctctacgttagtgtagattttatagccttttttacattttcaatgagatagaattattgtctacagatattctttgtacatgtaataaatccacatacactgctcaacaatgaagtggatatcactatacatggaaatatcactataaatgtaaataaaacctggataaaaaccaggtctttatttactgaaaagtaaaaaaaccaagagaaaagtagcatgtaaaaagaattggctatcaatttttgttgcgttgttcaaaaccaaaattgttgagcagtgtataataacacttttgtgtatcgtacaaataatgtatggacatggatttatttaatgtttcatcctgttttatttgacctcatatgagttagccttcggaacaaagcatacatttctaaaatttcctgttattttaatggataaagttattactcgtaaaggataatggcagcttttctagtaggcaatattttttaattgcgaaatagatttttatgtactaaatctatcgggcc

SEQ ID NO: 2663 - DNA, 2367 bp, Diabrotica virgifera
gtcccggaaaatagtgcgttccttcaaggtacgggctaagtgcaccatttagagcaaaaaagtctgataaaattttttgtaaagtcaaccgttttcaaaaaaataatttattaattttaatgcatttgattaatgtccacagaaatgcaaatacagccggcaacgctgcgttccttcttctgtgtaaaaataattttactgaactcaactatcatgaatcatcgaccattaggcataatattatgtattgataaaatactgatagcagtgatagaaaaacagcataatatttgtgtttattaaatatctaataaataaggtttgtatagtgttttaacttacatgaaaagtttttattacaatcaacaaacaagctacgtcttcaagaaatatctatccttagaacatgttacaaaaaatttgagtattacatttctccattcaatcttctgggaagttcgagtggttcaatcagatgattactaataatcccagcccatacattaatacttttggcattataaagtaaaacacacacacacaccatttctcgtaaaacaagctttatctgcacacaacactttacacattttgttttgaaaccatctacaaatccttaaacttcgaggtaaatcgccttggtgtacctaaatcttgcactaattatacactataggtacgtaattaacatgatacttgcgatcgaaatcatgacaataccacaacaatacgatgtattctcgggttacaggtaattatgatatgactgtttgtgtttacaattttaaatatcttcgctatgtcaaaataaataaaactgccgggttgccaaatgtaaattttagtaaaagacattattttatttttttgaggcaacagatgactttagaaaaaaatttataagaaagttttcttttaaatggtgcattctacccacacttttaaggacgcactattttcgggacaccctgtataaaactaacccagctcaaccagagaattcggtggaatattgtctcttcaaggacgtctcttcaatgttgccgatataaaagatcactctggcacatctgaaatcatagcagtcaatactatattcagtattttatatgttcagttcttcgcattcgaatactgtgtaaataaattaagctaagtgaaacttgttttacataaagaggatcaggattacgtaggatcatcatttcaaaatatcgcataatgtataataaataatcaattgttgccacatattaacaaagagtatattaggttaggttactgcatcaattaattttttgttactttagtttcaggttatgttttatttttgtattaaggggataacataagataagatacaatcctggcttctaatattttatacttctaaacaagtttcattttgcagattactattgacgtaaaatcttgtttccttattgatatgatcatgtcaatataaagcttaattaagtgcgaatgatacaggcggtaggttttggaaagaagaaaacaggcggcgatagtgttttgcttggaaacactacctccaaaataaggcatcacgactgacgaatttactgcattagaacgcaacaacaatctgtacatgtcaagcattcaaattaactgtctataagtgtatattaaaaaaaaattagattagttaatataagcctcattagtcatgggaataaaatattttcgatttcaaaattataaagtttttaaaaaatacttgccatttgatattattatcggaaatgttttattgcctaattttttattgatttttctttggtcaataccgttaatagtattccaaaaagcgacataggtcatgattctctacgttagtgtagattttatagccttttttacattttcaatgagatagaattattgtctacagatattctttgtacatgtaataaatccacatacactgctcaacaatgaagtggatatcactatacatggaaatatcactataaatgtaaataaaacctggataaaaaccaggtctttatttactgaaaagtaaaaaaaccaagagaaaagtagcatgtaaaaagaattggctatcaatttttgttgcgttgttcaaaaccaaaattgttgagcagtgtataataacacttttgtgtatcgtacaaataatgtatggacatggatttatttaatgtttcatcctgttttatttgacctcatatgagttagccttcggaacaaagcatacatttctaaaatttcctgttattttaatggataaagttattactcgtaaaggataatggcagcttttctagtaggcaatattttttaattgcgaaatagatttttatgtactaaatctatcgggcc

SEQ ID NO: 2664 - DNA, 1331 bp, Diabrotica virgifera
ggcagatggcgcataaatcgtttacttttcaatgtttttttatataattttttatgcatgtatttctttttataatgaatgctcatgcaaattttcaaaacaacaactggtacagtactttttattttggaaattcccaaaagaatgtatgaattttgtacttttgcactaggacagcctcttaaccaaactagtgttttttgaactgtacaacaaaattcagcattatacagggtgtcccggaaaatggtgcgttccttcaaggtacgggctaagtgcaccatttaaagcaaaaaagtctgataaaattttttgtaaagtcaaccgttttcaaaaaaataatttattaattttaatgcatttgattaatgtccacagaaatgcaaatacagccggcaacgctgcgttccttcttctgtgtaaaaataattttactgaactcaactatcatgaatcatcgaccattaggcataatattatgtattgataaaatactgatagcagtgatagaaaaacagcataatatttgtgtttattaaatatctaataaataaggtttgtatagtgttttaacttacatgaaaagtttttattacaatcaacaaacaagctacgtcttcaagaaatatctatccttagaacatgttacaaaaaatttgagtattacatttctccattcaatcttctgggaagttcgagtggttcaatcagatgattactaataatcccagcccatacattaatacttttggcattataaagtaaaacacacacacacaccatttctcgtaaaacaagctttatctgcacacaacactttacacattttgttttgaaaccatctacaaatccttaaacttcgaggtaaatcgccttggtgtacctaaatcttgcactaattatacactataggtacgtaattaacatgatacttgcgatcgaaatcatgacaataccacaacaatacgatgtattctcgggttacaggtaattatgatatgactgtttgtgtttacaattttaaatatcttcgctatgtcaaaataaataaaactgccgggttgccaaatgtaaattttagtaaaagacattattttatttttttgaggcaacagatgactttagaaaaaaatttataagaaagttttcttttaaatggtgcattctacccacacttttaaggacgcactattttcgggacaccctgtatagatttaaagcattttattgcttttcaaaatatgtcccaccaagatcaatacacttttgtatacgttcaaagaagttattcagtcttcagttggcgactggaatcgctcccacgcattgaa

SEQ ID NO: 2665 - DNA, 1095 bp, Diabrotica virgifera
gtcccggaaaatagtgcgttccttcaaggtacgggctaagtgcaccatttagagcaaaaaagtctgataaaattttttgtaaagtcaaccgttttcaaaaaaataatttattaattttaatgcatttgattaatgtccacagaaatgcaaatacagccggcaacgctgcgttccttcttctgtgtaaaaataattttactgaactcaactatcatgaatcatcgaccattaggcataatattatgtattgataaaatactgatagcagtgatagaaaaacagcataatatttgtgtttattaaatatctaataaataaggtttgtatagtgttttaacttacatgaaaagtttttattacaatcaacaaacaagctacgtcttcaagaaatatctatccttagaacatgttacaaaaaatttgagtattacatttctccattcaatcttctgggaagttcgagtggttcaatcagatgattactaataatcccagcccatacattaatacttttggcattataaagtaaaacacacacacacaccatttctcgtaaaacaagctttatctgcacacaacactttacacattttgttttgaaaccatctacaaatccttaaacttcgaggtaaatcgccttggtgtacctaaatcttgcactaattatacactataggtacgtaattaacatgatacttgcgatcgaaatcatgacaataccacaacaatacgatgtattctcgggttacaggtaattatgatatgactgtttgtgtttacaattttaaatatcttcgctatgtcaaaataaataaaactgccgggttgccaaatgtaaattttagtaaaagacattattttatttttttgaggcaacagatgactttagaaaaaaatttataagaaagttttcttttaaatggtgcattctacccacacttttaaggacgcactattttcgggacaccctgtatagatttaaagcattttattgcttttcaaaatatgtcccaccaagatcaatacacttttgtatacgttcaaagaagttattcagtcttcagttggcgactggaatcgctcccacgcattgaa

SEQ ID NO: 2666 - DNA, 962 bp, Diabrotica virgifera
ggcagatggcgcataaatcgtttacttttcaatgtttttttatataattttttatgcatgtatttctttttataatgaatgctcatgcaaattttcaaaacaacaactggtacagtactttttattttggaaattcccaaaagaatgtatgaattttgtacttttgcactaggacagcctcttaaccaaactagtgttttttgaactgtacaacaaaattcagcattatacagggtgtcccggaaaatggtgcgttccttcaaggtacgggctaagtgcaccatttaaagcaaaaaagtctgataaaattttttgtaaagtcaaccgttttcaaaaaaataatttattaattttaatgcatttgattaatgtccacagaaatgcaaatacagccggcaacgctgcgttccttcttctgtgtaaaaataattttactgaactcaactatcatgaatcatcgaccattaggcataatattatgtattgataaaatactgatagcagtgatagaaaaacagcataatatttgtgtttattaaatatctaataaataaggtttgtatagtgttttaacttacatgaaaagtttttattacaatcaacaaacaagctacgtcttcaagaaatatctatccttagaacatgttacaaaaaatttgagtattacatttctccattgaatcttctgggaacttctagtggttcaatcagatgattagtaatactctcagccccagcccatacatacttttggcattataaaagtaaaacacacacgcaccatttctcgtaaaacaaggtttatctgcacacaacactttacacattttgttttgaatcattacaataccacaacaatacgatgtattctcgagtaacaggtaattatgatatgactgtttgtgtttacaattttaaatatcttcgctatgtcaaaataaataaaactgccgggttgccaa

SEQ ID NO: 2667 - DNA, 726 bp, Diabrotica virgifera
gtcccggaaaatagtgcgttccttcaaggtacgggctaagtgcaccatttagagcaaaaaagtctgataaaattttttgtaaagtcaaccgttttcaaaaaaataatttattaattttaatgcatttgattaatgtccacagaaatgcaaatacagccggcaacgctgcgttccttcttctgtgtaaaaataattttactgaactcaactatcatgaatcatcgaccattaggcataatattatgtattgataaaatactgatagcagtgatagaaaaacagcataatatttgtgtttattaaatatctaataaataaggtttgtatagtgttttaacttacatgaaaagtttttattacaatcaacaaacaagctacgtcttcaagaaatatctatccttagaacatgttacaaaaaatttgagtattacatttctccattgaatcttctgggaacttctagtggttcaatcagatgattagtaatactctcagccccagcccatacatacttttggcattataaaagtaaaacacacacgcaccatttctcgtaaaacaaggtttatctgcacacaacactttacacattttgttttgaatcattacaataccacaacaatacgatgtattctcgagtaacaggtaattatgatatgactgtttgtgtttacaattttaaatatcttcgctatgtcaaaataaataaaactgccgggttgccaa

SEQ ID NO: 2668 - DNA, 1441 bp, Diabrotica virgifera
  SmartBlast Evalue=1E-160; Info=Plasma alpha-L-fucosidase n=1 Tax=Harpegnathos saltator RepID=E2B4G2_9HYME
tttcaaaatcttatacctattagtcttaaaaattcttattattttctaaattttattctgcccgtatactacactagctccaggaactatcttcaacacatatgcccattcactgcttacttgtgctttatccgggaaattaatggttactgaggatgcacctaaagtccactttaatgcttcaccactttcatggccgagcaaatgcactgaagtatttgtatttttgaacagatcaatagcagatcccagatccaatatattatctttaggccattgcaaactaatggcatatacatcagagcctttgctggtataccaaactccgtttgtcaaggaatcgttttgtgatgtccatggtcttgtactataaatagagtcaccgttaattgacaaccaagtacccaaatctttaagacgttgttggaaaataggagcaattatgccgtcttttgtaggtccaacattcataaggagattccctccacaactgactgtagataccaattggtacagaagttcttctatggtcatgtaatcagacagtttcgcatttcttctaaatccccaagatttgtgatcaattgtcatagcattttcccacttgtgttgttgaagagtacctggattgtatctatcttgacatgagaaaaatcctccatgagtacaaggaattccagatccccatctatcgtttactactacttcatctttgactgggctttcgttgtacagccatgccaagaattctttagatttccagtaagtgtctggagcatcccagtcaccgtcagcccatataacggaaggtttatatgtgttcacaagctcccttaattcgggatctgtcttacggtctacaaaatcttgtgttttatacccattggctttgtcagctagatatagttgattgaaccattcataataggagtggtataaaccgaatttgagattcttagcccttactgctgttgcaagttcaccaagaatatctcttcctggaccaacatcttgagcattccaactatatgagtattttgatggccatagacaatacccctcatgatgtttactggttaagacaatgtattttgctccagaattagcgaaaatttctgcccactcattaggatcataaaattcagctgtaaagtcctttgcaaagttttgatacttccagttgggagaataataattttttaagtaattcacaacctctgaatctcccgagctccaataagaccaaaaccattcagatgagaagcttggcactgaaaaaacaccccagtgaagaaaaataccaattttggcttcatcaaaccaagatggaagaggtcttgaatccaaactatcccaatctgctttgtattgtgcccgagaagcacatatgagcgcaaataaaaacgttaataataactttttgtttgtcataattaggaat

SEQ ID NO: 2669 - DNA, 1441 bp, Diabrotica virgifera
  SmartBlast Evalue=1E-160; Info=Plasma alpha-L-fucosidase n=1 Tax=Harpegnathos saltator RepID=E2B4G2_9HYME
tttcaaaatcttatacctattagtcttaaaaattcttattattttctaaattttattctgcccgtatactacactagctccaggaactatcttcaacacatatgcccattcactgcttacttgtgctttatccgggaaattaatggttactgaggatgcacctaaagtccactttaatgcttcaccactttcatggccgagcaaatgcactgaagtatttgtatttttgaacagatcaatagcagatcccagatccaatatattatctttaggccattgcaaactaatggcatatacatcagagcctttgctggtataccaaactccgtttgtcaaggaatcgttttgtgatgtccatggtcttgtactataaatagagtcaccgttaattgacaaccaagtacccaaatctttaagacgttgttggaaaataggagcaattatgccgtcttttgtaggtccaacattcataaggagattccctccacaactgactgtagataccaattggtacagaagttcttctatggtcatgtaatcagacagtttcgcatttcttctaaatccccaagatttgtgatcaattgtcatagcattttcccacttgtgttgttgaagagtacctggattgtatctatcttgacatgagaaaaatcctccatgagtacaaggaattccagatccccatctatcgtttactactacttcatctttgactgggctttcgttgtacagccatgccaagaattctttagatttccagtaagtgtctggagcatcccagtcaccgtcagcccatataacggaaggtttgtaggtgtttacaagctcccttagttcggggtctgtcttgcggtctacaaaatcttgtgttttgtatccattggctttgtcagcgagatatagttgattgaaccattcataataggagtggtatagaccaaacttgagattcttagcccttactgctgttgcaagttcaccaagaatatctcttcctggtccaacatcttgagcattccaactatatgagtattttgatggccatagacagtacccctcatgatgtttactcgttaagacaatgtattttgctccagaattagcgaaaatttctgcccactcattaggatcataaaattcagctgtaaagtcctttgcaaagttttgatacttccagttgggagaataataattttttaagtaattcacaacctctgaatctcccgagctccaataagaccaaaaccattcagatgagaagcttggcactgaaaaaacaccccagtgaagaaaaataccaattttggcttcatcaaaccaagatggaagaggtcttgaatccaaactatcccaatctgctttgtattgtgcccgagaagcacatatgagcgcaaataaaaacgttaataataactttttgtttgtcataattaggaat

SEQ ID NO: 2670 - DNA, 1438 bp, Diabrotica virgifera
  SmartBlast Evalue=1E-160; Info=Plasma alpha-L-fucosidase n=1 Tax=Harpegnathos saltator RepID=E2B4G2_9HYME
tttcaaaatcttatacctattagtcttaaaaattcttattattttctaaattttattctgcccgtatactacactagctccaggaactatcttcaacacatatgcccattcactgcttacttgtgctttatccgggaaattaatggttactgaggatgcacctaaagtccactttaatgcttcaccactttcatggccgagcaaatgcactgaagtatttgtatttttgaacagatcaatagcagatcccagatccaatatattatctttaggccattgcaaactaatggcatatacatcagagcctttgctggtataccaaactccgtttgtcaaggaatcgttttgtgatgtccatggtcttgtactataaatagagtcaccgttaattgacaaccaagtacccaaatctttaagacgttgttggaaaataggagcaattatgccgtcttttgtaggtccaacattcataaggagattccctccacaactgactgtagataccaattggtacagaagttcttctatggtcatgtaatcagacagtttcgcatttcttctaaatccccaagatttgtgatcaattgtcatagcattttcccacttgtgttgttgaagagtacctggattgtatctatcttgacatgagaaaaatcctccatgagtacaaggaattccagatccccatctatcgtttactactacttcatctttgactgggctttcgttgtacagccatgccaagaattctttagatttccagtaagtgtctggagcatcccagtcaccgtcagcccatataacggaaggtttatatgtgttcacaagctcccttaattcgggatctgtcttacggtctacaaaatcttgtgttttatacccattggctttgtcagctagatatagttgattgaaccattcataataggagtggtataaaccgaatttgagattcttagcccttactgctgttgcaagttcaccaagaatatctcttcctggaccaacatcttgagcattccaactatatgagtattttgatggccatagacaatacccctcatgatgtttactggttaagacaatgtattttgctccagaattagcgaaaatttctgcccactcattaggatcataaaattcagctgtaaagtcctttgcaaagttttgatacttccagttgggagaataataattttttaagtaattcacaacctctgaatctcccgagctccaataagaccaaaaccattcagatgagaagcttggcactgaaaaaacaccccagtgaagaaaaataccaattttggcttcatcaaaccaagatggaagaggtcttgaatccaaactatcccaatctgctttgtattgtgcccgagaagcacatatgagcgcaaataaaaacgttaataataactttttgtttgtcataattagg

SEQ ID NO: 2671 - DNA, 1438 bp, Diabrotica virgifera
  SmartBlast Evalue=1E-160; Info=Plasma alpha-L-fucosidase n=1 Tax=Harpegnathos saltator RepID=E2B4G2_9HYME
tttcaaaatcttatacctattagtcttaaaaattcttattattttctaaattttattctgcccgtatactacactagctccaggaactatcttcaacacatatgcccattcactgcttacttgtgctttatccgggaaattaatggttactgaggatgcacctaaagtccactttaatgcttcaccactttcatggccgagcaaatgcactgaagtatttgtatttttgaacagatcaatagcagatcccagatccaatatattatctttaggccattgcaaactaatggcatatacatcagagcctttgctggtataccaaactccgtttgtcaaggaatcgttttgtgatgtccatggtcttgtactataaatagagtcaccgttaattgacaaccaagtacccaaatctttaagacgttgttggaaaataggagcaattatgccgtcttttgtaggtccaacattcataaggagattccctccacaactgactgtagataccaattggtacagaagttcttctatggtcatgtaatcagacagtttcgcatttcttctaaatccccaagatttgtgatcaattgtcatagcattttcccacttgtgttgttgaagagtacctggattgtatctatcttgacatgagaaaaatcctccatgagtacaaggaattccagatccccatctatcgtttactactacttcatctttgactgggctttcgttgtacagccatgccaagaattctttagatttccagtaagtgtctggagcatcccagtcaccgtcagcccatataacggaaggtttgtaggtgtttacaagctcccttagttcggggtctgtcttgcggtctacaaaatcttgtgttttgtatccattggctttgtcagcgagatatagttgattgaaccattcataataggagtggtatagaccaaacttgagattcttagcccttactgctgttgcaagttcaccaagaatatctcttcctggtccaacatcttgagcattccaactatatgagtattttgatggccatagacagtacccctcatgatgtttactcgttaagacaatgtattttgctccagaattagcgaaaatttctgcccactcattaggatcataaaattcagctgtaaagtcctttgcaaagttttgatacttccagttgggagaataataattttttaagtaattcacaacctctgaatctcccgagctccaataagaccaaaaccattcagatgagaagcttggcactgaaaaaacaccccagtgaagaaaaataccaattttggcttcatcaaaccaagatggaagaggtcttgaatccaaactatcccaatctgctttgtattgtgcccgagaagcacatatgagcgcaaataaaaacgttaataataactttttgtttgtcataattagg

SEQ ID NO: 2672 - DNA, 1460 bp, Diabrotica virgifera
  SmartBlast Evalue=1E-168; Info=Plasma alpha-L-fucosidase n=1 Tax=Harpegnathos saltator RepID=E2B4G2_9HYME
tttcaaaatcttatacctattagtcttaaaaattcttattattttctaaattttattctgcccgtatactacactagctccaggaactatcttcaacacatatgcccattcactgcttacttgtgctttatccgggaaattaatggttactgaggatgcacctaaagtccactttaatgcttcaccactttcatggccgagcaaatgcactgaagtatttgtatttttgaacagatcaatagcagatcccagatccaatatattatctttaggccattgcaaactaatggcatatacatcagagcctttgctggtataccaaactccgtttgtcaaggaatcgttttgtgatgtccatggtcttgtactataaatagagtcaccgttaattgacaaccaagtacccaaatctttaagacgttgttggaaaataggagcaattatgccgtcttttgtaggtccaacattcataaggagattccctccacaactgactgtagataccaattggtacagaagttcttctatggtcatgtaatcagacagtttcgcatttcttctaaatccccaagatttgtgatcaattgtcatagcattttcccacttgtgttgttgaagagtacctggattgtatctatcttgacatgagaaaaatcctccatgagtacaaggaattccagatccccatctatcgtttactactacttcatctttgactgggctttcgttgtacagccatgccaagaattctttagatttccagtaagtgtctggagcatcccagtcaccgtcagcccatataacggaaggtttatatgtgttcacaagctcccttaattcgggatctgtcttacggtctacaaaatcttgtgttttatacccattggctttgtcagctagatatagttgattgaaccattcataataggagtggtataaaccgaatttgagattcttagcccttactgctgttgcaagttcaccaagaatatctcttcctggaccaacatcttgagcattccaactatatgagtattttgatggccatagacaatacccctcatgatgtttactggttaagacaatgtattttgctccagaattagcgaaaatttctgcccactcattaggatcataaaattcagctgtaaagtcctttgcaaagttttgatacttccagttgggagaataataattttttaagtaattcacaacctctgaatctcccgctttccaatctgcccaaaaccactctgattttacactaggaacggagaacactccccaatggagaaagattccgattttgtcttcatcataccaagaaggcaatggtctagaatctatactttcccatgtcggttggtatttggctgtcggttggtatttggcttgacacaaacaaaagagtgcaaacaaaccgactaataacttttgtattaccataactgttgccggcg

SEQ ID NO: 2673 - DNA, 1460 bp, Diabrotica virgifera
  SmartBlast Evalue=1E-168; Info=Plasma alpha-L-fucosidase n=1 Tax=Harpegnathos saltator RepID=E2B4G2_9HYME
tttcaaaatcttatacctattagtcttaaaaattcttattattttctaaattttattctgcccgtatactacactagctccaggaactatcttcaacacatatgcccattcactgcttacttgtgctttatccgggaaattaatggttactgaggatgcacctaaagtccactttaatgcttcaccactttcatggccgagcaaatgcactgaagtatttgtatttttgaacagatcaatagcagatcccagatccaatatattatctttaggccattgcaaactaatggcatatacatcagagcctttgctggtataccaaactccgtttgtcaaggaatcgttttgtgatgtccatggtcttgtactataaatagagtcaccgttaattgacaaccaagtacccaaatctttaagacgttgttggaaaataggagcaattatgccgtcttttgtaggtccaacattcataaggagattccctccacaactgactgtagataccaattggtacagaagttcttctatggtcatgtaatcagacagtttcgcatttcttctaaatccccaagatttgtgatcaattgtcatagcattttcccacttgtgttgttgaagagtacctggattgtatctatcttgacatgagaaaaatcctccatgagtacaaggaattccagatccccatctatcgtttactactacttcatctttgactgggctttcgttgtacagccatgccaagaattctttagatttccagtaagtgtctggagcatcccagtcaccgtcagcccatataacggaaggtttgtaggtgtttacaagctcccttagttcggggtctgtcttgcggtctacaaaatcttgtgttttgtatccattggctttgtcagcgagatatagttgattgaaccattcataataggagtggtatagaccaaacttgagattcttagcccttactgctgttgcaagttcaccaagaatatctcttcctggtccaacatcttgagcattccaactatatgagtattttgatggccatagacagtacccctcatgatgtttactcgttaagacaatgtattttgctccagaattagcgaaaatttctgcccactcattaggatcataaaattcagctgtaaagtcctttgcaaagttttgatacttccagttgggagaataataattttttaagtaattcacaacctctgaatctcccgctttccaatctgcccaaaaccactctgattttacactaggaacggagaacactccccaatggagaaagattccgattttgtcttcatcataccaagaaggcaatggtctagaatctatactttcccatgtcggttggtatttggctgtcggttggtatttggcttgacacaaacaaaagagtgcaaacaaaccgactaataacttttgtattaccataactgttgccggcg

SEQ ID NO: 2674 - DNA, 2001 bp, Diabrotica virgifera
  SmartBlast Evalue=6E-17; Info=Endonuclease-reverse transcriptase n=1 Tax=Bombyx mori RepID=D5LB38_BOMMO
gaatggaagaacattgttaagcaggtcaagactgacaaagggttgtagcgccattagaagaagaataagtgttgtttttgtagtctaccggtgaccctaattgttgacatgaaatatgaaacggaattgtaagaaaaaggaataactgtttaccctcaaatattgtttcagtaatttttcatacccccgaaggaatagtttacaatttgttttatattttgtacataggtagaaaaaaatgtttgttaggcagttgagtgacgttgattttattaataaaatactcaaacttgttatgaacagttttaaaaagtttatacaaaagttgatacgaaatatgtacactaagaccatctgtatgctttaaggtgtcatctgcttttaatcccaattgttttatctctttatgtgtatccaatcgtcgagtaatatttggaaaaatatatcagacttggccaaatttggtgaatgaagatgttttacaaaaatgcatagaaaagtatatcccgagtagatattaaataaggaggatataatgcatttctgtctgacgcctctttgattataatattcgtcggttaatctcacgtcgaaccgtacggctgcgttctggttcaaaatttaagttttcgatgatgagtatgtgtctaccatcaataattcctttaattcttaatatgtccaaaagcattccatgctgtaccctatcaaaagcctgttcctaatcgatgaaagccacataattagctttatgttgtcacatcatttttggggaagtgcatttaaagcaaaaagtgcctcacacgtacccagcgaattcctaagtccaaactgggttttatctaggtctctttcgcaatgactttttattgttccatgaataatgtgaagaaaaatgttcaatgtgtggctcatcaaactaactaacctgtatttatcagatctttttgcccgttgctgcttcggaattgctatacaaacagaattaagccatcctcaggcaggggctaactaccatttatggggggtaactacccggccaagagggccctgtaggggcccccgtttggttgatcgtgcatagattgtaacgaggtcacataaactttttatagtgctttcagtcgagttctatttcgagttgcccgattgtaataagtacacggcatattaattgtaacaacttcaatgatcaattttgacctgtttcacctgcaccattataaaaaattttgtattaaaatctcttcatgaagtcacctcattttctttgctttcaaactgcaaagcagctccgtcctttagatggcttcttataatttctttgcagttttcaaagttctgcatatgttggaatttgttttttaagattttaataaaaggtaccggatgtcgttttctaatatccccgccaaattgcattctgctctcattacagttgtatacaattacttcccgacggtctcctcctttttgacattttcctatcttcttcaaattttcttccactttttccatatcgaattttaacgcattttcgaattttttcttccaccttgtcaattttctgtatcttctcagcaatctggtttacctcttcccgcattttttttaaataaaccttcatatcttcatatttttccattcggttttgaagtttcaagaattttctttttattgtttcattatattttcattttgttttactatctgttcattttgttgtttttcttttaaattttttaaagcgaataaaaaataaggtgatttcaaaatttttttgtgttggtcaactaaaatagcaatatgtaggttcaagaaacttcagtcatagaatccattaaaatgcgttttcaaggggttaaatatcaatcatttttccggacctcgccttccactggggggtaaacccccagactccccggcagggggcccccagatcgcctttgctccggggcccctaacatcgtagttacggccctgctcccaatcttcttgcca

SEQ ID NO: 2675 - DNA, 1981 bp, Diabrotica virgifera
  SmartBlast Evalue=6E-17; Info=Endonuclease-reverse transcriptase n=1 Tax=Bombyx mori RepID=D5LB38_BOMMO
gaatggaagaacattgttaagcaggtcaagactgacaaagggttgtagcgccattagaagaagaataagtgttgtttttgtagtctaccggtgaccctaattgttgacatgaaatatgaaacggaattgtaagaaaaaggaataactgtttaccctcaaatattgtttcagtaatttttcatacccccgaaggaatagtttacaatttgttttatattttgtacataggtagaaaaaaatgtttgttaggcagttgagtgacgttgattttattaataaaatactcaaacttgttatgaacagttttaaaaagtttatacaaaagttgatacgaaatatgtacactaagaccatctgtatgctttaaggtgtcatctgcttttaatcccaattgttttatctctttatgtgtatccaatcgtcgagtaatatttggaaaaatatatcagacttggccaaatttggtgaatgaagatgttttacaaaaatgcatagaaaagtatatcccgagtagatattaaataaggaggatataatgcatttctgtctgacgcctctttgattataatattcgtcggttaatctcacgtcgaaccgtacggctgcgttctggttcaaaatttaagttttcgatgatgagtatgtgtctaccatcaataattcctttaattcttaatatgtccaaaagcattccatgctgtaccctatcaaaagcctgttcctaatcgatgaaagccacataattagctttatgttgtcacatcatttttggggaagtgcatttaaagcaaaaagtgcctcacacgtacccagcgaattcctaagtccaaactgggttttatctaggtctctttcgcaatgactttttattgttccatgaataatgtgaagaaaaatgttcaatgtgtggctcatcaaactaactaacctgtatttatcagatctttttgcccgttgctgcttcggaattgctatacaaacagaattaagccatcctcaggcaggggctaactaccatttatggggggtaactacccggccaagagggccctgtaggggcccccgtttggttgatcgtgcatagattgtaacgaggtcacataaactttttatagtgctttcagtcgagttctatttcgagttgcccgattgtaataagtacacggcatattaattgtaacaacttcaatgatcaattttgacctgtttcacctgcaccattataaaaaattttgtattaaaatctcttcatgaagtcacctcattttctttgctttcaaactgcaaagcagctccgtcctttagatggcttcttataatttctttgcagttttcaaagttctgcatatgttggaatttgttttttaagattttaataaaaggtaccggatgtcgttttctaatatccccgccaaattgcattctgctctcattacagttgtatacaattacttcccgacggtctcctcctttttgacattttcctatcttcttcaaattttcttccactttttccatatcgaattttaacgcattttcgaattttttcttccaccttgtcaattttctgtatcttctcagcaatctggtttacctcttcccgcattttttttaaataaaccttcatatcttcatatttttccattcggttttgaagtttcaagaattttctttttattgtttcattatattttcattttgttttactatctgttcattttgttgtttttcttttaaattttttaaagcgaataaaaaataaggtgatttcaaaaattttttgtgatggtccactaaatgtaggtttaagaaacttcactcatagaatccattaaaatgcgttttcaaggggttaaatatcaaacatttttccggaccaagccttccgctggggggtaaacccccagaccccaggaaaggggcccccagatcaccattgccccggggcccctaacatcgtagttacgaacctgcgttgaag

SEQ ID NO: 2676 - DNA, 1987 bp, Diabrotica virgifera
  SmartBlast Evalue=6E-17; Info=Endonuclease-reverse transcriptase n=1 Tax=Bombyx mori RepID=D5LB38_BOMMO
gaatggaagaacattgttaagcaggtcaagactgacaaagggttgtagcgccattagaagaagaataagtgttgtttttgtagtctaccggtgaccctaattgttgacatgaaatatgaaacggaattgtaagaaaaaggaataactgtttaccctcaaatattgtttcagtaatttttcatacccccgaaggaatagtttacaatttgttttatattttgtacataggtagaaaaaaatgtttgttaggcagttgagtgacgttgattttattaataaaatactcaaacttgttatgaacagttttaaaaagtttatacaaaagttgatacgaaatatgtacactaagaccatctgtatgctttaaggtgtcatctgcttttaatcccaattgttttatctctttatgtgtatccaatcgtcgagtaatatttggaaaaatatatcagacttggccaaatttggtgaatgaagatgttttacaaaaatgcatagaaaagtatatcccgagtagatattaaataaggaggatataatgcatttctgtctgacgcctctttgattataatattcgtcggttaatctcacgtcgaaccgtacggctgcgttctggttcaaaatttaagttttcgatgatgagtatgtgtctaccatcaataattcctttaattcttaatatgtccaaaagcattccatgctgtaccctatcaaaagcctgttcctaatcgatgaaagccacataattagctttatgttgtcacatcatttttggggaagtgcatttaaagcaaaaagtgcctcacacgtacccagcgaattcctaagtccaaactgggttttatctaggtctctttcgcaatgactttttattgttccatgaataatgtgaagaaaaatgttcaatgtgtggctcatcaaactaactaacctgtatttatcagatctttttgcccgttgctgcttcggaattgctatacaaacagaattaagccatcctcaggcaggggctaactaccatttatggggggtaactacccggccaagagggccctgtaggggcccccgtttggttgatcgtgcatagattgtaacgaggtcacataaactttttatagtgctttcagtcgagttctatttcgagttgcccgattgtaataagtacacggcatattaattgtaacaacttcaatgatcaattttgacctgtttcacctgcaccattataaaaaattttgtattaaaatctcttcatgaagtcacctcattttctttgctttcaaactgcaaagcagctccgtcctttagatggcttcttataatttctttgcagttttcaaagttctgcatatgttggaatttgttttttaagattttaataaaaggtaccggatgtcgttttctaatatccccgccaaattgcattctgctctcattacagttgtatacaattacttcccgacggtctcctcctttttgacattttcctatcttcttcaaattttcttccactttttccatatcgaattttaacgcattttcgaattttttcttccaccttgtcaattttctgtatcttctcagcaatctggtttacctctttctgcattttctctaaataaaccttcatgtcttcatatttttctaactcccaacgaacagtatcgttcgttgggaggcactgaagtcctcgtaccaatctcaaaaatattcctcaaaagtgactctaaaacctctcaatccaacagctgggctggaagatttgatgcagtcaatacattgaaacacagatcttccgatgttttgaagtgcctttcaagtctggttctgacaagtaacaaaagaaatgaaagagacgaagcaacacaactgaaaaaaagaaactagaatcattcaaatttgttttgttactagttgtgcaaaataaaatccttgaaaccctcaacatagtctcaaaaacactgcaatcaaaatctttggaccttttaac

SEQ ID NO: 2677 - DNA, 964 bp, Diabrotica virgifera
gttatttcggcgtaataaaacctaaaatgccattggaaaaggggcccgggctaagctggggcccccgagacctttcgtaaagatataaattgtttctgaggaaattagttatgttggcgaaaaaaaaaactaaaatacaaccggaatagcggcccccggtcccagctactttgtcctaaccaatttacccagaccacatcttggtatgtgaacggaaccacatggtaccacatattgaaaagaaaggtaagggtcagatggaatgagcacattggaatcataataaatctgcaataaataaaacagcagtgacggtattcgccttcgagagtgtcactgctgaaggtaccgcatatcgttttctaatatcctcgtcaaataggattctgctctcattagagctgtatacaattacttcccgacggtctcctcctttttgacattttcctatcttcttcaaattttcttccactttttccatatcgaattttaacgcattttcgaattttttcttccaccttgtcaattttctgtatcttctcagcaatctggtttacctcttcccgcattttttttaaataaaccttcatatcttcatatttttccattcggttttgaagtttcaagaattttctttttattgtttcattatattttcattttgttttactatctgttcattttgttgtttttcttttaaattttttaaagcgaataaaaaataaggtgatttcaaaatttttttgtgttggtcaactaaaatagcaatatgtaggttcaagaaacttcagtcatagaatccattaaaatgcgttttcaaggggttaaatatcaatcatttttccggacctcgccttccactggggggtaaacccccagactccccggcagggggcccccagatcgcctttgctccggggcccctaacatcgtagttacggccctgctcccaatcttcttgcca

SEQ ID NO: 2678 - DNA, 944 bp, Diabrotica virgifera
gttatttcggcgtaataaaacctaaaatgccattggaaaaggggcccgggctaagctggggcccccgagacctttcgtaaagatataaattgtttctgaggaaattagttatgttggcgaaaaaaaaaactaaaatacaaccggaatagcggcccccggtcccagctactttgtcctaaccaatttacccagaccacatcttggtatgtgaacggaaccacatggtaccacatattgaaaagaaaggtaagggtcagatggaatgagcacattggaatcataataaatctgcaataaataaaacagcagtgacggtattcgccttcgagagtgtcactgctgaaggtaccgcatatcgttttctaatatcctcgtcaaataggattctgctctcattagagctgtatacaattacttcccgacggtctcctcctttttgacattttcctatcttcttcaaattttcttccactttttccatatcgaattttaacgcattttcgaattttttcttccaccttgtcaattttctgtatcttctcagcaatctggtttacctcttcccgcattttttttaaataaaccttcatatcttcatatttttccattcggttttgaagtttcaagaattttctttttattgtttcattatattttcattttgttttactatctgttcattttgttgtttttcttttaaattttttaaagcgaataaaaaataaggtgatttcaaaaattttttgtgatggtccactaaatgtaggtttaagaaacttcactcatagaatccattaaaatgcgttttcaaggggttaaatatcaaacatttttccggaccaagccttccgctggggggtaaacccccagaccccaggaaaggggcccccagatcaccattgccccggggcccctaacatcgtagttacgaacctgcgttgaag

SEQ ID NO: 2679 - DNA, 950 bp, Diabrotica virgifera
gttatttcggcgtaataaaacctaaaatgccattggaaaaggggcccgggctaagctggggcccccgagacctttcgtaaagatataaattgtttctgaggaaattagttatgttggcgaaaaaaaaaactaaaatacaaccggaatagcggcccccggtcccagctactttgtcctaaccaatttacccagaccacatcttggtatgtgaacggaaccacatggtaccacatattgaaaagaaaggtaagggtcagatggaatgagcacattggaatcataataaatctgcaataaataaaacagcagtgacggtattcgccttcgagagtgtcactgctgaaggtaccgcatatcgttttctaatatcctcgtcaaataggattctgctctcattagagctgtatacaattacttcccgacggtctcctcctttttgacattttcctatcttcttcaaattttcttccactttttccatatcgaattttaacgcattttcgaattttttcttccaccttgtcaattttctgtatcttctcagcaatctggtttacctctttctgcattttctctaaataaaccttcatgtcttcatatttttctaactcccaacgaacagtatcgttcgttgggaggcactgaagtcctcgtaccaatctcaaaaatattcctcaaaagtgactctaaaacctctcaatccaacagctgggctggaagatttgatgcagtcaatacattgaaacacagatcttccgatgttttgaagtgcctttcaagtctggttctgacaagtaacaaaagaaatgaaagagacgaagcaacacaactgaaaaaaagaaactagaatcattcaaatttgttttgttactagttgtgcaaaataaaatccttgaaaccctcaacatagtctcaaaaacactgcaatcaaaatctttggaccttttaac

SEQ ID NO: 2680 - DNA, 1699 bp, Diabrotica virgifera
  SmartBlast Evalue=2E-13; Info=Endonuclease-reverse transcriptase n=1 Tax=Bombyx mori RepID=D7F159_BOMMO
aagtcaagtcgatataaatggggttgaagtgttgaccgaaagtttcctgacaataatgtattaatttcgcaagcatagctacttatatatcgttgattgctactctgaagaggatgttcgatgagcagttaaaccattttctcgtcattatcaatcagccaatcgcgtccactgctggacatacgccttcctcagttatttccagtgttctctacactaggttgcttgtaaccagtttcccgctacttttttatgtcgtcggtccatctaatcggtggtagtcctcggcttcttttatagtttctgggcctccattccatgattcgtcttgtccaccgtccatcatgtgttctggttaagtgccctgtccagtttcacttctctgtctctgtagagtagggagtgtgagtcaagtcccacagcacttaggccacaattgacccattgtacatcctcccagggggttgtcgtccttagttcatcatccatcctgccatttccaggaaggtggacaaatcacctggtgacatctcccctatatcggcaggtgtatgccaaggctcgccgagcgcatactctcgtattgacgataactccggacattcacataggacatgctcgacagtttagtcatctcgttcacacctcctgcatagagatgtgtctactagccccagtgtgtggaggtgttttcttagttgacaatggccagttaaaaaaccaactgtcaagcgtaggtttttcctggtcattctcaagtacttttctgatgctgacttcccaaggttccttagtgttaccttggcgagtctacatcctggcccttcttcccatcttttcacggtttgcgtgtgggagtgacatttgacaatttccgcgattgttgcagttgacaagccaaaaagatcaccaggtcctaagagtcttaggcctctgcccttcctagctcagctggtcagcaatgcggttgcctttatttccgttgtgtcctttaacccacctcaggatgatgttgttaccatccgaagcttgggctagtgattcatgacactccattactagccctgatatgacgcgtggtctgttcagggttagtagcgcttgtctgctgtctgtgcagattattacagttttgccggctatacctttcccgattatctcttttgcggctatggagataccagccagttcagtctgaactacgctggcatttttgcccatgccccatgacaattattactagtcctgaagactttatgttcacaaattcttagccaatagattacaccagtaatccttttaagtttactattattaatgtttcctaacttgtttactaatgtatgtgaattcttatatctattaaaataataaacgtagcttcgttataatgagctataaagactatcttgaagaagcatgtcattctcccgattgtactttgtgtcaataaagccttgaaaagggtttagtctgttttatttaaaaaaaaatattgaattgataatattctaactgtcagatgaataaacttattaattcataaattaaaaacctacgatctacgattttactgacaattatttttaaccaaacaacaaacacaacgtatggattacaccaaaaatatgttcataacagctagagatcacagaagttgctaaaaagtaataggcacctagtttaataccattacaat

SEQ ID NO: 2681 - DNA, 1505 bp, Diabrotica virgifera
  SmartBlast Evalue=2E-13; Info=Endonuclease-reverse transcriptase n=1 Tax=Bombyx mori RepID=D7F159_BOMMO
aagtcaagtcgatataaatggggttgaagtgttgaccgaaagtttcctgacaataatgtattaatttcgcaagcatagctacttatatatcgttgattgctactctgaagaggatgttcgatgagcagttaaaccattttctcgtcattatcaatcagccaatcgcgtccactgctggacatacgccttcctcagttatttccagtgttctctacactaggttgcttgtaaccagtttcccgctacttttttatgtcgtcggtccatctaatcggtggtagtcctcggcttcttttatagtttctgggcctccattccatgattcgtcttgtccaccgtccatcatgtgttctggttaagtgccctgtccagtttcacttctctgtctctgtagagtagggagtgtgagtcaagtcccacagcacttaggccacaattgacccattgtacatcctcccagggggttgtcgtccttagttcatcatccatcctgccatttccaggaaggtggacaaatcacctggtgacatctcccctatatcggcaggtgtatgccaaggctcgccgagcgcatactctcgtattgacgataactccggacattcacataggacatgctcgacagtttagtcatctcgttcacacctcctgcatagagatgtgtctactagccccagtgtgtggaggtgttttcttagttgacaatggccagttaaaaaaccaactgtcaagcgtaggtttttcctggtcattctcaagtacttttctgatgctgacttcccaaggttccttagtgttaccttggcgagtctacatcctggcccttcttcccatcttttcacggtttgcgtgtgggagtgacatttgacaatttccgcgattgttgcagttgacaagccaaaaagatcaccaggtcctaagagtcttaggcctctgcccttcctagctcagctggtcagcaatgcggttgcctttatttccgttgtgtcctttaacccacctcaggatgatgttgttaccatccgaagcttgggctagtgattcatgacactccattactagccctgatatgacgcgtggtctgttcagggttagtagcgcttgtctgctgtctgtgcagattattatagttttgccggctatacctttccggattatatcttttgcggctatggagataccagccagttcagtctgaactacgctggcatttttgcccataccccattttatactaaggttcagtgatttggagtatattccgcatcctgagccttctgccgttttggagccatcggtgtagatgcaatatgcatttgccacgtttgactccctctcttgtcttgtttcgattttgtagggtttgtcgaagaaaaacgtaggtttaattgagtcgcatccatggcccgcctgtagctggggcagtgcctccagctcaccccgccagaaacgacatctcaactgtcccattcctacatcaaggtttgcacccgctgagcgtaatc

SEQ ID NO: 2682 - DNA, 1395 bp, Diabrotica virgifera
  SmartBlast Evalue=2E-13; Info=Endonuclease-reverse transcriptase n=1 Tax=Bombyx mori RepID=D7F159_BOMMO
aagtcaagtcgatataaatggggttgaagtgttgaccgaaagtttcctgacaataatgtattaatttcgcaagcatagctacttatatatcgttgattgctactctgaagaggatgttcgatgagcagttaaaccattttctcgtcattatcaatcagccaatcgcgtccactgctggacatacgccttcctcagttatttccagtgttctctacactaggttgcttgtaaccagtttcccgctacttttttatgtcgtcggtccatctaatcggtggtagtcctcggcttcttttatagtttctgggcctccattccatgattcgtcttgtccaccgtccatcatgtgttctggttaagtgccctgtccagtttcacttctctgtctctgtagagtagggagtgtgagtcaagtcccacagcacttaggccacaattgacccattgtacatcctcccagggggttgtcgtccttagttcatcatccatcctgccatttccaggaaggtggacaaatcacctggtgacatctcccctatatcggcaggtgtatgccaaggctcgccgagcgcatactctcgtattgacgataactccggacattcacataggacatgctcgacagtttagtcatctcgttcacacctcctgcatagagatgtgtctactagccccagtgtgtggaggtgttttcttagttgacaatggccagttaaaaaaccaactgtcaagcgtaggtttttcctggtcattctcaagtacttttctgatgctgacttcccaaggttccttagtgttaccttggcgagtctacatcctggcccttcttcccatcttttcacggtttgcgtgtgggagtgacatttgacaatttccgcgattgttgcagttgacaagccaaaaagatcaccaggtcctaagagtcttaggcctctgcccttcctagctcagctggtcagcaatgcggttgcctttatttccgttgtgtcctttaacccacctcaggatgatgttgttaccatccgaagcttgggctagtgattcatgacactccattactagccctgatatgacgcgtggtctgttcagggttagtagcgcttgtctgctggtccagtttcacttaagcgtagtagttctttcgatgacgtcttgaactcctgatttttgcatgatttgttggttttttatgtggtctcgaaggctcacgtttagcattacacgttccatggctcgttgtttaactcagagtttattcgccattaaatataattaattatatattataaaccagtctttaaaatatcggaaacacgacaccggtcttcttcatatgctgcgtcttcctagtatttttccttgaatgattacttttgtagtaagttgtatcttgca

SEQ ID NO: 2683 - DNA, 1378 bp, Diabrotica virgifera
ataggtttctattgataatctcgcaccccactagtttcatctctttttatttcacaacatctgtatctgtagagtagggagtgtgagtcaagtcccacagcagttaggccacaattgacccattgtacatcctcccagggggttgtcatccttagttcattatccatcctgccatttccaggaaggtggacaaatcacctggtgacatctcccctatatcggcaggtgtatgccaaggctcgccgaaacgcatactctcgtattgacgataactccggacattcacataggacatgctcgacagtttagtcatctcgttcacacctcctgcatagagatgtgtctactagccccagtgtgtggaggtgttttcttagttgacaatggccagttaaaaaaccaactgtcaagcgtaggtttttcctggtcattctcaagtacttttctgatgctgacttcccaaggttccttagtgttaccttggcgagtctacatcctggcccttcttcccatcttttcacggtttgcgtgtgggagtgacatttgacaatttccgcgattgttgcagttgacaagccaaaaagatcaccaggtcctaagagtcttaggcctctgcccttcctagctcagctggtcagcaatgcggttgcctttatttccgttgtgtcctttaacccacctcaggatgatgttgttaccatccgaagcttgggctagtgattcatgacactccattactagccctgatatgacgcgtggtctgttcagggttagtagcgcttgtctgctgtctgtgcagattattacagttttgccggctatacctttcccgattatctcttttgcggctatggagataccagccagttcagtctgaactacgctggcatttttgcccatgccccatgacaattattactagtcctgaagactttatgttcacaaattcttagccaatagattacaccagtaatccttttaagtttactattattaatgtttcctaacttgtttactaatgtatgtgaattcttatatctattaaaataataaacgtagcttcgttataatgagctataaagactatcttgaagaagcatgtcattctcccgattgtactttgtgtcaataaagccttgaaaagggtttagtctgttttatttaaaaaaaaatattgaattgataatattctaactgtcagatgaataaacttattaattcataaattaaaaacctacgatctacgattttactgacaattatttttaaccaaacaacaaacacaacgtatggattacaccaaaaatatgttcataacagctagagatcacagaagttgctaaaaagtaataggcacctagtttaataccattacaat

SEQ ID NO: 2684 - DNA, 1184 bp, Diabrotica virgifera
ataggtttctattgataatctcgcaccccactagtttcatctctttttatttcacaacatctgtatctgtagagtagggagtgtgagtcaagtcccacagcagttaggccacaattgacccattgtacatcctcccagggggttgtcatccttagttcattatccatcctgccatttccaggaaggtggacaaatcacctggtgacatctcccctatatcggcaggtgtatgccaaggctcgccgaaacgcatactctcgtattgacgataactccggacattcacataggacatgctcgacagtttagtcatctcgttcacacctcctgcatagagatgtgtctactagccccagtgtgtggaggtgttttcttagttgacaatggccagttaaaaaaccaactgtcaagcgtaggtttttcctggtcattctcaagtacttttctgatgctgacttcccaaggttccttagtgttaccttggcgagtctacatcctggcccttcttcccatcttttcacggtttgcgtgtgggagtgacatttgacaatttccgcgattgttgcagttgacaagccaaaaagatcaccaggtcctaagagtcttaggcctctgcccttcctagctcagctggtcagcaatgcggttgcctttatttccgttgtgtcctttaacccacctcaggatgatgttgttaccatccgaagcttgggctagtgattcatgacactccattactagccctgatatgacgcgtggtctgttcagggttagtagcgcttgtctgctgtctgtgcagattattatagttttgccggctatacctttccggattatatcttttgcggctatggagataccagccagttcagtctgaactacgctggcatttttgcccataccccattttatactaaggttcagtgatttggagtatattccgcatcctgagccttctgccgttttggagccatcggtgtagatgcaatatgcatttgccacgtttgactccctctcttgtcttgtttcgattttgtagggtttgtcgaagaaaaacgtaggtttaattgagtcgcatccatggcccgcctgtagctggggcagtgcctccagctcaccccgccagaaacgacatctcaactgtcccattcctacatcaaggtttgcacccgctgagcgtaatc

SEQ ID NO: 2685 - DNA, 1074 bp, Diabrotica virgifera
ataggtttctattgataatctcgcaccccactagtttcatctctttttatttcacaacatctgtatctgtagagtagggagtgtgagtcaagtcccacagcagttaggccacaattgacccattgtacatcctcccagggggttgtcatccttagttcattatccatcctgccatttccaggaaggtggacaaatcacctggtgacatctcccctatatcggcaggtgtatgccaaggctcgccgaaacgcatactctcgtattgacgataactccggacattcacataggacatgctcgacagtttagtcatctcgttcacacctcctgcatagagatgtgtctactagccccagtgtgtggaggtgttttcttagttgacaatggccagttaaaaaaccaactgtcaagcgtaggtttttcctggtcattctcaagtacttttctgatgctgacttcccaaggttccttagtgttaccttggcgagtctacatcctggcccttcttcccatcttttcacggtttgcgtgtgggagtgacatttgacaatttccgcgattgttgcagttgacaagccaaaaagatcaccaggtcctaagagtcttaggcctctgcccttcctagctcagctggtcagcaatgcggttgcctttatttccgttgtgtcctttaacccacctcaggatgatgttgttaccatccgaagcttgggctagtgattcatgacactccattactagccctgatatgacgcgtggtctgttcagggttagtagcgcttgtctgctggtccagtttcacttaagcgtagtagttctttcgatgacgtcttgaactcctgatttttgcatgatttgttggttttttatgtggtctcgaaggctcacgtttagcattacacgttccatggctcgttgtttaactcagagtttattcgccattaaatataattaattatatattataaaccagtctttaaaatatcggaaacacgacaccggtcttcttcatatgctgcgtcttcctagtatttttccttgaatgattacttttgtagtaagttgtatcttgca

SEQ ID NO: 2686 - DNA, 1821 bp, Diabrotica virgifera
tatcattaaatactcttcagtacatgcatctgtcatttttaggcttaaaatattaaatgacctattttattgattatacattatacactatgatcatattgttgttaattaatatatttcgacaagtaatgaaaacccattgacatcattaattgtaataaagaattatagatattatttgtacagtaaagaaaaatatctcttggcaagtaatgatgcctggcttctcagtgtacaataaacatggccatgataaaaagtcatattctaatgttttggcaatgctctgacgtcagaaatcttaaatgacgtaagcgtgtttttgtagtaaaaagggtatagataggtatttttcttcctaaatagttcttcagcgtgtgtatccgaaaagcccctaatttttacatttgagcgcattcatatccatgtataaataaatttattccataatacctaaagactagttgccaaaagtgacaaattagtactaaagcaacgcattttagatttattcaaactataataatagtgtaattcttatgaattgtacaatcttgtaaggtgtattttgtttaatagtaagtatctaatagtgtgcaaacggttcctacatagggcatggtgcctcgttgcctaaaaaccaaaccagtatcgctttaacgtagttaaatatacagaatcatattgagtcgtttttagtaagattctaaaactgtacaaaatgataatgtttttctacagtgtcaacaacaacagctaataagaacagctgaagacagtttgtaagtgtagtaaccaatttccattgagaagaggcactttaagaaaaagaagaagagatcaaaataaacgtcagattttagtagctaacattggcaaaaaccatgcgaaaaaaaattaatcaaagagttaaaaattactaaaatcagaaaaaatgttttaagtaagcacaaaaaattaatgttacattgtataatgtaacattatgtttcagcacacgtcttattttttgtgaagtaagcgacgtaacgtattgtcgtctctaaatacacctcctctggacaagaaatgaataatgtcgacattcttccggtatcgtatcttcgagttgttaattactgttagaattactgcttctattcgaatagactggcgccagctactgtttgattttgtcctcttacaatctgcacgaagaaacttaagatctgttccaactagagtcagaaacgtcagaaaagtcagaaattgttcgcttttatgttattgcgcagaatcctgacgtctccaacttgtttctgactctggctggaacaaacctttagtctacgccatatctggtgtttgtatctgccaattcgacttttagatcggccgtatacagactgctcgggcagtttacgactgagcgacatacacggactgctcgagcggtcattatcgacgtctggagctgtcccttgttgactacctgacctgagttttctcttacatccggtctcaaactgtcgacaccaccatgaaatttcatcgtactgttgacagcttgaagcagtcatgactgatcgagctgtcatgtgcatggcagcgaatataagattatagttcgccgcgctgtcgctgctttaaacatccatctcaactgcttgaagccgtccgtgtacggccgacaagacagaaaatctcatgacatatttagtgcgagatgtttgaaaagatgtgattgatctgttcattacttagatgaatgtaatcacgaatttcgaggattcagaaagaatgaaaaatacaaaatttaagaactaaaataaaaagaaaact

SEQ ID NO: 2687 - DNA, 1722 bp, Diabrotica virgifera
ttatattatcgtcacaaaccgattgacaacattaattagaataaagaatcatagatattattttattagtacagtaaacaaaaactgcaaaaaaagaaatatatctctgacaagtgatacttagcttctcaccgtacaataaacatggccatgatgaaaggtcatattctaatgttttggcaatgctctgacgtcagaaatcttaaatgacgtaagcgtgtttttgtagtaaaaagggtatagataggtatttttcttcctaaatagttcttcagcgtgtgtatccgaaaagcccctaatttttacatttgagcgcattcatatccatgtataaataaatttattccataatacctaaagactagttgccaaaagtgacaaattagtactaaagcaacgcattttagatttattcaaactataataatagtgtaattcttatgaattgtacaatcttgtaaggtgtattttgtttaatagtaagtatctaatagtgtgcaaacggttcctacatagggcatggtgcctcgttgcctaaaaaccaaaccagtatcgctttaacgtagttaaatatacagaatcatattgagtcgtttttagtaagattctaaaactgtacaaaatgataatgtttttctacagtgtcaacaacaacagctaataagaacagctgaagacagtttgtaagtgtagtaaccaatttccattgagaagaggcactttaagaaaaagaagaagagatcaaaataaacgtcagattttagtagctaacattggcaaaaaccatgcgaaaaaaaattaatcaaagagttaaaaattactaaaatcagaaaaaatgttttaagtaagcacaaaaaattaatgttacattgtataatgtaacattatgtttcagcacacgtcttattttttgtgaagtaagcgacgtaacgtattgtcgtctctaaatacacctcctctggacaagaaatgaataatgtcgacattcttccggtatcgtatcttcgagttgttaattactgttagaattactgcttctattcgaatagactggcgccagctactgtttgattttgtcctcttacaatctgcacgaagaaacttaagatctgttccaactagagtcagaaacgtcagaaaagtcagaaattgttcgcttttatgttattgcgcagaatcctgacgtctccaacttgtttctgactctggctggaacaaacctttagtctacgccatatctggtgtttgtatctgccaattcgacttttagatcggccgtatacagactgctcgggcagtttacgactgagcgacatacacggactgctcgagcggtcattatcgacgtctggagctgtcccttgttgactacctgacctgagttttctcttacatccggtctcaaactgtcgacaccaccatgaaatttcatcgtactgttgacagcttgaagcagtcatgactgatcgagctgtcatgtgcatggcagcgaatataagattatagttcgccgcgctgtcgctgctttaaacatccatctcaactgcttgaagccgtccgtgtacggccgacaagacagaaaatctcatgacatatttagtgcgagatgtttgaaaagatgtgattgatctgttcattacttagatgaatgtaatcacgaatttcgaggattcagaaagaatgaaaaatacaaaatttaagaactaaaataaaaagaaaact

SEQ ID NO: 2688 - DNA, 1720 bp, Diabrotica virgifera
tatcattaaatactcttcagtacatgcatctgtcatttttaggcttaaaatattaaatgacctattttattgattatacattatacactatgatcatattgttgttaattaatatatttcgacaagtaatgaaaacccattgacatcattaattgtaataaagaattatagatattatttgtacagtaaagaaaaatatctcttggcaagtaatgatgcctggcttctcagtgtacaataaacatggccatgataaaaagtcatattctaatgttttggcaatgctctgacgtcagaaatcttaaatgacgtaagcgtgtttttgtagtaaaaagggtatagataggtatttttcttcctaaatagttcttcagcgtgtgtatccgaaaagcccctaatttttacatttgagcgcattcatatccatgtataaataaatttattccataatacctaaagactagttgccaaaagtgacaaattagtactaaagcaacgcattttagatttattcaaactataataatagtgtaattcttatgaattgtacaatcttgtaaggtgtattttgtttaatagtaagtatctaatagtgtgcaaacggttcctacatagggcatggtgcctcgttgcctaaaaaccaaaccagtatcgctttaacgtagttaaatatacagaatcatattgagtcgtttttagtaagattctaaaactgtacaaaatgataatgtttttctacagtgtcaacaacaacagctaataagaacagctgaagacagtttgtaagtgtagtaaccaatttccattgagaagaggcactttaagaaaaagaagaagagatcaaaataaacgtcagattttagtagctaacattggcaaaaaccatgcgaaaaaaaattaatcaaagagttaaaaattactaaaatcagaaaaaatgttttaagtaagcacaaaaaattaatgttacattgtataatgtaacattatgtttcagcacacgtcttattttttgtgaagtaagcgacgtaacgtattgtcgtctctaaatacacctcctctggacaagaaatgaataatgtcgacattcttccggtatcgtatcttcgagttgttaattactgttagaattactgcttctattcgaatagactggcgccagctactgtttgattttgtcctcttacaatctgcacgaagaaacttaagatctgttccaactagagtcagaaacgtcagaaaagtcagaaattgttcgcttttatgttattgcgcagaatcctgacgtctccaacttgtttctgactctggctggaacaaacctttagtctacgccatatctggtgtttgtatctgccaattcgacttttagatcggccgtatacagactgctcgggcagtttacgactgagcgacatacacggactgctcgagcggtcattatcgacgtctggagctgtcccttgttgactacctgacctgagttttctcttacatccggtctcaaactgtcgacaccaccatgaaatttcatcgtactgttgacagcttgaagcagtcatgactgatcgagctgtcatgtgcatggcagcgaatataagattatagttcaccgtactgtctcagcttcaagcagtcgatctcaactacttgaagctctacgtgtatgaccgacctaatacattttttgaagcgaagctttttaattttcgtgatggggaac

SEQ ID NO: 2689 - DNA, 1621 bp, Diabrotica virgifera
ttatattatcgtcacaaaccgattgacaacattaattagaataaagaatcatagatattattttattagtacagtaaacaaaaactgcaaaaaaagaaatatatctctgacaagtgatacttagcttctcaccgtacaataaacatggccatgatgaaaggtcatattctaatgttttggcaatgctctgacgtcagaaatcttaaatgacgtaagcgtgtttttgtagtaaaaagggtatagataggtatttttcttcctaaatagttcttcagcgtgtgtatccgaaaagcccctaatttttacatttgagcgcattcatatccatgtataaataaatttattccataatacctaaagactagttgccaaaagtgacaaattagtactaaagcaacgcattttagatttattcaaactataataatagtgtaattcttatgaattgtacaatcttgtaaggtgtattttgtttaatagtaagtatctaatagtgtgcaaacggttcctacatagggcatggtgcctcgttgcctaaaaaccaaaccagtatcgctttaacgtagttaaatatacagaatcatattgagtcgtttttagtaagattctaaaactgtacaaaatgataatgtttttctacagtgtcaacaacaacagctaataagaacagctgaagacagtttgtaagtgtagtaaccaatttccattgagaagaggcactttaagaaaaagaagaagagatcaaaataaacgtcagattttagtagctaacattggcaaaaaccatgcgaaaaaaaattaatcaaagagttaaaaattactaaaatcagaaaaaatgttttaagtaagcacaaaaaattaatgttacattgtataatgtaacattatgtttcagcacacgtcttattttttgtgaagtaagcgacgtaacgtattgtcgtctctaaatacacctcctctggacaagaaatgaataatgtcgacattcttccggtatcgtatcttcgagttgttaattactgttagaattactgcttctattcgaatagactggcgccagctactgtttgattttgtcctcttacaatctgcacgaagaaacttaagatctgttccaactagagtcagaaacgtcagaaaagtcagaaattgttcgcttttatgttattgcgcagaatcctgacgtctccaacttgtttctgactctggctggaacaaacctttagtctacgccatatctggtgtttgtatctgccaattcgacttttagatcggccgtatacagactgctcgggcagtttacgactgagcgacatacacggactgctcgagcggtcattatcgacgtctggagctgtcccttgttgactacctgacctgagttttctcttacatccggtctcaaactgtcgacaccaccatgaaatttcatcgtactgttgacagcttgaagcagtcatgactgatcgagctgtcatgtgcatggcagcgaatataagattatagttcaccgtactgtctcagcttcaagcagtcgatctcaactacttgaagctctacgtgtatgaccgacctaatacattttttgaagcgaagctttttaattttcgtgatggggaac

SEQ ID NO: 2690 - DNA, 540 bp, Diabrotica virgifera
gctgtgacacgattttgatggcagcccatgtcagaggtgtttgtctgtgtatgaaatttaataaaaaagtgtttcaaccggcaagcagatgggtacattttgacctcctattcggatcccgtactaatggattctgacgacgaagcacaagcaccgcttttgactcctcctagcgcagttaatagctcgagtagtcagtttatggcaaggcaaccgctcgcgagctgtcgacaccaccatgaaatttcatcgtactgttgacagcttgaagcagtcatgactgatcgagctgtcatgtgcatggcagcgaatataagattatagttcgccgcgctgtcgctgctttaaacatccatctcaactgcttgaagccgtccgtgtacggccgacaagacagaaaatctcatgacatatttagtgcgagatgtttgaaaagatgtgattgatctgttcattacttagatgaatgtaatcacgaatttcgaggattcagaaagaatgaaaaatacaaaatttaagaactaaaataaaaagaaaact

SEQ ID NO: 2691 - DNA, 439 bp, Diabrotica virgifera
gctgtgacacgattttgatggcagcccatgtcagaggtgtttgtctgtgtatgaaatttaataaaaaagtgtttcaaccggcaagcagatgggtacattttgacctcctattcggatcccgtactaatggattctgacgacgaagcacaagcaccgcttttgactcctcctagcgcagttaatagctcgagtagtcagtttatggcaaggcaaccgctcgcgagctgtcgacaccaccatgaaatttcatcgtactgttgacagcttgaagcagtcatgactgatcgagctgtcatgtgcatggcagcgaatataagattatagttcaccgtactgtctcagcttcaagcagtcgatctcaactacttgaagctctacgtgtatgaccgacctaatacattttttgaagcgaagctttttaattttcgtgatggggaac

SEQ ID NO: 2692 - DNA, 1714 bp, Diabrotica virgifera
aaatgagtacattttcgattgtcatatattaacaatatagtacttatctgtgaaagataaagctgttcttagaaggagacaatttgaatggatagtaccaaaataaaagaaacatgtcatctccaagacaaagtgaaaagagaaacatgaaaacaacaagtgacttatatgtgaagtaatagttttccagttggttaaaacaacgcagttgcatcaatggtcatcaaaatcagataatcacatggtaaaatgtagataaaactttaatcaatgcactaaaaacgattggagaactgtttgttattttattttggatttacgtgaaaatattgaacagaatattgactaaccttatacagatatctggtaagctcaacaatatttagtgtcagccataatcaaatgaacctatctttttatacgtctacaccaagatcttaagatttgatttcaatgatagtttaaactcatattaatattgaggtgatatatattttgagatcaaaatgttataggccaggataccgcgtaccaagggaagtttattggtggcaagctgaaaattggttaacagcttgatggtgtctagtcggacaagctttgatgcatgggagcactgaaccaggggaagttttaattgtggaacgtgattttaattgtggaacttgtcatcctgacaagtttatgattgtgaaaactagcaggttgtttttaagtttattcaatagcaaactttatataatatatgaaaaaatgtttgtccgacaaatatgttgggcattttaataagtccgacacgtagaacatgtcaaatgacagaattatgttggtgataaatgcagtctgatttttgcatgagagtttaatgaaagggtaacaaatcaattggaagttctgtccgacaaaatacatgcgacgttttcatagtctgacgttcgaaacctgtaacctattccaaagttaaagcttcccctcttccagtgttcccgtacatcagagtttgtccggctagatatcgttaagcttttaacaaattttcggcttgctattaatggactttttttggtgcgcgcgatccaggcctattaccaatactaaaacattccatcaactatagactgttcctattcgaataaaaaatgtacaatttccaaagtagaatgaattttgccaaatttttgttagccatcacttttataaatgcacttttatacacttttctatttgtgatttttttacttttgtttatcatgtataaaagatttacacagatgcgttttaaaattattttatttgaatatgtcccgaaaggtttgaaaaaatatttagatcctatcaatagcagcccaaatggagaaaacgtagagtaattatcttcatgaggctcgcacttttttaccttttgcattaaaagtatagtatatacaatatttttagtataaaaaatgaatttatttttaagcaaaaaattatactaatttaaatgagccatcaaccactttctgtccactcctaaacatggacctctttcatatttctccaagctgtcgtgtgttatgctatttgaaaccacctatttcttttagggtattcgggtattccgtattcccaccctagtttatcagctggtatattaccagtagcaacctatggttatatacagccatcattaactgtactataactgtttcgattaatgttcttatagtcctta

SEQ ID NO: 2693 - DNA, 1641 bp, Diabrotica virgifera
aaatgagtacattttcgattgtcatatattaacaatatagtacttatctgtgaaagataaagctgttcttagaaggagacaatttgaatggatagtaccaaaataaaagaaacatgtcatctccaagacaaagtgaaaagagaaacatgaaaacaacaagtgacttatatgtgaagtaatagttttccagttggttaaaacaacgcagttgcatcaatggtcatcaaaatcagataatcacatggtaaaatgtagataaaactttaatcaatgcactaaaaacgattggagaactgtttgttattttattttggatttacgtgaaaatattgaacagaatattgactaaccttatacagatatctggtaagctcaacaatatttagtgtcagccataatcaaatgaacctatctttttatacgtctacaccaagatcttaagatttgatttcaatgatagtttaaactcatattaatattgaggtgatatatattttgagatcaaaatgttataggccaggataccgcgtaccaagggaagtttattggtggcaagctgaaaattggttaacagcttgatggtgtctagtcggacaagctttgatgcatgggagcactgaaccaggggaagttttaattgtggaacgtgattttaattgtggaacttgtcatcctgacaagtttatgattgtgaaaactagcaggttgtttttaagtttattcaatagcaaactttatataatatatgaaaaaatgtttgtccgacaaatatgttgggcattttaataagtccgacacatagaacaagtcaaatgacaggaattatgtttgtgataaataatagcagtctgatttttgcatgagagtttaaggaaaaggtaaaaaatcaattggaagttttttctgacaaaatacatttccgtagtctgaccttcggaacctgtaacctgttctacagataaaacttcccttgttccactgtttgtacatcctgttccgtacatcaaagtttgtccgactagacatcgtttaggtattaacaaattttcagcttgccattaataaactctttcttggtacgcgggacccaggcctatttgatattgaattgatgaaataaaataaaggtgcaaagccttttgtagttaattcgaagtaatcaaataggtcttttaaatgtttagtaatgaattcttctaatatgtaaagaaacttttaatataaatatcacactgctacttatattcttttctaaaattctaaaacaactttaacaaggtttatgtgatacttgtaattacccagaacaatgtactttattatttttgtaaaagcttttgtgtgtatatatgtatatgaccttgcacaaaaacactgttcttcacaaaaacaacaaaaaaaaaataggaataatatgcacttaaaaactggaactattttatgtcagccttcaactttatttagggttaattcgagcaatacaatataaattctttattcatatataatacactactccaagaaattaacacaccattgcaggaatttaatattcaccattggcgcgcatacgggtaatatgacccttatgcgcgccaacggtaaatataaaattcttaaaaatgaataaccattttcaaa

SEQ ID NO: 2694 - DNA, 1216 bp, Diabrotica virgifera
tacagccagctacagctaagtttattttcctgtgatttaaaaaagttgattaatggcaagctgaaatttgttaatagcttaatggtgtctggttggacaggctttgatgtgtgggagcactggaacggggaagttttaattgtggaacgtgattttaattgtggaacttgtcatcctgacaagtttatgattgtgaaaactagcaggttgtttttaagtttattcaatagcaaactttatataatatatgaaaaaatgtttgtccgacaaatatgttgggcattttaataagtccgacacgtagaacatgtcaaatgacagaattatgttggtgataaatgcagtctgatttttgcatgagagtttaatgaaagggtaacaaatcaattggaagttctgtccgacaaaatacatgcgacgttttcatagtctgacgttcgaaacctgtaacctattccaaagttaaagcttcccctcttccagtgttcccgtacatcagagtttgtccggctagatatcgttaagcttttaacaaattttcggcttgctattaatggactttttttggtgcgcgcgatccaggcctattaccaatactaaaacattccatcaactatagactgttcctattcgaataaaaaatgtacaatttccaaagtagaatgaattttgccaaatttttgttagccatcacttttataaatgcacttttatacacttttctatttgtgatttttttacttttgtttatcatgtataaaagatttacacagatgcgttttaaaattattttatttgaatatgtcccgaaaggtttgaaaaaatatttagatcctatcaatagcagcccaaatggagaaaacgtagagtaattatcttcatgaggctcgcacttttttaccttttgcattaaaagtatagtatatacaatatttttagtataaaaaatgaatttatttttaagcaaaaaattatactaatttaaatgagccatcaaccactttctgtccactcctaaacatggacctctttcatatttctccaagctgtcgtgtgttatgctatttgaaaccacctatttcttttagggtattcgggtattccgtattcccaccctagtttatcagctggtatattaccagtagcaacctatggttatatacagccatcattaactgtactataactgtttcgattaatgttcttatagtcctta

SEQ ID NO: 2695 - DNA, 1202 bp, Diabrotica virgifera
aaatgagtacattttcgattgtcatatattaacaatatagtacttatctgtgaaagataaagctgttcttagaaggagacaatttgaatggatagtaccaaaataaaagaaacatgtcatctccaagacaaagtgaaaagagaaacatgaaaacaacaagtgacttatatgtgaagtaatagttttccagttggttaaaacaacgcagttgcatcaatggtcatcaaaatcagataatcacatggtaaaatgtagataaaactttaatcaatgcactaaaaacgattggagaactgtttgttattttattttggatttacgtgaaaatattgaacagaatattgactaaccttatacagatatctggtaagctcaacaatatttagtgtcagccataatcaaatgaacctatctttttatacgtctacaccaagatcttaagatttgatttcaatgatagtttaaactcatattaatattgaggtgatatatattttgagatcaaaatgttataggccaggataccgcgtaccaagggaagtttattggtggcaagctgaaaattggttaacagcttgatggtgtctagtcggacaagctttgatgcatgggagcactgaaccaggggaagttttaattgtggaacgtgattttaattgtggaacttgtcatcctgacaagtttatgattgtgaaaactagcaggttgtttttaagtttattcaatagcaaactttatataatatatgaaaaaatgtttgtccgacaaatatgttgggcattttaataagtccgacacgtagaacatgtcaaatgacagaattatgttggtgataaatgcagtctgatttttgcatgagagtttaatgaaagggtaacaaattaattggaagttcggtccgacaaaacacatgggatgttttcgcagtctgacgttcgaaacctgtaacctgttccacaattgaatcttcccctgttccggtattcccgtacatcggggtttgtccgactagacaccgttgagctattgacaagttttcagcttgctagtgataaaaatgtttttggtacgcaggatccgggcctaaaaacgtaggaatatacgtaaaatcagtttgtggcttattttttgacaaggcttgagagaatttaaatgctgccctatgtcattgtatatttttgtataagtactaactctcaggg

SEQ ID NO: 2696 - DNA, 1143 bp, Diabrotica virgifera
tacagccagctacagctaagtttattttcctgtgatttaaaaaagttgattaatggcaagctgaaatttgttaatagcttaatggtgtctggttggacaggctttgatgtgtgggagcactggaacggggaagttttaattgtggaacgtgattttaattgtggaacttgtcatcctgacaagtttatgattgtgaaaactagcaggttgtttttaagtttattcaatagcaaactttatataatatatgaaaaaatgtttgtccgacaaatatgttgggcattttaataagtccgacacatagaacaagtcaaatgacaggaattatgtttgtgataaataatagcagtctgatttttgcatgagagtttaaggaaaaggtaaaaaatcaattggaagttttttctgacaaaatacatttccgtagtctgaccttcggaacctgtaacctgttctacagataaaacttcccttgttccactgtttgtacatcctgttccgtacatcaaagtttgtccgactagacatcgtttaggtattaacaaattttcagcttgccattaataaactctttcttggtacgcgggacccaggcctatttgatattgaattgatgaaataaaataaaggtgcaaagccttttgtagttaattcgaagtaatcaaataggtcttttaaatgtttagtaatgaattcttctaatatgtaaagaaacttttaatataaatatcacactgctacttatattcttttctaaaattctaaaacaactttaacaaggtttatgtgatacttgtaattacccagaacaatgtactttattatttttgtaaaagcttttgtgtgtatatatgtatatgaccttgcacaaaaacactgttcttcacaaaaacaacaaaaaaaaaataggaataatatgcacttaaaaactggaactattttatgtcagccttcaactttatttagggttaattcgagcaatacaatataaattctttattcatatataatacactactccaagaaattaacacaccattgcaggaatttaatattcaccattggcgcgcatacgggtaatatgacccttatgcgcgccaacggtaaatataaaattcttaaaaatgaataaccattttcaaa

SEQ ID NO: 2697 - DNA, 704 bp, Diabrotica virgifera
tacagccagctacagctaagtttattttcctgtgatttaaaaaagttgattaatggcaagctgaaatttgttaatagcttaatggtgtctggttggacaggctttgatgtgtgggagcactggaacggggaagttttaattgtggaacgtgattttaattgtggaacttgtcatcctgacaagtttatgattgtgaaaactagcaggttgtttttaagtttattcaatagcaaactttatataatatatgaaaaaatgtttgtccgacaaatatgttgggcattttaataagtccgacacgtagaacatgtcaaatgacagaattatgttggtgataaatgcagtctgatttttgcatgagagtttaatgaaagggtaacaaattaattggaagttcggtccgacaaaacacatgggatgttttcgcagtctgacgttcgaaacctgtaacctgttccacaattgaatcttcccctgttccggtattcccgtacatcggggtttgtccgactagacaccgttgagctattgacaagttttcagcttgctagtgataaaaatgtttttggtacgcaggatccgggcctaaaaacgtaggaatatacgtaaaatcagtttgtggcttattttttgacaaggcttgagagaatttaaatgctgccctatgtcattgtatatttttgtataagtactaactctcaggg

SEQ ID NO: 2698 - DNA, 1336 bp, Diabrotica virgifera
attgaaactttttacaggtattgctaattaaattaaataattttgatttagggttcactttaggggtggtagagggctgaagatgtttttttaaaaatcctaaaaaaaaatacagtgattatacttaccaaaaggcatctttttgggggtattgtgtattaaaactaaacaaataattttttcggcccaccctgatatatatgtatatatatatatgtatatatgtatatatatattagtcatatttttcgtgttttaatttcagtcgtacgtagcaagcatactataaccatttggtagaagacaccctatatgtcagtaagaggttcatacgcttattaaattttgtaacaggtaacattgttgttatcttaggttgaacataacttttgcaaacatatgtcatgttagagtcacagcataatatgaacttgcttaactcagagattgttaaaaatctggtagttattttaataaatatgtttatttattttgtatatcatttattttattattcctttatgttcattattacaggtttgatatatttaatatctgacagcagtataagatacctgggaaaatgatcgaagatcattttcatggcgcccatgatttgttagatttatttatcttgttcgtctttagaaattattcatcttcattcattttcagtacattattcttattttattatttcatcttttagtcatcattactatctatatagagctactgttcttcgacaggcatgcaaacgagccgtatccatccttgagtgtcaagttgctctcttgcatctatagctagccaactctattcagtttgcctctgtctcttcccacttctacttctatcccttctaattcccctttcttcagtactactgcactttagtagtattttttattttcctattgcggcttctcaacgtagaagccacttcaccctttctttacacactccacattctcttcttttcagccacaactatttagttatattttagttaccttagttctttttcttccttacttctgttggagtacctatatctttctttttactttcactccaacagaagttttcttctttttgttacactggcgcccaacgtggggccaaccgttttatggttctaagacagtagttcttttagttcaattttcttttattggaattttctgtattattacctttttgatacctttgtatacatgttacttctgatttatttttggtctttaaaattttattaatactaaacaggtagacttatactgcttttggttttgattagttgatttcgatacctcatttttagttttagtggtac

SEQ ID NO: 2699 - DNA, 1230 bp, Diabrotica virgifera
attgaaactttttacaggtattgctaattaaattaaataattttgatttagggttcactttaggggtggtagagggctgaagatgtttttttaaaaatcctaaaaaaaaatacagtgattatacttaccaaaaggcatctttttgggggtattgtgtattaaaactaaacaaataattttttcggcccaccctgatatatatgtatatatatatatgtatatatgtatatatatattagtcatatttttcgtgttttaatttcagtcgtacgtagcaagcatactataaccatttggtagaagacaccctatatgtcagtaagaggttcatacgcttattaaattttgtaacaggtaacattgttgttatcttaggttgaacataacttttgcaaacatatgtcatgttagagtcacagcataatatgaacttgcttaactcagagattgttaaaaatctggtagttattttaataaatatgtttatttattttgtatatcatttattttattattcctttatgttcattattacaggtttgatatatttaatatctgacagcagtataagatacctgggaaaatgatcgaagatcattttcatggcgcccatgatttgttagatttatttatcttgttcgtctttagaaattattcatcttcattcattttcagtacattattcttattttattatttcatcttttagtcatcattactatctatatagagctactgttcttcgacaggcatgcaaacgagccgtatccatccttgagtgtcaagttgctctcttgcatctatagctagccaactctattcagtttgcctctgtctcttcccacttctacttctatcccttctaattcccctttcttcagtactactgcaaagtgtatttttatttttcctacttcggctcaaccgctgaagccccttcattttatttcataagaggccccaactagttaccttagtcttttcttttcttcttttttttccttacttctgttggagtatatctttctttttactttcactccaacagaagttctcttttttgttacacgtcatataataaaatgttaaaaatatcgtttttcttttgtcattttaataaatttctgatatttttaacaactaataccgttttttattattatgtgcggcgttaggtaccgcagtgtgtccactcatgtaactttacgagacgtggctaccggagggtta

SEQ ID NO: 2700 - DNA, 1190 bp, Diabrotica virgifera
attgaaactttttacaggtattgctaattaaattaaataattttgatttagggttcactttaggggtggtagagggctgaagatgtttttttaaaaatcctaaaaaaaaatacagtgattatacttaccaaaaggcatctttttgggggtattgtgtattaaaactaaacaaataattttttcggcccaccctgatatatatgtatatatatatatgtatatatgtatatatatattagtcatatttttcgtgttttaatttcagtcgtacgtagcaagcatactataaccatttggtagaagacaccctatatgtcagtaagaggttcatacgcttattaaattttgtaacaggtaacattgttgttatcttaggttgaacataacttttgcaaacatatgtcatgttagagtcacagcataatatgaacttgcttaactcagagattgttaaaaatctggtagttattttaataaatatgtttatttattttgtatatcatttattttattattcctttatgttcattattacaggtttgatatatttaatatctgacagcagtataagatacctgggaaaatgatcgaagatcattttcatggcgcccatgatttgttagatttatttatcttgttcgtctttagaaattattcatcttcattcattttcagtacattattcttattttattatttcatcttttagtcatcattactatctatatagagctactgttcttcgacaggcatgcaaacgagccgtatccatccttgagtgtcaagttgctctcttgcatctatagctagccaactctattcagtttgcctctgtctcttcccacttctacttctatcccttctaattcccctttcttcagtactactgcaaagtgtatttttatttttcctacttcggctcaaccgctgaagccccttcattttatttcataagaggccccaactagttaccttagtcttttcttttcttcttttttttccttacttctgttggagtatatctttctttttactttcactccaacagaagttttcttatttttgtaacactggctgcccaatgcgtggtgccaaccgtttatggttttaagacagtagttcttttagttcattttttattttattggaatttttgtattattaactttttgatatctttgtatacatgt

SEQ ID NO: 2701 - DNA, 1148 bp, Diabrotica virgifera
gtattttcccttagtgaggcttgggcctatttagttgtattattttcatcgttgtcagtttcatttagttgtacgtagcaagcgtactatgaccatttggtagaagactcatgtaagttgtaccctatatgtaagcaagaggtatcaaattttgtaaaaagataacattagtgttgttgtattgtataatatcctctttaaaatataacatatgtcatgttagagtcacagcataatatgaacttgcttaactcagagattgttaaaaatctggtagttattttaataaatatgtttatttattttgtatatcatttattttattattcctttatgttcattattacaggtttgatatatttaatatctgacagcagtataagatacctgggaaaatgatcgaagatcattttcatggcgcccatgatttgttagatttatttatcttgttcgtctttagaaattattcatcttcattcattttcagtacattattcttattttattatttcatcttttagtcatcattactatctatatagagctactgttcttcgacaggcatgcaaacgagccgtatccatccttgagtgtcaagttgctctcttgcatctatagctagccaactctattcagtttgcctctgtctcttcccacttctacttctatcccttctaattcccctttcttcagtactactgcactttagtagtattttttattttcctattgcggcttctcaacgtagaagccacttcaccctttctttacacactccacattctcttcttttcagccacaactatttagttatattttagttaccttagttctttttcttccttacttctgttggagtacctatatctttctttttactttcactccaacagaagttttcttctttttgttacactggcgcccaacgtggggccaaccgttttatggttctaagacagtagttcttttagttcaattttcttttattggaattttctgtattattacctttttgatacctttgtatacatgttacttctgatttatttttggtctttaaaattttattaatactaaacaggtagacttatactgcttttggttttgattagttgatttcgatacctcatttttagttttagtggtac

SEQ ID NO: 2702 - DNA, 1042 bp, Diabrotica virgifera
gtattttcccttagtgaggcttgggcctatttagttgtattattttcatcgttgtcagtttcatttagttgtacgtagcaagcgtactatgaccatttggtagaagactcatgtaagttgtaccctatatgtaagcaagaggtatcaaattttgtaaaaagataacattagtgttgttgtattgtataatatcctctttaaaatataacatatgtcatgttagagtcacagcataatatgaacttgcttaactcagagattgttaaaaatctggtagttattttaataaatatgtttatttattttgtatatcatttattttattattcctttatgttcattattacaggtttgatatatttaatatctgacagcagtataagatacctgggaaaatgatcgaagatcattttcatggcgcccatgatttgttagatttatttatcttgttcgtctttagaaattattcatcttcattcattttcagtacattattcttattttattatttcatcttttagtcatcattactatctatatagagctactgttcttcgacaggcatgcaaacgagccgtatccatccttgagtgtcaagttgctctcttgcatctatagctagccaactctattcagtttgcctctgtctcttcccacttctacttctatcccttctaattcccctttcttcagtactactgcaaagtgtatttttatttttcctacttcggctcaaccgctgaagccccttcattttatttcataagaggccccaactagttaccttagtcttttcttttcttcttttttttccttacttctgttggagtatatctttctttttactttcactccaacagaagttctcttttttgttacacgtcatataataaaatgttaaaaatatcgtttttcttttgtcattttaataaatttctgatatttttaacaactaataccgttttttattattatgtgcggcgttaggtaccgcagtgtgtccactcatgtaactttacgagacgtggctaccggagggtta

SEQ ID NO: 2703 - DNA, 1002 bp, Diabrotica virgifera
gtattttcccttagtgaggcttgggcctatttagttgtattattttcatcgttgtcagtttcatttagttgtacgtagcaagcgtactatgaccatttggtagaagactcatgtaagttgtaccctatatgtaagcaagaggtatcaaattttgtaaaaagataacattagtgttgttgtattgtataatatcctctttaaaatataacatatgtcatgttagagtcacagcataatatgaacttgcttaactcagagattgttaaaaatctggtagttattttaataaatatgtttatttattttgtatatcatttattttattattcctttatgttcattattacaggtttgatatatttaatatctgacagcagtataagatacctgggaaaatgatcgaagatcattttcatggcgcccatgatttgttagatttatttatcttgttcgtctttagaaattattcatcttcattcattttcagtacattattcttattttattatttcatcttttagtcatcattactatctatatagagctactgttcttcgacaggcatgcaaacgagccgtatccatccttgagtgtcaagttgctctcttgcatctatagctagccaactctattcagtttgcctctgtctcttcccacttctacttctatcccttctaattcccctttcttcagtactactgcaaagtgtatttttatttttcctacttcggctcaaccgctgaagccccttcattttatttcataagaggccccaactagttaccttagtcttttcttttcttcttttttttccttacttctgttggagtatatctttctttttactttcactccaacagaagttttcttatttttgtaacactggctgcccaatgcgtggtgccaaccgtttatggttttaagacagtagttcttttagttcattttttattttattggaatttttgtattattaactttttgatatctttgtatacatgt

SEQ ID NO: 2704 - DNA, 1294 bp, Diabrotica virgifera
  SmartBlast Evalue=5E-42; Info=Reverse transcriptase family member n=1 Tax=Glycine max RepID=Q1AKH8_SOYBN
agatttacaagataaagttattttcagaacacaaaggtagattttatgaagtaaaatattataagagatatgtgaagcatatcagtaatttaggtaatttaaagaaaagggtgtaattagaaattcaggacatggaagaacaaagtggtttttgcgccggtagatcgtgcgcagataacaaattcgtgatgcaacaagtaatagagaaaagaaaacaaggaatctgtctactcacctaacatttattgatctggaaaaagcctacgacacggtacttttaaagaaactctttgaaattttgacgacgataggcataagtgaagcatatgtgcgagcaattcaaaatatgtatcaaaacccgaaaagctgtattagacatggaaaatctatgtcgaaaccattccctgttacaaaagggttaaggcaagggtgctgcgtatcgccaacactatttaaaatatacatccagaaagctctggagcaatggaggaaaacagttgctggggtgggaataatgattgacgaaaactgcgtaacaactttcctgtttgctgatgaccaagtaattattgccaacgatgaacatgatatggattatatgctaagaaagttacaggtcgaatatgaaaaatggggactatgtgtgaacatggagaaaacggaatatttgagaataagagaggaaacgaagatccggagttacgagttaagaagtataataaaatgtaaggaatatagatatttaggaagcataatatcataagaagagactacaaaaagagacatgcatcataggatacagcaaggaaggaaagcaactcgtattttaaatggtttactatggtctaacaaggtgaagctgaatacaaaattaacaatctacagaacaattgtggaacctattctaacttatggggcagagtgttggcaactcacaggaaaggaaagaaaaaatatagaaatagcggagatggattacttacgtagagcatgcagggtatctagattagaacacgtaccaaatgaggaaataagacgacggacaaagagtgtatattccacggttgaccgaatagaaacaaagaaattgctatggtatggtcatgttatgagaatgccagagagaagatggccaaaagagcattaagttacacgcctataaatagaagaagaggacggcctacagaaacatggaagaaagttatagaacagtctatgaaagatagagctatagaagagaacgagtgggtggatagaaaacgatggcgagcgaaatgtgagatgcggaggagac

SEQ ID NO: 2705 - DNA, 1261 bp, Diabrotica virgifera
  SmartBlast Evalue=4E-25; Info="Polyprotein, putative n=1 Tax= Solanum demissum RepID=Q6L4B3_SOLDE"
tagataatgttttattgtataaaaataaatatttacagatattttaaatataaaaaagtcatattttcttagatactttcgataaagatagaatacttatataccttgcaatttactgttcattttgaattgttcattttttgcccagttttgtcagaactctttacttgatttgttaaaccgtcagtttttcagttaatcgtcttttatactaagcactgtaggtctttaaacaagatacaataggcattttgaatctagcatcattgtcttctacatgagtaaataaatataaaataattactatatgtttctaagcagaaatatgttactttgaatggtcttccatttccatgaatggaatgatgaacaattgtcttcctggtcatccaaaacatataagtgtaggtataaaagaaagaagaagatacttattaaatacaatgaagtacctacagcatttgagaaatgttgcgcactgtagcaatgttgtaactgcgtaacaactttcctgtttgctgatgaccaagtaattattgccaacgatgaacatgatatggactatacgctaagaaagttacaggtcgaatatgaaaaatggggactatgtgtgaacatggagaaaacggaatatttgagaataagagaggaaacgaagatccggagttacgagttaagaagtataataaaatgtaaggaatatagatatttaggaagcataatatcataagaagagactacaaaaagagacatgcatcataggatacagcaaggaaggaaagcaactcgtattttaaatggtttactatggtctaacaaggtgaagctgaatacaaaattaacaatctacagaacaattgtggaacctattctaacttatggggcagagtgttggcaactcacaggaaaggaaagaaaaaatatagaaatagcggagatggattacttacgtagagcatgcagggtatctagattagaacacgtaccaaatgaggaaataagacgacggacaaagagtgtatattccacggttgaccgaatagaaacaaagaaattgctatggtatggtcatgttatgagaatgccagagagaagatggccaaaagagcattaagttacacgcctataaatagaagaagaggacggcctacagaaacatggaagaaagttatagaacagtctatgaaagatagagctatagaagagaacgagtgggtggatagaaaacgatggcgagcgaaatgtgagatgcggaggagac

SEQ ID NO: 2706 - DNA, 1255 bp, Diabrotica virgifera
  SmartBlast Evalue=1E-41; Info=Endonuclease-reverse transcriptase n=1 Tax=Bombyx mori RepID=D7F176_BOMMO
agatttacaagataaagttattttcagaacacaaaggtagattttatgaagtaaaatattataagagatatgtgaagcatatcagtaatttaggtaatttaaagaaaagggtgtaattagaaattcaggacatggaagaacaaagtggtttttgcgccggtagatcgtgcgcagataacaaattcgtgatgcaacaagtaatagagaaaagaaaacaaggaatctgtctactcacctaacatttattgatctggaaaaagcctacgacacggtacttttaaagaaactctttgaaattttgacgacgataggcataagtgaagcatatgtgcgagcaattcaaaatatgtatcaaaacccgaaaagctgtattagacatggaaaatctatgtcgaaaccattccctgttacaaaagggttaaggcaagggtgctgcgtatcgccaacactatttaaaatatacatccagaaagctctggagcaatggaggaaaacagttgctggggtgggaataatgattgacgaaaactgcgtaacaactttcctgtttgctgatgaccaagtaattattgccaacgatgaacatgatatggattatatgctaagaaagttacaggtcgaatatgaaaaatggggactatgtgtgaacatggagaaaacggaatatttgagaataagagaggaaacgaagatccggagttacgagttaagaagtataataaaatgtaaggaatatagatatttaggaagcataatatcataagaagagactacaaaaagagacatgcatcataggatacagcaaggaaggaaagcaactcgtattttaaatggtttactatggtctaacaaggtgaagctgaatacaaaattaacaatctacagaacaattgtggaacctattctaacttatggggcagagtgttggcaactcacaggaaaggaaagaaaaaatatagaaatagcggagatggattacttacgtagagcatgcagggtatctagattagaacacgtaccaaatgaggaaataagacgacggacaaagagtgtatattccacggttgaccgaatagaaacaaagaaattgctatggtatggtcatgttatgaggatgtcagaggaaagatggccaaaaagagcattaaattacacacccataaatagaagaagaagaggaaggcctacagaaacatggaaggaaggcatagaacagtctatggcagatagggctattgaagaaaacgaatgggcg

SEQ ID NO: 2707 - DNA, 1222 bp, Diabrotica virgifera
  SmartBlast Evalue=5E-26; Info="Polyprotein, putative n=1 Tax= Solanum demissum RepID=Q6L4B3_SOLDE"
tagataatgttttattgtataaaaataaatatttacagatattttaaatataaaaaagtcatattttcttagatactttcgataaagatagaatacttatataccttgcaatttactgttcattttgaattgttcattttttgcccagttttgtcagaactctttacttgatttgttaaaccgtcagtttttcagttaatcgtcttttatactaagcactgtaggtctttaaacaagatacaataggcattttgaatctagcatcattgtcttctacatgagtaaataaatataaaataattactatatgtttctaagcagaaatatgttactttgaatggtcttccatttccatgaatggaatgatgaacaattgtcttcctggtcatccaaaacatataagtgtaggtataaaagaaagaagaagatacttattaaatacaatgaagtacctacagcatttgagaaatgttgcgcactgtagcaatgttgtaactgcgtaacaactttcctgtttgctgatgaccaagtaattattgccaacgatgaacatgatatggactatacgctaagaaagttacaggtcgaatatgaaaaatggggactatgtgtgaacatggagaaaacggaatatttgagaataagagaggaaacgaagatccggagttacgagttaagaagtataataaaatgtaaggaatatagatatttaggaagcataatatcataagaagagactacaaaaagagacatgcatcataggatacagcaaggaaggaaagcaactcgtattttaaatggtttactatggtctaacaaggtgaagctgaatacaaaattaacaatctacagaacaattgtggaacctattctaacttatggggcagagtgttggcaactcacaggaaaggaaagaaaaaatatagaaatagcggagatggattacttacgtagagcatgcagggtatctagattagaacacgtaccaaatgaggaaataagacgacggacaaagagtgtatattccacggttgaccgaatagaaacaaagaaattgctatggtatggtcatgttatgaggatgtcagaggaaagatggccaaaaagagcattaaattacacacccataaatagaagaagaagaggaaggcctacagaaacatggaaggaaggcatagaacagtctatggcagatagggctattgaagaaaacgaatgggcg

SEQ ID NO: 2708 - DNA, 801 bp, Diabrotica virgifera
  SmartBlast Evalue=9E-16; Info="Polyprotein, putative n=1 Tax= Solanum demissum RepID=Q6L4B3_SOLDE"
cgttcttattttactttgtttggccaagatgatgtttgtcttgtctttatacaaaaaaaggaagaatacactactggaacgtgatccgtctccaagtatattcccggataagtcttgatagatgtaagtctggattctgagtcttttacaaatttttctggtaggtctcctctctcgtttctgtaagtccatgtcctccgatatactgtgtcttatcgacatgcttggcattaaaatcgtgcagttttctgtctgattctgttgattatttataaaactcaattttttcttcagcataggatacagcaagggaggaaagcaactcgtattttaaatggtctactatggtctaacaaggtgaatctagacacacaattaacaatctacagaacaataattgtggaacctattataacttatggagcagagtgttggcaactcacaggaaaggaaagaaaaaatatagaaatagcggagatggattacttacgtagagcatgcagggtatctagattagaacacgtaccaaatgaggaaataagacgacggacaaagagtgtatattccacggttgaccgaatagaaacaaagaaattgctatggtatggtcatgttatgagaatgccagagagaagatggccaaaagagcattaagttacacgcctataaatagaagaagaggacggcctacagaaacatggaagaaagttatagaacagtctatgaaagatagagctatagaagagaacgagtgggtggatagaaaacgatggcgagcgaaatgtgagatgcggaggagac

SEQ ID NO: 2709 - DNA, 762 bp, Diabrotica virgifera
  SmartBlast Evalue=2E-16; Info="Polyprotein, putative n=1 Tax= Solanum demissum RepID=Q6L4B3_SOLDE"
cgttcttattttactttgtttggccaagatgatgtttgtcttgtctttatacaaaaaaaggaagaatacactactggaacgtgatccgtctccaagtatattcccggataagtcttgatagatgtaagtctggattctgagtcttttacaaatttttctggtaggtctcctctctcgtttctgtaagtccatgtcctccgatatactgtgtcttatcgacatgcttggcattaaaatcgtgcagttttctgtctgattctgttgattatttataaaactcaattttttcttcagcataggatacagcaagggaggaaagcaactcgtattttaaatggtctactatggtctaacaaggtgaatctagacacacaattaacaatctacagaacaataattgtggaacctattataacttatggagcagagtgttggcaactcacaggaaaggaaagaaaaaatatagaaatagcggagatggattacttacgtagagcatgcagggtatctagattagaacacgtaccaaatgaggaaataagacgacggacaaagagtgtatattccacggttgaccgaatagaaacaaagaaattgctatggtatggtcatgttatgaggatgtcagaggaaagatggccaaaaagagcattaaattacacacccataaatagaagaagaagaggaaggcctacagaaacatggaaggaaggcatagaacagtctatggcagatagggctattgaagaaaacgaatgggcg

SEQ ID NO: 2710 - DNA, 840 bp, Diabrotica virgifera
gactagccgactctttgacatatacttgtatttaaggtaatgttatagtttcatatattatatacccaagctagtgttaatatcttttgatataaaaattacagcattcctattaattaaaaagcttatttacctaaaataatattaaatttttttaaagaaactaaaacttacaagaaataggtagggatattttatttatacataagttgaatacagttacgtgttatgtacaatgattccacataatatgtgtagctttttaggctcctgtaaccacagtaaaacaacgcatactgttgctaccagcaatatcgtattgtttaacgagaaatattcgacctgatttagatgacattgaatcataattaaagtccggattataagcattttgcttttttttgcttatattaggatttttagtaaaaatgcttattttaaagatatgttgcttatctttgtttattttgcttcttatgataaactgtagttaaatttcatgtattacttcctgtcttaagcaaaattctataagtatacagagctataaaaccctaataattcaataaaccataagaattttaatcccttaggcttaggagataaacgggaaaacccatcgttatacctgtccatgtaataaactaatatttgtctgcagaaagcccaaatttattatattgttgtaaaatacttttcggtagtatcggtacatttgtctaaatttaaatacctacgcaccaatcacatctgcagatgttgaaagaactctttctatgtataaataatatgtctacatatagaagtggatagaagtttacaagaaaattttgaaaaaca

SEQ ID NO: 2711 - DNA, 827 bp, Diabrotica virgifera
gactagccgactctttgacatatacttgtatttaaggtaatgttatagtttcatatattatatacccaagctagtgttaatatcttttgatataaaaattacagcattcctattaattaaaaagcttatttacctaaaataatattaaatttttttaaagaaactaaaacttacaagaaataggtagggatattttatttatacataagttgaatacagttacgtgttatgtacaatgattccacataatatgtgtagctttttaggctcctgtaaccacagtaaaacaacgcatactgttgctaccagcaatatcgtattgtttaacgagaaatattcgacctgatttagatgacattgaatcataattaaagtccggattataagcattttgcttttttttgcttatattaggatttttagtaaaaatgcttattttaaagatatgttgcttatctttgtttattttgcttcttatgataaactgtagttaaatttcatgtattacttcctgtcttaagcaaaattctataagtatacagagctataaaaccctaataattcaataaaccataagaattttaatcccttaggcttaggagataaacgggaaaccaccttcgttatacctgcccattacatgtaataaactaatatttttgtctgcagacagcccaaatttattatattgttgtaaaatagtatcggtacatttgtctaaatttatatacgaccaatcacatctgcagatgttgaaataactttttctacgtataaatatatgtatatagatagaagacatagctttttacaagacattttgaaaa

SEQ ID NO: 2712 - DNA, 761 bp, Diabrotica virgifera
tatgattagtaaagttaggtcgggcttaacaacattgatgctatgttggtgtttgtagtttattactaacttcagttattattttaattaacaatattgatttttgtgtgtcaataaaacaagtatgttaagtttttgattttttagcttgccagttaatatactagcttgcttcgatctttaaaccatttttcttaaacctgaaggtacgtatccattacgttggtgcaccgtgctccgtgtaactgctcgaatggatacggcatgcactcctctacattatttataaataaagtccggattataagcattttgcttttttttgcttatattaggatttttagtaaaaatgcttattttaaagatatgttgcttatctttgtttattttgcttcttatgataaactgtagttaaatttcatgtattacttcctgtcttaagcaaaattctataagtatacagagctataaaaccctaataattcaataaaccataagaattttaatcccttaggcttaggagataaacgggaaaacccatcgttatacctgtccatgtaataaactaatatttgtctgcagaaagcccaaatttattatattgttgtaaaatacttttcggtagtatcggtacatttgtctaaatttaaatacctacgcaccaatcacatctgcagatgttgaaagaactctttctatgtataaataatatgtctacatatagaagtggatagaagtttacaagaaaattttgaaaaaca

SEQ ID NO: 2713 - DNA, 748 bp, Diabrotica virgifera
tatgattagtaaagttaggtcgggcttaacaacattgatgctatgttggtgtttgtagtttattactaacttcagttattattttaattaacaatattgatttttgtgtgtcaataaaacaagtatgttaagtttttgattttttagcttgccagttaatatactagcttgcttcgatctttaaaccatttttcttaaacctgaaggtacgtatccattacgttggtgcaccgtgctccgtgtaactgctcgaatggatacggcatgcactcctctacattatttataaataaagtccggattataagcattttgcttttttttgcttatattaggatttttagtaaaaatgcttattttaaagatatgttgcttatctttgtttattttgcttcttatgataaactgtagttaaatttcatgtattacttcctgtcttaagcaaaattctataagtatacagagctataaaaccctaataattcaataaaccataagaattttaatcccttaggcttaggagataaacgggaaaccaccttcgttatacctgcccattacatgtaataaactaatatttttgtctgcagacagcccaaatttattatattgttgtaaaatagtatcggtacatttgtctaaatttatatacgaccaatcacatctgcagatgttgaaataactttttctacgtataaatatatgtatatagatagaagacatagctttttacaagacattttgaaaa

SEQ ID NO: 2714 - DNA, 689 bp, Diabrotica virgifera
gactagccgactctttgacatatacttgtatttaaggtaatgttatagtttcatatattatatacccaagctagtgttaatatcttttgatataaaaattacagcattcctattaattaaaaagcttatttacctaaaataatattaaatttttttaaagaaactaaaacttacaagaaataggtagggatattttatttatacataagttgaatacagttacgtgttatgtacaatgattccacataatatgtgtagctttttaggctcctgtaaccacagtaaaacaacgcatactgttgctaccagcaatatcgtattgtttaacgagaaatattcgacctgatttagatgacattgaatcataattaaagtccggattataagcattttgcttttttttgcttatattaggatttttagtaaaaatgcttattttaaagatatgttgcttatctttgtttattttacttcttatgataaactataaaactgtaataattcaataaactataagaattttaatctcttcggcttaggagataaacgggaaaacccatcgttatacctgtctatgtaataaactactattttgtcttcagacagcccaaatttattatattgttgtaaaatagtatacgtacatttgtctaaatttaaatacgcaccaatcacatctgcagatgttg

SEQ ID NO: 2715 - DNA, 610 bp, Diabrotica virgifera
tatgattagtaaagttaggtcgggcttaacaacattgatgctatgttggtgtttgtagtttattactaacttcagttattattttaattaacaatattgatttttgtgtgtcaataaaacaagtatgttaagtttttgattttttagcttgccagttaatatactagcttgcttcgatctttaaaccatttttcttaaacctgaaggtacgtatccattacgttggtgcaccgtgctccgtgtaactgctcgaatggatacggcatgcactcctctacattatttataaataaagtccggattataagcattttgcttttttttgcttatattaggatttttagtaaaaatgcttattttaaagatatgttgcttatctttgtttattttacttcttatgataaactataaaactgtaataattcaataaactataagaattttaatctcttcggcttaggagataaacgggaaaacccatcgttatacctgtctatgtaataaactactattttgtcttcagacagcccaaatttattatattgttgtaaaatagtatacgtacatttgtctaaatttaaatacgcaccaatcacatctgcagatgttg

SEQ ID NO: 2716 - DNA, 932 bp, Diabrotica virgifera
aacttactttgattttcggtagatggctctagttcatccgtgacatttctttctttgcaattcggaaaggcccaaagtatgatacctggggaaatcggagagaagaggatatgggactactgatgagggggaaaagacctccgaaaccggtatagactcttcctgcactctccgatttaaccagagtattatgcagctgctgcattttcgtgttgcaaagaaattgagaatgtttatacatttttggaaatcggcctgtttcagcgtttgtacaagatccaacgaaaatttccaaatatcagatttggagtattttcagtggccaacaatgtatatctatatgacaagaaattttttagacacttatgatttattttttacttatttatccccagattaacatattccataaaatgtttaatgcaagttttgtttctgcagtaattgcatgtggtttgtaagctgggcaatcgtagtaaatgtttgccatctgccattccagattcgtgtagtttcaggattttcaattttagtaatatctttgagaagcgatcaagataatgtaaagacacacataacgtacgttataatcattcagcatatcaaatacagtttatgaattttttaaataagaacgaacacaacaggaaacttgcatagattaaaattgttgttgtaaaaaatatcgatagttgattgtgatagtattatttatgttttatgtgatatttttgtattcaatttaatttaaatccgaaatgctcattttttgacgtcattggtttatatatgcggcgcctcttcttggttaaccttcggatgaccaagaggggtaaatttggaccccaatgtatgtttttatttaataaattcagaaatattttcaattttaaactcattatttttttttatttgactttaatatcattcta

SEQ ID NO: 2717 - DNA, 856 bp, Diabrotica virgifera
gtgtggtacgtggaagaatctgagagaggaggatatgggactactgatgagggggaaacaacccccgaaaccggtatagactcttcctgcactctcagatttgaccagagtattatgcagctgctgcattttcgtgttgcaaagaaattgagaatgtttatacatttttggaaatcggcctgtttcagcgtttgtacaagatccaacgaaaatttccaaatatcagatttggagtattttcagtggccaacaatgtatatctatatgacaagaaattttttagacacttatgatttattttttacttatttatccccagattaacatattccataaaatgtttaatgcaagttttgtttctgcagtaattgcatgtggtttgtaagctgggcaatcgtagtaaatgtttgccatctgccattccagattcgtgtagtttcaggattttcaattttagtaatatctttgagaagcgatcaagataatgtaaagacacacataacgtacgttataatcattcagcatatcaaatacagtttatgaattttttaaataagaacgaacacaacaggaaacttgcatagattaaaattgttgttgtaaaaaatatcgatagttgattgtgatagtattatttatgttttatgtgatatttttgtattcaatttaatttaaatccgaaatgctcattttttgacgtcattggtttatatatgcggcgcctcttcttggttaaccttcggatgaccaagaggggtaaatttggaccccaatgtatgtttttatttaataaattcagaaatattttcaattttaaactcattatttttttttatttgactttaatatcattcta

SEQ ID NO: 2718 - DNA, 660 bp, Diabrotica virgifera
aacttactttgattttcggtagatggctctagttcatccgtgacatttctttctttgcaattcggaaaggcccaaagtatgatacctggggaaatcggagagaagaggatatgggactactgatgagggggaaaagacctccgaaaccggtatagactcttcctgcactctccgatttaaccagagtattatgcagctgctgcattttcgtgttgcaaagaaattgagaatgtttatacatttttaaaatatattttacttaaaactataaatttaagctaattttacttaactagaaattttacttaacgatttaagttatctgagaattcttactagtagaaatgggatgtaaatgtaaataagacactactacaatagtcttatgtgagataccgttttatgttgaaaatgtttgaacatttttagagtccatgttagacaaaactgtaatcttctcccttttttacttgcaattcgtcaactaccgcctctgagttgctcaacagcttgtaacttaattgtttttcaatggtaaattttaatacgccccatagttgagatacttctttcggctgaagctgaacttactggcattactcgaacaactgaaactatctccttcagttctgtatatgacataagaatcacaaatgtctg

SEQ ID NO: 2719 - DNA, 578 bp, Diabrotica virgifera
aacttactttgattttcggtagatggctctagttcatccgtgacatttctttctttgcaattcggaaaggcccaaagtatgatacctggggaaatcggagagaagaggatatgggactactgatgagggggaaaagacctccgaaaccggtatagactcttcctgcactctccgatttaaccagagtattatgcagctgctgcattttcgtgttgcaaagaaattgaaaatttttatacatttttaaaagatttaaactaggaggagtaaacttaaaagacagattcacgccaaataatgttaccagagaaatcaccagattcatattttttggttgaccatgtcgaccttcgatggtaatccagtaatatcggacaatttataagactactaacagttggctaaagagttctaaagacaacattttttttatataaatgcagactaaaaatctaaaggatatacttaatcttattggaggccgaaattagacaaaagaagtagaggaagaccacctactcgttgggctgacgatctcaagaaaatgtcaagaaattggaaagtgctcaaaatagagc

SEQ ID NO: 2720 - DNA, 584 bp, Diabrotica virgifera
gtgtggtacgtggaagaatctgagagaggaggatatgggactactgatgagggggaaacaacccccgaaaccggtatagactcttcctgcactctcagatttgaccagagtattatgcagctgctgcattttcgtgttgcaaagaaattgagaatgtttatacatttttaaaatatattttacttaaaactataaatttaagctaattttacttaactagaaattttacttaacgatttaagttatctgagaattcttactagtagaaatgggatgtaaatgtaaataagacactactacaatagtcttatgtgagataccgttttatgttgaaaatgtttgaacatttttagagtccatgttagacaaaactgtaatcttctcccttttttacttgcaattcgtcaactaccgcctctgagttgctcaacagcttgtaacttaattgtttttcaatggtaaattttaatacgccccatagttgagatacttctttcggctgaagctgaacttactggcattactcgaacaactgaaactatctccttcagttctgtatatgacataagaatcacaaatgtctg

SEQ ID NO: 2721 - DNA, 502 bp, Diabrotica virgifera
gtgtggtacgtggaagaatctgagagaggaggatatgggactactgatgagggggaaacaacccccgaaaccggtatagactcttcctgcactctcagatttgaccagagtattatgcagctgctgcattttcgtgttgcaaagaaattgaaaatttttatacatttttaaaagatttaaactaggaggagtaaacttaaaagacagattcacgccaaataatgttaccagagaaatcaccagattcatattttttggttgaccatgtcgaccttcgatggtaatccagtaatatcggacaatttataagactactaacagttggctaaagagttctaaagacaacattttttttatataaatgcagactaaaaatctaaaggatatacttaatcttattggaggccgaaattagacaaaagaagtagaggaagaccacctactcgttgggctgacgatctcaagaaaatgtcaagaaattggaaagtgctcaaaatagagc

SEQ ID NO: 2722 - DNA, 750 bp, Diabrotica virgifera
gaaaatctaaattgcatttcacgtcctgtcattcaaccgtgataataattttagcgaactattttctttaatatccaccaaaggtgaataaagtatgaactaaaagaaaacattgttcagatttgattacagtacagagcctctactatgggccattccacgaacatacgcctgttttggatgcattcgacaacgaatattttactgtgcaacataagaagtacgaaagtaaatggcgctaataattattccaataaacaacaatgtaatttgcaatttactttcgttcttcttattttgcacagtggaatattcgttgtcgaagtgatccaagaacaggcgtatgttcgtggaataaggtatatctcttcatcacactcgcaatttgcatttaaccaactgccaaggtatttaaaatggtttacccgttctatctcctctccatcaacggaaagtaccccaagtagcaccgaacgggtttattaagtcttttaaggatgccttaaaactgtagaataaaactaaaattaaaaccatttgatttttaagtaaaccttaaggttgcaataaaaccgctttcagcataaaaggacccgctctgaaagaggtcagtaaaaccaaaaataaaaaccttcttaaaactttgttttcttaagcaactggtttttaaggtgcttttaaaaccatgttaaaagacactttaagtgcaggcagttttatagcaaacttaaaaaggttatggagactttt

SEQ ID NO: 2723 - DNA, 705 bp, Diabrotica virgifera
atatataacacattatagtataaatatccatgactacaaaattatttgttttttgaacgtctgcactcaacttaccgtgtaccggtagctttatagcctattatgggccattccacgaacatacgcctgtcctggatcacctcgacaacgaacattccactgttcaacataagaagtacgaaagtaaatggcgctaataattattccaataaacaacaatgtaatttgcaatttactttcgttcttcttattttgcacagtggaatattcgttgtcgaagtgatccaagaacaggcgtatgttcgtggaataaggtatatctcttcatcacactcgcaatttgcatttaaccaactgccaaggtatttaaaatggtttacccgttctatctcctctccatcaacggaaagtaccccaagtagcaccgaacgggtttattaagtcttttaaggatgccttaaaactgtagaataaaactaaaattaaaaccatttgatttttaagtaaaccttaaggttgcaataaaaccgctttcagcataaaaggacccgctctgaaagaggtcagtaaaaccaaaaataaaaaccttcttaaaactttgttttcttaagcaactggtttttaaggtgcttttaaaaccatgttaaaagacactttaagtgcaggcagttttatagcaaacttaaaaaggttatggagactttt

SEQ ID NO: 2724 - DNA, 532 bp, Diabrotica virgifera
gaaaatctaaattgcatttcacgtcctgtcattcaaccgtgataataattttagcgaactattttctttaatatccaccaaaggtgaataaagtatgaactaaaagaaaacattgttcagatttgattacagtacagagcctctactatgggccattccacgaacatacgcctgttttggatgcattcgacaacgaatattttactgtgcaacataagaagtacgaaagtaaatggcgctaataattattccaataaacaacaatgtaatttgcaatttactttcgttcttcttattttgcacagtggaatattcgttgtcgaagtgatccaagaacaggcgtatgttcgtggaatagggtatacgtacaatcgtccaaaaatatttcatgttcagtaccagatgtagaatagtctataatagtacaagtacaagatcatttttcaatctatatggtttttgatcaaaagatattacttttaaaatatactcaaaactactttaaaatgcgtaaatcttctatatattattt

SEQ ID NO: 2725 - DNA, 487 bp, Diabrotica virgifera
atatataacacattatagtataaatatccatgactacaaaattatttgttttttgaacgtctgcactcaacttaccgtgtaccggtagctttatagcctattatgggccattccacgaacatacgcctgtcctggatcacctcgacaacgaacattccactgttcaacataagaagtacgaaagtaaatggcgctaataattattccaataaacaacaatgtaatttgcaatttactttcgttcttcttattttgcacagtggaatattcgttgtcgaagtgatccaagaacaggcgtatgttcgtggaatagggtatacgtacaatcgtccaaaaatatttcatgttcagtaccagatgtagaatagtctataatagtacaagtacaagatcatttttcaatctatatggtttttgatcaaaagatattacttttaaaatatactcaaaactactttaaaatgcgtaaatcttctatatattattt

SEQ ID NO: 2726 - DNA, 398 bp, Diabrotica virgifera
gaaaatctaaattgcatttcacgtcctgtcattcaaccgtgataataattttagcgaactattttctttaatatccaccaaaggtgaataaagtatgaactaaaagaaaacattgttcagatttgattacagtacagagcctctactatgggccattccacgaacatacgcctgttttggatgcattcgacaacgaatattttactgtgcaacataagaagtacgaaagtaaatggcgctaataattattccaataaacaacaatgtaatttgcaatttactttcgttcttcttattttgcacagtaaaacattcgttgtcgaagcaatccaaaacaggcgcatgttcgtggaatagggtatacagtgttttatgtttttgcgatttcccgaatacta

SEQ ID NO: 2727 - DNA, 353 bp, Diabrotica virgifera
atatataacacattatagtataaatatccatgactacaaaattatttgttttttgaacgtctgcactcaacttaccgtgtaccggtagctttatagcctattatgggccattccacgaacatacgcctgtcctggatcacctcgacaacgaacattccactgttcaacataagaagtacgaaagtaaatggcgctaataattattccaataaacaacaatgtaatttgcaatttactttcgttcttcttattttgcacagtaaaacattcgttgtcgaagcaatccaaaacaggcgcatgttcgtggaatagggtatacagtgttttatgtttttgcgatttcccgaatacta

SEQ ID NO: 2728 - DNA, 364 bp, Diabrotica virgifera
cctgccagaacttagccttcttagaaggggattcgttaaggcttatcatctccaaatgttccttgaaagacatggtgttagttgttggatgttaactttctttctagattcggtctttttcggtcgttcgtcccgttcacattgataaaaatgttgtgctccaattagaattttgggggttaattttcggttagtgataaatatatcttgcctctcgttttagctgataacagccaagtaaatgcaaacgaaaataattcccagaaaatacacgataaatgttgatatttctgagactggtatcatggccatcacatcggattggatcggtttcgtactaatttgggtcggtggatttttcaac

SEQ ID NO: 2729 - DNA, 4771 bp, Diabrotica virgifera
  SmartBlast Evalue=0; Info="Sushi domain containing protein, putative n=1 Tax=Pediculus humanus corporis RepID=E0VDP6_PEDHC"
gtgctaccacgtttaaataaggagttagaaattatgaacagtataaaaactagaaaactggaatatttggatcacataactagaggagaacaatatgagttgctgagaattattatgcaaggaaggatccaaggaagaagacgcatctcctggctaaagaaccttagataatggtttaactgtagtttattacaactattcagagcagcagccaacatagtgaccaaacccattatgatatccaacctctgatagaagatggaactttaagaagaagggccggttgccctcaacgttgagctgaatcttaccaacaagaagttgatggatcaacaaactgttgtttactaaatatacgagtaggcacctacctatggatgccaccagtagatcttgatgttaatgtaaacttgagaagggtgatatggttacttaatagtattctaatttagataataactgcagaacatagctttctactgggttttatgaaattcgttaatttattttaactttgtgctttcgtatcttcctatttactcttttaattgggaaaaagatatgtgggtcttgcaggattagataggtatacaattcaatgaaaaagtatcttaaataatgttgaatttactataagaatcggattacgttgtggttaaaaaggctatatctgaaactctacactttgcatgaaatataatctaaatcacactctgcatgaaatataatctgaaatacaataaaaaataaaagtcctattaaatattaactacaacataatatagtacttattttatataatagttttgacaaagattaaactttaaaatattacaattcataggttgaatcattatattctataggtgttagtatacggttgtttcttttgctcccgtgcttgtaacattactgtcttcatcttctgaagcatattcagcttctgttaatttcttagtagctgcttcttgggctctcctttgtgattccatgaactgttgctcttgtaatttttcagattctttttctttctgccttctttgtaagaaacgatacgccaggtagacgaaaagcaagatgagcgggataagaatagccataattatcccggaagccaaaccagcttgtcgttgagagtattcctgctgacgtaagcaatatgtgtatccgtattcaggaatattccatgttccatccgcttgacactctctccgctgatcacctaccaacacgaactcttggatgcattcataggtaaccttcgtaccgggcacgaacaggaaagtactctttcgtccgaatctcggtgtttctagtactccgcaagacacaactttcctccttgtcgtttctttatattgatagatcgtggctttataattcttggtgtaatgcgccaaatccctgtcaaccgtcatagcgtaatcgtagtaacattcgtacaactttagaggacatatttcggatattcgcttaagatctgtagatctgttggttggtaggaaatcttccggattcattaggaattgaggcttgaacgttttgttgttgtaagtcgctgaagttcttccgaattccctgtggaacaatgctctacccttttgaggatctaacacatcctccaacatccatttggaaccaaaatcattgtaaaccctttccatgtcatttatgttattcactattgctgctctagaaccatctggaagtgtgaagtcatcttctttgttaaaactccaatttccaaaaaggcctatggttttatttataaacgaccaaggcaaaaatactcttgcactcatgaatccttgattgtcgacaacctccattccagctccattgtcaaacataatgatgacttctgattgattaaggatgtagcttggagtgtaaatagtaacaccttggaagtgctggaattttagtgagggtctatcaaaataaagtcttctattatctgctataacatccaacctatatctccatctagaatccagaggtctccttctgacttcaattgctattgtgttattacctttagctactacagaagtcagctgagtagctctaacctcaccataagtgttagggtccatttgctcaaatcttccttggatttccagattgtccgtttgcgtaactgatttcaccaatgcgaattctccctttccattaaacgtatattctacatcgtcgaaagtaacaaagtgtggatcaccgtagactcctgctacacctggtgcttggtaagctacacaatcctgtgtaggtctccgttcaaatctcagtgtttcacatcccacagcttgctcgtcttgccaaagacaacacaaatatttgggtaccatgtcattaaaccattgtgagagagtaggcacttttgtcgcttcattgtaaggcattttacccaagttgtggcaacgtctcggactagaaccccattgctgatcgtaagagagcatcaaaaagccgtttttatcatagcaacattgttgttcggagccttctaacgtgggagatccagttttcacacaatgaagtgcttggttgttatagtaacaaatcgggttcgaatctttgtcgcaatcgaagtctggcataaacctgcccttgtcagctaaagcctgttcgacggtgcagggacattgagcaagttcgtgggcgaagttttttagatatctgtccgttctcagccaatcgtcacatagatatttgggccaatttttaccgtactggttttcccattggaactggaagtaccaaccgagtggaatgggtcggctccatattaccggtgttaattctatgctgctctggcttgtagtatatgtattaactgtgatagactcagttaaattaatttggaggaatccaaacttaatatcagtcagatattgattgactctagttctaaactgagaaggaacaatcgtgtgttctccaatgttttgaacattatcagcgatatcggtgatataaacaaacactggtttcatagtcgtttctctgtaaccccagagagaaattcggatgttagcgttgtcgtttgtggtcaaattctgcttctcccaagtgatttttaattcgctcggagatttttcgtgtaatttcatgtccttaaagaagattttttgagtcgcactagcaggtgattctacataatacttccccttccacttgaatgcttcggaattaacagcaatttgaagattcacccatccttcggcataaagttgaggttgtacacagatagctctgtttttatcaacaacatacccaaatacttcatttgatacgtcaaacttgcatcgaatcctatcattcaaattgaagcatggaccagttatatttaccactgttccacccaacatgttaccactttcaggagcgaatttcaggggaaggttggcaccatctatatctttgttgcacgatccaagcaaaatgtcttcgtctatacggaaaatatgtcttcccttaaaaccatttccaaatccaactgatgtgagatctcgaatgacggaagcttgactgtaaggattgtattcgtagcttctggtaccgtttccagcgttaaaaccaacataggcactgacaccaccttctccgttttgggaatcaccacccgcttcagtgtgggaggtccagtccaagttgaggtagttgaacatcgcgtaagtgaagacttcgtcagttgcaagaaccatttggaaggtgtttgtcttgtatttagcattagcgaatcctccagtgaaagtaacatttttccaagtgacaataacggcgtgcttaggatcgaatgtttctgatccaatgactcctgttctgatgtcccacttaagtctttctctaatttctacacccattctgtcttgcctcgttcttaaatctctttccattctaaaatagaccccgggtgttctttgatcaatgtctccatcacgtagattaccgattctgcatctgctgaagaaaatgccaataaaggcaggatcattctttttgggccattctttaattggaaatactaatggatagtcataatttggaggtggatcgctgaattccagatacccattcactgaaactcttgtgtaattatacctgaatccaaagaaaggcaactggaagtttaaattcttgtgcacctgaggaatggaagattgaatgtccttttggaaatctcccaagttattatcactgcctcctttatcgaaaaatgggtacataaaatgtttccttatttctgccagtctcggttctgatatagtgtatggagttcctcctcctcctcgttggtcagtgtctggtggagctgtgtctgaggtcataggatcgtaatctgcagcataaaatgtcgaatatttgcccattttattaactgtctgataagtccgtctgggatttttagtcacatttaccaaactattggttacattaactaaggatttatctacttcatagtttgtattcactggagggactccattaggcgtatcttccaccggaataggtttccctgcgtctggatccgcgttacttacattcgtagtctccacatcgatagtttcgacatctggtggaagatcaccatctagtcctttaacgctaacactaaacaaaacaaaaataacaaagtacttgaaccacattttggttatttggcactacaacctggcgcacatcacatcaaaaaaagttgctacggttagtaaagttcgtactcgagtgtttgcaagaatcgctagaacgagataatgctcttatcttt

SEQ ID NO: 2730 - DNA, 4648 bp, Diabrotica virgifera
  SmartBlast Evalue=0; Info="Sushi domain containing protein, putative n=1 Tax=Pediculus humanus corporis RepID=E0VDP6_PEDHC"
gtgctaccacgtttaaataaggagttagaaattatgaacagtataaaaactagaaaactggaatatttggatcacataactagaggagaacaatatgagttgctgagaattattatgcaaggaaggatccaaggaagaagacgcatctcctggctaaagaaccttagataatggtttaactgtagtttattacaactattcagagcagcagccaacatagtgaccaaacccattatgatatccaacctctgatagaagatggaactttaagaagaagggccggttgccctcaacgttgagctgaatcttaccaacaagaagttgatggatcaacaaactgttgtttactaaatatacgagtaggcacctacctatggatgccaccagtagatcttgatgttaatgtaaacttgagaagggtgatatggttacttaatagtattctaatttagataataactgcagaacatagctttctactgggttttatgaaattcgttaatttattttaactttgtgctttcgtatcttcctatttactcttttaattgggaaaaagatatgtgggtcttgcaggattagataggtatacaattcaatgaaaaagtatcttaaataatgttgaatttactataagaatcggattacgttgtggttaaaaaggctatatctgaaactctacactttgcatgaaatataatctaaatcacactctgcatgaaatataatctgaaatacaataaaaaataaaagtcctattaaatattaactacaacataatatagtacttattttatataatagttttgacaaagattaaactttaaaatattacaattcataggttgaatcattatattctataggtgttagtatacggttgtttcttttgctcccgtgcttgtaacattactgtcttcatcttctgaagcatattcagcttctgttaatttcttagtagctgcttcttgggctctcctttgtgattccatgaactgttgctcttgtaatttttcagattctttttctttctgccttctttgtaagaaacgatacgccaggtagacgaaaagcaagatgagcgggataagaatagccataattatcccggaagccaaaccagcttgtcgttgagagtattcctgctgacgtaagcaatatgtgtatccgtattcaggaatattccatgttccatccgcttgacactctctccgctgatcacctaccaacacgaactcttggatgcattcataggtaaccttcgtaccgggcacgaacaggaaagtactctttcgtccgaatctcggtgtttctagtactccgcaagacacaactttcctccttgtcgtttctttatattgatagatcgtggctttataattcttggtgtaatgcgccaaatccctgtcaaccgtcatagcgtaatcgtagtaacattcgtacaactttagaggacatatttcggatattcgcttaagatctgtagatctgttggttggtaggaaatcttccggattcattaggaattgaggcttgaacgttttgttgttgtaagtcgctgaagttcttccgaattccctgtggaacaatgctctacccttttgaggatctaacacatcctccaacatccatttggaaccaaaatcattgtaaaccctttccatgtcatttatgttattcactattgctgctctagaaccatctggaagtgtgaagtcatcttctttgttaaaactccaatttccaaaaaggcctatggttttatttataaacgaccaaggcaaaaatactcttgcactcatgaatccttgattgtcgacaacctccattccagctccattgtcaaacataatgatgacttctgattgattaaggatgtagcttggagtgtaaatagtaacaccttggaagtgctggaattttagtgagggtctatcaaaataaagtcttctattatctgctataacatccaacctatatctccatctagaatccagaggtctccttctgacttcaattgctattgtgttattacctttagctactacagaagtcagctgagtagctctaacctcaccataagtgttagggtccatttgctcaaatcttccttggatttccagattgtccgtttgcgtaactgatttcaccaatgcgaattctccctttccattaaacgtatattctacatcgtcgaaagtaacaaagtgtggatcaccgtagactcctgctacacctggtgcttggtaagctacacaatcctgtgtaggtctccgttcaaatctcagtgtttcacatcccacagcttgctcgtcttgccaaagacaacacaaatatttgggtaccatgtcattaaaccattgtgagagagtaggcacttttgtcgcttcattgtaaggcattttacccaagttgtggcaacgtctcggactagaaccccattgctgatcgtaagagagcatcaaaaagccgtttttatcatagcaacattgttgttcggagccttctaacgtgggagatccagttttcacacaatgaagtgcttggttgttatagtaacaaatcgggttcgaatctttgtcgcaatcgaagtctggcataaacctgcccttgtcagctaaagcctgttcgacggtgcagggacattgagcaagttcgtgggcgaagttttttagatatctgtccgttctcagccaatcgtcacatagatatttgggccaatttttaccgtactggttttcccattggaactggaagtaccaaccgagtggaatgggtcggctccatattaccggtgttaattctatgctgctctggcttgtagtatatgtattaactgtgatagactcagttaaattaatttggaggaatccaaacttaatatcagtcagatattgattgactctagttctaaactgagaaggaacaatcgtgtgttctccaatgttttgaacattatcagcgatatcggtgatataaacaaacactggtttcatagtcgtttctctgtaaccccagagagaaattcggatgttagcgttgtcgtttgtggtcaaattctgcttctcccaagtgatttttaattcgctcggagatttttcgtgtaatttcatgtccttaaagaagattttttgagtcgcactagcaggtgattctacataatacttccccttccacttgaatgcttcggaattaacagcaatttgaagattcacccatccttcggcataaagttgaggttgtacacagatagctctgtttttatcaacaacatacccaaatacttcatttgatacgtcaaacttgcatcgaatcctatcattcaaattgaagcatggaccagttatatttaccactgttccacccaacatgttaccactttcaggagcgaatttcaggggaaggttggcaccatctatatctttgttgcacgatccaagcaaaatgtcttcgtctatacggaaaatatgtcttcccttaaaaccatttccaaatccaactgatgtgagatctcgaatgacggaagcttgactgtaaggattgtattcgtagcttctggtaccgtttccagcgttaaaaccaacataggcactgacaccaccttctccgttttgggaatcaccacccgcttcagtgtgggaggtccagtccaagttgaggtagttgaacatcgcgtaagtgaagacttcgtcagttgcaagaaccatttggaaggtgtttgtcttgtatttagcattagcgaatcctccagtgaaagtaacatttttccaagtgacaataacggcgtgcttaggatcgaatgtttctgatccaatgactcctgttctgatgtcccacttaagtctttctctaatttctacacccattctgtcttgcctcgttcttaaatctctttccattctaaaatagaccccgggtgttctttgatcaatgtctccatcacgtagattaccgattctgcatctgctgaagaaaatgccaataaaggcaggatcattctttttgggccattctttaattggaaatactaatggatagtcataatttggaggtggatcgctgaattccagatacccattcactgaaactcttgtgtaattatacctgaatccaaagaaaggcaactggaagtttaaattcttgtgcacctgaggaatggaagattgaatgtccttttggaaatctcccaagttattatcactgcctcctttatcgaaaaatgggtacataaaatgtttccttatttctgccagtctcggttctgatatagtgtatggagttcctcctcctcctcgttggtcagtgtctggtggagctgtgtctgaggtcataggatcatagtttgtattcactggagggactccattaggcgtatcttccaccggaataggtttccctgcgtctggatccgcgttacttacattcgtagtctccacatcgatagtttcgacatctggtggaagatcaccatctagtcctttaacgctaacactaaacaaaacaaaaataacaaagtacttgaaccacattttggttatttggcactacaacctggcgcacatcacatcaaaaaaagttgctacggttagtaaagttcgtactcgagtgtttgcaagaatcgctagaacgagataatgctcttatcttt

SEQ ID NO: 2731 - DNA, 4498 bp, Diabrotica virgifera
  SmartBlast Evalue=0; Info="Sushi domain containing protein, putative n=1 Tax=Pediculus humanus corporis RepID=E0VDP6_PEDHC"
atttgtaaatactttatttttatttaacaatacttaaacattttaattttgcttataattccacaaattaacaaaacaatcactccacatgctagagatagccagtatagatataaatgtaatatatgcttacaaaagtaaaaaataattgaacaaaacataaatttttgactgaagaatgtttctaggtacagcggcacaaatacttaaaatacctaaaggcttcggatagtaaaataatgaaaatttattataaattaaatgatactctataaactactgaagtccatttctactctaattatattctaaacgtctgtcactatactactctgactagcgctaatcctttctttaggtttctttattggctctgcatacatgtcgttatagttcaaattctttgagctgttccctctaataatgtctggccgactataaggcgttgtatattgtatactagaagtagggctggttggacttcccgtaggcgttctagaaaccctgtcgtcttcgaaggtttgatcgtaagggtccaatggtttttcctcaaactcagaatttggtctattgggcaaaggttcgtgagttctgtaggatttgtcgtaacttcttcgtttcttgcttagtgagtcagtgtcgctttgaggatacttttcgtcctcgtcttcttctctgtatggacttaaagttcgactgaattgttggagattttgagtcttttgtacggtgtcgtagtcatagttttgattgttacttgttagtctttcgtatattttgtagccaacgtaacctaatagaagaaccaatggtatgataattgcgaggattatacctgaagtgatggcagcttgacgcgaagaatattcttcttgacgtaagcaatatgtgtatccgtattcaggaatattccatgttccatccgcttgacactctctccgctgatcacctaccaacacgaactcttggatgcattcataggtaaccttcgtaccgggcacgaacaggaaagtactctttcgtccgaatctcggtgtttctagtactccgcaagacacaactttcctccttgtcgtttctttatattgatagatcgtggctttataattcttggtgtaatgcgccaaatccctgtcaaccgtcatagcgtaatcgtagtaacattcgtacaactttagaggacatatttcggatattcgcttaagatctgtagatctgttggttggtaggaaatcttccggattcattaggaattgaggcttgaacgttttgttgttgtaagtcgctgaagttcttccgaattccctgtggaacaatgctctacccttttgaggatctaacacatcctccaacatccatttggaaccaaaatcattgtaaaccctttccatgtcatttatgttattcactattgctgctctagaaccatctggaagtgtgaagtcatcttctttgttaaaactccaatttccaaaaaggcctatggttttatttataaacgaccaaggcaaaaatactcttgcactcatgaatccttgattgtcgacaacctccattccagctccattgtcaaacataatgatgacttctgattgattaaggatgtagcttggagtgtaaatagtaacaccttggaagtgctggaattttagtgagggtctatcaaaataaagtcttctattatctgctataacatccaacctatatctccatctagaatccagaggtctccttctgacttcaattgctattgtgttattacctttagctactacagaagtcagctgagtagctctaacctcaccataagtgttagggtccatttgctcaaatcttccttggatttccagattgtccgtttgcgtaactgatttcaccaatgcgaattctccctttccattaaacgtatattctacatcgtcgaaagtaacaaagtgtggatcaccgtagactcctgctacacctggtgcttggtaagctacacaatcctgtgtaggtctccgttcaaatctcagtgtttcacatcccacagcttgctcgtcttgccaaagacaacacaaatatttgggtaccatgtcattaaaccattgtgagagagtaggcacttttgtcgcttcattgtaaggcattttacccaagttgtggcaacgtctcggactagaaccccattgctgatcgtaagagagcatcaaaaagccgtttttatcatagcaacattgttgttcggagccttctaacgtgggagatccagttttcacacaatgaagtgcttggttgttatagtaacaaatcgggttcgaatctttgtcgcaatcgaagtctggcataaacctgcccttgtcagctaaagcctgttcgacggtgcagggacattgagcaagttcgtgggcgaagttttttagatatctgtccgttctcagccaatcgtcacatagatatttgggccaatttttaccgtactggttttcccattggaactggaagtaccaaccgagtggaatgggtcggctccatattaccggtgttaattctatgctgctctggcttgtagtatatgtattaactgtgatagactcagttaaattaatttggaggaatccaaacttaatatcagtcagatattgattgactctagttctaaactgagaaggaacaatcgtgtgttctccaatgttttgaacattatcagcgatatcggtgatataaacaaacactggtttcatagtcgtttctctgtaaccccagagagaaattcggatgttagcgttgtcgtttgtggtcaaattctgcttctcccaagtgatttttaattcgctcggagatttttcgtgtaatttcatgtccttaaagaagattttttgagtcgcactagcaggtgattctacataatacttccccttccacttgaatgcttcggaattaacagcaatttgaagattcacccatccttcggcataaagttgaggttgtacacagatagctctgtttttatcaacaacatacccaaatacttcatttgatacgtcaaacttgcatcgaatcctatcattcaaattgaagcatggaccagttatatttaccactgttccacccaacatgttaccactttcaggagcgaatttcaggggaaggttggcaccatctatatctttgttgcacgatccaagcaaaatgtcttcgtctatacggaaaatatgtcttcccttaaaaccatttccaaatccaactgatgtgagatctcgaatgacggaagcttgactgtaaggattgtattcgtagcttctggtaccgtttccagcgttaaaaccaacataggcactgacaccaccttctccgttttgggaatcaccacccgcttcagtgtgggaggtccagtccaagttgaggtagttgaacatcgcgtaagtgaagacttcgtcagttgcaagaaccatttggaaggtgtttgtcttgtatttagcattagcgaatcctccagtgaaagtaacatttttccaagtgacaataacggcgtgcttaggatcgaatgtttctgatccaatgactcctgttctgatgtcccacttaagtctttctctaatttctacacccattctgtcttgcctcgttcttaaatctctttccattctaaaatagaccccgggtgttctttgatcaatgtctccatcacgtagattaccgattctgcatctgctgaagaaaatgccaataaaggcaggatcattctttttgggccattctttaattggaaatactaatggatagtcataatttggaggtggatcgctgaattccagatacccattcactgaaactcttgtgtaattatacctgaatccaaagaaaggcaactggaagtttaaattcttgtgcacctgaggaatggaagattgaatgtccttttggaaatctcccaagttattatcactgcctcctttatcgaaaaatgggtacataaaatgtttccttatttctgccagtctcggttctgatatagtgtatggagttcctcctcctcctcgttggtcagtgtctggtggagctgtgtctgaggtcataggatcgtaatctgcagcataaaatgtcgaatatttgcccattttattaactgtctgataagtccgtctgggatttttagtcacatttaccaaactattggttacattaactaaggatttatctacttcatagtttgtattcactggagggactccattaggcgtatcttccaccggaataggtttccctgcgtctggatccgcgttacttacattcgtagtctccacatcgatagtttcgacatctggtggaagatcaccatctagtcctttaacgctaacactaaacaaaacaaaaataacaaagtacttgaaccacattttggttatttggcactacaacctggcgcacatcacatcaaaaaaagttgctacggttagtaaagttcgtactcgagtgtttgcaagaatcgctagaacgagataatgctcttatcttt

SEQ ID NO: 2732 - DNA, 4375 bp, Diabrotica virgifera
  SmartBlast Evalue=0; Info="Sushi domain containing protein, putative n=1 Tax=Pediculus humanus corporis RepID=E0VDP6_PEDHC"
atttgtaaatactttatttttatttaacaatacttaaacattttaattttgcttataattccacaaattaacaaaacaatcactccacatgctagagatagccagtatagatataaatgtaatatatgcttacaaaagtaaaaaataattgaacaaaacataaatttttgactgaagaatgtttctaggtacagcggcacaaatacttaaaatacctaaaggcttcggatagtaaaataatgaaaatttattataaattaaatgatactctataaactactgaagtccatttctactctaattatattctaaacgtctgtcactatactactctgactagcgctaatcctttctttaggtttctttattggctctgcatacatgtcgttatagttcaaattctttgagctgttccctctaataatgtctggccgactataaggcgttgtatattgtatactagaagtagggctggttggacttcccgtaggcgttctagaaaccctgtcgtcttcgaaggtttgatcgtaagggtccaatggtttttcctcaaactcagaatttggtctattgggcaaaggttcgtgagttctgtaggatttgtcgtaacttcttcgtttcttgcttagtgagtcagtgtcgctttgaggatacttttcgtcctcgtcttcttctctgtatggacttaaagttcgactgaattgttggagattttgagtcttttgtacggtgtcgtagtcatagttttgattgttacttgttagtctttcgtatattttgtagccaacgtaacctaatagaagaaccaatggtatgataattgcgaggattatacctgaagtgatggcagcttgacgcgaagaatattcttcttgacgtaagcaatatgtgtatccgtattcaggaatattccatgttccatccgcttgacactctctccgctgatcacctaccaacacgaactcttggatgcattcataggtaaccttcgtaccgggcacgaacaggaaagtactctttcgtccgaatctcggtgtttctagtactccgcaagacacaactttcctccttgtcgtttctttatattgatagatcgtggctttataattcttggtgtaatgcgccaaatccctgtcaaccgtcatagcgtaatcgtagtaacattcgtacaactttagaggacatatttcggatattcgcttaagatctgtagatctgttggttggtaggaaatcttccggattcattaggaattgaggcttgaacgttttgttgttgtaagtcgctgaagttcttccgaattccctgtggaacaatgctctacccttttgaggatctaacacatcctccaacatccatttggaaccaaaatcattgtaaaccctttccatgtcatttatgttattcactattgctgctctagaaccatctggaagtgtgaagtcatcttctttgttaaaactccaatttccaaaaaggcctatggttttatttataaacgaccaaggcaaaaatactcttgcactcatgaatccttgattgtcgacaacctccattccagctccattgtcaaacataatgatgacttctgattgattaaggatgtagcttggagtgtaaatagtaacaccttggaagtgctggaattttagtgagggtctatcaaaataaagtcttctattatctgctataacatccaacctatatctccatctagaatccagaggtctccttctgacttcaattgctattgtgttattacctttagctactacagaagtcagctgagtagctctaacctcaccataagtgttagggtccatttgctcaaatcttccttggatttccagattgtccgtttgcgtaactgatttcaccaatgcgaattctccctttccattaaacgtatattctacatcgtcgaaagtaacaaagtgtggatcaccgtagactcctgctacacctggtgcttggtaagctacacaatcctgtgtaggtctccgttcaaatctcagtgtttcacatcccacagcttgctcgtcttgccaaagacaacacaaatatttgggtaccatgtcattaaaccattgtgagagagtaggcacttttgtcgcttcattgtaaggcattttacccaagttgtggcaacgtctcggactagaaccccattgctgatcgtaagagagcatcaaaaagccgtttttatcatagcaacattgttgttcggagccttctaacgtgggagatccagttttcacacaatgaagtgcttggttgttatagtaacaaatcgggttcgaatctttgtcgcaatcgaagtctggcataaacctgcccttgtcagctaaagcctgttcgacggtgcagggacattgagcaagttcgtgggcgaagttttttagatatctgtccgttctcagccaatcgtcacatagatatttgggccaatttttaccgtactggttttcccattggaactggaagtaccaaccgagtggaatgggtcggctccatattaccggtgttaattctatgctgctctggcttgtagtatatgtattaactgtgatagactcagttaaattaatttggaggaatccaaacttaatatcagtcagatattgattgactctagttctaaactgagaaggaacaatcgtgtgttctccaatgttttgaacattatcagcgatatcggtgatataaacaaacactggtttcatagtcgtttctctgtaaccccagagagaaattcggatgttagcgttgtcgtttgtggtcaaattctgcttctcccaagtgatttttaattcgctcggagatttttcgtgtaatttcatgtccttaaagaagattttttgagtcgcactagcaggtgattctacataatacttccccttccacttgaatgcttcggaattaacagcaatttgaagattcacccatccttcggcataaagttgaggttgtacacagatagctctgtttttatcaacaacatacccaaatacttcatttgatacgtcaaacttgcatcgaatcctatcattcaaattgaagcatggaccagttatatttaccactgttccacccaacatgttaccactttcaggagcgaatttcaggggaaggttggcaccatctatatctttgttgcacgatccaagcaaaatgtcttcgtctatacggaaaatatgtcttcccttaaaaccatttccaaatccaactgatgtgagatctcgaatgacggaagcttgactgtaaggattgtattcgtagcttctggtaccgtttccagcgttaaaaccaacataggcactgacaccaccttctccgttttgggaatcaccacccgcttcagtgtgggaggtccagtccaagttgaggtagttgaacatcgcgtaagtgaagacttcgtcagttgcaagaaccatttggaaggtgtttgtcttgtatttagcattagcgaatcctccagtgaaagtaacatttttccaagtgacaataacggcgtgcttaggatcgaatgtttctgatccaatgactcctgttctgatgtcccacttaagtctttctctaatttctacacccattctgtcttgcctcgttcttaaatctctttccattctaaaatagaccccgggtgttctttgatcaatgtctccatcacgtagattaccgattctgcatctgctgaagaaaatgccaataaaggcaggatcattctttttgggccattctttaattggaaatactaatggatagtcataatttggaggtggatcgctgaattccagatacccattcactgaaactcttgtgtaattatacctgaatccaaagaaaggcaactggaagtttaaattcttgtgcacctgaggaatggaagattgaatgtccttttggaaatctcccaagttattatcactgcctcctttatcgaaaaatgggtacataaaatgtttccttatttctgccagtctcggttctgatatagtgtatggagttcctcctcctcctcgttggtcagtgtctggtggagctgtgtctgaggtcataggatcatagtttgtattcactggagggactccattaggcgtatcttccaccggaataggtttccctgcgtctggatccgcgttacttacattcgtagtctccacatcgatagtttcgacatctggtggaagatcaccatctagtcctttaacgctaacactaaacaaaacaaaaataacaaagtacttgaaccacattttggttatttggcactacaacctggcgcacatcacatcaaaaaaagttgctacggttagtaaagttcgtactcgagtgtttgcaagaatcgctagaacgagataatgctcttatcttt

SEQ ID NO: 2733 - DNA, 4090 bp, Diabrotica virgifera
  SmartBlast Evalue=2E-32; Info=Novel protein n=1 Tax=Danio rerio RepID=Q6P3H0_DANRE
aaatattgcgtgaaagtggtagcacacgattgctgcgttcgtggaatagcgcactttttcgtaattcagcaaaaaatctactgaaaaagcgagtcttccccagttgcagaatcggtgtgttgtgtgtactgaatatttgtatttttttaattgtgggtgctatacaggataatcatgtctaccgctataatgtcgcagaatgccatgtacgaattcggggagagtctgataaaggtcggacaaagtaaattattcttccggtatcctacgaataacgagcagagcaactatagaaatgaaataaacggtataacacccgactcaactacaacttcacacataccaatcggatcaacacagatgcgtctcacactaaccagaatggcgtcaactcccattggccaggctagctcgaaccaactagcagcactcctggacaatctgacccaacaccggcgattggagcgcactcaatccgcccccgcgccacaagtgtcagcccccgcggcggcggtcacagccaccacagtcaacacgtcccgctacaagacggagttgtgccgcccattcgaggagttcggcgtgtgtaaatatggcgacaagtgccagttcgcgcatggcatgagtgaactccgcagcctcgccaggcatccgaaatataaaaccgagttgtgccgcacctaccacacggtcggcttctgcccgtatggaccccgttgccacttcgttcacaaccaagacgaagtcacaaagcctccaatgttgagcaataggccatcttctgtcacaccaagggcagccagacccgctgctctcagtccatcgttgtccctggatagccccagcccaccatgcagtttgagtcaaagtcctacctcttcgatgggatcgttcttcagcagcgaaccagaactacattcccctggtgttgaagaccagaggttgccagtttttaacagatttatagatactacacaaatccttactttgagcgatttgatattgtaatgcctattttttatttcatttactgtggatgaaactctgaacttggaagttattttttgttgaaacgttgaaaatttcggggaaagttatccaggttattcgaaaaaattaaaaaataatcattattcagttgtaggtctttgttagtcattgggtaacgatattgtttgatcattatgactatgtcaccaattggtgaggtgactgctcaattctaaagttttaagcaccaggtggcaagtggaattaaaaaattatttaatcaaaagttattcaaggaaaaagatagataagggtgctgctttatgactatacattgcaaaaataagtcattagtccagttttggagctttataatatatttgtaggcaaaatgttattgttttggtcaatatttgatcctttttatccaataaaataaaagcttataaatatattatcctccaataagttgatttctttgtaaaacattaatttagtaattaagtttcacgtggtttcactaatatgtttgtatattcactaatggaaattttttgtgcgagtacaaaagtccattgcttaaaatccatttatcggatttatttgttattttcttaccatatattacgctatagctctttctagaatgttaaaatgtgccttgtattttgtaattactacttttaagtgattgcgttttgtgataggcgatctcagtgaaagagttattgctaataaattctcacatctatagtttctgtgactccatgttctcagtaaaccacacatggacaaattagagatggaacatattaaacatacatgttacaatgtaaatgcattgtagcgcaatggttatgtgcatagtataagcagctagttaaataaagttttgctttaagctatcgggacatatcctatgtgataagatatataaagaattgcgtaacctacagggtgtccccgaaaatagtgccttcctttggtatggatataatacacaatgaagaacaaaaaagtcctatggcatttttttttctaaagttaaccgtttccaaaaaaatacattgttctccatataagcgaacttttatttcataaaattaaataatctggcatcactgtacaagaactctttgtaacttacgttattgacaccagaaatgtaggtcagacacctgcaaaataattataccaccccatgtttgaaaatcagacaaacaagaatttgtttgtttgttgagtaacaagaatactttagtattctacctataccgttagggacacactattttcggggacaccctgtatatcggaccctttcaacaacataatataccggatcgagttcactctttagtgtaacattagattgatgtgcatagatccagaaagtctccaaattctcaaagaaaaagagggcaaagatacctttcagttcaaggacacttatttgtttgaaccaccttttttatatgggatcaatcttctaaaattctaaacgcttcgcacagaccgaaataaaactggttgataaacagagaagggttcatatgtttcgctctaaagtgtttctattatattttttacttacactatacctaccaacaagttctcgataaagctaagttttctaatctgttcagcattgtggcatagggcagcataccgtatataattatatatataaataccagcttttgttgttagtttcttgtaagttttgttttaattatacagtacgaaagatttgtggctgtcaaaaattttataaaaatgtttgagaagaaatttttggttacatcaattacgaaataacttccaagtcacgggacaaaggctccaactcagactttatttaaatacagtgtcttatttatgttacaattaatctcgccaacatggcggagtgattttgatattgtgtgatttttttaaatataataaatttataaaaaggtgtgttttttacgaatgttactatgtgaatgtgtaagttaggttagtttttcaagtcatcggtcgtagagttttcgtattacattccgcggattatttattatttttattactgcttttctcatttattgttccctcttatcgtgtgcctatgtatcgccagtgtataagaatagtgacgcttcctttagttgtcttaaaatcttcccacattacagtatcgctcatccggaagactcaactcaaaaaacacacttttttttaggcattactgcaatatgttatacagcaatgattttctaaaacattaatttgggggtttctaatagtttcaataatagggttgtcgagacagctcaaaaaacttaataatgcctcactcattctgaagaggaacgtgaatataagaataatttgttgaaatttatgaatatgcaagtagcaggagattttcaggacaaggatgcatatgttcaaggtcagccatttgaagtaatatcctataaaatggagaaaatgaccaatggtggagcagttgagaagtgattcgggaaggatatggagcgaaaccacaggattctgaaagggtttgtgtgcagtataatgcctatataaatacaatgtggaaccttttgattctacttaacaccagaaataggtctcatcagataagtgctgcaaaaatatttgaagcattaccacaagaagaaaaataatgtctctttgcgatgagcgataaattttttgttttaatgtattttaaatgaataatgtaatatataaatgtcatttggccagataccaaaattttaaattaaataaataatgaatcttctgtcactacttttgaacactgccgatatgaccgatgcaagaatcaacattttttttaatcgttatttaaatcattatttaatttgtgtgttttttctcaacacgtttatgttatgtagttattttattataatttatatgtaacttattatttatattgcaatatttagagaccaacgtgctcattgtctcagtagcgtgctcatgcgctgactggtcggggagttcgcaatacctgtatattatttatgtatgtagctaataatgtatctttgtatcattatcaataaattatattttgttcagt

SEQ ID NO: 2734 - DNA, 4022 bp, Diabrotica virgifera
  SmartBlast Evalue=2E-32; Info=Novel protein n=1 Tax=Danio rerio RepID=Q6P3H0_DANRE
aaatattgcgtgaaagtggtagcacacgattgctgcgttcgtggaatagcgcactttttcgtaattcagcaaaaaatctactgaaaaagcgagtcttccccagttgcagaatcggtgtgttgtgtgtactgaatatttgtattttttttaattgtgggtgctatacaggataatcatgtctaccgctataatgtcgcagaatgccatgtacgaattcggggagagtctgataaagaacggtataacacccgactcaactacaacttcacacataccaatcggatcaacacagatgcgtctcacactaaccagaatggcgtcaactcccattggccaggctagctcgaaccaactagcagcactcctggacaatctgacccaacaccggcgattggagcgcactcaatccgcccccgcgccacaagtgtcagcccccgcggcggcggtcacagccaccacagtcaacacgtcccgctacaagacggagttgtgccgcccattcgaggagttcggcgtgtgtaaatatggcgacaagtgccagttcgcgcatggcatgagtgaactccgcagcctcgccaggcatccgaaatataaaaccgagttgtgccgcacctaccacacggtcggcttctgcccgtatggaccccgttgccacttcgttcacaaccaagacgaagtcacaaagcctccaatgttgagcaataggccatcttctgtcacaccaagggcagccagacccgctgctctcagtccatcgttgtccctggatagccccagcccaccatgcagtttgagtcaaagtcctacctcttcgatgggatcgttcttcagcagcgaaccagaactacattcccctggtgttgaagaccagaggttgccagtttttaacagatttatagatactacacaaatccttactttgagcgatttgatattgtaatgcctattttttatttcatttactgtggatgaaactctgaacttggaagttattttttgttgaaacgttgaaaatttcggggaaagttatccaggttattcgaaaaaattaaaaaataatcattattcagttgtaggtctttgttagtcattgggtaacgatattgtttgatcattatgactatgtcaccaattggtgaggtgactgctcaattctaaagttttaagcaccaggtggcaagtggaattaaaaaattatttaatcaaaagttattcaaggaaaaagatagataagggtgctgctttatgactatacattgcaaaaataagtcattagtccagttttggagctttataatatatttgtaggcaaaatgttattgttttggtcaatatttgatcctttttatccaataaaataaaagcttataaatatattatcctccaataagttgatttctttgtaaaacattaatttagtaattaagtttcacgtggtttcactaatatgtttgtatattcactaatggaaattttttgtgcgagtacaaaagtccattgcttaaaatccatttatcggatttatttgttattttcttaccatatattacgctatagctctttctagaatgttaaaatgtgccttgtattttgtaattactacttttaagtgattgcgttttgtgataggcgatctcagtgaaagagttattgctaataaattctcacatctatagtttctgtgactccatgttctcagtaaaccacacatggacaaattagagatggaacatattaaacatacatgttacaatgtaaatgcattgtagcgcaatggttatgtgcatagtataagcagctagttaaataaagttttgctttaagctatcgggacatatcctatgtgataagatatataaagaattgcgtaacctacagggtgtccccgaaaatagtgccttcctttggtatggatataatacacaatgaagaacaaaaaagtcctatggcatttttttttctaaagttaaccgtttccaaaaaaatacattgttctccatataagcgaacttttatttcataaaattaaataatctggcatcactgtacaagaactctttgtaacttacgttattgacaccagaaatgtaggtcagacacctgcaaaataattataccaccccatgtttgaaaatcagacaaacaagaatttgtttgtttgttgagtaacaagaatactttagtattctacctataccgttagggacacactattttcggggacaccctgtatatcggaccctttcaacaacataatataccggatcgagttcactctttagtgtaacattagattgatgtgcatagatccagaaagtctccaaattctcaaagaaaaagagggcaaagatacctttcagttcaaggacacttatttgtttgaaccaccttttttatatgggatcaatcttctaaaattctaaacgcttcgcacagaccgaaataaaactggttgataaacagagaagggttcatatgtttcgctctaaagtgtttctattatattttttacttacactatacctaccaacaagttctcgataaagctaagttttctaatctgttcagcattgtggcatagggcagcataccgtatataattatatatataaataccagcttttgttgttagtttcttgtaagttttgttttaattatacagtacgaaagatttgtggctgtcaaaaattttataaaaatgtttgagaagaaatttttggttacatcaattacgaaataacttccaagtcacgggacaaaggctccaactcagactttatttaaatacagtgtcttatttatgttacaattaatctcgccaacatggcggagtgattttgatattgtgtgatttttttaaatataataaatttataaaaaggtgtgttttttacgaatgttactatgtgaatgtgtaagttaggttagtttttcaagtcatcggtcgtagagttttcgtattacattccgcggattatttattatttttattactgcttttctcatttattgttccctcttatcgtgtgcctatgtatcgccagtgtataagaatagtgacgcttcctttagttgtcttaaaatcttcccacattacagtatcgctcatccggaagactcaactcaaaaaacacacttttttttaggcattactgcaatatgttatacagcaatgattttctaaaacattaatttgggggtttctaatagtttcaataatagggttgtcgagacagctcaaaaaacttaataatgcctcactcattctgaagaggaacgtgaatataagaataatttgttgaaatttatgaatatgcaagtagcaggagattttcaggacaaggatgcatatgttcaaggtcagccatttgaagtaatatcctataaaatggagaaaatgaccaatggtggagcagttgagaagtgattcgggaaggatatggagcgaaaccacaggattctgaaagggtttgtgtgcagtataatgcctatataaatacaatgtggaaccttttgattctacttaacaccagaaataggtctcatcagataagtgctgcaaaaatatttgaagcattaccacaagaagaaaaataatgtctctttgcgatgagcgataaattttttgttttaatgtattttaaatgaataatgtaatatataaatgtcatttggccagataccaaaattttaaattaaataaataatgaatcttctgtcactacttttgaacactgccgatatgaccgatgcaagaatcaacattttttttaatcgttatttaaatcattatttaatttgtgtgttttttctcaacacgtttatgttatgtagttattttattataatttatatgtaacttattatttatattgcaatatttagagaccaacgtgctcattgtctcagtagcgtgctcatgcgctgactggtcggggagttcgcaatacctgtatattatttatgtatgtagctaataatgtatctttgtatcattatcaataaattatattttgttcagt

SEQ ID NO: 2735 - DNA, 2380 bp, Diabrotica virgifera
  SmartBlast Evalue=1E-32; Info=Novel protein n=1 Tax=Danio rerio RepID=Q6P3H0_DANRE
aaatattgcgtgaaagtggtagcacacgattgctgcgttcgtggaatagcgcactttttcgtaattcagcaaaaaatctactgaaaaagcgagtcttccccagttgcagaatcggtgtgttgtgtgtactgaatatttgtatttttttaattgtgggtgctatacaggataatcatgtctaccgctataatgtcgcagaatgccatgtacgaattcggggagagtctgataaaggtcggacaaagtaaattattcttccggtatcctacgaataacgagcagagcaactatagaaatgaaataaacggtataacacccgactcaactacaacttcacacataccaatcggatcaacacagatgcgtctcacactaaccagaatggcgtcaactcccattggccaggctagctcgaaccaactagcagcactcctggacaatctgacccaacaccggcgattggagcgcactcaatccgcccccgcgccacaagtgtcagcccccgcggcggcggtcacagccaccacagtcaacacgtcccgctacaagacggagttgtgccgcccattcgaggagttcggcgtgtgtaaatatggcgacaagtgccagttcgcgcatggcatgagtgaactccgcagcctcgccaggcatccgaaatataaaaccgagttgtgccgcacctaccacacggtcggcttctgcccgtatggaccccgttgccacttcgttcacaaccaagacgaagtcacaaagcctccaatgttgagcaataggccatcttctgtcacaccaagggcagccagacccgctgctctcagtccatcgttgtccctggatagccccagcccaccatgcagtttgagtcaaagtcctacctcttcgatgggatcgttcttcagcagcgaaccagaactacattcccctggtgttgaagaccagaggttgccagtttttaacagatttatagatactacacaaatccttactttgagcgatttgatattgtaatgcctattttttatttcatttactgtggatgaaactctgaacttggaagttattttttgttgaaacgttgaaaatttcggggaaagttatccaggttattcgaaaaaattaaaaaataatcattattcagttgtaggtctttgttagtcattgggtaacgatattgtttgatcattatgactatgtcaccaattggtgaggtgactgctcaattctaaagttttaagcaccaggtggcaagtggaattaaaaaattatttaatcaaaagttattcaaggaaaaagatagataagggtgctgctttatgactatacattgcaaaaataagtcattagtccagttttggagctttataatatatttgtaggcaaaatgttattgttttggtcaatatttgatcctttttatccaataaaataaaagcttataaatatattatcctccaataagttgatttctttgtaaaacattaatttagtaattaagtttcacgtggtttcactaatatgtttgtatattcactaatggaaattttttgtgcgagtacaaaagtccattgcttaaaatccatttatcggatttatttgttattttcttaccatatattacgctatagctctttctagaatgttaaaatgtgccttgtattttgtaattactacttttaagtgattgcgttttgtgataggcgatctcagtgaaagagttattgctaataaattctcacacctatagtttctgtgactccatgttctcagtaaaccacacatggacaaagtagagatggaacatattaaacatacatgttacaatgtaaatgcattgtagcgcaatggttatgtgtatagtataagcagctagttaaataaagttttgctttaagctatcgggacatatcctttgtgataagaaattatataaagaattgcgtgacctacagggttccccgaaaatagtgcttcctttggtatggatataatacacaatgtaaaacaaaaaagtcctatgacattttttctacagttaaccgtttccaaaaaaaaatacattgttctccatataagcgaacttttatttcataaaattaaataatctggcatcactgtacaagtactctttgtaacttaggttactgacaccagaaatgtaggtcagacacctgcaaaataattataccaccccatgtttgaaaatcaaacaagaatttgtttgtttgttgaggagaaagacagggtttaatgtaaatactaaaggcccatactgcaactattttgaattgtgattgtatatctttagatttttgtatacatagttgtcagatttcaatttgcataccaaaatgtattttggttttttggccaaactgttgaa

SEQ ID NO: 2736 - DNA, 2312 bp, Diabrotica virgifera
  SmartBlast Evalue=1E-32; Info=Novel protein n=1 Tax=Danio rerio RepID=Q6P3H0_DANRE
aaatattgcgtgaaagtggtagcacacgattgctgcgttcgtggaatagcgcactttttcgtaattcagcaaaaaatctactgaaaaagcgagtcttccccagttgcagaatcggtgtgttgtgtgtactgaatatttgtattttttttaattgtgggtgctatacaggataatcatgtctaccgctataatgtcgcagaatgccatgtacgaattcggggagagtctgataaagaacggtataacacccgactcaactacaacttcacacataccaatcggatcaacacagatgcgtctcacactaaccagaatggcgtcaactcccattggccaggctagctcgaaccaactagcagcactcctggacaatctgacccaacaccggcgattggagcgcactcaatccgcccccgcgccacaagtgtcagcccccgcggcggcggtcacagccaccacagtcaacacgtcccgctacaagacggagttgtgccgcccattcgaggagttcggcgtgtgtaaatatggcgacaagtgccagttcgcgcatggcatgagtgaactccgcagcctcgccaggcatccgaaatataaaaccgagttgtgccgcacctaccacacggtcggcttctgcccgtatggaccccgttgccacttcgttcacaaccaagacgaagtcacaaagcctccaatgttgagcaataggccatcttctgtcacaccaagggcagccagacccgctgctctcagtccatcgttgtccctggatagccccagcccaccatgcagtttgagtcaaagtcctacctcttcgatgggatcgttcttcagcagcgaaccagaactacattcccctggtgttgaagaccagaggttgccagtttttaacagatttatagatactacacaaatccttactttgagcgatttgatattgtaatgcctattttttatttcatttactgtggatgaaactctgaacttggaagttattttttgttgaaacgttgaaaatttcggggaaagttatccaggttattcgaaaaaattaaaaaataatcattattcagttgtaggtctttgttagtcattgggtaacgatattgtttgatcattatgactatgtcaccaattggtgaggtgactgctcaattctaaagttttaagcaccaggtggcaagtggaattaaaaaattatttaatcaaaagttattcaaggaaaaagatagataagggtgctgctttatgactatacattgcaaaaataagtcattagtccagttttggagctttataatatatttgtaggcaaaatgttattgttttggtcaatatttgatcctttttatccaataaaataaaagcttataaatatattatcctccaataagttgatttctttgtaaaacattaatttagtaattaagtttcacgtggtttcactaatatgtttgtatattcactaatggaaattttttgtgcgagtacaaaagtccattgcttaaaatccatttatcggatttatttgttattttcttaccatatattacgctatagctctttctagaatgttaaaatgtgccttgtattttgtaattactacttttaagtgattgcgttttgtgataggcgatctcagtgaaagagttattgctaataaattctcacacctatagtttctgtgactccatgttctcagtaaaccacacatggacaaagtagagatggaacatattaaacatacatgttacaatgtaaatgcattgtagcgcaatggttatgtgtatagtataagcagctagttaaataaagttttgctttaagctatcgggacatatcctttgtgataagaaattatataaagaattgcgtgacctacagggttccccgaaaatagtgcttcctttggtatggatataatacacaatgtaaaacaaaaaagtcctatgacattttttctacagttaaccgtttccaaaaaaaaatacattgttctccatataagcgaacttttatttcataaaattaaataatctggcatcactgtacaagtactctttgtaacttaggttactgacaccagaaatgtaggtcagacacctgcaaaataattataccaccccatgtttgaaaatcaaacaagaatttgtttgtttgttgaggagaaagacagggtttaatgtaaatactaaaggcccatactgcaactattttgaattgtgattgtatatctttagatttttgtatacatagttgtcagatttcaatttgcataccaaaatgtattttggttttttggccaaactgttgaa

SEQ ID NO: 2737 - DNA, 1882 bp, Diabrotica virgifera
gaacaacaaaaaataccttttttgctctacatggtgccttctacctataccgttagggacacactattttcggggacaccctgtatatcagaccctttcaacaacataatataccggatcgagttagcgattcactctcgagtgtaacattagattgatgtgcatagatccagaaagtctccaaattctcaaagaaaaagagggcaaagatacctttcagttcaaggacacttatttgtttgaaccaccttttttatatgggatcaatcttctaaaattctaaacgcttcgcacagaccgaaataaaactggttgataaacagagaagggttcatatgtttcgctctaaagtgtttctattatattttttacttacactatacctaccaacaagttctcgataaagctaagttttctaatctgttcagcattgtggcatagggcagcataccgtatataattatatatataaataccagcttttgttgttagtttcttgtaagttttgttttaattatacagtacgaaagatttgtggctgtcaaaaattttataaaaatgtttgagaagaaatttttggttacatcaattacgaaataacttccaagtcacgggacaaaggctccaactcagactttatttaaatacagtgtcttatttatgttacaattaatctcgccaacatggcggagtgattttgatattgtgtgatttttttaaatataataaatttataaaaaggtgtgttttttacgaatgttactatgtgaatgtgtaagttaggttagtttttcaagtcatcggtcgtagagttttcgtattacattccgcggattatttattatttttattactgcttttctcatttattgttccctcttatcgtgtgcctatgtatcgccagtgtataagaatagtgacgcttcctttagttgtcttaaaatcttcccacattacagtatcgctcatccggaagactcaactcaaaaaacacacttttttttaggcattactgcaatatgttatacagcaatgattttctaaaacattaatttgggggtttctaatagtttcaataatagggttgtcgagacagctcaaaaaacttaataatgcctcactcattctgaagaggaacgtgaatataagaataatttgttgaaatttatgaatatgcaagtagcaggagattttcaggacaaggatgcatatgttcaaggtcagccatttgaagtaatatcctataaaatggagaaaatgaccaatggtggagcagttgagaagtgattcgggaaggatatggagcgaaaccacaggattctgaaagggtttgtgtgcagtataatgcctatataaatacaatgtggaaccttttgattctacttaacaccagaaataggtctcatcagataagtgctgcaaaaatatttgaagcattaccacaagaagaaaaataatgtctctttgcgatgagcgataaattttttgttttaatgtattttaaatgaataatgtaatatataaatgtcatttggccagataccaaaattttaaattaaataaataatgaatcttctgtcactacttttgaacactgccgatatgaccgatgcaagaatcaacattttttttaatcgttatttaaatcattatttaatttgtgtgttttttctcaacacgtttatgttatgtagttattttattataatttatatgtaacttattatttatattgcaatatttagagaccaacgtgctcattgtctcagtagcgtgctcatgcgctgactggtcggggagttcgcaatacctgtatattatttatgtatgtagctaataatgtatctttgtatcattatcaataaattatattttgttcagt

SEQ ID NO: 2738 - DNA, 4336 bp, Diabrotica virgifera
  SmartBlast Evalue=4E-53; Info=Thiamin pyrophosphokinase 1 n=1 Tax=Harpegnathos saltator RepID=E2BB74_9HYME
attgatatgacccaagatagaattgtgtttagaaatgcaatttgggaagctgaccccgcatagggataaggcaaagagagtgatgatgatgattaatttgttttgttgtataatcagcttctacaataattatgtgatatatttcatttaaaacgaattcaggaattcttttgtaatttggcaacaatgccaacttagatctctgacgtagtaatgatgtgcaacggtatttttacagtaccaaccatagatactttcagaaatatctctacgttaaggacttattttgtttgtaaattttgcaaggtgtatgtaaactagtacatcgataatgtttaagaagtgaaatcagatagctacaaacattgtcattttttacagttgaaggttattgtaaaacattaatatcatcactaggaacttttaaaaagtatttaatagtattaccaagagatgataaacccatgagaaatatattgataatttattagttagctgatttcagttctatgcatatataacttttacaatcattttaacagcttttgcagtgtgatacaaacatacataccgcttaagagtattcaatagatcttaaaaacaaataaaaccattactaagtacttttctagtctctaagaaaattctatataaaaaaactaaaagtaataactaaaaaggcagtaaaatatacccactaccgccactttagcactatttccagtattttttagttatttacaacaaaatatctttttaaattttaataaatttttttcaacaaaataataagttgaacaatgaccaaagtaataaaaaaatatctgacgactggctagataaggggatctatgatgtatcatttatgtaaataatcacatattatcatacaaatgttttactcagtaaaaatggtataattataatgccaccatgcgtaaaataccaaagaaatttcgtttagcatgcagctacagtacaaaattacataaagagcaatagaggacggcctcatttgccacgtaaaatcccataagaaatcgctaaggttcgttctggtcatttttgacgatttttgtagtggaggcgcgacggctcgctggatagtgacgtaagagggctcgttgaaaagtggaggggatggcggatacaaaagcagaaaaattaaacatggcggcagaaaaattaaacatttccaaaaggacactatatcatatcttcattactactgaccctattgctacgtttgaggacttaaatgaaaggacaagggtagtgaatatgttgaaacaaaaaataaacatattgacattaccaaaaggcactatatcgtatcttcgtagctatcggcctgactggagcgtgtgatgcgttaagtggaaggggagcgggtagaaaatgcgtaaaaacaaataacagacatgatagcattgtcaaaaggtcactatatcgtatcatcgttgctattggtccgatcgtgacgtacgagacgtcaaatgaaggattggacactgaggggcatgctagaaaaaaaaacaaacatcgacatttccaaaagggcactatattgtatctttgttgctattggtcccattgcatgatatgtcaaatggtagaggaggggtagcgaatacgtagaaacaaaaaacaaacatgacagcattgtcaaaacggcactatatcgaatcttcgttgctattgacccgactgaagcgtgtgataagttaaatgaaagggggttggacaccgagggtaacagagaaaaaacaaacattaacagaatcaagtaggcaactcattatacttggatgatatatcatgcaacaaatatatcgtaatatattgtaccagcacaatttttacataaatgtgttaaacatgtaaatattttatataaatgatacatcatagggatcgatgttttgagtaggtacatacaggaaacacataattaagaaggacagaaaaaaatgttaagcatttggtaggatgcaaatatctcaaataaaaataacgtatgtgtgacaaaaatattataccctatttttaaactaggagtaaactcaaaaggcccaataatgtcactagaaaaatcaccagattcatcttcttttttggttgatcatgtctgcttttgacggtaatccataaatattatattatactaaaatgtcgctaaagagttataaaaacaactgttttttatatacataaatgcaaactaaaaacctaaaaattaaaggaataacgcagaaaaagaaaacacaaaatatcgcccatataacttaattaacctttgtcaatattatatacttaattttaaatgtcaatagtgtcaaaatttcataatttagtggagtaaacttgccggcggttgaaccaattacaaacaagcatcacggcgcggtaaatttgaattactcctactagtttaaaaacaaggtatagtagcaccagctgtttgttaaaaagaaacaaatattaaatgcaactgaaatagactatcgatggtacaatgcgacttgagcatgtaacaaatgaaaatatgaaaaacagaaactatttcgaacagaataaagatcagatgactaaagttgattagctacagtatgttagtaatgccaaaaatagagatagataaaaaatatcagataaagttaagtaatcttccaaagctaagcttctgggtaatcatataaataaaaagtatattaagtatgttagtaaataagtagtttatattgtaaaacatttactggttttgtactaaaaataagtacaaaagcctcaataagcattatctaataacaacttttataaacctaatgcataaccaactcgataaaaattttaaaaacaacttataatattaaaactaatcaaaatcataattcaaattactcgttttagagaggagcactcattttgggggtttaatttggcgtttttgttgacgctattggtataatttgtataaacatacagtaaccgccacgctactagacacacgggtacattgagctatgtaatacagtcctggacccttcaattgttgcactgtttactgttatgtctagtgacgtctagaacgtcagaaaatgtacagaaaccgaatatgaacatagaaagtagacagtatatagaacagagtagttgtatttgaagtttgtagttgtctttgtgttaaagttgtgaaagttacaaagtattgtaatattgttggtgtttgaataaagttattttaaagcggagcaacaatactattaattaatgtattttttgtatggaaaaaaattattttgcatagtttcatgagaggcacatgacatgacagacctgaaagacacaggtgaaaacgggccggattagcccaaacctagcaattaggtacccgtgtctactagcgtggggcttaccgtatgtagatatgcagaaaattatcatgcacaaatatttttaatctttggaaaatgtttgtcttataaaagtgagtcaatgctcattgaccagattaaaggagaactagttttaatgtttattggacatgtaccatcataagtatttgaagaactaactatacctccaaattctaaagtatcctcatctaaattccatttaagtccagacgtggtgacgatactgggagcacctacaggcaaaagcgcacaccaacttttactttttatcaattcctgaggtagggttatttcgtgtgaacctgtatctaacaaccaactaaccgaagaggcagctattaaaaatatatcaatatcgctcataatgtttctcactttatacagggtgttaatgtttgccatcacttggtctaaccggccggatgtgtcagaaagaacataaatggtatccaactttatatcgtttgagctacaatgattttggagttcaattaaggatttaaaaaaatcagtctcgttttgatcaggtgttctaactatagtggttgctgatattcctttgtagtggtccaaaatatcttgctttatagaatccatgtctcccgtgattagatcaggatgtggtatgtcaccaaattctgattcattcattgttaaccatgttagccatcgttctgtaccaccatccactgttactctaacttttgcttgctcccataaccctacaattaaagcaggattaaaactaaaattaattggcgtatttaggataactatggcataattattttctttgacttttgataaaaggtccttacaaggattccaaatcctgggtgccttatgcaaactcataactgaaactggatagattaagttttaatgaaattgattcaatttatatattgttataataaaat

SEQ ID NO: 2739 - DNA, 4303 bp, Diabrotica virgifera
  SmartBlast Evalue=4E-53; Info=Thiamin pyrophosphokinase 1 n=1 Tax=Harpegnathos saltator RepID=E2BB74_9HYME
attgatatgacccaagatagaattgtgtttagaaatgcaatttgggaagctgaccccgcatagggataaggcaaagagagtgatgatgatgattaatttgttttgttgtataatcagcttctacaataattatgtgatatatttcatttaaaacgaattcaggaattcttttgtaatttggcaacaatgccaacttagatctctgacgtagtaatgatgtgcaacggtatttttacagtaccaaccatagatactttcagaaatatctctacgttaaggacttattttgtttgtaaattttgcaaggtgtatgtaaactagtacatcgataatgtttaagaagtgaaatcagatagctacaaacattgtcattttttacagttgaaggttattgtaaaacattaatatcatcactaggaacttttaaaaagtatttaatagtattaccaagagatgataaacccatgagaaatatattgataatttattagttagctgatttcagttctatgcatatataacttttacaatcattttaacagcttttgcagtgtgatacaaacatacataccgcttaagagtattcaatagatcttaaaaacaaataaaaccattactaagtacttttctagtctctaagaaaattctatataaaaaaactaaaagtaataactaaaaaggcagtaaaatatacccactaccgccactttagcactatttccagtattttttagttatttacaacaaaatatctttttaaattttaataaatttttttcaacaaaataataagttgaacaatgaccaaagtaataaaaaaatatctgacgactggctagataaggggatctatgatgtatcatttatgtaaataatcacatattatcatacaaatgttttactcagtaaaaatggtataattataatgccaccatgcgtaaaataccaaagaaatttcgtttagcatgcagctacagtacaaaattacataaagagcaatagaggacggcctcatttgccacgtaaaatcccataagaaatcgctaaggttcgttctggtcatttttgacgatttttgtagtggaggcgcgacggctcgctggatagtgacgtaagagggctcgttgaaaagtggaggggatggcggatacaaaagcagaaaaattaaggacactatatcatatcttcattactactgaccctattgctacgtttgaggacttaaatgaaaggacaagggtagtgaatatgttgaaacaaaaaataaacatattgacattaccaaaaggcactatatcgtatcttcgtagctatcggcctgactggagcgtgtgatgcgttaagtggaaggggagcgggtagaaaatgcgtaaaaacaaataacagacatgatagcattgtcaaaaggtcactatatcgtatcatcgttgctattggtccgatcgtgacgtacgagacgtcaaatgaaggattggacactgaggggcatgctagaaaaaaaaacaaacatcgacatttccaaaagggcactatattgtatctttgttgctattggtcccattgcatgatatgtcaaatggtagaggaggggtagcgaatacgtagaaacaaaaaacaaacatgacagcattgtcaaaacggcactatatcgaatcttcgttgctattgacccgactgaagcgtgtgataagttaaatgaaagggggttggacaccgagggtaacagagaaaaaacaaacattaacagaatcaagtaggcaactcattatacttggatgatatatcatgcaacaaatatatcgtaatatattgtaccagcacaatttttacataaatgtgttaaacatgtaaatattttatataaatgatacatcatagggatcgatgttttgagtaggtacatacaggaaacacataattaagaaggacagaaaaaaatgttaagcatttggtaggatgcaaatatctcaaataaaaataacgtatgtgtgacaaaaatattataccctatttttaaactaggagtaaactcaaaaggcccaataatgtcactagaaaaatcaccagattcatcttcttttttggttgatcatgtctgcttttgacggtaatccataaatattatattatactaaaatgtcgctaaagagttataaaaacaactgttttttatatacataaatgcaaactaaaaacctaaaaattaaaggaataacgcagaaaaagaaaacacaaaatatcgcccatataacttaattaacctttgtcaatattatatacttaattttaaatgtcaatagtgtcaaaatttcataatttagtggagtaaacttgccggcggttgaaccaattacaaacaagcatcacggcgcggtaaatttgaattactcctactagtttaaaaacaaggtatagtagcaccagctgtttgttaaaaagaaacaaatattaaatgcaactgaaatagactatcgatggtacaatgcgacttgagcatgtaacaaatgaaaatatgaaaaacagaaactatttcgaacagaataaagatcagatgactaaagttgattagctacagtatgttagtaatgccaaaaatagagatagataaaaaatatcagataaagttaagtaatcttccaaagctaagcttctgggtaatcatataaataaaaagtatattaagtatgttagtaaataagtagtttatattgtaaaacatttactggttttgtactaaaaataagtacaaaagcctcaataagcattatctaataacaacttttataaacctaatgcataaccaactcgataaaaattttaaaaacaacttataatattaaaactaatcaaaatcataattcaaattactcgttttagagaggagcactcattttgggggtttaatttggcgtttttgttgacgctattggtataatttgtataaacatacagtaaccgccacgctactagacacacgggtacattgagctatgtaatacagtcctggacccttcaattgttgcactgtttactgttatgtctagtgacgtctagaacgtcagaaaatgtacagaaaccgaatatgaacatagaaagtagacagtatatagaacagagtagttgtatttgaagtttgtagttgtctttgtgttaaagttgtgaaagttacaaagtattgtaatattgttggtgtttgaataaagttattttaaagcggagcaacaatactattaattaatgtattttttgtatggaaaaaaattattttgcatagtttcatgagaggcacatgacatgacagacctgaaagacacaggtgaaaacgggccggattagcccaaacctagcaattaggtacccgtgtctactagcgtggggcttaccgtatgtagatatgcagaaaattatcatgcacaaatatttttaatctttggaaaatgtttgtcttataaaagtgagtcaatgctcattgaccagattaaaggagaactagttttaatgtttattggacatgtaccatcataagtatttgaagaactaactatacctccaaattctaaagtatcctcatctaaattccatttaagtccagacgtggtgacgatactgggagcacctacaggcaaaagcgcacaccaacttttactttttatcaattcctgaggtagggttatttcgtgtgaacctgtatctaacaaccaactaaccgaagaggcagctattaaaaatatatcaatatcgctcataatgtttctcactttatacagggtgttaatgtttgccatcacttggtctaaccggccggatgtgtcagaaagaacataaatggtatccaactttatatcgtttgagctacaatgattttggagttcaattaaggatttaaaaaaatcagtctcgttttgatcaggtgttctaactatagtggttgctgatattcctttgtagtggtccaaaatatcttgctttatagaatccatgtctcccgtgattagatcaggatgtggtatgtcaccaaattctgattcattcattgttaaccatgttagccatcgttctgtaccaccatccactgttactctaacttttgcttgctcccataaccctacaattaaagcaggattaaaactaaaattaattggcgtatttaggataactatggcataattattttctttgacttttgataaaaggtccttacaaggattccaaatcctgggtgccttatgcaaactcataactgaaactggatagattaagttttaatgaaattgattcaatttatatattgttataataaaat

SEQ ID NO: 2740 - DNA, 2030 bp, Diabrotica virgifera
  SmartBlast Evalue=2E-53; Info=Thiamin pyrophosphokinase 1 n=1 Tax=Harpegnathos saltator RepID=E2BB74_9HYME
gcccatataacttaattaacctttgaattttaaatgtcaatactgtcaaaatttcataatttagtggagtaaaccaattacaaacaagcatcagggcgcggtaaatttgaattactcgtcctagtttaaaaacaaggtatagtagcaccagctgtttgttaaaaagaaacaaatattaaatgcaactgaaatagactatcgatggtacaatgcgacttgagcatgtaacaaatgaaaatatgaaaaacagaaactatttcgaacagaataaagatcagatgactaaagttgattagctacagtatgttagtaatgccaaaaatagagatagataaaaaatatcagataaagttaagtaatcttccaaagctaagcttctgggtaatcatataaataaaaagtatattaagtatgttagtaaataagtagtttatattgtaaaacatttactggttttgtactaaaaataagtacaaaagcctcaataagcattatctaataacaacttttataaacctaatgcataaccaactcgataaaaattttaaaaacaacttataatattaaaactaatcaaaatcataattcaaattactcgttttagagaggagcactcattttgggggtttaatttggcgtttttgttgacgctattggtataatttgtataaacatacagtaaccgccacgctactagacacacgggtacattgagctatgtaatacagtcctggacccttcaattgttgcactgtttactgttatgtctagtgacgtctagaacgtcagaaaatgtacagaaaccgaatatgaacatagaaagtagacagtatatagaacagagtagttgtatttgaagtttgtagttgtctttgtgttaaagttgtgaaagttacaaagtattgtaatattgttggtgtttgaataaagttattttaaagcggagcaacaatactattaattaatgtattttttgtatggaaaaaaattattttgcatagtttcatgagaggcacatgacatgacagacctgaaagacacaggtgaaaacgggccggattagcccaaacctagcaattaggtacccgtgtctactagcgtggggcttaccgtatgtagatatgcagaaaattatcatgcacaaatatttttaatctttggaaaatgtttgtcttataaaagtgagtcaatgctcattgaccagattaaaggagaactagttttaatgtttattggacatgtaccatcataagtatttgaagaactaactatacctccaaattctaaagtatcctcatctaaattccatttaagtccagacgtggtgacgatactgggagcacctacaggcaaaagcgcacaccaacttttactttttatcaattcctgaggtagggttatttcgtgtgaacctgtatctaacaaccaactaaccgaagaggcagctattaaaaatatatcaatatcgctcataatgtttctcactttatacagggtgttaatgtttgccatcacttggtctaaccggccggatgtgtcagaaagaacataaatggtatccaactttatatcgtttgagctacaatgattttggagttcaattaaggatttaaaaaaatcagtctcgttttgatcaggtgttctaactatagtggttgctgatattcctttgtagtggtccaaaatatcttgctttatagaatccatgtctcccgtgattagatcaggatgtggtatgtcaccaaattctgattcattcattgttaaccatgttagccatcgttctgtaccaccatccactgttactctaacttttgcttgctcccataaccctacaattaaagcaggattaaaactaaaattaattggcgtatttaggataactatggcataattattttctttgacttttgataaaaggtccttacaaggattccaaatcctgggtgccttatgcaaactcataactgaaactggatagattaagttttaatgaaattgattcaatttatatattgttataataaaat

SEQ ID NO: 2741 - DNA, 1646 bp, Diabrotica virgifera
attgatatgacccaagatagaattgtgtttagaaatgcaatttgggaagctgaccccgcatagggataaggcaaagagagtgatgatgatgattaatttgttttgttgtataatcagcttctacaataattatgtgatatatttcatttaaaacgaattcaggaattcttttgtaatttggcaacaatgccaacttagatctctgacgtagtaatgatgtgcaacggtatttttacagtaccaaccatagatactttcagaaatatctctacgttaaggacttattttgtttgtaaattttgcaaggtgtatgtaaactagtacatcgataatgtttaagaagtgaaatcagatagctacaaacattgtcattttttacagttgaaggttattgtaaaacattaatatcatcactaggaacttttaaaaagtatttaatagtattaccaagagatgataaacccatgagaaatatattgataatttattagttagctgatttcagttctatgcatatataacttttacaatcattttaacagcttttgcagtgtgatacaaacatacataccgcttaagagtattcaatagatcttaaaaacaaataaaaccattactaagtacttttctagtctctaagaaaattctatataaaaaaactaaaagtaataactaaaaaggcagtaaaatatacccactaccgccactttagcactatttccagtattttttagttatttacaacaaaatatctttttaaattttaataaatttttttcaacaaaataataagttgaacaatgaccaaagtaataaaaaaatatctgacgactggctagataaggggatctatgatgtatcatttatgtaaataatcacatattatcatacaaatgttttactcagtaaaaatggtataattataatgccaccatgcgtaaaataccaaagaaatttcgtttagcatgcagctacagtacaaaattacataaagagcaatagaggacggcctcatttgccacgtaaaatcccataagaaatcgctaaggttcgttctggtcatttttgacgatttttgtagtggaggcgcgacggctcgctggatagtgacgtaagagggctcgttgaaaagtggaggggatggcggatacaaaagcagaaaaattaaacatggcggcagaaaaattaaacatttccaaaaggacactatatcatatcttcattactactgaccctattgctacgtttgaggacttaaatgaaaggacaagggtagtgaatatgttgaaacaaaaaataaacatattgacattaccaaaaggcactatatcgtatcttcgtagctatcggcctgactggagcgtgtgatgcgttaagtggaaggggagcgggtagaaaatgcgtaaaaacaaataacagacatgatagcattgtcaaaaggtcactatatcgtatcattgttgctattcgtccaatcgtgacgtacgagacgtcaaatgaaggggtatgtattggacaccgaggtattctagaaaaaaaaaaacatcgacatttccaaaagggcactatattgtatctttgttgctattggtcccattggagcgtctgatacgtcaaatggtagaggaggggtagcgaatacgtag

SEQ ID NO: 2742 - DNA, 1613 bp, Diabrotica virgifera
attgatatgacccaagatagaattgtgtttagaaatgcaatttgggaagctgaccccgcatagggataaggcaaagagagtgatgatgatgattaatttgttttgttgtataatcagcttctacaataattatgtgatatatttcatttaaaacgaattcaggaattcttttgtaatttggcaacaatgccaacttagatctctgacgtagtaatgatgtgcaacggtatttttacagtaccaaccatagatactttcagaaatatctctacgttaaggacttattttgtttgtaaattttgcaaggtgtatgtaaactagtacatcgataatgtttaagaagtgaaatcagatagctacaaacattgtcattttttacagttgaaggttattgtaaaacattaatatcatcactaggaacttttaaaaagtatttaatagtattaccaagagatgataaacccatgagaaatatattgataatttattagttagctgatttcagttctatgcatatataacttttacaatcattttaacagcttttgcagtgtgatacaaacatacataccgcttaagagtattcaatagatcttaaaaacaaataaaaccattactaagtacttttctagtctctaagaaaattctatataaaaaaactaaaagtaataactaaaaaggcagtaaaatatacccactaccgccactttagcactatttccagtattttttagttatttacaacaaaatatctttttaaattttaataaatttttttcaacaaaataataagttgaacaatgaccaaagtaataaaaaaatatctgacgactggctagataaggggatctatgatgtatcatttatgtaaataatcacatattatcatacaaatgttttactcagtaaaaatggtataattataatgccaccatgcgtaaaataccaaagaaatttcgtttagcatgcagctacagtacaaaattacataaagagcaatagaggacggcctcatttgccacgtaaaatcccataagaaatcgctaaggttcgttctggtcatttttgacgatttttgtagtggaggcgcgacggctcgctggatagtgacgtaagagggctcgttgaaaagtggaggggatggcggatacaaaagcagaaaaattaaggacactatatcatatcttcattactactgaccctattgctacgtttgaggacttaaatgaaaggacaagggtagtgaatatgttgaaacaaaaaataaacatattgacattaccaaaaggcactatatcgtatcttcgtagctatcggcctgactggagcgtgtgatgcgttaagtggaaggggagcgggtagaaaatgcgtaaaaacaaataacagacatgatagcattgtcaaaaggtcactatatcgtatcattgttgctattcgtccaatcgtgacgtacgagacgtcaaatgaaggggtatgtattggacaccgaggtattctagaaaaaaaaaaacatcgacatttccaaaagggcactatattgtatctttgttgctattggtcccattggagcgtctgatacgtcaaatggtagaggaggggtagcgaatacgtag

SEQ ID NO: 2743 - DNA, 3012 bp, Diabrotica virgifera
  SmartBlast Evalue=3E-42; Info=Endonuclease-reverse transcriptase n=1 Tax=Bombyx mori RepID=D5LB38_BOMMO
aaatggcggactaattacctcgttataaactgatctcgttatatcagacaacaataatattgtgcctacatatgaatatgtagttttctaaaacattaacttcctatagtgaagccattatgagcaatataagatgctaaatattgtttggagaacatgtttttcgaaagaagcatgttcttcgatcacatttccctcgttataaccaaatatgtctcgttatagaagtgttatacttcaataggaatttcatgggacacctaatgtacctcgttttaagcggaacctcgtaataaccgtgttcgttatagagagagtatactgtattaggatctgatataaattttgcttttgcggagtgtttaaaaatgaacgaagtcttgattttctgtccaaactagacgaaaaacaacggaaagaaaaaaaggaaaccctaaaatcaaaaataggacttgcgtttaaatagcctgtgaaaatttgctatcattataacactaatttatacactggaagcagaaagcaatcatacgagtcaatgggagattagccaacgaatgttacattcaaagaagcgtcagacagggatgcatactatccccgctgttatataatatctactcggatataaatttttaaacaggctttggaagataaagaccttggagtgaaaatcaatgtagaaacggatcaaaaagcttaaatacgctgatgacactgctattttatatgacaattcccaaggccttcaagagttattggaccaaatgctatgtttggtcagtaatattataatataacatagcacttagacctggactctgaagactgatacgataaatctcccagaggtatctgaggtagggttgcatagacagggccgcatttaggtcaattgacgccctaggcaattctctagtagtctatacgatgtacttaaactacgatgtttatatacatataacagaaaaaattgtcattacagttcgatcacatcagagatttctttctttatttttctttggccaaatcatctataatgtcgtcataatttatccattttgttacgtcactttctatggacaaaatcgacaaattgttacgacgttcttgcgtcatacttgatcggagattattttcaattcttgacattttcgaaaatgactgttcagcggacacgttggcaactctgatgcacaaataaaaactcttctttaaatatttagatatgtcacttggtgattttgtggtatccaaatgaccctttaagtgaatgcattcatgtatgcatgatgtatctaggtcgtctttataaatgtgtatcagattttcagcttctttattaatttctttattgtttaattttggccaatctgttataacacgaaaacgttgacaaataagtccgtaaagattccagacgtctattcagatctcttatcagagtgtcgattataatatagaatgtgtggattttcatctcatcactagctgaaaagtttagttcatcatgggccaccacgtcaaattgaatttttctttttctctttcttatttctgtatatgttttatttgggaacaattttttggcttcctcttcataaatggcaaaattatttctgattgagataaagtaatttgaaagagcttcatactctttaacgacagaacccagatccattgcaggattctggacatatttattggataggttcactctttctaaaatatgttgccaaatcacagctaataaagtccatttttttcaaatatagatatagagtttgatgtttaacagctgcagtttgatattcgtcgttagagatattaaaaagagcattttttatttcgctgaagccagtgtataacgcttcagttgcgtccgcccttgtgaaccacctagtttcaccaagtttcagtataaatccaaccaaatcaagtctttagtttctgcctaatgtgcaaaatacatttacattgaagtgttcaatggcctttgcagttctgccggcgcgcggcggcccaataatctctaaatttacgacttccgtcttttttgaacgaatagtattaaagagaaattgaaatttgttttctagaaatgaatgcccacttctattccactgatggatgtacttaaatgttattcaattttaatttttacacatatacaaatatttttttgtacagtatttttgccgccctctcataatttgccgccctaggcagctgcctatattgcctaatggataaagcggccctgtgcatagaaaatactgcaaataccctggacaaccattgagaccaacgaagctggcctggaagagcaaatgtcgttcgagagttactgaaaactattaaaataagaaaaatttcatacctaggacatgttcttagaggaaatcgatacataatcttcttcttaacgtgctctatcaagtccccttgacgttggcgattaatatggcgaaactgtctctgtctcgagctattctaaatagttgttctgctttctttattcctgtccactccctgatattcttcaaccaagaggcctgctttctaccaattcctctgcgtccctcgaccctacccatcataataagttgaagaatattataccggtctccccttactacgtgtccaaaataggccatcaagcagctcgtgggcagcatttgctctcttaaggattaccacatttttgtcagcatagccgtccatggtattttcagtgtacgtctgtgcagccacattccaaaggcctccaaacgattaatggtggatatttttaatgtccatgcttcgacaccatgcaagaggactgaccaaatgtaacatttaatcatgcgctttcgaagttgaaagttatcatcacagaagaatgacctcattttttaaaatgtcgtgcgggctatctcgattctacattttatctctttatctggatctagttgttcagtaatatggcaaccaagatatttacaactgggtactcttgattatatgaccatc

SEQ ID NO: 2744 - DNA, 2712 bp, Diabrotica virgifera
  SmartBlast Evalue=3E-42; Info=Endonuclease-reverse transcriptase n=1 Tax=Bombyx mori RepID=D5LB38_BOMMO
atcactggcgtcgataagcacacatactttaggcatttcatttgtatacagacagctatttatttatacccatcaccacgtcaaaaacaactaaagaaacatgttcgtcttgattttctgtccgaactagacgaaaaacaacggaaagaaaaaaggaaacccttgaaaatgcgaaaatttgctatcattataacactaattcatacactgaaagcagaaagcaatcatacgggtcaatgggagattagccaacgaatgttacattcaaagaagcgtcagacagggatgcattctatccccgctgttatataatatctactcggatataattttcaaacaggctctgcaagataaagactttaaagtgaaaatcaatgtagaaacggatcaaaaatcttaaatacgctgatgacactgctattttatatgacaattcccaaggccttcaagagttattggaccaaatgctatgtttggtcagtaatattataatataacatagcacttagacctggactctgaagactgatacgataaatctcccagaggtatctgaggtagggttgcatagacagggccgcatttaggtcaattgacgccctaggcaattctctagtagtctatacgatgtacttaaactacgatgtttatatacatataacagaaaaaattgtcattacagttcgatcacatcagagatttctttctttatttttctttggccaaatcatctataatgtcgtcataatttatccattttgttacgtcactttctatggacaaaatcgacaaattgttacgacgttcttgcgtcatacttgatcggagattattttcaattcttgacattttcgaaaatgactgttcagcggacacgttggcaactctgatgcacaaataaaaactcttctttaaatatttagatatgtcacttggtgattttgtggtatccaaatgaccctttaagtgaatgcattcatgtatgcatgatgtatctaggtcgtctttataaatgtgtatcagattttcagcttctttattaatttctttattgtttaattttggccaatctgttataacacgaaaacgttgacaaataagtccgtaaagattccagacgtctattcagatctcttatcagagtgtcgattataatatagaatgtgtggattttcatctcatcactagctgaaaagtttagttcatcatgggccaccacgtcaaattgaatttttctttttctctttcttatttctgtatatgttttatttgggaacaattttttggcttcctcttcataaatggcaaaattatttctgattgagataaagtaatttgaaagagcttcatactctttaacgacagaacccagatccattgcaggattctggacatatttattggataggttcactctttctaaaatatgttgccaaatcacagctaataaagtccatttttttcaaatatagatatagagtttgatgtttaacagctgcagtttgatattcgtcgttagagatattaaaaagagcattttttatttcgctgaagccagtgtataacgcttcagttgcgtccgcccttgtgaaccacctagtttcaccaagtttcagtataaatccaaccaaatcaagtctttagtttctgcctaatgtgcaaaatacatttacattgaagtgttcaatggcctttgcagttctgccggcgcgcggcggcccaataatctctaaatttacgacttccgtcttttttgaacgaatagtattaaagagaaattgaaatttgttttctagaaatgaatgcccacttctattccactgatggatgtacttaaatgttattcaattttaatttttacacatatacaaatatttttttgtacagtatttttgccgccctctcataatttgccgccctaggcagctgcctatattgcctaatggataaagcggccctgtgcatagaaaatactgcaaataccctggacaaccattgagaccaacgaagctggcctggaagagcaaatgtcgttcgagagttactgaaaactattaaaataagaaaaatttcatacctaggacatgttcttagaggaaatcgatacataatcttcttcttaacgtgctctatcaagtccccttgacgttggcgattaatatggcgaaactgtctctgtctcgagctattctaaatagttgttctgctttctttattcctgtccactccctgatattcttcaaccaagaggcctgctttctaccaattcctctgcgtccctcgaccctacccatcataataagttgaagaatattataccggtctccccttactacgtgtccaaaataggccatcaagcagctcgtgggcagcatttgctctcttaaggattaccacatttttgtcagcatagccgtccatggtattttcagtgtacgtctgtgcagccacattccaaaggcctccaaacgattaatggtggatatttttaatgtccatgcttcgacaccatgcaagaggactgaccaaatgtaacatttaatcatgcgctttcgaagttgaaagttatcatcacagaagaatgacctcattttttaaaatgtcgtgcgggctatctcgattctacattttatctctttatctggatctagttgttcagtaatatggcaaccaagatatttacaactgggtactcttgattatatgaccatc

SEQ ID NO: 2745 - DNA, 2544 bp, Diabrotica virgifera
  SmartBlast Evalue=9E-28; Info=Zinc finger MYM-type protein 1 (Fragment) n=1 Tax=Camponotus floridanus RepID=E2A5L7_9HYME
aaatggcggactaattacctcgttataaactgatctcgttatatcagacaacaataatattgtgcctacatatgaatatgtagttttctaaaacattaacttcctatagtgaagccattatgagcaatataagatgctaaatattgtttggagaacatgtttttcgaaagaagcatgttcttcgatcacatttccctcgttataaccaaatatgtctcgttatagaagtgttatacttcaataggaatttcatgggacacctaatgtacctcgttttaagcggaacctcgtaataaccgtgttcgttatagagagagtatactgtattaggatctgatataaattttgcttttgcggagtgtttaaaaatgaacgaagtcttgattttctgtccaaactagacgaaaaacaacggaaagaaaaaaaggaaaccctaaaatcaaaaataggacttgcgtttaaatagcctgtgaaaatttgctatcattataacactaatttatacactggaagcagaaagcaatcatacgagtcaatgggagattagccaacgaatgttacattcaaagaagcgtcagacagggatgcatactatccccgctgttatataatatctactcggatataaatttttaaacaggctttggaagataaagaccttggagtgaaaatcaatgtagaaacggatcaaaaagcttaaatacgctgatgacactgctattttatatgacaattcccaaggccttcaagagttattggaccaaatgctatgtttggtcagtaatattataatataacatagcacttagacctggactctgaagactgatacgataaatctcccagaggtatctgaggtagggttgcatagacagggccgcatttaggtcaattgacgccctaggcaattctctagtagtctatacgatgtacttaaactacgatgtttatatacatataacagaaaaaattgtcattacagttcgatcacatcagagatttctttctttatttttctttggccaaatcatctataatgtcgtcataatttatccattttgttacgtcactttctatggacaaaatcgacaaattgttacgacgttcttgcgtcatacttgatcggagattattttcaattcttgacattttcgaaaatgactgttcagcggacacgttggcaactctgatgcacaaataaaaactcttctttaaatatttagatatgtcacttggtgattttgtggtatccaaatgaccctttaagtgaatgcattcatgtatgcatgatgtatctaggtcgtctttataaatgtgtatcagattttcagcttctttattaatttctttattgtttaattttggccaatctgttataacacgaaaacgttgacaaataagtccgtaaagattccagacgtctattcagatctcttatcagagtgtcgattataatatagaatgtgtggattttcatctcatcactagctgaaaagtttagttcatcatgggccaccacgtcaaattgaatttttctttttctctttcttatttctgtatatgttttatttgggaacaattttttggcttcctcttcataaatggcaaaattatttctgattgagataaagtaatttgaaagagcttcatactctttaacgacagaacccagatccattgcaggattctggacatatttattggataggttcactctttctaaaatatgttgccaaatcacagctaataaagtccatttttttcaaatatagatatagagtttgatgtttaacagctgcagtttgatattcgtcgttagagatattaaaaagagcattttttatttcgctgaagccagtgtataacgcttcagttgcgtccgcccttgtgaaccacctagtttcaccaagtttcagtataaatccaaccaaatcaagtctttagtttctgcctaatgtgcaaaatacatttacattgaagtgttcaatggcctttgcagttctgccggcgcgcggcggcccaataatctctaaatttacgacttccgtcttttttgaacgaatagtattaaagagaaattgaaatttgttttctagaaatgaatgcccacttctattccactgatggatgtacttaaatgttattcaattttaatttttacacatatacaaatatttttttgtacagtatttttgccgccctctcataatttgccgccctaggcagctgcctatattgcctaatggataaagcggccctgtgcatagaaaatactgcaaataccctggacaaccattgagaccaacgaagctggcctggaagagcaaatgtcgttcgtgagttactgaaaactattaaaataagaaaaaattcatacctaggacatgttcttagaggaaatcgatacagaatctccttcttaacgtccccttgacgttggcgattaacatggcgaaactgtctctgtctagagctattctaaatagttgttctgctttctttattcctgtccactccctgatattcttcaaccaagaggcctgc

SEQ ID NO: 2746 - DNA, 2244 bp, Diabrotica virgifera
  SmartBlast Evalue=8E-28; Info=Zinc finger MYM-type protein 1 (Fragment) n=1 Tax=Camponotus floridanus RepID=E2A5L7_9HYME
atcactggcgtcgataagcacacatactttaggcatttcatttgtatacagacagctatttatttatacccatcaccacgtcaaaaacaactaaagaaacatgttcgtcttgattttctgtccgaactagacgaaaaacaacggaaagaaaaaaggaaacccttgaaaatgcgaaaatttgctatcattataacactaattcatacactgaaagcagaaagcaatcatacgggtcaatgggagattagccaacgaatgttacattcaaagaagcgtcagacagggatgcattctatccccgctgttatataatatctactcggatataattttcaaacaggctctgcaagataaagactttaaagtgaaaatcaatgtagaaacggatcaaaaatcttaaatacgctgatgacactgctattttatatgacaattcccaaggccttcaagagttattggaccaaatgctatgtttggtcagtaatattataatataacatagcacttagacctggactctgaagactgatacgataaatctcccagaggtatctgaggtagggttgcatagacagggccgcatttaggtcaattgacgccctaggcaattctctagtagtctatacgatgtacttaaactacgatgtttatatacatataacagaaaaaattgtcattacagttcgatcacatcagagatttctttctttatttttctttggccaaatcatctataatgtcgtcataatttatccattttgttacgtcactttctatggacaaaatcgacaaattgttacgacgttcttgcgtcatacttgatcggagattattttcaattcttgacattttcgaaaatgactgttcagcggacacgttggcaactctgatgcacaaataaaaactcttctttaaatatttagatatgtcacttggtgattttgtggtatccaaatgaccctttaagtgaatgcattcatgtatgcatgatgtatctaggtcgtctttataaatgtgtatcagattttcagcttctttattaatttctttattgtttaattttggccaatctgttataacacgaaaacgttgacaaataagtccgtaaagattccagacgtctattcagatctcttatcagagtgtcgattataatatagaatgtgtggattttcatctcatcactagctgaaaagtttagttcatcatgggccaccacgtcaaattgaatttttctttttctctttcttatttctgtatatgttttatttgggaacaattttttggcttcctcttcataaatggcaaaattatttctgattgagataaagtaatttgaaagagcttcatactctttaacgacagaacccagatccattgcaggattctggacatatttattggataggttcactctttctaaaatatgttgccaaatcacagctaataaagtccatttttttcaaatatagatatagagtttgatgtttaacagctgcagtttgatattcgtcgttagagatattaaaaagagcattttttatttcgctgaagccagtgtataacgcttcagttgcgtccgcccttgtgaaccacctagtttcaccaagtttcagtataaatccaaccaaatcaagtctttagtttctgcctaatgtgcaaaatacatttacattgaagtgttcaatggcctttgcagttctgccggcgcgcggcggcccaataatctctaaatttacgacttccgtcttttttgaacgaatagtattaaagagaaattgaaatttgttttctagaaatgaatgcccacttctattccactgatggatgtacttaaatgttattcaattttaatttttacacatatacaaatatttttttgtacagtatttttgccgccctctcataatttgccgccctaggcagctgcctatattgcctaatggataaagcggccctgtgcatagaaaatactgcaaataccctggacaaccattgagaccaacgaagctggcctggaagagcaaatgtcgttcgtgagttactgaaaactattaaaataagaaaaaattcatacctaggacatgttcttagaggaaatcgatacagaatctccttcttaacgtccccttgacgttggcgattaacatggcgaaactgtctctgtctagagctattctaaatagttgttctgctttctttattcctgtccactccctgatattcttcaaccaagaggcctgc

SEQ ID NO: 2747 - DNA, 493 bp, Diabrotica virgifera
  SmartBlast Evalue=4E-35; Info=Endonuclease-reverse transcriptase n=1 Tax=Bombyx mori RepID=D5LB38_BOMMO
cttcaaccaagaggcctgctttctaccaattcctctgcgtccctcgacttacccatcataataagttgaagaatattataccggtctacccttactacgtgtccaaaataggccatctttctatatttgatgttatcaagcagctcgcgggcagcatttgctctcttaaggactgcaacatttgtcagcatagccgtccatggtattttcagtgtacgtctgtgcagccacattccaaaggcctccaaacgattaatggtggatatttttaatgtccatgcttcgacaccatgcaagaggactgaccaaatgtaacatttaatcatgcgctttcgaagttgaaagttatcatcacagaagaatgacctcattttttaaaatgtcgtgcgggctatctcgattctacattttatctctttatctggatctagttgttcagtaatatggcaaccaagatatttacaactgggtactcttgaattatatgaccatc

SEQ ID NO: 2748 - DNA, 3623 bp, Diabrotica virgifera
  SmartBlast Evalue=0; Info=Heterogeneous nuclear ribonucleoprotein Q n=1 Tax=Camponotus floridanus RepID=E2AQJ4_ 9HYME
gtagaacaataaaaatcgtcagtttgcaagaaaaacctcaacaccccccatctcggaaacgaagcacttgcggacacacgtttacaaagcaaactgtcattatccttccagacagaaccaccctttaaagtttgccacactcatttaaaaacaccccgcactgatgaaaaacaaggccagttgataaattacgtaaattttatattatcaaagcgaatgaatcaaaaaacacaatgttaagaaaacatgaggccatagttgggtttcaattctagtattttacaaatgctagaatattccacagggtgacgcgaaccttgagaaaaatcacccggtatacaatgacaactcccctgtagcagcaacattattacagcgatatagggcttttcattcacagtcatttgtttcgagctgctgtcatatgtcgtataatccgtgtatattatgtcgtataatccatgtatattaatattatacacagattatacaacataatgacagaggctcgaaacaaatgaaaatcgatgaaaagccctattgataaagaataaggttataacatgttaaaaaaaatcacttaaatcggacaacaggtttaggaaattcgagacatcaaaaatgaccaatttctaagtaggtgcgccaatttcttggagaagtgtaatagttccgttctaaaaatctccgaccccaaaacaacacatagtaaaacataatgccaagtaacttaaccaatttaattgaataaattttaattccaaaacaacaaacgtacagcaaaagaattttgaaagtaccaataacaattcaaaaattttaaaattaataaaaaacgaatgcagaataggtaataattaacgtagaattggggacaccatcagctatcaggctggcgcgcactacaagtgcttatcaaatctgccgcaatatgactcctcctgaatttttgtggcatcttttcatcaataaataattttaaatatattttccaataaatatagtacctaactagaattttatcatttcgtttggtctttaaaatatatcaatcacattagtagtacaacaaacttttttaatttcaacaaaatcgaacgttctattaaaatttcaagtgatattactaataatttaataacagaggtatttttaaaatatttttagagaccaatctacctcatgcgaacaaatttttaattagattttcaaatctaaaactgcgttcaaacgctacaacattttaaatttgtcgatcaccatcttctttaaacaaaactcgttgcccaagaattcatttggagttatattcaacacccttctatagcaggcactagagggtgtgctctggccttgtttatcgccctccttttttgacgtagggccactcacactcagtcccactgcgggcgttcaagtcctatcacttagctccaggagccgtaggaatcctggtaccatgcctgctgttcgccgttcacgtccgcccccagcggctgttgtgaaaggggctggctcccccagttgctctggtatcggcgctttgtctcccccctggttctggtgacccccgtcaaactttcgcttacctgctggtaaacttgccttggcgcggcccactccacgagcggcttggcgtgctgccccacgggcccctgttgctccgccccggcccgctctgttggctgccgccccacgggctggggggccacctgcccggccacgtgccaccaccccacgcccacggccagccgtaatcaccccttcccatcggcgctgatctcatacttcctgtccctcttgggcctgaagttccagggggacccctcatgggcatagttccaggcatcatgcctcctctaacttgcatcatctgcatcattcttctttctctggctctaagtatttcttcttttttctttttatcagaaggaggtttggctaatgacacttcaatatttgaaccccctaattctttagaatctaaggcttccattgccttaacggcattatccctatcttcaaaatgtataaaagcgtaatctttgattttcttcaccctctccaccttgccgaactgttcaaattcttcttttaatttttcttcacttatttcctgtgttaaatttcttacgtagaggaccttaaccttagacatagtttgggcatctggttcttcttgaggatcagcccaatctacgataatatcgcagccccaaactttaatacgccctgtgcccaaccttcgttttgctaaagatgctgccttatgtgattcatattccaaaaagcaaaatccacgatttttcttcttatcgtcgggcgacgaataaatgatcacttccatcaggccggctgtcaatttaccaaattcgtccaagatctcctctttgccttttgactttggaatgtttccgacgaaaagacgtagatttggcacgctaatgttaattttcagattctttccaggtttgatttcatgattatccaacttttggacggctatttgggctgcttcccgatttgtaaatgttacaaaggcatatcctctattggtacccgtcatcgggtccatcattagtctaaggtcccatatgtggccgcattcctcgaataatggaatcagctcatcttcatacatgtctttgggaattttgccgcaaaatacttcgcatcccgaacctggcggcgcaccttcccaatctggtgggggaccaccgaattttcgttgaccggtagtaacatctaaagcatatccggttcggtctaatatttttttgatcttatcgtggtcgggtcccttgacgggcactggcgcgggagtggccgcacccgccgagccgctggtccccgctctgctcttctgtctgtaggtcttcatgactccgcataggtacgccgatttgtttgacacgtgctccaagttggaatccaggaactgacctagaacgttgagcgccccatctacgggaaattcttttaaggcgtcaagcgctctttcgtctaggtcaacgtgtactagcttgccagtcttatagatctcatccaattttgcggcaactttctcgtcaaggccatattccagcagcttctggtagtcttcagtacgttcgacgtcgatcttcattgattcttccggtacctcaccattaccttctgccatagcttagtcgtaaatatggaatcctcttatcagcaagtaattgatcttagattagttgggtagcattttcgacatatttttactcacgccttgattttatatcttgtgaagctattaggtatctataatttcgtagaacggttattttgaagtgtatgacttattctggttgaaagtttgtcaaagctgcatatcggcccaataagttaaaagttaagaatccttagtttaatacacttgataaaacacaacaaacatcatttgtacaataaaaatcaacactgttcaacaatttgcagaaaaaaactaaaattattaacataaaacagcgattaataaaaaacgtacaacacaaaactaaaatagtcaattttaaagttgtttcgtaacaaaaaataaaacaaatttcgtggaatttttggtgtagtaccgactcccgcggtttataatgcagtgtgtg

SEQ ID NO: 2749 - DNA, 3472 bp, Diabrotica virgifera
  SmartBlast Evalue=0; Info=Heterogeneous nuclear ribonucleoprotein Q n=1 Tax=Camponotus floridanus RepID=E2AQJ4_ 9HYME
gtagaacaataaaaatcgtcagtttgcaagaaaaacctcaacaccccccatctcggaaacgaagcacttgcggacacacgtttacaaagcaaactgtcattatccttccagacagaaccaccctttaaagtttgccacactcatttaaaaacaccccgcactgatgaaaaacaaggccagttgataaattacgtaaattttatattatcaaagcgaatgaatcaaaaaacacaatgttaagaaaacatgaggccatagttgggtttcaattctagtattttacaaatgctagaatattccacagggtgacgcgaaccttgagaaaaatcacccggtatacaatgacaactcccctgtagcagcaacattattacagcgatatagggcttttcattcacagtcatttgtttcgagctgctgtcatatgtcgtataatccgtgtatattatgtcgtataatccatgtatattaatattatacacagattatacaacataatgacagaggctcgaaacaaatgaaaatcgatgaaaagccctattgataaagaataaggttataacatgttaaaaaaaatcacttaaatcggacaacaggtttaggaaattcgagacatcaaaaatgaccaatttctaagtaggtgcgccaatttcttggagaagtgtaatagttccgttctaaaaatctccgaccccaaaacaacacatagtaaaacataatgccaagtaacttaaccaatttaattgaataaattttaattccaaaacaacaaacgtacagcaaaagaattttgaaagtaccaataacaattcaaaaattttaaaattaataaaaaacgaatgcagaataggtaataattaacgtagaattggggacaccatcagctatcaggctggcgcgcactacaagtgcttatcaaatctgccgcaatatgactcctcctgaatttttgtggcatcttttcatcaataaataattttaaatatattttccaataaatatagtacctaactagaattttatcatttcgtttggtctttaaaatatatcaatcacattagtagtacaacaaacttttttaatttcaacaaaatcgaacgttctattaaaatttcaagtgatattactaataatttaataacagaggtatttttaaaatatttttagagaccaatctacctcatgcgaacaaatttttaattagattttcaaatctaaaactgcgttcaaacgctacaacattttaaatttgtcgatcaccatcttctttaaacaaaactcgttgcccaagaattcatttggagttatattcaacacccttctatagcaggcactagagggtgtgctctggccttgtttatcgccctccttttttgacgtagggccactcacactcagtcccactgcgggcgttcaagtcctatcacttagctccaggagccgtaggaatcctggtaccatgcctgctgttcgccgttcacgtccgcccccagcggctgttgtgaaaggggctggctcccccagttgctctggtatcggcgctttgtctcccccctggttctggtgacccccgtcaaactttcgcttacctgctggtaaacttgccttggcgcggcccactccacgagcggcttggcgtgctgccccacgggcccctgttgctccgccccggcccgctctgttggctgccgccccacgggctggggggccacctgcccggccacgtgccaccaccccacgcccacggccagccgtaatcaccccttcccatcggcgctgatctcatacttcctgtccctcttgggcctgaagttccagggggacccctcatgggcatagttccaggcatcatgcctcctctaacttgcatcatctgcatcattcttctttctctggctctaagtatttcttcttttttctttttatcagaaggaggtttggctaatgacacttcaatatttgaaccccctaattctttagaatctaaggcttccattgccttaacggcattatccctatcttcaaaatgtataaaagcgtaatctttgattttcttcaccctctccaccttgccgaactgttcaaattcttcttttaatttttcttcacttatttcctgtgttaaatttcttacgtagaggaccttaaccttagacatagtttgggcatctggttcttcttgaggatcagcccaatctacgataatatcgcagccccaaactttaatacgccctgtgcccaaccttcgttttgctaaagatgctgccttatgtgattcatattccaaaaagcaaaatccacgatttttcttcttatcgtcgggcgacgaataaatgatcacttccatcaggccggctgtcaatttaccaaattcgtccaagatctcctctttgccttttgactttggaatgtttccgacgaaaagacgtagatttggcacgctaatgttaattttcagattctttccaggtttgatttcatgattatccaacttttggacggctatttgggctgcttcccgatttgtaaatgttacaaaggcatatcctctattggtacccgtcatcgggtccatcattagtctaaggtcccatatgtggccgcattcctcgaataatggaatcagctcatcttcatacatgtctttgggaattttgccgcaaaatacttcgcatcccgaacctggcggcgcaccttcccaatctggtgggggaccaccgaattttcgttgaccggtagtaacatctaaagcatatccggttcggtctaatatttttttgatcttatcgtggtcgggtcccttgacgggcactggcgcgggagtggccgcacccgccgagccgctggtccccgctctgctcttctgtctgtaggtcttcatgactccgcataggtacgccgatttgtttgacacgtgctccaagttggaatccaggaactgacctagaacgttgagcgccccatctacgggaaattcttttaaggcgtcaagcgctctttcgtctaggtcaacgtgtactagcttgccagtcttatagatctcatccaattttgcggcaactttctcgtcaaggccatattccagcagcttctggtagtcttcagtacgttcgacgtcgatcttcattgattcttccggtacctcaccattaccttctgccatagcttagtcgtaaatatggaatcctcttatcagcaagtaattgatcttagattagttgggtagcattttcgacatatttttactcacgccttgattttatatcttgtgaagctattaggtatctataatttcgtagaacggttattttgaagtgtatgacttattctggttgaaagtttgtcaaagctgcatatcggcccaccaaatttaacagggtatatacacgaaatgtacacacaacacttaaaattataacaaattcataaaatttaaaatggcggccgccgactttaatgggcaacgtcaacg

SEQ ID NO: 2750 - DNA, 1979 bp, Diabrotica virgifera
  SmartBlast Evalue=0; Info=Heterogeneous nuclear ribonucleoprotein Q n=1 Tax=Camponotus floridanus RepID=E2AQJ4_ 9HYME
ccggctgataatcgtaatagtaatcttcataccggtaaaaatcatcataatagggatcactgtagccgcctctatagtccccgtaaccgtaatagtcgtaatcgtaatcgtaatcaccccttcccatcggcgctgatctcatacttcctgtccctcttgggcctgaagttccagggggacccctcatgggcatagttccaggcatcatgcctcctctaacttgcatcatctgcatcattcttctttctctggctctaagtatttcttcttttttctttttatcagaaggaggtttggctaatgacacttcaatatttgaaccccctaattctttagaatctaaggcttccattgccttaacggcattatccctatcttcaaaatgtataaaagcgtaatctttgattttcttcaccctctccaccttgccgaactgttcaaattcttcttttaatttttcttcacttatttcctgtgttaaatttcttacgtagaggaccttaaccttagacatagtttgggcatctggttcttcttgaggatcagcccaatctacgataatatcgcagccccaaactttaatacgccctgtgcccaaccttcgttttgctaaagatgctgccttatgtgattcatattccaaaaagcaaaatccacgatttttcttcttatcgtcgggcgacgaataaatgatcacttccatcaggccggctgtcaatttaccaaattcgtccaagatctcctctttgccttttgactttggaatgtttccgacgaaaagacgtagatttggcacgctaatgttaattttcagattctttccaggtttgatttcatgattatccaacttttggacggctatttgggctgcttcccgatttgtaaatgttacaaaggcatatcctctattggtacccgtcatcgggtccatcattagtctaaggtcccatatgtggccgcattcctcgaataatggaatcagctcatcttcatacatgtctttgggaattttgccgcaaaatacttcgcatcccgaacctggcggcgcaccttcccaatctggtgggggaccaccgaattttcgttgaccggtagtaacatctaaagcatatccggttcggtctaatatttttttgatcttatcgtggtcgggtcccttgacgggcactggcgcgggagtggccgcacccgccgagccgctggtccccgctctgctcttctgtctgtaggtcttcatgactccgcataggtacgccgatttgtttgacacgtgctccaagttggaatccaggaactgacctagaacgttgagcgccccatctacgggaaattcttttaaggcgtcaagcgctctttcgtctaggtcaacgtgtactagcttgccagtcttatagatctcatccaattttgcggcaactttctcgtcaaggccatattccagcagcttctggtagtcttcagtacgttcgacgtcgatcttcattgattcttccggtacctcaccattaccttctgccatagcttagtcgtaaatatggaatcctcttatcagcaagtaattgatcttagattagttgggtagcattttcgacatatttttactcacgccttgattttatatcttgtgaagctattaggtatctataatttcgtagaacggttattttgaagtgtatgacttattctggttgaaagtttgtcaaagctgcatatcggcccaataagttaaaagttaagaatccttagtttaatacacttgataaaacacaacaaacatcatttgtacaataaaaatcaacactgttcaacaatttgcagaaaaaaactaaaattattaacataaaacagcgattaataaaaaacgtacaacacaaaactaaaatagtcaattttaaagttgtttcgtaacaaaaaataaaacaaatttcgtggaatttttggtgtagtaccgactcccgcggtttataatgcagtgtgtg

SEQ ID NO: 2751 - DNA, 1828 bp, Diabrotica virgifera
  SmartBlast Evalue=0; Info=Heterogeneous nuclear ribonucleoprotein Q n=1 Tax=Camponotus floridanus RepID=E2AQJ4_ 9HYME
ccggctgataatcgtaatagtaatcttcataccggtaaaaatcatcataatagggatcactgtagccgcctctatagtccccgtaaccgtaatagtcgtaatcgtaatcgtaatcaccccttcccatcggcgctgatctcatacttcctgtccctcttgggcctgaagttccagggggacccctcatgggcatagttccaggcatcatgcctcctctaacttgcatcatctgcatcattcttctttctctggctctaagtatttcttcttttttctttttatcagaaggaggtttggctaatgacacttcaatatttgaaccccctaattctttagaatctaaggcttccattgccttaacggcattatccctatcttcaaaatgtataaaagcgtaatctttgattttcttcaccctctccaccttgccgaactgttcaaattcttcttttaatttttcttcacttatttcctgtgttaaatttcttacgtagaggaccttaaccttagacatagtttgggcatctggttcttcttgaggatcagcccaatctacgataatatcgcagccccaaactttaatacgccctgtgcccaaccttcgttttgctaaagatgctgccttatgtgattcatattccaaaaagcaaaatccacgatttttcttcttatcgtcgggcgacgaataaatgatcacttccatcaggccggctgtcaatttaccaaattcgtccaagatctcctctttgccttttgactttggaatgtttccgacgaaaagacgtagatttggcacgctaatgttaattttcagattctttccaggtttgatttcatgattatccaacttttggacggctatttgggctgcttcccgatttgtaaatgttacaaaggcatatcctctattggtacccgtcatcgggtccatcattagtctaaggtcccatatgtggccgcattcctcgaataatggaatcagctcatcttcatacatgtctttgggaattttgccgcaaaatacttcgcatcccgaacctggcggcgcaccttcccaatctggtgggggaccaccgaattttcgttgaccggtagtaacatctaaagcatatccggttcggtctaatatttttttgatcttatcgtggtcgggtcccttgacgggcactggcgcgggagtggccgcacccgccgagccgctggtccccgctctgctcttctgtctgtaggtcttcatgactccgcataggtacgccgatttgtttgacacgtgctccaagttggaatccaggaactgacctagaacgttgagcgccccatctacgggaaattcttttaaggcgtcaagcgctctttcgtctaggtcaacgtgtactagcttgccagtcttatagatctcatccaattttgcggcaactttctcgtcaaggccatattccagcagcttctggtagtcttcagtacgttcgacgtcgatcttcattgattcttccggtacctcaccattaccttctgccatagcttagtcgtaaatatggaatcctcttatcagcaagtaattgatcttagattagttgggtagcattttcgacatatttttactcacgccttgattttatatcttgtgaagctattaggtatctataatttcgtagaacggttattttgaagtgtatgacttattctggttgaaagtttgtcaaagctgcatatcggcccaccaaatttaacagggtatatacacgaaatgtacacacaacacttaaaattataacaaattcataaaatttaaaatggcggccgccgactttaatgggcaacgtcaacg

SEQ ID NO: 2752 - DNA, 2908 bp, Diabrotica virgifera
  SmartBlast Evalue=1E-28; Info=Diacylglycerol O-acyltransferase n=1 Tax=Camponotus floridanus RepID=E2AAY9_9HYME
gctagcactgaagaatggtactccattggttccggtgatttcctttggagagactgacttgttcgaccaacttgaaggatcttggttgagaacttttcaagagaaactcaggaagcatattggcctggcgcctgttcttcctataggtagagggttctttcaatactcgtttggtttaattccaaggaggtgtcctgttaccactgttgtcggggagcccatggatgttcctaaactcgacaacgtaacaaatgaagacatagaagagtaccaccaaaaattcacgaaacacctcatcgccatgttcgaagagcaaaaatacaaatatgtagaaaaaccggaagagaagaaactggtaatagaatagagaaaacatgtggttattcggtacttgtaatgtatcccaaaagttgttgaatctattgatttagaaataatttgttggttggttaggaatatttgaaaattatgtatatatttatttatttgtttcttatatttttgattttgttacttccttgttttgatagttatataattaactaagtaatggttggttgctccatttttgcaccaatagtatatctggcttgcgtcatttttgaggtcggtacttttattgggaccgtgcaagttcggaagagcgacacctggtttcataacttagcaatatttttagcacttttaattatattggccaattatattagtcctcgttactggataattgtcaaggccatagcccataaaagaatgagaagaaaaagtaagattgaggttatgttattaaaaggtaaacattgtacctactacaacaaaatgccattaattaaattcactttaataattgcatatcatatcaatattgtgaagcattggttattgatggagcatattgtcaatttgacaatttcaattaacaatatggattatttaagaaatgtatgttaagaaagttgcaagatttctccgctgtacgcgcacgatcgtttctcgtatcccctccaagtacttgcacacagcgaataggtgattttttacatttcatgcatgctgagtacgcattgaaaaagccggagccgccttctataaactaaagaaaattcttatttatagagatattacattaaaccttaaaatcagattaatacgctgcgccatattctcctacttgctgtatgtcattgagagctgaactattacagacgcaataatgaaaaaattggaggtattgaagatgtggatacaaaataacagaactatgctacgcagacgacctagtgttcattggggagtccgaaaaacaattacaagaaaatataaacatactgtatgaagagctaaaaatcagaaacatgaaaacaaacagagaaaaatcaaaaacaatgataattggaagacaaaaaggaaaacatagaaatagaagtagatggcaagcaacttgaacaggtagacagatataagtatttgggggtaatcataagccgggatggaaaattagaagatgagataaatgaaagaattgcaaagactggtaagctgtacaatattattaagagtaactttttaaaaaagaaagaaatacctaagaatataaaaacggaaatagtaaaaaagattgtgaaacacactctaacctatgcctgtgaatcttgggcattaacaaaaaggcaaaagaatagactaataagcacagaaatgagatttttgagaacaatagagggaaaacaaggaaagataacattagaaatcaaacctttagagaaaatctgaaaatacaccagttacaacaacaatcgaacaaggacaacttagatggctcggacatgtactgagaagaggagaagagaaaatagtagaggtcacaatttaatttcgacctcgccatgacagtcgcaatttatagtgattcgtattcatttcgatattagttccaactggggatattaacgttaggtatcattttgacactgctcagaatttgggttggttctcctgtttgggcgcgcgacttttccccaacacgagtctacgagaagtgtacggtaaatttaacctgtaattaggtacaaagaaagaaatatgtatgtcattgtactcactttatcacgctttacggaatctggatttcaatgcatattttttttataattctcgtgtcaaagttacgcgtgaagttagtcgtattgatgacagttggggaaacgtccgcgacccctcctgtttattgtatttatatgcaaccaccgcaacgtttgttgatagtctgggcaaattatcgaaaaaatatcatttttgggaaaagttatttaccagcaattttattgctaaaatcgaatcttaagattacataatattagtaatatggggtataacaagtgtggtattttatttataaacaggtaagcgctcctaaatcttcttttttttttaattagtgctctgtaactcctaagattgttcctttaaaccaagggcactcaaataaaagttcaccgtaatttagttctgcacaaagttattctttttccgatttccttcaacaaaaattttactcggaaaatccgagctttcccaaaaaatctgcaattttcaattaaattttggggaagtggttatttatcaatgtttgaataaattggtgacatgaaagattttttatagtagattatatatcaggaggccggcgacaatctaaccaatagtttagcaataattaaaatgttaattaaaaaatttcggtcgaaataataaccagaaagattatgatacaccagaataactatgattttcgtataaaaaagcactatacctattcaacgtactttacagaattgaaattggaccatttgagcggtctcaggaatgttataaagaaacattttttggcttataaacaaatagaacc

SEQ ID NO: 2753 - DNA, 2096 bp, Diabrotica virgifera
  SmartBlast Evalue=9E-28; Info=Reverse transcriptase family member n=1 Tax=Glycine max RepID=Q1AKH8_SOYBN
cgcgtttgatttccaccaagcaacaaaaaaaagaacggacttaatggaaactttatacagactaaataataaattttaacaacaaaccagaccctttctggactaaaactaaaatgaaaaagaaatacatgtatgtttcatagatatggaaaaagctttcgacagaattaaaagagaagatttttggaaaatactagagaagagaaaaattgaacaagatctaataggatgcatccagagtttatacgaaaaaacgaaaagctatgcaaggacaagaaatgaaaaaatcaaaagtatccgacagcaacattggattaaaacagggttgtgtcctgagcccactactctttaacctagtactagatgacgtaataaaagaatgcaaacacaaatggagaaaatataatgtaggatattggaagttaagaatgatacaaaataacagaactatgctacgcagacgacctagtgttcattggggagtccgaaaaacaattacaagaaaatataaacatactgtatgaagagctaaaaatcagaaacatgaaaacaaacagagaaaaatcaaaaacaatgataattggaagacaaaaaggaaaacatagaaatagaagtagatggcaagcaacttgaacaggtagacagatataagtatttgggggtaatcataagccgggatggaaaattagaagatgagataaatgaaagaattgcaaagactggtaagctgtacaatattattaagagtaactttttaaaaaagaaagaaatacctaagaatataaaaacggaaatagtaaaaaagattgtgaaacacactctaacctatgcctgtgaatcttgggcattaacaaaaaggcaaaagaatagactaataagcacagaaatgagatttttgagaacaatagagggaaaacaaggaaagataacattagaaatcaaacctttagagaaaatctgaaaatacaccagttacaacaacaatcgaacaaggacaacttagatggctcggacatgtactgagaagaggagaagagaaaatagtagaggtcacaatttaatttcgacctcgccatgacagtcgcaatttatagtgattcgtattcatttcgatattagttccaactggggatattaacgttaggtatcattttgacactgctcagaatttgggttggttctcctgtttgggcgcgcgacttttccccaacacgagtctacgagaagtgtacggtaaatttaacctgtaattaggtacaaagaaagaaatatgtatgtcattgtactcactttatcacgctttacggaatctggatttcaatgcatattttttttataattctcgtgtcaaagttacgcgtgaagttagtcgtattgatgacagttggggaaacgtccgcgacccctcctgtttattgtatttatatgcaaccaccgcaacgtttgttgatagtctgggcaaattatcgaaaaaatatcatttttgggaaaagttatttaccagcaattttattgctaaaatcgaatcttaagattacataatattagtaatatggggtataacaagtgtggtattttatttataaacaggtaagcgctcctaaatcttcttttttttttaattagtgctctgtaactcctaagattgttcctttaaaccaagggcactcaaataaaagttcaccgtaatttagttctgcacaaagttattctttttccgatttccttcaacaaaaattttactcggaaaatccgagctttcccaaaaaatctgcaattttcaattaaattttggggaagtggttatttatcaatgtttgaataaattggtgacatgaaagattttttatagtagattatatatcaggaggccggcgacaatctaaccaatagtttagcaataattaaaatgttaattaaaaaatttcggtcgaaataataaccagaaagattatgatacaccagaataactatgattttcgtataaaaaagcactatacctattcaacgtactttacagaattgaaattggaccatttgagcggtctcaggaatgttataaagaaacattttttggcttataaacaaatagaacc

SEQ ID NO: 2754 - DNA, 2150 bp, Diabrotica virgifera
  SmartBlast Evalue=8E-29; Info=Diacylglycerol O-acyltransferase n=1 Tax=Camponotus floridanus RepID=E2AAY9_9HYME
gctagcactgaagaatggtactccattggttccggtgatttcctttggagagactgacttgttcgaccaacttgaaggatcttggttgagaacttttcaagagaaactcaggaagcatattggcctggcgcctgttcttcctataggtagagggttctttcaatactcgtttggtttaattccaaggaggtgtcctgttaccactgttgtcggggagcccatggatgttcctaaactcgacaacgtaacaaatgaagacatagaagagtaccaccaaaaattcacgaaacacctcatcgccatgttcgaagagcaaaaatacaaatatgtagaaaaaccggaagagaagaaactggtaatagaatagagaaaacatgtggttattcggtacttgtaatgtatcccaaaagttgttgaatctattgatttagaaataatttgttggttggttaggaatatttgaaaattatgtatatatttatttatttgtttcttatatttttgattttgttacttccttgttttgatagttatataattaactaagtaatggttggttgctccatttttgcaccaatagtatatctggcttgcgtcatttttgaggtcggtacttttattgggaccgtgcaagttcggaagagcgacacctggtttcataacttagcaatatttttagcacttttaattatattggccaattatattagtcctcgttactggataattgtcaaggccatagcccataaaagaatgagaagaaaaagtaagattgaggttatgttattaaaaggtaaacattgtacctactacaacaaaatgccattaattaaattcactttaataattgcatatcatatcaatattgtgaagcattggttattgatggagcatattgtcaatttgacaatttcaattaacaatatggattatttaagaaatgtatgttaagaaagttgcaagatttctccgctgtacgcgcacgatcgtttctcgtatcccctccaagtacttgcacacagcgaataggtgattttttacatttcatgcatgctgagtacgcattgaaaaagccggagccgccttctataaactaaagaaaattcttatttatagagatattacattaaaccttaaaatcagattaatacgctgcgccatattctcctacttgctgtatgtcattgagagctgaactattacagacgcaataatgaaaaaattggaggtattgaagatgtggatacaaaataacagaactatgctacgcagacgacctagtgttcattggggagtccgaaaaacaattacaagaaaatataaacatactgtatgaagagctaaaaatcagaaacatgaaaacaaacagagaaaaatcaaaaacaatgataattggaagacaaaaaggaaaacatagaaatagaagtagatggcaagcaacttgaacaggtagacagatataagtatttgggggtaatcataagccgggatggaaaattagaagatgagataaatgaaagaattgcaaagactggtaagctgtacaatattattaagagtaactttttaaaaaagaaagaaatacctaagaatataaaaacggaaatagtaaaaaagattgtgaaacacactctaacctatgcctgtgaatcttgggcattaacaaaaaggcaaaagaatagactaataagcacagaaatgagatttttgagaacaatagagggaaaacaaggaaagataacattagaaatcaaacctttagagaaaatctgaaaatacaccagttacaacaacaatcgaacaaggacaacttagatggctcggacatgtactgagaagaggagaagagaaaatagtaagacaaatatatgaagcgagagatatgggaagaaagaagagaggaagaccaagaaagacgtggacagaagaagtgagggaagcggccgacaaaagaggaataaaatgggagaaaacaaaagcattggccatggatagaaggaaatggaaggaaatgtggaagaaaatgacggagaacctaactccgtaacaactcacaccgaaaggtagacgagttctggattaagtaaaagtaagtaagtatctcaaccggttttaaagcaataaataaatcgtcagtctgtaagaaaaat

SEQ ID NO: 2755 - DNA, 1338 bp, Diabrotica virgifera
  SmartBlast Evalue=8E-34; Info=Reverse transcriptase family member n=1 Tax=Glycine max RepID=Q1AKH8_SOYBN
cgcgtttgatttccaccaagcaacaaaaaaaagaacggacttaatggaaactttatacagactaaataataaattttaacaacaaaccagaccctttctggactaaaactaaaatgaaaaagaaatacatgtatgtttcatagatatggaaaaagctttcgacagaattaaaagagaagatttttggaaaatactagagaagagaaaaattgaacaagatctaataggatgcatccagagtttatacgaaaaaacgaaaagctatgcaaggacaagaaatgaaaaaatcaaaagtatccgacagcaacattggattaaaacagggttgtgtcctgagcccactactctttaacctagtactagatgacgtaataaaagaatgcaaacacaaatggagaaaatataatgtaggatattggaagttaagaatgatacaaaataacagaactatgctacgcagacgacctagtgttcattggggagtccgaaaaacaattacaagaaaatataaacatactgtatgaagagctaaaaatcagaaacatgaaaacaaacagagaaaaatcaaaaacaatgataattggaagacaaaaaggaaaacatagaaatagaagtagatggcaagcaacttgaacaggtagacagatataagtatttgggggtaatcataagccgggatggaaaattagaagatgagataaatgaaagaattgcaaagactggtaagctgtacaatattattaagagtaactttttaaaaaagaaagaaatacctaagaatataaaaacggaaatagtaaaaaagattgtgaaacacactctaacctatgcctgtgaatcttgggcattaacaaaaaggcaaaagaatagactaataagcacagaaatgagatttttgagaacaatagagggaaaacaaggaaagataacattagaaatcaaacctttagagaaaatctgaaaatacaccagttacaacaacaatcgaacaaggacaacttagatggctcggacatgtactgagaagaggagaagagaaaatagtaagacaaatatatgaagcgagagatatgggaagaaagaagagaggaagaccaagaaagacgtggacagaagaagtgagggaagcggccgacaaaagaggaataaaatgggagaaaacaaaagcattggccatggatagaaggaaatggaaggaaatgtggaagaaaatgacggagaacctaactccgtaacaactcacaccgaaaggtagacgagttctggattaagtaaaagtaagtaagtatctcaaccggttttaaagcaataaataaatcgtcagtctgtaagaaaaat

SEQ ID NO: 2756 - DNA, 516 bp, Diabrotica virgifera
tttataaacaaattagcactcctaaatcttctttttttttcaattagtgctctgtaactcctaaaattttcctttaaaccaaagacactcaaataaaaattcaccacaatttagttctgcacaaagttattctttttccgatttccttcaacaaaaattttactcggaaaatccgagctttcccaaaaaatctgcaattttcaattaaattttgggaaagtggttatttatcaatgtttgaataaattggtgacatgaaagattttttatagtagattatatatcaggaggccggcgacaatctaaccaatagtttagcaataattaaaatgttaattaaaaaatttcggtcgaaataataaccagaaagattatgatacaccagaataactatgattttcgtataaaaaagcactatacctattcaacgtactttacagaattgaaattggaccatttgagcggtctcaggaatgttataaagaaacattttttggcttataaacaaatagaacc

SEQ ID NO: 2757 - DNA, 2050 bp, Diabrotica virgifera
  SmartBlast Evalue=1E-122; Info=14-3-3 protein zeta n=27 Tax= Endopterygota RepID=1433Z_DROME
ctcggtgtttgtgtcgtagttcgtagtctcttcgtggggtaggttctttcatctgtctcagtttttgttaccgggctgttaaatagagcttagcaggagtatattcaacatttattactaaagtagctgaataatttgaagataaaagtatttagaattagagaaaaatgtctgctcctgataaagatgaattagttcaaagggccaagcttgctgagcaagcagaacgctatgatgatatggcctcagcaatgaaatcagttacagagacaggagtggaactcagtaacgaagaaaggaatctcctatcagtcgcatataagaatgtggttggtgccagacgatcatcatggagagtaatttcttcaattgaacaaaagactgaaggatcagagaggaaacaacagatggctcgagaatatagagaaaaagttgaaaaagagttacgagaaatctgcgatgacgtcttaggacttcttgacaaataccttatccctaaagcaagcaatgcagagtccaaagtattctacctcaagatgaagggagattactataggtacctcgcagaagtagccaccggcgacactaggaacactgtcgtcgattattcacaaaaagcttatcaagatgcattcgaaatctctaaggcgaaaatgacacccacacatccaatcaggttgggattggctcttaacttctcagtgttttactatgagatattaaattcaccagacaaagcttgccagttagctaaacaggcctttgacgatgcaatagccgagttggacacacttaacgaagactcatataaggacagtacccttattatgcagcttctccgagataacctcacactttggacgagtgacacgcagggcgaagctgatgagcctcaagaggctggtgataattaaaagtgtggagcgtcattttttaaacaattattcgttaataatgaaatttcatgtaagttgacgtattcgtggaacttggttgtgaagtttcattgacagttttaagtttcatcctgctgaaacttcgatatttaaaatgttttaggagatatgtaaatcgttaaatttatatttcacattatcacacaaccgtcatacttttcgcaacaagtaatttaagccataaaaaccaaatgtagtcatatagtttagtgatcgaaacaatatgattacatatattcatttctgtgattgttgtgtgattcaatgtcaattcttctgcatcaacttttgtttttttttatatatatattcagtactgtaatggtttttaattttttatatattaaatgtatatttatctccttctagaattttgaaaatttttttttgaaattttagcaccttttaagttgtaacttgttaactattacatttattatttaataacattgttttaggttatcttttttattttgtatttgttcattgttgaacttctccccagaacttacctctcggggtaaaggcaaatacagcggttttaaccaaaagtttttttaagagttggaattacgttatgtgaaatatatattttgtagaacaaatatgcagatcaaggtctatctgtagtccttacttgattttatagaagtcgatagacaatacttaaaaacattagtgcagcgttcaaataattaagataaatatattattgcatgatatcagccatttcgaaaaccatatagatcactgcacaaatcacttaaataaaacggctgtttggtttgtttcgacactgccaactaattgatgcttttgttgaagccgctgggtatgtttttaccctcatcatttattttgagtcagttatttaattacatttagtctgccaacttaattttgcactccattacatgggccaatatctgccccttcccctaaagtacctatgtttaccgtaaaccactcactttggatgtgctatatataaatgtatatgtattaaaataaaaactgctaccaagctctatttgttttctgttgtatctgtcgaagtatatgtcagatatcaataaatttttcaaaactctaaa

SEQ ID NO: 2758 - DNA, 2050 bp, Diabrotica virgifera
  SmartBlast Evalue=1E-123; Info=Multifunctional chaperone n=4 Tax=Neoptera RepID=D1FPL8_CIMLE
ctcggtgtttgtgtcgtagttcgtagtctcttcgtggggtaggttctttcatctgtctcagtttttgttaccgggctgttaaatagagcttagcaggagtatattcaacatttattactaaagtagctgaataatttgaagataaaagtatttagaattagagaaaaatgtctgctcctgataaagatgaattagttcaaagggccaagcttgctgagcaagcagaacgctatgatgatatggcctcagcaatgaaatcagttacagagacaggagtggaactcagtaacgaagaaaggaatctcctatcagtcgcatataagaatgtggttggtgccagacgatcatcatggagagtaatttcttcaattgaacaaaagactgaaggatcagagaggaaacaacagatggctcgagaatatagagaaaaagttgaaaaagagttacgagaaatctgcgatgacgtcttaggacttcttgacaaataccttatccctaaagcaagcaatgcagagtccaaagtattctacctcaagatgaagggagattactataggtacctcgcagaagtagccaccggcgacactaggaacaaagttgtagaagattctcaaaaggcatatcaagaagcatttgacatagctaagtcaaaaatgcagtctacccatcctattaggctaggacttgccctaaatttctctgtgttttattacgaaattataaattcacctccgagagcttgtcacttagccaaacaggcctttgacgatgcaatagccgagttggacacacttaacgaagactcatataaggacagtacccttattatgcagcttctccgagataacctcacactttggacgagtgacacgcagggcgaagctgatgagcctcaagaggctggtgataattaaaagtgtggagcgtcattttttaaacaattattcgttaataatgaaatttcatgtaagttgacgtattcgtggaacttggttgtgaagtttcattgacagttttaagtttcatcctgctgaaacttcgatatttaaaatgttttaggagatatgtaaatcgttaaatttatatttcacattatcacacaaccgtcatacttttcgcaacaagtaatttaagccataaaaaccaaatgtagtcatatagtttagtgatcgaaacaatatgattacatatattcatttctgtgattgttgtgtgattcaatgtcaattcttctgcatcaacttttgtttttttttatatatatattcagtactgtaatggtttttaattttttatatattaaatgtatatttatctccttctagaattttgaaaatttttttttgaaattttagcaccttttaagttgtaacttgttaactattacatttattatttaataacattgttttaggttatcttttttattttgtatttgttcattgttgaacttctccccagaacttacctctcggggtaaaggcaaatacagcggttttaaccaaaagtttttttaagagttggaattacgttatgtgaaatatatattttgtagaacaaatatgcagatcaaggtctatctgtagtccttacttgattttatagaagtcgatagacaatacttaaaaacattagtgcagcgttcaaataattaagataaatatattattgcatgatatcagccatttcgaaaaccatatagatcactgcacaaatcacttaaataaaacggctgtttggtttgtttcgacactgccaactaattgatgcttttgttgaagccgctgggtatgtttttaccctcatcatttattttgagtcagttatttaattacatttagtctgccaacttaattttgcactccattacatgggccaatatctgccccttcccctaaagtacctatgtttaccgtaaaccactcactttggatgtgctatatataaatgtatatgtattaaaataaaaactgctaccaagctctatttgttttctgttgtatctgtcgaagtatatgtcagatatcaataaatttttcaaaactctaaa

SEQ ID NO: 2759 - DNA, 2014 bp, Diabrotica virgifera
  SmartBlast Evalue=1E-122; Info=14-3-3 protein zeta n=27 Tax= Endopterygota RepID=1433Z_DROME
ctctcgctcgtcacttcgtcacactcgtgatcgctgatctagtctattcattgttgaaagtagtgtgtatagcgtcggctgctataaaatcttactatttattgaataaaaccatttagaattagagaaaaatgtctgctcctgataaagatgaattagttcaaagggccaagcttgctgagcaagcagaacgctatgatgatatggcctcagcaatgaaatcagttacagagacaggagtggaactcagtaacgaagaaaggaatctcctatcagtcgcatataagaatgtggttggtgccagacgatcatcatggagagtaatttcttcaattgaacaaaagactgaaggatcagagaggaaacaacagatggctcgagaatatagagaaaaagttgaaaaagagttacgagaaatctgcgatgacgtcttaggacttcttgacaaataccttatccctaaagcaagcaatgcagagtccaaagtattctacctcaagatgaagggagattactataggtacctcgcagaagtagccaccggcgacactaggaacactgtcgtcgattattcacaaaaagcttatcaagatgcattcgaaatctctaaggcgaaaatgacacccacacatccaatcaggttgggattggctcttaacttctcagtgttttactatgagatattaaattcaccagacaaagcttgccagttagctaaacaggcctttgacgatgcaatagccgagttggacacacttaacgaagactcatataaggacagtacccttattatgcagcttctccgagataacctcacactttggacgagtgacacgcagggcgaagctgatgagcctcaagaggctggtgataattaaaagtgtggagcgtcattttttaaacaattattcgttaataatgaaatttcatgtaagttgacgtattcgtggaacttggttgtgaagtttcattgacagttttaagtttcatcctgctgaaacttcgatatttaaaatgttttaggagatatgtaaatcgttaaatttatatttcacattatcacacaaccgtcatacttttcgcaacaagtaatttaagccataaaaaccaaatgtagtcatatagtttagtgatcgaaacaatatgattacatatattcatttctgtgattgttgtgtgattcaatgtcaattcttctgcatcaacttttgtttttttttatatatatattcagtactgtaatggtttttaattttttatatattaaatgtatatttatctccttctagaattttgaaaatttttttttgaaattttagcaccttttaagttgtaacttgttaactattacatttattatttaataacattgttttaggttatcttttttattttgtatttgttcattgttgaacttctccccagaacttacctctcggggtaaaggcaaatacagcggttttaaccaaaagtttttttaagagttggaattacgttatgtgaaatatatattttgtagaacaaatatgcagatcaaggtctatctgtagtccttacttgattttatagaagtcgatagacaatacttaaaaacattagtgcagcgttcaaataattaagataaatatattattgcatgatatcagccatttcgaaaaccatatagatcactgcacaaatcacttaaataaaacggctgtttggtttgtttcgacactgccaactaattgatgcttttgttgaagccgctgggtatgtttttaccctcatcatttattttgagtcagttatttaattacatttagtctgccaacttaattttgcactccattacatgggccaatatctgccccttcccctaaagtacctatgtttaccgtaaaccactcactttggatgtgctatatataaatgtatatgtattaaaataaaaactgctaccaagctctatttgttttctgttgtatctgtcgaagtatatgtcagatatcaataaatttttcaaaactctaaa

SEQ ID NO: 2760 - DNA, 2014 bp, Diabrotica virgifera
  SmartBlast Evalue=1E-123; Info=Multifunctional chaperone n=4 Tax=Neoptera RepID=D1FPL8_CIMLE
ctctcgctcgtcacttcgtcacactcgtgatcgctgatctagtctattcattgttgaaagtagtgtgtatagcgtcggctgctataaaatcttactatttattgaataaaaccatttagaattagagaaaaatgtctgctcctgataaagatgaattagttcaaagggccaagcttgctgagcaagcagaacgctatgatgatatggcctcagcaatgaaatcagttacagagacaggagtggaactcagtaacgaagaaaggaatctcctatcagtcgcatataagaatgtggttggtgccagacgatcatcatggagagtaatttcttcaattgaacaaaagactgaaggatcagagaggaaacaacagatggctcgagaatatagagaaaaagttgaaaaagagttacgagaaatctgcgatgacgtcttaggacttcttgacaaataccttatccctaaagcaagcaatgcagagtccaaagtattctacctcaagatgaagggagattactataggtacctcgcagaagtagccaccggcgacactaggaacaaagttgtagaagattctcaaaaggcatatcaagaagcatttgacatagctaagtcaaaaatgcagtctacccatcctattaggctaggacttgccctaaatttctctgtgttttattacgaaattataaattcacctccgagagcttgtcacttagccaaacaggcctttgacgatgcaatagccgagttggacacacttaacgaagactcatataaggacagtacccttattatgcagcttctccgagataacctcacactttggacgagtgacacgcagggcgaagctgatgagcctcaagaggctggtgataattaaaagtgtggagcgtcattttttaaacaattattcgttaataatgaaatttcatgtaagttgacgtattcgtggaacttggttgtgaagtttcattgacagttttaagtttcatcctgctgaaacttcgatatttaaaatgttttaggagatatgtaaatcgttaaatttatatttcacattatcacacaaccgtcatacttttcgcaacaagtaatttaagccataaaaaccaaatgtagtcatatagtttagtgatcgaaacaatatgattacatatattcatttctgtgattgttgtgtgattcaatgtcaattcttctgcatcaacttttgtttttttttatatatatattcagtactgtaatggtttttaattttttatatattaaatgtatatttatctccttctagaattttgaaaatttttttttgaaattttagcaccttttaagttgtaacttgttaactattacatttattatttaataacattgttttaggttatcttttttattttgtatttgttcattgttgaacttctccccagaacttacctctcggggtaaaggcaaatacagcggttttaaccaaaagtttttttaagagttggaattacgttatgtgaaatatatattttgtagaacaaatatgcagatcaaggtctatctgtagtccttacttgattttatagaagtcgatagacaatacttaaaaacattagtgcagcgttcaaataattaagataaatatattattgcatgatatcagccatttcgaaaaccatatagatcactgcacaaatcacttaaataaaacggctgtttggtttgtttcgacactgccaactaattgatgcttttgttgaagccgctgggtatgtttttaccctcatcatttattttgagtcagttatttaattacatttagtctgccaacttaattttgcactccattacatgggccaatatctgccccttcccctaaagtacctatgtttaccgtaaaccactcactttggatgtgctatatataaatgtatatgtattaaaataaaaactgctaccaagctctatttgttttctgttgtatctgtcgaagtatatgtcagatatcaataaatttttcaaaactctaaa

SEQ ID NO: 2761 - DNA, 1696 bp, Diabrotica virgifera
  SmartBlast Evalue=1E-102; Info=Endonuclease-reverse transcriptase n=1 Tax=Bombyx mori RepID=D7F170_BOMMO
aaagcattacataccattttggtaggttcatttaaaattttccaaataggtaggtacctacctatgtaattttttattaggatactgaaacatttacaattattacgtacatgtctcttttaaaaactatttaaaaagtcactacaattataaacttgctttttctctgccatcacaacaataaaaactaatatacacataatctccatattgaataattattggcagatgattttaaaacccaatcagatcccgtataacgtttgagcgactaataccatactgtcggtgtgcgcatgtgcccaggaaaataaaaattcaccctcctgcctaaagaagtataacttcaaaaaccaatttgcttacactaaaacatatattggtatgcggaataaaaaattgcacctagcctgcaattcaaaaaaatgcgctaatcagttgcgtacgatttgcagcgtgtcctatttcgcagtatagtaaaagcgttgtaaaagtagatacgcaccttaattagaaatattattttatagtttttgtgccgaattcgtattacattgtgataagtttatttctaccccctcggtaaaagaagtgaaaatatctatagaaaaactaaggaaccacaaatccccaggcagcgatggcatcgcagcagagttatttaagcacggtggagagcaaatcaccaaggtgatgcgagaaattggttgtaaaatttggtctgaggagcaaatgcctgaagaatggagtttaggcttaatatgcccgttacacaaaaagggaaaccaactggaatgcaataattaccgcggaataactctcctaaatacagcatacaagatattgtcaaacattttacacgagagattgaagccttataccgaaacgtttctaggagaatatcaggcagaatttaggcgtggacgttcaaccattaaccagatctttacactacgacagatcctcgaaaaagcgcaagagtttaacatatatatgtaccatatctttgtcgattttaaagcggcatatgacagtgtcttaagagcaattttttacaacgctatgaatgagttaggaattccaaaaaaactcatatgtttgataaaagtgacaatggcgaagatgctatcagcagtaaaaattcaaaacgactcgtcaaccccatttgaaattcataggggattaaggcagggagaggcgctggcgtgtcagctttttaatgtagccttagaaaaagttgtacgagacgctaatttagataggaggggaaatgttgacgcagatctaatcatcaatgaccaaaaattcgaagcggtcaaagagttcatatctctagggacatcgcttaaccccaataataacacatcagaggaaatacgaagacgaataataattgcaaacaggtgttatcatagtctatcaaagtacttagctaacaaacgtctgtctcaaaaaactcgtataaggctgtatagaacattgatagtccccgttctcacatatggatcagaggaatggaggctaactaaaacagatgaatcctctctgtcgatttttgaaagaaaggtgatacgtaagatattcggagcggtctgtgagaacggaatatggaggcgtagatataactttgaactgcagaatatctacaagcatacgtttggtggaaaatatattatcactataattaagcgaaacc

SEQ ID NO: 2762 - DNA, 1667 bp, Diabrotica virgifera
  SmartBlast Evalue=3E-80; Info=Endonuclease-reverse transcriptase n=1 Tax=Bombyx mori RepID=D7F170_BOMMO
aaagcattacataccattttggtaggttcatttaaaattttccaaataggtaggtacctacctatgtaattttttattaggatactgaaacatttacaattattacgtacatgtctcttttaaaaactatttaaaaagtcactacaattataaacttgctttttctctgccatcacaacaataaaaactaatatacacataatctccatattgaataattattggcagatgattttaaaacccaatcagatcccgtataacgtttgagcgactaataccatactgtcggtgtgcgcatgtgcccaggaaaataaaaattcaccctcctgcctaaagaagtataacttcaaaaaccaatttgcttacactaaaacatatattggtatgcggaataaaaaattgcacctagcctgcaattcaaaaaaatgcgctaatcagttgcgtacgatttgcagcgtgtcctatttcgcagtatagtaaaagcgttgtaaaagtagatacgcaccttaattagaaatattattttatagtttttgtgccgaattcgtattacattgtgataagtttatttctaccccctcggtaaaagaagtgaaaatatctatagaaaaactaaggaaccacaaatccccaggcagcgatggcatcgcagcagagttatttaagcacggtggagagcaaatcaccaaggtgatgcgagaaattggttgtaaaatttggtctgaggagcaaatgcctgaagaatggagtttaggcttaatatgcccgttacacaaaaagggaaaccaactggaatgcaataattaccgcggaataactctcctaaatacagcatacaagatattgtcaaacattttacacgagagattgaagccttataccgaaacgtttctaggagaatatcaggcagaatttaggcgtggacgttcaaccattaaccagatctttacactacgacagatcctcgaaaaagcgcaagagtttaacatatatatgtaccatatctttgtcgattttaaagcggcatatgacagtgtcttaagagcaattttttacaacgctatgaatgagttaggaattccaaaaaaactcatatgtttgataaaagtgacaatggcgaagatgctatcagcagtaaaaattcaaaacgactcgtcaaccccatttgaaattcataggggattaaggcagggagaggcgctggcgtgtcagctttttaatgtagccttagaaaaagttgtacgagacgctaatttagataggaggggaaatgttgacgcagatctaatcatcaatgaccaaaaattcgaagcggtcaaagagttcatatctctagggacatcgcttaaccccaataataacacatcagaggaaatacgaagacgaataataattgcaaacaggtgttatcatagtctatcaaagtacttagctaacaaacgtctgtctcaaaaaactcgtataaggctgtatagaacattgacaccgttctcacatatggatcagaggcatggacgctaactaaaacagatgaatccgctctatcgatttttgaaagaaaggtgctacgcaagatattcggagcagtctgtgagaacggaatatggaggcgtagttataactttgatctgcagaatatctacaagtagcccgatcaaagaactatc

SEQ ID NO: 2763 - DNA, 1497 bp, Diabrotica virgifera
  SmartBlast Evalue=1E-75; Info=Endonuclease-reverse transcriptase n=1 Tax=Bombyx mori RepID=D7F170_BOMMO
aaagcattacataccattttggtaggttcatttaaaattttccaaataggtaggtacctacctatgtaattttttattaggatactgaaacatttacaattattacgtacatgtctcttttaaaaactatttaaaaagtcactacaattataaacttgctttttctctgccatcacaacaataaaaactaatatacacataatctccatattgaataattattggcagatgattttaaaacccaatcagatcccgtataacgtttgagcgactaataccatactgtcggtgtgcgcatgtgcccaggaaaataaaaattcaccctcctgcctaaagaagtataacttcaaaaaccaatttgcttacactaaaacatatattggtatgcggaataaaaaattgcacctagcctgcaattcaaaaaaatgcgctaatcagttgcgtacgatttgcagcgtgtcctatttcgcagtatagtaaaagcgttgtaaaagtagatacgcaccttaattagaaatattattttatagtttttgtgccgaattcgtattacattgtgataagtttatttctaccccctcggtaaaagaagtgaaaatatctatagaaaaactaaggaaccacaaatccccaggcagcgatggcatcgcagcagagttatttaagcacggtggagagcaaatcaccaaggtgatgcgagaaattggttgtaaaatttggtctgaggagcaaatgcctgaagaatggagtttaggcttaatatgcccgttacacaaaaagggaaaccaactggaatgcaataattaccgcggaataactctcctaaatacagcatacaagatattgtcaaacattttacacgagagattgaagccttataccgaaacgtttctaggagaatatcaggcagaatttaggcgtggacgttcaaccattaaccagatctttacactacgacagatcctcgaaaaagcgcaagagtttaacatatatatgtaccatatctttgtcgattttaaagcggcatatgacagtgtcttaagagcaattttttacaacgctatgaatgagttaggaattccaaaaaaactcatatgtttgataaaagtgacaatggcgaagatgctatcagcagtaaaaattcaaaacgactcgtcaaccccatttgaaatacataggggttaaggcagggagatgcgctggcgtgtcaactttttaatgtagcattagaaaaagtcgtacgagacgctaatatagatagcaggggaacaatattcaatagatctgcccaaattctagcatatgcagacgacgtggacattataacaagaatcagagcgagaactgcggaaatcctaaccgagctagtagcagcagcagaacgaatggggttacatataaatcgaaataaaacaaaattcatggcgactaacacaaacacaagagctggaatgtgatgcagatctaatcatcaatgaaccaaaacttcgaagcggt

SEQ ID NO: 2764 - DNA, 1026 bp, Diabrotica virgifera
  SmartBlast Evalue=9E-28; Info=Endonuclease-reverse transcriptase n=1 Tax=Bombyx mori RepID=D7F170_BOMMO
atttgccgccgaacaattctcaaaagttctctagtgaacgcaatcgacgcaaatggtctcagcctcagtgcatgagagtattcgctttgtgagtgaccatggtggaggtagccggtaccctgaaacgatgccagcgcacagtgtgtcaataaggctagctaggtgaacaaaagtcatattcaaaactaaaagaatttgtttatgtctaacacatcccatcgctgagtaatagagcccaaaagtatgtattctcattgtaatagaatatatcagttgaaattcgtacatcatttaaatcacacgaaattaaagttttccttaatttttaaagatcaactgttgaagatggataatagttatgctagtaagtgcttattttttctaatccaataaatctatctgataatcaaatattaaaaagttttatgatgagcaaaggaaattttcttcgttttgaaactttggaagggtggcaattacttgtatcgttttgtacccgggataaattttctatatgtcatagctgttataataatacttattataataacaagaactgcggaaatcctaaccgagctaacacaaacacaagagctggaaatgttgacgcagatctaatcatcaatgaccaaaaattcgaagcggtcaaagagttcatatctctagggacatcgcttaaccccaataataacacatcagaggaaatacgaagacgaataataattgcaaacaggtgttatcatagtctatcaaagtacttagctaacaaacgtctgtctcaaaaaactcgtataaggctgtatagaacattgatagtccccgttctcacatatggatcagaggaatggaggctaactaaaacagatgaatcctctctgtcgatttttgaaagaaaggtgatacgtaagatattcggagcggtctgtgagaacggaatatggaggcgtagatataactttgaactgcagaatatctacaagcatacgtttggtggaaaatatattatcactataattaagcgaaacc

SEQ ID NO: 2765 - DNA, 997 bp, Diabrotica virgifera
  SmartBlast Evalue=4E-13; Info=Endonuclease-reverse transcriptase n=1 Tax=Bombyx mori RepID=D7F170_BOMMO
atttgccgccgaacaattctcaaaagttctctagtgaacgcaatcgacgcaaatggtctcagcctcagtgcatgagagtattcgctttgtgagtgaccatggtggaggtagccggtaccctgaaacgatgccagcgcacagtgtgtcaataaggctagctaggtgaacaaaagtcatattcaaaactaaaagaatttgtttatgtctaacacatcccatcgctgagtaatagagcccaaaagtatgtattctcattgtaatagaatatatcagttgaaattcgtacatcatttaaatcacacgaaattaaagttttccttaatttttaaagatcaactgttgaagatggataatagttatgctagtaagtgcttattttttctaatccaataaatctatctgataatcaaatattaaaaagttttatgatgagcaaaggaaattttcttcgttttgaaactttggaagggtggcaattacttgtatcgttttgtacccgggataaattttctatatgtcatagctgttataataatacttattataataacaagaactgcggaaatcctaaccgagctaacacaaacacaagagctggaaatgttgacgcagatctaatcatcaatgaccaaaaattcgaagcggtcaaagagttcatatctctagggacatcgcttaaccccaataataacacatcagaggaaatacgaagacgaataataattgcaaacaggtgttatcatagtctatcaaagtacttagctaacaaacgtctgtctcaaaaaactcgtataaggctgtatagaacattgacaccgttctcacatatggatcagaggcatggacgctaactaaaacagatgaatccgctctatcgatttttgaaagaaaggtgctacgcaagatattcggagcagtctgtgagaacggaatatggaggcgtagttataactttgatctgcagaatatctacaagtagcccgatcaaagaactatc

SEQ ID NO: 2766 - DNA, 1884 bp, Diabrotica virgifera
  SmartBlast Evalue=3E-25; Info=Endonuclease-reverse transcriptase n=1 Tax=Bombyx mori RepID=D7F164_BOMMO
cttcagaacaatacgtaaaagaaggtttaacaccgcccgaaattcgtttgagacttctaaattacatggcaactcctcaccttcaataccctccgcaaagaacggaagtcgagtttaaactgaacatgaaatcggtccacacaaaactgataaaaaaaagtgcaatcacacaagaaatcatcgacaaggaacatgatatggttttgaaatattagcgtataaagccccgtaaaatttctaatgctctgatgccgtccaatggccgtgctggtcagtgttacatcagaaattgcaaccagaaacaggaaaaaggtttgcggaagatgtgtactgcttgtactgacttagaaatacaaacgcattcgcatagatctggctcccttaaaatttcatctgttttcaaaacttaaaccttcccaactagtcagcacttcatctaatcaagaatccattgcggctgtagatgatgtatcacttccagacaaaacgaaagagaagctttggcgttcgttggagcaccattggatgaaataagaggatattgttttgaaacaaaacttctctgaacgcataaattttcgtttccattattagaaccaagaactttttagacaccactttgtcagatcacatctatttgtagtttttttatccaattctaactttcttttatttccattctttggcaaagcctttagatttgaaaagtcgaaaagaaatacatgggatattattcgggctatttatcggcctgtgtctttataaatttataaaaagctcaggcaccagatagttaccaaggattctgcactccgacttatagagaatttcctctgtgtttaaataaaagggagtttgtgaatttatttaatagagatattaacaagtaacccagtcaacagatttaggacatgctactaaattatgaagctaaactagcatgactaaaaacctatattgtcaaaacccaaaccgtgtgtaactttgtaattaacctacacgaacattcatattctcctattaaaattgtaaatacctttcaaaaaactattaacaaacagttcgtcttattataactattctgttatggtttatgggcattttaagctgcctaaatagattgtcacggacaatcaaactgccgaattacaaagaaggatcaccttagcatgggccgcatatggagctctatcagacatctttaagagcaacttgccaaattaaaaaagaagacgttcgaccaatatgtgcttccagtcatgacttacggcgccgaaacattatcgttaacccaggccacagcaaccaaacttagagtggcccaaagaagaatggaacggtcactacttggactgactttcagagacagggtcagaaacgaagaaatcagaagaaggacaggcgtcacagatgtcatagagcgagtagcatggctgaagtggaattgggcgggccatgtagccagaatgaaggacgggaggtggaccaaaaaattacagtgtggagaccaagagaagacagaagaagtagaggtgaccacctacacgatggacagacgacgtcaaaaggattgctgggaattggttgcaggaaagcccaagatcgacaaaactggaagaaattaggggaggcctatgttcaactttggatgcagaaggctggatgatgatgatgatgatgatgatgatgatgatgatgatgatgatgatgatgacacaagtctttggctcaaatcatgtacactgtgacggtaatttacttattcgatacaaaatattggaaagcatacataactgacatttaattccagtgggtatcgtttaggattgttcttactgatatagtccattcgctcattttgagaatagtttgacagattcatca

SEQ ID NO: 2767 - DNA, 1449 bp, Diabrotica virgifera
  SmartBlast Evalue=3E-81; Info=Endonuclease-reverse transcriptase n=1 Tax=Bombyx mori RepID=D7F164_BOMMO
tctaacaatgtgcacttcggctctaattttaaattcgaatgcgaacaaacagggaagacaataatgaagttatttagtaattttaagattttattattcatttactcttgttattttgtatttggttcttccttatatcaatggaacattttgacaaatagacagttgtcggaaacatgacaccatttacctagtgctacacaagtctacaagcataatgagagcgttggaggaaagtcgtatagattatcggtactcccgactgatagcgaacatatacaataatgcaaccatgaccgtccgattacacaaagataccaaatctataaaaatcaaaagaggaattagacagggagacacgttatctcccaaactctttacggcagtacttaaacatgctttcaaacaattggagtgggacgccaaaggaataaatgtcgacggcgaaaggctctcccacctacgattcgcagacgacatagttcttataacagacaacttaaaagagattagaactatgcttactgagttagatgccgcctgtaaaaaagttggtttaaacataaattttggaaagacacaatacatgacaaacctggtaccaagcgaaaatccaaaagtcgacgtcaacgaaatagcattggtccataaatataaatacttagggcatgaaatccaaattgccagggacaatcaaactgccgaattacaaagaaggatcaccttaaaatgggcagcatatggagctctatcagatatcttcaagagcaacttgccaaattatttgaaaaagaagacgttcgaccaatgtgtgcttccagtcatgacttacggcgccgaaacattatcgttaacccaggccacagcaaccaaacttagagtggcccaaagaagaatggaacggtcactacttggactgactttcagagacagggtcagaaacgaagaaatcagaagaaggacaggcgtcacagatgtcatagagcgagtagcatggctgaagtggaattgggcgggccatgtagccagaatgaaggacgggaggtggacccaaaaaattacagtgtggagaccaagagaagacagaagaagtagaggtgaccacctacacgatggacagacgacgtcaaaaggattgctgggaattggttgcaggaaagcccaagatcgacaaaactggaagaaattaggggaggcctatgttcaactttggatgcagaaggctggatgatgatgatgatgatgatgatgatgatgatgatgatgatgatgatgatgacacaagtctttggctcaaatcatgtacactgtgacggtaatttacttattcgatacaaaatattggaaagcatacataactgacatttaattccagtgggtatcgtttaggattgttcttactgatatagtccattcgctcattttgagaatagtttgacagattcatca

SEQ ID NO: 2768 - DNA, 1494 bp, Diabrotica virgifera
  misc_feature (33)..(33): n is a, c, g, or t
  SmartBlast Evalue=5E-27; Info=Putative uncharacterized transposon-derived protein F52C9.6 (Fragment) n=1 Tax= Camponotus floridanus RepID=E2AL50_9HYME
tcctctacggagaagagagctgaagtcttacanacgatgccatcaaattattagtgggatttgaaatgtggtgctatcgatagataatagtatcataatatagtttatacaccacacaactaacacgactgttctccagaggctaagaaaaaacgaacatttatacgaacagctataaaagaaattattaacattataaatatcagaaaattggcttactttggccacattatgtgtaatagtaaataccgacttctacagttgattctacaagtcaagattggaggcaaacgagaccctggacgtagacgtatatcctggctgaccaatcttaggaaatgaactggtctaacgtcagctccaaactaactccaaactgatagcgaacatatacaataatgcaaccatgaccgtccgactacacaaagataccaaatctataaaaatcaaaagaggaattagtcagggagacacgttatctcccaaactctttacggtagtacttgaacatgctttcaaacaattggagtgggacgccaaaagaataaatgtcgacggtgaaaggctctccctccaacctacaattcgcagacgacatgtaaaaaagttggtttaaacataaattttggaaaaacacaaaacctgataccaagcgaagatccaaaagtcgacgtcaacgaaatagcattggtccataaatataaatacttagggcatgaaatccaaattgccagggacaatcaaactgctgaattacagagaagaatcaccttagcatgggctgcatatggagctctatcagacatcttcaagagcaacttgccaacttatttgaaaagaagaagtttaaccaacgtgtgcttccagtcatgacttacggcgccgaaacattatcgttaacccaggccacagcaaccaaacttagagtggcccaaagaagaatggaacggtcactacttggactgactttcagagacagggtcagaaacgaagaaatcagaagaaggacaggcgtcacagatgtcatagagcgagtagcatggctgaagtggaattgggcgggccatgtagccagaatgaaggacgggaggtggaccaaaaaattacagtgtggagaccaagagaagacagaagaagtagaggtgaccacctacacgatggacagacgacgtcaaaaggattgctgggaattggttgcaggaaagcccaagatcgacaaaactggaagaaattaggggaggcctatgttcaactttggatgcagaaggctggatgatgatgatgatgatgatgatgatgatgatgatgatgatgatgatgatgacacaagtctttggctcaaatcatgtacactgtgacggtaatttacttattcgatacaaaatattggaaagcatacataactgacatttaattccagtgggtatcgtttaggattgttcttactgatatagtccattcgctcattttgagaatagtttgacagattcatca

SEQ ID NO: 2769 - DNA, 1010 bp, Diabrotica virgifera
  SmartBlast Evalue=4E-45; Info=Endonuclease-reverse transcriptase n=1 Tax=Bombyx mori RepID=D7F164_BOMMO
aaattttattgttacaataaataattatgacgtgttattcattaaatacagagaaacataaattaagtgctgagattgtttacattcagctaaaatataatgagaaagacgtgccgcgaactcttctccaatcttctctagaatttccggagttattttgtgccaagcgaaaatccaaaagtcgacgtcaacgaaatagcattggtccataaatataaatacttagggcatgaaatccaaattgccagggacaatcaaactgccgaattacaaagaaggatcaccttaaaatgggcagcatatggagctctatcagatatcttcaagagcaacttgccaaattatttgaaaaagaagacgttcgaccaatgtgtgcttccagtcatgacttacggcgccgaaacattatcgttaacccaggccacagcaaccaaacttagagtggcccaaagaagaatggaacggtcactacttggactgactttcagagacagggtcagaaacgaagaaatcagaagaaggacaggcgtcacagatgtcatagagcgagtagcatggctgaagtggaattgggcgggccatgtagccagaatgaaggacgggaggtggacccaaaaaattacagtgtggagaccaagagaagacagaagaagtagaggtgaccacctacacgatggacagacgacgtcaaaaggattgctgggaattggttgcaggaaagcccaagatcgacaaaactggaagaaattaggggaggcctatgttcaactttggatgcagaaggctggatgatgatgatgatgatgatgatgatgatgatgatgatgatgatgatgatgacacaagtctttggctcaaatcatgtacactgtgacggtaatttacttattcgatacaaaatattggaaagcatacataactgacatttaattccagtgggtatcgtttaggattgttcttactgatatagtccattcgctcattttgagaatagtttgacagattcatca

SEQ ID NO: 2770 - DNA, 852 bp, Diabrotica virgifera
  SmartBlast Evalue=2E-34; Info=Endonuclease-reverse transcriptase n=1 Tax=Bombyx mori RepID=D7F164_BOMMO
gaaaggaagtatagaaactttttgacaaactaaaatagataaatatataggaacattcatttcactattccactgggactgtcgtaatacagaacaattagtccgtagttcatcctctcgtgttttggcacttactttccttcatggagctctagcagatatcttcaagagcaacttgccaaattatttgaaaatgaagacgtttgaccaatgtgtgcttccagtcatgacttacggcgccgaaacattatcgttaacccaggccacagcaaccaaacttagagtggcccaaagaagaatggaacggtcactacttggactgactttcagagacagggtcagaaacgaagaaatcagaagaaggacaggcgtcacagatgtcatagagcgagtagcatggctgaagtggaattgggcgggccatgtagccagaatgaaggacgggaggtggacccaaaaaattacagtgtggagaccaagagaagacagaagaagtagaggtgaccacctacacgatggacagacgacgtcaaaaggattgctgggaattggttgcaggaaagcccaagatcgacaaaactggaagaaattaggggaggcctatgttcaactttggatgcagaaggctggatgatgatgatgatgatgatgatgatgatgatgatgatgatgatgatgatgacacaagtctttggctcaaatcatgtacactgtgacggtaatttacttattcgatacaaaatattggaaagcatacataactgacatttaattccagtgggtatcgtttaggattgttcttactgatatagtccattcgctcattttgagaatagtttgacagattcatca

SEQ ID NO: 2771 - DNA, 2083 bp, Diabrotica virgifera
  SmartBlast Evalue=1E-26; Info=Putative uncharacterized transposon-derived protein F52C9.6 (Fragment) n=1 Tax= Harpegnathos saltator RepID=E2BUQ3_9HYME
gtgaactgtggatacttccttttatggtattatagttgatgtccttcattggtacaaacaggagtaatttaatgactttctcaattctcaaacatgtatggacaaacagcatcgtaacttgattttatagtttaggtatgtgtctttggacagaaggaacaataagagctacagaaataaaaggtacgattataacatcgacgtcgcaacttgtggcgtatgctgatcgaaatagcattaattagcagaaacctaaacagtttaaaggaagaatttacgaagttatgcaaagaagcatccaaaaggggtttagaaataaatcaaaacaaaacaaaatacctaactatgctcaagaaaaaacccagttaatgtgataagcttaaatattggtgaatatgaatttgaaaaggtagaacattttaaatatcttgtagtctcagttaatggaactaatgatagaagtatcgaaattaatgaaagaatccaggcaggaaacagaacctactggaaatacagtaacttctcaaagataagaagcttactcagaatacaaaactgaaaatttacaaagcagcaattagaccagtaatcacatatggtgctgaagtaatgtgtctgacccagaaagaggaagaaagattgaggatctagaaaggaaagtcaattcggaggatagcaggcccactaaacttaggtaataatgaatttagaaaactcatgaaccacgaagtaagagaacttctgaaaggagaagacatcgtcagatttatcaaggcacagagactcagatggatgggacatatagaaaggagaaatccagaaggcgttatcaagaacatttccaaatggagacctgtatcaggcagaccacgaggaagacccaaaactagatgggagaaccagatagtcgaggaccttaagaagatgggagttagagaatatacaaccataagccaaaaacaggaaagaatggagaattattaaaaaatacgccacgacacacagccaattgtaaaaccaaaatgttaatccggactgattcaccgtgacaaatgaatcggaagagccaaaagagggaggcaatctacacacagtgtagatgccatgatgatgataagtcaaatgttattcctattttttttttcattactgttaaatttagtatgaaaacaacttcatatttgccactacttacaacttttaagaataacttctgtaaaactgaagcaatttagattgtattctaaaaacttcttatgtaaagtacatattatgtatattaaacaactattctaaacaaaataacagcgataacaatgatatttaagtacacaaaaccaaaaattaagtaatacgaccgatagtttaagctgcaatgaaatactaagcgactattgaggaggttctgcagcggcaggtgcaggttcttcaacagctggaggctgttctgcgtcttcagtaggtaaaacttcgggttcgtcagtcgtgggaggagcttctgactcgtcttcaactttcctcaaactctctaactcttcttctagctccttacaacgggtagtcacctcctctagttttacggtaagagttttgtgtgtttcaaggccagcttgtagggatagtttatcaattatgtatgataaagcatcttctggtttatctacttcttcatatagatttactaaaactttagttaaggcatccattatcccagctttttctaaatatttgcggaattcttccctttttccttcggacggcttataagcttgtggagtactcatattaatttattggatagtagatagtacaaaatttgctgacaatttattatttttttataggacgtttttattcaaaaagttgacagaatggcaattctgaaatactttttatcacagttgacacagtccttatattaataattataaaaatttcaattattttagaaacgtgttaaattattttacaaaagaaaattatgtttaaattccgcccttacgatttagaacattttcaaataaaataatcaaaatatagaataaaactagagataactttctaccttccgcaaaatatcgag

SEQ ID NO: 2772 - DNA, 1593 bp, Diabrotica virgifera
  SmartBlast Evalue=4E-31; Info=Putative uncharacterized transposon-derived protein F52C9.6 (Fragment) n=1 Tax= Harpegnathos saltator RepID=E2BUQ3_9HYME
gtgaactgtggatacttccttttatggtattatagttgatgtccttcattggtacaaacaggagtaatttaatgactttctcaattctcaaacatgtatggacaaacagcatcgtaacttgattttatagtttaggtatgtgtctttggacagaaggaacaataagagctacagaaataaaaggtacgattataacatcgacgtcgcaacttgtggcgtatgctgatcgaaatagcattaattagcagaaacctaaacagtttaaaggaagaatttacgaagttatgcaaagaagcatccaaaaggggtttagaaataaatcaaaacaaaacaaaatacctaactatgctcaagaaaaaacccagttaatgtgataagcttaaatattggtgaatatgaatttgaaaaggtagaacattttaaatatcttgtagtctcagttaatggaactaatgatagaagtatcgaaattaatgaaagaatccaggcaggaaacagaacctactggaaatacagtaacttctcaaagataagaagcttactcagaatacaaaactgaaaatttacaaagcagcaattagaccagtaatcacatatggtgctgaagtaatgtgtctgacccagaaagaggaagaaagattgaggatctagaaaggaaagtcaattcggaggatagcaggcccactaaacttaggtaataatgaatttagaaaactcatgaaccacgaagtaagagaacttctgaaaggagaagacatcgtcagatttatcaaggcacagagactcagatggatgggacatatagaaaggagaaatccagaaggcgttatcaagaacatttccaaatggagacctgtatcaggcagaccacgaggaagacccaaaactagatgggagaaccagatagtcgaggaccttaagaagatgggagtcagagaatgggtaaccagaagcaaaaacaggaacgaatggaggaaaattgtagaagatgccaagtcacacaaccaattgtaaaaccaaaatgttaatgcggattgatttaccgcgacaaacgaatcggaagagcccaaagagggcggcaatcactccgctaggagtgtagatgccatcatgatgatgtggtatgtagtgaacgcaaacatttgtcgcattcaggagacgaaaaagtgacacgagtggctccgcaactgttggaattcgttctatgaatgtggtgctacttgcggaaggtgttacggacgacggaacgggcgccatgacagtgagcccagttttaattccgctacctccgttcaacgtatgctacttctgtgaatttgtcaatagacttgttgaaagatggcgtcaagtactaattatcaattggaaaatagcgcagacggtaaacattgaacatggtctttgaatatgactagaagtaaaaaacaatttattatgcagaggcaagtatacagggtggtgaattgggaaacgggccataggaagctcaatgtaaaattctaaactgctgaattcccgcttccccaattattccacatcaaaagacatgagaaaccacttgtagaggatcgaaatctctattgaaaacaattg

SEQ ID NO: 2773 - DNA, 1545 bp, Diabrotica virgifera
  SmartBlast Evalue=4E-31; Info=Putative uncharacterized transposon-derived protein F52C9.6 (Fragment) n=1 Tax= Harpegnathos saltator RepID=E2BUQ3_9HYME
gtgaactgtggatacttccttttatggtattatagttgatgtccttcattggtacaaacaggagtaatttaatgactttctcaattctcaaacatgtatggacaaacagcatcgtaacttgattttatagtttaggtatgtgtctttggacagaaggaacaataagagctacagaaataaaaggtacgattataacatcgacgtcgcaacttgtggcgtatgctgatcgaaatagcattaattagcagaaacctaaacagtttaaaggaagaatttacgaagttatgcaaagaagcatccaaaaggggtttagaaataaatcaaaacaaaacaaaatacctaactatgctcaagaaaaaacccagttaatgtgataagcttaaatattggtgaatatgaatttgaaaaggtagaacattttaaatatcttgtagtctcagttaatggaactaatgatagaagtatcgaaattaatgaaagaatccaggcaggaaacagaacctactggaaatacagtaacttctcaaagataagaagcttactcagaatacaaaactgaaaatttacaaagcagcaattagaccagtaatcacatatggtgctgaagtaatgtgtctgacccagaaagaggaagaaagattgaggatctagaaaggaaagtcaattcggaggatagcaggcccactaaacttaggtaataatgaatttagaaaactcatgaaccacgaagtaagagaacttctgaaaggagaagacatcgtcagatttatcaaggcacagagactcagatggatgggacatatagaaaggagaaatccagaaggcgttatcaagaacatttccaaatggagacctgtatcaggcagaccacgaggaagacccaaaactagatgggagaaccagatagtcgaggaccttaagaagatgggagtcagagaatgggtaaccagaagcaaaaacaggaacgaatggaggaaaattgtagaagatgccaagtcacacaaccaattgtaaaaccaaaatgttaatgcggattgatttaccgcgacaaacgaatcggaagagcccaaagagggcggcaatcactccgctaggagtgtagatgccatcatgatgatgtggtatgtagtgaacgcaaacatttgtcgcattcaggagacgaaaaagtgacacgagtggctccgcaactgttggaattcgttctatgaatgtggtgctacttgcggaaggtgttacggacgacggaacgggcgccatgacagtgagcccagttttaattccgctacctccgttcaacgtatgctacttctgtgaatttgtcaatagacttgttgaaagatggcgtcaagtactaattatcaattggaaaatagcgcagacggtaaacaattcatggtctttgaccatgattatgaagtaaaaaacaatttatgtgcagaggcaagtatataacctcacatataacagaaagtaataggctgtcacgaatttagggagcggagccttcacaagatgaaacacaactgttactgctccatcaggaac

SEQ ID NO: 2774 - DNA, 505 bp, Diabrotica virgifera
tggtttagctataaccacaacatttaagaaacattgacaaaatacttactacgtagtgttacatttgtcgcattcaagagacgaaaagtgacggagcggctccgcaacggttggaaattcgttctataaatgtggtgctacttgcggaacgtgttacggaacggtcgccatggcagtgagctcttttaattttgataccatcgtgcaacgtatgctacttctgtgaatttgtcaatagacttgttgaaagatggcgtcaagtactaattatcaattggaaaatagcgcagacggtaaacattgaacatggtctttgaatatgactagaagtaaaaaacaatttattatgcagaggcaagtatacagggtggtgaattgggaaacgggccataggaagctcaatgtaaaattctaaactgctgaattcccgcttccccaattattccacatcaaaagacatgagaaaccacttgtagaggatcgaaatctctattgaaaacaattg

SEQ ID NO: 2775 - DNA, 457 bp, Diabrotica virgifera
tggtttagctataaccacaacatttaagaaacattgacaaaatacttactacgtagtgttacatttgtcgcattcaagagacgaaaagtgacggagcggctccgcaacggttggaaattcgttctataaatgtggtgctacttgcggaacgtgttacggaacggtcgccatggcagtgagctcttttaattttgataccatcgtgcaacgtatgctacttctgtgaatttgtcaatagacttgttgaaagatggcgtcaagtactaattatcaattggaaaatagcgcagacggtaaacaattcatggtctttgaccatgattatgaagtaaaaaacaatttatgtgcagaggcaagtatataacctcacatataacagaaagtaataggctgtcacgaatttagggagcggagccttcacaagatgaaacacaactgttactgctccatcaggaac

SEQ ID NO: 2776 - DNA, 1672 bp, Diabrotica virgifera
acctttatcgcgaatgtcacatcgcgatcctattggttaaaaatctgtatcatactgaaaatctgtatcataatggagttcattatggtacaggtagtgacatcataatttatatattatagtgtgagaatagaaaaaaaatattttttctacaaccgtgttaaaaatgcaatttttagcactccatacgagcgttaaaaatgctactttaaggcactagtgctttaaaatttttatggcactgcaagttcgtattgaccgtatagacaattttgatgtaatgtcaaaaaaattaaaaatggaatgtcagtcaagttcaagtaaaagtttttgtagatattgtcctgtaattacgtttgtagaaaaaatattgtatgatatgcgtgttaaaaagtacatttttaaggcactcatgtcaattgcagaactcgctatcgctcattctgcaaactttcacatgcgtgccttaaacgtgtacttttaacacttatataataaataactattaaattcaaataaattaagtcagtgcattaattttttaaactgatttttttacaatttgtttaggtataaggaatttaaattgattagtattaattattaatatacaatttaaaatttataatttattttataataaatcttcgtttggaaattgtgattttatttttagcaaaaactgtggttgtagaaaaagtatagtgtgtaacacgtacagaaaggtaatttttcacttgtttgaatcgcggcactcgcttgcgctcgtaccgcaacttttcaaactcgtgagaaattagtacctttctgcacttgttgcacaatatactattttgagcttaggctattgttgctgtaatagtctcacatataaacaacattatgcagacttagacccgtttgccattatactaatttcagtactgatttcagtactaaaaatattggttagttgcgcgagtcgatttagtatgaaaaagtcagtttgtgccaagtttgtgtttgcaactatccgaattgtaatcagcatataggcatgcgctctacctactaaatttacatgagctttactcaaggttcatagataggagctttactaattgagattgcaagtggcaagccattaacttattaacaataaaagatgggaagaagtatttttgcaaaactggcaaacttggcttttatttctgctattagagatatatccacacctagtttggctaattctgcctttatttcttccaaaactttaattcgtgcgttcctattctatagagagggtgctttggcacatacaaacattgatcattgattcgatttgtaaaactctattaatgtttcaatctgcctttttctccacatgttgaaagttgaaatcactattattattatgtacctataaaaaaacaaaagtacctaatatacaatacaacctcactttttaatattgtgtcaatttcagtacaagaaattagacccgtttgccattatactaatttcagtactgatttcagtactaaaaataattggttagttgcgcgagtcgatttagtatgaaaaatgtcagtttgtgtttgcaactatccgaattataatcagcatgtaggcatgcgctctactaattttatattgataatattgatgttgaagaagtattttaaacctttct

SEQ ID NO: 2777 - DNA, 1612 bp, Diabrotica virgifera
acctttatcgcgaatgtcacatcgcgatcctattggttaaaaatctgtatcatactgaaaatctgtatcataatggagttcattatggtacaggtagtgacatcataatttatatattatagtgtgagaatagaaaaaaaatattttttctacaaccgtgttaaaaatgcaatttttagcactccatacgagcgttaaaaatgctactttaaggcactagtgctttaaaatttttatggcactgcaagttcgtattgaccgtatagacaattttgatgtaatgtcaaaaaaattaaaaatggaatgtcagtcaagttcaagtaaaagtttttgtagatattgtcctgtaattacgtttgtagaaaaaatattgtatgatatgcgtgttaaaaagtacatttttaaggcactcatgtcaattgcagaactcgctatcgctcattctgcaaactttcacatgcgtgccttaaacgtgtacttttaacacttatataataaataactattaaattcaaataaattaagtcagtgcattaattttttaaactgatttttttacaatttgtttaggtataaggaatttaaattgattagtattaattattaatatacaatttaaaatttataatttattttataataaatcttcgtttggaaattgtgattttatttttagcaaaaactgtggttgtagaaaaagtatagtgtgtaacacgtacagaaaggtaatttttcacttgtttgaatcgcggcactcgcttgcgctcgtaccgcaacttttcaaactcgtgagaaattagtacctttctgcacttgttgcacaatatactattttgagcttaggctattgttgctgtaatagtctcacatataaacaacattatgcagacttagacccgtttgccattatactaatttcagtactgatttcagtactaaaaatattggttagttgcgcgagtcgatttagtatgaaaaagtcagtttgtgccaagtttgtgtttgcaactatccgaattgtaatcagcatataggcatgcgctctacctactaaatttacatgagctttactcaaggttcatagataggagctttactaattgagattgcaagtggcaagccattaacttattaacaataaaagatgggaagaagtatttttgcaaaactggcaaacttggcttttatttctgctattagagatatatccacacctagtttggctaattctgcctttatttcttccaaaactttaattcgtgcgttcctattctatagagagggtgctttggcacatacaaacattgatcattgattcgatttgtaaaactctattaatgtttcaatctgcctttttctccacatgttgaaagttgaaatcactattattattatgtacctataaaaaaacaaaagtacctaatatacaatacaacctcactttttaatattgtgtcaatttcagtacaagaaattagaacatgttttaatttttagtactaaatcggcgcgcgcatccaatttgtagatacaatatttttagtactaacctcagtactaaatttagcatagtggcaagcggaccttatacaatcagagtatttggtcagaa

SEQ ID NO: 2778 - DNA, 925 bp, Diabrotica virgifera
attctgccatatcaagatccacaataaatctagacaaaaactgttaacaccttcaatgcaataactgacacatttcccatacaacttttctgcctcaatttgtctttgatattttttactgatgtagatgtcatattactatcttagacccgtttgccattatactaatttcagtactgatttcagtactaaaaatattggttagttgcgcgagtcgatttagtatgaaaaagtcagtttgtgccaagtttgtgtttgcaactatccgaattgtaatcagcatataggcatgcgctctacctactaaatttacatgagctttactcaaggttcatagataggagctttactaattgagattgcaagtggcaagccattaacttattaacaataaaagatgggaagaagtatttttgcaaaactggcaaacttggcttttatttctgctattagagatatatccacacctagtttggctaattctgcctttatttcttccaaaactttaattcgtgcgttcctattctatagagagggtgctttggcacatacaaacattgatcattgattcgatttgtaaaactctattaatgtttcaatctgcctttttctccacatgttgaaagttgaaatcactattattattatgtacctataaaaaaacaaaagtacctaatatacaatacaacctcactttttaatattgtgtcaatttcagtacaagaaattagacccgtttgccattatactaatttcagtactgatttcagtactaaaaataattggttagttgcgcgagtcgatttagtatgaaaaatgtcagtttgtgtttgcaactatccgaattataatcagcatgtaggcatgcgctctactaattttatattgataatattgatgttgaagaagtattttaaacctttct

SEQ ID NO: 2779 - DNA, 865 bp, Diabrotica virgifera
attctgccatatcaagatccacaataaatctagacaaaaactgttaacaccttcaatgcaataactgacacatttcccatacaacttttctgcctcaatttgtctttgatattttttactgatgtagatgtcatattactatcttagacccgtttgccattatactaatttcagtactgatttcagtactaaaaatattggttagttgcgcgagtcgatttagtatgaaaaagtcagtttgtgccaagtttgtgtttgcaactatccgaattgtaatcagcatataggcatgcgctctacctactaaatttacatgagctttactcaaggttcatagataggagctttactaattgagattgcaagtggcaagccattaacttattaacaataaaagatgggaagaagtatttttgcaaaactggcaaacttggcttttatttctgctattagagatatatccacacctagtttggctaattctgcctttatttcttccaaaactttaattcgtgcgttcctattctatagagagggtgctttggcacatacaaacattgatcattgattcgatttgtaaaactctattaatgtttcaatctgcctttttctccacatgttgaaagttgaaatcactattattattatgtacctataaaaaaacaaaagtacctaatatacaatacaacctcactttttaatattgtgtcaatttcagtacaagaaattagaacatgttttaatttttagtactaaatcggcgcgcgcatccaatttgtagatacaatatttttagtactaacctcagtactaaatttagcatagtggcaagcggaccttatacaatcagagtatttggtcagaa

SEQ ID NO: 2780 - DNA, 551 bp, Diabrotica virgifera
acctttatcgcgaatgtcacatcgcgatcctattggttaaaaatctgtatcatactgaaaatctgtatcataatggagttcattatggtacaggtagtgacatcataatttatatattatagtgtgagaatagaaaaaaaatattttttctacaaccgtgttaaaaatgcaatttttagcactccatacgagcgttaaaaatgctactttaaggcactagtgctttaaaatttttatggcactgcaagttcgtattgaccgtatagacaattttgatgtaatgtcaaaaaaattaaaaatggaatgtcagtcaagttcaagtaaaagtttttgtagatattgtcctgtaattacgtttgtagaaaaaatattgtatgatatgcgtgttaaaaagtacatttttaaggcactcatgtgaattgcagaactcgctttcgctcattctgcaaactttcacatgcgtgccttaaacgtgtacttttaacacttatatcataaataactattaatgttccgtaatatgtaattataaattaatatattaatcttag

SEQ ID NO: 2781 - DNA, 1431 bp, Diabrotica virgifera
gagacaactttttaaataattatatcatggtaataagcttttataattattttcttgtgatctttctatattatgttatatttaacgggaataaaccgagaaaacaacaatttctgagatgaaaatcgtatttccaattaaaattgtggattattcgcattaaacataatatataacaaatattatttttgtagttttacggtatgtagccgtttaagcatgatttatatatctttgtcttttgtttaaagcttgtgttatgttcgaattaaagcattatatttatattcgaatgtgttatattcgaattaaagcattatactgacagctgtcactaacagctacacatttgatcaacctgtcaaaactgtctatattatgacaaataactgttattgtgcaggtgtcatttctctaacatctgtcatggcattgacagcttgattgaaatacaatagggaacttgcataaaattttaaattcgaaaaaatttttataaatcaaacagaacataatttaaaacatgtatcaaagataaaaaaagttgtttttgtgttccgtttggcccctaaagacgattctaaattcaaattattgcagctagcccaaaacgcgtcgtgacgtcatatggttatatgtttacattctgcaccaacaaagtaaacaaaattgtatataattttaaattagacattataaacgtcagtagaaaatacagttatgtgacgtcgacaagtgtttttgatcgtttgaactattcatagaaaacttgtacttttacaaaatggttttattttccatagtaaaccttctttcctttccttcaaaaactgtatcaaactccaatctcaacaaactggtatatattattacaatgacatacgataaatgtcattagaatataaatatttttcccttattccgcgacgatgagctggccaaatacccaagtaggtggaggccaataaactaaagaaggagaagaagaatatacctaaatataaccataatcataactatataataaaactatgtgacgtcacgggtcgtttgaactattttataccgcagaatactttaaatttgtatttctaagttattacgagcttttgaagcgtgaaattttggaaatctcatttttaaacaaaactgaacattatgtaataaagaaaaatgtgcaagttccctattcaggtacttatttaaaccacaatctatgcagacactgttgtttaatggtattttgttaaactctaaatatctacccaatgacccataattatttccagtccatcttggagtagcttggaaaatatgccattttttatttcaacttattcacataatcgtaaaggatttggaggctacattgactcgactatacaagtaccataataatatttataagttttatgtaatacggagtaactg

SEQ ID NO: 2782 - DNA, 1390 bp, Diabrotica virgifera
cgagcttaattttttctcgatcaccactatcactggggcgaaatggagggttagtaagacaataagaatcttaggtattataatataagtaagtttatagtattcaaagtgattgagtcttcatgagtttggtaattgctgacgagtatacaacagtggtatgaatgttcttagcatatagtgaaaatgataatttatgtttacgaagaagttttgtttctcatcataaaaatatctaataattaatgcatttcatctagaagtgttccaatgccattatccctttagagccgtgttttctaaaaatgttacaaaattatctttaggaagatcttcaacttcgagaataaaatctcgatgaaactgggaggaaggtagacattccagtactgtattgacaagatcttccaatagggaacttgcataaaattttaaattcgaaaaaaatttttaaataaatcaaacagaacataatttaaaacatgtatcaaagataaaaaaagttgtttttgtgttccgtttggcccctaaagacgattctaaattcaaattattgcagctagcccaaaacgcgtcgtgacgtcatatggttatatgtttacattctgcaccaacaaagtaaacaaaattgtatataattttaaattagacattataaacgtcagtagaaaatacagttatgtgacgtcgacaagtgtttttgatcgtttgaactattcatagaaaacttgtacttttacaaaatggttttattttccatagtaaaccttctttcctttccttcaaaaactgtatcaaactccaatctcaacaaactggtatatattattacaatgacatacgataaatgtcattagaatataaatatttttcccttattccgcgacgatgagctggccaaatacccaagtaggtggaggccaataaactaaagaaggagaagaagaatatacctaaatataaccataatcataactatataataaaactatgtgacgtcacgggtcgtttgaactattttataccgcagaatactttaaatttgtatttctaagttattacgagcttttgaagcgtgaaattttggaaatctcatttttaaacaaaactgaacattatgtaataaagaaaaatgtgcaagttccctattcaggtacttatttaaaccacaatctatgcagacactgttgtttaatggtattttgttaaactctaaatatctacccaatgacccataattatttccagtccatcttggagtagcttggaaaatatgccattttttatttcaacttattcacataatcgtaaaggatttggaggctacattgactcgactatacaagtaccataataatatttataagttttatgtaatacggagtaactg

SEQ ID NO: 2783 - DNA, 1046 bp, Diabrotica virgifera
gagacaactttttaaataattatatcatggtaataagcttttataattattttcttgtgatctttctatattatgttatatttaacgggaataaaccgagaaaacaacaatttctgagatgaaaatcgtatttccaattaaaattgtggattattcgcattaaacataatatataacaaatattatttttgtagttttacggtatgtagccgtttaagcatgatttatatatctttgtcttttgtttaaagcttgtgttatgttcgaattaaagcattatatttatattcgaatgtgttatattcgaattaaagcattatactgacagctgtcactaacagctacacatttgatcaacctgtcaaaactgtctatattatgacaaataactgttattgtgcaggtgtcatttctctaacatctgtcatggcattgacagcttgattgaaatacaatagggaacttgcataaaattttaaattcgaaaaaatttttataaatcaaacagaacataatttaaaacatgtatcaaagataaaaaaagttgtttttgtgttccgtttggcccctaaagacgattctaaattcaaattattgcagctagcccaaaacgcgtcgtgacgtcatatggttatatgtttacattctgcaccaacaaagtaaacaaaattgtatataattttaaattagacattataaacgtcatgcgtcagtagaaaaacagttagtgacgtcacaagtgtttttgatcgtttgaactattcatagaaaacttgtacttttacaaaatggttttattttccataggaaaccttctttcctttccttcaaaaactgtatcaaactccaatctcaacaaactggtatatattattacaatgacgtatgtacgataaatgtcattagaatatttttctcttattccgcgacgacgagctggccaaatacccaagtaggtggaggccaataaactaaaggagaagaagaatatacctaaatataaccatagatataaccatattgtaaaactaatgtgacgtcacggg

SEQ ID NO: 2784 - DNA, 1005 bp, Diabrotica virgifera
cgagcttaattttttctcgatcaccactatcactggggcgaaatggagggttagtaagacaataagaatcttaggtattataatataagtaagtttatagtattcaaagtgattgagtcttcatgagtttggtaattgctgacgagtatacaacagtggtatgaatgttcttagcatatagtgaaaatgataatttatgtttacgaagaagttttgtttctcatcataaaaatatctaataattaatgcatttcatctagaagtgttccaatgccattatccctttagagccgtgttttctaaaaatgttacaaaattatctttaggaagatcttcaacttcgagaataaaatctcgatgaaactgggaggaaggtagacattccagtactgtattgacaagatcttccaatagggaacttgcataaaattttaaattcgaaaaaaatttttaaataaatcaaacagaacataatttaaaacatgtatcaaagataaaaaaagttgtttttgtgttccgtttggcccctaaagacgattctaaattcaaattattgcagctagcccaaaacgcgtcgtgacgtcatatggttatatgtttacattctgcaccaacaaagtaaacaaaattgtatataattttaaattagacattataaacgtcatgcgtcagtagaaaaacagttagtgacgtcacaagtgtttttgatcgtttgaactattcatagaaaacttgtacttttacaaaatggttttattttccataggaaaccttctttcctttccttcaaaaactgtatcaaactccaatctcaacaaactggtatatattattacaatgacgtatgtacgataaatgtcattagaatatttttctcttattccgcgacgacgagctggccaaatacccaagtaggtggaggccaataaactaaaggagaagaagaatatacctaaatataaccatagatataaccatattgtaaaactaatgtgacgtcacggg

SEQ ID NO: 2785 - DNA, 696 bp, Diabrotica virgifera
catacgacaaatgtcagtagaatataaatatatttcccttatagggcttttcatgcacagtcatgtgtttcgagcttctgtcaaatgtcgtataatccgtgcacatatgtacaatattatacacagactatacaacatattatgatagaagctcgaaacaaatgacaatcgatgaaaagccctattctacgacgatgagctggccaaatacccaagtaggtggaggccaataaactaaagaaggagaagaagaatatacctaaatataaccataatcataactatataataaaactatgtgacgtcacgggtcgtttgaactattttataccgcagaatactttaaatttgtatttctaagttattacgagcttttgaagcgtgaaattttggaaatctcatttttaaacaaaactgaacattatgtaataaagaaaaatgtgcaagttccctattcaggtacttatttaaaccacaatctatgcagacactgttgtttaatggtattttgttaaactctaaatatctacccaatgacccataattatttccagtccatcttggagtagcttggaaaatatgccattttttatttcaacttattcacataatcgtaaaggatttggaggctacattgactcgactatacaagtaccataataatatttataagttttatgtaatacggagtaactg

SEQ ID NO: 2786 - DNA, 1743 bp, Diabrotica virgifera
  SmartBlast Evalue=1E-43; Info=Chymotrypsin-like proteinase 6A n= 1 Tax=Tribolium castaneum RepID=D0R8R1_TRICA
tttcctaccatattgtcttcaagttgtagattatgttatctcgagttataaatatgtaacaactattagtaataataattgtgtgttgagaatattttgatctgcacagtgcgacatgttttttgccgtattttctctctttattttccaagcatttgctgcccctagccaccatttgggtatcatagatggtgagaatgccacactgggcgagtttccctatatagtcgccgtggaagattgcgatggtttatgttttgtaaaatgcggtggcgttttgttaaccgaaagttggattctcactgctggccattgtaacaaaaaggaaatgttcgacgatcttcaggctcacgttggaattacaaatgtcgatgatacagaccatcaattcaggcatgtagtaaaaattattgttcatccaaaattcgacgaacatgcttcaatcagttcgcacgacatagcagtcatgaagcttaagacaccacttatattagatgatagagtaaaagttgccgttctaccaaaaccaaacacagacgaattatctggaaatgccacagtaacaggttggggagcaatacaaactgacccctacaaaatatatcctaatgacctacaaaaagccatagttccaattgttgaatataatgattgtatggccaaacttaaggccgaagttggtgaggatttgcccgaatacaacaacactgccgtttgtactggaccgtataccggtggaatcggaccttgttatggagactctggtagtcctttgattcaagatgacgttgttgtaggattggtttcttggggatccaatccttgtgcttttccaggcgctttagccgtttatacgaaagttagctcattcattgactggattcagaaaaatattgacgaggaattaacctttgaaagttaaaaatgcataaagaaagaatatattgaatatttaacaataggtcataattataaaaaattttaaaacaagtagtatattttatatatggaattattatctttttttgtgagctaacgtgttactaattcacattaaggaggtaggcgcaaaatttagactccaatgctttttaaatgcattcattgttttcgaatcatgagaattatataaatattcttgaaaagtttaaacgcagaatgaaatattacgttattagcgatggccgaaagtccctgaaaacttctataatgtttattttaataagttacaggggtgaaaaaaaagagaaaaatttagtgtgatttttatttcaaatatctcattcaaaagaaactttttgtttattctaagggactttcggccctcggtaatactttaatctttcattctgcgtttaatttctttttaaatatttattagttttttcaggattaaaaaaatgaatgcatttaaatagcattggagtcgaaagctttcgcttacgcccttaatgtaataattaatcaaaacaattattcttcttccttcgtttttttcgtcaaagtttataagttaagatatcaacgtcattttcactaaaaacgatttccactaaataggataaatatatgttatgacttatgacacaatatcataatagatattttaagaaatagaaaatatatgaattactcgtctaaccatgtttttagagcagctgtaaactgaatacaaatagtcatgatactcgccacgccaaaccttcgaaagaagactacacattaaaagaaagaaaaaaattt

SEQ ID NO: 2787 - DNA, 1554 bp, Diabrotica virgifera
  SmartBlast Evalue=1E-43; Info=Chymotrypsin-like proteinase 6A n= 1 Tax=Tribolium castaneum RepID=D0R8R1_TRICA
tttcctaccatattgtcttcaagttgtagattatgttatctcgagttataaatatgtaacaactattagtaataataattgtgtgttgagaatattttgatctgcacagtgcgacatgttttttgccgtattttctctctttattttccaagcatttgctgcccctagccaccatttgggtatcatagatggtgagaatgccacactgggcgagtttccctatatagtcgccgtggaagattgcgatggtttatgttttgtaaaatgcggtggcgttttgttaaccgaaagttggattctcactgctggccattgtaacaaaaaggaaatgttcgacgatcttcaggctcacgttggaattacaaatgtcgatgatacagaccatcaattcaggcatgtagtaaaaattattgttcatccaaaattcgacgaacatgcttcaatcagttcgcacgacatagcagtcatgaagcttaagacaccacttatattagatgatagagtaaaagttgccgttctaccaaaaccaaacacagacgaattatctggaaatgccacagtaacaggttggggagcaatacaaactgacccctacaaaatatatcctaatgacctacaaaaagccatagttccaattgttgaatataatgattgtatggccaaacttaaggccgaagttggtgaggatttgcccgaatacaacaacactgccgtttgtactggaccgtataccggtggaatcggaccttgttatggagactctggtagtcctttgattcaagatgacgttgttgtaggattggtttcttggggatccaatccttgtgcttttccaggcgctttagccgtttatacgaaagttagctcattcattgactggattcagaaaaatattgacgaggaattaacctttgaaagttaaaaatgcataaagaaagaatatattgaatatttaacaataggtcataattataaaaaattttaaaacaagtagtatattttatatatggaattattatctttttttgtgagctaacgtgttactaattcacattaaggaggtaggcgcaaaatttagactccaatgctttttaaatgcattcattgttttcgaatcatgagaattatataaatattcttgaaaagtttaaacgcagaatgaaatattacgttattagcgatggccgaaagtccctgaaaacttctataatgtttattttaataagttacaggggtgaaaaaaaagagaaaaatttagtgtgatttttatttcaaatatctcattcaaaagaaactttttgtttattctaagggactttcggccctcggtaatactttaatctttcattctgcgtttaaatttttcaaaaactcttactggttttctcagaattcgaaagaaatatatgcgtttaaaaggaattcgacgaaaagtttgcgcctacgcacttaaaaagggattaaagtattatacatttgatgtacttcattttttttacattttgatgataaatgagatgtcacatgatgtacatgatgttcttaaatgaagtc

SEQ ID NO: 2788 - DNA, 977 bp, Diabrotica virgifera
  SmartBlast Evalue=1E-43; Info=Chymotrypsin-like proteinase 6A n= 1 Tax=Tribolium castaneum RepID=D0R8R1_TRICA
tttcctaccatattgtcttcaagttgtagattatgttatctcgagttataaatatgtaacaactattagtaataataattgtgtgttgagaatattttgatctgcacagtgcgacatgttttttgccgtattttctctctttattttccaagcatttgctgcccctagccaccatttgggtatcatagatggtgagaatgccacactgggcgagtttccctatatagtcgccgtggaagattgcgatggtttatgttttgtaaaatgcggtggcgttttgttaaccgaaagttggattctcactgctggccattgtaacaaaaaggaaatgttcgacgatcttcaggctcacgttggaattacaaatgtcgatgatacagaccatcaattcaggcatgtagtaaaaattattgttcatccaaaattcgacgaacatgcttcaatcagttcgcacgacatagcagtcatgaaacttaagacaccacttatattagatgatagagtaaaagttgccgttctaccaaaaccaaacacagacgaatcatctggaaatgccacagtaacaggttggggagcaatacaaactgacccctacaaattatatcctaatgacctacaaaaagccgtagttccaattgttgaatataatgattgtatggccaaacttaaggccgaaattggtgaggatttgcccgaatacaacaacactgccgtttgtactggaccgtataccggtgggatcggaccttgttatggagactctggtagtcctttgattcaagatgacgttgttgtaggattggtctcttggggatccaatccttgtgcttttccaggctctttagccgtttatacgaaagttagctcattcattgactggatccagaaaaatattgacgaggaattaacttttgaaagttaaaaatgtataaagaaagaatatattgaatatttaacaataggtcataattataaaa

SEQ ID NO: 2789 - DNA, 728 bp, Diabrotica virgifera
gaaatacagattacaaaaatgtataatacttagttctggtttgagagtgtaggcgcaaaatttcggtcgaattctttttgaacgcatttatttatttcgaattctgagaaggctagtatgtatttttgaaagaattaaacgcaaaatgaactattacagtattgttaatggtcttaagtccctgacaacttctataatgtttattttaataagtcacaggggtgaaaaaaagggaaaatttagtctgatttttatttcaaatatctcattcaaaagaaactttttgtttattctaagggactttcggccctcggtaatactttaatctttcattctgcgtttaatttctttttaaatatttattagttttttcaggattaaaaaaatgaatgcatttaaatagcattggagtcgaaagctttcgcttacgcccttaatgtaataattaatcaaaacaattattcttcttccttcgtttttttcgtcaaagtttataagttaagatatcaacgtcattttcactaaaaacgatttccactaaataggataaatatatgttatgacttatgacacaatatcataatagatattttaagaaatagaaaatatatgaattactcgtctaaccatgtttttagagcagctgtaaactgaatacaaatagtcatgatactcgccacgccaaaccttcgaaagaagactacacattaaaagaaagaaaaaaattt

SEQ ID NO: 2790 - DNA, 539 bp, Diabrotica virgifera
gaaatacagattacaaaaatgtataatacttagttctggtttgagagtgtaggcgcaaaatttcggtcgaattctttttgaacgcatttatttatttcgaattctgagaaggctagtatgtatttttgaaagaattaaacgcaaaatgaactattacagtattgttaatggtcttaagtccctgacaacttctataatgtttattttaataagtcacaggggtgaaaaaaagggaaaatttagtctgatttttatttcaaatatctcattcaaaagaaactttttgtttattctaagggactttcggccctcggtaatactttaatctttcattctgcgtttaaatttttcaaaaactcttactggttttctcagaattcgaaagaaatatatgcgtttaaaaggaattcgacgaaaagtttgcgcctacgcacttaaaaagggattaaagtattatacatttgatgtacttcattttttttacattttgatgataaatgagatgtcacatgatgtacatgatgttcttaaatgaagtc

SEQ ID NO: 2791 - DNA, 1317 bp, Diabrotica virgifera
  SmartBlast Evalue=5E-20; Info=Endonuclease-reverse transcriptase HmRTE-e01 n=1 Tax=Heliconius melpomene RepID= C6Y4D5_9NEOP
acttacaaaaagcatatgacagtgtgcccctcagcaaactatggtcaatcctacatcaaaccaacattaaacatggtcttgtcaaagcagtccaaagtctgtataatggaacgactgcaaaaattaaaactggatgtctgggggatttaagatcacgaaaggattgaatcagagttgttgtatttcgcctaccctttttaaaatttatctgaaacaagcactcaatctgtggaaaagaaaatgtaagggcatggaatccctctcaatgacgacacaacactatacactttatgtttcgctgatgaccaaattctgattgctcaggatcatgacgacttgagttacatgacgcagaagctaatagaagaatataacaaatggggtctcgaagtcaacattaagaaaactgaagccatgtgtattggagggacaaagcagtccattacattagacgatggggtagaaattaaacactgtgatgaatacaagtacctgggcatgaagataactcaagatggaacactcgatgctgctataaaagacagaaacatacagggtagaaaagccatatccatgatgaacggcattctgtgggaccagacaatatctaaagcgaacaaacagctcatatacaatacctacttaaaagtataatcacatatggcagtgaagtttggccactgaaactaagaacagagaaaatgttactagtaacggaaatggacttctggagaagagcagcaggcaaatcaagaagtgaacggataccaaatgagagaatacgagaaatgatgggagtcacacatacaataattgatgacataaaaacaaaacaactagtatggtacggccatgtacagagaatgccagatgacaggatccctaagcagattttggcatggacaccacaagggagaagaaaaagaggaaggccgagaagaagctggagggagggaattgaaaaagaactagaggagagaaagagaaattcccccaggtctatggttaaacagaaaagaatggcggttaggagtcggaaggcgtcggagaacgctgtaaaccgatagtagtagtagtagtagtaacctatggttgtttgtaataacaaaaaattataaagcgtaactcgacgacattcgagagaaagagactgaaaaatatacggcccggtacaagaggaagacggcacatgtagaattattagaaacgacgagattaatgaatggaatgaagggtacgaagacaagaagaaacaaaatcgacatattacactggaagctgataagaagacgaaaaacaaggtaagacccagaatgg

SEQ ID NO: 2792 - DNA, 1245 bp, Diabrotica virgifera
  SmartBlast Evalue=4E-14; Info=Endonuclease-reverse transcriptase HmRTE-e01 n=1 Tax=Heliconius melpomene RepID= C6Y4D5_9NEOP
aagaagtatgatattgcttttcatttgcagaagatataaatatattttattttattcattttaaactgtatataattatcttaaatatatttactttattttttaacctgtgttttactgattctgtcgtcttaaaagagctacccgttacaagctgtggaaaagaaaatgtaatggcatgggaatccctctcaacgacgaaacaacactatacactttatgtttcgctgatgaccatatcctgattgctcaggatcatgacgatttgcgttaaacgcacggaagctaataaaacaatataacaaatggggtctagaagtcaacattatgaaaactgaagccatgtgtatcggagggacaaagcagtccattacattagacgatggggtagaaattaaacactgtgatgaatacaagtacctgggcatgaagataactcaagatggaacactcgatgctgctataaaagacagaaacatacagggtagaaaagccatatccatgatgaacggcattctgtgggaccagacaatatctaaagcgaacaaacagctcatatacaatacctacttaaaagtataatcacatatggcagtgaagtttggccactgaaactaagaacagagaaaatgttactagtaacggaaatggacttctggagaagagcagcaggcaaatcaagaagtgaacggataccaaatgagagaatacgagaaatgatgggagtcacacatacaataattgatgacataaaaacaaaacaactagtatggtacggccatgtacagagaatgccagatgacaggatccctaagcagattttggcatggacaccacaagggagaagaaaaagaggaaggccgagaagaagctggagggagggaattgaaaaagaactagaggagagaaagagaaattcccccaggtctatggttaaacagaaaagaatggcggttaggagtcggaaggcgtcggagaacgctgtaaaccgatagtagtagtagtagtagtaacctatggttgtttgtaataacaaaaaattataaagcgtaactcgacgacattcgagagaaagagactgaaaaatatacggcccggtacaagaggaagacggcacatgtagaattattagaaacgacgagattaatgaatggaatgaagggtacgaagacaagaagaaacaaaatcgacatattacactggaagctgataagaagacgaaaaacaaggtaagacccagaatgg

SEQ ID NO: 2793 - DNA, 946 bp, Diabrotica virgifera
  SmartBlast Evalue=2E-13; Info=Endonuclease-reverse transcriptase HmRTE-e01 n=1 Tax=Heliconius melpomene RepID= C6Y4D5_9NEOP
acttacaaaaagcatatgacagtgtgcccctcagcaaactatggtcaatcctacatcaaaccaacattaaacatggtcttgtcaaagcagtccaaagtctgtataatggaacgactgcaaaaattaaaactggatgtctgggggatttaagatcacgaaaggattgaatcagagttgttgtatttcgcctaccctttttaaaatttatctgaaacaagcactcaatctgtggaaaagaaaatgtaagggcatggaatccctctcaatgacgacacaacactatacactttatgtttcgctgatgaccaaattctgattgctcaggatcatgacgacttgagttacatgacgcagaagctaatagaagaatataacaaatggggtctcgaagtcaacattaagaaaactgaagccatgtgtattggagggacaaagcagtccattacattagacgatggggtagaaattaaacactgtgatgaatacaagtacctgggcatgaagataactcaagatggaacactcgatgctgctataaaagacagaaacatacagggtagaaaagccatatccatgatgaacggcattctgtgggaccagacaatatctaaagcgaacaaacagctcatatacaatacctacttaaaagtataatcacatatggcagtgaagtttggccactgaaactaagaacagagaaaatgttactagtaacggaaatggacttctggagaagagcagcaggcaaatcaagaagtgaacggataccaaatgagagaatacgagaaatgatgtgagtcacacaataattgatgacataaaaacaaaacaagtcatacggtaaaaaaaatacggccatgtacagagaatgccagatgacagaatccctaaacagattttgacgcggacaccacaagggagaaggaaaagaggaaggctgagaaga

SEQ ID NO: 2794 - DNA, 874 bp, Diabrotica virgifera
aagaagtatgatattgcttttcatttgcagaagatataaatatattttattttattcattttaaactgtatataattatcttaaatatatttactttattttttaacctgtgttttactgattctgtcgtcttaaaagagctacccgttacaagctgtggaaaagaaaatgtaatggcatgggaatccctctcaacgacgaaacaacactatacactttatgtttcgctgatgaccatatcctgattgctcaggatcatgacgatttgcgttaaacgcacggaagctaataaaacaatataacaaatggggtctagaagtcaacattatgaaaactgaagccatgtgtatcggagggacaaagcagtccattacattagacgatggggtagaaattaaacactgtgatgaatacaagtacctgggcatgaagataactcaagatggaacactcgatgctgctataaaagacagaaacatacagggtagaaaagccatatccatgatgaacggcattctgtgggaccagacaatatctaaagcgaacaaacagctcatatacaatacctacttaaaagtataatcacatatggcagtgaagtttggccactgaaactaagaacagagaaaatgttactagtaacggaaatggacttctggagaagagcagcaggcaaatcaagaagtgaacggataccaaatgagagaatacgagaaatgatgtgagtcacacaataattgatgacataaaaacaaaacaagtcatacggtaaaaaaaatacggccatgtacagagaatgccagatgacagaatccctaaacagattttgacgcggacaccacaagggagaaggaaaagaggaaggctgagaaga

SEQ ID NO: 2795 - DNA, 877 bp, Diabrotica virgifera
  SmartBlast Evalue=4E-16; Info=Endonuclease-reverse transcriptase n=1 Tax=Bombyx mori RepID=D7F169_BOMMO
attacattagacgatgggtagaaattaaacaactgcgatgaatacaagtacctgggcatgaagataactcaagatggaacactcgatgctgctataaaagacagaaacatgcagggtagaaaagccatatccatgatgaacggcattctgtgggaccagacaatatctaaagcgaacaaacagctcatatacaatagcatacttaaaagtataatcacatatggcagtgaagtttggccactgaaacaaagagcgcagaaaatgttactagtaacagaaatggacttctggagaagagcagcaggcaaatcaagaagagatcggataccgaacgagagaatacgagaaatgatgggagtaacacatacaatacttgatgacataaaaacaaaacaattggtatggtacggccatgtacagagaatgccagatgacaggatccctaagcagattttggcatggacaccacaagggagaagaaaaagaggaaggccgagaagaagctggagggagggaattgaaaaagaactagaggagagaaagagaaattcccccaggtctatggttaaacagaaaagaatggcggttaggagtcggaaggcgtcggagaacgctgtaaaccgatagtagtagtagtagtagtaacctatggttgtttgtaataacaaaaaattataaagcgtaactcgacgacattcgagagaaagagactgaaaaatatacggcccggtacaagaggaagacggcacatgtagaattattagaaacgacgagattaatgaatggaatgaagggtacgaagacaagaagaaacaaaatcgacatattacactggaagctgataagaagacgaaaaacaaggtaagacccagaatgg

SEQ ID NO: 2796 - DNA, 1607 bp, Diabrotica virgifera
atttataatatttctcttttagcagatgagccaaggttcaaaatagcgttttttgaattttggtccgattatttgttgctacggatattgcaaaataaaactaaaattttgaaaataaaaaatttgctacaactctgcgaaaatgaatttaggactttcatactgcacgaaaagttgagccaaacagtccatacaatgcacaaaaaaatttaagacgatgcgtcaattagtctaaattctattcaatttgtttgtcccaagtagccttttttcgcaatgtcattgttcagaaaataacaatgacacagcaattctgcgaaaacaacatgaaagaagaatagtcatattttcaacggatttaaaaaaatcatttaaagtcatttttatcactcagaaaacattttactaaaatagagtcattcctggcttaaaaacaatttgaataactttgttaatattgactgtaggcctaaaactacaatggaatttaaaaactggtattattatacgaattttcaaagaaaaacttttcgcctaggttaattatggtcaaagttagccacttcttatttaattgacggctactttgtttataacaattaagcaacctaactagagcattttgaagttgaagatatatagtttatgtgtaaaagtttgagtaaactttgatcttcaacagagtggttaataaagctttaaatatagcgtccgaacggaattaattcgtggtcggtggaggggaattactaaaatacgtgcactcaaaaaatgaaactgattctgcaaacatatgctgcgattaatatcgctggaacttgttgatggattttgatcataatttttttaatttgtatgtactcgtagtcttatagagtacgttatgtacacacaaccccacctaacattacaaaatgttagggggaactccccttatcactcagggatatgaaaaatagattacgaccgattctaagacctaccgaatatacatatataatttcataaaaatcggtcaagcggtctcggaggagtatggaaactaacactgtgacaggagaattttatagatggctattaacaaataggggttggtgatagaagagtgaaaattaagggttgtatgtattttataattctacatcatataaaattaaggtagataattttgtccaaaaaaataaaaaaaatgtcaggggggcttataacttatgcgtataaaaatagattaaaacctcttcaacgtcctacaggataaacgtgtaaaattttataaaaatcggccaagccgtttcggagtagtatggtaactaacattgttacaggagaatttgatgtatatagaagtaactgcgaattaaataataaaagtggctaactttgaatctaattaagctaggcaaaaagtttttttttctgaaaattcgtataaaaataccagcttttgaaatcctaaagtagatctactctatagtcaatattaacaaagttattcaaattgcttagaagccaaaaatgaacttttttcggagtgataaaaacgactttttaattgatttttttttctaatactttaaaatataactattattcttgtcatgcggttt

SEQ ID NO: 2797 - DNA, 1346 bp, Diabrotica virgifera
gagctttttctgcaatgttattattcagaaaatcacaatgatacagcaattctatgcaaacgacatgaaagaaaatggttatattttcaacgtatttaaacaaaatcattaaagtcattttaatcataccgaaaacattttactaaagaagattcatttttggcttataaacaatccgaataactttgttaacactgactgtagaccaaaactactttgagacttgaaaagccggtatttttacactaattttcaaaaaaaactctttgtccaggttaaccacggtcaaagttatccacttttctcattcaattcacagctactttgtttataacaattaagcaacctaactagcaccatttttaagttaaaggaatatagtttatgtgcacaagtttgagtaaactttgatcttcaacagagtggttaataaagctttaaatatagcgtccgaacggaattaattcgtggtcggtggaggggaattactaaaatacgtgcactcaaaaaatgaaactgattctgcaaacatatgctgcgattaatatcgctggaacttgttgatggattttgatcataatttttttaatttgtatgtactcgtagtcttatagagtacgttatgtacacacaaccccacctaacattacaaaatgttagggggaactccccttatcactcagggatatgaaaaatagattacgaccgattctaagacctaccgaatatacatatataatttcataaaaatcggtcaagcggtctcggaggagtatggaaactaacactgtgacaggagaattttatagatggctattaacaaataggggttggtgatagaagagtgaaaattaagggttgtatgtattttataattctacatcatataaaattaaggtagataattttgtccaaaaaaataaaaaaaatgtcaggggggcttataacttatgcgtataaaaatagattaaaacctcttcaacgtcctacaggataaacgtgtaaaattttataaaaatcggccaagccgtttcggagtagtatggtaactaacattgttacaggagaatttgatgtatatagaagtaactgcgaattaaataataaaagtggctaactttgaatctaattaagctaggcaaaaagtttttttttctgaaaattcgtataaaaataccagcttttgaaatcctaaagtagatctactctatagtcaatattaacaaagttattcaaattgcttagaagccaaaaatgaacttttttcggagtgataaaaacgactttttaattgatttttttttctaatactttaaaatataactattattcttgtcatgcggttt

SEQ ID NO: 2798 - DNA, 813 bp, Diabrotica virgifera
atttataatatttctcttttagcagatgagccaaggttcaaaatagcgttttttgaattttggtccgattatttgttgctacggatattgcaaaataaaactaaaattttgaaaataaaaaatttgctacaactctgcgaaaatgaatttaggactttcatactgcacgaaaagttgagccaaacagtccatacaatgcacaaaaaaatttaagacgatgcgtcaattagtctaaattctattcaatttgtttgtcccaagtagccttttttcgcaatgtcattgttcagaaaataacaatgacacagcaattctgcgaaaacaacatgaaagaagaatagtcatattttcaacggatttaaaaaaatcatttaaagtcatttttatcactcagaaaacattttactaaaatagagtcattcctggcttaaaaacaatttgaataactttgttaatattgactgtaggcctaaaactacaatggaatttaaaaactggtattattatacgaattttcaaagaaaaacttttcgcctaggttaattatggtcaaagttagccacttcttatttaattgacggctactttgtttataacaattaagcaacctaactagagcattttgaagttgaagatatatagtttatgtgtaaaagtttgagtaaactttgatcttcaacagagtggttaataaagctttaaaaatgacgtcctaacgaaatcgaatcgtggtcggtggaggggaaatattaaaatccgtgcactcaaaaaatgaaattgattcttcaaacatatgctgcgattaatatctcc

SEQ ID NO: 2799 - DNA, 552 bp, Diabrotica virgifera
gagctttttctgcaatgttattattcagaaaatcacaatgatacagcaattctatgcaaacgacatgaaagaaaatggttatattttcaacgtatttaaacaaaatcattaaagtcattttaatcataccgaaaacattttactaaagaagattcatttttggcttataaacaatccgaataactttgttaacactgactgtagaccaaaactactttgagacttgaaaagccggtatttttacactaattttcaaaaaaaactctttgtccaggttaaccacggtcaaagttatccacttttctcattcaattcacagctactttgtttataacaattaagcaacctaactagcaccatttttaagttaaaggaatatagtttatgtgcacaagtttgagtaaactttgatcttcaacagagtggttaataaagctttaaaaatgacgtcctaacgaaatcgaatcgtggtcggtggaggggaaatattaaaatccgtgcactcaaaaaatgaaattgattcttcaaacatatgctgcgattaatatctcc

SEQ ID NO: 2800 - DNA, 356 bp, Diabrotica virgifera
atttataatatttctcttttagcagatgagccaaggttcaaaatagcgttttttgaattttggtccgattatttgttgctacggatattgcaaaataaaactaaaattttgaaaataaaaaatttgctacaactctgcgaaaatgaatttaggactttcatattgcatgaaaagttgagccaaacagtccatacaatgcacaaaaaaatttaagacgatgcgtcaattagtctaaattctattcaatttgtttatcccaaatgttattttgtccctttttttcgcagtgttattgttcagaaaataataataacacagcaactctgtgaaaatacatgaaagaagaatagtcatat

SEQ ID NO: 2801 - DNA, 846 bp, Diabrotica virgifera
  SmartBlast Evalue=1E-101; Info=60S ribosomal protein L10A n=4 Tax=Neoptera RepID=D1FPL3_CIMLE
gtccttttctttttcctctttcatttcgttaacgtagacaagccgcaaaagttgtgtcttgaaaaataaaaatgacgtctaaagtatctcgtgatactctatacgagtgtgtgaatggagtcttggaaaatgccaaggagaagaaaaggaactttttggaaaccgtggaactccagatcggtcttaagaactacgatccccaaaaggataagcgtttcagcggaaccgtcaaactaaagcacattcctcgtccaaagatgcaggtatgcatcttgggagatcagcaacattgtgacgaagctaacgccaacaatgttccattcatggatgtagaagccttgaaaaaattgaacaaaaacaagaaattggttaagaaactagccaagaaatatgatgctttccttgcttctgaagccctcatcaaacagatccccaggttgttgggtccaggtttgaacaaggctggtaaattccctggtcttctctcccaccaggaatccatgacacagaaaattgatgaagtaaaagcaacaatcaaattccaaatgaagaaggtactctgcctttctgttgctgttggtcatgtaggcatgaatcaagatgaattggttcaaaatgtccatctttcaatcaacttcttggtctcactgttgaagaaacattggcagaacgttaggtctctccacgtcaaatcatctatgggacccccacaaagattgtattaagttataatttttatactgagacttttatttacacacttaaatgtgggtatctaaataaacatcgtttttaagttctttgttgtttttatttgtagtattgatttatgattggatgtacata

SEQ ID NO: 2802 - DNA, 846 bp, Diabrotica virgifera
  SmartBlast Evalue=1E-101; Info=60S ribosomal protein L10A n=4 Tax=Neoptera RepID=D1FPL3_CIMLE
gtccttttctttttcctctttcatttcgttaacgtagacaagccgcaaaagttgtgtcttgaaaaataaaaatgacgtctaaagtatctcgtgatactctatacgagtgtgtgaatggagtcttggaaaatgccaaggagaagaaaaggaactttttggaaaccgtggaactccagatcggtcttaagaactacgatccccaaaaggataagcgtttcagcggaaccgtcaaactaaagcacattcctcgtccaaagatgcaggtatgcatcttgggagatcagcaacattgtgatgaagctaacgctaacaatgttccattcatggatgtagaagccttgaaaaaattgaacaaaaacaagaaattggttaagaaactagccaagaaatatgatgctttcctcgcttctgaagctctcatcaaacagatccccaggttgttgggtccaggtttgaacaaggctggtaaattccctggtcttctctcccaccaggaatccatgacacagaaaattgatgaagtaaaagcaacaatcaaattccaaatgaagaaggtactctgcctttctgttgctgttggtcatgtaggcatgaatcaagatgaattggttcaaaatgtccatctttcaatcaacttcttggtctcactgttgaagaaacattggcagaacgttaggtctctccacgtcaaatcatctatgggacccccacaaagattgtattaagttataatttttatactgagacttttatttacacacttaaatgtgggtatctaaataaacatcgtttttaagttctttgttgtttttatttgtagtattgatttatgattggatgtacata

SEQ ID NO: 2803 - DNA, 799 bp, Diabrotica virgifera
  SmartBlast Evalue=1E-101; Info=60S ribosomal protein L10A n=4 Tax=Neoptera RepID=D1FPL3_CIMLE
gtccttttctttttcctctttcatttcgttaacgtagacaagccgcaaaagttgtgtcttgaaaaataaaaatgacgtctaaagtatctcgtgatactctatacgagtgtgtgaatggagtcttggaaaatgccaaggagaagaaaaggaactttttggaaaccgtggaactccagatcggtcttaagaactacgatccccaaaaggataagcgtttcagcggaaccgtcaaactaaagcacattcctcgtccaaagatgcaggtatgcatcttgggagatcagcaacattgtgacgaagctaacgccaacaatgttccattcatggatgtagaagccttgaaaaaattgaacaaaaacaagaaattggttaagaaactagccaagaaatatgatgctttccttgcttctgaagccctcatcaaacagatccccaggttgttgggtccaggtttgaacaaggctggtaaattccctggtcttctctcccaccaggaatccatgacacagaaaattgatgaagtaaaagcaacaatcaaattccaaatgaagaaggtactctgcctttctgttgctgttggtcatgtaggcatgaatcaagatgaattggttcaaaatgtccatctttcaatcaacttcttggtctcactgttgaagaaacattggcagaacgttaggtctctccacgtcaaatcatctatgggacccccacaaagattgtattaagttataatttttatactgagacttttatttacacacttaaatgtgggtatctaaataaacatcgtttttaagtt

SEQ ID NO: 2804 - DNA, 799 bp, Diabrotica virgifera
  SmartBlast Evalue=1E-101; Info=60S ribosomal protein L10A n=4 Tax=Neoptera RepID=D1FPL3_CIMLE
gtccttttctttttcctctttcatttcgttaacgtagacaagccgcaaaagttgtgtcttgaaaaataaaaatgacgtctaaagtatctcgtgatactctatacgagtgtgtgaatggagtcttggaaaatgccaaggagaagaaaaggaactttttggaaaccgtggaactccagatcggtcttaagaactacgatccccaaaaggataagcgtttcagcggaaccgtcaaactaaagcacattcctcgtccaaagatgcaggtatgcatcttgggagatcagcaacattgtgatgaagctaacgctaacaatgttccattcatggatgtagaagccttgaaaaaattgaacaaaaacaagaaattggttaagaaactagccaagaaatatgatgctttcctcgcttctgaagctctcatcaaacagatccccaggttgttgggtccaggtttgaacaaggctggtaaattccctggtcttctctcccaccaggaatccatgacacagaaaattgatgaagtaaaagcaacaatcaaattccaaatgaagaaggtactctgcctttctgttgctgttggtcatgtaggcatgaatcaagatgaattggttcaaaatgtccatctttcaatcaacttcttggtctcactgttgaagaaacattggcagaacgttaggtctctccacgtcaaatcatctatgggacccccacaaagattgtattaagttataatttttatactgagacttttatttacacacttaaatgtgggtatctaaataaacatcgtttttaagtt

SEQ ID NO: 2805 - DNA, 805 bp, Diabrotica virgifera
gccctgtattttagtattgtaacgaaatgctatttatggtaccttttaacttctcaagcactccctatacctaactgcttcaatttgtgagttattggtgattcaagccaaacattaattgcaacacaaaatacgtgaaattgtattaggttggccgtgaaaatattcaatcacgaataattttttggaaataagtacatattaatctagactgatacttaaaattgccactaatggttgagctatcaaaattcaattgaagttaaaattgttggtgcgattaacaattaagcacaaattaaagcagttagctatagggaatgctcaaaaagtaaaaaagtatcatgaaatatcatttcgttacaacaccaaaatacagggtgttccatcttaagaaaactcagaaaacactcattccgagtttcgacccaccctgtatactaaaattaaaaattcagccataccaacaattgttaacaatagtagaccatattaaaatcatttcaacataaacagagctactatgtcaaaccactacaatcccacagggtgtgaacactgctacgaaattaataagaaaacataaccatcccttaacctaccctgcataaagttacaaaaccctatatttcaagaaagaagaaatcgaggagaatccaaaaatacaaaaatacacagggtccccatttaaaaaaacgaagctacaagcaacttccagtataaccggaagtgccaagtagatggcaatatttttattaaatagatcagtcctcaaaacccccccattccaactttcataattcag

SEQ ID NO: 2806 - DNA, 656 bp, Diabrotica virgifera
gccctgtattttagtattgtaacgaaatgctatttatggtaccttttaacttctcaagcactccctatacctaactgcttcaatttgtgagttattggtgattcaagccaaacattaattgcaacacaaaatacgtgaaattgtattaggttggccgtgaaaatattcaatcacgaataattttttggaaataagtacatattaatctagactgatacttaaaattgccactaatggttgagctatcaaaattcaattgaagttaaaattgttggtgcgattaacaattaagcacaaattaaagcagttagctatagggaatgctcaaaaagtaaaaaagtatcatgaaatatcatttcgttacaacaccaaaatacagggtgttccatcttaagaaaactcagaaaacactcattccgagtttcgacccaccctgtatactaaaattaaaaattcagccataccaacaattgttaacaatagtagaccatattaaaatcatttcaacataaacagagtctactatgtcaaactaccacaatcctacagggtgtgaacactgccacgaaattaataagaaaacacaaccatccctcaacctaccctgtataaagttacaaaaccctacactttaagaaagaagaaatcgaggagaa

SEQ ID NO: 2807 - DNA, 502 bp, Diabrotica virgifera
gccctgtattttagtattgtaacgaaatgctatttatggtaccttttaacttctcaagcactccctatacctaactgcttcaatttgtgagttattggtgattcaagccaaacattaattgcaacacaaaatacgtgaaattgtattaggttggccgtgaaaatattcaatcacgaataagttttcagaaataaatacatattaatccagactggtccttaaaattaccaataatggtttagctatcgaaaaagctacttagttaagattgttggtgcgattaacaattaagcacaaattaaagcagttaggtatagggaatgcttcaagaaacaaaaaagtaccataaaacatcatttcattacaataccaaaatacagggagttccattccagaaaactcagaaaatactcattccgagcctcgaccaaccctgcacacctaaaattaaaaattcagctatactaacgattctcaacaatagtagagcataccaaaaatc

SEQ ID NO: 2808 - DNA, 465 bp, Diabrotica virgifera
gcatcatgaaatatcatttcattacaacaccaaaatacagggtgctccatctaagaaaactcagaaaacactcattccgagcttcgacccaccctgcacactaaaattaaaactttagctatactaataattgttaacaatagtagaccatattaaaatcatttcaacataaacagagctactatgtcaaaccactacaatcccacagggtgtgaacactgctacgaaattaataagaaaacataaccatcccttaacctaccctgcataaagttacaaaaccctatatttcaagaaagaagaaatcgaggagaatccaaaaatacaaaaatacacagggtccccatttaaaaaaacgaagctacaagcaacttccagtataaccggaagtgccaagtagatggcaatatttttattaaatagatcagtcctcaaaacccccccattccaactttcataattcag

SEQ ID NO: 2809 - DNA, 316 bp, Diabrotica virgifera
gcatcatgaaatatcatttcattacaacaccaaaatacagggtgctccatctaagaaaactcagaaaacactcattccgagcttcgacccaccctgcacactaaaattaaaactttagctatactaataattgttaacaatagtagaccatattaaaatcatttcaacataaacagagtctactatgtcaaactaccacaatcctacagggtgtgaacactgccacgaaattaataagaaaacacaaccatccctcaacctaccctgtataaagttacaaaaccctacactttaagaaagaagaaatcgaggagaa

SEQ ID NO: 2810 - DNA, 336 bp, Diabrotica virgifera
tcttataaattataaagattatattggatatattatataattcgtaaataatttttttcgattatagcgccatctatcgacaactagaataaatgttataaatgtctgtaatcacagacgtgcctttttttctgtcacatacaatttaatgcgttagaaagaaatcgaaaaactgtgacgcactgaaagatgatcatgaaaaggactttacaataggatcttacatattcaggacaaccctgcaggtcagaaattctggaagatctaaatttacaaacagaaaattcgacgaatatctcttgatatttctcactaccagtgtatagctacaaagct

SEQ ID NO: 2811 - DNA, 326 bp, Diabrotica virgifera
atttgtaatattattatctaattaaaaaaaattatttttttattatggcgtcatctatcgacaactagaataactagaataaatgttgtaaatgtctgtaatcaccgacgtgcctttttttctgtcacatacaatttaatgcgttagaaagaaatcgaaaaactgtgacgcactgaaagatgatcatgaaaaggactttacaataggatcttacatattcaggacaaccctgcaggtcagaaattctggaagatctaaatttacaaacagaaaattcgacgaatatctcttgatatttctcactaccagtgtatagctacaaagct

SEQ ID NO: 2812 - DNA, 249 bp, Diabrotica virgifera
aataaatgttataaatgtctgtaatcacagacgtgcctttttttctgtcacatacaatttaatgcgttagaaagaaatcgaaaaactgtgacgcactgaaagatgatcatgaaaaggactttacaataggatcttacatattcaggacaaccctgcaggtcagaaattctggaagatctaaatttacaaacagaaaattcgacgaatatctcttgatatttctcactaccagtgtatagctacaaagct

SEQ ID NO: 2813 - DNA, 6982 bp, Diabrotica virgifera
  SmartBlast Evalue=1E-103; Info=Interferon-inducible double stranded RNA-dependent protein kinase activator A n=2 Tax= Formicidae RepID=E2B2Z2_9HYME
aaattgaccggaactttttgtatccgccattaggcttgttgttagattctttgacaggtctaattgattatcgagtgctttctttgaaaagctcgacatggagtcccaaaacatgaccatgatgcactcggccggaccgattcagcccccaccaagggaagggggcggcccccatcccaacagaaggggtaaccgcaaggggcacggaccacttcacggaaatctaccgacagagaggttatccttgggggaagaagccaaattgctctactctcaagaaatggcctccatgccgagcaagactcccgtcagcgtcctccaggagttgctgagccgtcgcggcatcactcccaaatacgaactggtccaaatcgagggcgccatccacgagccaatcttccgctaccgcgtgttccttaacaacgatctggtggccaccggaaccggaagatcgaagaaagacgccaaacattcggcagccaagaacttgctggatctcttggtcggaaaagtgactcccgaacaagccaatcagaccaacggaacgcccggagcggctgatatcaccaatcaggtggtgacatcgttcgatgacaaagtgatgggcaatcccattggctggctccaagagatgtgcatgtcccgcagatggccaccaccattctatgaaatggaacacgaagagggactaccacacgaaaggcagttcaccatcgcttgtcatgtgttgaaattccgcgaaattggcactggcaagtcaaagaagctagccaagagaatggcggctcacaagatgtggcaatccttgcaggatttacccgtggagggtaacaatctgccttctacatttgcgagtgacgaagagttggccactaaactgggcagctcggctgagaatcggtattcgggactgaaagacactaagattaccaagttgggcaaccagcagtcccacaaagtttcacagttccacaaaacgctgaaaaattccgtcggcaagaagttggccgatttgcagactctcagcttcaacgccaaggacttcaactttgttcagttcttgcaggagatcgctagcgaacaatccttcgaggtaacctacgtggacatcgaagaaaaaacattgaccaatcgccaccaatgcttggtgcagctatccactttgccagtggccgtctgctacggaacaggcaaaactccgaaggaagccaagggctcggctgctcatcatgccctcgagtacctcaaaatcatgaccaaaaagtgaacagctatcgatacacagtcatagatccaatcctataattatccatttcctgtaattctggtttctctatagttttgtcatacgtttttgaggcagcaaatttctcaagggcacacggcaacaaaaagtgataatggatacaaatttgactactgtatagctttcttctcttggtgaacacatactttattcgtcatcgctccccacgagcgtttctttagtctgtatattttcttgtatcacttattgcgtctttgctttggtcactttacgcgcgaaaaccattatgttttactaatttttcaataaagtacactttatttaagaacaggggagaaaagtcacgagaatttgaaaagcgagcttcatgatcccctgaagaatatatcttgaagaactattattttttttttatttttcatcacagtgatgtttgtttcagaacaaaccgggaaaagtattatgagaatatgaaatttaaaagaaaatttgaaaagtatcatgagttttgtgattctccgaagaatatgtctcgaaagactttgactttttactatttttgtatgcacaaaattcgttctacatatgaaacatgtcagttatatattcacctttatatgtcacattttgtggttctttaacgaaatgtcaagagcataaagtatgtctagaacgattttacctttgcgcgaaaagtgaccacaagcaatgtcaaagagaaggatagcaactaattttacaagctatactttgcatagaattagtggtttttttctaaaatcaatttacatattatttttgacttgaataaatttttaaatttaaaaatgcgtgtgtgcaggtatatttatcacatcattcgtcgtgtaccacatctcggatcttgctactaatattcgattcgataggtgctttgtctggttaactttagtgggaaggtttaggtatttgtggtatctgtcgatgttgccagaacgtaagatatcctaaactcacttttttccgaaaaaatatcgcaatagctcaaaagggaacaatttttatcgagttattgatttcgaggaataatacgaacttccatagattcaaatgaagtaaacaacatacgtttttcatttaaaatgaactcacatatgcaatgcattcaacattccatagattcagtgaaaacacgccatcgggttctattttgcgcttaggccttcacctcgtttcaaggctatccttaacatcttatctcgtctatgatatatcttctccaagtttgtgctgggcaaatcaatcaatttgcctcgaaatctaaggttatattacttttatgaatcgtgataacatgcataaaatataataaaaatttatagttttttgcatttttattcggcttattgtaatattcctccatagttcttacatccttgtttatttccctttttgtggagaggtactatgtgtgtttggctagattctgtttgacattcgaaaagtaaacgtcagtttgcgtttcaatgcatcgataagacgaatggtaaagctgctaaaaaagcaggaaaagcccagaagaacgttcgactttcacttcattctatcggcctttcttctctttgccgtattttattttgtaaggtgaggtatttgtacatgaagttgtctgcccctttcttaatcggttctgcatgaatgccatctgggcccggggctctgtgatttcttagtgtcaatagtgctgccgttacttcctcaagcgctggtaacgctttatcgggttctgctaagtggtaagtagaaggtaagccacttaagcacacatgttacataaatgtcaaaatttcgcaaatatatatcacataatttgtttgtggacataaaggaaagaaaaaaatgtcaaaattttgcaaattatgtggcattttgacatttatgtgacataatttgcgacatttgacgtacggttcaagtagctgaagtaaaagtgtgctccattggtttatcctctactgtacaactgtttacctgtgtatgataaataaacttttttcgggtttggaaaaatttcaaattgttcaggtaaaatcttgcttcatgattgaaaatttgcaaggtttggaggagttgtactaatttgtgtaattgaagttcgtattatttcctcgaaatcaataatgcaatgtgtttaaatttttgtcgagtcaaaagcgaagaatatttgaaaatttctaatattgcgatatttttttatcgatctggcttcaatgtttgaatgatgattatataacgagtagatagctttagaggtaatacactattattaggcactagttattaattataatcatcaatattatctatcgatactgaatgtaattttttatatagtgccccgatgatatgatatgtatttattatattgtgaaaagggagcatttatttgatgcaaagtatagaggttgtacccaaacttttcggggtgcaatcttcttttccggaaaatgctcgaaaactcaattggcgcacattcagcaggttttttaacagtttgaaaaccttgataaatggaacgaaattaaacacgctgagaaagctatggttgagtgaaaaaggtgggaaatgttgactgttgtagctgattaaggggtgtattctatatttcggttaaatttaagaggcttttaaaatttaacgtttagcagtcttctttttagaataacattgacattctataaagacgttagagaggttcactaaaaaatattaggaatccactacaaggttttcaatagggcattctaacatgtcaaaattaaatcaatatggcggctgacgggcaaacaaatgttatttgtcagttcttaatatggttttagattcgtttttagttgcctttctttgtaattttgttttgtacaatgattaatttaacattttcagtggaagaattaatttaaaaagataatattcctcatttctgttgtgttttgaggtgtggaatgcgaagtaattgtgataaagttcagttttatcagttaccatgagtgcaaattttgagtgaaatgagagaagaacagtggttaaatgctataaaaggtcctataaaaatgctaaataactacctgtgccatgctagtagtctaccaacaactttcaaaaatattcactcatgttcatttattcaccggttaaaactaaataaagtcgttcaagtaattctacaactaaaaacttcacaaaactgacaaacaaaatgttcggaaaatacaactagaaaactactaaaggtaaaaaacaaaatgtggtacaaatataaacagagacaagttttgtatttccgaccatattggtgtcattaacgtcaagtctcgaaatgccctgttagatacagcaaattgatcgtgtttaaactacttgtaatgtagaagttgtccaaaaactgtcagaggccaaaacacttaaaaataagaaattgacatgaagtgaagacttcttttttagctaaatctattgtaagaaatcctttcgcaaaaaacgatcgcagaaacttttccatccacatcggggcggatatcagagaataataacttaaatagtagtagattttgcgttgtggtgaaaaaaaaaatagagattggaacacattaaaaatattcataaatctattagagctagaaattttaagtgtaacacatgtggtaaaacattctttttaaagggaatcactctggagcatcctagcatgtgttctacgatagttcatcatagtactctctttttttttgtaactcattttcccattaatcatttttatttatcaaactatttaattataaagttacgattttaagggatatagaatacaaaaatattgtaacagacggtaaaattttagaggcctcttaaatttaacgaaagtgttacagaatacacccctaaggcaagattaaaaaacggaaacgaaggaagaggaaattgctggaaattttagtaattctcacattgtttccgaaaactcaggaaattatctgaaaaactgcaaccgatatttcataatgttgccagatttctgcaaatgattgtattttaccctccagtattcgcgtagattttcaggagaagcatagttgcatcgagagaccgatattaattgaacgttagtttttgaaaaaaaaaagccccaacaacttgggcttttaggatgaataatacgtacatattcttcaagaaacagaaattttaatcagataaactaaatgtggtattactgttaatgcagagaaggttcctatcttcaatgagatgatggcgaccacattgacccatcttattctattcacatcagtcttgcctattcacaatcttgccttgtagaatcaactgtatgaaaattaaaaatctaatttttatattgaaatggtgtagaagacaatgcttaaaaattgagaaaattgtcattacaaaacaacggtatttgaagatggatcgtatgaagacgaggataccgaatacacagtaaatatgtgtaaataagatcacgagaactagacgaaaaacacagaaaggaacttagtgaaaacaatagttgatcagaaccactaaatgttagtatggaaaacagggaagaagatgaaagtgaaatgactgaagatcaaccagtaggaaatggcattaataatacatgtatatcttgagcgcagaaacgacgaaataaaaaggaactcgaagcaaaggaaaggaaaaatctaattttagagcaagctaagaagaataaagagggacccagaattgttaaaatccttaaaatcagctgtagacgcagtactaccatacaacgtgacagtgtgacaaacaaaatttcgaccaatcaagtgccaaatttcatacaattttcgatacaagaacttgcatattgttatacagggcacaaatgtacgtacaagaaacgatacaagaaaatgtatatcagaaatgatattagaaatgatacaagaaaatgcatagtgtcatacagccataagttggtaaatgatttaagaaaagttacagcagattttgtaagacaaaacaaagatgacttcaaaccatttatgtgcaatgaattaggtgaatccgaagtagttagcgaggaacagtttgagaattattgtaaagatgttgcaacaacaaattaatggggaggtcagttagaactgcgagctttatcgaatattcttacttactccattgaagttattgaggccgcgattccttccacactgtaggaaaaaattgcagtttgctcactttcatcaatatcaaaaattgaactttgacccggtctgccagaccgtgcgcgactactggaaggtttaaaatacctttttatcgcatattccccgtaaaagtgaaatctggcagtacagtgttgcgaaattgagggctttttctggaaaataagattatgctctttttgatttttgtgaacggtgattgtggaagagcaaacatctcgactggttctttgggtataagcgacggtgtttcctcgtcggcaatcgctgggttctaattaacatatatgtcaatagaaagtttttaggcacaaaccgtcaatacatataggcatgctattgtcgaagatgtctaaagatccctagaactgtagaattgtttcatttttcttttatttcttagtaggtaagtttgtgatttatattgatgtgtatgctaattaatataactaatggc

SEQ ID NO: 2814 - DNA, 6965 bp, Diabrotica virgifera
  SmartBlast Evalue=1E-103; Info=Interferon-inducible double stranded RNA-dependent protein kinase activator A n=2 Tax= Formicidae RepID=E2B2Z2_9HYME
aaattgaccggaactttttgtatccgccattaggcttgttgttagattctttgacaggtctaattgattatcgagtgctttctttgaaaagctcgacatggagtcccaaaacatgaccatgatgcactcggccggaccgattcagcccccaccaagggaagggggcggcccccatcccaacagaaggggtaaccgcaaggggcacggaccacttcacggaaatctaccgacagagaggttatccttgggggaagaagccaaattgctctactctcaagaaatggcctccatgccgagcaagactcccgtcagcgtcctccaggagttgctgagccgtcgcggcatcactcccaaatacgaactggtccaaatcgagggcgccatccacgagccaatcttccgctaccgcgtgttccttaacaacgatctggtggccaccggaaccggaagatcgaagaaagacgccaaacattcggcagccaagaacttgctggatctcttggtcggaaaagtgactcccgaacaagccaatcagaccaacggaacgcccggagcggctgatatcaccaatcaggtggtgacatcgttcgatgacaaagtgatgggcaatcccattggctggctccaagagatgtgcatgtcccgcagatggccaccaccattctatgaaatggaacacgaagagggactaccacacgaaaggcagttcaccatcgcttgtcatgtgttgaaattccgcgaaattggcactggcaagtcaaagaagctagccaagagaatggcggctcacaagatgtggcaatccttgcaggatttacccgtggagggtaacaatctgccttctacatttgcgagtgacgaagagttggccactaaactgggcagctcggctgagaatcggtattcgggactgaaagacactaagattaccaagttgggcaaccagcagtcccacaaagtttcacagttccacaaaacgctgaaaaattccgtcggcaagaagttggccgatttgcagactctcagcttcaacgccaaggacttcaactttgttcagttcttgcaggagatcgctagcgaacaatccttcgaggtaacctacgtggacatcgaagaaaaaacattgaccaatcgccaccaatgcttggtgcagctatccactttgccagtggccgtctgctacggaacaggcaaaactccgaaggaagccaagggctcggctgctcatcatgccctcgagtacctcaaaatcatgaccaaaaagtgaacagctatcgatacacagtcatagatccaatcctataattatccatttcctgtaattctggtttctctatagttttgtcatacgtttttgaggcagcaaatttctcaagggcacacggcaacaaaaagtgataatggatacaaatttgactactgtatagctttcttctcttggtgaacacatactttattcgtcatcgctccccacgagcgtttctttagtctgtatattttcttgtatcacttattgcgtctttgctttggtcactttacgcgcgaaaaccattatgttttactaatttttcaataaagtacactttatttaagaacaggggagaaaagtcacgagaatttgaaaagcgagcttcatgatcccctgaagaatatatcttgaagaactattattttttttttatttttcatcacagtgatgtttgtttcagaacaaaccgggaaaagtattatgagaatatgaaatttaaaagaaaatttgaaaagtatcatgagttttgtgattctccgaagaatatgtctcgaaagactttgactttttactatttttgtatgcacaaaattcgttctacatatgaaacatgtcagttatatattcacctttatatgtcacattttgtggttctttaacgaaatgtcaagagcataaagtatgtctagaacgattttacctttgcgcgaaaagtgaccacaagcaatgtcaaagagaaggatagcaactaattttacaagctatactttgcatagaattagtggtttttttctaaaatcaatttacatattatttttgacttgaataaatttttaaatttaaaaatgcgtgtgtgcaggtatatttatcacatcattcgtcgtgtaccacatctcggatcttgctactaatattcgattcgataggtgctttgtctggttaactttagtgggaaggtttaggtatttgtggtatctgtcgatgttgccagaacgtaagatatcctaaactcacttttttccgaaaaaatatcgcaatagctcaaaagggaacaatttttatcgagttattgatttcgaggaataatacgaacttccatagattcaaatgaagtaaacaacatacgtttttcatttaaaatgaactcacatatgcaatgcattcaacattccatagattcagtgaaaacacgccatcgggttctattttgcgcttaggccttcacctcgtttcaaggctatccttaacatcttatctcgtctatgatatatcttctccaagtttgtgctgggcaaatcaatcaatttgcctcgaaatctaaggttatattacttttatgaatcgtgataacatgcataaaatataataaaaatttatagttttttgcatttttattcggcttattgtaatattcctccatagttcttacatccttgtttatttccctttttgtggagaggtactatgtgtgtttggctagattctgtttgacattcgaaaagtaaacgtcagtttgcgtttcaatgcatcgataagacgaatggtaaagctgctaaaaaagcaggaaaagcccagaagaacgttcgactttcacttcattctatcggcctttcttctctttgccgtattttattttgtaaggtgaggtatttgtacatgaagttgtctgcccctttcttaatcggttctgcatgaatgccatctgggcccggggctctgtgatttcttagtgtcaatagtgctgccgttacttcctcaagcgctggtaacgctttatcgggttctgctaagtggtaagtagaaggtaagccacttaagcacacatgttacataaatgtcaaaatttgacataatttgtggacataaaggaaagaaaaaaatgtcaaaattttgcaaattatgtggcattttgacatttatgtgacataatttgcgacatttgacgtacggttcaagtagctgaagtaaaagtgtgctccattggtttatcctctactgtacaactgtttacctgtgtatgataaataaacttttttcgggtttggaaaaatttcaaattgttcaggtaaaatcttgcttcatgattgaaaatttgcaaggtttggaggagttgtactaatttgtgtaattgaagttcgtattatttcctcgaaatcaataatgcaatgtgtttaaatttttgtcgagtcaaaagcgaagaatatttgaaaatttctaatattgcgatatttttttatcgatctggcttcaatgtttgaatgatgattatataacgagtagatagctttagaggtaatacactattattaggcactagttattaattataatcatcaatattatctatcgatactgaatgtaattttttatatagtgccccgatgatatgatatgtatttattatattgtgaaaagggagcatttatttgatgcaaagtatagaggttgtacccaaacttttcggggtgcaatcttcttttccggaaaatgctcgaaaactcaattggcgcacattcagcaggttttttaacagtttgaaaaccttgataaatggaacgaaattaaacacgctgagaaagctatggttgagtgaaaaaggtgggaaatgttgactgttgtagctgattaaggggtgtattctatatttcggttaaatttaagaggcttttaaaatttaacgtttagcagtcttctttttagaataacattgacattctataaagacgttagagaggttcactaaaaaatattaggaatccactacaaggttttcaatagggcattctaacatgtcaaaattaaatcaatatggcggctgacgggcaaacaaatgttatttgtcagttcttaatatggttttagattcgtttttagttgcctttctttgtaattttgttttgtacaatgattaatttaacattttcagtggaagaattaatttaaaaagataatattcctcatttctgttgtgttttgaggtgtggaatgcgaagtaattgtgataaagttcagttttatcagttaccatgagtgcaaattttgagtgaaatgagagaagaacagtggttaaatgctataaaaggtcctataaaaatgctaaataactacctgtgccatgctagtagtctaccaacaactttcaaaaatattcactcatgttcatttattcaccggttaaaactaaataaagtcgttcaagtaattctacaactaaaaacttcacaaaactgacaaacaaaatgttcggaaaatacaactagaaaactactaaaggtaaaaaacaaaatgtggtacaaatataaacagagacaagttttgtatttccgaccatattggtgtcattaacgtcaagtctcgaaatgccctgttagatacagcaaattgatcgtgtttaaactacttgtaatgtagaagttgtccaaaaactgtcagaggccaaaacacttaaaaataagaaattgacatgaagtgaagacttcttttttagctaaatctattgtaagaaatcctttcgcaaaaaacgatcgcagaaacttttccatccacatcggggcggatatcagagaataataacttaaatagtagtagattttgcgttgtggtgaaaaaaaaaatagagattggaacacattaaaaatattcataaatctattagagctagaaattttaagtgtaacacatgtggtaaaacattctttttaaagggaatcactctggagcatcctagcatgtgttctacgatagttcatcatagtactctctttttttttgtaactcattttcccattaatcatttttatttatcaaactatttaattataaagttacgattttaagggatatagaatacaaaaatattgtaacagacggtaaaattttagaggcctcttaaatttaacgaaagtgttacagaatacacccctaaggcaagattaaaaaacggaaacgaaggaagaggaaattgctggaaattttagtaattctcacattgtttccgaaaactcaggaaattatctgaaaaactgcaaccgatatttcataatgttgccagatttctgcaaatgattgtattttaccctccagtattcgcgtagattttcaggagaagcatagttgcatcgagagaccgatattaattgaacgttagtttttgaaaaaaaaaagccccaacaacttgggcttttaggatgaataatacgtacatattcttcaagaaacagaaattttaatcagataaactaaatgtggtattactgttaatgcagagaaggttcctatcttcaatgagatgatggcgaccacattgacccatcttattctattcacatcagtcttgcctattcacaatcttgccttgtagaatcaactgtatgaaaattaaaaatctaatttttatattgaaatggtgtagaagacaatgcttaaaaattgagaaaattgtcattacaaaacaacggtatttgaagatggatcgtatgaagacgaggataccgaatacacagtaaatatgtgtaaataagatcacgagaactagacgaaaaacacagaaaggaacttagtgaaaacaatagttgatcagaaccactaaatgttagtatggaaaacagggaagaagatgaaagtgaaatgactgaagatcaaccagtaggaaatggcattaataatacatgtatatcttgagcgcagaaacgacgaaataaaaaggaactcgaagcaaaggaaaggaaaaatctaattttagagcaagctaagaagaataaagagggacccagaattgttaaaatccttaaaatcagctgtagacgcagtactaccatacaacgtgacagtgtgacaaacaaaatttcgaccaatcaagtgccaaatttcatacaattttcgatacaagaacttgcatattgttatacagggcacaaatgtacgtacaagaaacgatacaagaaaatgtatatcagaaatgatattagaaatgatacaagaaaatgcatagtgtcatacagccataagttggtaaatgatttaagaaaagttacagcagattttgtaagacaaaacaaagatgacttcaaaccatttatgtgcaatgaattaggtgaatccgaagtagttagcgaggaacagtttgagaattattgtaaagatgttgcaacaacaaattaatggggaggtcagttagaactgcgagctttatcgaatattcttacttactccattgaagttattgaggccgcgattccttccacactgtaggaaaaaattgcagtttgctcactttcatcaatatcaaaaattgaactttgacccggtctgccagaccgtgcgcgactactggaaggtttaaaatacctttttatcgcatattccccgtaaaagtgaaatctggcagtacagtgttgcgaaattgagggctttttctggaaaataagattatgctctttttgatttttgtgaacggtgattgtggaagagcaaacatctcgactggttctttgggtataagcgacggtgtttcctcgtcggcaatcgctgggttctaattaacatatatgtcaatagaaagtttttaggcacaaaccgtcaatacatataggcatgctattgtcgaagatgtctaaagatccctagaactgtagaattgtttcatttttcttttatttcttagtaggtaagtttgtgatttatattgatgtgtatgctaattaatataactaatggc

SEQ ID NO: 2815 - DNA, 6973 bp, Diabrotica virgifera
  SmartBlast Evalue=1E-103; Info=Interferon-inducible double stranded RNA-dependent protein kinase activator A n=2 Tax= Formicidae RepID=E2B2Z2_9HYME
aaattgaccggaactttttgtatccgccattaggcttgttgttagattctttgacaggtctaattgattatcgagtgctttctttgaaaagctcgacatggagtcccaaaacatgaccatgatgcactcggccggaccgattcagcccccaccaagggaagggggcggcccccatcccaacagaaggggtaaccgcaaggggcacggaccacttcacggaaatctaccgacagagaggttatccttgggggaagaagccaaattgctctactctcaagaaatggcctccatgccgagcaagactcccgtcagcgtcctccaggagttgctgagccgtcgcggcatcactcccaaatacgaactggtccaaatcgagggcgccatccacgagccaatcttccgctaccgcgtgttccttaacaacgatctggtggccaccggaaccggaagatcgaagaaagacgccaaacattcggcagccaagaacttgctggatctcttggtcggaaaagtgactcccgaacaagccaatcagaccaacggaacgcccggagcggctgatatcaccaatcaggtggtgacatcgttcgatgacaaagtgatgggcaatcccattggctggctccaagagatgtgcatgtcccgcagatggccaccaccattctatgaaatggaacacgaagagggactaccacacgaaaggcagttcaccatcgcttgtcatgtgttgaaattccgcgaaattggcactggcaagtcaaagaagctagccaagagaatggcggctcacaagatgtggcaatccttgcaggatttacccgtggagggtaacaatctgccttctacatttgcgagtgacgaagagttggccactaaactgggcagctcggctgagaatcggtattcgggactgaaagacactaagattaccaagttgggcaaccagcagtcccacaaagtttcacagttccacaaaacgctgaaaaattccgtcggcaagaagttggccgatttgcagactctcagcttcaacgccaaggacttcaactttgttcagttcttgcaggagatcgctagcgaacaatccttcgaggtaacctacgtggacatcgaagaaaaaacattgaccaatcgccaccaatgcttggtgcagctatccactttgccagtggccgtctgctacggaacaggcaaaactccgaaggaagccaagggctcggctgctcatcatgccctcgagtacctcaaaatcatgaccaaaaagtgaacagctatcgatacacagtcatagatccaatcctataattatccatttcctgtaattctggtttctctatagttttgtcatacgtttttgaggcagcaaatttctcaagggcacacggcaacaaaaagtgataatggatacaaatttgactactgtatagctttcttctcttggtgaacacatactttattcgtcatcgctccccacgagcgtttctttagtctgtatattttcttgtatcacttattgcgtctttgctttggtcactttacgcgcgaaaaccattatgttttactaatttttcaataaagtacactttatttaagaacaggggagaaaagtcacgagaatttgaaaagcgagcttcatgatcccctgaagaatatatcttgaagaactattattttttttttatttttcatcacagtgatgtttgtttcagaacaaaccgggaaaagtattatgagaatatgaaatttaaaagaaaatttgaaaagtatcatgagttttgtgattctccgaagaatatgtctcgaaagactttgactttttactatttttgtatgcacaaaattcgttctacatatgaaacatgtcagttatatattcacctttatatgtcacattttgtggttctttaacgaaatgtcaagagcataaagtatgtctagaacgattttacctttgcgcgaaaagtgaccacaagcaatgtcaaagagaaggatagcaactaattttacaagctatactttgcatagaattagtggtttttttctaaaatcaatttacatattatttttgacttgaataaatttttaaatttaaaaatgcgtgtgtgcaggtatatttatcacatcattcgtcgtgtaccacatctcggatcttgctactaatattcgattcgataggtgctttgtctggttaactttagtgggaaggtttaggtatttgtggtatctgtcgatgttgccagaacgtaagatatcctaaactcacttttttccgaaaaaatatcgcaatagctcaaaagggaacaatttttatcgagttattgatttcgaggaataatacgaacttccatagattcaaatgaagtaaacaacatacgtttttcatttaaaatgaactcacatatgcaatgcattcaacattccatagattcagtgaaaacacgccatcgggttctattttgcgcttaggccttcacctcgtttcaaggctatccttaacatcttatctcgtctatgatatatcttctccaagtttgtgctgggcaaatcaatcaatttgcctcgaaatctaaggttatattacttttatgaatcgtgataacatgcataaaatataataaaaatttatagttttttgcatttttattcggcttattgtaatattcctccatagttcttacatccttgtttatttccctttttgtggagaggtactatgtgtgtttggctagattctgtttgacattcgaaaagtaaacgtcagtttgcgtttcaatgcatcgataagacgaatggtaaagctgctaaaaaagcaggaaaagcccagaagaacgttcgactttcacttcattctatcggcctttcttctctttgccgtattttattttgtaaggtgaggtatttgtacatgaagttgtctgcccctttcttaatcggttctgcatgaatgccatctgggcccggggctctgtgatttcttagtgtcaatagtgctgccgttacttcctcaagcgctggtaacgctttatcgggttctgctaagtggtaagtagaaggtaagccacttaagcacacatgttacataaatgtcaaaatttcgcaaatatatatcacataatttgtttgtggacataaaggaaagaaaaaaatgtcaaaattttgcaaattatgtggcattttgacatttatgtgacataatttgcgacatttgacgtacggttcaagtagctgaagtaaaagtgtgctccattggtttatcctctactgtacaactgtttacctgtgtatgataaataaacttttttcgggtttggaaaaatttcaaattgttcaggtaaaatcttgcttcatgattgaaaatttgcaaggtttggaggagttgtactaatttgtgtaattgaagttcgtattatttcctcgaaatcaataatgcaatgtgtttaaatttttgtcgagtcaaaagcgaagaatatttgaaaatttctaatattgcgatatttttttatcgatctggcttcaatgtttgaatgatgattatataacgagtagatagctttagaggtaatacactattattaggcactagttattaattataatcatcaatattatctatcgatactgaatgtaattttttatatagtgccccgatgatatgatatgtatttattatattgtgaaaagggagcatttatttgatgcaaagtatagaggttgtacccaaacttttcggggtgcaatcttcttttccggaaaatgctcgaaaactcaattggcgcacattcagcaggttttttaacagtttgaaaaccttgataaatggaacgaaattaaacacgctgagaaagctatggttgagtgaaaaaggtgggaaatgttgactgttgtagctgattaaggggtgtattctatatttcggttaaatttaagaggcttttaaaatttaacgtttagcagtcttctttttagaataacattgacattctataaagacgttagagaggttcactaaaaaatattaggaatccactacaaggttttcaatagggcattctaacatgtcaaaattaaatcaatatggcggctgacgggcaaacaaatgttatttgtcagttcttaatatggttttagattcgtttttagttgcctttctttgtaattttgttttgtacaatgattaatttaacattttcagtggaagaattaatttaaaaagataatattcctcatttctgttgtgttttgaggtgtggaatgcgaagtaattgtgataaagttcagttttatcagttaccatgagtgcaaattttgagtgaaatgagagaagaacagtggttaaatgctataaaaggtcctataaaaatgctaaataactacctgtgccatgctagtagtctaccaacaactttcaaaaatattcactcatgttcatttattcaccggttaaaactaaataaagtcgttcaagtaattctacaactaaaaacttcacaaaactgacaaacaaaatgttcggaaaatacaactagaaaactactaaaggtaaaaaacaaaatgtggtacaaatataaacagagacaagttttgtatttccgaccatattggtgtcattaacgtcaagtctcgaaatgccctgttagatacagcaaattgatcgtgtttaaactacttgtaatgtagaagttgtccaaaaactgtcagaggccaaaacacttaaaaataagaaattgacatgaagtgaagacttcttttttagctaaatctattgtaagaaatcctttcgcaaaaaacgatcgcagaaacttttccatccacatcggggcggatatcagagaataataacttaaatagtagtagattttgcgttgtggtgaaaaaaaaaatagagattggaacacattaaaaatattcataaatctattagagctagaaattttaagtgtaacacatgtggtaattttttaaaggaaatcactctggagcatcctagcgtgtgttctacgatagttcatcatagtactctctttttttttgtaactcattttcccattaaccatttttatttatcaaactatttaatcataaagttacgattttaagggatatagaatacaaaaatattttaacagacggtaaaattttagaggcctcttaaatttaacgaaagtgttacagaatacacccctaaggcaagattaaaaaacggcaacgaaggaagaggaaattgctggaaattttagtaattctcacattgtttccgaaaactcaggaaattatctgaaaaactgcaaccgatatttcataatgttgccagatttctgcaaatgattgtattttaccttccagtattcgcgtagattttcaggagaagcatagttgcatcgagagaccaatattaattaaacgttagtttttgaaaaaaaaaagccccaacaacttgggcttttaggatgaataatacgtacatattcttcaagaaacagaaattttaatcagataaactaaatccagtattactgttaatgcagagaaggttcctatcttcaatgagatgatggcgaccacattgacccatcttattctattcacatcagtcttgcctattcacaatcttgccttgtagaatcaactgtatgaaaattaaaaatctaatttttatattgaaatggtgtagaagacgatgcttaaaaattgagaaaattgtcattacttaaaaacaacggtatttgaagatggagcgtatgaagacgaggataccgaatacacagtaaatatgtgtaaataagatcacgagaactagacgaaaaacacagaaaggaacttagtgaaaacaatagttgatcagaaccactaaatgttagtatggaaaacagggaagaagatgaaagtgaaatgactgaagatcaaccagtaggaaatggcatgaataatacatgtatatctcgagcgcagaaacgacgaaataaaaaggaactcaaagcaaaggaaaggaaaaatctaattttagagcaagctaagaagaataaagagggacccagaattgttaaaatccttaaaatcagctgtagacgcagtactaccatacaacgtgacacagtgtgacaaacaaaatttcgaccaatcacgtgccgaattttatacaattttcgatacaagaacttgcatattgtcatacagggcacaaatgtacgtacaagaaacgatacaagaaaatgtatatcagaaacgatattagaaatgatacaagaaaatgcatagtgtcatacagccataagttggtaaattatttaaagttgcagcagattttatgagacaaaacaaagatgacttcataccatttatgtgcaattaattaggtaaatccgaagtagttagcgaggagcagtttgagaattattgtaaagatgttgcaacaacaaattaatggcgaggtcagttagaactgcgagctttatcgaatattcttgctctattgaagttattcaggccgcgattccttccacactgtaggaaaaaattgcagtttgctcactttcatcaatatcaaaaattgaactttgacccggtctgccagaccgtgcgcgactactggaaggtttaaaatacctttttatcgcatattccccgtaaaagtgaaatctggcagtacagtgttgcgaaattgagggctttttctggaaaataagattatgctctttttgatttttgtgaacggtgattgtggaagagcaaacatctcgactggttctttgggtataagcgacggtgtttcctcgtcggcaatcgctgggttctaattaacatatatgtcaatagaaagtttttaggcacaaaccgtcaatacatataggcatgctattgtcgaagatgtctaaagatccctagaactgtagaattgtttcatttttcttttatttcttagtaggtaagtttgtgatttatattgatgtgtatgctaattaatataactaatggc

SEQ ID NO: 2816 - DNA, 6956 bp, Diabrotica virgifera
  SmartBlast Evalue=1E-103; Info=Interferon-inducible double stranded RNA-dependent protein kinase activator A n=2 Tax= Formicidae RepID=E2B2Z2_9HYME
aaattgaccggaactttttgtatccgccattaggcttgttgttagattctttgacaggtctaattgattatcgagtgctttctttgaaaagctcgacatggagtcccaaaacatgaccatgatgcactcggccggaccgattcagcccccaccaagggaagggggcggcccccatcccaacagaaggggtaaccgcaaggggcacggaccacttcacggaaatctaccgacagagaggttatccttgggggaagaagccaaattgctctactctcaagaaatggcctccatgccgagcaagactcccgtcagcgtcctccaggagttgctgagccgtcgcggcatcactcccaaatacgaactggtccaaatcgagggcgccatccacgagccaatcttccgctaccgcgtgttccttaacaacgatctggtggccaccggaaccggaagatcgaagaaagacgccaaacattcggcagccaagaacttgctggatctcttggtcggaaaagtgactcccgaacaagccaatcagaccaacggaacgcccggagcggctgatatcaccaatcaggtggtgacatcgttcgatgacaaagtgatgggcaatcccattggctggctccaagagatgtgcatgtcccgcagatggccaccaccattctatgaaatggaacacgaagagggactaccacacgaaaggcagttcaccatcgcttgtcatgtgttgaaattccgcgaaattggcactggcaagtcaaagaagctagccaagagaatggcggctcacaagatgtggcaatccttgcaggatttacccgtggagggtaacaatctgccttctacatttgcgagtgacgaagagttggccactaaactgggcagctcggctgagaatcggtattcgggactgaaagacactaagattaccaagttgggcaaccagcagtcccacaaagtttcacagttccacaaaacgctgaaaaattccgtcggcaagaagttggccgatttgcagactctcagcttcaacgccaaggacttcaactttgttcagttcttgcaggagatcgctagcgaacaatccttcgaggtaacctacgtggacatcgaagaaaaaacattgaccaatcgccaccaatgcttggtgcagctatccactttgccagtggccgtctgctacggaacaggcaaaactccgaaggaagccaagggctcggctgctcatcatgccctcgagtacctcaaaatcatgaccaaaaagtgaacagctatcgatacacagtcatagatccaatcctataattatccatttcctgtaattctggtttctctatagttttgtcatacgtttttgaggcagcaaatttctcaagggcacacggcaacaaaaagtgataatggatacaaatttgactactgtatagctttcttctcttggtgaacacatactttattcgtcatcgctccccacgagcgtttctttagtctgtatattttcttgtatcacttattgcgtctttgctttggtcactttacgcgcgaaaaccattatgttttactaatttttcaataaagtacactttatttaagaacaggggagaaaagtcacgagaatttgaaaagcgagcttcatgatcccctgaagaatatatcttgaagaactattattttttttttatttttcatcacagtgatgtttgtttcagaacaaaccgggaaaagtattatgagaatatgaaatttaaaagaaaatttgaaaagtatcatgagttttgtgattctccgaagaatatgtctcgaaagactttgactttttactatttttgtatgcacaaaattcgttctacatatgaaacatgtcagttatatattcacctttatatgtcacattttgtggttctttaacgaaatgtcaagagcataaagtatgtctagaacgattttacctttgcgcgaaaagtgaccacaagcaatgtcaaagagaaggatagcaactaattttacaagctatactttgcatagaattagtggtttttttctaaaatcaatttacatattatttttgacttgaataaatttttaaatttaaaaatgcgtgtgtgcaggtatatttatcacatcattcgtcgtgtaccacatctcggatcttgctactaatattcgattcgataggtgctttgtctggttaactttagtgggaaggtttaggtatttgtggtatctgtcgatgttgccagaacgtaagatatcctaaactcacttttttccgaaaaaatatcgcaatagctcaaaagggaacaatttttatcgagttattgatttcgaggaataatacgaacttccatagattcaaatgaagtaaacaacatacgtttttcatttaaaatgaactcacatatgcaatgcattcaacattccatagattcagtgaaaacacgccatcgggttctattttgcgcttaggccttcacctcgtttcaaggctatccttaacatcttatctcgtctatgatatatcttctccaagtttgtgctgggcaaatcaatcaatttgcctcgaaatctaaggttatattacttttatgaatcgtgataacatgcataaaatataataaaaatttatagttttttgcatttttattcggcttattgtaatattcctccatagttcttacatccttgtttatttccctttttgtggagaggtactatgtgtgtttggctagattctgtttgacattcgaaaagtaaacgtcagtttgcgtttcaatgcatcgataagacgaatggtaaagctgctaaaaaagcaggaaaagcccagaagaacgttcgactttcacttcattctatcggcctttcttctctttgccgtattttattttgtaaggtgaggtatttgtacatgaagttgtctgcccctttcttaatcggttctgcatgaatgccatctgggcccggggctctgtgatttcttagtgtcaatagtgctgccgttacttcctcaagcgctggtaacgctttatcgggttctgctaagtggtaagtagaaggtaagccacttaagcacacatgttacataaatgtcaaaatttgacataatttgtggacataaaggaaagaaaaaaatgtcaaaattttgcaaattatgtggcattttgacatttatgtgacataatttgcgacatttgacgtacggttcaagtagctgaagtaaaagtgtgctccattggtttatcctctactgtacaactgtttacctgtgtatgataaataaacttttttcgggtttggaaaaatttcaaattgttcaggtaaaatcttgcttcatgattgaaaatttgcaaggtttggaggagttgtactaatttgtgtaattgaagttcgtattatttcctcgaaatcaataatgcaatgtgtttaaatttttgtcgagtcaaaagcgaagaatatttgaaaatttctaatattgcgatatttttttatcgatctggcttcaatgtttgaatgatgattatataacgagtagatagctttagaggtaatacactattattaggcactagttattaattataatcatcaatattatctatcgatactgaatgtaattttttatatagtgccccgatgatatgatatgtatttattatattgtgaaaagggagcatttatttgatgcaaagtatagaggttgtacccaaacttttcggggtgcaatcttcttttccggaaaatgctcgaaaactcaattggcgcacattcagcaggttttttaacagtttgaaaaccttgataaatggaacgaaattaaacacgctgagaaagctatggttgagtgaaaaaggtgggaaatgttgactgttgtagctgattaaggggtgtattctatatttcggttaaatttaagaggcttttaaaatttaacgtttagcagtcttctttttagaataacattgacattctataaagacgttagagaggttcactaaaaaatattaggaatccactacaaggttttcaatagggcattctaacatgtcaaaattaaatcaatatggcggctgacgggcaaacaaatgttatttgtcagttcttaatatggttttagattcgtttttagttgcctttctttgtaattttgttttgtacaatgattaatttaacattttcagtggaagaattaatttaaaaagataatattcctcatttctgttgtgttttgaggtgtggaatgcgaagtaattgtgataaagttcagttttatcagttaccatgagtgcaaattttgagtgaaatgagagaagaacagtggttaaatgctataaaaggtcctataaaaatgctaaataactacctgtgccatgctagtagtctaccaacaactttcaaaaatattcactcatgttcatttattcaccggttaaaactaaataaagtcgttcaagtaattctacaactaaaaacttcacaaaactgacaaacaaaatgttcggaaaatacaactagaaaactactaaaggtaaaaaacaaaatgtggtacaaatataaacagagacaagttttgtatttccgaccatattggtgtcattaacgtcaagtctcgaaatgccctgttagatacagcaaattgatcgtgtttaaactacttgtaatgtagaagttgtccaaaaactgtcagaggccaaaacacttaaaaataagaaattgacatgaagtgaagacttcttttttagctaaatctattgtaagaaatcctttcgcaaaaaacgatcgcagaaacttttccatccacatcggggcggatatcagagaataataacttaaatagtagtagattttgcgttgtggtgaaaaaaaaaatagagattggaacacattaaaaatattcataaatctattagagctagaaattttaagtgtaacacatgtggtaattttttaaaggaaatcactctggagcatcctagcgtgtgttctacgatagttcatcatagtactctctttttttttgtaactcattttcccattaaccatttttatttatcaaactatttaatcataaagttacgattttaagggatatagaatacaaaaatattttaacagacggtaaaattttagaggcctcttaaatttaacgaaagtgttacagaatacacccctaaggcaagattaaaaaacggcaacgaaggaagaggaaattgctggaaattttagtaattctcacattgtttccgaaaactcaggaaattatctgaaaaactgcaaccgatatttcataatgttgccagatttctgcaaatgattgtattttaccttccagtattcgcgtagattttcaggagaagcatagttgcatcgagagaccaatattaattaaacgttagtttttgaaaaaaaaaagccccaacaacttgggcttttaggatgaataatacgtacatattcttcaagaaacagaaattttaatcagataaactaaatccagtattactgttaatgcagagaaggttcctatcttcaatgagatgatggcgaccacattgacccatcttattctattcacatcagtcttgcctattcacaatcttgccttgtagaatcaactgtatgaaaattaaaaatctaatttttatattgaaatggtgtagaagacgatgcttaaaaattgagaaaattgtcattacttaaaaacaacggtatttgaagatggagcgtatgaagacgaggataccgaatacacagtaaatatgtgtaaataagatcacgagaactagacgaaaaacacagaaaggaacttagtgaaaacaatagttgatcagaaccactaaatgttagtatggaaaacagggaagaagatgaaagtgaaatgactgaagatcaaccagtaggaaatggcatgaataatacatgtatatctcgagcgcagaaacgacgaaataaaaaggaactcaaagcaaaggaaaggaaaaatctaattttagagcaagctaagaagaataaagagggacccagaattgttaaaatccttaaaatcagctgtagacgcagtactaccatacaacgtgacacagtgtgacaaacaaaatttcgaccaatcacgtgccgaattttatacaattttcgatacaagaacttgcatattgtcatacagggcacaaatgtacgtacaagaaacgatacaagaaaatgtatatcagaaacgatattagaaatgatacaagaaaatgcatagtgtcatacagccataagttggtaaattatttaaagttgcagcagattttatgagacaaaacaaagatgacttcataccatttatgtgcaattaattaggtaaatccgaagtagttagcgaggagcagtttgagaattattgtaaagatgttgcaacaacaaattaatggcgaggtcagttagaactgcgagctttatcgaatattcttgctctattgaagttattcaggccgcgattccttccacactgtaggaaaaaattgcagtttgctcactttcatcaatatcaaaaattgaactttgacccggtctgccagaccgtgcgcgactactggaaggtttaaaatacctttttatcgcatattccccgtaaaagtgaaatctggcagtacagtgttgcgaaattgagggctttttctggaaaataagattatgctctttttgatttttgtgaacggtgattgtggaagagcaaacatctcgactggttctttgggtataagcgacggtgtttcctcgtcggcaatcgctgggttctaattaacatatatgtcaatagaaagtttttaggcacaaaccgtcaatacatataggcatgctattgtcgaagatgtctaaagatccctagaactgtagaattgtttcatttttcttttatttcttagtaggtaagtttgtgatttatattgatgtgtatgctaattaatataactaatggc

SEQ ID NO: 2817 - DNA, 4778 bp, Diabrotica virgifera
  SmartBlast Evalue=2E-34; Info=Endonuclease-reverse transcriptase n=1 Tax=Bombyx mori RepID=D7F174_BOMMO
agccatacttcagtaatcaagaacagcaaaaatgaagtacttggtattctttgtttgcattgttgcctacgcatctgccacagcagtgaatctcgcatcattcttggaagccaccaacacaacaacaacatgtgcttgcaaacaatccttggacaatatccttgccaaaataaaagaacaaaacaccaatttgaacaatgctaatgtcacactgaattccatagaagtaaccattgtcaaaaatgtcagtgtcgaagttgccaaccaaacacaaacactatgcaagttagaagaacgcctttctgtactcatcaaaaaagaagttaacattggcgttatactcgacgtccaaactactaatcttaccaacatcgtcaaccttcttattgacatatgtgggaatacagagtgcatcgagaatgaacttgaagatcaaaactgtatattggaaaatattgagaatgtcagcttggcagctgttgaggactgtaacggggacacgtgccgaccaacaattggttttaaagggtaaaacctgatctgattaaaatattacatttttctacgaaatatttagcttaaaatgaaaattatttaaaaattaatcaactgcaatcatgaagatgttaactcttttctaagtagaataattattacatatttcgtattaaattcaaatgattataataattataaatgtttttgtcttctctagtactcatatttatcatatatttgttcttatttccaaaaagtagtttaaactcagttaaactctatacctaacaatttttttttaaacttagaccaatacgtatatattacataagcttaaaaacaagatataatagtatccgtttttaaaaagaaataaataatgttcttaatattttattaaaagttctaatagttattaaggtaccaaaggtattataaggataataacgcttgaggtcaatggtgtatataccgaggacctttggcacgaggaatatacgttgaccaaaagcgttattatctatcatacccgtggtgccttcaacgtttaatgtccgactaaattattatttacatgccaaaaatttaaatgaatttttaattaattagttttcaaataagtacatttacttagcaatagtcgtaacgtaattgtggtaaccatagttttacttaggttggtatttgccaacttggcagtatttaagtagttattaaatttaataccctagggcgttatttttcaaaattattggggcattataccatacttaactgacttcgaaatcacgtcattattttcaaataataccagtcggacattaagatcgtttaaacgcacatctaaaaggcagcgtttagacaccgcgataaatcggagcaatttatcgatatcgatcgagttatttcaatctatcgttgtgtgtaaacggtacatcgcagcgatttatcggaattggagttggattggagttggtatcggattgcatcaatttattgtaacgatcgagttgtttcagtttatattcaatcgcgacaatatattgcagcgtctaaacagctttaaaaaaatcaataaaccatagcaatttatcgtcacaataaattgctcgcatttatcgctccgtctaaacgccacttaaaatgttactgttttatgctacctttttacggttctactagactactagacggacagttgagtgtatgttttgtttgtgttctctacaactcaaaaaacaaaaacaaaacaactaaaacaaaacgaaaacactacttgttttcgttaagcggactacattgtgttcgaattttgtttttgttttcggcccttttccattgaccgtcacgaggaagtcaaattacagttttctcttcaataaccaaccaacacctttagagaagaagactttctctttttagatgtgtttggtcgatactgaattcctttggaaaagggtatatttccaactcattgcattttaaccaaaccacttgggtgttaaattatgtcctgtgccagtgttcttcatttttttatggttctttttttttacgctgacgttatgaaattatgtttttaattttctttcaatttctatccagttggtgtcaaacaattcgacaatttctttgtacgaatcctttttttaatcaggctagtaaagcgatattaataaacacaacacgaccgtttccttgatgggactcgaaaaacaaaacttaatctgtttcaaagcatgtgagtcttcacaaagtttgcaaaagttgctgttttattttattcgagacgagtttatgttgtgttttgttaaatctgctattaccttattcactgttgatgttgacgaccatctcagtttttcatattttgttaacaacatcaaagttctgcactattgacaattacccctatttgaagaaatagttttgtctggtatccagtattatttctatgtctattctatcttctcaatgacttctaaccaggcgtgtggtatcggaaaaagtgtttagcaacccacctcgtaagctagattttacaatatttatttatctacaagcgatcaataaaatatgaatagttatgctatatatacatacttttgttctttatattattttcatgatctttgtacttatatccaagacattgttcagtctcactccggatgtggatgcaagaagtttagaccatttaaacgattcttaaatgcacataccaaatcaacttactatatcatgtttaggtttcatcatgttcatcatcatcaataacagctgtccattaatttctgttcgtttcttttgcatccgttcggggccaatcaatcgcttgatgtcatcagttcatctgatttcaggtctgtctctacttcttttatttgctcttactcgccattcaacaattcgcttgtttcaatggctgtcttccattgatatatttcctttcatatatattcatattgttcagttgcttttcctcataagagtttctgtgttttgacactactaaaggtaacaaaatactcattcaaaagtctacatattatgatcatctgcttcaccatagctgatgtacggagtctattgattaagaatcacaagactagtttccaattttacgatctttgtgtttttttcaatcaaatttaggttaaattcgttgataaaggaaatgtaaaatcccattttggtttcattcaacaattgaaatccttgattttagtctgtgcaaaattgttttttaaaccctacaaggttttactataagccgtttatatttttagtccattgatatttggagcaaagagtatagataacaaaaattcaaataatattttaagactcctcctcatcagtcgtttactcattgctgagtgtcgtgattccctataatacgagcaactatctctttccatcggcttctgtcctgagcttccctcatggattcagagaatgtttttccactggctttctgtacttgatccgtccatcgagtaggtgagcgacctctacttctgcgcccttcaacgtttcccgaaattataagtctctcaagattattatcacttcttcttgcaatatggccgaaaaattttaagacgatggagaggcaaatagaggaaagtcgagtctgaatattaagctcttggaggattgagtggtttgttctgtgttccgtccatgagatccgaatcattcttctccagcagcacatttcaaaggcgtcaatcctttttctgtcgtccgatttcattggaaaacacacacacatgctcgtatcaaccccagccccggggaacatgtgtgttccaatggaaaagtggaacccacatgtccgaagatcaaaccggtcacaccccgtaatggagtggtacctatctgacccccaagctatacctccacccctccccatcgaaggacataccgaatggggaggcgttgatcttaatgttactttggatacatcttaatgttacttaatgatacatgatcttaatgttacgttgatcttaatattaatgtcttaatacgttgatcttaatgttaccgatttcattgttcatgtttcgaatctgtaattaaatatgggaaaaattaaggctcgtactaatcttattttggtgttcttcgacaagaagtgatctttccagattttcgataatcgactcatagcgtttttggccatgcctattctcctacgtatttctgtttcacaagatcctgtattactgatgtaggataagacaaattggtaaaaatttggtttatttaatttttgtaaaattaggaaaagtgttgttgattcaaggagtttaagacaatacaactttgaggaaaacttagtaagtttctaaatacttctgaacacggtaccttctgaatacttaaaaaatcatcttgtttgcatttggctacaaccctagatatgcacaactaaagtcctgcgcccacgacggaagtgttttaaaactacggtctgaaaccgattgcactcgcaactggttttcaactagttttcaaccgttatttgaaaacagttgcgtcgtgggggctggacctaactgcgcattatttttactatcccagtctgcacgtatatttttattttgtaattaagcttgtgtatcaaatgttagaaaaggctttaacgagtacaattgtcagattagttaagaactaatatttatattttatggtatgcatatttgattcactgattagttttttaatattatttattttaagcgaaatttgtaggaatgaaattgaccatc

SEQ ID NO: 2818 - DNA, 4764 bp, Diabrotica virgifera
  SmartBlast Evalue=2E-34; Info=Endonuclease-reverse transcriptase n=1 Tax=Bombyx mori RepID=D7F174_BOMMO
agccatacttcagtaatcaagaacagcaaaaatgaagtacttggtattctttgtttgcattgttgcctacgcatctgccacagcagtgaatctcgcatcattcttggaagccaccaacacaacaacaacatgtgcttgcaaacaatccttggacaatatccttgccaaaataaaagaacaaaacaccaatttgaacaatgctaatgtcacactgaattccatagaagtaaccattgtcaaaaatgtcagtgtcgaagttgccaaccaaacacaaacactatgcaagttagaagaacgcctttctgtactcatcaaaaaagaagttaacattggcgttatactcgacgtccaaactactaatcttaccaacatcgtcaaccttcttattgacatatgtgggaatacagagtgcatcgagaatgaacttgaagatcaaaactgtatattggaaaatattgagaatgtcagcttggcagctgttgaggactgtaacggggacacgtgccgaccaacaattggttttaaagggtaaaacctgatctgattaaaatattacatttttctacgaaatatttagcttaaaatgaaaattatttaaaaattaatcaactgcaatcatgaagatgttaactcttttctaagtagaataattattacatatttcgtattaaattcaaatgattataataattataaatgtttttgtcttctctagtactcatatttatcatatatttgttcttatttccaaaaagtagtttaaactcagttaaactctatacctaacaatttttttttaaacttagaccaatacgtatatattacataagcttaaaaacaagatataatagtatccgtttttaaaaagaaataaataatgttcttaatattttattaaaagttctaatagttattaaggtaccaaaggtattataaggataataacgcttgaggtcaatggtgtatataccgaggacctttggcacgaggaatatacgttgaccaaaagcgttattatctatcatacccgtggtgccttcaacgtttaatgtccgactaaattattatttacatgccaaaaatttaaatgaatttttaattaattagttttcaaataagtacatttacttagcaatagtcgtaacgtaattgtggtaaccatagttttacttaggttggtatttgccaacttggcagtatttaagtagttattaaatttaataccctagggcgttatttttcaaaattattggggcattataccatacttaactgacttcgaaatcacgtcattattttcaaataataccagtcggacattaagatcgtttaaacgcacatctaaaaggcagcgtttagacaccgcgataaatcggagcaatttatcgatatcgatcgagttatttcaatctatcgttgtgtgtaaacggtacatcgcagcgatttatcggaattggagttggattggagttggtatcggattgcatcaatttattgtaacgatcgagttgtttcagtttatattcaatcgcgacaatatattgcagcgtctaaacagctttaaaaaaatcaataaaccatagcaatttatcgtcacaataaattgctcgcatttatcgctccgtctaaacgccacttaaaatgttactgttttatgctacctttttacggttctactagactactagacggacagttgagtgtatgttttgtttgtgttctctacaactcaaaaaacaaaaacaaaacaactaaaacaaaacgaaaacactacttgttttcgttaagcggactacattgtgttcgaattttgtttttgttttcggcccttttccattgaccgtcacgaggaagtcaaattacagttttctcttcaataaccaaccaacacctttagagaagaagactttctctttttagatgtgtttggtcgatactgaattcctttggaaaagggtatatttccaactcattgcattttaaccaaaccacttgggtgttaaattatgtcctgtgccagtgttcttcatttttttatggttctttttttttacgctgacgttatgaaattatgtttttaattttctttcaatttctatccagttggtgtcaaacaattcgacaatttctttgtacgaatcctttttttaatcaggctagtaaagcgatattaataaacacaacacgaccgtttccttgatgggactcgaaaaacaaaacttaatctgtttcaaagcatgtgagtcttcacaaagtttgcaaaagttgctgttttattttattcgagacgagtttatgttgtgttttgttaaatctgctattaccttattcactgttgatgttgacgaccatctcagtttttcatattttgttaacaacatcaaagttctgcactattgacaattacccctatttgaagaaatagttttgtctggtatccagtattatttctatgtctattctatcttctcaatgacttctaaccaggcgtgtggtatcggaaaaagtgtttagcaacccacctcgtaagctagattttacaatatttatttatctacaagcgatcaataaaatatgaatagttatgctatatatacatacttttgttctttatattattttcatgatctttgtacttatatccaagacattgttcagtctcactccggatgtggatgcaagaagtttagaccatttaaacgattcttaaatgcacataccaaatcaacttactatatcatgtttaggtttcatcatgttcatcatcatcaataacagctgtccattaatttctgttcgtttcttttgcatccaatcgcttgatgtcatcagttcatctgatttcaggtctgtctctacttcttttatttgctcttgttcgccattcaacaattcgcttgtttcaacggctgtcttccattgatatatttcctttcatatatattcatattgttcagttgcttttcctcataagagtttctgtattttgacactactaaaggtaacaaaatactcattcaaaaggctacatattatgatcatctgcttcaccatagctgatgtacggagtctattgattaagaatcacaagactagtttccaattttacgatctttgtgtttttttcaatcaaatttaggttaaattcgttgataaaggaaatgtaaaatcccattttggtttcattcaacaattgaaatcctttattttagtctgtgcaaaattgttttttaaaccctacaaggttttactataagccgtttatatttttagtccattgatatttggagcaaagagtaccgataacaaaaattcaaataatattttaagactcctcctcctcagtcgtttcctcattgctgagtgtcgtgattccctataatacgagcaactatctctttccatcggcttctgtcctgagcttccctcatggattcagagaatgtttttccactggctttctgtacttgatccgtccatcgagtaggtgagcgacctctacttctgcgcccttcaacgtttcccgaaattataagtctctcaagattattatcacttcttcttgcaatatggccgaaaaattttaagacgatggagaggcaaatagaggaaagtcgagtctgaatattaagctcttggaggattgagtggtttgttctgtgttccgtccatgagatccgaatcattcttctccagcagcacatttcaaaggcgtcaatcctttttctgtcgtccgatttcattggaaaacacacacacatgctcgtatcaaccccagccccggggaacatgtgtgttccaatggaaaagtggaacccacatgtccgaagatcaaaccggtcacaccccgtaatggagtggtacctatctgacccccaagctatacctccacccctccccatcgaaggacataccgaatggggaggcgttgatcttaatgttactttggatacatcttaatgttacttaatgatacatgatcttaatgttacgttgatcttaatattaatgtcttaatacgttgatcttaatgttaccgatttcattgttcatgtttcgaatctgtaattaaatatgggaaaaattaaggctcgtactaatcttattttggtgttcttcgacaagaagtgatctttccagattttcgataatcgactcatagcgtttttggccatgcctattctcctacgtatttctgtttcacaagatcctgtattactgatgtaggataagacaaattggtaaaaatttggtttatttaatttttgtaaaattaggaaaagtgttgttgattcaaggagtttaagacaatacaactttgaggaaaacttagtaagtttctaaatacttctgaacacggtaccttctgaatacttaaaaaatcatcttgtttgcatttggctacaaccctagatatgcacaactaaagtcctgcgcccacgacggaagtgttttaaaactacggtctgaaaccgattgcactcgcaactggttttcaactagttttcaaccgttatttgaaaacagttgcgtcgtgggggctggacctaactgcgcattatttttactatcccagtctgcacgtatatttttattttgtaattaagcttgtgtatcaaatgttagaaaaggctttaacgagtacaattgtcagattagttaagaactaatatttatattttatggtatgcatatttgattcactgattagttttttaatattatttattttaagcgaaatttgtaggaatgaaattgaccatc

SEQ ID NO: 2819 - DNA, 4475 bp, Diabrotica virgifera
  SmartBlast Evalue=3E-54; Info=Endonuclease-reverse transcriptase n=1 Tax=Bombyx mori RepID=D7F163_BOMMO
agccatacttcagtaatcaagaacagcaaaaatgaagtacttggtattctttgtttgcattgttgcctacgcatctgccacagcagtgaatctcgcatcattcttggaagccaccaacacaacaacaacatgtgcttgcaaacaatccttggacaatatccttgccaaaataaaagaacaaaacaccaatttgaacaatgctaatgtcacactgaattccatagaagtaaccattgtcaaaaatgtcagtgtcgaagttgccaaccaaacacaaacactatgcaagttagaagaacgcctttctgtactcatcaaaaaagaagttaacattggcgttatactcgacgtccaaactactaatcttaccaacatcgtcaaccttcttattgacatatgtgggaatacagagtgcatcgagaatgaacttgaagatcaaaactgtatattggaaaatattgagaatgtcagcttggcagctgttgaggactgtaacggggacacgtgccgaccaacaattggttttaaagggtaaaacctgatctgattaaaatattacatttttctacgaaatatttagcttaaaatgaaaattatttaaaaattaatcaactgcaatcatgaagatgttaactcttttctaagtagaataattattacatatttcgtattaaattcaaatgattataataattataaatgtttttgtcttctctagtactcatatttatcatatatttgttcttatttccaaaaagtagtttaaactcagttaaactctatacctaacaatttttttttaaacttagaccaatacgtatatattacataagcttaaaaacaagatataatagtatccgtttttaaaaagaaataaataatgttcttaatattttattaaaagttctaatagttattaaggtaccaaaggtattataaggataataacgcttgaggtcaatggtgtatataccgaggacctttggcacgaggaatatacgttgaccaaaagcgttattatctatcatacccgtggtgccttcaacgtttaatgtccgactaaattattatttacatgccaaaaatttaaatgaatttttaattaattagttttcaaataagtacatttacttagcaatagtcgtaacgtaattgtggtaaccatagttttacttaggttggtatttgccaacttggcagtatttaagtagttattaaatttaataccctagggcgttatttttcaaaattattggggcattataccatacttaactgacttcgaaatcacgtcattattttcaaataataccagtcggacattaagatcgtttaaacgcacatctaaaaggcagcgtttagacaccgcgataaatcggagcaatttatcgatatcgatcgagttatttcaatctatcgttgtgtgtaaacggtacatcgcagcgatttatcggaattggagttggattggagttggtatcggattgcatcaatttattgtaacgatcgagttgtttcagtttatattcaatcgcgacaatatattgcagcgtctaaacagctttaaaaaaatcaataaaccatagcaatttatcgtcacaataaattgctcgcatttatcgctccgtctaaacgccacttaaaatgttactgttttatgctacctttttacggttctactagactactagacggacagttgagtgtatgttttgtttgtgttctctacaactcaaaaaacaaaaacaaaacaactaaaacaaaacgaaaacactacttgttttcgttaagcggactacattgtgttcgaattttgtttttgttttcggcccttttccattgaccgtcacgaggaagtcaaattacagttttctcttcaataaccaaccaacacctttagagaagaagactttctctttttagatgtgtttggtcgatactgaattcctttggaaaagggtatatttccaactcattgcattttaaccaaaccacttgggtgttaaattatgtcctgtgccagtgttcttcatttttttatggttctttttttttacgctgacgttatgaaattatgtttttaattttctttcaatttctatccagttggtgtcaaacaattcgacaatttctttgtacgaatcctttttttaatcaggctagtaaagcgatattaataaacacaacacgaccgtttccttgatgggactcgaaaaacaaaacttaatctgtttcaaagcatgtgagtcttcacaaagtttgcaaaagttgctgttttattttattcgagacgagtttatgttgtgttttgttaaatctgctattaccttattcactgttgatgttgacgaccatctcagtttttcatattttgttaacaacatcaaagttctgcactattgacaattacccctatttgaagaaatagttttgtctggtatccagtattatttctatgtctattctatcttctcaatgacttctaaccaggcgtgtggtatcggaaaaagtgtttagcaacccacctcgtaagctagattttacaatatttatttatctacaagcgatcaataaaatatgaatagttatgctatatatacatacttttgttctttatattattttcatgatctttgtacttatatccaagacattgttcagtctcactccggatgtggatgcaagaagtttagaccatttaaacgattcttaaatgcacataccaaatcaacttactatatcatgtttaggtttcatcatgttcatcatcatcaataacagctgtccattaatttctgttcgtttcttttgcatccgttcggggccaatcaatcgcttgatgtcatcagttcatctgatttcaggtctgtctctacttcttttatttgctcttactcgccattcaacaattcgcttgtttcaatggctgtcttccattgatatatttcctttcatatatattcatattgttcagttgcttttcctcataagagtttctgtgttttgacactactaaaggtaacaaaatactcattcaaaagtctacatattatgatcatctgcttcaccatagctgatgtacggagtctattgattaagaatcacaagactagtttccaattttacgatctttgtgtttttttcaatcaaatttaggttaaattcgttgataaaggaaatgtaaaatcccattttggtttcattcaacaattgaaatccttgattttagtctgtgcaaaattgttttttaaaccctacaaggttttactataagccgtttatatttttagtccattgatatttggagcaaagagtatagataacaaaaattcaaataatattttaagactcctcctcatcagtcgtttactcattgctgagtgtcgtgattccctataatacgagcaactatctctttccatcggcttctgtcctgagcttccctcatggattcagagaatgtttttccactggctttctgtacttgatccgtccatcgagtaggtgagcgacctctacttctgcgcccttcaacgtttcccgaaattataagtctctcaagattattatcacttcttcttgcaatatggccgaaaaattttaagacgatggagaggcaaatagaggaaagtcgagtctgaatattaagctcttggaggattgagtggtttgttctgtgttccgtccatgagatccgaattattcttctccagcagcacatttcaaaggcgtcaatcctttttctgtcgtccgatttcattgttcatatttcgaatctgtaattaaatatgggaaaaattaaggctcgtactaatcttattttggtgttcttcgacaagaagtgatctttccagattttcgataatcgactcatagcgtttttggccatgcctattctcctacgtatttctgtttcacaagatcctgtattactgatgtaggataagacaaattggtaaaaatttggtttatttaatttttgtaaaattaggaaaagtgttgttgattcaaggagtttaagacaatacaactttgaggaaaacttagtaagtttctaaatacttctgaacacggtaccttctgaatacttaaaaaatcatcttgtttgcatttggctacaaccctagatatgcacaactaaagtcctgcgcccacgacggaagtgttttaaaactacggtctgaaaccgattgcactcgcaactggttttcaactagttttcaaccgttatttgaaaacagttgcgtcgtgggggctggacctaactgcgcattatttttactatcccagtctgcacgtatatttttattttgtaattaagcttgtgtatcaaatgttagaaaaggctttaacgagtacaattgtcagattagttaagaactaatatttatattttatggtatgcatatttgattcactgattagttttttaatattatttattttaagcgaaatttgtaggaatgaaattgaccatc

SEQ ID NO: 2820 - DNA, 4461 bp, Diabrotica virgifera
  SmartBlast Evalue=3E-54; Info=Endonuclease-reverse transcriptase n=1 Tax=Bombyx mori RepID=D7F163_BOMMO
agccatacttcagtaatcaagaacagcaaaaatgaagtacttggtattctttgtttgcattgttgcctacgcatctgccacagcagtgaatctcgcatcattcttggaagccaccaacacaacaacaacatgtgcttgcaaacaatccttggacaatatccttgccaaaataaaagaacaaaacaccaatttgaacaatgctaatgtcacactgaattccatagaagtaaccattgtcaaaaatgtcagtgtcgaagttgccaaccaaacacaaacactatgcaagttagaagaacgcctttctgtactcatcaaaaaagaagttaacattggcgttatactcgacgtccaaactactaatcttaccaacatcgtcaaccttcttattgacatatgtgggaatacagagtgcatcgagaatgaacttgaagatcaaaactgtatattggaaaatattgagaatgtcagcttggcagctgttgaggactgtaacggggacacgtgccgaccaacaattggttttaaagggtaaaacctgatctgattaaaatattacatttttctacgaaatatttagcttaaaatgaaaattatttaaaaattaatcaactgcaatcatgaagatgttaactcttttctaagtagaataattattacatatttcgtattaaattcaaatgattataataattataaatgtttttgtcttctctagtactcatatttatcatatatttgttcttatttccaaaaagtagtttaaactcagttaaactctatacctaacaatttttttttaaacttagaccaatacgtatatattacataagcttaaaaacaagatataatagtatccgtttttaaaaagaaataaataatgttcttaatattttattaaaagttctaatagttattaaggtaccaaaggtattataaggataataacgcttgaggtcaatggtgtatataccgaggacctttggcacgaggaatatacgttgaccaaaagcgttattatctatcatacccgtggtgccttcaacgtttaatgtccgactaaattattatttacatgccaaaaatttaaatgaatttttaattaattagttttcaaataagtacatttacttagcaatagtcgtaacgtaattgtggtaaccatagttttacttaggttggtatttgccaacttggcagtatttaagtagttattaaatttaataccctagggcgttatttttcaaaattattggggcattataccatacttaactgacttcgaaatcacgtcattattttcaaataataccagtcggacattaagatcgtttaaacgcacatctaaaaggcagcgtttagacaccgcgataaatcggagcaatttatcgatatcgatcgagttatttcaatctatcgttgtgtgtaaacggtacatcgcagcgatttatcggaattggagttggattggagttggtatcggattgcatcaatttattgtaacgatcgagttgtttcagtttatattcaatcgcgacaatatattgcagcgtctaaacagctttaaaaaaatcaataaaccatagcaatttatcgtcacaataaattgctcgcatttatcgctccgtctaaacgccacttaaaatgttactgttttatgctacctttttacggttctactagactactagacggacagttgagtgtatgttttgtttgtgttctctacaactcaaaaaacaaaaacaaaacaactaaaacaaaacgaaaacactacttgttttcgttaagcggactacattgtgttcgaattttgtttttgttttcggcccttttccattgaccgtcacgaggaagtcaaattacagttttctcttcaataaccaaccaacacctttagagaagaagactttctctttttagatgtgtttggtcgatactgaattcctttggaaaagggtatatttccaactcattgcattttaaccaaaccacttgggtgttaaattatgtcctgtgccagtgttcttcatttttttatggttctttttttttacgctgacgttatgaaattatgtttttaattttctttcaatttctatccagttggtgtcaaacaattcgacaatttctttgtacgaatcctttttttaatcaggctagtaaagcgatattaataaacacaacacgaccgtttccttgatgggactcgaaaaacaaaacttaatctgtttcaaagcatgtgagtcttcacaaagtttgcaaaagttgctgttttattttattcgagacgagtttatgttgtgttttgttaaatctgctattaccttattcactgttgatgttgacgaccatctcagtttttcatattttgttaacaacatcaaagttctgcactattgacaattacccctatttgaagaaatagttttgtctggtatccagtattatttctatgtctattctatcttctcaatgacttctaaccaggcgtgtggtatcggaaaaagtgtttagcaacccacctcgtaagctagattttacaatatttatttatctacaagcgatcaataaaatatgaatagttatgctatatatacatacttttgttctttatattattttcatgatctttgtacttatatccaagacattgttcagtctcactccggatgtggatgcaagaagtttagaccatttaaacgattcttaaatgcacataccaaatcaacttactatatcatgtttaggtttcatcatgttcatcatcatcaataacagctgtccattaatttctgttcgtttcttttgcatccaatcgcttgatgtcatcagttcatctgatttcaggtctgtctctacttcttttatttgctcttgttcgccattcaacaattcgcttgtttcaacggctgtcttccattgatatatttcctttcatatatattcatattgttcagttgcttttcctcataagagtttctgtattttgacactactaaaggtaacaaaatactcattcaaaaggctacatattatgatcatctgcttcaccatagctgatgtacggagtctattgattaagaatcacaagactagtttccaattttacgatctttgtgtttttttcaatcaaatttaggttaaattcgttgataaaggaaatgtaaaatcccattttggtttcattcaacaattgaaatcctttattttagtctgtgcaaaattgttttttaaaccctacaaggttttactataagccgtttatatttttagtccattgatatttggagcaaagagtaccgataacaaaaattcaaataatattttaagactcctcctcctcagtcgtttcctcattgctgagtgtcgtgattccctataatacgagcaactatctctttccatcggcttctgtcctgagcttccctcatggattcagagaatgtttttccactggctttctgtacttgatccgtccatcgagtaggtgagcgacctctacttctgcgcccttcaacgtttcccgaaattataagtctctcaagattattatcacttcttcttgcaatatggccgaaaaattttaagacgatggagaggcaaatagaggaaagtcgagtctgaatattaagctcttggaggattgagtggtttgttctgtgttccgtccatgagatccgaattattcttctccagcagcacatttcaaaggcgtcaatcctttttctgtcgtccgatttcattgttcatatttcgaatctgtaattaaatatgggaaaaattaaggctcgtactaatcttattttggtgttcttcgacaagaagtgatctttccagattttcgataatcgactcatagcgtttttggccatgcctattctcctacgtatttctgtttcacaagatcctgtattactgatgtaggataagacaaattggtaaaaatttggtttatttaatttttgtaaaattaggaaaagtgttgttgattcaaggagtttaagacaatacaactttgaggaaaacttagtaagtttctaaatacttctgaacacggtaccttctgaatacttaaaaaatcatcttgtttgcatttggctacaaccctagatatgcacaactaaagtcctgcgcccacgacggaagtgttttaaaactacggtctgaaaccgattgcactcgcaactggttttcaactagttttcaaccgttatttgaaaacagttgcgtcgtgggggctggacctaactgcgcattatttttactatcccagtctgcacgtatatttttattttgtaattaagcttgtgtatcaaatgttagaaaaggctttaacgagtacaattgtcagattagttaagaactaatatttatattttatggtatgcatatttgattcactgattagttttttaatattatttattttaagcgaaatttgtaggaatgaaattgaccatc

SEQ ID NO: 2821 - DNA, 8567 bp, Diabrotica virgifera
  SmartBlast Evalue=6E-14; Info=Endonuclease-reverse transcriptase n=1 Tax=Bombyx mori RepID=D5LB38_BOMMO
tagttatatcttcatgtacaaaatacatctaaaaaactacaccctgtagtttttccttccaataaaacatttaataacaaaacagaacattattattaaaaatacgaatatcaaaaaccaatcacaaggtctatatacaatgtacaatttacagggtgtcatttaaaaactacgtctacgactaactaaagtaggtcttccgaaaagaggaaaaatttacaaaatattttataaaaaataaaacgtttgtcgtatatttctaaatttttcctactcttgtcatttcgacaacaaagtttgttcaaaaaatataaagatctctatttgaaaaatgttccatgcaatattatcattttaaatcggattagataaacaaaaaaattgagcaaaaataacagaatctgtatttataatacgtttaatactaaaacaaccggaacaaaaaagtttctattgtaccaaagctccaaaaataatattttcacgtcattcaactagattgtttaaccaaaacgtaaaaattatagacacttgtgaagatcattgtgtactgaaataaggaagtgttatgtttagttccatcaaaaacaaaatagtagtcaaagatacaataaatgcaccttaaatatagaactggtacagaactaatgttctgctcaggaatatctccctcctctgcatcgtaaggatgcagaggcgtcatgtaatttgtttgactatttctgtccaattatccctcttcagtgcgtgttgttttgcttcggagaatgagtaaccagtcatgtcctttgtgtggtccgaccattgtactggagatcttcctctggatcttttacgcgttacgtttccttcaactatcattcgttccatgtcttctcttcttctaagcttaatttaaaagaggctcagacatgacaagacacataatctccaactattggaaattggagttgctcactctttcaatggacctgttattcggtgttatggtggagttttcaagtgcatccaagtttctggagatgatcatgaatttgatctttttggtattaatctctaatcccattcgcttattgtattctccgattatagtgacaagttgttgatcaatactccattcactttagaggcatcttccaaagactcttgaaatatggcatccgaataaatgttaaataaaagaggggaaagcacacaaccatgttgaacaccccttcttatatgtaggggtttggaaatagaattgtctatttttaattgtgtcgtttgataccagttttcaatgcatcttatctctttttggtatatatcaagtttctttaggatcggcattaatttgtgtcttttagtcggcttataaataaatgtttacttttcgtttaaagagctttaatacaataggaaaataagtaaaaatctcgtttaaattttttgaacagaatattataacctttaaagtgccctaccgaatctaatgttgaccgacctttcaccaatactttcatacgagaaaagagatcaaccaaaaaaatacagctcaagcttccatttatacacactaagcttagtttacaaaaaatttaaaggcctatattagttttatttcatataaaaatggtcatacattgaagtaaaacagaacttattgcgtttttaaagaaaactacataattaattcttacacatggtgtaaaagtctggaaaatgattctggtttaacactttttccttcgtttcgtagttaatgtaaaagtatgaaatgctttacttcaacttatattaaaaacactgttgaaccactgaaacgttttcagtcttagaatacgtggcaagaaattcaatgaattatcaaatataactaaccacttttttataactggtccaatcgttcacggtagtagaaacagcagcaaaaagaatgggagtatacgttaatactagtaaaaaaaagtataggaaggtgacaaacaataacggtgacatataataagcaagtagcaaaacccgaagatataacggatggaacatataatttcgaaggagtaagagttcatgtatctaggactacaaatcaaccaaagtaacataactgcaaaaatagacgtacagtacaacctgccatatccggacggttctgcgccatccggatctaccgaaatctaccgagaaaggcagtcctgctgttggataacgcactaaaagaataactaaaagatggcgaaataatgtattatagaatctataaaacgtgtctatcgacgaaagttattgacggcgttgattactggaatgtatgaagaagaaaacgtttcagagactgtaaaagaattagtggtcttgacatccggattttttcatatccggatcggtctgtcgccatattgatccggatatggaaggtttgactgtatctatctagcaaataaagcatactatgggttaaagaaacttttaacatcaaacatattcacaaaagatcaaaaatattgatatatacagaactcctcatatattatacagggtgtccccgaaaaggtatggatataatagacaatgtagaacaaaaaagtactataacattttttttctaaagttcaaccgtttccaaaaaaaattaaattgttctccatataagcgaacttttattttcataaaatttaaaaatttggcatccctgtacaagaactgttagtgatttaggttattgacaccaaaaaaatgtaggaaaataacaaaacaagaatttgtttgtttgtttaggatgaagacagggtttaatgtaaatcctaaaggccaatgctgcaactatttttgaattgtaattgtctatgtttagatttttgtatacatagttgtcagatttcaatttgcacgccaaaatgtatttttgttttttggccaaacggttgaatttagaaaaaaatgttataagacttttttgctctacatggtaccttctacctatacttttaaggaacgcactattttcggggacaccctgtataatatatcaaatatcctcacatatcaagaaatattgatatcaagcccctccccacttacgcatcagaaacgtgaacgataacacaaaattatgaagaacgttaggctgttttgaacgtaaaattatcagcattatttataaaggcgtgcaggagaacagattatggcgtagacgctacaattatgagcttttggtaggtccatcaaaataaacgggctgcagtggttgggccacttacagataatgaacgagatggagccgttgaaacacgtttataaccgaagactggatggagtaaagaaaagacgcagtggaaaaccaaggcgaaggataggaaagactggaacctgattctagaataggtcaagactcacctggggttgtagagccaatgatgatgatgtatatgaatacttttattcaagttacacttaatattgattatcagttgaacagtagttcctggccgatagtgacttgttatttgggattcagctcagtcaatatagtgtaaagtttgtttagcagtaaatggttgacttcaattagtgcggtaaatattattaaatttatctgacttggcacattgttaagaccggtccggagcgataagcaaccgaggtagacagagttggtcttttgacaattaacactggctagacggtactcctataataaagcaaaggatccacaaaatttacaataattacgacgacaaaaacggatgtaaaatatattactttgccttatatacccgaaattaatgttttcaaatgagttttaaaatgaattaaatctattttaattgctaagattatagaaaaacaaacgttcaaacatatttaaattttacctgaaaccgggccttttatactattgaagtaccagtgaatagtacaagtattgaccattgaagtccaccatttactgataaacaaactttaccagtttctacgtatacaaaaagtggtcagtaatttttaaaaattaaaacatcaacaagcccgactaaaaattaacaagtggttttttttacgaaatattaacacaactggaagacatacactttacagtttaaaacacattgtcgagtagtacatccatatatcgcaaaaatatattcttaaaaaatattatggttttgctaatatgccaactataaggccatttactttcattgattagatatattattttagtacgtttattagaatcattggaaaaaatgacagtagatatgaaaagtatcaatcaaaaccaatggctcaagaaatcctgtaaaaaaacttgtaaattattgtttggcatgaatgttctaggggtcagaagatggagggaagttgccaggaatggcgacttctttgcgagcaggcaaatatccacaacggattgtagagccacttatgatgatgatgaacgtttcaaaattaatgcagatgcttgtatttcaattttcaagtaacatcattctctatcttctgtatcgtcttcttcaagatttattggagacctgtttgttttttggtttctttaaaaacattttcaattatgttcataatttgctaataatttgaatctgctcataccccacaattagtggaatatgcgaagtttggaattagaagcggaatgtgtatgagatagactttattttctcttcaaatattattgcagaagtattccgattaaagatattttcctttgcttcgttgattttgaagacatttcatttaaaactaataagaaatgtatgtgtgttggaggtaaaatgccaagattagaatcgatgaaaaaaaacactttgtattgtcctcaagctgtttaaactatatttgaagctgctgctcagaaaagctttggaaactgtttctacacgaataaaaataattgaggtttacatacttcattggtttagacagaaatattgaaaccattgaaaaacaaataagaagcaagatgtccccatacctacattataaggtgataaatatgctacattatggattagatgccatcgttagatttagatgccaaaatattaaaataaatcaaaattttgaagaagagtggataaaaacagtgagaaatgtaaaaaaactggacataatagataagaaacctactcaaacaaaaatattcgacaatttaaatttggactttgcaattggttaagatggttttacgttatccaattttcatgctatgcaagaaccatgcaaggcagattatgcaactgcgcatgcccacgcgctattttcaagcaatttctgtgctagacgaaaaattagaacgtgatctatttttcgtgctattttgatgcaagttgtcaaaattcatgttgccagtataacaaaatttatagtttaacttattgtgttaatttaatgatatttattggatgtaattttgtgatttatatttgaatatatttttaatgctggactgaaattttcaagagaaatatctaaagttaatgtttgatacatttcttctgttggcaataatacaaaaaatggtatctgaaattgcacagaaatagctctgatgtaaacagatcaggctaggcaagatatattccatgcaagacggacttgaatagcctagatgtaaagctgcttttacagttgcaacagagagtgtgtgtgtgtgaaaagatggcttggatgcaggtccgttagccacagatttgtattttatttttaccgtaatttatttgttttgttatatttatacctatttcatttaaatgactatgtttatttgaagtagtttatgagtaatttaaatattttcatttcatgacaacttagtagatattctatactaattggaaaatacacttgggtttgtcgtaaattgtaatataattgcaacagagaacaaaatatctaaaccattttttccaaataagattctcttattgattatttgcaattttcacacgttttcttttagatatttatttttggcacacagtctacaccactaaatttaaaaacctaactacagtttgtttggtttttaccatggaatgctggattatgacacactagccaagttacacatttttacatttagttgacacacgcgtggctgcacctactaatttttcggggttggggttgcaaaaaaaaaacaaattggttgtatcaggttgatataaaagtattaatctgtatgtgcttaagagagaagggtatggtttgaaaatttagaaattttcctatttttttttattattttaaataaaagtaaataacttcaagagaactctctggaaatttcagattgaccgcagcaaaattaccggaaattcatgttgcatgttgagtattcctaccttctactcgcgtcgcacacttgagcgtagtgagaaacgtttaacagttgtttctcttctcttttgttattactccgcgattcaaaaacatatttcggtatgcatcactttacgatttgacagacaaaaagaaatctgttttttcaaagtcagtggacaatgtaactcaaaaattacttgatcaatccacttgacattttgcgaggtaacgctgtcgagatattttccagagattttttctacaacaataatgaatatgttgatttttaacctttttttacaagacatttcgttattttgttaaatcataagctaataaaatccaatgaggagttctgatgtacaccgcaaaattaattttttttgcaggtatctgtaaaaatttgccgccgttggcttatttttcaatattttgccttaattttttttttgattctttgaattgtactgaatatgtttatttaatttaaaaataaaatatttctactagtttcaaaaaaattcacaaagttgtgcttgaaatatttatttcaaacgatgccccttaaaatagcttagtagtacttgctgtagccattagaacaatgtgttggccataaacaaatgttaggttgtattcaaatattagacgttcagtataatatttgattaaaaccttatgaataaaatagataaataataaacaattctggttttgtatgtaaaattctgcaacaaagctaatcgccgctttttgcgatttttctacacagtttagccacctatttttaaagttgccttttgatattattggatatgtacataatagttgcgccatctagtaacttcaacatttcagaagtcaagatttatttgacgaactgaaaacgtagccttatatttaaacttcattgagattaagtaatacgttaataaattcatttttttagtaaaattgtggcttatttcccattaaaaatagttgattataaaaatgccacaaggaaatagcttcagaaaaacattaagtaatacatttgaacatgtgataaattattcaaatttaaatacaatttataatgttaacaacattaacacatgaatattataaacacaggatttagaagcataacgacacattagaaatgtgtgaaaaaccggtaattgacacaaactggttgtgtaaaatagaaatatgtcactaatgttttgtttttggtcagtgttcattccctttttgctttatttccaggtacatgttcggtaagtataaaatttccaatacctacttatgcatatcgcaacagaagcgggcttgtggaatttcaaaataaatttttacagtcctgatatgttttgcgtatatactaccacaatgtggctatagttaaatctcctaagcttgcaattatttatactttctaacccaaaccaaaatataaggttttcttaatataaggtttacagaaagtttatgaatcaaaattatactacttcacatagaaaaatattagtaaatagagagaacactacaaattaattaattaatttcgccctatatattatttcagagacttcgctaatgttttttctggactggaaggttttttatttcataacttgccccttttaatgctaaatccgaataatccattacttttctattgtggatgttaacagaagaaacgcacagacaaaacatgaacagaataatataattgcctaaagaatagtcaagctgctggtagtagacggaaaatttagttgggaggaggggatatagaagttagattgaaactgaagatgaaatatgatgtaaatactgaatattatcttgattcgtagatattgtaaaattaaaatgtgttttaatataactcaatattcgttttcttttatgtaacatataaatattctcagcaattttaagattattttcaaataaagtttaccccaactaagatgcacctattaaataaacattcaaactatatacttgttttaattttatgcacaatcttattcaaccataacgctgcaaaattaagccatatttatatctacctgataaaattcattttttgccaaccccgtattataagctctttgacatatcaatattatacgatagctaaaagatacctaagttagcttacataaattaaaaaaatacatctgaaacttaacctctctaaagtgatggccctttttcgttttatcgttttagagtttgcatatacacag

SEQ ID NO: 2822 - DNA, 6465 bp, Diabrotica virgifera
  SmartBlast Evalue=4E-14; Info=Endonuclease-reverse transcriptase n=1 Tax=Bombyx mori RepID=D5LB38_BOMMO
tagttatatcttcatgtacaaaatacatctaaaaaactacaccctgtagtttttccttccaataaaacatttaataacaaaacagaacattattattaaaaatacgaatatcaaaaaccaatcacaaggtctatatacaatgtacaatttacagggtgtcatttaaaaactacgtctacgactaactaaagtaggtcttccgaaaagaggaaaaatttacaaaatattttataaaaaataaaacgtttgtcgtatatttctaaatttttcctactcttgtcatttcgacaacaaagtttgttcaaaaaatataaagatctctatttgaaaaatgttccatgcaatattatcattttaaatcggattagataaacaaaaaaattgagcaaaaataacagaatctgtatttataatacgtttaatactaaaacaaccggaacaaaaaagtttctattgtaccaaagctccaaaaataatattttcacgtcattcaactagattgtttaaccaaaacgtaaaaattatagacacttgtgaagatcattgtgtactgaaataaggaagtgttatgtttagttccatcaaaaacaaaatagtagtcaaagatacaataaatgcaccttaaatatagaactggtacagaactaatgttctgctcaggaatatctccctcctctgcatcgtaaggatgcagaggcgtcatgtaatttgtttgactatttctgtccaattatccctcttcagtgcgtgttgttttgcttcggagaatgagtaaccagtcatgtcctttgtgtggtccgaccattgtactggagatcttcctctggatcttttacgcgttacgtttccttcaactatcattcgttccatgtcttctcttcttctaagcttaatttaaaagaggctcagacatgacaagacacataatctccaactattggaaattggagttgctcactctttcaatggacctgttattcggtgttatggtggagttttcaagtgcatccaagtttctggagatgatcatgaatttgatctttttggtattaatctctaatcccattcgcttattgtattctccgattatagtgacaagttgttgatcaatactccattcactttagaggcatcttccaaagactcttgaaatatggcatccgaataaatgttaaataaaagaggggaaagcacacaaccatgttgaacaccccttcttatatgtaggggtttggaaatagaattgtctatttttaattgtgtcgtttgataccagttttcaatgcatcttatctctttttggtatatatcaagtttctttaggatcggcattaatttgtgtcttttagtcggcttataaataaatgtttacttttcgtttaaagagctttaatacaataggaaaataagtaaaaatctcgtttaaattttttgaacagaatattataacctttaaagtgccctaccgaatctaatgttgaccgacctttcaccaatactttcatacgagaaaagagatcaaccaaaaaaatacagctcaagcttccatttatacacactaagcttagtttacaaaaaatttaaaggcctatattagttttatttcatataaaaatggtcatacattgaagtaaaacagaacttattgcgtttttaaagaaaactacataattaattcttacacatggtgtaaaagtctggaaaatgattctggtttaacactttttccttcgtttcgtagttaatgtaaaagtatgaaatgctttacttcaacttatattaaaaacactgttgaaccactgaaacgttttcagtcttagaatacgtggcaagaaattcaatgaattatcaaatataactaaccacttttttataactggtccaatcgttcacggtagtagaaacagcagcaaaaagaatgggagtatacgttaatactagtaaaaaaaagtataggaaggtgacaaacaataacggtgacatataataagcaagtagcaaaacccgaagatataacggatggaacatataatttcgaaggagtaagagttcatgtatctaggactacaaatcaaccaaagtaacataactgcaaaaatagacgtacagtacaacctgccatatccggacggttctgcgccatccggatctaccgaaatctaccgagaaaggcagtcctgctgttggataacgcactaaaagaataactaaaagatggcgaaataatgtattatagaatctataaaacgtgtctatcgacgaaagttattgacggcgttgattactggaatgtatgaagaagaaaacgtttcagagactgtaaaagaattagtggtcttgacatccggattttttcatatccggatcggtctgtcgccatattgatccggatatggaaggtttgactgtatctatctagcaaataaagcatactatgggttaaagaaacttttaacatcaaacatattcacaaaagatcaaaaatattgatatatacagaactcctcatatattatacagggtgtccccgaaaaggtatggatataatagacaatgtagaacaaaaaagtactataacattttttttctaaagttcaaccgtttccaaaaaaaattaaattgttctccatataagcgaacttttattttcataaaatttaaaaatttggcatccctgtacaagaactgttagtgatttaggttattgacaccaaaaaaatgtaggaaaataacaaaacaagaatttgtttgtttgtttaggatgaagacagggtttaatgtaaatcctaaaggccaatgctgcaactatttttgaattgtaattgtctatgtttagatttttgtatacatagttgtcagatttcaatttgcacgccaaaatgtatttttgttttttggccaaacggttgaatttagaaaaaaatgttataagacttttttgctctacatggtaccttctacctatacttttaaggaacgcactattttcggggacaccctgtataatatatcaaatatcctcacatatcaagaaatattgatatcaagcccctccccacttacgcatcagaaacgtgaacgataacacaaaattatgaagaacgttaggctgttttgaacgtaaaattatcagcattatttataaaggcgtgcaggagaacagattatggcgtagacgctacaattatgagcttttggtaggtccatcaaaataaacgggctgcagtggttgggccacttacagataatgaacgagatggagccgttgaaacacgtttataaccgaagactggatggagtaaagaaaagacgcagtggaaaaccaaggcgaaggataggaaagactggaacctgattctagaataggtcaagactcacctggggttgtagagccaatgatgatgatgtatatgaatacttttattcaagttacacttaatattgattatcagttgaacagtagttcctggccgatagtgacttgttatttgggattcagctcagtcaatatagtgtaaagtttgtttagcagtaaatggttgacttcaattagtgcggtaaatattattaaatttatctgacttggcacattgttaagaccggtccggagcgataagcaaccgaggtagacagagttggtcttttgacaattaacactggctagacggtactcctataataaagcaaaggatccacaaaatttacaataattacgacgacaaaaacggatgtaaaatatattactttgccttatatacccgaaattaatgttttcaaatgagttttaaaatgaattaaatctattttaattgctaagattatagaaaaacaaacgttcaaacatatttaaattttacctgaaaccgggccttttatactattgaagtaccagtgaatagtacaagtattgaccattgaagtccaccatttactgataaacaaactttaccagtttctacgtatacaaaaagtggtcagtaatttttaaaaattaaaacatcaacaagcccgactaaaaattaacaagtggttttttttacgaaatattaacacaactggaagacatacactttacagtttaaaacacattgtcgagtagtacatccatatatcgcaaaaatatattcttaaaaaatattatggttttgctaatatgccaactataaggccatttactttcattgattagatatattattttagtacgtttattagaatcattggaaaaaatgacagtagatatgaaaagtatcaatcaaaaccaatggctcaagaaatcctgtaaaaaaacttgtaaattattgtttggcatgaatgttctaggggtcagaagatggagggaagttgccaggaatggcgacttctttgcgagcaggcaaatatccacaacggattgtagagccacttatgatgatgatgaacgtttcaaaattaatgcagatgcttgtatttcaattttcaagtaacatcattctctatcttctgtatcgtcttcttcaagatttattggagacctgtttgttttttggtttctttaaaaacattttcaattatgttcataatttgctaataatttgaatctgctcataccccacaattagtggaatatgcgaagtttggaattagaagcggaatgtgtatgagatagactttattttctcttcaaatattattgcagaagtattccgattaaagatattttcctttgcttcgttgattttgaagacatttcatttaaaactaataagaaatgtatgtgtgttggaggtaaaatgccaagattagaatcgatgaaaaaaaacactttgtattgtcctcaagctgtttaaactatatttgaagctgctgctcagaaaagctttggaaactgtttctacacgaataaaaataattgaggtttacatacttcattggtttagacagaaatattgaaaccattgaaaaacaaataagaagcaagatgtccccatacctacattataaggtgataaatatgctacattatggattagatgccatcgttagatttagatgccaaaatattaaaataaatcaaaattttgaagaagagtggataaaaacagtgagaaatgtaaaaaaactggacataatagataagaaacctactcaaacaaaaatattcgacaatttaaatttggactttgcaattggttaagatggttttacgttatccaattttcatgctatgcaagaaccatgcaaggcagattatgcaactgcgcatgcccacgcgctattttcaagcaatttctgtgctagacgaaaaattagaacgtgatctatttttcgtgctattttgatgcaagttgtcaaaattcatgttgccagtataacaaaatttatagtttaacttattgtgttaatttaatgatatttattggatgtaattttgtgatttatatttgaatatatttttaatgctggactgaaattttcaagagaaatatctaaagttaatgtttgatacatttcttctgttggcaataatacaaaaaatggtatctgaaattgcacagaaatagctctgatgtaaacagatcaggctaggcaagatatattccatgcaagacggacttgaatagcctagatgtaaagctgcttttacagttgcaacagagagtgtgtgtgtgtgaaaagatggcttggatgcaggtccgttagccacagatttgtattttatttttaccgtaatttatttgttttgttatatttatacctatttcatttaaatgactatgtttatttgaagtagtttatgagtaatttaaatattttcatttcatgacaacttagtagatattctatactaattggaaaatacacttgggtttgtcgtaaattgtaatataattgcaacagagaacaaaatatctaaaccattttttccaaataagattctcttattgattatttgcaattttcacacgttttcttttagatatttatttttggcacacagtctacaccactaaatttaaaaacctaactacagtttgtttggtttttaccatggaatgctggattatgacacactagccaagttacacatttttacatttagttgacacacgcgtggctgcacctactaatttttcggggttggggttgcaaaaaaaaaacaaattggttgtatcaggttgatataaaagtattaatctgtatgtgcttaagagagaagggtatggtttgaaaatttagaaattttcctatttttttttattattttaaataaaagtaaataacttcaagagaactctctggaaatttcagattgaccgcagcaaaattaccggaaattcatgttgcatgttgagtattcctaccttctactcgcgtcgcagcagcttcgcgccgcacacttgagcgtagtgagaaacgttcaacagttgtttctcttctcttttgttattactccgcggtatgcatcactttacgatttgacag

SEQ ID NO: 2823 - DNA, 690 bp, Diabrotica virgifera
tagttatatcttcatgtacaaaatacatctaaaaaactacaccctgtagtttttccttccaataaaacatttaataacaaaacagaacattattattaaaaatacgaatatcaaaaaccaatcacaaggtctatatacaatgtacaatttacagggtgtcatttaaaaactacgtctacgactaactaaagtaggtcttccgaaaagaggaaaaatttacaaaatattttataaaaaataaaacgtttgtcgtatatttctaaatttttcctactcttgtcatttcgacaacaaagtttgttcaaaaaatataaagatctctatttgaaaaatgttccatgcaatattatcattttaaatcggattagataaacaaaaaaattgagcaaaaataacagaatctgtatttataatacgtttaatactaaaacaaccggaacaaaaaagtttctattgtaccaaagctccaaaaataatattttcacgtcattcaactagattgtttaaccaaaacgtaaaaattatagacacttgtgaagattaagggaaaataaaaatgtagcacgtcaaagtgtgtaaacaattcattccttcagatgagcgccctcgacataaacgtcaccatcggagccaatggtcaaacaccaaaaaagcaccggtacatagaggtgcaaaaaagtgcatcccagg

SEQ ID NO: 2824 - DNA, 387 bp, Diabrotica virgifera
ttaaccaaataatgtttcaaatatgatgtgaaaaataattttgaattcggttacttgcttttttttccttaaaagtagaaaagaagtttaatttctcttgcttaataattatcgtgcaattatttattattaactgtaacaagttcctttaatccacttcttttattagttggattatacaaattggttatatattatcattaaaatatggtcatattgtctttcaaccaattatggaataaaggaaataaaaatgtagcacgtcaaagtgtgtaaacaattcattccttcagatgagcgccctcgacataaacgtcaccatcggagccaatggtcaaacaccaaaaaagcaccggtacatagaggtgcaaaaaagtgcatcccagg

SEQ ID NO: 2825 - DNA, 3823 bp, Diabrotica virgifera
  SmartBlast Evalue=0; Info=Multidrug resistance-associated protein 1 n=1 Tax=Culex quinquefasciatus RepID=B0WL13_CULQU
aaaaaatattttaatcttgtattcctgaatgttcaatcattttgttaaagataccaccttgttttgttctcaaggcttgtggagtatcaaactctataatttcaccatgatcaacaaccattatcctatcacaatccaacacagtatttaatttgtgagcaatggttagcactgtacattgtgaaaaatgtgttttaattgtcctttgcaagagactgcaagtctctggatccatgttggacgttgcttcatccaaaacaataattttatttttgctgaccaacgctctggccaagcatatcaattggcgttgtccagaactataacgtgaaccattctcaacaatgacatcatctaaacaggtaaataaattttttaaatggactttttctattgcggaccaaatttctgcatccgtatgggttcctgatggatccatatttgctcttatcgaacctgaaaataatatcggatcttgtggaataatacctatgctggatcgtaaatacttcaaacataaattcttaatatcttcattgtcgattaaaatacgacccttaatattataaagcctgaacaatactgaaataatagacgattttccagcgcctgtacgtccaacaattccaattttttctttgcttttaatggtaaaactaatattttttaatactctttgttccgatgagttgtaaactaaagagacgttttcgtactttatttctccaaacgatggccaatttttcaacgaacgtccttgcaatttatcttcagattcaatgtcagtatattctaaaactctttctatacctgtcatattattttctatttcggtatattgtctaataacatattgtagaaaacccgtaagtaacattgcctgagttattgctaacccaacgtcaccagcttgagcatctgtcttaaaacaaacaaactttattactatggcagcaaaaaatgtagttgataccatatccatgataaagccgtaaaacctaatggcacacgccatcatataagaagtggatgtataatgatctaggtgttgatcgaattctgaaattagtaagggctgcttttcaaatgctcgaacagcggttattccttcaagcgttgcatttagatatccaatcattggacttctagttgcagcatccagtctttttatgcctctccccgttggtagataaaacttctgtataaaatataacttgacaaataaaaatattgaaggaatgataaagagtttgttgacggaaataattaagtacaatattcccagtaatcctagagtttgcctaaatatctcgtaagtattcaaaggaataacttcgtccatagtcatcagatctttagaaaacctattcacaacatttcccacaaagtgtttgtcgaagaagctcataaaagcgtttatgacggatttcaacattttgcgatgtagatttcgagacgctcttatagcaaagaagaagttcatgtatattctagtaaaggtgagtactaccatcactactgttaagaatgtatacatcacaagatagttgtctcttttatttatgatgttgatatactcttcagtatcagtttgatttgagagcgttaaattcgtaatactaggttccaggttaacccacttgcttacaagtttttctgagtacgacagagctgcttgggcagcaataaaaataattgctagaataactaacatgataatgccaccagcgtatttgtaatatctcaaataaactttaaggcttacagtaccactcttcttttcctcatcgtacaaattcttattctcatttttatctcccccaattagctgagttctctcattcgcttcgtcgtcaagtatatcttcgtctgtaacatcaatatcgtcgtcaaagtagttcatttcaacatcatcgataaaataagttattcttttgtccaaagtttctttttgtttttccaaagacagcgttcgaccatcttcaacaactagcgtattatttccgtacaacaatttgatgtggttgatgttgttggacaccatgataaccactttgtcttttaagaaatccataatacagtttctaaatatataataatttacttttgagtctaaaccagctagacactcatctattaagtatatatcactaatacgatatatcgctcttgccagattgattctggattgctgccctttgctgaaattgacacctctatctcctactatagttttgtcgccttttggtagtttctttaaatctatattaagagcgcacaatttaagtacttcattgtaccgtttttcgttataaggttctccaaagagtatgttctgtcgtaaagtggatgggaaaagccagggttcttctgacgcgtaggagatggttccatcaattgtcatttgcccactgcttactggatattcacccaggagaactttgataattgagcttttaccactaccaatgttgccagtgatgagattgactcctttttcggccgaaaaagagatgtcattaagaatagttttttctccgactttggcactcacatgcctcatgtagactctcggtgaaatagtctgtgatcgtctgtctacgacttcctccagtttcaaaaagtgtgacaatcttttaagggaagctcttaagtccgaacattgagctataccaattgggatcgatactgttatgaacgatttgagactttggtagcaagtttgaataaaatagactgtctctgcgtctgtaaaatgaccagaccatatataggtcatgatcataaagaaaaaggagaggctcgttgctgtggatccaacaattagcaccaaagattttagatagaagaccggagataagttttgcagttctaactttcttaattcgttaagttttgtcgtaaagaagttttcccaagtgtacattttaatagtttttatatttcttatagtttctgttgtcagttgcagtctttcgtcagtcctcttagcagattggaccctttttgagcttactacttttcctacaaacaattgtaatgggatagtcaacatgtaaaagccaattcctccaaacacagaccattgtattctattaaatataactcctgtgatgattattgtttggatgacaccgatccacatatcattcacaaatatcaatgccatttcgaatgcaaacacatccttcgttatcaacgttacaatttttccaacagttacgtgattccaagcattgggccccaacttcactgctttcctgtaaactagtgcagctacagaagtcctcactcttatacctacttctgtagtaaattgttgataattgtggttataaataacactaaatacgtttaaacctacaactagggaagcatatatatacaaatcttttgttgtcacatctgtttggttgggagcgtagtacgctaccactttactaagtgctcttggttgaataaacactaaaactgttttcacaaccaattgtattaatcccagaattaaatactgcataccaaagcagctgattaagcacttaccaaggaggcatcttctcctttctttttccgttgcctcatccaagcatcttctagattatttcccagctgttctgatgccagccattttgggatttcatatatatcactatcatcaagtccttttttgcgtgcttttttaaacagggggtagttatagaaaaatgttagaagacgaaaaatggaagctttggttcggggatttgtttctttggcatttctttttgacgagtccatattggataaggacagtcaaaaaccataaacacctatctcgaaaaat

SEQ ID NO: 2826 - DNA, 3823 bp, Diabrotica virgifera
  SmartBlast Evalue=0; Info=Multidrug resistance-associated protein 1 n=1 Tax=Culex quinquefasciatus RepID=B0WL13_CULQU
aaaaaatattttaatcttgtattcctgaatgttcaatcattttgttaaagataccaccttgttttgttctcaaggcttgtggagtatcaaactctataatttcaccatgatcaacaaccattatcctatcacaatccaacacagtatttaatttgtgagcaatggttagcactgtacattgtgaaaaatgtgttttaattgtcctttgcaagagactgcaagtctctggatccatgttggacgttgcttcatccaaaacaataattttatttttgctgaccaacgctctggccaagcatatcaattggcgttgtccagaactataacgtgaaccgttttcaacaatgacatcatctaaactggtaaatagattctttaaatggactttttctattgcggaccaaatttctgcatccgtatgggttcctgatggatccatatttgctcttattgaacctgaaaataatatcggatcttgtggaatgatacctatgctggatcgtaaatatttcaaacataaattcttaatatcttcattgtctattaaaatacgaccctcaatatcataaagcctgaacaatactgaaataatagatgattttccagcccctgtacgtccaacaattccaattttttctttgcttttaatggtaaaactgatattttttaatactctttggtccgatgagttgtaaactaaagagacgttttcgtactttatttctccaaacgaaggccaatttttcaacgaacgtccttgcaatttatcttcacattcaatgtcagtatactctaaaactctttctatacctgtcatattattttctatttcggtatattgtctaataacatattgtagaaaacccgtaagtaacattgcctgagttattgctaacccaacgtcaccagcttgagcatctgtcttaaaacaaacaaactttattactatggcagcaaaaaatgtagttgataccatatccatgataaagccgtaaaacctaatggcacacgccatcatataagaagtggatgtataatgatctaggtgttgatcgaattctgaaattagtaagggctgcttttcaaatgctcgaacagcggttattccttcaagcgttgcatttagatatccaatcattggacttctagttgcagcatccagtctttttatgcctctccccgttggtagataaaacttctgtataaaatataacttgacaaataaaaatattgaaggaatgataaagagtttgttgacggaaataattaagtacaatattcccagtaatcctagagtttgcctaaatatctcgtaagtattcaaaggaataacttcgtccatagtcatcagatctttagaaaacctattcacaacatttcccacaaagtgtttgtcgaagaagctcataaaagcgtttatgacggatttcaacattttgcgatgtagatttcgagacgctcttatagcaaagaagaagttcatgtatattctagtaaaggtgagtactaccatcactactgttaagaatgtatacatcacaagatagttgtctcttttatttatgatgttgatatactcttcagtatcagtttgatttgagagcgttaaattcgtaatactaggttccaggttaacccacttgcttacaagtttttctgagtacgacagagctgcttgggcagcaataaaaataattgctagaataactaacatgataatgccaccagcgtatttgtaatatctcaaataaactttaaggcttacagtaccactcttcttttcctcatcgtacaaattcttattctcatttttatctcccccaattagctgagttctctcattcgcttcgtcgtcaagtatatcttcgtctgtaacatcaatatcgtcgtcaaagtagttcatttcaacatcatcgataaaataagttattcttttgtccaaagtttctttttgtttttccaaagacagcgttcgaccatcttcaacaactagcgtattatttccgtacaacaatttgatgtggttgatgttgttggacaccatgataaccactttgtcttttaagaaatccataatacagtttctaaatatataataatttacttttgagtctaaaccagctagacactcatctattaagtatatatcactaatacgatatatcgctcttgccagattgattctggattgctgccctttgctgaaattgacacctctatctcctactatagttttgtcgccttttggtagtttctttaaatctatattaagagcgcacaatttaagtacttcattgtaccgtttttcgttataaggttctccaaagagtatgttctgtcgtaaagtggatgggaaaagccagggttcttctgacgcgtaggagatggttccatcaattgtcatttgcccactgcttactggatattcacccaggagaactttgataattgagcttttaccactaccaatgttgccagtgatgagattgactcctttttcggccgaaaaagagatgtcattaagaatagttttttctccgactttggcactcacatgcctcatgtagactctcggtgaaatagtctgtgatcgtctgtctacgacttcctccagtttcaaaaagtgtgacaatcttttaagggaagctcttaagtccgaacattgagctataccaattgggatcgatactgttatgaacgatttgagactttggtagcaagtttgaataaaatagactgtctctgcgtctgtaaaatgaccagaccatatataggtcatgatcataaagaaaaaggagaggctcgttgctgtggatccaacaattagcaccaaagattttagatagaagaccggagataagttttgcagttctaactttcttaattcgttaagttttgtcgtaaagaagttttcccaagtgtacattttaatagtttttatatttcttatagtttctgttgtcagttgcagtctttcgtcagtcctcttagcagattggaccctttttgagcttactacttttcctacaaacaattgtaatgggatagtcaacatgtaaaagccaattcctccaaacacagaccattgtattctattaaatataactcctgtgatgattattgtttggatgacaccgatccacatatcattcacaaatatcaatgccatttcgaatgcaaacacatccttcgttatcaacgttacaatttttccaacagttacgtgattccaagcattgggccccaacttcactgctttcctgtaaactagtgcagctacagaagtcctcactcttatacctacttctgtagtaaattgttgataattgtggttataaataacactaaatacgtttaaacctacaactagggaagcatatatatacaaatcttttgttgtcacatctgtttggttgggagcgtagtacgctaccactttactaagtgctcttggttgaataaacactaaaactgttttcacaaccaattgtattaatcccagaattaaatactgcataccaaagcagctgattaagcacttaccaaggaggcatcttctcctttctttttccgttgcctcatccaagcatcttctagattatttcccagctgttctgatgccagccattttgggatttcatatatatcactatcatcaagtccttttttgcgtgcttttttaaacagggggtagttatagaaaaatgttagaagacgaaaaatggaagctttggttcggggatttgtttctttggcatttctttttgacgagtccatattggataaggacagtcaaaaaccataaacacctatctcgaaaaat

SEQ ID NO: 2827 - DNA, 3823 bp, Diabrotica virgifera
  SmartBlast Evalue=0; Info=Multidrug resistance-associated protein 1 n=1 Tax=Culex quinquefasciatus RepID=B0WL13_CULQU
aaaaaatattttaatcttgtattcctgaatgttcaatcattttgttaaagataccaccttgttttgttctcaaggcttgtggagtatcaaactctataatttcaccatgatcaacaaccattatcctatcacaatccaacacagtatttaatttgtgagcaatggttagcactgtacattgtgaaaaatgtgttttaattgtcctttgcaagagactgcaagtctctggatccatgttggacgttgcttcatccaaaacaataattttatttttgctgaccaacgctctggccaagcatatcaattggcgttgtccagaactataacgtgaaccattctcaacaatgacatcatctaaacaggtaaataaattttttaaatggactttttctattgcggaccaaatttctgcatccgtatgggttcctgatggatccatatttgctcttatcgaacctgaaaataatatcggatcttgtggaataatacctatgctggatcgtaaatacttcaaacataaattcttaatatcttcattgtcgattaaaatacgacccttaatattataaagcctgaacaatactgaaataatagacgattttccagcgcctgtacgtccaacaattccaattttttctttgcttttaatggtaaaactaatattttttaatactctttgttccgatgagttgtaaactaaagagacgttttcgtactttatttctccaaacgatggccaatttttcaacgaacgtccttgcaatttatcttcagattcaatgtcagtatattctaaaactctttctatacctgtcatattattttctatttcggtatattgtctaataacatattgtagaaaacccgtaagtaacattgcctgagttattgctaacccaacgtcaccagcttgagcatctgtcttaaaacaaacaaactttattactatggcagcaaaaaatgtagttgataccatatccatgataaagccgtaaaacctaatggcacacgccatcatataagaagtggatgtataatgatctaggtgttgatcgaattctgaaattagtaagggctgcttttcaaatgctcgaacagcggttattccttcaagcgttgcatttagatatccaatcattggacttctagttgcagcatccagtctttttatgcctctccccgttggtagataaaacttctgtataaaatataacttgacaaataaaaatattgaaggaatgataaagagtttgttgacggaaataattaagtacaatattcccaataatcctagagtttgcctaaatatctcgtaagtattcaaaggaataacttcgtccatagtcatcagatctttcgaaaacctgttcacaacatttcccacaaagtgtttgtcgaagaagctcataaaagcgtttatgacggatttcaacattttgcgatgtagatttcgagacgcccttatagcaaagaagaagttcatgtatattctagtaaaggtgagtactaccatcactactgtcaagaatgtatacatcacaaggtagttgtctcttttatttatgatgttgatatactcttcagtgtcagtttgatttgagagcgttaaattcgtaatattaggttccagattaacccacttgcttacaagtttttctgagtacgacagagctgcttgggcagcaataaaaataattgctagaataactaacatgataatgccaccagcgtatttgtaatatctcaaataaactttaaggcttacagtaccactcttcttttcctcatcgtacaaattcttattctcatttttatctcccccaattagctgagttctctcattcgcttcgtcgtcaagtatatcttcgtctgtaacatcaatatcgtcgtcaaagtagttcatttcaacatcatcgataaaataagttattcttttgtccaaagtttctttttgtttttccaaagacagcgttcgaccatcttcaacaactagcgtattatttccgtacaacaatttgatgtggttgatgttgttggacaccatgataaccactttgtcttttaagaaatccataatacagtttctaaatatataataatttacttttgagtctaaaccagctagacactcatctattaagtatatatcactaatacgatatatcgctcttgccagattgattctggattgctgccctttgctgaaattgacacctctatctcctactatagttttgtcgccttttggtagtttctttaaatctatattaagagcgcacaatttaagtacttcattgtaccgtttttcgttataaggttctccaaagagtatgttctgtcgtaaagtggatgggaaaagccagggttcttctgacgcgtaggagatggttccatcaattgtcatttgcccactgcttactggatattcacccaggagaactttgataattgagcttttaccactaccaatgttgccagtgatgagattgactcctttttcggccgaaaaagagatgtcattaagaatagttttttctccgactttggcactcacatgcctcatgtagactctcggtgaaatagtctgtgatcgtctgtctacgacttcctccagtttcaaaaagtgtgacaatcttttaagggaagctcttaagtccgaacattgagctataccaattgggatcgatactgttatgaacgatttgagactttggtagcaagtttgaataaaatagactgtctctgcgtctgtaaaatgaccagaccatatataggtcatgatcataaagaaaaaggagaggctcgttgctgtggatccaacaattagcaccaaagattttagatagaagaccggagataagttttgcagttctaactttcttaattcgttaagttttgtcgtaaagaagttttcccaagtgtacattttaatagtttttatatttcttatagtttctgttgtcagttgcagtctttcgtcagtcctcttagcagattggaccctttttgagcttactacttttcctacaaacaattgtaatgggatagtcaacatgtaaaagccaattcctccaaacacagaccattgtattctattaaatataactcctgtgatgattattgtttggatgacaccgatccacatatcattcacaaatatcaatgccatttcgaatgcaaacacatccttcgttatcaacgttacaatttttccaacagttacgtgattccaagcattgggccccaacttcactgctttcctgtaaactagtgcagctacagaagtcctcactcttatacctacttctgtagtaaattgttgataattgtggttataaataacactaaatacgtttaaacctacaactagggaagcatatatatacaaatcttttgttgtcacatctgtttggttgggagcgtagtacgctaccactttactaagtgctcttggttgaataaacactaaaactgttttcacaaccaattgtattaatcccagaattaaatactgcataccaaagcagctgattaagcacttaccaaggaggcatcttctcctttctttttccgttgcctcatccaagcatcttctagattatttcccagctgttctgatgccagccattttgggatttcatatatatcactatcatcaagtccttttttgcgtgcttttttaaacagggggtagttatagaaaaatgttagaagacgaaaaatggaagctttggttcggggatttgtttctttggcatttctttttgacgagtccatattggataaggacagtcaaaaaccataaacacctatctcgaaaaat

SEQ ID NO: 2828 - DNA, 3823 bp, Diabrotica virgifera
  SmartBlast Evalue=0; Info=Multidrug resistance-associated protein 1 n=1 Tax=Culex quinquefasciatus RepID=B0WL13_CULQU
aaaaaatattttaatcttgtattcctgaatgttcaatcattttgttaaagataccaccttgttttgttctcaaggcttgtggagtatcaaactctataatttcaccatgatcaacaaccattatcctatcacaatccaacacagtatttaatttgtgagcaatggttagcactgtacattgtgaaaaatgtgttttaattgtcctttgcaagagactgcaagtctctggatccatgttggacgttgcttcatccaaaacaataattttatttttgctgaccaacgctctggccaagcatatcaattggcgttgtccagaactataacgtgaaccgttttcaacaatgacatcatctaaactggtaaatagattctttaaatggactttttctattgcggaccaaatttctgcatccgtatgggttcctgatggatccatatttgctcttattgaacctgaaaataatatcggatcttgtggaatgatacctatgctggatcgtaaatatttcaaacataaattcttaatatcttcattgtctattaaaatacgaccctcaatatcataaagcctgaacaatactgaaataatagatgattttccagcccctgtacgtccaacaattccaattttttctttgcttttaatggtaaaactgatattttttaatactctttggtccgatgagttgtaaactaaagagacgttttcgtactttatttctccaaacgaaggccaatttttcaacgaacgtccttgcaatttatcttcacattcaatgtcagtatactctaaaactctttctatacctgtcatattattttctatttcggtatattgtctaataacatattgtagaaaacccgtaagtaacattgcctgagttattgctaacccaacgtcaccagcttgagcatctgtcttaaaacaaacaaactttattactatggcagcaaaaaatgtagttgataccatatccatgataaagccgtaaaacctaatggcacacgccatcatataagaagtggatgtataatgatctaggtgttgatcgaattctgaaattagtaagggctgcttttcaaatgctcgaacagcggttattccttcaagcgttgcatttagatatccaatcattggacttctagttgcagcatccagtctttttatgcctctccccgttggtagataaaacttctgtataaaatataacttgacaaataaaaatattgaaggaatgataaagagtttgttgacggaaataattaagtacaatattcccaataatcctagagtttgcctaaatatctcgtaagtattcaaaggaataacttcgtccatagtcatcagatctttcgaaaacctgttcacaacatttcccacaaagtgtttgtcgaagaagctcataaaagcgtttatgacggatttcaacattttgcgatgtagatttcgagacgcccttatagcaaagaagaagttcatgtatattctagtaaaggtgagtactaccatcactactgtcaagaatgtatacatcacaaggtagttgtctcttttatttatgatgttgatatactcttcagtgtcagtttgatttgagagcgttaaattcgtaatattaggttccagattaacccacttgcttacaagtttttctgagtacgacagagctgcttgggcagcaataaaaataattgctagaataactaacatgataatgccaccagcgtatttgtaatatctcaaataaactttaaggcttacagtaccactcttcttttcctcatcgtacaaattcttattctcatttttatctcccccaattagctgagttctctcattcgcttcgtcgtcaagtatatcttcgtctgtaacatcaatatcgtcgtcaaagtagttcatttcaacatcatcgataaaataagttattcttttgtccaaagtttctttttgtttttccaaagacagcgttcgaccatcttcaacaactagcgtattatttccgtacaacaatttgatgtggttgatgttgttggacaccatgataaccactttgtcttttaagaaatccataatacagtttctaaatatataataatttacttttgagtctaaaccagctagacactcatctattaagtatatatcactaatacgatatatcgctcttgccagattgattctggattgctgccctttgctgaaattgacacctctatctcctactatagttttgtcgccttttggtagtttctttaaatctatattaagagcgcacaatttaagtacttcattgtaccgtttttcgttataaggttctccaaagagtatgttctgtcgtaaagtggatgggaaaagccagggttcttctgacgcgtaggagatggttccatcaattgtcatttgcccactgcttactggatattcacccaggagaactttgataattgagcttttaccactaccaatgttgccagtgatgagattgactcctttttcggccgaaaaagagatgtcattaagaatagttttttctccgactttggcactcacatgcctcatgtagactctcggtgaaatagtctgtgatcgtctgtctacgacttcctccagtttcaaaaagtgtgacaatcttttaagggaagctcttaagtccgaacattgagctataccaattgggatcgatactgttatgaacgatttgagactttggtagcaagtttgaataaaatagactgtctctgcgtctgtaaaatgaccagaccatatataggtcatgatcataaagaaaaaggagaggctcgttgctgtggatccaacaattagcaccaaagattttagatagaagaccggagataagttttgcagttctaactttcttaattcgttaagttttgtcgtaaagaagttttcccaagtgtacattttaatagtttttatatttcttatagtttctgttgtcagttgcagtctttcgtcagtcctcttagcagattggaccctttttgagcttactacttttcctacaaacaattgtaatgggatagtcaacatgtaaaagccaattcctccaaacacagaccattgtattctattaaatataactcctgtgatgattattgtttggatgacaccgatccacatatcattcacaaatatcaatgccatttcgaatgcaaacacatccttcgttatcaacgttacaatttttccaacagttacgtgattccaagcattgggccccaacttcactgctttcctgtaaactagtgcagctacagaagtcctcactcttatacctacttctgtagtaaattgttgataattgtggttataaataacactaaatacgtttaaacctacaactagggaagcatatatatacaaatcttttgttgtcacatctgtttggttgggagcgtagtacgctaccactttactaagtgctcttggttgaataaacactaaaactgttttcacaaccaattgtattaatcccagaattaaatactgcataccaaagcagctgattaagcacttaccaaggaggcatcttctcctttctttttccgttgcctcatccaagcatcttctagattatttcccagctgttctgatgccagccattttgggatttcatatatatcactatcatcaagtccttttttgcgtgcttttttaaacagggggtagttatagaaaaatgttagaagacgaaaaatggaagctttggttcggggatttgtttctttggcatttctttttgacgagtccatattggataaggacagtcaaaaaccataaacacctatctcgaaaaat

SEQ ID NO: 2829 - DNA, 3029 bp, Diabrotica virgifera
  SmartBlast Evalue=0; Info=Lysosomal alpha-mannosidase (Mannosidase alpha class 2b member 1) (Fragment) n=1 Tax=Aedes aegypti RepID=Q178V9_AEDAE
tagaatttcaatagttagatacaacacgtgacaaaaactaagatgaggtgtttactcctatttctgggtctaacactctccggtgtattatcaagacaactaaaaaatgatggatatcaagttggctgcgtaaagtgccaccctgtagacaaggacaaaataaatgtccatttgatacctcactctcatgacgatgtaggttggctaaagactgttgatcagtactattatggaatgaatacaaagatacagcaagctggggtacagtatatcataacatcagtatttgaagctctgcttgacaatgaagatagaaggtatatacaagtggaaacagcatacttttggaaatggtggcaacaccagagccccgaagtacgtaaattatataaaggtttggttgacaaggggcaaattgaaatggttaacggagcgtggtcaatgaacgatgaagcatgcgccaactatcagtccaccatagaccagtttacttggggactcaggactatcgatgaaaccgtaggtgaatgtggaattccaactgttggctggcaaattgatccatttggccacagtagggaacaagcttctttactatcacaaatgggatatgatggcgttatgtttgctaggctagatcacgatgataaaaccaacagaatgagtaaatctgctttggattttgtctggaaaggaagcgccaatctagatgagagcaccatatttggaagcatatttccaacgagcttgtatttcccaccagatggattttgttgggattacagatgtacagatgatacagtagacgacaattcaaaaagtgcagattacaacatcgatgatatacgagacaagtttacgaaactaatagacacatataaacaatattttcctactaaaaatatcattattcctatgggaggcgactttcattatgagagcgctgaaaaaaactacatcaatatggatagatttatcaaagctttccagaacgacacaaatcttaacgttatatactctactccatcttgttatattaaagcggtaaacgatggcttagataaagatctgattgcgaaaacagatgacttctttccttatagtgacagtgatcattctttctggacaggatactattcatcaaggccaaattctaaaagatttgaaagagttggacataatattctacaggccaccaaacagttatttgctcaaaattcctacaacacgtcgagaaattatgacgaaaatctaaggcatttaagagaaataatgggaattatgcaacaccatgatgctataactggaaccgagaagcaacacgtggcaaacgattatgttagaggaatacacagagcaattactgatgttgaaaaagaaatgggagaagttttcgacgaacttctcaacacggatcttaaactggaactggcttcatgtttattaacaaatgttagcatctgtaaagtatcacaagaatcagataaatttgttgtagcagtgtacaatcctctgggatggagtgtaacacattatgtaagattaccagtggataatggggattatatgatcaatgaaggtgaattatacgatcttattcctaccatcagcaactttagtcatgtcaaaataaaaggagaaacccctagtgcttttgagttagtatttgctgctaaagatattccaccaatgggcttcaaattatactatatacaaaaaacgagcgcaacgagagatgccaaacaagaagaggaaggcgattccgacgacataacaacatttgtaatgaacgataacgataatacattacaatctgtcatcttaaatgatttaaacatggacattacacaaaatttttactattacgtcagtgacgatggaaattcttctggcgtggcttctggggcatatatattcaggcctgtagcaccaggtactgctaatccagtttcgcccgcacaaataaacaaaatcttccaaaaagcaggtaaagttgttgatgaagtgcaccaagtatggactagcgaggaggctgaaattcttcaaattataaggcactataaaaatgagagctatatagagtttgactggatcattggtaatattaatattactgacaacaaaggaaaggagttcatctcaaaatatacgataaacagcaactttaacaacaacaatgtcttttatactgactctaatggaagagaactcatcaaaagagttaaaaataagcggtccgattatacttacgatcctgaggtcgaaccagtatccagcaactactatccagtaacttccagaattgttattaaggatgaagatcaagatattgaagtcgctgtacttactgaccgatctgaaggtggttcaagtctttctcaaaatgaactagagctaatggtacatagaagaatactgcacgatgatcataaaggtgtagatgaaaatctaaatgaaatagaatttgatacgggagtttatgtgagaggtacacattatttggttatcggaaaagcgaacaaagttaatttggatggtaaatctactgcaagccttgaacgcattattgcacaacaaaaattgattcaaccctggattggtttatctgcaacaaacatgtcctacaaagacctacagaaatctgaattggtgtatgaagggttagatggatctctgccagaaaatgtgaatatcttgacctttgagcaatggataaatggtacatatcttcttcgtttggaacatattatggaacaggatgatgatactgaattatcgaaatctattgatgtaaatatagcgaaagccttcaaacatttcgatataaaatccatggcggaaacaacattggctgcgaaccaattgttatcagactaccaaaagaaaactaaatatacctggaaaacatcagatctcacaaccaaaaatgttaaaagagtagagcccattgaaggacaccaaaagcagtatctttgtcaccgatgcagataagaaccttcattgtctcattaaaagaaaaagataatact

SEQ ID NO: 2830 - DNA, 3029 bp, Diabrotica virgifera
  SmartBlast Evalue=0; Info=Lysosomal alpha-mannosidase (Mannosidase alpha class 2b member 1) (Fragment) n=1 Tax=Aedes aegypti RepID=Q178V9_AEDAE
tagaatttcaatagttagatacaacacgtgacaaaaactaagatgaggtgtttactcctatttctgggtctaacactctccggtgtattatcaagacaactaaaaaatgatggatatcaagttggctgcgtaaagtgccaccctgtagacaaggacaaaataaatgtccatttgatacctcactctcatgacgatgtaggttggctaaagactgttgatcagtactattatggaatgaatacaaagatacagcaagctggggtacagtatatcataacatcagtatttgaagctctgcttgacaatgaagatagaaggtatatacaagtggaaacagcatacttttggaaatggtggcaacaccagagccccgaagtacgtaaattatataaaggtttggttgacaaggggcaaattgaaatggttaacggagcgtggtcaatgaacgatgaagcatgcgccaactatcagtccaccatagaccagtttacttggggactcaggactatcgatgaaaccgtaggtgaatgtggaattccaactgttggctggcaaattgatccatttggccacagtagggaacaagcttctttactatcacaaatgggatatgatggcgttatgtttgctaggctagatcacgatgataaaaccaacagaatgagtaaatctgctttggattttgtctggaaaggaagcgccaatctagatgagagcaccatatttggaagcatatttccaacgagcttgtatttcccaccagatggattttgttgggattacagatgtacagatgatacagtagacgacaattcaaaaagtgcagattacaacatcgatgatatacgagacaagtttacgaaactaatagacacatataaacaatattttcctactaaaaatatcattattcctatgggaggcgactttcattatgagagcgctgaaaaaaactacatcaatatggatagatttatcaaagctttccagaacgacacaaatcttaacgttatatactctactccatcttgttatattaaagcggtaaacgatggcttagataaagatctgattgcgaaaacagatgacttctttccttatagtgacagtgatcattctttctggacaggatactattcatcaaggccaaattctaaaagatttgaaagagttggacataatattctacaggccaccaaacagttatttgctcaaaattcctacaacacgtcgagaaattatgacgaaaatctaaggcatttaagagaaataatgggaattatgcaacaccatgatgctataactggaaccgagaagcaacacgtggcaaacgattatgttagaggaatacacagagcaattactgatgttgaaaaagaaatgggagaagttttcgacgaacttctcaacacggatcttaaactggaactggcttcatgtttattaacaaatgttagcatctgtaaagtatcacaagaatcagataaatttgttgtagcagtgtacaatcctctgggatggagtgtaacacattatgtaagattaccagtggataatggggattatatgatcaatgaaggtgaattatacgatcttattcctaccatcagcaactttagtcatgtcaaaataaaaggagaaacccctagtgcttttgagttagtatttgctgctaaagatattccaccaatgggcttcaaattatactatatacaaaaaacgagcgcaacgagagatgccaaacaagaagaggaaggcgattccgacgacataacaacatttgtaatgaacgataacgataatacaataaaatctgtcagtttaaatggattaaacttggatattactcaaaacttttactattacgtgagtgacgatggaaattcttctggtgtggcctctggggcatatatattcaggcctgtagcacctggtgctgctaatccagtttcgcccgctcaaatcaacaaaatcttccaaaaatcaggtaaagttgttgatgaagtgcatcaagtatggaccagcgaggaggctgaaatccttcaaatcataaggcattataaaaatgagagctatatagaatttgattggatcatcggtaatattaatattactgacaacaaaggaaaggagttcatatcaaaatatacgataaacagcaattttaacaacaagaatgtcttttatactgactctaatggaagagaacttattaagagagttaaaaataagcggtccgattattcttacgatcctgaagtcgaaccagtatccagtaactattatccagtaacctccagaattgttcttaaggatgaagatcaagatattgaagttgctgttcttactgaccgatctgaaggtggctcaagtctttctcaaaatgaattggagctaatggtacacagaagaattctgaacgatgatcataaaggtgtagatgaaaatctaaatgaaatagaatttgatacgggagtttatgtgagaggtacacattatttggttatcggaaaagcgaacaaagttaatttggatggtaaatctactgcaagccttgaacgcattattgcacaacaaaaattgattcaaccctggattggtttatctgcaacaaacatgtcctacaaagacctacagaaatctgaattggtgtatgaagggttagatggatctctgccagaaaatgtgaatatcttgacctttgagcaatggataaatggtacatatcttcttcgtttggaacatattatggaacaggatgatgatactgaattatcgaaatctattgatgtaaatatagcgaaagccttcaaacatttcgatataaaatccatggcggaaacaacattggctgcgaaccaattgttatcagactaccaaaagaaaactaaatatacctggaaaacatcagatctcacaaccaaaaatgttaaaagagtagagcccattgaaggacaccaaaagcagtatctttgtcaccgatgcagataagaaccttcattgtctcattaaaagaaaaagataatact

SEQ ID NO: 2831 - DNA, 3029 bp, Diabrotica virgifera
  SmartBlast Evalue=0; Info=Lysosomal alpha-mannosidase (Mannosidase alpha class 2b member 1) (Fragment) n=1 Tax=Aedes aegypti RepID=Q178V9_AEDAE
tagaatttcaatagttagatacaacacgtgacaaaaactaagatgaggtgtttactcctatttctgggtctaacactctccggtgtattatcaagacaactaaaaaattatggatatcaagttggctgcgtaaagtgccaccctgtagacaaggataaaataaatgtccatctaataccacactctcatgacgatgtaggttggctaaaaactgttgatcagtactattatggaatgaatacatctatacagcaagctggggtacagtatatcataacatcagtatttgaagctttgcttgacaatgaggatagaaggtatatacaagtggaaacagcatacttttggaaatggtggcagcaccagagccccgaagtacgtaaattatataaaggtttggttgacaaggggcaaattgaaatggttaacggagcatggtcaatgaacgatgaagcatgcgccaactatcagtccaccatagaccagtttacttggggactcaggactatcgatgaaactgtaggtgaatgtggaattccaacagttggatggcaaattgatccatttggccacagtagggaacaagcttctttgctatcacaaatgggatatgacggcgttatgtttgccagactggatcatgatgataaaaccaacagaatgagtaaatctgctttggattttgtctggaaaggaagcgacaatctagacgaaagcaccatatttggaagcatatttccaactagcttgtatttccctccagatggattctgttgggattacaaatgtacagatggtacagtagacgataattcagaaagtgcagattacaacatcgattttatacgagacaagtttacgaaactaatacacacatataaacaatattttcctactaaaaatatcattattcctatgggaggagactttcattacgagagtgctgaaaaaaattacatcaatatggatagatttatcaaagctttccagaacgacacaaatctgaacgttatatactctactccatcttgttatattaaagcggtaaacgatggtttagataaagatctgattgcgaaaacagatgacttctttccttatagtgacagtgatcattctttctggacaggatactattcatcaaggccaaattctaaaagatttgaaagagttggacataatattctacaggccaccaaacagttatttgctcaaaattcctacaacacgtcgagaaattatgacgaaaatctaaggcacctaagagaaataatgggaattatgcaacaccatgatgctataactggaaccgagaaacaacacgtggcaaacgattatgttagaggaatacacagagcaattactgatgttgaaaaagaaatgggagaagttttcgacgaacttctcaacacggatcttaaactggaactggcttcatgtttattaacaaatgttagcatctgtaaagtatcacaagaatcagataaatttgttgtagcagtgtacaatcctctgggatggagtgtaacacattatgtaagattaccagtggataatggggattatatgatcaatgaaggtgaattatacgatcttattcctaccatcagcaactttagtcatgtcaaaataaaaggagaaacccctagtgcttttgagttagtatttgctgctaaagatattccaccaatgggcttcaaattatactatatacaaaaaacgagcgcaacgagagatgccaaacaagaagaggaaggcgattccgacgacataacaacatttgtaatgaacgataacgataatacattacaatctgtcatcttaaatgatttaaacatggacattacacaaaatttttactattacgtcagtgacgatggaaattcttctggcgtggcttctggggcatatatattcaggcctgtagcaccaggtactgctaatccagtttcgcccgcacaaataaacaaaatcttccaaaaagcaggtaaagttgttgatgaagtgcaccaagtatggactagcgaggaggctgaaattcttcaaattataaggcactataaaaatgagagctatatagagtttgactggatcattggtaatattaatattactgacaacaaaggaaaggagttcatctcaaaatatacgataaacagcaactttaacaacaacaatgtcttttatactgactctaatggaagagaactcatcaaaagagttaaaaataagcggtccgattatacttacgatcctgaggtcgaaccagtatccagcaactactatccagtaacttccagaattgttattaaggatgaagatcaagatattgaagtcgctgtacttactgaccgatctgaaggtggttcaagtctttctcaaaatgaactagagctaatggtacatagaagaatactgcacgatgatcataaaggtgtagatgaaaatctaaatgaaatagaatttgatacgggagtttatgtgagaggtacacattatttggttatcggaaaagcgaacaaagttaatttggatggtaaatctactgcaagccttgaacgcattattgcacaacaaaaattgattcaaccctggattggtttatctgcaacaaacatgtcctacaaagacctacagaaatctgaattggtgtatgaagggttagatggatctctgccagaaaatgtgaatatcttgacctttgagcaatggataaatggtacatatcttcttcgtttggaacatattatggaacaggatgatgatactgaattatcgaaatctattgatgtaaatatagcgaaagccttcaaacatttcgatataaaatccatggcggaaacaacattggctgcgaaccaattgttatcagactaccaaaagaaaactaaatatacctggaaaacatcagatctcacaaccaaaaatgttaaaagagtagagcccattgaaggacaccaaaagcagtatctttgtcaccgatgcagataagaaccttcattgtctcattaaaagaaaaagataatact

SEQ ID NO: 2832 - DNA, 3029 bp, Diabrotica virgifera
  SmartBlast Evalue=0; Info=Lysosomal alpha-mannosidase (Mannosidase alpha class 2b member 1) (Fragment) n=1 Tax=Aedes aegypti RepID=Q178V9_AEDAE
tagaatttcaatagttagatacaacacgtgacaaaaactaagatgaggtgtttactcctatttctgggtctaacactctccggtgtattatcaagacaactaaaaaattatggatatcaagttggctgcgtaaagtgccaccctgtagacaaggataaaataaatgtccatctaataccacactctcatgacgatgtaggttggctaaaaactgttgatcagtactattatggaatgaatacatctatacagcaagctggggtacagtatatcataacatcagtatttgaagctttgcttgacaatgaggatagaaggtatatacaagtggaaacagcatacttttggaaatggtggcagcaccagagccccgaagtacgtaaattatataaaggtttggttgacaaggggcaaattgaaatggttaacggagcatggtcaatgaacgatgaagcatgcgccaactatcagtccaccatagaccagtttacttggggactcaggactatcgatgaaactgtaggtgaatgtggaattccaacagttggatggcaaattgatccatttggccacagtagggaacaagcttctttgctatcacaaatgggatatgacggcgttatgtttgccagactggatcatgatgataaaaccaacagaatgagtaaatctgctttggattttgtctggaaaggaagcgacaatctagacgaaagcaccatatttggaagcatatttccaactagcttgtatttccctccagatggattctgttgggattacaaatgtacagatggtacagtagacgataattcagaaagtgcagattacaacatcgattttatacgagacaagtttacgaaactaatacacacatataaacaatattttcctactaaaaatatcattattcctatgggaggagactttcattacgagagtgctgaaaaaaattacatcaatatggatagatttatcaaagctttccagaacgacacaaatctgaacgttatatactctactccatcttgttatattaaagcggtaaacgatggtttagataaagatctgattgcgaaaacagatgacttctttccttatagtgacagtgatcattctttctggacaggatactattcatcaaggccaaattctaaaagatttgaaagagttggacataatattctacaggccaccaaacagttatttgctcaaaattcctacaacacgtcgagaaattatgacgaaaatctaaggcacctaagagaaataatgggaattatgcaacaccatgatgctataactggaaccgagaaacaacacgtggcaaacgattatgttagaggaatacacagagcaattactgatgttgaaaaagaaatgggagaagttttcgacgaacttctcaacacggatcttaaactggaactggcttcatgtttattaacaaatgttagcatctgtaaagtatcacaagaatcagataaatttgttgtagcagtgtacaatcctctgggatggagtgtaacacattatgtaagattaccagtggataatggggattatatgatcaatgaaggtgaattatacgatcttattcctaccatcagcaactttagtcatgtcaaaataaaaggagaaacccctagtgcttttgagttagtatttgctgctaaagatattccaccaatgggcttcaaattatactatatacaaaaaacgagcgcaacgagagatgccaaacaagaagaggaaggcgattccgacgacataacaacatttgtaatgaacgataacgataatacaataaaatctgtcagtttaaatggattaaacttggatattactcaaaacttttactattacgtgagtgacgatggaaattcttctggtgtggcctctggggcatatatattcaggcctgtagcacctggtgctgctaatccagtttcgcccgctcaaatcaacaaaatcttccaaaaatcaggtaaagttgttgatgaagtgcatcaagtatggaccagcgaggaggctgaaatccttcaaatcataaggcattataaaaatgagagctatatagaatttgattggatcatcggtaatattaatattactgacaacaaaggaaaggagttcatatcaaaatatacgataaacagcaattttaacaacaagaatgtcttttatactgactctaatggaagagaacttattaagagagttaaaaataagcggtccgattattcttacgatcctgaagtcgaaccagtatccagtaactattatccagtaacctccagaattgttcttaaggatgaagatcaagatattgaagttgctgttcttactgaccgatctgaaggtggctcaagtctttctcaaaatgaattggagctaatggtacacagaagaattctgaacgatgatcataaaggtgtagatgaaaatctaaatgaaatagaatttgatacgggagtttatgtgagaggtacacattatttggttatcggaaaagcgaacaaagttaatttggatggtaaatctactgcaagccttgaacgcattattgcacaacaaaaattgattcaaccctggattggtttatctgcaacaaacatgtcctacaaagacctacagaaatctgaattggtgtatgaagggttagatggatctctgccagaaaatgtgaatatcttgacctttgagcaatggataaatggtacatatcttcttcgtttggaacatattatggaacaggatgatgatactgaattatcgaaatctattgatgtaaatatagcgaaagccttcaaacatttcgatataaaatccatggcggaaacaacattggctgcgaaccaattgttatcagactaccaaaagaaaactaaatatacctggaaaacatcagatctcacaaccaaaaatgttaaaagagtagagcccattgaaggacaccaaaagcagtatctttgtcaccgatgcagataagaaccttcattgtctcattaaaagaaaaagataatact

SEQ ID NO: 2833 - DNA, 2892 bp, Diabrotica virgifera
  SmartBlast Evalue=1E-90; Info=Syntenin-1 n=1 Tax=Camponotus floridanus RepID=E2A3P2_9HYME
gaagaggatcgggaatatacattcaaataaaaggaaacaacattttttcgtcataactgagattattcacaatttttaaaaattatgcaatcaaggtctatagtctgtgtttaaaacaggaggagtaatttaaatttaccgcgccgtaatacttgtttgcaaatggtccaacctcaggcaagtttactccactgttatgaaattttaacactaatgacatttacgaaattttgacggtattttataagttaattaagttatatcagcgattttttgtgttttctgcgttattcctttaatttttagaattttagtctgcttttatataaaacacagttgttgtttttagaactttttagcggcgtattagtataatatatttatggattaccgtcgaaggccgataagatcaacaaaaaaagatgtatttggtgatttttctggtgactttcttgggtgtgaatctgtctttttagtttactcctcttggtttaaaaacaaagcatggatcaactaaataacctatcgttcgcactattataacaaaaggagaaatataaaattaaaaaattaattttcacataattttactatggaataagataatcatgcatagtctattccacgaataaacgactgttttgggttatcgcgacaaagaatattttagtgtgcaacataagaagtacgaatgtaaattgctctactaattattctaataaacaacaatgtaatttgcaatgtactttcgttcttcatattttgaaaagttaaataatcgttgtcgcgataatccaaaacagtcgtatattcgtggaatagggtatatcaaaatcattgttaaaaaaaaatgaagaaagtaaagtgtagattcttactgatcaatacatattacagactaattattagcccaatgatagttagggttcaacacataaaaacatatatttcagatatttttaaaacttcataatttaaaatgtgatttatgaaaatcttgaaattttaagacatcacaatcttgatacaatgttgagacatgttctttacctaattttgttatatataatctacatggaaaaagaaaatcattcgattttttttggtcctttgagccggattattatttcagaattaaatgacgttaacaatattctgtttatgttgtattaaggaacgctatattatacaaaaaattaagcttttcaaatgtattgtaagcacaatgtttcaaataatgtttgtaaaagcacaattagtaaataaaacatcaaacttataaagctcagcagaattctcagaaattaaatttttgttggtgcatttcttaaaagttaattttaatcaaacaagcaagcaatgtatgagtttgttttattagtaatatattagagccaatagaacctacagatatgtccattgtgcacagatttatgtgctttcagtcgagaatgggctatgaatatcatgtaatacagactacagtaaaaaaacaaaagctgtaataaaatgcgaaattgtgcagatagctttcaaaagaaagtttcaactaaatttgacatagtaagttccattttaatttttttacttccgtctcacacaaatttgatcaaatatgtgtgtaactttttaagtatcgctggaatatatcataataaatgcatgtcggattaaaatataaacattaaaaaatagatctatgaacataataatataaggaaatacaaatatatactattctagatattaagattgccatatggtgcttatatatcgaaatggatggaaataattacaatgtgggtattgagtggtccatcaaatccttcagtagtgaacccttcattgatttaatcatatggtcgtataagaaactcggaataacggtgatagtaacgacgggtccagctttctgaatgatgttagtaatttccttgtctttcagtcctacaacattttgtccatccacttccaatagctgatgttcgatcagaacaccgttcctagcggccgaagagtccttaacaattgtgataattttaccgttcttgtattggaatcctatacaacccacgctgtctttgtgtaaagtgatagttctttcgaagggcctgtctctgacaactacgttgataccgttcacggggctcttcttgaacatagcgtggaccttttccatcgtatatccagcgacgttttcatcgttaatttgcaagatttgatctccaaatcgcaaccctgccatggcggctggcgagttctctacaacgacacagacgaatacacctttgttgatggatttgacgcgaactcccactttgttatctttatctttgcagagtatcaattgacgaacaccgtgagtgacctgagctctttgaaggccgactgattgtccagaaatgggagctattaggccagttgacgtagtttggggaacaacgctctgttgatagagaaccacctgggaatactctggcatgttctctgcaatgacagcttcacttaattctagccccataaattcccctaatgacgggtaaagttgtttgtcggcccccattgcagggactccagggacaggcatggaatcaaatccaggatatgtgtaaggtggtggagcaccgggagcagtggcttgtggggcggcaatactcctttgaatgtggctgtattgggcattggccatttggtccattttcatgtcttctaaactcgggtacagcgacatttttctttttctgttaataaaactacacacaagaaatgaatatgttgtgagaaaaaaaagttaattcacactacccgaaaaacaatagaagagataagaagtgactcactcggaaagaacgcaaagaacctgttaattacgccgaccacttcggttttgta

SEQ ID NO: 2834 - DNA, 2883 bp, Diabrotica virgifera
  SmartBlast Evalue=1E-90; Info=Syntenin-1 n=1 Tax=Camponotus floridanus RepID=E2A3P2_9HYME
gaagaggatcgggaatatacattcaaataaaaggaaacaacattttttcgtcataactgagattattcacaatttttaaaaattatgcaatcaaggtctatagtctgtgtttaaaacaggaggagtaatttaaatttaccgcgccgtaatacttgtttgcaaatggtccaacctcaggcaagtttactccactgttatgaaattttaacactaatgacatttacgaaattttgacggtattttataagttaattaagttatatcagcgattttttgtgttttctgcgttattcctttaatttttagaattttagtctgcttttatataaaacacagttgttgtttttagaactttttagcggcgtattagtataatatatttatggattaccgtcgaaggccgataagatcaacaaaaaaagatgtatttggtgatttttctggtgactttcttgggtgtgaatctgtctttttagtttactcctcttggtttaaaaacaaagcatggatcaactaaataacctatcgttcgcactattataacaaaaggagaaatataaaattaaaaaattaattttcacataattttactatggaataagataatcatgcatagtctattccacgaataaacgactgttttgggttatcgcgacaaagaatattttagtgtgcaacataagaagtacgaatgtaaattgctctactaattattctaataaacaacaatgtaatttgcaatgtactttcgttcttcatattttgaaaagttaaataatcgttgtcgcgataatccaaaacagtcgtatattcgtggaatagggtatatcaaaatcattgttaaaaaaaaatgaagaaagtaaagtgtagattcttactgatcaatacatattacagactaattattagcccaatgatagttagggttcaacacataaaaacatatatttcagatatttttaaaacttcataatttaaaatgtgatttatgaaaatcttgaaattttaagacatcacaatcttgatacaatgttgagacatgttctttacctaattttgttatatataatctacatggaaaaagaaaatcattcgattttttttggtcctttgagccggattattatttcagaattaaatgacgttaacaatattctgtttatgttgtattaaggaacgctatattatacaaaaaattaagcttttcaaatgtattgtaagcacaatgtttcaaataatgtttgtaaaagcacaattagtaaataaaacatcaaacttataaagctcagcagaattctcagaaattaaatttttgttggtgcatttcttaaaagttaattttaatcaaacaagcaagcaatgtatgagtttgttttattagtaatatattagagccaatagaacctacagatatgtccattgtgcacagatttatgtgctttcagtcgagaatgggctatgaatatcatgtaatacagactacagtaaaaaacaaaagctgtagcgaaattgtgcagatagttttcaaaagaaagtttaactaaatttgacatagtaagttccaatttattttttttacttccgtctcacacaaatttgatcaaatatgtgtgtaactttttaagtatcgctggaatatatcataataaatgcatgtcggattaaaatataaacaataaaaaatagatctatgaacataataatataaggaaatacaaatatatactattctagatattaagattgccatatggtgcttatatatcgaaatggatggaaataattacaatgtgggtattgagtggtccatcaaatccttcagtagtgaacccttcattgatttaatcatatggtcgtataagaaactcggaataacggtgatagtaacgacgggtccagctttctgaatgatgttagtaatttccttgtctttcagtcctacaacattttgtccatccacttccaatagctgatgttcgatcagaacaccgttcctagcggccgaagagtccttaacaattgtgataattttaccgttcttgtattggaatcctatacaacccacgctgtctttgtgtaaagtgatagttctttcgaagggcctgtctctgacaactacgttgataccgttcacggggctcttcttgaacatagcgtggaccttttccatcgtatatccagcgacgttttcatcgttaatttgcaagatttgatctccaaatcgcaaccctgccatggcggctggcgagttctctacaacgacacagacgaatacacctttgttgatggatttgacgcgaactcccactttgttatctttatctttgcagagtatcaattgacgaacaccgtgagtgacctgagctctttgaaggccgactgattgtccagaaatgggagctattaggccagttgacgtagtttggggaacaacgctctgttgatagagaaccacctgggaatactctggcatgttctctgcaatgacagcttcacttaattctagccccataaattcccctaatgacgggtaaagttgtttgtcggcccccattgcagggactccagggacaggcatggaatcaaatccaggatatgtgtaaggtggtggagcaccgggagcagtggcttgtggggcggcaatactcctttgaatgtggctgtattgggcattggccatttggtccattttcatgtcttctaaactcgggtacagcgacatttttctttttctgttaataaaactacacacaagaaatgaatatgttgtgagaaaaaaaagttaattcacactacccgaaaaacaatagaagagataagaagtgactcactcggaaagaacgcaaagaacctgttaattacgccgaccacttcggttttgta

SEQ ID NO: 2835 - DNA, 2871 bp, Diabrotica virgifera
  SmartBlast Evalue=1E-90; Info=Syntenin-1 n=1 Tax=Camponotus floridanus RepID=E2A3P2_9HYME
gaagaggatcgggaatatacattcaaataaaaggaaacaacattttttcgtcataactgagattattcacaatttttaaaaattatgcaatcaaggtctatagtctgtgtttaaaacaggaggagtaatttaaatttaccgcgccgtaatacttgtttgcaaatggtccaacctcaggcaagtttactccactgttatgaaattttaacactaatgacatttacgaaattttgacggtattttataagttaattaagttatatcagcgattttttgtgttttctgcgttattcctttaatttttagaattttagtctgcttttatataaaacacagttgttgtttttagaactttttagcggcgtattagtataatatatttatggattaccgtcgaaggccgataagatcaacaaaaaaagatgtatttggtgatttttctggtgactttcttgggtgtgaatctgtctttttagtttactcctcttggtttaaaaacaaagcatggatcaactaaataacctatcgttcgcactattataacaaaaggagaaatataaaattaaaaaattaattttcacataattttactatggaataagataatcatgcatagtctattccacgaataaacgactgttttgggttatcgcgacaaagaatattttagtgtgcaacataagaagtacgaatgtaaattgctctactaattattctaataaacaacaatgtaatttgcaatgtactttcgttcttcatattttgaaaagttaaataatcgttgtcgcgataatccaaaacagtcgtatattcgtggaatagggtatatcaaaatcattgttaaaaaaaaatgaagaaagtaaagtgtagattcttactgatcaatacatattacagactaattattagccacataaaaacatatatttcagatatttttaaaacttcataatttaaaatgtgatttatgaaaatcttgaaattttaagacatcacaatcttgatacaatgttgagacatgttctttacctaattttgttatatataatctacatggaaaaagaaaatcattcgattttttttggtcctttgagccggattattatttcagaattaaatgacgttaacaatattctgtttatgttgtattaaggaacgctatattatacaaaaaattaagcttttcaaatgtattgtaagcacaatgtttcaaataatgtttgtaaaagcacaattagtaaataaaacatcaaacttataaagctcagcagaattctcagaaattaaatttttgttggtgcatttcttaaaagttaattttaatcaaacaagcaagcaatgtatgagtttgttttattagtaatatattagagccaatagaacctacagatatgtccattgtgcacagatttatgtgctttcagtcgagaatgggctatgaatatcatgtaatacagactacagtaaaaaaacaaaagctgtaataaaatgcgaaattgtgcagatagctttcaaaagaaagtttcaactaaatttgacatagtaagttccattttaatttttttacttccgtctcacacaaatttgatcaaatatgtgtgtaactttttaagtatcgctggaatatatcataataaatgcatgtcggattaaaatataaacattaaaaaatagatctatgaacataataatataaggaaatacaaatatatactattctagatattaagattgccatatggtgcttatatatcgaaatggatggaaataattacaatgtgggtattgagtggtccatcaaatccttcagtagtgaacccttcattgatttaatcatatggtcgtataagaaactcggaataacggtgatagtaacgacgggtccagctttctgaatgatgttagtaatttccttgtctttcagtcctacaacattttgtccatccacttccaatagctgatgttcgatcagaacaccgttcctagcggccgaagagtccttaacaattgtgataattttaccgttcttgtattggaatcctatacaacccacgctgtctttgtgtaaagtgatagttctttcgaagggcctgtctctgacaactacgttgataccgttcacggggctcttcttgaacatagcgtggaccttttccatcgtatatccagcgacgttttcatcgttaatttgcaagatttgatctccaaatcgcaaccctgccatggcggctggcgagttctctacaacgacacagacgaatacacctttgttgatggatttgacgcgaactcccactttgttatctttatctttgcagagtatcaattgacgaacaccgtgagtgacctgagctctttgaaggccgactgattgtccagaaatgggagctattaggccagttgacgtagtttggggaacaacgctctgttgatagagaaccacctgggaatactctggcatgttctctgcaatgacagcttcacttaattctagccccataaattcccctaatgacgggtaaagttgtttgtcggcccccattgcagggactccagggacaggcatggaatcaaatccaggatatgtgtaaggtggtggagcaccgggagcagtggcttgtggggcggcaatactcctttgaatgtggctgtattgggcattggccatttggtccattttcatgtcttctaaactcgggtacagcgacatttttctttttctgttaataaaactacacacaagaaatgaatatgttgtgagaaaaaaaagttaattcacactacccgaaaaacaatagaagagataagaagtgactcactcggaaagaacgcaaagaacctgttaattacgccgaccacttcggttttgta

SEQ ID NO: 2836 - DNA, 2862 bp, Diabrotica virgifera
  SmartBlast Evalue=1E-90; Info=Syntenin-1 n=1 Tax=Camponotus floridanus RepID=E2A3P2_9HYME
gaagaggatcgggaatatacattcaaataaaaggaaacaacattttttcgtcataactgagattattcacaatttttaaaaattatgcaatcaaggtctatagtctgtgtttaaaacaggaggagtaatttaaatttaccgcgccgtaatacttgtttgcaaatggtccaacctcaggcaagtttactccactgttatgaaattttaacactaatgacatttacgaaattttgacggtattttataagttaattaagttatatcagcgattttttgtgttttctgcgttattcctttaatttttagaattttagtctgcttttatataaaacacagttgttgtttttagaactttttagcggcgtattagtataatatatttatggattaccgtcgaaggccgataagatcaacaaaaaaagatgtatttggtgatttttctggtgactttcttgggtgtgaatctgtctttttagtttactcctcttggtttaaaaacaaagcatggatcaactaaataacctatcgttcgcactattataacaaaaggagaaatataaaattaaaaaattaattttcacataattttactatggaataagataatcatgcatagtctattccacgaataaacgactgttttgggttatcgcgacaaagaatattttagtgtgcaacataagaagtacgaatgtaaattgctctactaattattctaataaacaacaatgtaatttgcaatgtactttcgttcttcatattttgaaaagttaaataatcgttgtcgcgataatccaaaacagtcgtatattcgtggaatagggtatatcaaaatcattgttaaaaaaaaatgaagaaagtaaagtgtagattcttactgatcaatacatattacagactaattattagccacataaaaacatatatttcagatatttttaaaacttcataatttaaaatgtgatttatgaaaatcttgaaattttaagacatcacaatcttgatacaatgttgagacatgttctttacctaattttgttatatataatctacatggaaaaagaaaatcattcgattttttttggtcctttgagccggattattatttcagaattaaatgacgttaacaatattctgtttatgttgtattaaggaacgctatattatacaaaaaattaagcttttcaaatgtattgtaagcacaatgtttcaaataatgtttgtaaaagcacaattagtaaataaaacatcaaacttataaagctcagcagaattctcagaaattaaatttttgttggtgcatttcttaaaagttaattttaatcaaacaagcaagcaatgtatgagtttgttttattagtaatatattagagccaatagaacctacagatatgtccattgtgcacagatttatgtgctttcagtcgagaatgggctatgaatatcatgtaatacagactacagtaaaaaacaaaagctgtagcgaaattgtgcagatagttttcaaaagaaagtttaactaaatttgacatagtaagttccaatttattttttttacttccgtctcacacaaatttgatcaaatatgtgtgtaactttttaagtatcgctggaatatatcataataaatgcatgtcggattaaaatataaacaataaaaaatagatctatgaacataataatataaggaaatacaaatatatactattctagatattaagattgccatatggtgcttatatatcgaaatggatggaaataattacaatgtgggtattgagtggtccatcaaatccttcagtagtgaacccttcattgatttaatcatatggtcgtataagaaactcggaataacggtgatagtaacgacgggtccagctttctgaatgatgttagtaatttccttgtctttcagtcctacaacattttgtccatccacttccaatagctgatgttcgatcagaacaccgttcctagcggccgaagagtccttaacaattgtgataattttaccgttcttgtattggaatcctatacaacccacgctgtctttgtgtaaagtgatagttctttcgaagggcctgtctctgacaactacgttgataccgttcacggggctcttcttgaacatagcgtggaccttttccatcgtatatccagcgacgttttcatcgttaatttgcaagatttgatctccaaatcgcaaccctgccatggcggctggcgagttctctacaacgacacagacgaatacacctttgttgatggatttgacgcgaactcccactttgttatctttatctttgcagagtatcaattgacgaacaccgtgagtgacctgagctctttgaaggccgactgattgtccagaaatgggagctattaggccagttgacgtagtttggggaacaacgctctgttgatagagaaccacctgggaatactctggcatgttctctgcaatgacagcttcacttaattctagccccataaattcccctaatgacgggtaaagttgtttgtcggcccccattgcagggactccagggacaggcatggaatcaaatccaggatatgtgtaaggtggtggagcaccgggagcagtggcttgtggggcggcaatactcctttgaatgtggctgtattgggcattggccatttggtccattttcatgtcttctaaactcgggtacagcgacatttttctttttctgttaataaaactacacacaagaaatgaatatgttgtgagaaaaaaaagttaattcacactacccgaaaaacaatagaagagataagaagtgactcactcggaaagaacgcaaagaacctgttaattacgccgaccacttcggttttgta

SEQ ID NO: 2837 - DNA, 2708 bp, Diabrotica virgifera
  SmartBlast Evalue=0; Info=Transitional endoplasmic reticulum ATPase TER94 n=4 Tax=Neoptera RepID=D6WTD3_TRICA
gtcattttgtgtcagaataacgatcgtcatctttgtgcttgagtaaaaactgaaatcatataaaagagataatttctattgtgaactgatttttcaaaagtttctacattaagtacatattcattactaaataatggccgaaaacaaaaatccagaggatttggccaccgcaattctccgtaagaaagatcgtccaaatagacttttggtagaagaagcagttaacgatgataactccgtggttgctttgtcacaagcaaaaatggatgaactacaacttttcagaggagacacagtcctactgaagggcaagcgaaggaaagaaactgtttgtatagtattatctgatgatacatgtagcgatgaaaaaattcgtatgaatagaaatgttagaaataatttaagagttaggctttcagatgtagtttctatccaagcttgccctgatgtaaaatatggcaagagaatacatgtacttcccatagatgatacagtggaaggactcacaggaaatctcttcgaagtatacctgaaaccctacttcctggaggcctatcgaccaatacacaaagatgacgtattcgttgtacgtggaggaatgagagctgttgaattcaaagtcgtcgagaccgatcccgctccgtactgtatagtggctccagataccgtcattcattgtgatggagatccaatcaagcgcgaagaggaggaagaagctcttaacgcagttggatacgacgacatcggaggttgtagaaaacagctcgctcaaatcaaagaaatggtggagttaccactgagacatcctagtcttttcaaggctattggagttaaaccaccaagaggtatcttactttacggtccaccgggtactggtaagacactcattgcacgtgccgtagctaacgaaactggagcgttcttcttcttgattaacggtcctgagattatgagcaaattggccggtgaatccgaaagcaatcttcgtaaagctttcgaggaagccgacaagaattccccagctattattttcattgatgaattggatgccatcgctcccaagagagagaaaacacacggagaggtggaacgccgtatagtatcccaacttctaactttgatggacggtatgaagaagagttcccacgttatcgttatggccgctactaacagaccaaactcaatcgatccagctttacgtagattcggaagattcgacagggaaatcgatatcggaatacctgatgcaactggcagacttgaagttttacgtattcacaccaagaacatgaaattggccgatgatgtcgacttggaacagatcgctgcggaaactcatggtcacgtaggtgccgatttagcttcactgtgttcggaagcagcccttcaacaaatcagagaaaaaatggacctcatcgacctcgaagacgaccaaattgacgcagaagtcctaaactcactggcagttaccatggagaacttccgttacgccatgacgaagagcagcccaagtgctttacgtgagaccatagtagaagtaccaaatgtcacttgggacgatatcggtggcttggctaatgtcaagaaagaattgcaagaattggtgcaatacccagtcgaacatccagataagttccttaagttcggtatgcaaccgtccagaggagtgttgttctatgggccgcctggttgcggtaaaacgttattagctaaggctattgcgaatgaatgccaagccaactttatctcagttaaaggaccagagttgcttactatgtggtttggtgaatcagaagcaaatgtcagagatatcttcgacaaggctcgatctgcggcaccttgtgttctattctttgacgaattagattcaattgccaaatcgcgtggtggaaatgtaggtgatgccggtggtgcagccgacagagttattaatcaaattctaacagaaatggacggtatgggagccaaaaagaacgtgtttattatcggtgctacaaacagaccagatatcatcgatcctgcaatattgcgtccaggtcgtctcgatcagttgatctacatccctctacccgacgagaaatctagggaagccatcttcaaagccaacttgaggaaatcgcctgtagctaaagacgtagatcttgtatacatcgctaaagtaacccatggattttctggtgccgatttgactgaaatctgccagagagcttgcaaacttgccatcaggcaaagcatcgaaacagaaattaggagagaaagagaaagggctttgaaccccaatgttgctatggatttggacgatgacgatccagtcccagaaatcaccagggcccacttcgaagaggccatgcgtttcgccagacgttccgtttcagacaacgacatcagaaaatacgagatgttcgcccagaccttacagcaatctcgcggattcggtaccaacttccgtttcccgacagcagctggtggacctgctgctccaggaggtaccggaggagaccaggccaacttccaggacgatcctgaagacgatctgtatagttaaatgtttcaggtgggctcaataagcaccaactttcaattttatttttcatttttgtatttatttacagtaactcctcagtttgctaacaatattacattgttaacgcattcatatgttgtttaatataatagttttggaatataattacaagtttgtctaaaaa

SEQ ID NO: 2838 - DNA, 2708 bp, Diabrotica virgifera
  SmartBlast Evalue=0; Info=Transitional endoplasmic reticulum ATPase TER94 n=4 Tax=Neoptera RepID=D6WTD3_TRICA
gtcattttgtgtcagaataacgatcgtcatctttgtgcttgagtaaaaactgaaatcatataaaagagataatttctattgtgaactgatttttcaaaagtttctacattaagtacatattcattactaaataatggccgaaaacaaaaatccagaggatttggccaccgcaattctccgtaagaaagatcgtccaaatagacttttggtagaagaagcagttaacgatgataactccgtggttgctttgtcacaagcaaaaatggatgaactacaacttttcagaggagacacagtcctactgaagggcaagcgaaggaaagaaactgtttgtatagtattatctgatgatacatgtagcgatgaaaaaattcgtatgaatagaaatgttagaaataatttaagagttaggctttcagatgtagtttctatccaagcttgccctgatgtaaaatatggcaagagaatacatgtacttcccatagatgatacagtggaaggactcacaggaaatctcttcgaagtatacctgaaaccctacttcctggaggcctatcgaccaatacacaaagatgacgtattcgttgtacgtggaggaatgagagctgttgaattcaaagtcgtcgagaccgatcccgctccgtactgtatagtggctccagataccgtcattcattgtgatggagatccaatcaagcgcgaagaggaggaagaagctcttaacgcagttggatacgacgacatcggaggttgtagaaaacagctcgctcaaatcaaagaaatggtggagttaccactgagacatcctagtcttttcaaggctattggagttaaaccaccaagaggtatcttactttacggtccaccgggtactggtaagacactcattgcacgtgccgtagctaacgaaactggagcgttcttcttcttgattaacggtcctgagattatgagcaaattggccggtgaatccgaaagcaatcttcgtaaagctttcgaggaagccgacaagaattccccagctattattttcattgatgaattggatgccatcgctcccaagagagagaaaacacacggagaggtggaacgccgtatagtatcccaacttctaactttgatggacggtatgaagaagagttcccacgttatcgttatggccgctactaacagaccaaactcaatcgatccagctttacgtagattcggaagattcgacagggaaatcgatatcggaatacctgatgcaactggcagacttgaagttttacgtattcacaccaagaacatgaaattggccgatgatgtcgacttggaacagatcgctgcggaaactcatggtcacgtaggtgccgatttagcttcactgtgttcggaagcagcccttcaacaaatcagagaaaaaatggacctcatcgacctcgaagacgaccaaattgacgcagaagtcctaaactcactggcagttaccatggagaacttccgttacgccatgacgaagagcagcccaagtgctttacgtgagaccatagtagaagtaccaaatgtcacttgggacgatatcggtggcttggctaatgtcaagaaagaattgcaagaattggtgcaatacccagtcgaacatccagataagttccttaagttcggtatgcaaccgtccagaggagtgttgttctatgggccgcctggttgcggtaaaacgttattagctaaggctattgcgaatgaatgccaagccaactttatctcagttaaaggaccagagttgcttactatgtggtttggtgaatcagaagcaaatgtcagagatatcttcgacaaggctcgatctgcggcaccttgtgttctattctttgacgaattagattcaattgccaaatcgcgtggtggaaatgtaggtgatgccggtggtgcagccgacagagttattaatcaaattctaacagaaatggacggtatgggagccaaaaagaacgtgtttattatcggtgctacaaacagaccagatatcatcgatcctgcaatattgcgtccaggtcgtctcgatcagttgatctacatccctctacccgacgagaaatctagggaagccatcttcaaagccaacttgaggaaatcgcctgtagctaaagacgtagatcttgtatacattgctaaagtaactcatggattttctggtgccgatttgactgaaatctgccagagagcttgcaaactggccatcaggcagagcatcgaaaccgaaattaggagagaaagagagagggctttgaatcccaatgttgctatggatttggacgatgacgatccagttccagaaatcaccagggcccacttcgaagaggccatgcgtttcgccagacgttccgtttcagacaacgacatcagaaaatacgagatgttcgcccagaccttacagcaatctcgcggattcggtaccaacttccgtttcccgacagcagctggtggacctgctgctccaggaggtaccggaggagaccaggccaacttccaggacgatcctgaagacgatctgtatagttaaatgtttcaggtgggctcaataagcaccaactttcaattttatttttcatttttgtatttatttacagtaactcctcagtttgctaacaatattacattgttaacgcattcatatgttgtttaatataatagttttggaatataattacaagtttgtctaaaaa

SEQ ID NO: 2839 - DNA, 2708 bp, Diabrotica virgifera
  SmartBlast Evalue=0; Info=Transitional endoplasmic reticulum ATPase TER94 n=4 Tax=Neoptera RepID=D6WTD3_TRICA
gtcattttgtgtcagaataacgatcgtcatctttgtgcttgagtaaaaactgaaatcatataaaagagataatttctattgtgaactgatttttcaaaagtttctacattaagtacatattcattactaaataatggccgaaaacaaaaatccagaggatttggccaccgcaattctccgtaagaaagatcgtccaaatagacttttggtagaagaagcagttaacgatgataactccgtggttgctttgtcacaagcaaaaatggatgaactacaacttttcagaggagacacagtcctactgaagggcaagcgaaggaaagaaactgtttgtatagtattatctgatgatacatgtagcgatgaaaaaattcgtatgaatagaaatgttagaaataatttaagagttaggctttcagatgtagtttctatccaagcttgccctgatgtaaagtatggcaagagaatacatgtacttcccatagatgatacagtggaaggactcacaggaaatctcttcgaagtatacctgaaaccctacttcctggaggcctatcgaccaatacacaaagatgacgtattcgttgtacgtggaggaatgagagctgttgaattcaaagtcgtcgagaccgatcccgctccgtactgtatagtggctccagacaccgtcattcattgtgatggagatccaatcaagcgcgaagaggaagaggaagctcttaacgcagttggatacgacgacatcggaggttgtagaaaacagctcgctcaaatcaaagaaatggtagagttaccactgagacatcctagtcttttcaaggctattggagttaaaccaccaagaggtatcttactttacggtccaccgggtactggtaagacactcattgcacgtgccgtagctaacgaaactggagcgttcttcttcttgattaacggtcctgagattatgagcaaattggccggtgaatccgaaagcaatcttcgtaaagctttcgaggaagccgacaagaattccccagctattattttcattgatgaattggatgccatcgctcccaagagagagaaaacacacggagaggtggaacgccgtatagtatcccaacttctaactttgatggacggtatgaagaagagttcccacgttatcgttatggccgctactaacagaccaaactcaatcgatccagctttacgtagattcggaagattcgacagggaaatcgatatcggaatacctgatgcaactggcagacttgaagttttacgtattcacaccaagaacatgaaattggccgatgatgtcgacttggaacagatcgctgcggaaactcatggtcacgtaggtgccgatttagcttcactgtgttcggaagcagcccttcaacaaatcagagaaaaaatggacctcatcgacctcgaagacgaccaaattgacgcagaagtcctaaactcactggcagttaccatggagaacttccgttacgccatgacgaagagcagcccaagtgctttacgtgagaccatagtagaagtaccaaatgtcacttgggacgatatcggtggcttggctaatgtcaagaaagaattgcaagaattggtgcaatacccagtcgaacatccagataagttccttaagttcggtatgcaaccgtccagaggagtgttgttctatgggccgcctggttgcggtaaaacgttattagctaaggctattgcgaatgaatgccaagccaactttatctcagttaaaggaccagagttgcttactatgtggtttggtgaatcagaagcaaatgtcagagatatcttcgacaaggctcgatctgcggcaccttgtgttctattctttgacgaattagattcaattgccaaatcgcgtggtggaaatgtaggtgatgccggtggtgcagccgacagagttattaatcaaattctaacagaaatggacggtatgggagccaaaaagaacgtgtttattatcggtgctacaaacagaccagatatcatcgatcctgcaatattgcgtccaggtcgtctcgatcagttgatctacatccctctacccgacgagaaatctagggaagccatcttcaaagccaacttgaggaaatcgcctgtagctaaagacgtagatcttgtatacatcgctaaagtaacccatggattttctggtgccgatttgactgaaatctgccagagagcttgcaaacttgccatcaggcaaagcatcgaaacagaaattaggagagaaagagaaagggctttgaaccccaatgttgctatggatttggacgatgacgatccagtcccagaaatcaccagggcccacttcgaagaggccatgcgtttcgccagacgttccgtttcagacaacgacatcagaaaatacgagatgttcgcccagaccttacagcaatctcgcggattcggtaccaacttccgtttcccgacagcagctggtggacctgctgctccaggaggtaccggaggagaccaggccaacttccaggacgatcctgaagacgatctgtatagttaaatgtttcaggtgggctcaataagcaccaactttcaattttatttttcatttttgtatttatttacagtaactcctcagtttgctaacaatattacattgttaacgcattcatatgttgtttaatataatagttttggaatataattacaagtttgtctaaaaa

SEQ ID NO: 2840 - DNA, 2708 bp, Diabrotica virgifera
  SmartBlast Evalue=0; Info=Transitional endoplasmic reticulum ATPase TER94 n=4 Tax=Neoptera RepID=D6WTD3_TRICA
gtcattttgtgtcagaataacgatcgtcatctttgtgcttgagtaaaaactgaaatcatataaaagagataatttctattgtgaactgatttttcaaaagtttctacattaagtacatattcattactaaataatggccgaaaacaaaaatccagaggatttggccaccgcaattctccgtaagaaagatcgtccaaatagacttttggtagaagaagcagttaacgatgataactccgtggttgctttgtcacaagcaaaaatggatgaactacaacttttcagaggagacacagtcctactgaagggcaagcgaaggaaagaaactgtttgtatagtattatctgatgatacatgtagcgatgaaaaaattcgtatgaatagaaatgttagaaataatttaagagttaggctttcagatgtagtttctatccaagcttgccctgatgtaaagtatggcaagagaatacatgtacttcccatagatgatacagtggaaggactcacaggaaatctcttcgaagtatacctgaaaccctacttcctggaggcctatcgaccaatacacaaagatgacgtattcgttgtacgtggaggaatgagagctgttgaattcaaagtcgtcgagaccgatcccgctccgtactgtatagtggctccagacaccgtcattcattgtgatggagatccaatcaagcgcgaagaggaagaggaagctcttaacgcagttggatacgacgacatcggaggttgtagaaaacagctcgctcaaatcaaagaaatggtagagttaccactgagacatcctagtcttttcaaggctattggagttaaaccaccaagaggtatcttactttacggtccaccgggtactggtaagacactcattgcacgtgccgtagctaacgaaactggagcgttcttcttcttgattaacggtcctgagattatgagcaaattggccggtgaatccgaaagcaatcttcgtaaagctttcgaggaagccgacaagaattccccagctattattttcattgatgaattggatgccatcgctcccaagagagagaaaacacacggagaggtggaacgccgtatagtatcccaacttctaactttgatggacggtatgaagaagagttcccacgttatcgttatggccgctactaacagaccaaactcaatcgatccagctttacgtagattcggaagattcgacagggaaatcgatatcggaatacctgatgcaactggcagacttgaagttttacgtattcacaccaagaacatgaaattggccgatgatgtcgacttggaacagatcgctgcggaaactcatggtcacgtaggtgccgatttagcttcactgtgttcggaagcagcccttcaacaaatcagagaaaaaatggacctcatcgacctcgaagacgaccaaattgacgcagaagtcctaaactcactggcagttaccatggagaacttccgttacgccatgacgaagagcagcccaagtgctttacgtgagaccatagtagaagtaccaaatgtcacttgggacgatatcggtggcttggctaatgtcaagaaagaattgcaagaattggtgcaatacccagtcgaacatccagataagttccttaagttcggtatgcaaccgtccagaggagtgttgttctatgggccgcctggttgcggtaaaacgttattagctaaggctattgcgaatgaatgccaagccaactttatctcagttaaaggaccagagttgcttactatgtggtttggtgaatcagaagcaaatgtcagagatatcttcgacaaggctcgatctgcggcaccttgtgttctattctttgacgaattagattcaattgccaaatcgcgtggtggaaatgtaggtgatgccggtggtgcagccgacagagttattaatcaaattctaacagaaatggacggtatgggagccaaaaagaacgtgtttattatcggtgctacaaacagaccagatatcatcgatcctgcaatattgcgtccaggtcgtctcgatcagttgatctacatccctctacccgacgagaaatctagggaagccatcttcaaagccaacttgaggaaatcgcctgtagctaaagacgtagatcttgtatacattgctaaagtaactcatggattttctggtgccgatttgactgaaatctgccagagagcttgcaaactggccatcaggcagagcatcgaaaccgaaattaggagagaaagagagagggctttgaatcccaatgttgctatggatttggacgatgacgatccagttccagaaatcaccagggcccacttcgaagaggccatgcgtttcgccagacgttccgtttcagacaacgacatcagaaaatacgagatgttcgcccagaccttacagcaatctcgcggattcggtaccaacttccgtttcccgacagcagctggtggacctgctgctccaggaggtaccggaggagaccaggccaacttccaggacgatcctgaagacgatctgtatagttaaatgtttcaggtgggctcaataagcaccaactttcaattttatttttcatttttgtatttatttacagtaactcctcagtttgctaacaatattacattgttaacgcattcatatgttgtttaatataatagttttggaatataattacaagtttgtctaaaaa

SEQ ID NO: 2841 - DNA, 5270 bp, Diabrotica virgifera
  SmartBlast Evalue=4E-59; Info=Cysteine string protein n=1 Tax= Camponotus floridanus RepID=E2AR80_9HYME
cacattgaacgttaacgttgtgttggtggggtattgacatttctgaaaaaagtcgtgtctgcggtattttcataaatatgtgtcataataataataataactaatattttttctaaattatgtgttagtgtaataatcggttctgtgtatgttcggtaataggactaaaactagcacaaaatggacgccaaaagaaaattatcaacccaaggtgattctttatacgaagtgttatcgttaccaaaaacggcgactagtgaagagatcaagaagacttaccggcgtttagcacttaagtatcatccagataaaaatcccaataatccggaagccgcggaaaagttcaaagaggtgaacagggctcattctatattaaacgatactacgaaacgaaatatatacgataattacggttcgttgggtctctacatcgccgaacagttcggagaagaaaatgtcaatgcctacttcgtcgtgacgtctacatggtgtaaggccctattcttcgtctgtggaatattaacgggctgctattgttgttgttgtttatgctgctgttgcaacttctgttgcggaaaatgcaagcctagaccaccagaagatactggagactatcacacgttaaatcgagatcagggtccaagttcggcacaacaggttcacaccatccaaccaggtaaaagggatgatggatctgatgatggtcgaggtggtgagacctcaccggtgacgagccagccttctcccaatagaagtcaaaacgctcctgtatatgctatgccaccgcctccagcaatgggggaaagtgccgcgctaaatcaaggtgatgttccagtttatacgcctgatctaaagtaatcgtattgaagaatggtctacttcaacaatcttaataagcgttttgataggtacaccgaaaattctcaacggtagaggaagactttcgattcttctttgacctagtcaaattattattatgattttaattattcgtccgacacgtatttataaaccattagttattatttaagtttaaaatttatttaaaactttttttactttttatttttcatgaactaacgaattaggtgacttaaaatatgcttgtaagaggtaagtgtgactatgtagcagggatttagtgaaaactggaagtatggttcttgatcaatttgttaactttgaaatcctgatttggaagagctacatcattttgtttatgtgatatttttcgtatctgtttggtattttatatttatgtatttttcgtgttactctgttaatgtttgtattatcatttatagtatctgattacatttcatatacaaataccgattgcaaaagaagaggaatagatacagacagtgaccagaaaatgattatcaggttattaagctgatgatctattatctgtcaaatttgctgtacttcgatttgattctcgtttaaataatcgttctagtcaccaaattttcaaatacatagattgtttttacactattctgtttttggttcttcaaattggatacacatgtctccttgcatttcctttgactttgcttgtcactgacattggtaattttatgttgcctagcatactgataatcatggtttctttagtgcgaggggagggttatctttttagttttgcatataaccataaaggcaaaaaacatatagacttaaagaactttattgtttttcaaaatatgtcccaacaagatcgatacacttttgcatacgttcaaaccatttggtaaaacagttccagtcttcagttgacacctgcaaaatcgctgttttaaaggcatcgatggtttctgactactggaatcgctgcccacgcattgaattcttgatctttgggaacgtgaagaagttgttgggtcggggctattcggtggatagtttaataattcgatgttttgaagttccaaattgccctcctattgtcttttgggcagttcgagcacttgcattgtcctgatgtaggatgattcgccgttgtgtgttgcgtttcgcgataatttctgataaacagtttataccaatcagacgtaacagatttggacacaaatggtcgcaaccattttctttgacacacttcgagaacaaatcacttttgttgggttttcctcatcgtgaaacacccacacagcggattggcgtttatttcccggttcgtatgagtaaatccaatgttcatcgccactaacaatatgtactataaacgttttttgagcttactttgttgaaccgttccaatgtttttcgacatcaaatgacgcgaaccgctttttgctcttctgtgatcaaatgaaggatccaatgggaaaccaacctcgtaacaccagttcttcatgtaggatcttttgtatcgaggtctttgaaatgcccaaagatgactctatctctcggtatgttacacggcggtcatccttaattagctgacaaaccgcatcaatgttttgttatgtgagtgttgttctgggtggaccttgcctggattcgtcgctgagattggagctaccacgttgaaattcgtaataccagcgggaaatagtcgacgggtttgatgcttcattcccaaacacagaaactatttcagcgaggcattgctgttgggataatcctctccgaaaattgtaaaaaattattgctcgaaaatgttctcggctaagatccatttttcgtccgacttgctaatttcaaaaattcactgtatctacacaacttgtatcgcaatgaaactctagatttatgtcaacaaaagatttaggttacatttgtgtcggaaggctatttattggtggcgccctctaagcggctatatgcaggtctaaaaagacaaacctccaaatagttgctgacatccaaacaactcttaggctgcaatggggcatgatctcagtgcattcgtgagtcaattctattgtgagaatacctttacttaaggaaatccatgattataatataatataaattatattataaataaatagacagatttattttcatttattttccaagccatgttttatcaccctatagcatcttcaggtattattaaaaatgataaattattaatgtatatttgtttgttaagaccagtgattttacattaattaattttaaatcttagaaagttaattttcaaataattgtagctctttcttctactaaaaaaaaactgacttacaaattatgaaatatctcaacgtgtataattattaagaatccagtgttcgcggcattcctgcaaatatctatatcaatattgcactttgttatttgaacgttccagtattttatgcataagttggatttattctttagccacggagttttttattgtatggcacacagacacctttcccattttaccttaatcactagttttaatttgggccatactataatttacttggtttttatcgaaagaaatgtgtgaacatatttggtaaacaaaatatagaataattaactaatatactactttgactgtttttagctctagtatagctgtcgggataatctgttgctttatttttgtcgacaactatatcataagtgttttgaaattaatctagtctaaataagaaaacatacgatttttatatttcaacttagccttcttttacttaaccgtgataattttgctgcagaaaggaatcctccgaaccatgttttgttctcacaaggaacagaagacaatggtcggccaattagtatctccttatagtcggcataagtacatacgcatgtactcaccagtattgattctacgatttgctatcgtcatattatgttgaatttcttataacacaaccgcagatttccacagttcaacaaaaagtactgcttctttttcgcaatcctgattatgttctgagtttaacaataatgttcaatagactatcgttaatgggctatggtagcaagcgaaaatccaaaagtcgactgcaacgaaatagtattagttcataactataaatacttaggtcatgaaatccaaattgacagagacaactgaaccgctgaactacacagaagaatcatattagcataagccgcatatgaagctctatcagacatctccaagagatttgttgatatgttgacttatttgaaaaagaatccctggcaactgtctgtaggaagctcaatagaactggaggaaattaggggagacctatgtttaactttggacgcagagggttggataatggtgatagtcgttaattaaagtcataaagccccagattagactgttctctgtcatttgttacaggatcaacaacgaatcaattttattttgaaaatgttacaaaaaaaaggaatgtcgatctgcacagatctctcttgagaaacattgtagctacaaatttctcaaaatatagttaattgttctacgaaaacttcttgccaagttttgtcaatgattttgcctccctctcagttttttatgcgtcggaaattacgtgaaggtacctttgaaagaagacggtgtacggttttttgagacaacttatgggtcgtattaagtgggaaaaattgtagggtaatgaagtagatcttagacaagacatcaatcatccttcaagctagatggtttagtctgtgctttgtatattcctcaagtttataatgcggtgactttataactccttactaatgttgtatcaattaagtccagtaaccgtttgaccttcaagtaagccgtttaaccttcaaatattcatccgttatgtgatagagatattctagcaggctttcagtgtttctaagttgcatttttactgattttttcgcagcgaaacgattaagctgtgtcatacataacaattaatgtcctgcaccatacccaaataataatcaaggcctaaatatttgttattattgtatctataaaaaacaatcaatatgagttagtataacagttgccaactatgttcacatatttactttatatatttatgtctgtatatacttgtttcaatgatgccatgcgctttggaagagttcttccaatgatatatgaggtttttaaagtaattttaattgtttctctgttaaaatgaatcgttacgagcaattctatatattcaataattatcaagattttccctttagaaagaatgtacttttaatatttattcaatgtaccattgttattaagtgtaataaaagaatatagcctagatactaccttatcattctgaaaattaaacttctgtgtatatttacttaaaatacagctattctggatt

SEQ ID NO: 2842 - DNA, 2381 bp, Diabrotica virgifera
ggtggagccgtagccttaggctgcaatggggcatgatctcagtgcattcgtgagtcaattctattgtgagaatacctttacttaaggaaatccatgattatataaataaatagacagatttattttcatttattttccaagccatgttttatcaccctatagcatcttcaggtattattaaaaatgataaattattaatgtatatttgtttgttaagaccagtgattttacattaattaattttaaatcttagaaagttaattttcaaataattgtagctctttcttctactaaaaaaaaactgacttacaaattatgaaatatctcaacgtgtataattattaagaatccagtgttcgcggcattcctgcaaatatctatatcaatattgcactttgttatttgaacgttccagtattttatgcataagttggatttattctttagccacggagttttttattgtatggcacacagacacctttcccattttaccttaatcactagttttaatttgggccatactataatttacttggtttttatcgaaagaaatgtgtgaacatatttggtaaacaaaatatagaataattaactaatatactactttgactgtttttagctctagtatagctgtcgggataatctgttgctttatttttgtcgacaactatatcataagtgttttgaaattaatctagtctaaataagaaaacatacgatttttatatttcaacttagccttcttttacttaaccgtgataattttgctgcagaaaggaatcctccgaaccatgttttgttctcacaaggaacagaagacaatggtcggccaattagtatctccttatagtcggcataagtacatacgcatgtactcaccagtattgattctacgatttgctatcgtcatattatgttgaatttcttataacacaaccgcagatttccacagttcaacaaaaagtactgcttctttttcgcaatcctgattatgttctgagtttaacaataatgttcaatagactatcgttaatgggctatggtagcaagcgaaaatccaaaagtcgactgcaacgaaatagtattagttcataactataaatacttaggtcatgaaatccaaattgacagagacaactgaaccgctgaactacacagaagaatcatattagcataagccgcatatgaagctctatcagacatctccaagagatttgttgatatgttgacttatttgaaaaagaatccctggcaactgtctgtaggaagctcaatagaactggaggaaattaggggagacctatgtttaactttggacgcagagggttggataatggtgatagtcgttaattaaagtcataaagccccagattagactgttctctgtcatttgttacaggatcaacaacgaatcaattttattttgaaaatgttacaaaaaaaaggaatgtcgatctgcacagatctctcttgagaaacattgtagctacaaatttctcaaaatatagttaattgttctacgaaaacttcttgccaagttttgtcaatgattttgcctccctctcagttttttatgcgtcggaaattacgtgaaggtacctttgaaagaagacggtgtacggttttttgagacaacttatgggtcgtattaagtgggaaaaattgtagggtaatgaagtagatcttagacaagacatcaatcatccttcaagctagatggtttagtctgtgctttgtatattcctcaagtttataatgcggtgactttataactccttactaatgttgtatcaattaagtccagtaaccgtttgaccttcaagtaagccgtttaaccttcaaatattcatccgttatgtgatagagatattctagcaggctttcagtgtttctaagttgcatttttactgattttttcgcagcgaaacgattaagctgtgtcatacataacaattaatgtcctgcaccatacccaaataataatcaaggcctaaatatttgttattattgtatctataaaaaacaatcaatatgagttagtataacagttgccaactatgttcacatatttactttatatatttatgtctgtatatacttgtttcaatgatgccatgcgctttggaagagttcttccaatgatatatgaggtttttaaagtaattttaattgtttctctgttaaaatgaatcgttacgagcaattctatatattcaataattatcaagattttccctttagaaagaatgtacttttaatatttattcaatgtaccattgttattaagtgtaataaaagaatatagcctagatactaccttatcattctgaaaattaaacttctgtgtatatttacttaaaatacagctattctggatt

SEQ ID NO: 2843 - DNA, 1951 bp, Diabrotica virgifera
  SmartBlast Evalue=1E-59; Info=Cysteine string protein n=1 Tax= Camponotus floridanus RepID=E2AR80_9HYME
cacattgaacgttaacgttgtgttggtggggtattgacatttctgaaaaaagtcgtgtctgcggtattttcataaatatgtgtcataataataataataactaatattttttctaaattatgtgttagtgtaataatcggttctgtgtatgttcggtaataggactaaaactagcacaaaatggacgccaaaagaaaattatcaacccaaggtgattctttatacgaagtgttatcgttaccaaaaacggcgactagtgaagagatcaagaagacttaccggcgtttagcacttaagtatcatccagataaaaatcccaataatccggaagccgcggaaaagttcaaagaggtgaacagggctcattctatattaaacgatactacgaaacgaaatatatacgataattacggttcgttgggtctctacatcgccgaacagttcggagaagaaaatgtcaatgcctacttcgtcgtgacgtctacatggtgtaaggccctattcttcgtctgtggaatattaacgggctgctattgttgttgttgtttatgctgctgttgcaacttctgttgcggaaaatgcaagcctagaccaccagaagatactggagactatcacacgttaaatcgagatcagggtccaagttcggcacaacaggttcacaccatccaaccaggtaaaagggatgatggatctgatgatggtcgaggtggtgagacctcaccggtgacgagccagccttctcccaatagaagtcaaaacgctcctgtatatgctatgccaccgcctccagcaatgggggaaagtgccgcgctaaatcaaggtgatgttccagtttatacgcctgatctaaagtaatcgtattgaagaatggtctacttcaacaatcttaataagcgttttgataggtacaccgaaaattctcaacggtagaggaagactttcgattcttctttgacctagtcaaattattattatgattttaattattcgtccgacacgtatttataaaccattagttattatttaagtttaaaatttatttaaaactttttttactttttatttttcatgaactaacgaattaggtgacttaaaatatgcttgtaagaggtaagtgtgactatgtagcagggatttagtgaaaactggaagtatggttcttgatcaatttgttaactttgaaatcctgatttggaagagctacatcattttgtttatgtgatatttttcgtatctgtttggtattttatatttatgtatttttcgtgttactctgttaatgtttgtattatcatttatagtatctgattacatttcatatacaaataccgattgcaaaagaagaggaatagatacagacagtgaccagaaaatgattatcaggttattaagctgatgatctattatctgtcaaatttgctgtacttcgatttgattctcgtttaaataatcgttctagtcaccaaattttcaaatacatagattgtttttacactattctgtttttggttcttcaaattggatacacatgtctccttgcatttcctttgactttgcttgtcactgacattggtaattttatgttgcctagcatactgataatcatggtttctttagtgcgaggggagggttatctttttagttttgcatataaccataaaggcaaaaaacatatagacttaaagaactttattgtttttcaaaatatgtcccaacaagatcgatacacttttgcatacgttcaaaccatttggtaaaacagttccagtcttcagttgacacctgcaaaatcgctgttttaaaggcatcgatggtttctgactactggaattaaattaaattaattaaaataatgcccacgcattgaattcttgatctttgggaacgtgaagaagttgttgggtcggggctattcggtggatagtttaataattcgatgttttgaagt

SEQ ID NO: 2844 - DNA, 999 bp, Diabrotica virgifera
  SmartBlast Evalue=5E-60; Info=Cysteine string protein n=1 Tax= Camponotus floridanus RepID=E2AR80_9HYME
cacattgaacgttaacgttgtgttggtggggtattgacatttctgaaaaaagtcgtgtctgcggtattttcataaatatgtgtcataataataataataactaatattttttctaaattatgtgttagtgtaataatcggttctgtgtatgttcggtaataggactaaaactagcacaaaatggacgccaaaagaaaattatcaacccaaggtgattctttatacgaagtgttatcgttaccaaaaacggcgactagtgaagagatcaagaagacttaccggcgtttagcacttaagtatcatccagataaaaatcccaataatccggaagccgcggaaaagttcaaagaggtgaacagggctcattctatattaaacgatactacgaaacgaaatatatacgataattacggttcgttgggtctctacatcgccgaacagttcggagaagaaaatgtcaatgcctacttcgtcgtgacgtctacatggtgtaaggccctattcttcgtctgtggaatattaacgggctgctattgttgttgttgtttatgctgctgttgcaacttctgttgcggaaaatgcaagcctagaccaccagaagatactggagactatcacacgttaaatcgagatcagggtccaagttcggcacaacaggttcacaccatccaaccaggtaaaagggatgatggatctgatgatggtcgaggtggtgagacctcaccggtgacgagccagccttctcccaatagaagtcaaaacgctcctgtatatgctatgccaccgcctccagcaatgggggaaagtgccgcgctaaatcaaggtgatgttccagtttatacgcctgatttattcaccaaacaatagagggaataaagaaaaaaaggtatagaagtcgcagtcggtcttttaggtacacgacttaccgcatttctgtcccggattgtttcgcggtgaattatgacttattttatataccaatcatacatatatacaaac

SEQ ID NO: 2845 - DNA, 3189 bp, Diabrotica virgifera
  SmartBlast Evalue=6E-12; Info=Endonuclease-reverse transcriptase n=1 Tax=Bombyx mori RepID=D5LB38_BOMMO
aaccaaaaaaactttttagattccattaataacacattccgtgcgcatgactccgaccggagccagtgtgatgctttactagttgcgcacggcccgatcggagacagtattctgttgattttttcaaaacctatggcagcggatgtgttaactgttaatttgatatagtttgatagtgaaaatatgttgggacgacaaaatgattgtcgtggtaccaccactggcattctactactgcagaatgacagggagaatgacttcttatataaagcgtcttataaaaagcattttacagtaacacgagcgattacaagacatttccattgtgtttgcttttattaacagaacattgacgacagtaaccacatctatctgggtattacattgttgtgacgtaagaaaaactatgtaatgacgctaccattgccatcaacattcacgacagagagtttggcgccttttatctatttaatctaccattagtatagtaaatcttactgtaacatcgtctattacacaccttcatcggcgtaccaacattatgtgtacgtatgtccataatatctcatttataacacattatattttttgttaactgacattataaagtcatttggcgccatttagcgtacaaaaaacccagtcatagtgacaagagaaaacgaccaatgaccatggcatcaacatttaggacggtaatttggcgccaatattctattaagttcttgatgatgttaaacatcatcgtggtactgatattatcgtctacaagagccatggtgccgcaaatttgaataaaatatgatattttctttattttagaaagaatacactaataaatttattaaaattgacaaattctaccctgatcttaccaacaaatatgtatgaattacagtttcagaaacttcttcacaatttacaatctacaaaattacgtgtttattgctttattaacaatgtttacctcgatattacactgatccagtaagttacagatggttttaaactagaaacaacatttataaaattaacagtatacaatgcaattaccgtaggagatacaattagtttatatctcgtttaatttgcttctgtacaaccacccctctacactgtacctctactgaatttaatataccaatgtaaaattgaaaatatgacgatcacacctcgacgacattcggaacgactttgtttagttcgaaatgtcatcgagtagctgttttgacacatgacatatcgtctatttgcaaaattcgaaagcgtagaggccatagaagcgaaatctgcgcacctcaatagaaaacaagaagtaaactgttgctaaaagcctatacagccgccgaaaaaaacaaaaaaaattattgaccttgatacatgaactatttaaggcataaagtacctatgaccttaatgtataaaccagtactgatcaaacgatgactccagtacgatgaacatagacttcttcgtgtatctcatcctttaagagcattgggctattagcgcaacactttgccgataaatatttaaaattaaaaacttcaaaaacacacagctggtacttctacgcagggtacgaaataaccgttgctgcgcataagcgctagaagtacgagtaccaagcgagacattcgaaaaatggcgagcaagtaacatcgcaccgtcccacagtggttccaaatgctgaaaacgtggccatggtgtgcaaaaaagtccctatctagggattttcatgtttgcagttgttttctcatactatcgtagagtcgtaatacgcaggtataaggatcagactggatgtattttggttcatagctcaggaataagtgagccatgtccgaggttattatggccggcagagaaagtgaaaaagaacgcatattttgaaaacgctgtaaaacgttttgtagtttatcaattttatcgttgtaaagcagattcttcttttttaagtatgtagttatgtaagatataagttaacataagatttagtaacaataaatgccttaaatttgttaatgcattaatacagtttaatacatttatatcagttgtgtgttaacggtcattttatctctatctatatcaattttgtatgttagtgcatgagaatacattagcagacctaaaattacagtccacgaattaaatttaaaccccatgcgttaacattctggtccttcgagccggatatgagtcagcgacctatggatgcggtcatcacggtccattttactttgtctgcagcggcactgaagagttccattgttatttttccacgccactgccttaaatttttcaaccaagacgtgcgtcgtctcccggttctcttcttccttctaccttcccttgtataatgagtcacgtccaactcatatttttcatttcttagtatgtgagcaaagtagttcatttttctttccttcatagtgttgcgtatttcttttttcattatttattaatgtttccgtgttgtgtccacgatattttccacattctacgaacaccatacatcaaagcttgcaagtcgtttttcagttgtgtccgtaattgtccaggtttcaactccatataaaaggacagaggactataatattcaatcgggcttgcggttatgttagctctggcactctgcaatataaacaaattatttattcgtaacagtacatttacagtctctgtttcgtaatctaaaggacactagctgacataatgacaccagaaatacactcttctgggccattattaaccggccaccttaaaaatgggtcatttttgatgtcacatctcctaaacctgttgtccgatttaagtgatttctccaataatgttatagccctattcctcgacaatatcgctataacaatattgttgctaaacaggcaaattttcattgtataccgggtgcacgaatcaaactgtgttactttcttaaagcttgcatcaccctgcggaatattctagcatttgtagtatactgaaattaaaacctaactatagcctcatgctttctcaacattttgtttttttattgattcgcttatgttgaataataaaaagttttataaacacatcttcttctcttcttcattctccagactgtttgcatccagtcctggataagtccttcccatgagttctccattctcctctgctttgttctattttgggtgccgcagtttc

SEQ ID NO: 2846 - DNA, 2992 bp, Diabrotica virgifera
aaccaaaaaaactttttagattccattaataacacattccgtgcgcatgactccgaccggagccagtgtgatgctttactagttgcgcacggcccgatcggagacagtattctgttgattttttcaaaacctatggcagcggatgtgttaactgttaatttgatatagtttgatagtgaaaatatgttgggacgacaaaatgattgtcgtggtaccaccactggcattctactactgcagaatgacagggagaatgacttcttatataaagcgtcttataaaaagcattttacagtaacacgagcgattacaagacatttccattgtgtttgcttttattaacagaacattgacgacagtaaccacatctatctgggtattacattgttgtgacgtaagaaaaactatgtaatgacgctaccattgccatcaacattcacgacagagagtttggcgccttttatctatttaatctaccattagtatagtaaatcttactgtaacatcgtctattacacaccttcatcggcgtaccaacattatgtgtacgtatgtccataatatctcatttataacacattatattttttgttaactgacattataaagtcatttggcgccatttagcgtacaaaaaacccagtcatagtgacaagagaaaacgaccaatgaccatggcatcaacatttaggacggtaatttggcgccaatattctattaagttcttgatgatgttaaacatcatcgtggtactgatattatcgtctacaagagccatggtgccgcaaatttgaataaaatatgatattttctttattttagaaagaatacactaataaatttattaaaattgacaaattctaccctgatcttaccaacaaatatgtatgaattacagtttcagaaacttcttcacaatttacaatctacaaaattacgtgtttattgctttattaacaatgtttacctcgatattacactgatccagtaagttacagatggttttaaactagaaacaacatttataaaattaacagtatacaatgcaattaccgtaggagatacaattagtttatatctcgtttaatttgcttctgtacaaccacccctctacactgtacctctactgaatttaatataccaatgtaaaattgaaaatatgacgatcacacctcgacgacattcggaacgactttgtttagttcgaaatgtcatcgagtagctgttttgacacatgacatatcgtctatttgcaaaattcgaaagcgtagaggccatagaagcgaaatctgcgcacctcaatagaaaacaagaagtaaactgttgctaaaagcctatacagccgccgaaaaaaacaaaaaaaattattgaccttgatacatgaactatttaaggcataaagtacctatgaccttaatgtataaaccagtactgatcaaacgatgactccagtacgatgaacatagacttcttcgtgtatctcatcctttaagagcattgggctattagcgcaacactttgccgataaatatttaaaattaaaaacttcaaaaacacacagctggtacttctacgcagggtacgaaataaccgttgctgcgcataagcgctagaagtacgagtaccaagcgagacattcgaaaaatggcgagcaagtaacatcgcaccgtcccacagtggttccaaatgctgaaaacgtggccatggtgtgcaaaaaagtccctatctagggattttcatgtttgcagttgttttctcatactatcgtagagtcgtaatacgcaggtataaggatcagactggatgtattttggttcatagctcaggaataagtgagccatgtccgaggttattatggccggcagagaaagtgaaaaagaacgcatattttgaaaacgctgtaaaacgttttgtagtttatcaattttatcgttgtaaagcagattcttcttttttaagtatgtagttatgtaagatataagttaacataagatttagtaacaataaatgccttaaatttgttaatgcattaatagtgaaaatatacttgaaataattaaaattttgtaaagatgcattcaaaagtacaaaattctgcataattctgcgactaatgtttattaatcttaaaatatatagtaaggagatacagaatcactttggtttagctgcctataactgcctatgcattgctggcagttgtttgaatacaaaagtgggaaatgacgcatattacatgattctggcgattgttgagtatgtatgggcagttgtacataagtaataggttctgaatattgtacttcataaaaaaatgtattggtaatcagcagtttcaaaagtcccttataatataaaattttaaacaaaaatgcgctaaaataaaattttcgaatttctttcgtccatattggatccgccattttgttaaaaaaaaagtaatgttagatttgtaatcagcgaccttaacctaccaaatttgacaaaaaattttccttttttattgatattttcaatttctttccgccattttgttttcagaaaaaatagtgtcaaattcgtaattagcgatgccaaaacacttaaaaacgaaagtaattccgaaatgtataaacaatatacgcttttaaaggttcatgaccacgtttttggcatttggaaccactgtgcgacggcgtcttaccatcctacgaccatcatgcagtcctacacaaaatcggaattcatcgctgaatactacattatgccattctatcacctaatgctgccgatctctgcaccaattcaaacgtgatgacagtggtccaaaaggtagtaacaaaacggtctcataaagctagtagtctaaggcgcctatctagtagtacgcctctgttcaccagttggtcttcttcgtgttcctataccttcgtttgtccacaaaccacacacgcataactgtcgcattgtcgtacaattaacacgatggccaatttcgcgatacgacaaaccc

SEQ ID NO: 2847 - DNA, 2895 bp, Diabrotica virgifera
  SmartBlast Evalue=5E-12; Info=Endonuclease-reverse transcriptase n=1 Tax=Bombyx mori RepID=D5LB38_BOMMO
aaccaaaaaaactttttagattccattaataacacattccgtgcgcatgactccgaccggagccagtgtgatgctttactagttgcgcacggcccgatcggagacagtattctgttgattttttcaaaacctatggcagcggatgtgttaactgttaatttgatatagtttgatagtgaaaatatgttgggacgacaaaatgattgtcgtggtaccaccactggcattctactactgcagaatgacagggagaatgacttcttatataaagcgtcttataaaaagcattttacagtaacacgagcgattacaagacatttccattgtgtttgcttttattaacagaacattgacgacagtaaccacatctatctgggtattacattgttgtgacgtaagaaaaactatgtaatgacgctaccattgccatcaacattcacgacagagagtttggcgccttttatctatttaatctaccattagtatagtaaatcttactgtaacatcgtctattacacaccttcatcggcgtaccaacattatgtgtacgtatgtccataatatctcatttataacacattatattttttgttaactgacattataaagtcatttggcgccatttagcgtacaaaaaacccagtcatagtgacaagagaaaacgaccaatgaccatggcatcaacatttaggacggtaatttggcgccaatattctattaagttcttgatgatgttaaacatcatcgtggtactgatattatcgtctacaagagccatggtgccgcaaatttgaataaaatatgatattttctttattttagaaagaatacactaataaatttattaaaattgacaaattctaccctgatcttaccaacaaatatgtatgaattacagtttcagaaacttcttcacaatttacaatctacaaaattacgtgtttattgctttattaacaatgtttacctcgatattacactgatccagtaagttacagatggttttaaactagaaacaacatttataaaattaacagtatacaatgcaattaccgtaggagatacaattagtttatatctcgtttaatttgcttctgtacaaccacccctctacactgtacctctactgaatttaatataccaatgtaaaattgaaaatatgacgatcacacctcgacgacattcggaacgactttgtttagttcgaaatgtcatcgagtagctgttttgacacatgacatatcgtctatttgcaaaattcgaaagcgtagaggccatagaagcgaaatctgcgcacctcaatagaaaacaagaagtaaactgttgctaaaagcctatacagccgccgaaaaaaacaaaaaaaattattgaccttgatacatgaactatttaaggcataaagtacctatgaccttaatgtataaaccagtactgatcaaacgatgactccagtacgatgaacatagacttcttcgtgtatctcatcctttaagagcattgggctattagcgcaacactttgccgataaatatttaaaattaaaaacttcaaaaacacacagctggtacttctacgcagggtacgaaataaccgttgctgcgcataagcgctagaagtacgagtaccaagcgagacattcgaaaaatggcgagcaagtaacatcgcaccgtcccacagtggttccaaatgctgaaaacgtggccatggtgtgcaaaaaagtccctatctagggattttcatgtttgcagttgttttctcatactatcgtagagtcgtaatacgcaggtataaggatcagactggatgtattttggttcatagctcaggaataagtgagccatgtccgaggttattatggccggcagagaaagtgaaaaagaacgcatattttgaaaacgctgtaaaacgttttgtagtttatcaattttatcgttgtaaagcagattcttcttttttaagtatgtagttatgtaagatataagttaacataagatttagtaacaataaatgccttaaatttgttaatgcattaatacagtttaatacatttatatcagttgtgtgttaacggtcattttatctctatctatatcaattttgtatgttagtgcatgagaatacattagcagacctaaaattacagtccacgaattaaatttaaaccccatgcgttaacattctggtccttcgagccggatatgagtcagcgacctatggatgcggtcatcacggtccattttactttgtctgcagcggcactgaagagttccattgttatttttccacgccactgccttaaatttttcaaccaagacgtgcgtcgtctcccggttctcttcttccttctaccttcccttgtataatgagtcacgtccaactcatatttttcatttcttagtatgtgagcaaagtagttcatttttctttccttcatagtgttgcgtatttcttttttcattatttattaatgtttccgtgttgtgtccacgatattttccacattctacgaacaccatacatcaaagcttgcaagtcgtttttcagttgtgtccgtaattgtccaggtttcaactccatataaaaggacagaggactataatattcaatcgggcttgcggttatgttagctctggcactctgcaatataaacaaattatttattcgtaacagtacatttacagtctctgtttcgtaatctaaaggacactagctgacataatgacaccagaaatacactcttctgggccattattaaccggccaccttaaaaatgggtcatttttgatgtcacatctcccaaacctgttgtccgatttaagtgatttccccaataatgctatagccctattccttgacaatatcgctataataacactgttgccaaacaggcaaatt

SEQ ID NO: 2848 - DNA, 1115 bp, Diabrotica virgifera
gaaagtgagaaagaacgcgtataatgaaaacgctgtaaaacgttttatagttgatcaattttatttatcgctgtaaagcagattcttctttttcaagtatgtagtgatgtaagatgtaagttaacttaagatttagtaacaataaataccttaaatttgttatgcataaatagtgaaaatatacttgaaataattaaacttttgtaaaaatacattcaaaaagtacaaaattctgcgactaatgtttattaatcttgaagtatacagtaagaagatacagaatcactttggtttagctgcctataactgcctatgcattactggcagttgtttgaatataaaagtggacgcatattacatgattctggcgattgttgagtatgtatgggcggttgtacataagtaataggttctgaatattgtacttcataaaaaaatgtattggtaatcagcagtttcaaaagtcccttataatataaaattttaaacaaaaatgcgctaaaataaaattttcgaatttctttcgtccatattggatccgccattttgtttaaaaaaaaagtaatgttagatttgtaatcagcgaccttaacctaccaaatttgacaaaaaattttccttttttattgatattttcaatttctttccgccattttgttttcagaaaaaatagtgtcaaattcgtaattagcgatgccaaaacacttaaaaacgaaagtaattccgaaatgtataaacaatatacgcttttaaaggttcatgaccacgtttttggcatttggaaccactgtgcgacggcgtcttaccatcctacgaccatcatgcagtcctacacaaaatcggaattcatcgctgaatactacattatgccattctatcacctaatgctgccgatctctgcaccaattcaaacgtgatgacagtggtccaaaaggtagtaacaaaacggtctcataaagctagtagtctaaggcgcctatctagtagtacgcctctgttcaccagttggtcttcttcgtgttcctataccttcgtttgtccacaaaccacacacgcataactgtcgcattgtcgtacaattaacacgatggccaatttcgcgatacgacaaaccc

SEQ ID NO: 2849 - DNA, 2449 bp, Diabrotica virgifera
  SmartBlast Evalue=7E-45; Info=Integral membrane protein 2C n=1 Tax=Camponotus floridanus RepID=E2ALC7_9HYME
tttgttttggtcaagtcaagtcaaagtcgcaggcaggttcattatagttgcgaactagtgtattgattaccccaaatttgtgccagaaacatttttcaaaatgacgattttgactaaacctttctccgaaaagaaaggggagaaggacgtagctcctttggtgttcaacgaacaaaccgccccagccaatgctccagaagatgtcgaatcacaacaacgtagaatgccccgcattcttatttttccagccggtgcacgaccccacagggttacgacagttactaccctctgtctccttctgaccgctcttacagtcgtaggaataggtatcgtaggaggcaaaattctgtacgaccagtacatcagagtagcacataaacggtttgaaggatgggctcagattccaataaaaaatgaattgaaaagtgcatatgacgggacagaagtagatgatactgatgcgtttttagataaaatattaccaacagaaaattacaatgaaatgtggaacgatgacgatactgacttcaagcatattttcaaagattatttccaagaaaacttcgagattagcaacgacgaaaaatacgaaaaaatcgacgtgcctgatttcagagatggtcgcagcggccgtttcatccacgattttaataccaacacaactggcatcatcgacataactggacgtagatgcttcgtcatgccattgaaccgagacaatgttctaccaccaaagtcgttgtttgatttgattcacaagatgtgggaagggtattataaagtaaataccgatcttgttagaaaaaatatgagagttatcatcccaccaattacagataccaagaccattggtggatatattgcaagtgaatgtgatggattgcctatttataaattagaaaaatacgtcggtggagttgtaaagaggtctgccgataagcagtctgaacgattcgcccagtttgctggccaaggagtcacccagatagaaattaccaacatggatgaggtgtatgcctacgaaaaaagtttgattagccattaaattgtttaattatcgtattaacataaaattattatataaaaaattgaatagttgagaggcatcaccaaaatttctcttgcttttctcgtattttattgtttagttctatcgtaaaatacttgatacgatggttgtctttttagttttgcatatagccataaagacaaaaaaatatagacctgaatttattgtcttttggacagtgtgatcacttgcattgccttgaggtaggatgattcgccgttttgtgttgctttgtcggagtttcgcgataacttctggtaaacaagaggttatatacctatcagaagtaaccgttcttcgatcttctaaagcaattgttgccacatgaccagattttgacacaaaagttgcgaccgacactcttcgagaacggatcacttttgttggtttttcctcatcgtgaaacattcacacagcgaatttgcgttgattttacggttcgtaggagtaaatcaaagattcatcgctactaacaatactataaacgttttttgagcttcctttgttgaaccgttccaatgtttttcgacaccaatcgacgcgaacagctttttgctttttgaaattagcagtaccagcgggaaacagttgactggtgtgatgcttcattcccaaacaaagaaaccatttcatcgagacattgttgttgggatagtcctctcgaaaaattgtaagaacttattgctcgaaaatattctcggctaagatccatttttcgaccttgcgctaatttcaaaaattcactgtatctatacaactggttgtaacgcaatgaaactctggatttatgtcaacaaaagattgaggttacatttgtgtcggaaggttttatttgtggcgccctctatgtggcgctatatgcaaaactaaaaagacaaacgtcatattagttgtgtacaaatgatgtattacaaaagccctatgccatacctcggtgcttataacggacggtatatggtttaaaggaacttttgcatacatcatcttattttaatagacgaaaaattggtctaaaaacaatttttgatcaagacagtcaatttcgcataatcaatcagtctaaaattattgtttcaattcaaaaagaaaatagttattagttatacgtttatttatgacttgtatgtgagatattcggttagaatcatacaagaggtttttagaaatgtcaaaaattgttttaggaaccccagtaaagtagataaaattattaattattactaatagtggaaataccagtttcgtgaaataaagatattataaaatgcatgtaaagtttatgtaaattttataaataaaatagtattgacactattatatcatttgtgcaatatatttcgtcatgtgttgtatttaaaagttcctatggaataaatcccc

SEQ ID NO: 2850 - DNA, 2438 bp, Diabrotica virgifera
  SmartBlast Evalue=7E-45; Info=Integral membrane protein 2C n=1 Tax=Camponotus floridanus RepID=E2ALC7_9HYME
tttgttttggtcaagtcaagtcaaagtcgcaggcaggttcattatagttgcgaactagtgtattgattaccccaaatttgtgccagaaacatttttcaaaatgacgattttgactaaacctttctccgaaaagaaaggggagaaggacgtagctcctttggtgttcaacgaacaaaccgccccagccaatgctccagaagatgtcgaatcacaacaacgtagaatgccccgcattcttatttttccagccggtgcacgaccccacagggttacgacagttactaccctctgtctccttctgaccgctcttacagtcgtaggaataggtatcgtaggaggcaaaattctgtacgaccagtacatcagagtagcacataaacggtttgaaggatgggctcagattccaataaaaaatgaattgaaaagtgcatatgacgggacagaagtagatgatactgatgcgtttttagataaaatattaccaacagaaaattacaatgaaatgtggaacgatgacgatactgacttcaagcatattttcaaagattatttccaagaaaacttcgagattagcaacgacgaaaaatacgaaaaaatcgacgtgcctgatttcagagatggtcgcagcggccgtttcatccacgattttaataccaacacaactggcatcatcgacataactggacgtagatgcttcgtcatgccattgaaccgagacaatgttctaccaccaaagtcgttgtttgatttgattcacaagatgtgggaagggtattataaagtaaataccgatcttgttagaaaaaatatgagagttatcatcccaccaattacagataccaagaccattggtggatatattgcaagtgaatgtgatggattgcctatttataaattagaaaaatacgtcggtggagttgtaaagaggtctgccgataagcagtctgaacgattcgcccagtttgctggccaaggagtcacccagatagaaattaccaacatggatgaggtgtatgcctacgaaaaaagtttgattagccattaaattgtttaattatcgtattaacataaaattattatataaaaaattgaatagttgagaggcatcaccaaaatttctcttgcttttctcgtattttattgtttagttctatcgtaaaatacttgatacgatggttgtctttttagttttgcatatagccataaagacaaaaaaatatagacctgaatttattgtcttttggacagtgtgatcacttgcattgccttgaggtaggatgattcgccgttttgtgttgctttgtcggagtttcgcgataacttctggtaaacaagaggttatatacctatcagaagtaaccgttcttcgatcttctaaagcaattgttgccacatgaccagattttgacacaaaagttgcgaccgacactcttcgagaacggatcacttttgttggtttttcctcatcgtgaaacattcacacagcgaatttgcgttgattttacggttcgtaggagtaaatcaaagattcatcgctactaacaatactataaacgttttttgagcttcctttgttgaaccgttccaatgtttttcgacaccaatcgacgcgaacagctttttgctttttgaaattagcagtaccagcgggaaacagttgactggtgtgatgcttcattcccaaacaaagaaaccatttcatcgagacattgttgttgggatagtcctctcgaaaaattgtaagaacttattgctcgaaaatattctcggctaagatccatttttcgaccttgcgctaatttcaaaaattcactgtatctatacaactggttgtaacgcaatgaaactctggatttatgtcaacaaaagattgaggttacatttgtgtcggaaggttttatttgtggcgccctctatgtggcgctatatgcaaaactaaaaagacaaacgtcatattagttgtgtacaaatgatgtattacaaaagccctatgccatacctcggtgcttataacggacggtatatggtttaaaggaacttttgcatacatcatcttattttaatagacgaaaaattggtctaaaaacaatttttgatcaagacagtcaatttcgcataatcaatcagtctaaaattattgtttcaattcaaaaagaaaatagttattagttatacgtttatttatgacttgtatgtgagatattcggttagaatcatacaagaggtttttagaaatgtcaaaaattgttttaggaaccccagtaaagtagataaaattattaattattactaatagtggaaataccagtttcgtgaaataaagatattataaaatgcatgtaaagtttataaataaaatagtattgacactattatatcatttgtgcaatatatttcgtcatgtgttgtatttaaaagttcctatggaataaatcccc

SEQ ID NO: 2851 - DNA, 2422 bp, Diabrotica virgifera
  SmartBlast Evalue=7E-45; Info=Integral membrane protein 2C n=1 Tax=Camponotus floridanus RepID=E2ALC7_9HYME
tttgttttggtcaagtcaagtcaaagtcgcaggcaggttcattatagttgcgaactagtgtattgattaccccaaatttgtgccagaaacatttttcaaaatgacgattttgactaaacctttctccgaaaagaaaggggagaaggacgtagctcctttggtgttcaacgaacaaaccgccccagccaatgctccagaagatgtcgaatcacaacaacgtagaatgccccgcattcttatttttccagccggtgcacgaccccacagggttacgacagttactaccctctgtctccttctgaccgctcttacagtcgtaggaataggtatcgtaggaggcaaaattctgtacgaccagtacatcagagtagcacataaacggtttgaaggatgggctcagattccaataaaaaatgaattgaaaagtgcatatgacgggacagaagtagatgatactgatgcgtttttagataaaatattaccaacagaaaattacaatgaaatgtggaacgatgacgatactgacttcaagcatattttcaaagattatttccaagaaaacttcgagattagcaacgacgaaaaatacgaaaaaatcgacgtgcctgatttcagagatggtcgcagcggccgtttcatccacgattttaataccaacacaactggcatcatcgacataactggacgtagatgcttcgtcatgccattgaaccgagacaatgttctaccaccaaagtcgttgtttgatttgattcacaagatgtgggaagggtattataaagtaaataccgatcttgttagaaaaaatatgagagttatcatcccaccaattacagataccaagaccattggtggatatattgcaagtgaatgtgatggattgcctatttataaattagaaaaatacgtcggtggagttgtaaagaggtctgccgataagcagtctgaacgattcgcccagtttgctggccaaggagtcacccagatagaaattaccaacatggatgaggtgtatgcctacgaaaaaagtttgattagccattaaattgtttaattatcgtattaacataaaattattatataaaaaattgaatagttgagaggcatcaccaaaatttctcttgcttttctcgtattttattgtttagttctatcgtaaaatacttgatacgatggttgtctttttagttttgcatatagccataaagacaaaaaaatatagacctgaatttattgtcttttggacagtgtgatcacttgcattgccttgaggtaggatgattcgccgttttgtgttgctttgtcggagtttcgcgataacttctggtaaacaagaggttatatacctatcagaagtaaccgttcttcgatcttctaaagcaattgttgccacatgaccagattttgacacaaaagttgcgaccgacactcttcgagaacggatcacttttgttggtttttcctcatcgtgaaacattcacacagcgaatttgcgttgattttacggttcgtaggagtaaatcaaagattcatcgctactaacaatactataaacgttttttgagcttcctttgttgaaccgttccaatgtttttcgacaccaatcgacgcgaacagctttttgctttttgaaattagcagtaccagcgggaaacagttgactggtgtgatgcttcattcccaaacaaagaaaccatttcatcgagacattgttgttgggatagtcctctcgaaaaattgtaagaacttattgctcgaaaatattctcggctaagatccatttttcgaccttgcgctaatttcaaaaattcactgtatctatacaactggttgtaacgcaatgaaactctggatttatgtcaacaaaagattgaggttacatttgtgtcggaaggttttatttgtggcgccctctatgtggcgctatatgcaaaactaaaaagacaaacgtcatattagttgtgtacaaatgatgtattacaaaagccctatgccatacctcggtgcttataacggacggtatatggtttaaaggaacttttgcatacatcatcttattttaatagacgaaaaattggtctaaaaacaatttttgatcaagacagtcaatttcgcataatcaatcagtctaaaattattgtttcaattcaaaaagaaaatagttattgtgagatattcggttagaatcatacaagaggtttttagaaatgtcaaaaattgttttaggaaccccagtaaagtagataaaattattaattattactaatagtggaaataccagtttcgtgaaataaagatattataaaatgcatgtaaagtttatgtaaattttataaataaaatagtattgacactattatatcatttgtgcaatatatttcgtcatgtgttgtatttaaaagttcctatggaataaatcccc

SEQ ID NO: 2852 - DNA, 2411 bp, Diabrotica virgifera
  SmartBlast Evalue=7E-45; Info=Integral membrane protein 2C n=1 Tax=Camponotus floridanus RepID=E2ALC7_9HYME
tttgttttggtcaagtcaagtcaaagtcgcaggcaggttcattatagttgcgaactagtgtattgattaccccaaatttgtgccagaaacatttttcaaaatgacgattttgactaaacctttctccgaaaagaaaggggagaaggacgtagctcctttggtgttcaacgaacaaaccgccccagccaatgctccagaagatgtcgaatcacaacaacgtagaatgccccgcattcttatttttccagccggtgcacgaccccacagggttacgacagttactaccctctgtctccttctgaccgctcttacagtcgtaggaataggtatcgtaggaggcaaaattctgtacgaccagtacatcagagtagcacataaacggtttgaaggatgggctcagattccaataaaaaatgaattgaaaagtgcatatgacgggacagaagtagatgatactgatgcgtttttagataaaatattaccaacagaaaattacaatgaaatgtggaacgatgacgatactgacttcaagcatattttcaaagattatttccaagaaaacttcgagattagcaacgacgaaaaatacgaaaaaatcgacgtgcctgatttcagagatggtcgcagcggccgtttcatccacgattttaataccaacacaactggcatcatcgacataactggacgtagatgcttcgtcatgccattgaaccgagacaatgttctaccaccaaagtcgttgtttgatttgattcacaagatgtgggaagggtattataaagtaaataccgatcttgttagaaaaaatatgagagttatcatcccaccaattacagataccaagaccattggtggatatattgcaagtgaatgtgatggattgcctatttataaattagaaaaatacgtcggtggagttgtaaagaggtctgccgataagcagtctgaacgattcgcccagtttgctggccaaggagtcacccagatagaaattaccaacatggatgaggtgtatgcctacgaaaaaagtttgattagccattaaattgtttaattatcgtattaacataaaattattatataaaaaattgaatagttgagaggcatcaccaaaatttctcttgcttttctcgtattttattgtttagttctatcgtaaaatacttgatacgatggttgtctttttagttttgcatatagccataaagacaaaaaaatatagacctgaatttattgtcttttggacagtgtgatcacttgcattgccttgaggtaggatgattcgccgttttgtgttgctttgtcggagtttcgcgataacttctggtaaacaagaggttatatacctatcagaagtaaccgttcttcgatcttctaaagcaattgttgccacatgaccagattttgacacaaaagttgcgaccgacactcttcgagaacggatcacttttgttggtttttcctcatcgtgaaacattcacacagcgaatttgcgttgattttacggttcgtaggagtaaatcaaagattcatcgctactaacaatactataaacgttttttgagcttcctttgttgaaccgttccaatgtttttcgacaccaatcgacgcgaacagctttttgctttttgaaattagcagtaccagcgggaaacagttgactggtgtgatgcttcattcccaaacaaagaaaccatttcatcgagacattgttgttgggatagtcctctcgaaaaattgtaagaacttattgctcgaaaatattctcggctaagatccatttttcgaccttgcgctaatttcaaaaattcactgtatctatacaactggttgtaacgcaatgaaactctggatttatgtcaacaaaagattgaggttacatttgtgtcggaaggttttatttgtggcgccctctatgtggcgctatatgcaaaactaaaaagacaaacgtcatattagttgtgtacaaatgatgtattacaaaagccctatgccatacctcggtgcttataacggacggtatatggtttaaaggaacttttgcatacatcatcttattttaatagacgaaaaattggtctaaaaacaatttttgatcaagacagtcaatttcgcataatcaatcagtctaaaattattgtttcaattcaaaaagaaaatagttattgtgagatattcggttagaatcatacaagaggtttttagaaatgtcaaaaattgttttaggaaccccagtaaagtagataaaattattaattattactaatagtggaaataccagtttcgtgaaataaagatattataaaatgcatgtaaagtttataaataaaatagtattgacactattatatcatttgtgcaatatatttcgtcatgtgttgtatttaaaagttcctatggaataaatcccc

SEQ ID NO: 2853 - DNA, 3052 bp, Diabrotica virgifera
  SmartBlast Evalue=0; Info=Lysosomal alpha-mannosidase n=1 Tax= Harpegnathos saltator RepID=E2B6B9_9HYME
ttgctttgcctgataaaataacaatcactggaaacattaacaaacacatgtcatatgaagcacctaaaaacatctttaatttttgaacaaagatctttaacatgggttcaactgtggtgaccatatgtttatttgctgtactttcttcaactgtttattgtaaagttactacagagcaggctgaaaacaaagtggtgtgtgccgtgtgtcatccattagatcaggaacgaatcaatatccatttggttccacattctcatgatgatgtgggctggttgaaatcttttgatgagtactactatggtttgaaagcacatgctactacaacacccatagcagtaaaaaatataataacgtccgtagtagaggagttgcagagaaataaggacagaagatatattcaagtggagacagctttcttttataaatggtggaaagagcaagacgaaactatgcgacgtgcgttcaagaatcttgtggataatggacagctcgaaatagttaatggaggatggagcatgaatgatgaagcttgtaccaattatcaatcaactatcgaccaatttactttgggattcaggataattgacgaagcccttggtaaatgtggaagatctagagtaggttggcaaatagatccatttggacacagtagagagcaatcttccattctagctcaaatgggttataatggaatgttctttagtagattggatcattcagatcgctcaataagagaaaaagaacaccggatgaattttgcttggcaaggaagtgctaatttagatggcagcattatatttggcagtatttttcctaatgcaggctacaattcaccagatggtttctgctgggatataagctgtcaaaatgatcaaattgtagatgacaacagtagcattcattttaacctagatgatcaggttagacgtttcacggatattttggatggatatgctaaattttattcccaagataacaagaatatgttggttgtaatgggtggagattttgagtaccaacaatctgcaatgtattttgataacatggataagctaattaagggttttaagaaccacgagaaatataatttgatttattctaccccatcttgttatatgaagagtgtgcatgatgataacgtaaatttaacactaaaaactgatgacttcttcccgtatagtagtagtaaccatggtttctgggctggttatttcacttcaaggaccaacttgaaaaggtttgaacgggttggaaataatatacttcaggcaactaaacaattatatgcgcttagttccaaaagaggttatgatgacaatctaacggatcttaaacaagctatgggcacgttacaacatcatgatgcaataactggtactgcaactcaagaagtaacaaatgattatgtacgaaccttaactgctgctattaaaaaaacggaggaaccactgactgaaataataggtgagttgcttgaggcaaagacagaattagactggaacctgagttcgtgccttcttaccaattttagtatatgtgccacttctcaaaatagtgataagtttgtggtcgccatctataacccactagcatggaatgcaacgcattacattagactgcccgtggaagagggaaaatatatcattaatggaccagatggactggaagagtatgatttgattccatctcttagtaaattcgatttcgtaaaaattgtaattgaaactcctagtgcctacgaacttgtctttgccgccagagatataaaaccactcggtttgaaaatgttccacatagagaaacaaaaacaagaactcacagaaccaaagaaggtaaacctgggacatctaactagttttcaattagatgacaaaactaaccttttaagcaacgtaactctaaacgggatatctttagcattaaagcaaaacttttattactatatatctagtacagggatggtcgaaaaggattattcaacgtctggagcctacgttttcacacctaccaaggatatacctgaagaacttcaaaatgtagaagtgattggctcgtataatggaaacttggttgaagaagtgcatcaaaagtggattactaatgtttctgatatttaccaaagtattaggtggtacaaaactgacaaccatatagagttggactggttggtgggaaatataaacacgaaaatcaattacactggtatagaagtcataagccgtttcgacgtatccgattttgataaccaaaacgtcttctacaccgactccaacggtcgtgaaactattaaaaggattaaaaaccaacgggctgactatttttataatattagttgggaaccagtctctagtaactactatccggttacttcaaaaatagttataaaagatcaagaaaaacatatgcagatggctattctcactgataggtctcagggaggttcaagtttggagaataatcaaatcgagttgatggtacacaggagaacaatatttgatgatggtaagggtgttggcgaacctctttctgagacagaattcaactcagatttaggaatgtatgccagaggtacacattatttgctcataggcgacacagaaaaaattaacaaagacggaaagacaacaactgggcaagaacgggtcttagctcaaaagaaacttcgccaaccgtggattggactgtcacctaccaaacaaacattcgatgaattgaaagaatccatgaagctgcagtactctgctctaaatgaagaccttccagaaaacgttaatatattgactctagaaccatggacaagcgggagctacctgttgagatttgagcatattttagagaaaaatgaagatcctaacttatcaaacaaatcgacatttagtatagagaacctgttaaaaggaataaatgttcacacaataactgagatgtcacttggagcaaatgtaccactaagtgaactcaatcagacacccagatatgtatggaatatcaatgatggaagtactcaatcagagatttcagatgttagtaaaagtgtaggtgctaatgg

SEQ ID NO: 2854 - DNA, 3078 bp, Diabrotica virgifera
  SmartBlast Evalue=0; Info=Lysosomal alpha-mannosidase n=1 Tax= Harpegnathos saltator RepID=E2B6B9_9HYME
atatacaaaaaacgttcagtaataatctcaattgcttggcctgataaaataacaattacgggaaatattaacaaaaatatatgaagtacctgaaaacatatttaatttaggaaaaaagatcttcaacatggagtcgattgtggtgactatatttttatttactatattttcttctactgcgttttgtaaagttactatagaacaagctgaaaacaaagtaggatgtgtagtgtgtcatccattagataaggaacgaattaatatccacttggttccacattcccatgacgatgtgggatggttgaaatcgtttgatgaatactactatggtttgaaagtatatgctactacaatgcccatagcagtaaaaaatataataacatccgtagtagaggagttacagagaaataaggacagaagatatatccaagtggagacagcgttcttttacaaatggtggaaagaacaagacgaaactatgcgacgtgcatttaagaatcttgtggatagtggacagctggaaatagttagtggaggatggagtatgaacgatgaagcttgtaccaattatcaatcaactatcgaccaatttactttgggattcaggataattgacgaagcccttggtaagtgtggaagatctagagtaggttggcaaattgatccatttggacacagtagagagcaagcttccattctagctcaaatgggttataatggaatgttctttagtagattggaccattcagatcgctcaataagggaacaagaacaccggatggattttgcttggcaaggaagtgctaatttagaccacagcattatatttggcagtatttttcctaatcaaggctacggtgcaccagatggtttctgttgggatataagctgtcaaaatgatcaaattgtagatgataacagtagcatccattttaatctagatgatcaggttagccgtttcgcggatattttagatgggtattctaaattttattccaatgataacaagaatatgttggttgtaatgggtggagattttcaataccaacaatctgcaatgtattttgataacatggataagctaataaagggttttaagaaccaccagaattacaatttgatttattctaccccatcttgttatatgaagagtgtgcacgataataacgtaaatttaacattaaaaactgatgacttcttcccgtacagtgataataatcatactttctgggctggttattttacttcaaggaccaatttgaaaaggtttgaaagggttggaaacaacatacttcaggcaactaaacaattatatgcgcttagttccaaaagaggttatgatgaaaatttaacggatcttaaacaagctctgggcacgttacaacatcatgatgcaataactggtactgcaactcaagaagtaaccaatgattatgtaagaaccttaacggctgctattaaaagaacggaggaaccactgactgaaataataagtgaattgcttgaggcaaagacagaattagagtggaacctgagttcgtgtcttcttaccaattttagtatatgtgccacttctcaaaatagtgataaatttgtggtcgccgtctataacccactagcatggaatgcaacgcattatataaggctgcctgtggaagatggaaaatatgtcattaatggaccagatggactggaagagtatgacttgattccatctcttagtacattcgacttcgtaaaaattgtaaatgaaactcctagtgcctacgaacttgtttttgccgccagaaatataaaaccacttggtttgaaaatcttccacatagagaaacaaaagcaagaactcacagaaccaaagcaagtgaacctgggacatctaactagctttcaattagatgacaaaactaaccttttaagcagcgtaactctaaacggaatatctttagcattaaatcaaaacttttattactatatatctagtacagggatggtcgaaaaggactactcaacatctggagcttacgtttttactcctaccaaggatgtacctgaagaacttcaaaatgtagaagtgattggctcgtataatggaaaattggttgaagaagtgcatcaaaagtggattactaatgtttctgatatttaccaaagtattaggtggtacaaaactgacaaccatatagagctggattggttggtgggaaatataaacacgaaaatcaattacactggtatagaagtcataagccgtttcgacttatccgattttgataaccaaaacgtcttctacaccgattccaatggtcgtgaaactattaaaaggattaaaaaccaacgggctgactattcttataatactagttgggaaccagtctctagtaactactatccggttacttcaaagatagttatcaaagatgaagaaaaacatattcagatggctattctcactgacaggtctcaaggaggttcaagcttggagaataatcaaatcgagttgatggtacacaggagaacaatatttgatgatggtaagggtgttggcgaacctctttctgagacagaattcaactcagatttaggaatgtatgccagaggtacacattatttgctcataggtgacacagaaaaaattaacaaagacggaaaaacaacaactggacaagaacgaatattagctcaaaagaaacttcgccaaccgtggattggactctctcctaccaaacaaacattcgatgaattgaaagaatccatgaagctgcagtactctgctctaaatgaagaccttccagaaaacgttaatatattgactctagaaccatggacaagcgggagctacctgttgagatttgagcatattttagagaaaaatgaagatcctaacttatcaaacaaatcgacatttagtatagagaacctgttaaaaggaataaatgttcacacaataactgagatgtcacttggagcaaatgtaccactaagtgaactcaatcagacacccagatatgtatggaatatcaatgatggaagtactcaatcagagatttcagatgttagtaaaagtgtaggtgctaatgg

SEQ ID NO: 2855 - DNA, 2060 bp, Diabrotica virgifera
  SmartBlast Evalue=1E-139; Info=Lysosomal alpha-mannosidase (Mannosidase alpha class 2b member 1) n=1 Tax=Aedes aegypti RepID=Q178W1_AEDAE
atatacaaaaaacgttcagtaataatctcaattgcttggcctgataaaataacaattacgggaaatattaacaaaaatatatgaagtacctgaaaacatatttaatttaggaaaaaagatcttcaacatggagtcgattgtggtgactatatttttatttactatattttcttctactgcgttttgtaaagttactatagaacaagctgaaaacaaagtaggatgtgtagtgtgtcatccattagataaggaacgaattaatatccacttggttccacattcccatgacgatgtgggatggttgaaatcgtttgatgaatactactatggtttgaaagtatatgctactacaatgcccatagcagtaaaaaatataataacatccgtagtagaggagttacagagaaataaggacagaagatatatccaagtggagacagcgttcttttacaaatggtggaaagaacaagacgaaactatgcgacgtgcatttaagaatcttgtggatagtggacagctggaaatagttagtggaggatggagtatgaacgatgaagcttgtaccaattatcaatcaactatcgaccaatttactttgggattcaggataattgacgaagcccttggtaagtgtggaagatctagagtaggttggcaaattgatccatttggacacagtagagagcaagcttccattctagctcaaatgggttataatggaatgttctttagtagattggaccattcagatcgctcaataagggaacaagaacaccggatggattttgcttggcaaggaagtgctaatttagaccacagcattatatttggcagtatttttcctaatcaaggctacggtgcaccagatggtttctgttgggatataagctgtcaaaatgatcaaattgtagatgataacagtagcatccattttaatctagatgatcaggttagccgtttcgcggatattttagatgggtattctaaattttattccaatgataacaagaatatgttggttgtaatgggtggagattttcaataccaacaatctgcaatgtattttgataacatggataagctaataaagggttttaagaaccaccagaattacaatttgatttattctaccccatcttgttatatgaagagtgtgcacgataataacgtaaatttaacattaaaaactgatgacttcttcccgtacagtgataataatcatactttctgggctggttattttacttcaaggaccaatttgaaaaggtttgaaagggttggaaacaacatacttcaggcaactaaacaattatatgcgcttagttccaaaagaggttatgatgaaaatttaacggatcttaaacaagctctgggcacgttacaacatcatgatgcaataactggtactgcaactcaagaagtaaccaatgattatgtaagaaccttaacggctgctattaaaagaacggaggaaccactgactgaaataataagtgaattgcttgaggcaaagacagaattagagtggaacctgagttcgtgtcttcttaccaattttagtatatgtgccacttctcaaaatagtgataaatttgtggtcgccgtctataacccactagcatggaatgcaacgcattatataaggctgcctgtggaagatggaaaatatatcattaatggaccagatggactggaagagtatgatttgagtccatctcttagtacattcgacttcgtaaaaattgtaaatgaaactcctagtgcctacgaacttgtctttgccgccagagatataaaaccacttggtttgaaaatcttccacatagagaaacaaaagaaagaactcacagaatcaaaggaagtgaacctgggacatctaactagttttcaattagatgacaaaactaaccttttaagcagcgtaactctaaacgggatatctttagcattaacgcaaaacttttattactatatatctagtacagggatggtcgaaaaggactattcaacatctggagcctacgtgtttactcctaccaaggatatacctgaagaacttc

SEQ ID NO: 2856 - DNA, 928 bp, Diabrotica virgifera
  SmartBlast Evalue=3E-71; Info=Lysosomal alpha-mannosidase (Mannosidase alpha class 2b member 1) n=1 Tax=Aedes aegypti RepID=Q178W1_AEDAE
ttgctttgcctgataaaataacaatcactggaaacattaacaaacacatgtcatatgaagcacctaaaaacatctttaatttttgaacaaagatctttaacatgggttcaactgtggtgaccatatgtttatttgctgtactttcttcaactgtttattgtaaagttactacagagcaggctgaaaacaaagtggtgtgtgccgtgtgtcatccattagatcaggaacgaatcaatatccatttggttccacattctcatgatgatgtgggctggttgaaatcttttgatgagtactactatggtttgaaagcacatgctactacaacacccatagcagtaaaaaatataataacgtccgtagtagaggagttgcagagaaataaggacagaagatatattcaagtggagacagctttcttttataaatggtggaaagagcaagacgaaactatgcgacgtgcgttcaagaatcttgtggataatggacagctcgaaatagttaatggaggatggagcatgaatgatgaagcttgtaccaattatcaatcaactatcgaccaatttactttgggattcaggataattgacgaagcccttggtaaatgtggaagatctagagtaggttggcaaatagatccatttgggcatagtagagagcaagcttccattctagctcaaatgggttataatggaatgttctttagtagattggaccattcagatcgctcaataaggaaagaagaacaccggatggattttgcttggcaaggaagcgccaatttagatgacagcattatatttggcagtatttttcctaatgcaggctacgatgcaccacagggcttctgctgggatataagctgtcaaaatgatcaaattgtagatgacaacagtagcatccattttaacctagaggatcaggttag

SEQ ID NO: 2857 - DNA, 3579 bp, Diabrotica virgifera
atattgattcttttgttgatattgattttagctttaagtttcattgtatgaaccgcggaaatctttccgaatcaaaagtttactaaacatatacatcctatgtttaactgcaatggtttcttaatgagttatctctatctgctcgtggaagcacagaaaaaaccagttcgaaggaagcactggaaaaaaacacatttttactcttgtttttggtatttggacgctacggcaacaaaatcggtgtcttcacctcttctaacaagaaagatatagaccacatactgaaaagaagttatatattttattaaaaacgacgttttccatatgtcttcactttaacaaactctttgatatcactcagcaattgtgtggtgtctttataatgttaatattgaaacgtttcaaaccgattatttacaattttcattaaaggtgctttaagaccaatttttagatgagatcagcgagtgttattctttcctacggcctattttgaagacgttttgtcgttgagtatcggcatcaatctcatttactttttaaatactactggtaacattttgggttctaacccctccgtaacgcagtggtaagggagcctacctttggatacaaaaattgttagttcgaatcccggctcgatgggaaatttttctttattaaaatatttaatacatgaaaataatttctatcctcgtgggatcgatactcacctgaaggaccgtagacgttctgatttaataagcgtgtctttgtaaaaacaatgaagtcgactttattaagtaacaaaacatcactcatcacacacactcaggcgtggatacagggggatcaacgggtccatggaccccctattgtatttagtctataagtattttttattatttattatttttttctgttactctaaactttaagccatcagtacaacactaaattacacgacaaccgcttccaaagaattgaaagaagccataaaatctaataaaacacccttctctgaaaaataatctgcaggcgcatttgtttgggtaccggtggaaccataaacaacggaaatatttttctcaattcaaagaataacaacaatgatattttaaaatgcaaatacattacactgggtataaaccttatctcatgaaaagtcacgtttcaaatttgcgatacaataaagatataaaaatttgtattttactagataatccatgcgtacctacccattgatggtagaaaggttaatctttatggtaaagaacgaccagtgagataatagtcgtgaattgtctatcaatccttttgataccgtaggtatctgggattatatagtgtattttatccttagagtaagtgtgactcgtatggctaaatctggaaaatataatatttgaggtaagtctgcccccccccctattatgaatttctagatccgcggctgcacacactacacattactcccttgagctggtgatagtaattacgtgacataaaggttccaaaccaaggccagaaaacaacacaaaactttgggttcatttacattgctaggttatttgtaaatttgtctagatcagttgtctcgaacggtaaaaggaagcgggtcaaaattgaatctactagatcctagatcatttccaaggttccctttatcaaattccgagtctttaaaatatataccagatttctgatctttggtttggaaaggtaatttattccctaggagcctaaagactcattgtgtgcagaccttcaatgggcaataaaaaagcaatactaacattaccaggatgagactaaactctataccttaggcacaaacttcaacattgggtaaagttcagatgatatttatttaataaaatacgttaacatcagcaaaaatgtttcgtaatagttaaaaccctgtggactgaccaattcacaaattaggaggacctcacaagaacaaagaatatttttttaaagacatttcttagtacaacccctcaattttaaataattacaacccaaccctgttcaatagtaccatttcaccccgcctatttcttaccctctctcctaaccagacagacaatatacttggattcgggacagaagaaattctctctcttctctatttttcgacggatcaagtcggtaccgctcatctcttgacggtccagccgttcttttgggctgaaacgaacaatagcaatacgtgcacgaacagtaattcgggagtgacgccatagacgacttcacaacagtcaaaacgcgaggcacgtggtacgggaacagtcaactcgtatgtgaccggcttcagtgttccggacaatgtttcacaacttggtaagacactttatctacataccaatattgtctgcataaaaccttattttatattcccttttgaacctagcaatcctagttacagtccacaatcatacaatcttgatattgtattcacaatctcacacatgtacaagctgaatcgtacagcttttccgcgctgatgcagataatataaagattgccatgatgatcgccaacattccataccataccatataccgtgggtaaggtaaaaactatactcagagtgataactgaataaatgcactgcatacaacttttgctttctggatcagttcatatatttatttagtaaacaacgtgaccagatgagcaaaagttcgatgataaccaatataatatgatgattttacgagcgtaagatgaaaattattcagcgataaaggccatatataccatattgtataggtcatgtgaatagttttctacatagtaaaaaaatgaacacttcaaataatagttatttcgtaaaagacgtgtttgtagtacattatgagagcaagatgaaaaatgtccggtaatgcctgttttaaagaaaacctaaacaggtagtagtcactgggtgttaaatcgggagtgtaggtgggagattgagttatccacataaaatatctcatacccaaatgatccgatggaaactttacattaattagctctatcttgaggaacattttcatacacagtattctgtctacacgctgaaacgggcgagcagcacatgagtgtttgttattttttattatttttttgtcaatgttcaatcagcaaatcttcaaatacaaaaacggataccatattacgagggtaagttttaggtactctattactcacacgggttgtgctcagctcaatcatgattgataaaatatttttaaaacttgtctttatgttctttttcaataatttcgtatacattttatttcgaatcttgttatgaatgaaatttaaaacatttgcggcatttttaaacgaccgagagcattttaactgctcaaagaaacgtaaaaattgtcgaatattgtcatactggcctttgtctttcttcttgatagatgtagatgtaaaggcgcatgcgtaaaagctgacagcaacttctctgcgtctgaattttcaaaattgaaatatctcgtgcatgtcatatgccaaacttaggtatgtatatccttaccagatatctaagagactcgtcaatattcagctcagcgaggtgctattgttggaggtgtcaaa

SEQ ID NO: 2858 - DNA, 2439 bp, Diabrotica virgifera
atattgattcttttgttgatattgattttagctttaagtttcattgtatgaaccgcggaaatctttccgaatcaaaagtttactaaacatatacatcctatgtttaactgcaatggtttcttaatgagttatctctatctgctcgtggaagcacagaaaaaaccagttcgaaggaagcactggaaaaaaacacatttttactcttgtttttggtatttggacgctacggcaacaaaatcggtgtcttcacctcttctaacaagaaagatatagaccacatactgaaaagaagttatatattttattaaaaacgacgttttccatatgtcttcactttaacaaactctttgatatcactcagcaattgtgtggtgtctttataatgttaatattgaaacgtttcaaaccgattatttacaattttcattaaaggtgctttaagaccaatttttagatgagatcagcgagtgttattctttcctacggcctattttgaagacgttttgtcgttgagtatcggcatcaatctcatttactttttaaatactactggtaacattttgggttctaacccctccgtaacgcagtggtaagggagcctacctttggatacaaaaattgttagttcgaatcccggctcgatgggaaatttttctttattaaaatatttaatacatgaaaataatttctatcctcgtgggatcgatactcacctgaaggaccgtagacgttctgatttaataagcgtgtctttgtaaaaacaatgaagtcgactttattaagtaacaaaacatcactcatcacacacactcaggcgtggatacagggggatcaacgggtccatggaccccctattgtatttagtctataagtattttttattatttattatttttttctgttactctaaactttaagccatcagtacaacactaaattacacgacaaccgcttccaaagaattgaaagaagccataaaatctaataaaacacccttctctgaaaaataatctgcaggcgcatttgtttgggtaccggtggaaccataaacaacggaaatatttttctcaattcaaagaataacaacaatgatattttaaaatgcaaatacattacactgggtataaaccttatctcatgaaaagtcacgtttcaaatttgcgatacaataaagatataaaaatttgtattttactagataatccatgcgtacctacccattgatggtagaaaggttaatctttatggtaaagaacgaccagtgagataatagtcgtgaattgtctatcaatccttttgataccgtaggtatctgggattatatagtgtattttatccttagagtaagtgtgactcgtatggctaaatctggaaaatataatgtcacaagctagtaaaagcaattcaagaattcttgaaaattgactaaactctgttgccaaatctatccgctaaaaaaaatttctaataattttgattttccgctagaaaaaaaaatcagcagattaatttgaaaattaagaattttgatttttcggtagaaaaaaaggagaattaggtagatcgatagatttgacagatgttcggtagatctactgaaaaatcggtagctgtggcatcactgtaatttgaggtaagtctggccccctattatgaatttctagatccgcgcctgtccatggcttctaaaaattggaagccagatgatgctgaagcgaagaagacaagagggaattcaaaaacttgtttgccaaaacaaaacatcatgtggtgccagatactaggtttattggcaatggttttctgctaatgcaagataatgcgagatcacccacggcaagcattgtaacacgtatccttttaagatgttggtacatattccaaaaatggattggtctgcttaaagtctagaccttaatcctattgagcatttatggggtcttcccaaaaggcgtgaaagacgtcatataccttctccaacaacatataaggagcttcgaatatctttcattgagtaatgggccacttttcccaaagggacatctaaaacgtgatcacttctatgctaaatcgaatgagaggtctggtgtcatccagaactgtggtggcaacaaacattttaaaaaagtgatacctgtcttttcttgacttttgacaattcttgttataactgtaactgtaatgatagatcgaaattttgaatgtctttattatattctcaaatttttcctttttcacatttgttactcaggataatgtcgggttacatactacaagagtaactgactcaatacacactagatttgatgtgagataaataagaaaaatataaagggataaaaaatcataaatttttgtgtgactcgttttctctgacttgcaatgcatattatatttgtttttcttgaagtgctgttattcgagagtaggctacatcta

SEQ ID NO: 2859 - DNA, 1828 bp, Diabrotica virgifera
atattgattcttttgttgatattgattttagctttaagtttcattgtatgaaccgcggaaatctttccgaatcaaaagtttactaaacatatacatcctatgtttaactgcaatggtttcttaatgagttatctctatctgctcgtggaagcacagaaaaaaccagttcgaaggaagcactggaaaaaaacacatttttactcttgtttttggtatttggacgctacggcaacaaaatcggtgtcttcacctcttctaacaagaaagatatagaccacatactgaaaagaagttatatattttattaaaaacgacgttttccatatgtcttcactttaacaaactctttgatatcactcagcaattgtgtggtgtctttataatgttaatattgaaacgtttcaaaccgattatttacaattttcattaaaggtgctttaagaccaatttttagatgagatcagcgagtgttattctttcctacggcctattttgaagacgttttgtcgttgagtatcggcatcaatctcatttactttttaaatactactggtaacattttgggttctaacccctccgtaacgcagtggtaagggagcctacctttggatacaaaaattgttagttcgaatcccggctcgatgggaaatttttctttattaaaatatttaatacatgaaaataatttctatcctcgtgggatcgatactcacctgaaggaccgtagacgttctgatttaataagcgtgtctttgtaaaaacaatgaagtcgactttattaagtaacaaaacatcactcatcacacacactcaggcgtggatacagggggatcaacgggtccatggaccccctattgtatttagtctataagtattttttattatttattatttttttctgttactctaaactttaagccatcagtacaacactaaattacacgacaaccgcttccaaagaattgaaagaagccataaaatctaataaaacacccttctctgaaaaataatctgcaggcgcatttgtttgggtaccggtggaaccataaacaacggaaatatttttctcaattcaaagaataacaacaatgatattttaaaatgcaaatacattacactgggtataaaccttatctcatgaaaagtcacgtttcaaatttgcgatacaataaagatataaaaatttgtattttactagataatccatgcgtacctacccattgatggtagaaaggttaatctttacacctacagttggtaaagagcgaccagtgagattaatagtcgtgaattattgtctttcaatcgatgtctatcaatccttttgataccgtaggtatctgggattatatagtgtattttatccttagagtttagagtaagtgtgagtcgtatggctaaatctggacatataatatttgaggtaagtctgccccgccccctattatgaatttctagatccgcgcctgcctgtagttatatctatccagaatcagtccagctaaatagctgataatatattaagtgagccaattgagcttgtatttttcaatacataattctctatacagggtgcttcattaataatcatccatataataaatggagaaaccccagcacaaaatacgaagattcaacctaaaacactcaaatcaaaatgtggctccttaccgagttgcagggtgctttcatttaaaaatctaaaaaccactcttgttcagaatttcaaaactattcgacgcatccccctcatacttggcaggtagtacaggtactgtacaaaccactaaattatgtcaaacaaaggtttccggccactaccagaggc

SEQ ID NO: 2860 - DNA, 959 bp, Diabrotica virgifera
cggcatagtaaaaaaaatgatttttttttaattctgaatgtgatctctttatccattttcagtaaaatatcaactttcatacattttcgttggctattacccatcccttcaggagttgacgtgttcgcaatagtaaaaatcctatatttataccctgtatagaatcattgactcctcaaacactttttatttcgtaaaagacgtgttcgtagtacagtattatgagagtaaaatgaaaaatgtccggtaatacctgttttaaagaaaacctaaacaggtagtagtcactgggtgttaaatcgggagtgtaggtgggagattgagttatccacataaaatatctcatacccaaatgatccgatggaaactttacattaattagctctatcttgaggaacattttcatacacagtattctgtctacacgctgaaacgggcgagcagcacatgagtgtttgttattttttattatttttttgtcaatgttcaatcagcaaatcttcaaatacaaaaacggataccatattacgagggtaagttttaggtactctattactcacacgggttgtgctcagctcaatcatgattgataaaatatttttaaaacttgtctttatgttctttttcaataatttcgtatacattttatttcgaatcttgttatgaatgaaatttaaaacatttgcggcatttttaaacgaccgagagcattttaactgctcaaagaaacgtaaaaattgtcgaatattgtcatactggcctttgtctttcttcttgatagatgtagatgtaaaggcgcatgcgtaaaagctgacagcaacttctctgcgtctgaattttcaaaattgaaatatctcgtgcatgtcatatgccaaacttaggtatgtatatccttaccagatatctaagagactcgtcaatattcagctcagcgaggtgctattgttggaggtgtcaaa

SEQ ID NO: 2861 - DNA, 3272 bp, Diabrotica virgifera
  SmartBlast Evalue=2E-62; Info=Lysosomal-associated transmembrane protein n=1 Tax=Aedes aegypti RepID=Q16R19_AEDAE
ctggtccaattgaagacgctgtagacggacatgctaagataaaggtgattctttataaatattatttcataattgtatctgattcgtcacctgctattcttatatattgtctagtattcgtttcggtagctttatttaaaagatatcgatgcggtttacagatttttgagtcagtacccaagtttcacatccatagctcacaaagctagtatatatggtgtacagaaaggggtacagtacgtctccttgcgacacttcagcctcaaacaatccgacttcagaaaggatgtgtcctatttgaaccctgactttcctattggctagatacgacgagagaatacttcattgccttgctatatctaagttgactcattttgtgaataagcccttcgtgccaccctttatcaaatgtcttactgacgtctaggaatacagagtatttacttcattctacagtgtatttcttctggttgaatcgttcttggatgtatttggtcaaccttagcacttgtagctcgctgaattgtgcttctggtatcgtacctattgtttcagagtcttcttttatctacctagctactattatcatttttgcaaccttgcttattgataatagtatcacagcataataaactagaccagcaaggacactctcctatgccgcctttgaagttgaaaagtacagagtcgccatttttcgcgtagtacaattcaggattcagtggtgatgtgatgtgttcgttcatcagtgttgccgatgtcactatatgaaattatattaagccactgctaaaatgatcagattttgcgaaaaattatgttaaaatttttgatcttagtagtttctaagggtagtaaaaatacattaagaaaacagttattttattcaacttgttaattcaaaaatacttgtaacaaaattatatgtaatatattattattatgctataataaaactacatctggaacgctttcaaataaaatttcctcgtcctcatcttgtgaaaatgaagactttatgtgattacaataatttaacattttttgtctgtttgaaaggagtaacattcttttactccttcacttttgctaacactaatttaatatttggccacagatcgcatttaaaagtcgacagacaacgatatctcagaaaacgggatttttttttatttctgcactgctgcagtatcagttgttgtactaactttattacccgtaagagattctttttgaatattttctggaatttctgcaaaagattacaatcgccattcatcgtcaatattttgtgtgatgtcccaattattgacataattcccacaggcatacgtataaaattatgttaaaaaatatttattatcagaatgtcataaaagttaagtaaatctgataattatgtacaaatcggcaacactatcgattatctacactgtctggtactacgaggaaaatagccgacgatctgcgcagtaatagtgcgcgaacttttctcccgccttctagtgtgtcactgctgttgcgttttctatgctgtgtctctactacatttagttcagtgaacaatttcatcaagtgaagacgatgatatgaatacgattgactaacgcacacacagcttgaatctttctattaaactgatctgtcgagtgtgttgagtcgcggcaacaagataccgacacataacttgaatgtctttttgcaggagcgttggtgggagtacggtgtatataaaccataggttaaacaataaagatacatcgtgaaacgtgacgacatcgtgtagctttgatgggacaatggccttacaccatgcaactgtcattaaagcactcttatttaacatgtatacccaaaataaaaatcacattgcaaagtgattgaaagttaaaacatttttttaatttatttatgagaactagctaaaaattggagcaaattgggtgatatataaaatcccaaaaagtgaattaaattttgaagatgatagatctagttttcgttttgtgggacgacagcaactttcttagtgggtgactcaacttttgggtcttgctcggtctccttctttggctcatcagcttcaactacgatttcaacggcttcggctttacctacttctggttgtaactcaggctcttcgggttgttgggatacgggagattctggtactacagcaggtgatacttcagcactagtttcgattacgggtgtgacattgacagcttcggcggaggtgctaggttcctgattttccgtagtgttctgtataatcctaaatctgtttggcgtctcctgtacgacttgcgtagtgcaaggatatggtggcggttgttcatccataacatcttgatatgagggaggcggagtctgtttcaaaacaccaaagacagcctcttgatcgcggaacaggttcggataatctggatcggtgataccacggtggtcggattcaggaatgatgtatcgaatggcgtttcggttagtttgttggcggaaggttaggtacttgtagcatctccaaactacactgatccagtatgccttccataacattgaaaataagaaggccagcaacactatgagcgtcaaaacttgcgggctcaactggagaagttcttggcgcagaggaaggttccagttttctgcgattaggcgatgagcagatctcaagtagcaaaagtatccagttgcggttagagctgtaatggcaaaatcgaaaagttgtaggcagaagaatgggaggacatgtgtcggttttcctttaattgttccgtagaccataagaagggtaatggataaggtacaaaccgtcattagggctcccatatcgatgtcagatgtgtatattttgcggctatcctgagttgtgggcaaatagtagggattgtcatcatcttttttgcttagaggggtaggcaagaaatcagtttgtaggtcttcgttcttttggagaatcacatgatgattgcgcatcatcagtgccagtactgtcagagccaaaatatgaagcaccaaatgccatatcccaaataggattgtagctgttcgaacatgcaaacaaaagcaagatgtccattctttatttctatctgaacccaatttcaggcgcatcgtaaacatttccttatccgatcaccagatacaatgtgcttatttgtatgaaattctaaaaagaatcaattattttgttgtatttgtataacctttttacgattaaaaataatttataaattattatctgctggattgttttcacttgacaaaaccag

SEQ ID NO: 2862 - DNA, 2888 bp, Diabrotica virgifera
  SmartBlast Evalue=1E-62; Info=Lysosomal-associated transmembrane protein n=1 Tax=Aedes aegypti RepID=Q16R19_AEDAE
gtacaggcttttcatttacactatcgtaacattaagtaaccaaataaatatctctacatataataacagtgcacgacagaatatgattctgtacgaattatagagtgactcaacgacagctgatggtccaagggccttgtctcaccaaatctgcgcaacagcgacatgatttcgatatggcacaggcaggcgacatggagttgtcctatcaaagcaacgtgtgtgttctacgtctctaccacagcataataaactagaccagcaaggacactccccgatgccgcctttgaagttgaaaagaacagagtcgccattttcgcgtacctaatacatctcagtggtgatgtgatgtgttcgttcatcagtgttgccgatgtcactatatgaaattatattaagccactgctaaaatgatcagattttgcgaaaaattatgttaaaatttttgatcttagtagtttctaagggtagtaaaaatacattaagaaaacagttattttattcaacttgttaattcaaaaatacttgtaacaaaattatatgtaatatattattattatgctataataaaactacatctggaacgctttcaaataaaatttcctcgtcctcatcttgtgaaaatgaagactttatgtgattacaataatttaacattttttgtctgtttgaaaggagtaacattcttttactccttcacttttgctaacactaatttaatatttggccacagatcgcatttaaaagtcgacagacaacgatatctcagaaaacgggatttttttttatttctgcactgctgcagtatcagttgttgtactaactttattacccgtaagagattctttttgaatattttctggaatttctgcaaaagattacaatcgccattcatcgtcaatattttgtgtgatgtcccaattattgacataattcccacaggcatacgtataaaattatgttaaaaaatatttattatcagaatgtcataaaagttaagtaaatctgataattatgtacaaatcggcaacactatcgattatctacactgtctggtactacgaggaaaatagccgacgatctgcgcagtaatagtgcgcgaacttttctcccgccttctagtgtgtcactgctgttgcgttttctatgctgtgtctctactacatttagttcagtgaacaatttcatcaagtgaagacgatgatatgaatacgattgactaacgcacacacagcttgaatctttctattaaactgatctgtcgagtgtgttgagtcgcggcaacaagataccgacacataacttgaatgtctttttgcaggagcgttggtgggagtacggtgtatataaaccataggttaaacaataaagatacatcgtgaaacgtgacgacatcgtgtagctttgatgggacaatggccttacaccatgcaactgtcattaaagcactcttatttaacatgtatacccaaaataaaaatcacattgcaaagtgattgaaagttaaaacatttttttaatttatttatgagaactagctaaaaattggagcaaattgggtgatatataaaatcccaaaaagtgaattaaattttgaagatgatagatctagttttcgttttgtgggacgacagcaactttcttagtgggtgactcaacttttgggtcttgctcggtctccttctttggctcatcagcttcaactacgatttcaacggcttcggctttacctacttctggttgtaactcaggctcttcgggttgttgggatacgggagattctggtactacagcaggtgatacttcagcactagtttcgattacgggtgtgacattgacagcttcggcggaggtgctaggttcctgattttccgtagtgttctgtataatcctaaatctgtttggcgtctcctgtacgacttgcgtagtgcaaggatatggtggcggttgttcatccataacatcttgatatgagggaggcggagtctgtttcaaaacaccaaagacagcctcttgatcgcggaacaggttcggataatctggatcggtgataccacggtggtcggattcaggaatgatgtatcgaatggcgtttcggttagtttgttggcggaaggttaggtacttgtagcatctccaaactacactgatccagtatgccttccataacattgaaaataagaaggccagcaacactatgagcgtcaaaacttgcgggctcaactggagaagttcttggcgcagaggaaggttccagttttctgcgattaggcgatgagcagatctcaagtagcaaaagtatccagttgcggttagagctgtaatggcaaaatcgaaaagttgtaggcagaagaatgggaggacatgtgtcggttttcctttaattgttccgtagaccataagaagggtaatggataaggtacaaaccgtcattagggctcccatatcgatgtcagatgtgtatattttgcggctatcctgagttgtgggcaaatagtagggattgtcatcatcttttttgcttagaggggtaggcaagaaatcagtttgtaggtcttcgttcttttggagaatcacatgatgattgcgcatcatcagtgccagtactgtcagagccaaaatatgaagcaccaaatgccatatcccaaataggattgtagctgttcgaacatgcaaacaaaagcaagatgtccattctttatttctatctgaacccaatttcaggcgcatcgtaaacatttccttatccgatcaccagatacaatgtgcttatttgtatgaaattctaaaaagaatcaattattttgttgtatttgtataacctttttacgattaaaaataatttataaattattatctgctggattgttttcacttgacaaaaccag

SEQ ID NO: 2863 - DNA, 1422 bp, Diabrotica virgifera
  SmartBlast Evalue=4E-10; Info=Pol protein (Fragment) n=1 Tax= Drosophila melanogaster RepID=Q18LA8_DROME
ctggtccaattgaagacgctgtagacggacatgctaagataaaggtgattctttataaatattatttcataattgtatctgattcgtcacctgctattcttatatattgtctagtattcgtttcggtagctttatttaaaagatatcgatgcggtttacagatttttgagtcagtacccaagtttcacatccatagctcacaaagctagtatatatggtgtacagaaaggggtacagtacgtctccttgcgacacttcagcctcaaacaatccgacttcagaaaggatgtgtcctatttgaaccctgactttcctattggctagatacgacgagagaatacttcattgccttgctatatctaagttgactcattttgtgaataagcccttcgtgccaccctttatcaaatgtcttactgacgtctaggaatacagagtatttacttcattctacagtgtatttcttctggttgaatcgttcttggatgtatttggtcaaccttagcacttgtagctcgctgaattgtgcttctggtatcgtacctattgtttcagagtcttcttttatctacctagctactattatcatttttgcaaccttgcttattgataatagtatcacagcataataaactagaccagcaaggacactctcctatgccgcctttgaagttgaaaagtacagagtcgccatttttcgcgtagtacatctcagtggtgatgtgatgtgttggttcatcagtgttgccgatgtcaccaactttattacccgtaagagattctttttgaataatttctggaatttatgcaaaagattaacaatacaatcgccattcatcgtcaatattttgtgttatgtcccaattattgacataattcccacaggcatacgtataaaattatgttaaaaaatatgaatgtcataaaagttaagtaaatctgataattatgtacaaatcggcaacactgtcgattttctacattgtctggtactacgcacaaaatggccgacgatctgcgcagtaatagtgcgcgaacttttcccgcctactagtgtgtcactgctgttgcgttttctatgctgtgacagaggtcattgtgaccagtgcaatgaagtgcatcattctccttaacagcgttgccacatttagtagatatctactgttttggtatatttttgatattatttaaaaaattctagtaggcaatgttttttattagatgtttggtatatttcaatattttgttatcactaaaataaaatttgctttttaatagtattcaccctatttctaaattaattttcagacattttgttacaatttcccaatgtcattaccgaaaataagattcaggacgtagatgatgataatagatggacagagaatagacaaggcgaaaacggcgggttcgttgggaaaa

SEQ ID NO: 2864 - DNA, 1072 bp, Diabrotica virgifera
acccaagtagcaatttgtcgacgcgacaacgttgtctaccgcgtggcaacgttttgttacaacgttgttattgcctagaagacgacccaattctgcactaatttggtggacgatttttgagttgtcttgacgttgcctaggcaaccttaagcgttgcataagacaactgaagcgactataaaaagtgcctgcgtgcaatggttgctcaaagagtcggactggttatgtttttttacctatataaaaagtaaactattttgacatcatatcaggtatttaaatttatataaatacataaataaggacttaaacaaaattacctgatgtgaaatttataaacgcatctcagattaccgtcaaatatggatattccaccttaaaaaaacacacgcgctcattttttatcacctttttaacaaaaaatatgtaaatttaaaaaatctaattttaatataaaagccagaatttatgttaaagatgttttgtataaatttaatgtattgatggtgcttttaaaggtattagaaaatgcctgcattttttatattttgtgtttttattttctttacatcccaaaaaaaccaaaatggtgcattaaacaacattaccaatattacttaaaatataccttattaccaaccatagacggatgagacaaccgagaagtccaatcgccgaccaaacacggcctggaccgactatcccaaccactttagaacgcactctcttattgggtgacagaggtcatgtgaccagtgcaatgaagtgcatcattctccttaacagcgttgccacatttagtagatatctactgttttggtatatttttgatattatttaaaaaattctagtaggcaatgttttttattagatgtttggtatatttcaatattttgttatcactaaaataaaatttgctttttaatagtattcaccctatttctaaattaattttcagacattttgttacaatttcccaatgtcattaccgaaaataagattcaggacgtagatgatgataatagatggacagagaatagacaaggcgaaaacggcgggttcgttgggaaaa

SEQ ID NO: 2865 - DNA, 2628 bp, Diabrotica virgifera
  SmartBlast Evalue=6E-18; Info=Reverse transcriptase n=2 Tax= Ostrinia nubilalis RepID=A4KWG0_OSTNU
aagccactgcgtattcctgtccaatcgcgaatgttcttcagacatgaaaccttctttttctttagcccatttctatccaattttggcctaggccttccccatatctgtctgtccttggctgcgcttttccagtgagttcctgcagcttttacaatatcgttcttccatggcatctgaggtcttcctgtccacggtctccagtttggtatttcagcattccatcttttatcttcctgtctcggatctttccatttttctttgagttatttctattttgtttatgttgacctttgttaatgtccatatttctgagccatacgtcagaacaggaaggatgcactgatcaaatacacggatttttactgttttttggtactgttgtatctgtgtggtttttagtatccatcttaattttccaaaaacgctgtatgttatttacgtttgtatttgtcatgatttttgttttactcatgttcatttttaaccctatcttttctaacgcttgtgctagttgagtcaacattgtggctagttcttggttggttgtaataagaacatcatcatgacatctgcttagttcaaattcctctgcagccctagatttacctttcatgataagccgaatgagcctgtactattagtctcctctaagaacatgccctcgttaggaatttttttcttattttaacagttctcaataaccaacgaactttatttaacacagcttcgttggtatggatgcctctccaggatatttgggtcattcttccatgcaacctcatctcaaatgcctctaggcgaatgatcgtatcaactttcagagtccaagtctatgtgtcgtgtagtaacactgaccaaatatagtattgcagtgaggttggcgactaacatacatgcttgtcttagaagcattcatttttagaactatttctcttctacaaattgcaaaattagtaattaaaaacaatttagacaaagtcgagtactcggagatgaatgcaacacctaccaaccggaatacgccacgtgttacaagtaagccaggtttcgacaaatcaagacgaatctgggcaacactcaccaccagaataaggacgaactgtagcaggtgctccaggtttgtaaaaagatatttaaaatcgaaaaagttataaagaatagttaaccctcgcaggaccaaccttttagtagaaacagcggggaccaaggagggtcaataaatgtccacacatagattaatcaaaaacgtgcttctttatttaaactaatttaaaaataacactttatattattcctagacgttaatggaacagttaaaagatacgaatttataatttacccggagtcttcggcttcagtggaattggcatcatcgtaggatacagaaacatttttgacttcttgctgtgcttaccgcatacatacttgcattttgaacaaactatggttgtttttgcccacttattggcctttttttttcttttagattttgctaatttgacacatgaatgatatcgtccctttccattttgggatggtgatgaaggtattcaaggggattatttatagtccactgtcaagtttttataaaagtatgaggaaatgaattaaattatagaaatgctaattataccatctaatagggcagtagtacgccgacaactactaattatttgagatttttaggaataaaggaatttagaaaatcggatgtaatgcaatgttgtggatactttttaacttttaaccctcattggtccttctagggctagggttaatatcaacaattgcatcaaaagtatattacaactctgtgcaacagtaccaatcgactatatttttctttctcatacagagtcaaataataaaacatatcaaaacttcattttttagtaaaggttatggcagtgctacattatttcttttggaataaacaccctcaaaattgcagtggataagatataaaattcatacataaattaaggctttacatcgatatataatactttttaaacagttcaatattataagtcgttcaatatttagatgcattggcaaacaaactgcgtagttaaatgcatgtagtatatcccatagattataaatgtagtaataataataaactatataaatatattatatatatagaactgacttacaaaattctttgtatttatcgactgtggaggtatgttgtataacactatggaatggtgttgaattatcggaaattgtgggctgtgtcttagattgaaactatatttatttctgttaagttcgatatttcgatgataatttatttttcatcttcctcaggaacaaactacacaattaattaacaattagatacaattataatacatattacaataatatgacttacgaaatgttgtaaatctattctaatatacagcaatgtggcttcgaaccacacatcgttttcacgagtgctaagcgtacactgagacgaataattttttcaagatgtgttaaagagtcaacaagtctattatcgaacagctgttaagtatttttgctatttttagaattgtaaaatattgcaataaatatcactcaaactgctggtatctgttttgtaattaattgaattcttagttttattgatgt

SEQ ID NO: 2866 - DNA, 2026 bp, Diabrotica virgifera
  SmartBlast Evalue=5E-18; Info=Reverse transcriptase n=2 Tax= Ostrinia nubilalis RepID=A4KWG0_OSTNU
aagccactgcgtattcctgtccaatcgcgaatgttcttcagacatgaaaccttctttttctttagcccatttctatccaattttggcctaggccttccccatatctgtctgtccttggctgcgcttttccagtgagttcctgcagcttttacaatatcgttcttccatggcatctgaggtcttcctgtccacggtctccagtttggtatttcagcattccatcttttatcttcctgtctcggatctttccatttttctttgagttatttctattttgtttatgttgacctttgttaatgtccatatttctgagccatacgtcagaacaggaaggatgcactgatcaaatacacggatttttactgttttttggtactgttgtatctgtgtggtttttagtatccatcttaattttccaaaaacgctgtatgttatttacgtttgtatttgtcatgatttttgttttactcatgttcatttttaaccctatcttttctaacgcttgtgctagttgagtcaacattgtggctagttcttggttggttgtaataagaacatcatcatgacatctgcttagttcaaattcctctgcagccctagatttacctttcatgataagccgaatgagcctgtactattagtctcctctaagaacatgccctcgttaggaatttttttcttattttaacagttctcaataaccaacgaactttatttaacacagcttcgttggtatggatgcctctccaggatatttgggtcattcttccatgcaacctcatctcaaatgcctctaggcgaatgatcgtatcaactttcagagtccaagtctatgtgtcgtgtagtaacactgaccaaatatagtattgcagtgaggttggcgactaacatacatgcttgtcttagaagcattcatttttagaactatttctcttctacaaattgcaaaattagtaattaaaaacaatttagacaaagtcgagtactcggagatgaatgcaacacctaccaaccggaatacgccacgtgttacaagtaagccaggtttcgacaaatcaagacgaatctgggcaacactcaccaccagaataaggacgaactgtagcaggtgctccaggtttgtaaaaagatatttaaaatcgaaaaagttataaagaatagttaaccctcgcaggaccaaccttttagtagaaacagcggggaccaaggagggtcaataaatgtccacacatagattaatcaaaaacgtgcttctttatttaaactaatttaaaaataacactttatattattcctagacgttaatggaacagttaaaagatacgaatttataatttacccggagtcttcggcttcagtggaattggcatcatcgtaggatacagaaacatttttgacttcttgctgtgcttaccgcatacatacttgcattttgaacaaactatggttgtttttgcccacttattggcctttttttttcttttagattttgctaatttgacacatgaatgatatcgtccctttccattttgggatggtgatgtaggttttcaaggggattatttcgacacccccatcgaacaaggttgtaactcaagttacatctattttcagatttcaacacaggcgaattcagcaaaaaaattgcgcacacgtcaatataaacgacatagtttaattctcaatagtttggctaatactccattgaaaaaagttgtattttaacttacgtgtgccattttagcgtgaaaaaggcagtaacactggatactcccctatgttaaatatttactttctttatacttgacgattaacaaggttgttaaatgagttacaactttgttgcacgtatgtttaatttattaagtatttaaacatatggtgtatctcataagtcaatttatcgaaatgaaaataaaaaaaggatttaaggacttttttccattttgatagttgcggtggaatagaatagttgttggtacatacttctatatagtgaaacagtgtaatattaacattacacatg

SEQ ID NO: 2867 - DNA, 2015 bp, Diabrotica virgifera
  SmartBlast Evalue=5E-18; Info=Reverse transcriptase n=2 Tax= Ostrinia nubilalis RepID=A4KWG0_OSTNU
aagccactgcgtattcctgtccaatcgcgaatgttcttcagacatgaaaccttctttttctttagcccatttctatccaattttggcctaggccttccccatatctgtctgtccttggctgcgcttttccagtgagttcctgcagcttttacaatatcgttcttccatggcatctgaggtcttcctgtccacggtctccagtttggtatttcagcattccatcttttatcttcctgtctcggatctttccatttttctttgagttatttctattttgtttatgttgacctttgttaatgtccatatttctgagccatacgtcagaacaggaaggatgcactgatcaaatacacggatttttactgttttttggtactgttgtatctgtgtggtttttagtatccatcttaattttccaaaaacgctgtatgttatttacgtttgtatttgtcatgatttttgttttactcatgttcatttttaaccctatcttttctaacgcttgtgctagttgagtcaacattgtggctagttcttggttggttgtaataagaacatcatcatgacatctgcttagttcaaattcctctgcagccctagatttacctttcatgataagccgaatgagcctgtactattagtctcctctaagaacatgccctcgttaggaatttttttcttattttaacagttctcaataaccaacgaactttatttaacacagcttcgttggtatggatgcctctccaggatatttgggtcattcttccatgcaacctcatctcaaatgcctctaggcgaatgatcgtatcaactttcagagtccaagtctatgtgtcgtgtagtaacactgaccaaatatagtattgcagtgaggttggcgactaacatacatgcttgtcttagaagcattcatttttagaactatttctcttctacaaattgcaaaattagtaattaaaaacaatttagacaaagtcgagtactcggagatgaatgcaacacctaccaaccggaatacgccacgtgttacaagtaagccaggtttcgacaaatcaagacgaatctgggcaacactcaccaccagaataaggacgaactgtagcaggtgctccaggtttgtaaaaagatatttaaaatcgaaaaagttataaagaatagttaaccctcgcaggaccaaccttttagtagaaacagcggggaccaaggagggtcaataaatgtccacacatagattaatcaaaaacgtgcttctttatttaaactaatttaaaaataacactttatattattcctagacgttaatggaacagttaaaagatacgaatttataatttacccggagtcttcggcttcagtggaattggcatcatcgtaggatacagaaacatttttgacttcttgctgtgcttaccgcatacatacttgcattttgaacaaactatggttgtttttgcccacttattggcctttttttttcttttagattttgctaatttgacacatgaatgatatcgtccctttccattttgggatggtgatgaaggtattcaaggggattatttatagtccactgtcaagtttttataaaagtatgaggaaatgaattaaattatagaaatgctaattataccatctaatagggcagtagtacgccgacaactactaattatttgagatttttaggaataaaggaatttagaaaatcggatgtaatgcaatgttgtggatactttttaacttttaaccctccttggtccttctagggttaacctttgtgtctatacccaggtacctgggtatcattggtaactgttttatctaaatcattggcgatagtataaatgtttttattccagcttcaagttattcctaaaattagtcagaacgaagagatttataataaaatccaaagaaaaaaatgcatgcaaaaaatgcaaataaatgcatattaaaattacctgtcaaagtttttacaccattacgtccacacccgtggcacccgggtaacacta

SEQ ID NO: 2868 - DNA, 1542 bp, Diabrotica virgifera
  SmartBlast Evalue=3E-18; Info=Reverse transcriptase n=2 Tax= Ostrinia nubilalis RepID=A4KWG0_OSTNU
aagccactgcgtattcctgtccaatcgcgaatgttcttcagacatgaaaccttctttttctttagcccatttctatccaattttggcctaggccttccccatatctgtctgtccttggctgcgcttttccagtgagttcctgcagcttttacaatatcgttcttccatggcatctgaggtcttcctgtccacggtctccagtttggtatttcagcattccatcttttatcttcctgtctcggatctttccatttttctttgagttatttctattttgtttatgttgacctttgttaatgtccatatttctgagccatacgtcagaacaggaaggatgcactgatcaaatacacggatttttactgttttttggtactgttgtatctgtgtggtttttagtatccatcttaattttccaaaaacgctgtatgttatttacgtttgtatttgtcatgatttttgttttactcatgttcatttttaaccctatcttttctaacgcttgtgctagttgagtcaacattgtggctagttcttggttggttgtaataagaacatcatcatgacatctgcttagttcaaattcctctgcagccctagatttacctttcatgataagccgaatgagcctgtactattagtctcctctaagaacatgccctcgttaggaatttttttcttattttaacagttctcaataaccaacgaactttatttaacacagcttcgttggtatggatgcctctccaggatatttgggtcattcttccatgcaacctcatctcaaatgcctctaggcgaatgatcgtatcaactttcagagtccaagtctatgtgtcgtgtagtaacactgaccaaatatagtattgcagtgaggttggcgactaacatacatgcttgtcttagaagcattcatttttagaactatttctcttctacaaattgcaaaattagtaattaaaaacaatttagacaaagtcgagtactcggagatgaatgcaacacctaccaaccggaatacgccacgtgttacaagtaagccaggtttcgacaaatcaagacgaatctgggcaacactcaccaccagaataaggacgaactgtagcaggtgctccaggtttgtaaaaagatatttaaaatcgaaaaagttataaagaatagttaaccctcgcaggaccaaccttttagtagaaacagcggggaccaaggagggtcaataaatgtccttcttcttctttaggtgccgtgtatgtattcagacgttggccgtcatcatgtttacaatttcttgaaatctctctatcggctgctgcgcgaaataattcttctactgtgcacaccattgtctaatattacgcagccatgaaagtttctttcgatcaatccatctctttccctccacttttccttgtattataaggcgaagcagatggtatttagatcctctaattatatggccgaagtattctgtttttctcctctttatgatgcttatgagcagacgttctgaattcagcatttgaagaacatcttcattggaag

SEQ ID NO: 2869 - DNA, 3214 bp, Diabrotica virgifera
  SmartBlast Evalue=2E-12; Info=Putative outer membrane adhesin like proteiin n=1 Tax=Shewanella frigidimarina NCIMB 400 RepID= Q088L7_SHEFN
atctgcgataaacagtatcgagtgactacctctcgataatatttggataaatagaatagataaattatttgatagtagataccgtcataaaatagtagttattgtttttggaactgagtgacatgaaggcttagtgatgcggttgaggacaataatctttttgttttgtgttttgggattatccaatgcgcagaataataataatggaaattgttcaatcgaaggttttgtacccagtgattggacggtaatttttaaacctgacaccatcgttaccgacgaagcggcagatgaggttatctttagcggagcttttactggaaagttggacgacttgtcatgtacgcctagcgcaacgggcaaaagcaattatgtggattttgaagcaaaagacggaaaatttacaataaaaactgctgcagatattgtaaagttggatgaggaaactgctcaaactagctcaccattttatctcaattatgtgtgtactatgaactgcgatgctggacagagtcaattgggtatagcagtcaaaatagctgattataataatcacaagccagaattttctcaagcaacttacacatacaccgttgcttcaccaattatgcctcatacagactttactttagaaggggatgtcatcaaagccaccgatttggatttttccaataataatattatttttacagtggatcccccacatttcgttattgatacaacagcagacagtactgacagtaataaaaaaacgtttgtggccaaaattagagctaaaagtgtagtccaactgaaggaaacgaccaccacgtatactttgactgctacagatgtaggtacggatccaggacctcttagccaaactgctagtcttacatttacaatcgacgcagataacagtttggatattccatctttcgaataccaggacagtcagactgactactcatttcagtaccaaagcgataatacattgaaaccgttatctggatctattaagttgaatacccaacattcattaactacgaaaaactttgaacttctcggtgacatgaaagggaaattttctattgaatacgattcaaacgcaaaggaaatcactttaagcgtccaagaggaaataaaagatcctaccgtaacattaacagttcttacactcaatatcaataatggtcaagtgactgtttctactccagttattatttactttacgaccagttctatcttcaaattcgataagcatatatacactggaagttacgatgacgcaaaaaatcaagtcaatttggatgagtcgattacaataaccagtagtggcaaatctgatgttaatattgaaattgctggagatttggcaaagtatttcagtgcagtcaaaggcactgatgccggcacttggtctattaaagtagctacccccgctccaacagcagacgaactaaaaggatatacatatcttaatctggtactgactgctactgaagacgacatcgacggcaaagacacggcaagccttttggtcaaacttccttcccatgtactgcagttttccaaaattttatatgaagctacttacaatgaagataatactgtaaccatgtctgataagattacgtttacgacaaatgaagatacagtagtagatataaccgtcgatacaaattatgagaaatatttcgtcgtaagtcaggaggacaagagctatataataaaatccacaactacaccgctaccggatgagattctctccaagcagacagaaattgcagtcgtcataacagcaaaagatggctaccagaatacccagcaagcagttgtcaagatcaccctgccagaaattaacaatgaaaaggcgccgaagtttaccaaatcctattataaatctgaatacaagcaagaccaaacagataattacttggacttcacggatcctttaacttttgataacgtggatgatccatcgaaagttaaaattagtctagatgcatacagtgacaattttgaaatagtttatgataaaagtcaaaagaaatggcgagtgcatataaaagatccgttaacatctaaggacttcgattcttggacagaaatacttgtgataatggaagctacagaatcaggagtcactaaaacaggaaaatctgtattggtaatagaccttacaactgacgtcggtcctcagttcgttgaattgtattattcagctgaatataaacaaaatgacacgaaatatatagattttcatacagctcttgcttttgaaaaagaggttgatccaaaaaatttacaaataacacttgatacttacaccaacaatttcgcagtgacttatgatacagctcaaaaggaatggcgcatacaaataaaatctcccctgagctctaaagattttgagtctttatcagaaatcgttttgactatggaagcgactcagtcaggagtcaataaaacaggaaaagctgtattggtaatagaacttataactgaaactggtcctgagttttccaaattgtactatgcgtctgaatacaaacaataccaaaaagactatatcgattttaaagaagatgttacttttaccgaaaatattgatccaaacaatttaaagataacaattgattcttacacggataattttgcagtggtttacgatactgctcaaacaaaatggcggatagaaattaaattgcctctaaattctcaagatttcgagtctttatcagaaattgttcttactatggaagctacagaaataggcgtcaccaaaacaggaaaatctgtattggttatcgaactcacaacagacgcaacagaagtgggaccacaatttaatgaattattttatcaatgcgaatataaacaaggccaaattgattatttagactttggaacagatattggttttaccgaaaatattgatccaaaaaatttaaaaataattctaaactcttatactgacaatttcgcggtaacttatgataaagatgaaaagaaatggcgtatacaaataacagtccccctggattctaacgtttttgactctttatcagaaatcatactgaccatggaagctatagaaacgggcgttactaaatcaggaaaagctatgttggttatcgaactcaaaacagatgcaagagaagtggggccacaatttaaggacttatactaccaatccgaatataaacaaggcaaaactgattatatagatttt

SEQ ID NO: 2870 - DNA, 2251 bp, Diabrotica virgifera
atctgcgataaacagtatcgagtgactacctctcgataatatttggataaatagaatagataaattatttgatagtagataccgtcataaaatagtagttattgtttttggaactgagtgacatgaaggcttagtgatgcggttgaggacaataatctttttgttttgtgttttgggattatccaatgcgcagaataataataatggaaattgttcaatcgaaggttttgtacccagtgattggacggtaatttttaaacctgacaccatcgttaccgacgaagcggcagatgaggttatctttagcggagcttttactggaaagttggacgacttgtcatgtacgcctagcgcaacgggcaaaagcaattatgtggattttgaagcaaaagacggaaaatttacaataaaaactgctgcagatattgtaaagttggatgaggaaactgctcaaactagctcaccattttatctcaattatgtgtgtactatgaactgcgatgctggacagagtcaattgggtatagcagtcaaaatagctgattataataatcacaagccagaattttctcaagcaacttacacatacaccgttgcttcaccaattatgcctcatacagactttactttagaaggggatgtcatcaaagccaccgatttggatttttccaataataatattatttttacagtggatcccccacatttcgttattgatacaacagcagacagtactgacagtaataaaaaaacgtttgtggccaaaattagagctaaaagtgtagtccaactgaaggaaacgaccaccacgtatactttgactgctacagatgtaggtacggatccaggacctcttagccaaactgctagtcttacatttacaatcgacgcagataacagtttggatattccatctttcgaataccaggacagtcagactgactactcatttcagtaccaaagcgataatacattgaaaccgttatctggatctattaagttgaatacccaacattcattaactacgaaaaactttgaacttctcggtgacatgaaagggaaattttctattgaatacgattcaaacgcaaaggaaatcactttaagcgtccaagaggaaataaaagatcctaccgtaacattaacagttcttacactcaatatcaataatggtcaagtgactgtttctactccagttattatttactttacgaccagttctatcttcaaattcgataagcatatatacactggaagttacgatgacgcaaaaaatcaagtcaatttggatgagtcgattacaataaccagtagtggcaaatctgatgttaatattgaaattgctggagatttggcaaagtatttcagtgcagtcaaaggcactgatgccggcacttggtctattaaagtagctacccccgctccaacagcagacgaactaaaaggatatacatatcttaatctggtactgactgctactgaagacgacatcgacggcaaagacacggcaagccttttggtcaaacttccttcccatgtactgcagttttccaaaattttatatgaagctacttacaatgaagataatactgtaaccatgtctgataagattacgtttacgacaaatgaagatacagtagtagatataaccgtcgatacaaattatgagaaatatttcgtcgtaagtcaggaggacaagagctatataataaaatccacaactacaccgctaccggatgagattctctccaagcagacagaaattgcagtcgtcataacagcaaaagatggctaccagaatacccagcaagcagttgtcaagatcaccctgccagaaattaacaatgaaaaggcgccgaagtttaccaaatcctattataaatctgaatacaagcaagaccaaacagataattacttggacttcacggatcctttaacttttgataacgtggatgatccatcgaaagttaaaattagtctagatgcttatactgacaatttcgcggtaacttatgataaagatgaaaagaaatggcgtatacaaataacagtccccctggattctaacgtttttgactctttatcagaaatcatactgaccatggaagctatagaaacgggcgttactaaatcaggaaaagctatgttggttatcgaactcaaaacagatgcaagagaagtggggccacaatttaaggacttatactaccaatccgaatataaacaaggcaaaactgattatatagatttt

SEQ ID NO: 2871 - DNA, 1409 bp, Diabrotica virgifera
atcgaactcacaacagacgcaacaagaagtgggaccacaatttaaagacttatactatcaatctgaatataaacaaagccaaactaattatttagactttggaacagatgttggttttaccgaaaatattgatccaaaattttataacaatagttctagactcttataccgacaatttcgcggtaatttatgataaagatgaaaagaaatggcgtatacaaataacagcccccctggattctaacgtttttgattctttatcagaaatcatattgaccatggaagctatagaaacgggcgttactaaatcaggaaaagctatattggttatcgaactcaaaacagacgcaacagattcagggccacaatttaaggacttgtactaccaatccgaatataaacaaggccaaactgattatatagattttaaaagagatgttgcttttgaagaagacattgatccaaagaatataaaaatatcaatggactcttatacggacaattttgcaatagtttatgatacagctcaaaacaaatggcgcattcaaataaactcccctctgagttctaaagattttgaatctctatcagaaatcgtcctaacaatggaagctacagaatcaggggtcaccaaaactggaaaatctgtgttgattatcgaactcaaaactgatgctacagaagtggtaccacaatttaaggacttatattatgaagctgagtacaaacaaggccaaactgattatatagattttaaatcacctgtggcatttaaagcagacaatgatccaaataatctaaaaatatcaatagattcttatactaataacttcgcagtaacttatgatgcaactaacaagaaatggcgaatacaaataaaatctcccctgacttctaaagatttcgagtctttatcagaaatcgttataactatggaagctaccgaatcaggagttaccaaaacaggaaaatctgtcttagttatcgaactcaaaacagacgcaacagaagtgggaccacaatttaatgaattattttatcaatgcgaatataaacaaggccaaattgattatttagactttggaacagatattggttttaccgaaaatattgatccaaaaaatttaaaaataattctaaactcttatactgacaatttcgcggtaacttatgataaagatgaaaagaaatggcgtatacaaataacagtccccctggattctaacgtttttgactctttatcagaaatcatactgaccatggaagctatagaaacgggcgttactaaatcaggaaaagctatgttggttatcgaactcaaaacagatgcaagagaagtggggccacaatttaaggacttatactaccaatccgaatataaacaaggcaaaactgattatatagatttt

SEQ ID NO: 2872 - DNA, 1175 bp, Diabrotica virgifera
tggattctaacgtttttgactctttatcagaaatcatactgaccatggaagctatagaaacgggcgttactaaatcaggaaaagctatgttggttatcgaactcaaaacagatgcaagagaagtggggccacaatttaaggacttatactaccaatccgaatataaacaaggcaaaactgattatatagattttaaaacagatgttgcttttgaagaagacattgatccaaagaatataaaaatatcaatggactcttatacggacaattttgcaatagtttatgatacagctcaaaacaaatggcgcattcaaataaactcccctctgagttctaaagattttgaatctctatcagaaatcgtcctaacaatggaagctacagaatcaggggtcaccaaaactggaaaatctgtgttgattatcgaactcaaaactgatgctacagaagtggtaccacaatttaaggacttatattatgaagctgagtacaaacaaggccaaactgattatatagattttaaatcacctgtggcatttaaagcagacaatgatccaaataatctaaaaatatcaatagattcttatactaataacttcgcagtaacttatgatgcaactaacaagaaatggcgaatacaaataaaatctcccctgacttctaaagatttcgagtctttatcagaaatcgttataactatggaagctaccgaatcaggagttaccaaaacaggaaaatctgtcttagttatcgaactcaaaacagacgcaacagaagtgggaccacaatttaatgaattattttatcaatgcgaatataaacaaggccaaattgattatttagactttggaacagatattggttttaccgaaaatattgatccaaaaaatttaaaaataattctaaactcttatactgacaatttcgcggtaacttatgataaagatgaaaagaaatggcgtatacaaataacagtccccctggattctaacgtttttgactctttatcagaaatcatactgaccatggaagctatagaaacgggcgttactaaatcaggaaaagctatgttggttatcgaactcaaaacagatgcaagagaagtggggccacaatttaaggacttatactaccaatccgaatataaacaaggcaaaactgattatatagatttt

SEQ ID NO: 2873 - DNA, 3017 bp, Diabrotica virgifera
  SmartBlast Evalue=1E-111; Info=LIM domain and actin-binding protein 1 n=1 Tax=Harpegnathos saltator RepID=E2C1L4_9HYME
gtggtacgaagtattggtatagtgcaggtgaaaatatagtgtgcttgaatttaaaatttttcacaattctgaaacttcttcataaaaatataaaattgatctaaaaaatattaaaagtaaaacaacaaggcattaaaaatggactttaaaaaaacacttggtaactacaagtactagtagaataaaatctacaaaaaaacatatattggttaaagcggatatttagggcgctaaaatttatagtaattttaatagcgaagtgccaaccttgcaaataaaggttaccaacgttcaggcatgtatgtacagtccaggaagcaataaaactataaaatttacggtaaaattaagtggaaatactacacaaaacgaactagatttttgcaataaaaattgttgcttgcctaattatatctagctgcaaaccagttgcagatctacgaggggggaaataggggaaagtcctccccacaagaagatccaaaatttatgaaacttaaaccatagatagacaaatttaattcaataaaacagctagttagcaaaattaagaaaaccttattgcataaatttattatttatatcaagatatttcttatgtctttttttttattttctgtttatcttttttatggcttttggttggtgtttcattggaagtccccactccttctaggcaagttcccccaaagcaaatttctagatctgctatgccgctaaccatgaatcaaaatgccacaagctggtcaatcgctacataaataaactaggactgaatccgttcttttttggtactaacaactgagtaaaaaacgttaaaaatatataaaaatatactcaatacatcggataaaataatttgattgtgcagagttacattaatacatttaaaattgatttaaaatgacgtaaccctatccacagcaagaatgacatgcataaattggtgagataatcgacaatcgaaattgttcgagaagtctactgtctacggtagttcgagaaggaaccgtacgtggcgctggcgcaacaagacgtacggtataatgacagtacgaagtttgtttttcattaattactagtagattctttaatacaattaggcttaaagtgtttggacgactccattcagtatttttcattcacacaaatctattgacttttacacgaggtgtccttgttttgtctgagcttgtttccctcattgattcaaaacgtgctcttaacgattttgttgattcgacttgggattcatcaccatattcttcgataacgttgacactttgattctgctctcttttaatttcttgagcttcccatttttcaaatttggctctgagctgtctagctctggctgctttttgtgcttcgatcaaatcttcaggtaatttgttgttatcggtctgatcctcttcttcttcttcgttttcttcctcggtagccgatccttcttcactttcgctttcagttctggtgggctctggtggtggagtgaatcgtttcaatggtttaggaccttgtggttctgggtccctggaaaagttctcctccatttgtttgaacttgcttaacatcttcgaagctgtgtgtgaagccctagcgacttccgaatcgtcggctatctcatcagaacgaataatttctggatcatggtagatttcacggtcgggagtgtcagactctcgagcttttttcacatctactttaggtacagcaacaggtgatatgctctggggctgtttggcagcattggcatcaagttcaaggaacaaggacctagatttcttactaatttcactttggaacacttcggtatcatctgagtctccgttcctggagtcttctcgttctattaccaattctcctttttcgaatctctctttcagagacttggtatcacaggactctattttctctgattttacgagatttgtgcaagattctgattggattacagcttgctggtatgcttccttcatcttcccttgttttcccaaaaacaatttattcctaatggattggatctcctgtttcctttcctcccgtctctcatctttcgaattttgctctccctgttcccatttattcttcacttcattcagattagtaaaatggaacggtttttccttttgcacccttttggccctgtacagagtgggatcctctccttcgggcacttcctcctcctcttcttcggcttcagaagaggactcttcgataggtattccattcaatgcttcgtcggatacaccgacgtccatgcccttagcttggaatcttgcgagtttcgataaaatggagggtgactttttaacattgacaggagtgggtcctctgtccatctcttgagtctccgactgagtttgttggaaaacttggaagcgttcttttacatttaaactctggagttcctcgagacccaagtcgggcttgtcgcttgatggagtgtcatcttcaacggccttgggggcgaagagggacttaaaatggggtttgcagtagagcgtgccctcatggctcgcgtatgtttcaacggttaactgtttactacattccgtgcatctgaaacagtttttgtgccaaactgctttttcagctttgatttgttccatttgaaagacttgcttcgcgcaagccttgcagtttgtcatgtcgatttgtgtaccgttaaatttctcttgagccttggcggaatcagatgatctgatgtgaagaacattcttcttttggagggcatcgaatttactaaagctggatttcactgaaatgttttccttttcctccttcctcgattttttagttttcttcttttttaaaaccttctcctcgggtgtatcggactggatcgtggtggtttctgtgtaagtttcagttacggtgcttattctagatttctttacagtctccgccatctttattggattgataatatcgtttcacaaattttcttcaaatccctgtgttgtgaattcttcttttccactaaaatcgcactttcactaacaacaactacaccc

SEQ ID NO: 2874 - DNA, 2429 bp, Diabrotica virgifera
  SmartBlast Evalue=1E-146; Info=LIM domain and actin-binding protein 1 n=1 Tax=Harpegnathos saltator RepID=E2C1L4_9HYME
taaaatatatttcaaaataatcacataatggtaatacaaaaatacgtagtaaaatatgtgaataatatgtcaaaaacactagaacatctacatatatgataatacattataaaaagcaaaaaatacaactttgtcttacacacgaatcgtactttaagtacatggaataataactttttgtataagtataaattttatttcaataaaaatattaaatattttagccctggcaaaaattggtccaaaaatatattaagtatcacataaaacggcagttttcacgccattgtggcgttcacgttattccatttttctttgtgctggtcaaatccgaaaccagtgtcgtagtttcccttggaaatgaacaatctcttgaaatgaggggtgcaatacaacagccccttattgtaggaatacgaatccattctcaaaatacacgaacattccatgcatttgaaacatctcttatggtaggtgtggccatgaacagaaattttttctaagggatataccttttcctcgcagctatagcatagttcagtaacatttggtatttccacaaatctattgacttttacacgaggtgtccttgttttgtctgagcttgtttccctcattgattcaaaacgtgctcttaacgattttgttgattcgacttgggattcatcaccatattcttcgataacgttgacactttgattctgctctcttttaatttcttgagcttcccatttttcaaatttggctctgagctgtctagctctggctgctttttgtgcttcgatcaaatcttcaggtaatttgttgttatcggtctgatcctcttcttcttcttcgttttcttcctcggtagccgatccttcttcactttcgctttcagttctggtgggctctggtggtggagtgaatcgtttcaatggtttaggaccttgtggttctgggtccctggaaaagttctcctccatttgtttgaacttgcttaacatcttcgaagctgtgtgtgaagccctagcgacttccgaatcgtcggctatctcatcagaacgaataatttctggatcatggtagatttcacggtcgggagtgtcagactctcgagcttttttcacatctactttaggtacagcaacaggtgatatgctctggggctgtttggcagcattggcatcaagttcaaggaacaaggacctagatttcttactaatttcactttggaacacttcggtatcatctgagtctccgttcctggagtcttctcgttctattaccaattctcctttttcgaatctctctttcagagacttggtatcacaggactctattttctctgattttacgagatttgtgcaagattctgattggattacagcttgctggtatgcttccttcatcttcccttgttttcccaaaaacaatttattcctaatggattggatctcctgtttcctttcctcccgtctctcatctttcgaattttgctctccctgttcccatttattcttcacttcattcagattagtaaaatggaacggtttttccttttgcacccttttggccctgtacagagtgggatcctctccttcgggcacttcctcctcctcttcttcggcttcagaagaggactcttcgataggtattccattcaatgcttcgtcggatacaccgacgtccatgcccttagcttggaatcttgcgagtttcgataaaatggagggtgactttttaacattgacaggagtgggtcctctgtccatctcttgagtctccgactgagtttgttggaaaacttggaagcgttcttttacatttaaactctggagttcctcgagacccaagtcgggcttgtcgcttgatggagtgtcatcttcaacggccttgggggcgaagagggacttaaaatggggtttgcagtagagcgtgccctcatggctcgcgtatgtttcaacggttaactgtttactacattccgtgcatctgaaacagtttttgtgccaaactgctttttcagctttgatttgttccatttgaaagacttgcttcgcgcaagccttgcagtttgtcatgtcgatttgtgtaccgttaaatttctcttgagccttggcggaatcagatgatctgatgtgaagaacattcttcttttggagggcatcgaatttactaaagctggatttcactgaaatgttttccttttcctccttcctcgattttttagttttcttcttttttaaaaccttctcctcgggtgtatcggactggatcgtggtggtttctgtgtaagtttcagttacggtgcttattctagatttctttacagtctccgccatctttattggattgataatatcgtttcacaaattttcttcaaatccctgtgttgtgaattcttcttttccactaaaatcgcactttcactaacaacaactacaccc

SEQ ID NO: 2875 - DNA, 1528 bp, Diabrotica virgifera
  SmartBlast Evalue=1E-108; Info=LIM domain and actin-binding protein 1 n=1 Tax=Harpegnathos saltator RepID=E2C1L4_9HYME
cgggagtgtcagacttcacttgtgatgggtctcgtggtggcgtaatcctgaactgcttcctctctttctccggttccctgtacgtttcgaagaacttgaaacgttcttgaatatcggccgtcttgacctcgatcacttcttctatctctgaagattttactacatcttcggagaccgatttcgagtatgcctctcgagcttttttcacatctactttaggtacagcaacaggtgatatgctctggggctgtttggcagcattggcatcaagttcaaggaacaaggacctagatttcttactaatttcactttggaacacttcggtatcatctgagtctccgttcctggagtcttctcgttctattaccaattctcctttttcgaatctctctttcagagacttggtatcacaggactctattttctctgattttacgagatttgtgcaagattctgattggattacagcttgctggtatgcttccttcatcttcccttgttttcccaaaaacaatttattcctaatggattggatctcctgtttcctttcctcccgtctctcatctttcgaattttgctctccctgttcccatttattcttcacttcattcagattagtaaaatggaacggtttttccttttgcacccttttggccctgtacagagtgggatcctctccttcgggcacttcctcctcctcttcttcggcttcagaagaggactcttcgataggtattccattcaatgcttcgtcggatacaccgacgtccatgcccttagcttggaatcttgcgagtttcgataaaatggagggtgactttttaacattgacaggagtgggtcctctgtccatctcttgagtctccgactgagtttgttggaaaacttggaagcgttcttttacatttaaactctggagttcctcgagacccaagtcgggcttgtcgcttgatggagtgtcatcttcaacggccttgggggcgaagagggacttaaaatggggtttgcagtagagcgtgccctcatggctcgcgtatgtttcaacggttaactgtttactacattccgtgcatctgaaacagtttttgtgccaaactgctttttcagctttgatttgttccatttgaaagacttgcttcgcgcaagccttgcagtttgtcatgtcgatttgtgtaccgttaaatttctcttgagccttggcggaatcagatgatctgatgtgaagaacattcttcttttggagggcatcgaatttactaaagctggatttcactgaaatgttttccttttcctccttcctcgattttttagttttcttcttttttaaaaccttctcctcgggtgtatcggactggatcgtggtggtttctgtgtaagtttcagttacggtgcttattctagatttctttacagtctccgccatctttattggattgataatatcgtttcacaaattttcttcaaatccctgtgttgtgaattcttcttttccactaaaatcgcactttcactaacaacaactacaccc

SEQ ID NO: 2876 - DNA, 760 bp, Diabrotica virgifera
taaggaagtcaatgttttcttcggaaggagttagcatcggggaagtgacggtttgagtgaatagcagcgtagcagcgtcatctgtcattagcaacattctgtctttaaccgacttaacgttttcttcttgtgaaagatgtagctctgaaaaatctgtagtgtttagactaaattctggcctttcagttgtttctttgtcgatttccttgttgatgatttcgtactcgttcgctacttcgattttcggacttaagtctaagttaagattaagtttgggcgtctcgggggattggtccgtcagttcagtcttacttggttccggtaacgtttcgtataaattttcatcttcaacgtcgtggccgttttgggtttctgagctgccatttttaaggttcagggtaatgacgggggtgtcgtagtactggtgacgttcattttcaatgaaatcgttactggctatgccgcttttgggaacaggacgtatgttattgctaatattttcgtagaagttgtcttctgggtactgatcagcttcttggaggtcatctttgctcatgcaattttttagtctcatgttaaactcttccagtaaagcttcttcgagattttcttcttcatcacttactattctagatttctttacagtctccgccatctttattggattgataatatcgtttcacaaattttcttcaaatccctgtgttgtgaattcttcttttccactaaaatcgcactttcactaacaacaactacaccc

SEQ ID NO: 2877 - DNA, 2687 bp, Diabrotica virgifera
gtttgacaggctgtcattaccacctgttctacgtttcgcttgaccggccgcagtatggttctctacacagtcacagtgatcaactgtgaaaatacccagctttagtgattcagagaaatttttcgacgctgcctctccgtataatactagaacgtctcagcaagactactgagattataaagaacatcaataacagaaagctggagtacttagaacatgtaatgagatgtgtcaaatatgctaaataatgtaatgagatgtgtcaaatatgctaaaaaatatgcaagggaaaatagcagaaagaaaaaaactttatagttgaaaaacttgcgtgattggtatagtattgatacaagcattctatttagggtggcagtcagtggtgtcatggtgcgggaacgccgttccggcactggttaagaaaagaaaaaaataaatagagaatttgggttttgtaaacaaaaattagcagtgcgttccggcactgctaattttgccatgacaccactggtggcagtgaataaaattaagatagctatgatggtaaccaacgttctgaaaggacttggtacatgaagaagaagaaggactctcatcaccactgttaacaccattttaaataatggtcaaatgatgtgacatcacatgtgaatttaatgaactacagtagaaccccgcaaatccgaactaattggggggacagcctgttcggattccgaaaagttcggattatccgaaagttagccttaactagtagttcaaagctttcattgtgatattgagtagccaaacgttctcgcaagagtgtggacaatatttttggactccaagttgactacgagagaaccaaagtaagtttgtgtttaacctttataaacactttataaacctatatattaaagtataatatttatttttaagaaattttaaatgtcaaagtcctagtaatcctacattgtccaattttctggctttactctgtataataaacatgttattgttcggatttacggggttctactgtatatcacccaattatgaattattgccataaaggaagataatatctagactaacagttctgaagtaaggaaagatggagtaaagaagtgatatctgaaaatagaatacaagcaaaagaaataaaggaagaacgatagtaagttaaggagctgaaatagccaaaacattgtataaaaagaatgttaatcagaaaaatcttgagacatatcgaggaactgttaaattaagtctgggtacaagttgagttttatctattgatattttgcagaactagagaaatataagaaaaatattgtatctgcttctaagacaaatgcaattttacaggaaacgtacaaggaaaatgagaaccaggaaggcgaaggattttccgactgaaaaatctacatattttatgtggctcaacacaacagccacaaatcttttcagagcatcagtttgcaaagtacagattgccatgagggtcgccaacatccgaaacgaataagcactacgagaagaggaagtcttacattattattgcccttatcgtgaaatttcacaaaagtgagtgtatcgaaagaaaaaaaaaagaatatgtttggtttaattctcttttgaattgttattactgtttttttatgtacataatcgtagaatttattgcttttattagtaattttgtgtaaaattataattttaccatatcttaagttactaccaactatgttctttctttcttttttatttcttcaaatttctttcctcacacacaattttaccatcgaactatgaagatttgtcgaaatttgtcgtgtcgggagatgaataggttataactgctgtatttttttattttatttttttatataagatgacttattgctcttatttattgatacctatatagatgtataagtgaattaatcatatttattatgtaaataaagcgaaacttctattaaaagtgtcaaaatcgtagtcatgtaagtgttttctgggtatttatcattgttgcttaactacttactggaaatagtcataacttttggtctcgttctgttcttctcattctcttcaatcttgaacatcagtagcttgtccaatctcaaattttttaggcgtatttttttacatcattttgcatttagtcatctttatccttcgtgacatatttttgttggtttttgggtctgtccacaagatgtttagtacagtaatatataacgaagatacattttaaccagacaaaatcgaacatatagtgaattttttatctattgaacgcctgatattgtcatgttctattcacaactcttctatttgatttatttcttcactacaaatatgtactattatataactttgatgaaattaatttactattttgttaagcaggagtataaaaggtgttgtttcctttctctacagtgacataaagtgtattaaatttgtggctaactgaacgaaggatagaaaattgttagataagttttgattatttccattctttgaattgaccaccatttttcaagtatctacttagttatttaagagcgttattcatatatatgttattaacctttttatttttaggtagttttgtttttagattatatttacatagttagcgttttgtacataagacatacttgtaatatatataatgttttggattgacatat

SEQ ID NO: 2878 - DNA, 2372 bp, Diabrotica virgifera
gtttgacaggctgtcattaccacctgttctacgtttcgcttgaccggccgcagtatggttctctacacagtcacagtgatcaactgtgaaaatacccagctttagtgattcagagaaatttttcgacgctgcctctccgtataatactagaacgtctcagcaagactactgagattataaagaacatcaataacagaaagctggagtacttagaacatgtaatgagatgtgtcaaatatgctaaataatgtaatgagatgtgtcaaatatgctaaaaaatatgcaagggaaaatagcagaaagaaaaaaactttatagttgaaaaacttgcgtgattggtatagtattgatacaagcattctatttagggtggcagtcagtggtgtcatggtgcgggaacgccgttccggcactggttaagaaaagaaaaaaataaatagagaatttgggttttgtaaacaaaaattagcagtgcgttccggcactgctaattttgccatgacaccactggtggcagtgaataaaattaagatagctatgatggtaaccaacgttctgaaaggacttggtacatgaagaagaagaaggactctcatcaccactgttaacaccattttaaataatggtcaaatgatgtgacatcacatgtgaatttaatgaactacagtagaaccccgcaaatccgaactaattggggggacagcctgttcggattccgaaaagttcggattatccgaaagttagccttaactagtagttcaaagctttcattgtgatattgagtagccaaacgttctcgcaagagtgtggacaatatttttggactccaagttgactacgagagaaccaaagtaagtttgtgtttaacctttataaacactttataaacctatatattaaagtataatatttatttttaagaaattttaaatgtcaaagtcctagtaatcctacattgtccaattttctggctttactctgtataataaacatgttattgttcggatttacggggttctactgtatatcacccaattatgaattattgccataaaggaagataatatctagactaacagttctgaagtaaggaaagatggagtaaagaagtgatatctgaaaatagaatacaagcaaaagaaataaaggaagaacgatagtaagttaaggagctgaaatagccaaaacattgtataaaaagaatgttaatcagaaaaatcttgagacatatcgaggaactgttaaattaagtctgggtacaagttgagttttatctattgatattttgcagaactagagaaatataagaaaaatattgtatctgcttctaagacaaatgcaattttacaggaaacgtacaaggaaaatgagaaccaggaaggcgaaggattttccgactgaaaaatctacatattttatgtggctcaacacaacagccacaaatcttttcagagcatcagtttgcaaagtacagattgccatgagggtcgccaacatccgaaacgaataagcactacgagaagaggaagtcttacattattattgcccttatcgtgaaatttcacaaaagtgagtgtatcgaaagaaaaaaaaaagaatatgtttggtttaattctcttttgaattgttattactgtttttttatgtacataatcgtagaatttattgcttttattagtaattttgtgtaaaattataattttaccatatcttaagttactaccaactatgttctttctttcttttttatttcttcaaatttctttcctcacacacaattttaccatcgaactatgaagatttgtcgaaatttgtcgtgtcgggagatgaataggttataactgctgtatttttttattttatttttttatataagatgacttattgctcttatttattgatacctatatagatgtataagtgaattaatcatatttattatgtaaataaagcgaaacttctattaaaagtgtcaaaatcgtagtcatgtaagtgttttctgggtatttatcattgttgcttaactacttactggaaatagtcataacttttggtctcgttctgttcttctcattctcttcaatcttgaacatcagtagcttgtccaatctcaaattttttaggcgtatttttttacatcattttgcatttagtcatctttatccttcgtgacatatttttgttggtttttgggtctgtccacaagatgtttagcatacattgcgctatctacatttcgaaattttctagttgtctcatttttagagtccatgtgtcaactttacacagtaatataacgaagatacattttaaccagacaaaatcgaacatatagtgagttttttatctattgaacgcctgatgttgtcatg

SEQ ID NO: 2879 - DNA, 1311 bp, Diabrotica virgifera
gtttgacaggctgtcattaccacctgttctacgtttcgcttgaccggccgcagtatggttctctacacagtcacagtgatcaactgtgaaaatacccagctttagtgattcagagaaatttttcgacgctgcctctccgtataatactagaacgtctcagcaagactactgagattataaagaacatcaataacagaaagctggagtacttagaacatgtaatgagatgtgtcaaatatgctaaataatgtaatgagatgtgtcaaatatgctaaaaaatatgcaagggaaaatagcagaaagaaaaaaactttatagttgaaaaacttgcgtgattggtatagtattgatacaagcattctatttagggtggcagtcagtggtgtcatggtgcgggaacgccgttccggcactggttaagaaaagaaaaaaataaatagagaatttgggttttgtaaacaaaaattagcagtgcgttccggcactgctaattttgccatgacaccactggtggcagtgaataaaattaagatagctatgatggtaaccaacgttctgaaaggacttggtacatgaagaagaagaaggactctcatcaccactgttaacaccattttaaataatggtcaaatgatgtgacatcacatgtgaatttaatgaactacagtagaaccccgcaaatccgaactaattggggggacagcctgttcggattccgaaaagttcggattatccgaaagttagccttaactagtagttcaaagctttcattgtgatattgagtagccaaacgttctcgcaagagtgtggacaatatttttggactccaagttgactacgagagaaccaaagtaagtttgtgtttaacctttataaacactttataaacctatatattaaagtataatatttatttttaagaaattttaaatgtcaaagtcctagtaatcctacattgtccaattttctggctttactctgtataataaacatgtttttaagtttttgtcttgaatttttaaattttttccactttccgttggttcggatttgccgaaagttcggattcgcggggttcggatttacggggttctactgtatatcacccaattatgaattattgccataaaggaagataatatctagactaacagttctgaagtaaggaaagatggagtaaagaagtgatatctgaaaatagaatacaagcaaaagaaataaaggaagaacgatagtaagttaaggagctgaaatagccaaaacattgtataaaaagaatgttaatcagaaaaatcttgagacatatcgagg

SEQ ID NO: 2880 - DNA, 1222 bp, Diabrotica virgifera
gtttgacaggctgtcattaccacctgttctacgtttcgcttgaccggccgcagtatggttctctacacagtcacagtgatcaactgtgaaaatacccagctttagtgattcagagaaatttttcgacgctgcctctccgtataatactagaacgtctcagcaagactactgagattataaagaacatcaataacagaaagctggagtacttagaacatgtaatgagatgtgtcaaatatgctaaataatgtaatgagatgtgtcaaatatgctaaaaaatatgcaagggaaaatagcagaaagaaaaaaactttatagttgaaaaacttgcgtgattggtatagtattgatacaagcattctatttagggtggcagtcagtggtgtcatggtgcgggaacgccgttccggcactggttaagaaaagaaaaaaataaatagagaatttgggttttgtaaacaaaaattagcagtgcgttccggcactgctaattttgccatgacaccactggtggcagtgaataaaattaagatagctatgatggtaaccaacgttctgaaaggacttggtacatgaagaagaagaaggactctcatcaccactgttaacaccattttaaataatggtcaaatgatgtgacatcacatgtgaatttaatgaactacagtagaaccccgcaaatccgaactaattggggggacagcctgttcggattccgaaaagttcggattatccgaaagttagccttaactagtagttcaaagctttcattgtgatattgagtagccaaacgttctcgcaagagtgtggacaatatttttggactccaagttgactacgagagaaccaaagtaagtttgtgtttaacctttataaacactttataaacctatatattaaagtataatatttatttttaagaaattttaaatgtcaaagtcctagtaatcctacattgtccaattttctggctttactctgtataataaacatgtttttaagtttttgtcttgaatttttaaattttttccactttccgttggttcggatttgccgaaagttcggattcgcggggttcggatttacggggttctactgtattttatatttcaacattttttttaaattttgggctctgttggggaatttcctcatttccctccacgcagacccgccactggttctctcgaaaagttgtagtaaatcgtaattgcaacaattt

SEQ ID NO: 2881 - DNA, 2371 bp, Diabrotica virgifera
ccggtggtacgcgtaccactggtggtacgcaggaagttttcaggtggtacgcgacgcgtgtgtgaaacatgcgatttcaaggttattctcttataagggtagcaggttaaacatacagaaatgagatggttatctaaagaaaaattttcacccgtctctttgaactgaggtcagcaattttaatgcttttaactcaaaaaataatgacatgaaagacttgttctatgatgatgaagaatggttgtcaagatttgagtatttagctgacatttttgacagacccaacactctgaaaatggttcttcagggaaaaaacagaatacccagcacagcaataagaaaaagttggtttttttttgttctcaaatacagaggaagcagtggcggctcgtgatttttacaataggggaggctatacctaactgtaaaaatatctagacaaatttgcactagcaaaaaatgcgccaaaaaaatgtaatttaaggctccattttttgaccattttttatttacatttcataatatcatcctaattcataatttcatgatatcatatcattttaaaaatagttagtctaattgtaaaagtttaataccaaagtttgtgtcgtttatttgttaacaattccatctatttgtaaatagatacctatgcatatcaaaataaatacagatttgaagttttgcagtccatacataatgaagcttcaaattttttaagatactcaactgaatttttgtaattctaaacacggcctactgcgaattcaaaagcatgataaattaccgatattttgctttgagttagagatatcggaaaaagttatttgagcaagttgttccaaatattattataaccccacataccaaatttcataacaaaattcgcacttttagatttttcatcatttttagtcaggaccctaaaattcgttgtcccgagacgcacgcaaccacggaacggagccgagaagctactctgtctcccttgatatatctccgggcagcgtgtgagggcgccgtagatgccactgttaggagaccgggtctccttaaacgcctgctgctagcaacggagactgctgggcttctcggctccatccatgcatctcgggataacccagggtcctgcctacaataatatgtaataaaactgagacgcgatcatgcgttctaatgctaatgctccgtacgtatggataattagtgataatatggaatttacacgttgtataatagtgagagtgcttattgttttcgcgattcatgataaacaaaacagtgtagagtgtgtaaaaaatttatggggaggctgagcctcccttgcctcctctgacgagccgctactgagaggaagattgtctctacatttcctacgctatcatcatttttgaagaaaacgaaatatcttcaataccagatggagttgctgatataattcttgacttggaatctcctcaagaaagttttaataaatatttctctgaagattattccaaacttgactgcaccaaaaatccttttttcaaaaacttcaccaaatgagttggaattaaaggaaagattcattgatctaacagaagactatctggatcgggtgtaaatccgagtatacaatgctcttccagcaagctattctgttttttatgtcatttgtactagttacttgtgtcagaatggtgagctattgtatacaaaaatttatataggaacagaccaagaagtatttaagaggacttaagaataaaattgactataattacttctgcaattgacactttaatcacagacaaactacaacaagcttcgcattaatctcgatacgcaatgactaatgttgatttctgttgatttgatccttctttttggttgagagtttgtaccaattgtgtaacattgcactatgtttttgtatagtttgatggtgtttggtggtacgccaaaatcttcaaaatatttcaggtggtacgcagttgctagaaggttgggaacccctgttctggatcataatcatccttttaatgaacagtatcaagtccttcatattcaaaataaaggccttatctatcttgattaggatctatggaaattaataaattataaaatacagttagtagagactgtagtggcattggcttatagtggattttgtgtaaatggcgaaaaacaggggttttccttgttttaaatgttaaaatcttatttatgtattttttattatattgtcagttatttcggttttgacaacttgtatatattagctatataatttatttattttaatttatttttgtaattccatatattatctaacaagtcctgtattatttagactgatttttattgtaatacattatatttttgtatgact

SEQ ID NO: 2882 - DNA, 2091 bp, Diabrotica virgifera
ctgcgcgttatcaaaatctatttttaaactgtggtacctgttatgtacgagtcatgacattcctgtctgctacggttagtcattattattatttcctggcagtggcggctcgtgatttttacaataggggaggctatacctaactgaaaaatatctagacaaatttgcactagcaaaaaatgcgccaaaaaaatgtaatttaaggctccattttttgaccattttttatttacatttcataatatcatcctaattcataatttcatgatatcatatcattttaaaaatagttagtctaattgtaaaagtttaataccaaagtttgtgtcgtttatttgttaacaattccatctatttgtaaatagatacctatgcatatcaaaataaatacagatttgaagttttgcagtccatacataatgaagcttcaaattttttaagatactcaactgaatttttgtaattctaaacacggcctactgcgaattcaaaagcatgataaattaccgatattttgctttgagttagagatatcggaaaaagttatttgagcaagttgttccaaatattattataaccccacataccaaatttcataacaaaattcgcacttttagatttttcatcatttttagtcaggaccctaaaattcgttgtcccgagacgcacgcaaccacggaacggagccgagaagctactctgtctcccttgatatatctccgggcagcgtgtgagggcgccgtagatgccactgttaggagaccgggtctccttaaacgcctgctgctagcaacggagactgctgggcttctcggctccatccatgcatctcgggataacccagggtcctgcctacaataatatgtaataaaactgagacgcgatcatgcgttctaatgctaatgctccgtacgtatggataattagtgataatatggaatttacacgttgtataatagtgagagtgcttattgttttcgcgattcatgataaacaaaacagtgtagagtgtgtaaaaaatttatggggaggctgagcctcccttgcctcctctgacgagccgctactgagaggaagattgtctctacatttcctacgctatcatcatttttgaagaaaacgaaatatcttcaataccagatggagttgctgatataattcttgacttggaatctcctcaagaaagttttaataaatatttctctgaagattattccaaacttgactgcaccaaaaatccttttttcaaaaacttcaccaaatgagttggaattaaaggaaagattcattgatctaacagaagactatctggatcgggtgtaaatccgagtatacaatgctcttccagcaagctattctgttttttatgtcatttgtactagttacttgtgtcagaatggtgagctattgtatacaaaaatttatataggaacagaccaagaagtatttaagaggacttaagaataaaattgactataattacttctgcaattgacactttaatcacagacaaactacaacaagcttcgcattaatctcgatacgcaatgactaatgttgatttctgttgatttgatccttctttttggttgagagtttgtaccaattgtgtaacattgcactatgtttttgtatagtttgatggtgtttggtggtacgccaaaatcttcaaaatatttcaggtggtacgcagttgctagaaggttgggaacccctgttctggatcataatcatccttttaatgaacagtatcaagtccttcatattcaaaataaaggccttatctatcttgattaggatctatggaaattaataaattataaaatacagttagtagagactgtagtggcattggcttatagtggattttgtgtaaatggcgaaaaacaggggttttccttgttttaaatgttaaaatcttatttatgtattttttattatattgtcagttatttcggttttgacaacttgtatatattagctatataatttatttattttaatttatttttgtaattccatatattatctaacaagtcctgtattatttagactgatttttattgtaatacattatatttttgtatgact

SEQ ID NO: 2883 - DNA, 1510 bp, Diabrotica virgifera
agaatgaccaacttgagacaaacagctctcgactcctcaacctattcagttagagactttgaagtgtagacgcatagtgaaaacacatcacttgaggaaggcactatgccgaaacagctgtagagacattagcctataataaattttgtgaaaatagcgaaaacaaaagttttcagtgttttattgttagataaaatgaatttccatcaagtaaaggtcgaatccatgaattaataaatatgattttaatttactgaattacaagccaagtatccaactaaaaaaagtttctcactttcttcgacggagcaacattaaaagattctctttaataaagaaaaggctaaagaggaaaaaagagaaagatagtgaagtaaagtgaaggtagtgaagataaaattaggctaaaaaattgtactactttaactaagtacagtcaaatttattttggcaagatgttcaaaattggaaacagttaaaaaagtgagtgaatattagataaaagatatacagggtgattcattaagaatgtccaatctcttagttgtagattctagacctcaaaatattaagatttaatccaaatcacttgaataaaatgtggctcgttactgagttacagggtgttttatttaaaaatgtaataattatttttacccagtactttaaaactatttaacatatccttttcatacttggcagaaagtgtaggtattgcacaccctacgaaattatgataaataaacgtttcgggccactaccacaggcgcacgacagggggcattgaatggtttacccttccaaaattctacgccactggcggaattgctatttagcacaatagttcgacttctccaatactttctatttaaataatatactttttattcgtaacgacaaagtcattagttttcgagatatttgaagttgaaaatgaaacggcacagctatttgattaatgtattctgccctttcatttttaacttcaaatatctcgaaaactaatgattccatcgttacgaatgccgagtatattaattacatagaaagtactggagaatcgaaatactgtgccaagatagcaattccgccagtggtgtagaatttgggaaggcccaaccattcactcccctctgtcgcacgcctccggtagtaaccagaaacgtttattcaatactacatcctcaaaaattgtatcaaactccaatataaacaaaatggtatatactgttatatgagtcaggaaaaatgtcattacacaatattacgataggacgtcacaagccttcgcgcgctttttagatcgtttgaaattatttaaatacacagaagattttaaatttgtaaagttatgagtttttgagacgtgaaattttggaaatcatatttttaaacaaaactgaacattattatacagggtggttcatcccattcgcctcggtgtctgtacggaaaaccacttaatatctttaaaaaaacttcttcacagaaatacacataaccatcaata

SEQ ID NO: 2884 - DNA, 1361 bp, Diabrotica virgifera
tattgatggttatgtgtatttctgtgaagaagtttttttaaaaatattaagtggttttccgtacagacaccgaggcgaatgggatgaaccaccctgtataataatgttcagttttgtttaaaaatatgatttccaaaatttcacgtctcaaaaactcataactttacaaatttaaaatcttctgtgtatttaaataatttcaaacgatctaaaaagcgcgcgaaggcttgtgacgtcctatcgtaatattgtgtaatgacatttttcctgactcatataacagtatataccattttgtttatattggagtttgatacaatttttgaggatgtagtattgaataaacgtttctggttactaccggaggcgtgcgacagaggggagtgaatggttgggccttcccaaattctacaccactggcggaattgctatcttggcacagtatttcgattctccagtactttctatgtaattaatatactcggcattcgtaacgatggaatcattagttttcgagatatttgaagttaaaaatgaaagggcagaatacattaatcaaatagctgtgccgtttcattttcaacttcaaatatctcgaaaactaatgactttgtcgttacgaataaaaagtatattatttaaatagaaagtattggagagtcgaactattgtgctaaatagcaattccgccagtggcgtagaattttggaagggtagaccattcaatgccccctgtcgtacgcctgtggtagtggcccgaaacgtttatttatcataatttcgtagggtgtgcaatacctacactttctgccaagtatgaaaaggatatgttaaatagttttaaagtactgggtaaaaataattattacatttttaaataaaacaccctgtaactcagtaacgagccacattttattcaagtgatttggattaaatcttaatattttgaggtctagaatctaaaactaagagattggacattcttaatgaatcaccctgtatatcttttatctaatattcactcacttttttaactgtttccaattttgaacatcttgccaaaataaatttgactgtacttagttaaagtatgaaattaccgtgattccctgaattgtcgctaccctgtataatcaattttgtgtaaatagtgaaaacaaaagttttccttgatttaaatgtttcaatcttatttatgtattttttattattttgtcaattgtttcggggttaacaacttttatattagctatataatttatttattttagtttatttttgtaatttcgtttatattatctaacaagtcctgtattatttagactgatttttattgtaatacattatatttttgtatgact

SEQ ID NO: 2885 - DNA, 2586 bp, Diabrotica virgifera
cttctatatgattggtttcatataaagtttatacagttgccgaactcgtccggtacgtctaaaggtggggaaaaaatcaatacaatgtaaatttattggtttctatcgctaaatttcccacctctactggttttatctctttttatctcacaacttaatatgttttccatcttttacgttattttgccgattagcgcactcatcacttgtatacaaaaacaaactagccttataaacttattgagctagatctttaggtatttatcgatatttgtattaaagtgacttttccatatttaaaagactatataaccaactttaactcataaaatatcccaaaaatgtgaattttccgattttcctccttgtaaatgcatttacaatgcaaattgtaacagttaaaactattatggataagccaatatggctaaaaattaaaagtagataaaaacatgtcactaaacggttatttttgttgaaatatacatattattatgttgtgatgtacgataagaccgagtcatcttaacacggtttacatgttttattgagcaaatagtaagataactagtttaataatcataattttgctattctaataaaccaactaagtcactatgtgaagaacaaggggaacgcttctatcaggacattcaagtaatggcagggagaaaccagggccgctgggatgtgaatgccaataaccttcgaatccacctgtgtcgttcgatgttcttgccacatggcctacccatctccatttcttttctgctacatacatgttctgctaaagtgtatattgttttaaaatgtaaatctgttttcaaataataacctgaaatatgaaaatagtaaataagccagatctgagccctgattctaattcaaatttcgactcaaaacaggtcgcaatcaatatggtgactttgaaatgcgactttgcgatccttgtggattttagttgaactaacgaaatgatgtcataaaatagcgacttatcgaaattaatagcgactccaaaaaagtggttgatattatgatattataatttcgagtcgaaattattgtgacacggacatgaatgaatatgaatggccgaaagcgaggttaggtttagtttaggagatgtgttttgtttgtttcttgcaaggaaaactaaagcaaaaggtattaatatggctgggttttatggaaatttgctggttttggaggaattagatagaatagtattaaattagaaatagaataattgagaatgtccacaacgtgaattatcaactcaatgaaaggtgtaaggtaataatctgggaaaattagtataaaacaaggaaaattatgtaccagctattttattgctttacatgctggaatcaaatcttaatatttcatatattagtaatatagctatgcaaagtccgcagaaagtgtgctatttggttcataaagaaattagcgctccgaaatcgttttaaaattattgctttgtaactcagaagctttaatgtaaaccaaaaacactcacatcaaaaattcaccgcaatttaattctgcacatacacatagatattttttttttcgatttccttcagcggaaatttttctcgaaaatacgggttttccaaacaaaatctttaatcttcaaataaaattttagggaagcaattatttatcaacaattaaataacttggtgacatataaatcttttttgttatgagtgtcttgaagatatgaaaatttgtatgtacaaagaggaccggaataaaaaggtaatggttcaaagattgaaatcctgttgtttataactctgtcgcaaatgccggtcaaatttgaccggttatacctggaaccactcctcgcaattcaattttttttttcttcgaaaagggcacagaagccgtgcccttttcaacagcgttgacttaatttaatttaatctaatattttctgaggggttttatttgtttataagccaaaaaattgtttctttataacattcaaatagtccaatttcaattctgtcaagtacgttgaataggtatagtgctatttaatacgaaaatcatagttattctggtgtatcataatctttctggttattatttcaaccgaaattttttaattaacattaacatctgataacagagaggagctaaattatggaataaattcgttttctctggaatggacgattttggagagggatcccgaaacaggtcgatttttgttttcaaattgaagtttttttggcatatatttcagactagtgacgtcatccatccgggcgtgatgacgtaatcgattattttttaaatgggagtggcggtcgtgtggtggctcatttgaaaaggcgtttagttctctattccgtgttatgaacattaatatcattgtttatacagggtggccaagaaaaatttttttgaactaaattgattgacgcaaaaggaagaatgtatgtatgtagtttgtttgactcaaagtgcattctattgctgtcggaaggtggaaacaaatgtttatttggcaaataaacattgcttttagcttaaattaaatgttcaaactgccaataggtaggagagagg

SEQ ID NO: 2886 - DNA, 1852 bp, Diabrotica virgifera
tccgaccaccggcttcgctcccccaaatatacagagcatcatcaggtcaacaagtaaactacatgctaaataaaatagaactgctaaaactgtaaacaaataaataaccagagttataacattgtctggttgttatctgggccctgattctaattcaaatttcgattcaaaacaggtcgcaatcaatatggcgacgttgaaatgcgactatgcgatccttgtggatttcatttgaactaactaaaggacgtcatgcaatttcgataggtcgcaattaatttcgactcctcaaaagtggttgaaattataatttcgagtcgaaattattgtgacacggacataaatgaatggtcgaaagcgaggttaggtttagtttaggagatgtgttttgtttaggagatgtgtaggaaaactaaagcaaaaggtattaatatggcttggctttatggaaatttgctggttttggagcagtatagagtatagtattagatagaatagtattaaattagaaatataataatcgacaatgtccacaacgtgaattatcaactcaatgaaagatgtaataatctgggaaaattagtataaaacaaggaaaattatgtaccagctattttattgctttacatgctggaatcaaatcttaatatttcatatattagtaatatagctatgcaaagtccgcagaaagtgtgctatttggttcataaagaaattagcgctccgaaatcgttttaaaattattgctttgtaactcagaagctttaatgtaaaccaaaaacactcacatcaaaaattcaccgcaatttaattctgcacatacacatagatattttttttttcgatttccttcagcggaaatttttctcgaaaatacgggttttccaaacaaaatctttaatcttcaaataaaattttagggaagcaattatttatcaacaattaaataacttggtgacatataaatcttttttgttatgagtgtcttgaagatatgaaaatttgtatgtacaaagaggaccggaataaaaaggtaatggttcaaagattgaaatcctgttgtttataactctgtcgcaaatgccggtcaaatttgaccggttatacctggaaccactcctcgcaattcaattttttttttcttcgaaaagggcacagaagccgtgcccttttcaacagcgttgacttaatttaatttaatctaatattttctgaggggttttatttgtttataagccaaaaaattgtttctttataacattcaaatagtccaatttcaattctgtcaagtacgttgaataggtatagtgctatttaatacgaaaatcatagttattctggtgtatcataatctttctggttattatttcaaccgaaattttttaattaacattaacatctgataacagagaggagctaaattatggaataaattcgttttctctggaatggacgattttggagagggatcccgaaacaggtcgatttttgttttcaaattgaagtttttttggcatatatttcagactagtgacgtcatccatccgggcgtgatgacgtaatcgattattttttaaatgggagtggcggtcgtgtggtggctcatttgaaaaggcgtttagttctctattccgtgttatgaacattaatatcattgtttatacagggtggccaagaaaaatttttttgaactaaattgattgacgcaaaaggaagaatgtatgtatgtagtttgtttgactcaaagtgcattctattgctgtcggaaggtggaaacaaatgtttatttggcaaataaacattgcttttagcttaaattaaatgttcaaactgccaataggtaggagagagg

SEQ ID NO: 2887 - DNA, 1410 bp, Diabrotica virgifera
aaggtattaatatggccgggttttatggaaatttgctggttttggaggaattagatagagtagtattaaattagaaatataataattgagaatgttcgtgaattattaactcaatgaaagatgtaaggtaataatctgggaaaattagtataaaacaaggaaaattatgtaccagctattttattgctggacatgctggaattaaatctcaagatttcatatattagtaatatagctatgcaaagtccgcagaaagtgtgctatttggtttataaacaaattagcgctccgaaatctttttttcaattattgctctgcaactcagaagattttaacgttaaaccaaaaacactcacataaaaattcactgtaattattcggcacatgatattttttttttcgatttccttcagcggaaatttttctcgaaaatacgggttttccaaacaaaatctttaatcttcaaataaaattttagggaagcaattatttatcaacaattaaataacttggtgacatataaatcttttttgttatgagtgtcttgaagatatgaaaatttgtatgtacaaagaggaccggaataaaaaggtaatggttcaaagattgaaatcctgttgtttataactctgtcgcaaatgccggtcaaatttgaccggttatacctggaaccactcctcgcaattcaattttttttttcttcgaaaagggcacagaagccgtgcccttttcaacagcgttgacttaatttaatttaatctaatattttctgaggggttttatttgtttataagccaaaaaattgtttctttataacattcaaatagtccaatttcaattctgtcaagtacgttgaataggtatagtgctatttaatacgaaaatcatagttattctggtgtatcataatctttctggttattatttcaaccgaaattttttaattaacattaacatctgataacagagaggagctaaattatggaataaattcgttttctctggaatggacgattttggagagggatcccgaaacaggtcgatttttgttttcaaattgaagtttttttggcatatatttcagactagtgacgtcatccatccgggcgtgatgacgtaatcgattattttttaaatgggagtggcggtcgtgtggtggctcatttgaaaaggcgtttagttctctattccgtgttatgaacattaatatcattgtttatacagggtggccaagaaaaatttttttgaactaaattgattgacgcaaaaggaagaatgtatgtatgtagtttgtttgactcaaagtgcattctattgctgtcggaaggtggaaacaaatgtttatttggcaaataaacattgcttttagcttaaattaaatgttcaaactgccaataggtaggagagagg

SEQ ID NO: 2888 - DNA, 1433 bp, Diabrotica virgifera
cttctatatgattggtttcatataaagtttatacagttgccgaactcgtccggtacgtctaaaggtggggaaaaaatcaatacaatgtaaatttattggtttctatcgctaaatttcccacctctactggttttatctctttttatctcacaacttaatatgttttccatcttttacgttattttgccgattagcgcactcatcacttgtatacaaaaacaaactagccttataaacttattgagctagatctttaggtatttatcgatatttgtattaaagtgacttttccatatttaaaagactatataaccaactttaactcataaaatatcccaaaaatgtgaattttccgattttcctccttgtaaatgcatttacaatgcaaattgtaacagttaaaactattatggataagccaatatggctaaaaattaaaagtagataaaaacatgtcactaaacggttatttttgttgaaatatacatattattatgttgtgatgtacgataagaccgagtcatcttaacacggtttacatgttttattgagcaaatagtaagataactagtttaataatcataattttgctattctaataaaccaactaagtcactatgtgaagaacaaggggaacgcttctatcaggacattcaagtaatggcagggagaaaccagggccgctgggatgtgaatgccaataaccttcgaatccacctgtgtcgttcgatgttcttgccacatggcctacccatctccatttcttttctgctacatacatgttctgctaaagtgtatattgttttaaaatgtaaatctgttttcaaataataacctgaaatatgaaaatagtaaataagccagatctgagccctgattctaattcaaatttcgactcaaaacaggtcgcaatcaatatggtgactttgaaatgcgactttgcgatccttgtggattttagttgaactaacgaaatgatgtcataaaatagcgacttatcgaaattaatagcgactccaaaaaagtggttgatattatgatattataatttcgagtcgaaattattgtgacacggacatgaatgaatatgaatggccgaaagcgaggttaggtttagtttaggagatgtgttttgtttgtttcttgcaagaaaactaaagcaaaaggtattaatatggctgggttttatggaaatttgctggttttggaggaattagatagaatagtattaaattagaaatataataattgagaatatccacaactgtgaattatcaactcaataaaagatgtaaggtaataatctgggaaaattagtataaaacaaggaaaattatgtaccagctattttattgctggacatgctggaatcaaatcttaagatttcatatattagtaatatggctatgcaaagtccgcagaaagtgtgctaa

SEQ ID NO: 2889 - DNA, 1735 bp, Diabrotica virgifera
tgtgaataatgttttattagtctataaattttgatgtcatcaagacacgtgggcatacttttctgctactattctcatatgaggcgataaaatctttggttcattttttagaaaccaacatacaatacatgaaacggtgtagctctcgaacaattctttaaaataaaattctaacattttatttgcgaaatcgtctcgatctttggtaagaattattttagtaaaaactgattccaatggacctaaatacttattttcagcaatagtatgtcgcagcatatcaaatatatctatattgtattttacagcatattgagggaactttacattgtataaaataacatttgctattatttgattatcgtatttagcattattactgaaattgttttctattaactgaacaaatagtggaaaatctacaattttaatacagaattcgggatagtcctgacaaaacctcagaactgttaagaaaaaatcatgtttaaaacgttcattataagtagaatcattgacactattaataacttcttcaatatgctctaccatttctgtgtaaagccgcttactcacggataaatctatattatcgaaatctctgatacgacgttcaatagccatatctttcaggtattgaataagcaacggtttataatctttaccgttcttaactaaatactccaaatgtttttccatgaaatctccattgctgccaagtgagaattgtttttgtattcttaatatttctaattgttcgtcaatatacttccaatgattttcattaaagtcttccaacttgaatgcatttctcaatgagcccaggacacttgtacgaaaactcggctcttcatttctatgcctgaagcatatatacttcaaaacttccaccagtgcatccaaatcttcactgttcttacatgtttcaatcagtaataataccaaagattgtctctcccacaaatcagaagtgacattaattttttctttaagggccggtatagctttcgcaggtgggtagtatttaagaaagttattgtaatttccctgttgttctttatagtgaacttcagcccacaactcaataatttctttgggtggatttagcgacgtcattgaattaaaattcagcaagagatcttttaactctcgaccattgaatttttcggtaaatgtttgatttaataaattccatcttctgtttttaggataataacttattaactggcagctcttacagtacgtacttacactattgagctggttaggaaacaaatccttaaataaagtatcaaaatgtttacctaattttcgaacaactactgcattgtttaaaaactttaggtaatattcgctatcttttaaaacgtcatcattaaccatattaaaaatgtttttagaagttcttctgccaactcggtataaacgaatctttcgttcccgatgaagtttcaacacaagttctgggttttttatagctatattctttagtaccttctcatcattgtaatactgtttcaaattcacatagaatatgaacagctcttcacttttattgtatatgttaagtacttggtttgaatttaactgtaaatcaagctcaacaattgcagcttgaattttagtaggactgcatttgtgtaagactgatactgccatgggtatgccatacttttttaaaagggcttcaaagagtgagtctatctttttctcagtccagtgatttgaaatccta

SEQ ID NO: 2890 - DNA, 1733 bp, Diabrotica virgifera
tgtgaataatgttttattagtctataaattttgatgtcatcaagacacgtgggcatacttttctgctactattctcatatgaggcgataaaatctttggttcattttttagaaaccaacatacaatacatgaaacggtgtagctctcgaacaattctttaaaataaaattctaacattttatttgcgaaatcgtctcgatctttggtaagaattattttagtaaaaactgattccaatggacctaaatacttattttcagcaatagtatgtcgcagcatatcaaatatatctatattgtattttacagcatattgagggaactttacattgtataaaataacatttgctattatttgattatcgtatttagcattattactgaaattgttttctattaactgaacaaatagtggaaaatctacaattttaatacaaaattcgggattattctgacaaaaaattcagaattgttaggaaataatcatgtttaaaatgtatactataagagttattaacactattaataacttcttcaatatgctctaccatttctgtgtaaagccgcttactcacggataaatctatattatcgaaatctctgatacgacgttcaatagccatatctttcaggtattgaataagcaacggtttataatctttaccgttcttaactaaatactccaaatgtttttccatgaaatctccattgctgccaagtgagaattgtttttgtattcttaatatttctaattgttcgtcaatatacttccaatgattttcattaaagtcttccaacttgaatgcatttctcaatgagcccaggacacttgtacgaaaactcggctcttcatttctatgcctgaagcatatatacttcaaaacttccaccagtgcatccaaatcttcactgttcttacatgtttcaatcagtaataataccaaagattgtctctcccacaaatcagaagtgacattaattttttctttaagggccggtatagctttcgcaggtgggtagtatttaagaaagttattgtaatttccctgttgttctttatagtgaacttcagcccacaactcaataatttctttgggtggatttagcgacgtcattgaattaaaattcagcaagagatcttttaactctcgaccattgaatttttcggtaaatgtttgatttaataaattccatcttctgtttttaggataataacttattaactggcagctcttacagtacgtacttacactattgagctggttaggaaacaaatccttaaataaagtatcaaaatgtttacctaattttcgaacaactactgcattgtttaaaaactttaggtaatattcgctatcttttaaaacgtcatcattaaccatattaaaaatgtttttagaagttcttctgccaactcggtataaacgaatctttcgttcccgatgaagtttcaacacaagttctgggttttttatagctatattctttagtaccttctcatcattgtaatactgtttcaaattcacatagaatatgaacagctcttcacttttattgtatatgttaagtacttggtttgaatttaactgtaaatcaagctcaacaattgcagcttgaattttagtaggactgcatttgtgtaagactgatactgccatgggtatgccatacttttttaaaagggcttcaaagagtgagtctatctttttctcagtccagtgatttgaaatccta

SEQ ID NO: 2891 - DNA, 1736 bp, Diabrotica virgifera
tgtgaataatgttttattagtctataaattttgatgtcatcaagacacgtgggcatacttttctgctactattctcatatgaggcgataaaatctttggttcattttttagaaaccaacatacaatttgtgaaaccggaaatctctcgaaccattcttcaaaataaaattctaacattttgtttgcgaattcgtctcgttttttggtcagaattattttaacaaacattaaattaaatggacctaaatctttatcttcagcaatagcttggcgcaatgtagcaaatatatctatattgtattttacagcatattgagggaattttacattgtataaaataacatttgctattatttgattatcgtatttagcaattattactgaaattgttttctattaactgaacaaatagtggaaaatctacaattttaatacagaattcgggatagtcctgacaaaacctcagaactgttaagaaaaaatcatgtttaaaacgttcattataagtagaatcattgacactattaataacttcttcaatatgctctaccatttctgtgtaaagccgcttactcacggataaatctatattatcgaaatctctgatacgacgttcaatagccatatctttcaggtattgaataagcaacggtttataatctttaccgttcttaactaaatactccaaatgtttttccatgaaatctccattgctgccaagtgagaattgtttttgtattcttaatatttctaattgttcgtcaatatacttccaatgattttcattaaagtcttccaacttgaatgcatttctcaatgagcccaggacacttgtacgaaaactcggctcttcatttctatgcctgaagcatatatacttcaaaacttccaccagtgcatccaaatcttcactgttcttacatgtttcaatcagtaataataccaaagattgtctctcccacaaatcagaagtgacattaattttttctttaagggccggtatagctttcgcaggtgggtagtatttaagaaagttattgtaatttccctgttgttctttatagtgaacttcagcccacaactcaataatttctttgggtggatttagcgacgtcattgaattaaaattcagcaagagatcttttaactctcgaccattgaatttttcggtaaatgtttgatttaataaattccatcttctgtttttaggataataacttattaactggcagctcttacagtacgtacttacactattgagctggttaggaaacaaatccttaaataaagtatcaaaatgtttacctaattttcgaacaactactgcattgtttaaaaactttaggtaatattcgctatcttttaaaacgtcatcattaaccatattaaaaatgtttttagaagttcttctgccaactcggtataaacgaatctttcgttcccgatgaagtttcaacacaagttctgggttttttatagctatattctttagtaccttctcatcattgtaatactgtttcaaattcacatagaatatgaacagctcttcacttttattgtatatgttaagtacttggtttgaatttaactgtaaatcaagctcaacaattgcagcttgaattttagtaggactgcatttgtgtaagactgatactgccatgggtatgccatacttttttaaaagggcttcaaagagtgagtctatctttttctcagtccagtgatttgaaatccta

SEQ ID NO: 2892 - DNA, 1734 bp, Diabrotica virgifera
tgtgaataatgttttattagtctataaattttgatgtcatcaagacacgtgggcatacttttctgctactattctcatatgaggcgataaaatctttggttcattttttagaaaccaacatacaatttgtgaaaccggaaatctctcgaaccattcttcaaaataaaattctaacattttgtttgcgaattcgtctcgttttttggtcagaattattttaacaaacattaaattaaatggacctaaatctttatcttcagcaatagcttggcgcaatgtagcaaatatatctatattgtattttacagcatattgagggaattttacattgtataaaataacatttgctattatttgattatcgtatttagcaattattactgaaattgttttctattaactgaacaaatagtggaaaatctacaattttaatacaaaattcgggattattctgacaaaaaattcagaattgttaggaaataatcatgtttaaaatgtatactataagagttattaacactattaataacttcttcaatatgctctaccatttctgtgtaaagccgcttactcacggataaatctatattatcgaaatctctgatacgacgttcaatagccatatctttcaggtattgaataagcaacggtttataatctttaccgttcttaactaaatactccaaatgtttttccatgaaatctccattgctgccaagtgagaattgtttttgtattcttaatatttctaattgttcgtcaatatacttccaatgattttcattaaagtcttccaacttgaatgcatttctcaatgagcccaggacacttgtacgaaaactcggctcttcatttctatgcctgaagcatatatacttcaaaacttccaccagtgcatccaaatcttcactgttcttacatgtttcaatcagtaataataccaaagattgtctctcccacaaatcagaagtgacattaattttttctttaagggccggtatagctttcgcaggtgggtagtatttaagaaagttattgtaatttccctgttgttctttatagtgaacttcagcccacaactcaataatttctttgggtggatttagcgacgtcattgaattaaaattcagcaagagatcttttaactctcgaccattgaatttttcggtaaatgtttgatttaataaattccatcttctgtttttaggataataacttattaactggcagctcttacagtacgtacttacactattgagctggttaggaaacaaatccttaaataaagtatcaaaatgtttacctaattttcgaacaactactgcattgtttaaaaactttaggtaatattcgctatcttttaaaacgtcatcattaaccatattaaaaatgtttttagaagttcttctgccaactcggtataaacgaatctttcgttcccgatgaagtttcaacacaagttctgggttttttatagctatattctttagtaccttctcatcattgtaatactgtttcaaattcacatagaatatgaacagctcttcacttttattgtatatgttaagtacttggtttgaatttaactgtaaatcaagctcaacaattgcagcttgaattttagtaggactgcatttgtgtaagactgatactgccatgggtatgccatacttttttaaaagggcttcaaagagtgagtctatctttttctcagtccagtgatttgaaatccta

SEQ ID NO: 2893 - DNA, 2612 bp, Diabrotica virgifera
  SmartBlast Evalue=3E-10; Info=Novel hAT family dimerisation domain protein n=1 Tax=Danio rerio RepID=UPI0001E90AAD
ttggagcaagggccgtgagtgaacgtgctatagaccgttatttttgcagtaatttgttaataacagggttggaacgcggtttaggctatcacgactggcggcagtagacttggcgtataggggtactatgaaagggactgcaaacttgctgtggatagcgcatttcgagcttttcggcgaataaactcagtggcggcccgtgaggtagtgccatagagccatggcactaccttgctaactatgcagaaacatatttttttatcttaaaaacattttaatgcctgtttatttttttgtgaatatttctctttatttttataaattatatcaaatctggcaactgtgtagcgcaatgcaaatctaccgactctggccacccacagctgaccggataaaggatgaaaatcataaaaatcccagtgccgaacggcatagtggctcgtgagaaaagagaaagattgtatgagcatcctgtgtaagtgacagagagagagcggtattgcacttttaacatacgtttaaattggagtctctgtgccaggctcgaaatctcgaaaaggaagttagtggatcttaagatacaatgttttagatctacatatttctagtttctttacgcgttcgcttgacgctattgtgtttattgtctactactgtattgtatatttgtgtttatactctactatattttttaatttgtaattattagttagtgcgttgtgatcgtgggtgtcgtaggtataaaaataatattttgattattttctacgtttaatttatttattgacaatgaatcaaattagtatattaaaaaactcttttggtggtttttcgttagaaaaaaaaactacaaattaaagaactcggtcggcctttacccgatttaaaaattgaaaaacaaagtggaaatggacaaaacttcgctgtcgtaagtttaataaaattatttatgataaaaatagctggttgtgtggttgcgaacaaactaataaactcttctgttttgtatgcgttttgtttggaggtgacgagacttggtcaaacaaaggcaccgatgatcttgtacatatatgggagaaattgaaatcccatgaaaaatctaaagtgcacatgaataacgtttttagcttttcaacgcttggtaagttaaatataaaaacccaattaaattcagcttatcgtgatactctatttatatttaatatcctttttgaccatatcgtaaaaccgccacaaaaaatttaggcagctgcccggattctggcactaccttcctaaagttatacgagccgccactgaataaactattattttgttattaacagtaagagcgcattttgagtggtcgcgactggtcgcattcgattcagcgaccaaaaatacactagagaagaccttaacactatcaatttatttgcagagcttctgatagttcccggaaaaaccccagattttgccatggtttgttattaacaattggacgcaccacatttgggcttccagaccacttctattggattcagcgacccagagacttataataccaccatcaaatcgcggcggactgggggtgtccacgggacccctatgttgcgactagactaatggatcgtttacccttatacatcagagccatatgtggccacattatcagaggtgcgaaatatctcatatttcttatctgataatgtggcctaaatattccagctttcttgttttgatgttcgttatgacctcacgatcctttacatacaacaaagtcgagaagccgtagcatcttacggatcttatcctcatctccagaggaaggtttcgattaacgaacgtttttcatttttataaatgcttgttttgcaacttcaatgcgtatcttgatttctataccttggtcattgttttcattttcccaggttcccagatatttgtagttattcactatttctacttgttgctcgatatctaaccttcctaccataagttgcttagaaataatcatgaacttggttttttaacgttcattatttgtagtccttactttatactgacttgatataatatatttactagttgcagtgcttctagatctatagtgtcatctatatgttgttctatttttttgtctagtcaattttgtataaattgttctgtactgggagcattctgttgcatatactgactttgctggtgttacaaacgtggacagcaaccaatcctggggaatatcgaggaactcactaaatccctaaacatactaatgtattgcttttcatatgatacaaaatggcgcctgtctaccattttcaatgataacttcactaaaacgtcaaaaaatgaacatttagggaaaatggagactaaaatgtggtttcaaattattttataaagttatggcttctttatatttttttaaaccttaaacctttacaattatttcgacaatgatttttgatgtcgacttaataatatttttatgttttggtcttaataaaattagtgttaagtaaattgtttttaagtgtcaaaagagaatctacgaaaaataacagtgggtttttttatctaggattaatgttacatattaagcttacaagacttttttaatctaatcttta

SEQ ID NO: 2894 - DNA, 1302 bp, Diabrotica virgifera
  SmartBlast Evalue=2E-26; Info=Novel hAT family dimerisation domain protein n=1 Tax=Danio rerio RepID=UPI0001E90AAD
ttggagcaagggccgtgagtgaacgtgctatagaccgttatttttgcagtaatttgttaataacagggttggaacgcggtttaggctatcacgactggcggcagtagacttggcgtataggggtactatgaaagggactgcaaacttgctgtggatagcgcatttcgagcttttcggcgaataaactcagtggcggcccgtgaggtagtgccatagagccatggcactaccttgctaactatgcagaaacatatttttttatcttaaaaacattttaatgcctgtttatttttttgtgaatatttctctttatttttataaattatatcaaatctggcaactgtgtagcgcaatgcaaatctaccgactctggccacccacagctgaccggataaaggatgaaaatcataaaaatcccagtgccgaacggcatagtggctcgtgagaaaagagaaagattgtatgagcatcctgtgtaagtgacagagagagagcggtattgcacttttaacatacgtttaaattggagtctctgtgccaggctcgaaatctcgaaaaggaagttagtggatcttaagatacaatgttttagatctacatatttctagtttctttacgcgttcgcttgacgctattgtgtttattgtctactactgtattgtatatttgtgtttatactctactatattttttaatttgtaattattagttagtgcgttgtgatcgtgggtgtcgtaggtataaaaataatattttgattattttctacgtttaatttatttattgacaatgaatcaaattagtatattaaaaaactcttttggtggtttttcgttagaaaaaaaaactacaaattaaagaactcggtcggcctttacccgatttaaaaattgaaaaacaaagtggaaatggacaaaacttcgctgtcgtaagtttaataaaattatttatgataaaaatagctggttgtgtggttgcgaacaaactaataaactcttctgttttgtatgcgttttgtttggaggtgacgagacttggtcaaacaaaggcaccgatgatcttgtacatatatgggagaaattgaaatcccatgaaaaatctaaagtgcacatggataacgtttttagcttttcaatgcttggtaagttaaatataaaaacccaattaaattcagcttatcgtgatactctaattaaacataatgaacaggtagataagaatcgatatgtcttgaatcaaatcataaattgtataaggttttgtggagcttttgagtttgagttagctctaagaggtcacgac

SEQ ID NO: 2895 - DNA, 1334 bp, Diabrotica virgifera
gtcatttatttgtaaaaagccttatgttagttttttctttatagatcttattgcgcggaaattacaaatttcactcttgaaactacccatctgaaaatacgtcgattccacacagaatatttgtttttttttaagtaatatcttctcttgaggaggaagaatatcttctcttgtagttcattctcctatcggaggttggctatcatcacagctatccgtaccttattggcggctgctctgaaaatatctactgagctgcaactatactactctcttaagtttctcagccagaaaattattcgtcttcctatgttgcgactagactaatggatcgtttacccttatacatcagagccatatgtggccacattatcagaggtgcgaaatatctcatatttcttatctgataatgtggcctaaatattccagctttcttgttttgatgttcgttatgacctcacgatcctttacatacaacaaagtcgagaagccgtagcatcttacggatcttatcctcatctccagaggaaggtttcgattaacgaacgtttttcatttttataaatgcttgttttgcaacttcaatgcgtatcttgatttctataccttggtcattgttttcattttcccaggttcccagatatttgtagttattcactatttctacttgttgctcgatatctaaccttcctaccataagttgcttagaaataatcatgaacttggttttttaacgttcattatttgtagtccttactttatactgacttgatataatatatttactagttgcagtgcttctagatctatagtgtcatctatatgttgttctatttttttgtctagtcaattttgtataaattgttctgtactgggagcattctgttgcatatactgactttgctggtgttacaaacgtggacagcaaccaatcctggggaatatcgaggaactcactaaatccctaaacatactaatgtattgcttttcatatgatacaaaatggcgcctgtctaccattttcaatgataacttcactaaaacgtcaaaaaatgaacatttagggaaaatggagactaaaatgtggtttcaaattattttataaagttatggcttctttatatttttttaaaccttaaacctttacaattatttcgacaatgatttttgatgtcgacttaataatatttttatgttttggtcttaataaaattagtgttaagtaaattgtttttaagtgtcaaaagagaatctacgaaaaataacagtgggtttttttatctaggattaatgttacatattaagcttacaagacttttttaatctaatcttta

SEQ ID NO: 2896 - DNA, 1309 bp, Diabrotica virgifera
ctattattttgttattaacaagataggaacgcattttgagtggtcgcgactggtcgcattcgattcagcgaccaaaaatacactagagaagaccttaacactatcaatttatttacagagcttctaatagttcccgaaaggcacccaattttgccataatttgttattaacaattggacgcaccacatttgggcttccagaccacttctattggattcagcgacccagagacttataataccaccatcaaatcgcggcggactgggggtgtccacgggacccctatgttgcgactagactaatggatcgtttacccttatacatcagagccatatgtggccacattatcagaggtgcgaaatatctcatatttcttatctgataatgtggcctaaatattccagctttcttgttttgatgttcgttatgacctcacgatcctttacatacaacaaagtcgagaagccgtagcatcttacggatcttatcctcatctccagaggaaggtttcgattaacgaacgtttttcatttttataaatgcttgttttgcaacttcaatgcgtatcttgatttctataccttggtcattgttttcattttcccaggttcccagatatttgtagttattcactatttctacttgttgctcgatatctaaccttcctaccataagttgcttagaaataatcatgaacttggttttttaacgttcattatttgtagtccttactttatactgacttgatataatatatttactagttgcagtgcttctagatctatagtgtcatctatatgttgttctatttttttgtctagtcaattttgtataaattgttctgtactgggagcattctgttgcatatactgactttgctggtgttacaaacgtggacagcaaccaatcctggggaatatcgaggaactcactaaatccctaaacatactaatgtattgcttttcatatgatacaaaatggcgcctgtctaccattttcaatgataacttcactaaaacgtcaaaaaatgaacatttagggaaaatggagactaaaatgtggtttcaaattattttataaagttatggcttctttatatttttttaaaccttaaacctttacaattatttcgacaatgatttttgatgtcgacttaataatatttttatgttttggtcttaataaaattagtgttaagtaaattgtttttaagtgtcaaaagagaatctacgaaaaataacagtgggtttttttatctaggattaatgttacatattaagcttacaagacttttttaatctaatcttta

SEQ ID NO: 2897 - DNA, 2065 bp, Diabrotica virgifera
  SmartBlast Evalue=0; Info=Polyadenylate-binding protein 1 n=3 Tax=Apocrita RepID=E2B282_9HYME
aaaatgcacaagtactttttatttatgcttaaaaatataaaacataaaatcatcactgcttcagcaactactctttcttaatctgagtagtagcagcttgcttggcttgatgggcttgtaaaacagcaactgcttcttccactttgttcttaagggactcctgttgttccaacatgtgtagcagctcagtgttgtcaatctccaataacataccagtgattttacctgccatgtctggatacatgcgttggataagtggaaacaatctttcacccaacatctgtttttgctcctgtggtggagcagcagccaacatggttgctgtcaatggttcctgaccttgaatgtgtacagcctgctgtactggagcagcagcacctggtaaacctcccaaaggttgtggtggatttctcatgtttgaagtgtatttgaagttggctgttctgttaacagcagcaggtacaattgcattttgtggttgttgtccagtaatttgcctaggtacactcatgttgctacgcatggttgttgactgatttggtgggcgggcagtagctctgtaagtgttttgcataccggggtatacagtagttcctccttgagcaccctgtcttacagttgtttgggcggcccatctggtactagcacgaatttgagtcatctgtgctggtccatagaatctttgtgcggcaggaatggtaggaacaaaataaccgctagatgcacctggttgtatgaactgacccatctggtgcattctcatatttgccatacgctgcatgtactgagaagttaaatgtgctttacgatcttctttacgctgagctaaggcaacatataaaggcttagaaccaacaattctgccattcatttctgttaccgcctttgtagcttcttctggagaggaaaaacatacaaaaccaaaacccttgcttctaccttcttccaacatcactttggcagatgttatggttccaaaaggagtaaactctttacggagacgttcatcatctattgtatcatctagatttttaacatagagatttacaccctgatagcgattaagtctttccatttttaaggcttcaaagcgacgttttagttcttgttgacgctcagctctcttttgggctcttccaacatacaaaggttttccttcaaccaactcttttccatttaaagcttcaactgccgcttctgctgcctctgaactttcaaaggctacaaaaccaaatccttttgatttaccatcttctttactcattatcttgtagctggtaattttaccatacttttcaaacataacctttaactgttcctcagcaaaatcttcaccaaaatttttaacataaacatttgtgaacagcttggctttttctcccagttccttttctctttctttgtgtggaataaagcgacctacatatactttttttccgttcaacaacataccatttaccttttcaatagacttatttgcagcttcttcggtttcaaaatggacaaacccataacctttactagagctgttttcatcttgggctaccttacaactaagaatgttaccaaaagctgagaaagtatcgtacatggccttgttgtcaatggaacgatctaaattcttgataaaaacatttccaacgccagattttctcaatgatggatcacgttgagaccacatgatgcggataggcctaccttttatcaagtcaaaattcatggtatccaaagcacgctcagcatctgcaggttgttggaagttcacatatgcataacccaaggatcgacgtgtaatcaagtctctacacacgcgaatcgaaagcacaggacccgcggttgaaaatttctcaaaaagcatggcctcagtaatatcagaatgtaaatcgccgacgtataaagacgccataggataatttggggcagccggattcatcttcgttggatattttttacttttttacactattttacaattttttttgtttttttaatagtttttcttcacaataggtttaaaaagtctatttgtcagaagtcaaaaagaaaaaaggttatcatattcttc

SEQ ID NO: 2898 - DNA, 2065 bp, Diabrotica virgifera; identical to SEQ ID NO: 2897
  SmartBlast Evalue=0; Info=Polyadenylate-binding protein 1 n=3 Tax=Apocrita RepID=E2B282_9HYME

SEQ ID NO: 2899 - DNA, 2065 bp, Diabrotica virgifera
  SmartBlast Evalue=0; Info=Polyadenylate-binding protein 1 n=3 Tax=Apocrita RepID=E2B282_9HYME
aaaatgcacaagtactttttatttatgcttaaaaatataaaacataaaatcatcactgcttcagcaactactctttcttaatctgagtagtagcagcttgcttggcttgatgggcttgtaaaacagcaactgcttcttccactttgttcttaagggactcctgttgttccaacatgtgtagcagctcagtgttgtcaatctccaataacataccagtgattttacctgccatgtctggatacatgcgttggataagtggaaacaatctttcacccaacatctgtttttgctcctgtggtggagcagcagccaacatggttgctgtcaatggttcctgaccttgaatgtgtacagcctgctgtactggagcagcagcacctggtaaacctcccaaaggttgtggtggatttctcatgtttgaagtgtatttgaagttggctgttctgttaacagcagcaggtacaattgcattttgtggttgttgtccagtaatttgcctaggtacactcatgttgctacgcatggttgttgactgatttggtgggcgggcagtagctctgtaagtgttttgcataccggggtatacagtagttcctccttgagcaccctgtcttacagttgtttgggcggcccatctggtactagcacgaatttgagtcatctgtgctggtccatagaatctttgtgcggcaggaatggtaggaacaaaataaccgctagatgcacctggttgtatgaactgacccatctggtgcattctcatatttgccatacgctgcatgtactgagaagttaaatgtgctttacgatcttctttacgctgagctaaggcaacatataaaggcttagaaccaacaattctgccattcatttctgttaccgcctttgtagcttcttctggagaggaaaaacatacaaaaccaaaacccttgcttctaccttcttccaacatcactttggcagatgttatggttccaaaaggagtaaactctttacggagacgttcatcatctattgtatcatctagatttttaacatagagatttacaccctgatagcgattaagtctttccatttttaaggcttcaaagcgacgttttagttcttgttgacgctcagctctcttttgggctcttccaacatacaaaggttttccttcaaccaactcttttccatttaaagcttcaactgccgcttctgctgcctctgaactttcaaaggctacaaaaccaaatccttttgatttaccatcttctttactcattatcttgtagctggtaattttaccatacttttcaaacatgacctttaactgttcctcagcaaaatcttcaccaaaatttttaacataaacatttgtgaacagcttggctttttctcccagttccttttctctttctttgtgtggaataaagcgacctacatatactttttttccgttcaacaacataccatttaccttttcaatagacttatttgcagcttcttcggtttcaaaatggacaaacccataacctttactagagctgttttcatcttgggctaccttacaactaagaatgttaccaaaagctgagaaagtatcgtacatggccttgttgtcaatggaacgatctaaattcttgataaaaacatttccaacgccagattttctcaatgatggatcacgttgagaccacatgatgcggataggcctaccttttatcaagtcaaaattcatggtatccaaagcacgctcagcatctgcaggttgttggaagttcacatatgcataacccaaggatcgacgtgtaatcaagtctctacacacgcgaatcgaaagcacaggacccgcggttgaaaatttctcaaaaagcatggcctcagtaatatcagaatgtaaatcgccgacgtataaagacgccataggataatttggggcagccggattcatcttcgttggatattttttacttttttacactattttacaattttttttgtttttttaatagtttttcttcacaataggtttaaaaagtctatttgtcagaagtcaaaaagaaaaaaggttatcatattcttc

SEQ ID NO: 2900 - DNA, 1791 bp, Diabrotica virgifera
cgagtgttcatacaatcaacttgttatagaagtcagtgaaaaagtgcaatgaaattattcgtcctcgccctagtggcaggtgcggcaacactatccttatgtaaccccttcgaggggttagaagaggatagatggagacgatccctgctgacagacgccgataccagcctcaccggaggcgaaaagatatccaaaaggtctttacttactgaagccgatgctggactacctggtggtgagagaatatccaaacgatctctcttcactgaagctgatcctgctctgcctggtttcgagcgaatctctaagaggtctttgttaactgaagcagagtctgcgttacctggtggtgagcgaatctccaaaagatctttgttcagagaagcagatcctgctttacctagttctgagcgaatttccaagaggtctctgttaaccgaagctgagcctggtttacctggtggtgagcatatatccaaaaggtctctatttagagaagctgattatggtttgattggtagcgagaaaatatcaaagaggtcgacagatgaaggcgttgaaagaatttccaaacgggcagtggaagaagaccaagaagcagctgaacaattctggttaccgaaatttgccagaaaaaatttggaaagagctagaaggtctgacgatagtttagaagcagctgaatctacattcgccttccgtcccaactttgccaggcgagaattcagaagaatcaagagaaatattggatttttacctggttttgccagaaaaggtattagaggtagaagatcagcagagttagaagacacagaacaagaaaacaatgaaagaagcaaaagaaatattggcttcctacctggatttgcaagaaaaggtatacgaagcagacgatcagctgaattagatgacgcagaagaagaaaacaatgaaagaagtaaaagaaatattggtttcctgcctggttttgcaagaaaaggtataagaagcagacgatcagcagagttagaagacacagaggaagaaaataatgaaagaagcaaaagaaatattggcttcctacctggttttgctagaaaagggatacgaagcagacgatcagctgagctagatgacgcagaagaagaaaacaatgaaagaagcaaaagaaatattggctttttacctggtttcgcaagaaaaggtatcagaaatagacgttcagttgagatagaagacgatgaagaagaaaacaatgaaagaagtaaaagaaatattggcttcctacctggatttgcaagaaaaggtataaggagtagacgatcagctgaattagaaccagaaggagaaaataacgaaagagcaaagagaaacattggtttcttgcctggctttgcaaggaaaggtatcagaagcagacgttccatatacttagaagatacagaagatgaagaatctggtaacagagaaaagagaaatatcggctttttacctggtttcgcgagaaaaggtattagaagcaaacgatcagtagacgatgaggaagaaaatgattctgaaagaactaagagaaacattggatttttaccaggttttgctagaaaaggaatcagaagttaagctgaatgatctttgatttcaaaatgtactaactgttaatatgcaatttcaaaaaataccaaaaaattttcacatgtaaatgtatttatttctagattagggatttgtgtataattttttagataataaatcttttgtaatatagttacaagctggggtcttattggtgtaaggtacaaaataaaatttata

SEQ ID NO: 2901 - DNA, 1780 bp, Diabrotica virgifera
cgagtgttcatacaatcaacttgttatagaagtcagtgaaaaagtgcaatgaaattattcgtcctcgccctagtggcaggtgcggcaacactatccttatgtaaccccttcgaggggttagaagaggatagatggagacgatccctgctgacagacgccgataccagcctcaccggaggcgaaaagatatccaaaaggtctttacttactgaagccgatgctggactacctggtggtgagagaatatccaaacgatctctcttcactgaagctgatcctgctctgcctggtttcgagcgaatctctaagaggtctttgttaactgaagcagagtctgcgttacctggtggtgagcgaatctccaaaagatctttgttcagagaagcagatcctgctttacctagttctgagcgaatttccaagaggtctctgttaaccgaagctgagcctggtttacctggtggtgagcatatatccaaaaggtctctatttagagaagctgattatggtttgattggtagcgagaaaatatcaaagaggtcgacagatgaaggcgttgaaagaatttccaaacgggcagtggaagaagaccaagaagcagctgaacaattctggttaccgaaatttgccagaaaaaatttggaaagagctagaaggtctgacgatagtttagaagcagctgaatctacattcgccttccgtcccaactttgccaggcgagaattcagaagaatcaagagaaatattggatttttacctggttttgccagaaaaggtattagaggtagaagatcagcagagttagaagacacagaacaagaaaacaatgaaagaagcaaaagaaatattggcttcctacctggatttgcaagaaaaggtatacgaagcagacgatcagctgaattagatgacgcagaagaagaaaacaatgaaagaagtaaaagaaatattggtttcctgcctggttttgcaagaaaaggtataagaagcagacgatcagcagagttagaagacacagaggaagaaaataatgaaagaagcaaaagaaatattggcttcctacctggttttgctagaaaagggatacgaagcagacgatcagctgagctagatgacgcagaagaagaaaacaatgaaagaagcaaaagaaatattggctttttacctggtttcgcaagaaaaggtatcagaaatagacgttcagttgagatagaagacgatgaagaagaaaacaatgaaagaagtaaaagaaatattggcttcctacctggatttgcaagaaaaggtataaggagtagacgatcagctgaattagaaccagaaggagaaaataacgaaagagcaaagagaaacattggtttcttgcctggctttgcaaggaaaggtatcagaagcagacgttccatatacttagaagatacagaagatgaagaatctggtaacagagaaaagagaaatatcggctttttacctggtttcgcgagaaaaggtattagaagcaaacgatcagtagacgatgaagaagaaaaggattctgaaagaactaagagaaatattggatttttaccaggttttgctagaaaaggaatcagaagttaagctaaacgatttttgatttcaaaatgtactaactgttaatatgcaatttcaaaaaataccaaaaaattttcacatgtaattgtatttatttctagataaggatttgtgtataattttttagataataaatcttttgtaatatagttacaagctggggtcttattggtgtaaggtacaaaat

SEQ ID NO: 2902 - DNA, 1773 bp, Diabrotica virgifera
cgagtgttcatacaatcaacttgttatagaagtcagtgaaaaagtgcaatgaaattattcgtcctcgccctagtggcaggtgcggcaacactatccttatgtaaccccttcgaggggttagaagaggatagatggagacgatccctgctgacagacgccgataccagcctcaccggaggcgaaaagatatccaaaaggtctttacttactgaagccgatgctggactacctggtggtgagagaatatccaaacgatctctcttcactgaagctgatcctgctctgcctggtttcgagcgaatctctaagaggtctttgttaactgaagcagagtctgcgttacctggtggtgagcgaatctccaaaagatctttgttcagagaagcagatcctgctttacctagttctgagcgaatttccaagaggtctctgttaaccgaagctgagcctggtttacctggtggtgagcatatatccaaaaggtctctatttagagaagctgattatggtttgattggtagcgagaaaatatcaaagaggtcgacagatgaaggcgttgaaagaatttccaaacgggcagtggaagaagaccaagaagcagctgaacaattctggttaccgaaatttgccagaaaaaatttggaaagagctagaaggtctgacgatagtttagaagcagctgaatctacattcgccttccgtcccaactttgccaggcgagaattcagaagaatcaagagaaatattggatttttacctggttttgccagaaaaggtattagaggtagaagatcagcagagttagaagacacagaacaagaaaacaatgaaagaagcaaaagaaatattggcttcctacctggatttgcaagaaaaggtatacgaagcagacgatcagctgaattagatgacgcagtagaagaaaacaatgagagaagtaaaagaaatattggtttcctacctggttttgcaagaaaaggcataagaagcagacgattcgcagagttagaagacacagaggaagaaaataatgaaagaagcaaaagaaatattggcttcctacctggttttgctagaaaagggatacgaagcagacgatcagctgagctagatgacgcagaagaagaaaacaatgaaagaagcaaaagaaatatcggctttttacctggtttcgcaagaaaaggtatcagaagtagacgttcagctgagatagaagaagaagaagaaaataacgaaagaagtaaaagaaatattggctttctacctggatttgcaagaaaaggtataagaagtagacgatcagctgaattagaagaaccagaagaaaataacgaaagagcaaagagaaacattggtttcttgcctggctttgcaaggaaaggtatcagaagcagacgttccatatacttagaagatacagaagatgaagaatctggtaacagagaaaggagaaatatcggctttttacctggtttcgcgagaaaaggtattagaagcaaacgatcagtagatgatgaggaagaaaaggattctgaaagaactaagagaaacataggatttttaccaggttttgctagaaaaggaatcagaagttaaactaaatgatttttgatttcaaatgtactaactgttaatatgcaattttaaaaaataccaaaaaattttcacatgtaaatgtatttattatagtatttaggtatttgtgtataattttttagataataaatcttttgtaatatagttacaagctgggtcttattggtgtaaggtatg

SEQ ID NO: 2903 - DNA, 1430 bp, Diabrotica virgifera
  SmartBlast Evalue=2E-89; Info="Cathepsin L-like proteinase"" n= 1 Tax=Diabrotica virgifera virgifera RepID=Q70EX2_DIAVI"
ttttgaaatttttaattttttattattttaaatgaaagtgtataaattcaagaatactctctgaaaatttcggatcactaggagcaaaactaccggaaatacagcgtgttgaatatctctacctccgactcactttgcagcagcttcgctccagcgcgcttgagcttagtgagaaacgttcaacaaatgttccccgtctcttctgtaaattattacgcgattcaaaaacatattccggtgtgcatcacttttgatttgtcggacaaaaaaaaaattgaaaataaaattgtcagaactttaaacttgtttttcccaaaactgcttttttaaaggcggtgtacatcggtacaatgatattggtttattataaatttatttcatatttttcattgttgttggcccaaatttaaatttaaaatttacaaaacgggataggaattgtcttcgttaattccgcatgtgttttgtcctctagctagccttatgtatccttcttcaccccagtcttcaccccaagaatttttgatcaggatgtagtcatcggtgtaacccacagcaagcacagcatgattgagataacgtccacaatccgtttcattcaggatacctcctacatacagtgaccaataggatgcatcgacagtagaagatatgggtcccacattagcaatagcagaaatcaaatcttcttcggttggattacattccttatatccagagatagaactaatcgattttttgacatctttacgacaatcctgattttgaccttcgtatggataatctgcgtcggcacatatacctatatttcgaatttcttcgaaagcatcctcttgaataccaccactacaaccataatttgtcctactgcagtcgacaagatattgaggactcagaggaactctttggttttggtgaattgctacctgtccctccagggcaccgacgacactaaaggcccagcacgatccacatttaccctggtctcttacaggtagtactacgtcttttaacctccaatcaacagataatggtaaagtaacattggaatcggcaatacacgattggcgataagtaagcttgggctttgaagcagcctggcgtgttagtagagccttgaactcttctttggtccaatcggcaaatggagtgacacccttgaaccatcccacctctcctttggcgtatcttgcgttgtgctcttcgatttcttgaaggttgttttggaagatttggaatctcagtttatcttctgtgattctgtattgtttcgaatgtttcgccttaaaaggacgtattggtcataatcgttcaaatctgcggtgattcccgcaacaagacacgcaatacaagtagcaacttcatgatctattcttactgatactcttgatcacaaaattctatcgtctagaagatgtttataaatttcg

SEQ ID NO: 2904 - DNA, 1209 bp, Diabrotica virgifera
  SmartBlast Evalue=3E-88; Info="Cathepsin L-like proteinase"" n= 1 Tax=Diabrotica virgifera virgifera RepID=Q70EX2_DIAVI"
ttaaataaaattcagtgctctatatctgccttttatttccgcaaaattcaaatattcgagcactcaacttcttcctattttaataggaataaacacaaaagaggaaggaaaagaaaaatatggtacctattattggtttagtatacatttatatcacatttttcattgttgttggtccaaatttaaatttaaaatttacaaaatgggataggaattatctgcgttaattccgcatgtgtttactcctctagctagccttatgtatccttcttcgccccagtcttcaccccaagaattttttatcaggatgtagtcatcggtgtaacctacagcaagcacagcatgattgagccaatctctatcacaatccgtgtcatccaggatacctcctgcatacaatgaccattcggatgcatcgacactagaagctatgggtcccacattagcaatagcagaaatcaaatcttcttcggttggattacattccttatatccagagatagaactaatcgattttttgacatctttacgacaatcctgattttgaccttcgtatggataatctgcgtcggcacatatacctatatttcgaatttcttcgaaagcatcctcttgaataccaccactacaaccataatttgtcctactgcagtcgacaagatattgaggactcagaggaactctttggttttggtgaattgctacctgtccctccagggcaccgacgacactaaaggcccagcacgatccacatttaccctggtctcttacaggtagtactacgtcttttaacctccaatcaacagataatggtaaagtaacattggaatcggcaatacacgattggcgataagtaagcttgggctttgaagcagcctggcgtgttagtagagccttgaactcttctttggtccaatcggcaaatggagtgacacccttgaaccatcccacctctcctttggcgtatcttgcgttgtgctcttcgatttcttgaaggttgttttggaagatttggaatctcagtttatcttctgtgattctgtattgtttcgaatgtttcgccttaaaaggacgtattggtcataatcgttcaaatctgcggtgattcccgcaacaagacacgcaatacaagtagcaacttcatgatctattcttactgatactcttgatcacaaaattctatcgtctagaagatgtttataaatttcg

SEQ ID NO: 2905 - DNA, 1090 bp, Diabrotica virgifera
  SmartBlast Evalue=8E-92; Info="Cathepsin L-like proteinase"" n= 1 Tax=Diabrotica virgifera virgifera RepID=Q70EX2_DIAVI"
ttttttactattattagtttattatacatttatatcacatttttcattgttgttggtccaaatttaaatttaaaatttacaaaacgggataggaattatcttcgttaattgcgcatatgttatgccctcgagctagctttatgtatccttcttcaccccagtcttcaccccaagaatttttgatcaggatgtagtcatcggtataacctacagcaagcacagcatgattgagccaatctccacaattcgtgtcatccaggatacctcctgcatacaatgaccatgtggatgcatcgacagtagaagatatgggtcccacagtagcaacagcagaaatcaaatcttcttcggttggattacatttcttatatccagaaatagaactaatcgcttttttaacatctgtacgacaatcctgatcttgagctacgtatggataatctgcgtcggcacatatacctatactttgaatgtcttcgaaagtatcctcttgcataccaccactacaaccattatttctcttagagcagtcgttaagatattgtggactcagaggaactctttggttttggtgaattgctacctgtccctccagggcaccgacgacactaaaggcccagcacgatccacattgaccctggtctcttacaggtagtactgcgtctttaaacctccaatcaacaaataatggtaaagtaacattggaattggcgatacacgatcccaagttgtcggtaagcttgggctttgaagcagcctggcgtgttagtagagccttgaactcttctttggtccaatcggcaaatggagtgacacccttgaaccatcccacctctcctttggcgtatcttgcgttgtgctcttcgatttctcgaaggttgttttggaagatttggaatctcagtttatcttctgtgattctgtattgtttcgaatgtttcgccttaaaaaggacgtattggtcataatcgttcaaatctgcggtgattcccgcaacaagacacgcaataacaagtagcaacttcatgatctattcttactgatacttgatcacaaaattctatcgtctagaagatgtttataaatttcg

SEQ ID NO: 2906 - DNA, 1086 bp, Diabrotica virgifera
  SmartBlast Evalue=2E-88; Info="Cathepsin L-like proteinase"" n= 1 Tax=Diabrotica virgifera virgifera RepID=Q70EX2_DIAVI"
ttttttactattattagtttattatacatttatatcacatttttcattgttgttggtccaaatttaaatttaaaatttacaaaacgggataggaattatcttcgttaattgcgcatatgttatgccctcgagctagctttatgtatccttcttcaccccagtcttcaccccaagaatttttgatcaggatgtagtcatcggtataacctacagcaagcacagcatgattgagccaatctccacaattcgtgtcatccaggatacctcctgcatacaatgaccatgtggatgcatcgacagtagaagatatgggtcccacagtagcaacagcagaaatcaaatcttcttcggttggattacatttcttatatccagaaatagaactaatcgcttttttaacatctgtacgacaatcctgatcttgagctacgtatggataatctgcgtcggcacatatacctatactttgaatgtcttcgaaagtatcctcttgcataccaccactacaaccattatttctcttagagcagtcgttaagatattgtggactcagaggaactctttggttttggtgaattgctacctgtccctccagggcaccgacgacactaaaggcccagcacgatccacattgaccctggtctcttacaggtagtactgcgtctttaaacctccaatcaacaaataatggtaaagtaacattggaatcggcgatacacgattggcgataagtaagcttgggctttgaagtagcctggcgtgttagtagagccttgaactcttctttggtccaatcggcaaatggagtgacacccttgaaccatcccacctctcctttggcgtatcttgcgttgtgctcttcgatttctcgaaggtttttttggaagatttggaatctcagtttatcttctgtgattctgtattgtttcgaatgtttcgccttaaaaggacgtattggtcataatcgttcaaatctgcggtgttcccgcaacaagacacgcaataacaagtagcaacttcatgatctattcttactgatactctgatcacaaaattctatcgtctagaagatgtttataaatttcg

SEQ ID NO: 2907 - DNA, 1189 bp, Diabrotica virgifera
tctaaataaggaaatcttcatataattggtttggagaattttcaaaatgattgttcataatcagatttttaaattttaagtaagttggtacctacctttatcacaattcatatatgggtaaatgtcaactttaaagtgaactttacttaatgtttactttaagttgattatgaaaccgggcgattttgacaggtaaccgttaacacagattttactgtatttacagggcctaaaaagaatctactgatttctattgattttttgaaagcaaaactactatccgctgcaagataattcggatggaattcagacaaaatatgtacaaaaagtacatattttgtcggaggttcagccaaattatcttgcaacggatatagtactgaaagagtaagaactggcctggcaaccctgtctagcaaagctgatacaaagatttaagcttatcaaatctactgataaaacaatggacaatggagaaaccagctaataaaaaacaaataaataggataaaataataagaaaaagtaaggttataaagtaaattcttttttgctcctgaagttgccgtaaacgtgtcacacatctatagaactatacgtaaaggccctggggtcgtgagagacaactacctagtcggccagaaaacccatgggcgtaaattagtttagcattataacgtttttaagtagttgcgattgttgaaaaaacttaactgtgatatgtagttgtcacaatagtaataacttagttgcccatataactaaagatattacttaacgttgtaacatcgtaatgtcagtcgggttaggggtcgttggccgaaacaactgaaagtccactgtggcaacgttatatacagtgcatttatttgtactgacaaccaatgcgtcgaaaaattgctacttgggtaacttttgacgagcagtttatctcgaaaaaatattaaaaattacagccgcaatcctggaacgcgcctttgccacctgttgatcgccactgttcctcttaaggccttgtcatttagtacctatacccaatttaagcatttaaccaagtggcagcagttagaatgtgtttttgttttacccgataaaacccgaaatttgaactatttaaattttatttcgtacttactatcggattttaccgatacctcgcggatacttcgcactttacccgggcaatccca

SEQ ID NO: 2908 - DNA, 1044 bp, Diabrotica virgifera
tctaaataaggaaatcttcatataattggtttggagaattttcaaaatgattgttcataatcagatttttaaattttaagtaagttggtacctacctttatcacaattcatatatgggtaaatgtcaactttaaagtgaactttacttaatgtttactttaagttgattatgaaaccgggcgattttgacaggtaaccgttaacacagattttactgtatttacagggcctaaaaagaatctactgatttctattgattttttgaaagcaaaactactatccgctgcaagataattcggatggaattcagacaaaatatgtacaaaaagtacatattttgtcggaggttcagccaaattatcttgcaacggatatagtactgaaagagtaagaactggcctggcaaccctgtctagcaaagctgatacaaagatttaagcttatcaaatctactgataaaacaatggacaatggagaaaccagctaataaaaaacaaataaataggataaaataataagaaaaagtaaggttataaagtaaattcttttttgctcctgaagttgccgtaaacgtgtcacacatctatagaactatacgtaaaggccctggggtcgtgagagacaactacctagtcggccagaaaacccatgggcgtaaattagtttagcattataacgtttttaagtagttgcgattgttgaaaaaacttaactgtgatatgtagttgtcacaatagtaataacttagttgcccatataactaaagatattacttaacgttgtaacatcgtaatgtcagtcgggttaggggtcgttggccgaaacaactgaaagtccactgtggcaacgttatatacagtgcatttatttgtactgacaaccaatgcgtcgaaaaattgctacttgggtagataaatatacaaggtatatttacttttaaattaataattaataaccaatttattaaattatcctaggtaaatagaccttgtatatttatgtattattcgatattatgtatatcattttaaagtgcgcatagcg

SEQ ID NO: 2909 - DNA, 963 bp, Diabrotica virgifera
tctaaataaggaaatcttcatataattggtttggagaattttcaaaatgattgttcataatcagatttttaaattttaagtaagttggtacctacctttatcacaattcatatatgggtaaatgtcaactttaaagtgaactttacttaatgtttactttaagttgattatgaaaccgggcgattttgacaggtaaccgttaacacagattttactgtatttacagggcctaaaaagaatctactgatttctattgattttttgaaagcaaaactactatccgctgcaagataattcggatggaattcagacaaaatatgtacaaaaagtacatattttgtcggaggttcagccaaattatcttgcaacggatatagtactgaaagagtaagaactggcctggcaaccctgtctagcaaagctgatacaaagatttaagcttatcaaatctactgataaaacaatggacaatggagaaaccagctaataaaaaacaaataaataggataaaataataagaaaaagtaaggttataaagtaaattcttttttgctcctgaagttgccgtaaacgtgtcacacatctatagaactatacgtaaaggccctggggtcgtgagagacaactacctagtcggccagaaaacccatgggcgtaaattagtttagcattataacgtttttaagtagttgcgattgttgaaaaaacttaactgtgatatgtagttgtcacaatagtaataacttagttgcccatataactaaagatattacttaacgttgtaacatcgtaatgtcagtcgggttaggggtcgttggccgaaacaactgaaaatgctctcgggcaacgttatatacagtgcatttgtttgtactgacaaccaatgcgtcgaaaaattgctacttggggtgttgctgtgaatcgactatatgtacgtttgtcaatatttgattgcactaatgt

SEQ ID NO: 2910 - DNA, 668 bp, Diabrotica virgifera
tctaaataaggaaatcttcatataattggtttggagaattttcaaaatgattgttcataatcagatttttaaattttaagtaagttggtacctacctttatcacaattcatatatgggtaaatgtcaactttaaagtgaactttacttaatgtttactttaagttgattatgaaaccgggcgattttgacaggtaaccgttaacacagattttactgtatttacagggcctaaaaagaatctactgatttctattgattttttgaaagcaaaactactatccgctgcaagataattcggatggaattcagacaaaatatgtacaaaaagtacatattttgtcggaggttcagccaaattatcttgcaacggatatagtactgaaagagtaagaactggcctggcaaccctgtctagcaaagctgatacaaagatttaagcttatcaaatctactgataaaacaatggacaatggagaaaccagctaataaaaaacaaataaacaggttgttaaataaatcgaaaatttccagcaaaataaaatataaaataataagaaaaaagaaggttataaagtaaattctttttctccttctgaagttgccgcaaaggtgtcacaactctagaacaacacctagggtcgtgacagacaacttcagagtcggccag

SEQ ID NO: 2911 - DNA, 1292 bp, Diabrotica virgifera
tttgcatgttattaccagttttaattgtcaatggctcactcaatttttaacgtagacaaaatttttgcaaaacaatttcttgggaattaaataaactacaatttcatatttaaacattttttcatatctctgatgctaatcgttctattctgaagaaaagagaattttagccaaactccaaaaattcgttattcgcttttgacttcattttttttaaaaactaattattctaagccggttaaacttctagaacctattaataatacataaataaaaaagaccaaataaggtcaatgactaattttaattagggtggtgattagggggttgcttccgatcactttttcgctgaaaaaaatagggactgacattcttttcattataagtcacttaatttttgagctagagacttcttttttatttctggagatagatatttttaaatactttaaattagtttaacaagttatcctcgaaaaatgcatagttttcccgtcttttgactttgaaactacaatatttagcatttgacgaagaagagctaacatataataaagtatatcttgattactgttggtcttaaagaaaattaaaaaacacggttttgtttattttttcaaaaggtacatttttgttaagtaaagttgttttgataaaacgaaaacttttggagttattagcagaaaacttattaaaaacattgatttttcgatataaaactaacactttcgatagcgaataaatcgaaaactattaattttatcaaaaaaatgtatagaactttttttgcttagaatgaatggttttacaacttttgcggtcaaaatataataaaaaatttccacccccgagatggggtggcaaccaccccatggtaaaagcgcctttcggcatcatatagattttgatccttggactatccactacttatttcaaattttcaagcaaatcgatccattctgtaaaaattgcgaggtgaaaagttcagttcctggactaattatactttggagctctataacttctgaacggcttacctgatgttgatcactaaacatgaatttgaaacgtattgacaagtagtatctgatgcatccaagatcgagtatgataactgaacgtattacaggaattattgagcttgaaaaaccgtttttcccataagaaatagatttgatcatacttatgaagcctataacttaaaaattcgaattttcccagatataggtatacaccgttagacgcgtcctgagtccttctacaaacgctcagttattggcgcaattcgtagg

SEQ ID NO: 2912 - DNA, 1084 bp, Diabrotica virgifera
actaatcattctaagccggtcaaatttctagaacctattaataattcataaataaagaagaccaaataaggtcaatgactaattttgattagggtggtgattaggaggttgcttccgatcactttttcgcttaaaaaatagggactgacattattttcattataagtcactgaatttttgagctagtgacttttttttatttgtggagatagatatttttaaatactttaaattagattgaacaaatcaccctcgaaaaatgcatggttttcccgtcttttgactttgaaactacaatatttagcatttgacgaagtatttatatttgacctttgagctaacataataaagtatagctcgattactattggtcttaaagaaaattaaaaagaaggttttgtttatttttttaaaaggtacatttttgttagtaaagatgttttgataaaacaaaaacttttggagttattagcagaaaacttattaaaaacattgatttttcgatataaaactaacactttcgatagcgaataaatcgaaaactattaattttatcaaaaaaatgtatagaactttttttgcttagaatgaatggttttacaacttttgcggtcaaaatataataaaaaatttccacccccgagatggggtggcaaccaccccatggtaaaagcgcctttcggcatcatatagattttgatccttggactatccactacttatttcaaattttcaagcaaatcgatccattctgtaaaaattgcgaggtgaaaagttcagttcctggactaattatactttggagctctataacttctgaacggcttacctgatgttgatcactaaacatgaatttgaaacgtattgacaagtagtatctgatgcatccaagatcgagtatgataactgaacgtattacaggaattattgagcttgaaaaaccgtttttcccataagaaatagatttgatcatacttatgaagcctataacttaaaaattcgaattttcccagatataggtatacaccgttagacgcgtcctgagtccttctacaaacgctcagttattggcgcaattcgtagg

SEQ ID NO: 2913 - DNA, 862 bp, Diabrotica virgifera
tttgcatgttattaccagttttaattgtcaatggctcactcaatttttaacgtagacaaaatttttgcaaaacaatttcttgggaattaaataaactacaatttcatatttaaacattttttcatatctctgatgctaatcgttctattctgaagaaaagagaattttagccaaactccaaaaattcgttattcgcttttgacttcattttttttaaaaactaattattctaagccggttaaacttctagaacctattaataatacataaataaaaaagaccaaataaggtcaatgactaattttaattagggtggtgattagggggttgcttccgatcactttttcgctgaaaaaaatagggactgacattcttttcattataagtcacttaatttttgagctagagacttcttttttatttctggagatagatatttttaaatactttaaattagtttaacaagttatcctcgaaaaatgcatagttttcccgtcttttgactttgaaactacaatatttagcatttgacgaagaagagctaacatataataaagtatagctcgattactattggtcttaaaggaaaattaaaaaaaaactcttctgtttatttttttaaaaagtacatttttgttaaataaagttattttgagaaaacgaaaacttttggagttattagcagacaggcaatggttttttcgttataaaactaacactttcgacagcgaacaaatcgaaaactcttaattttatcaaaaaaatgtacaaaacgtttcctgcttagaatgaatgtttttaccaacatctgcggccaaaacacaataaaaaatttccatccccctagatggggtggcaaccc

SEQ ID NO: 2914 - DNA, 572 bp, Diabrotica virgifera
taacatttttgatagcgagtaagtcgaaaactgttaattttatcaaaaaaatgtatagaacatttttccttgatatgaatgtttttatcaactcttgtcgtcaaaatataataaggaatttccacccccgagatggggtggcaaccaccccatggtaaaagcgcctttcggcatcatatagattttgatccttggactatccactacttatttcaaattttcaagcaaatcgatccattctgtaaaaattgcgaggtgaaaagttcagttcctggactaattatactttggagctctataacttctgaacggcttacctgatgttgatcactaaacatgaatttgaaacgtattgacaagtagtatctgatgcatccaagatcgagtatgataactgaacgtattacaggaattattgagcttgaaaaaccgtttttcccataagaaatagatttgatcatacttatgaagcctataacttaaaaattcgaattttcccagatataggtatacaccgttagacgcgtcctgagtccttctacaaacgctcagttattggcgcaattcgtagg

SEQ ID NO: 2915 - DNA, 1556 bp, Diabrotica virgifera
taacaaatgtactgggtgccaggcagtaacttaatcgataaattgtttaaacaatttttttttagacaaattcatcatttgggttattctgagcaaaaaaaggtattttgtgatttttcactaaaattgattgttgtcgagttgtacgcgatttaaatttgaaaaatgcgaaaatatccattttcaaggcttgataactcggttaaaatcattattatgaaagtcagaaagtgaccaaatcaaagtttatagccccctctacaaaatccagcagaaatttttgtcactattttattactaagctttatctttaattattaacaatgagcgctaagtgcgtattaggcggccgtcaatggtgagtgctaaagagatgcaccattccagccgtccaatggtgaatctcactcgcactcacattgacggccgcctcaatcacggttagcgctcattgttgataattgaaaataatatcttattaatgaaataatgacaaaaatttcttcaggatcttgtagaggtagctttaatctttgattttttttagtttctgactttcataatatataatatcgtatggcatttttgcctttcggacagttccggcgccaattacatctttaaccctgtttcaagtaactagtgtcgatgtacactagcccagggggaccgacggcttaacgtgctctccgaggcacggtgagacggctcgtgtcattattgaaatgaaaatggtttgtctttagcagagctcgactcgaacccacgtgcactggcgtatgaggccagcgattatgccgttactccacggccgctcgctcgactttcacaataattacctttaaccgagttattaaaccttgaaaatggttattttggtgtttttcaaattttaagtcgctaataactcgacaacagtcaattttagagaaaaaaaaaggcccaacggatctaaaaaaaatttgtacgaagtgaaaaaattatgtatttttgcgaatttgtttaaaatcattgtttatcgccaaacttcactaaaatcattcattattgtactcatttgccctcattttcggcagtaaagtaacactttgttgtattgaaagaagaatgttactttacctgccgcgattattaatcaaattaaccgagattgaatgtaagtggtcaatggcagcaatcgattatttatttgagtgaaattaaaatttatttactttaattattaaaaatattgtacaaaatttatcttattattaataaaatttatgtcaaaaagtaaaattctgtagtgtttcgcaatagggcttttcattcacagtcatttgtttcgagcttctgtcatatgtcgtataatccgtgtatattaatattatacacagattgtacaacatatgacagaggctagaaacaaatgacaatcgatgaaaagccctattatattcatacaaaataaattaaaactttacagatttagtaattaggtaggtatacaatattgataactatcgattaaacatcaaaaccggccatcatgcaaaagtcatctgtcatacaaa

SEQ ID NO: 2916 - DNA, 940 bp, Diabrotica virgifera
tacatctttaaccctagtttcaagtaactagtgtcgatgtacactagcccagggggaccgactgcttaacgtgctctccgaggcacggtgagacggctcgtgtcattattggaaatgaaaatggtttgtctttagcagggctcgaacccacgtgcactggcgtatgaggccagcgattatgccgttactccacggccgctcgctcgactttcacaataattatctttaaccgagttattaaaccttgaaaatggttattttggggtttttcaaattttaagtcgctaataactcgacaacagtcaattttagagaaaaaaaaaggcccaacggatctaaaaaaaatttgtacgaagtgaaaaaattatgtatttttgcgaatttgtttaaaatcattgtttatcgccaaacttcactaaaatcattcattattgtactcatttgccctcattttcggcagtaaagtaacactttgttgtattgaaagaagaatgttactttacctgccgcgattattaatcaaattaaccgagattgaatgtaagtggtcaatggcagcaatcgattatttatttgagtgaaattaaaatttatttactttaattattaaaaatattgtacaaaatttatcttattattaataaaatttatgtcaaaaagtaaaattctgtagtgtttcgcaatagggcttttcattcacagtcatttgtttcgagcttctgtcatatgtcgtataatccgtgtatattaatattatacacagattgtacaacatatgacagaggctagaaacaaatgacaatcgatgaaaagccctattatattcatacaaaataaattaaaactttacagatttagtaattaggtaggtatacaatattgataactatcgattaaacatcaaaaccggccatcatgcaaaagtcatctgtcatacaaa

SEQ ID NO: 2917 - DNA, 862 bp, Diabrotica virgifera
taacaaatgtactgggtgccaggcagtaacttaatcgataaattgtttaaacaatttttttttagacaaattcatcatttgggttattctgagcaaaaaaaggtattttgtgatttttcactaaaattgattgttgtcgagttgtacgcgatttaaatttgaaaaatgcgaaaatatccattttcaaggcttgataactcggttaaaatcattattatgaaagtcagaaagtgaccaaatcaaagtttatagccccctctacaaaatccagcagaaatttttgtcactattttattactaagctttatctttaattattaacaatgagcgctaagtgcgtattaggcggccgtcaatggtgagtgctaaagagatgcaccattccagccgtccaatggtgaatctcactcgcactcacattgacggccgcctcaatcacggttagcgctcattgttgataattgaaaataatatcttattaatgaaataatgacaaaaatttcttcaggatcttgtagaggtagctttaatctttgattttttttagtttctgactttcataatatataatatcgtatggcatttttgcctttcggacagttccggcgccaattacatctttaaccctgtttcaagtaactagtgtcgatgtacactagcccagggggaccgacggcttaacgtgctctccgaggcacggtgagacggctcgtgtcattattgaaatgaaaatggtttgtctttagcagggctcgaacccacgtgcactggcgtatgaggccagcgattatgctgttactccacggccgctcgctcgactttcacaataattatcttatctttaaccgagttatcaaacccc

SEQ ID NO: 2918 - DNA, 387 bp, Diabrotica virgifera
taaactaaaagtgtacactactagaacaaatttacgaacacgttttcattacaaaagatttggtgtggtaattaaatatgtaattaaacatataattttttacttaggtacagtcggaaaaaggaaagaatagggcttttcattcacagtcatttgtttcgagcttctgtcatatgtcgtataatccgtgtatattaatattatacacagattgtacaacatatgacagaggctagaaacaaatgacaatcgatgaaaagccctattatattcatacaaaataaattaaaactttacagatttagtaattaggtaggtatacaatattgataactatcgattaaacatcaaaaccggccatcatgcaaaagtcatctgtcatacaaa

SEQ ID NO: 2919 - DNA, 1170 bp, Diabrotica virgifera
  SmartBlast Evalue=9E-79; Info=Endonuclease-reverse transcriptase n=1 Tax=Bombyx mori RepID=D5LB38_BOMMO
tattcttatcctggtccttatttctgtcgtttggtcgtttctgtcgttcaagttcctaggtatttgtatttgtcaaccctttctatcggcacatttccgaaatgtttgcttgtttgtatgtttgttttattcttagttattatcatgtatttggtctttttatgttcatttttagtccatattcttcacagaaactgtttgtcttgtttagtagtaattggagttgttcagcagagcttgccataatcacggtgtcatctgcatatcttatgttgttaatagatcttccgttaattattattccttcactttgagatagcaatgcttcttcaaaaatggcttcactatatgcattaaagagtaatggagacataatacatccctgccgaactcctctcctgatttcaatttctggactgggttcgttatctattacaatttgtgctctttgattccagtaaaggtttgttattattcgtaagtcccttttgtctatgttttttgtctttagaatttggactaatttttcatgtcttactttgtcaaaagctttctcaaaatcaacgtaacaaacatgcacatccacattcatgtccatgcatctttgagctaacacattaaaagcaaataacgcctctctggttcctagtccgtttctgaacccaaactgactatcatctattccttcttctagttttttgtttatacgaccatgtattattttcaagaataatttgagaatgtgacttattaatgatattgttctgtattcactgcaatctttagcgtttgtatttttagggatagcacaaaaggttgagagtaaccattgttttggtatgtttcctgttttgtacactgtgttaaacaagtctacgataatgtctaaggtttcatcatttatgcattttaagatttctactaggattttgaacctattgctttaccatttttttgtttttttaatgccattttaatttcctcttctaatatctttaaaaccatatccttattttccatatcctcttctacttctatttccatctgatctattgtattgtcgttgaacagttcattgatgtattctgtccatctctttaatttttcgttagtactcaacacaagtttcccatctgtatcttttagtattcccggtttctttttctgttg

SEQ ID NO: 2920 - DNA, 1152 bp, Diabrotica virgifera
  SmartBlast Evalue=1E-75; Info=Endonuclease-reverse transcriptase n=1 Tax=Bombyx mori RepID=D5LB38_BOMMO
tttcttgctatttctatcctggtccttatttctgtttgataatttttttctgaaatgcaggttctctgaaatcctacatttcccaaaagtatgctcgtttgtatgtttgttttcttagttattatcatgtatttggtctttttatgttcatttttagtccatattcttcacagaaactgtttgtcttgtttagtagtaattggagttgttcagcagagcttgccataatcacggtgtcatctgcatatcttatgttgttaatagatcttccgttaattattattccttcactttgagatagcaatgcttcttcaaaaatggcttcactatatgcattaaagagtaatggagacataatacatccctgccgaactcctctcctgatttcaatttctggactgggttcgttatctattacaatttgtgctctttgattccagtaaaggtttgttattattcgtaagtcccttttgtctatgttttttgtctttagaatttggactaatttttcatgtcttactttgtcaaaagctttctcaaaatcaacgtaacaaacatgcacatccacattcatgtccatgcatctttgagctaacacattaaaagcaaataacgcctctctggttcctagtccgtttctgaacccaaactgactatcatctattccttcttctagttttttgtttatacgaccatgtattattttcaagaataatttgagaatgtgacttattaatgatattgttctgtattcactgcaatctttagcgtttgtatttttagggatagcacaaaaggttgagagtaaccattgttttggtatgtttcctgttttgtacactgtgttaaacaagtctacgataatgtctaaggtttcatcatttatgcattttaagatttctactaggattttgaacctattgctttaccatttttttgtttttttaatgccattttaatttcctcttctaatatctttaaaaccatatccttattttccatatcctcttctacttctatttccatctgatctattgtattgtcgttgaacagttcattgatgtattctgtccatctctttaatttttcgttagtactcaacacaagtttcccatctgtatcttttagtattcccggtttctttttctgttg

SEQ ID NO: 2921 - DNA, 1096 bp, Diabrotica virgifera
  SmartBlast Evalue=3E-82; Info=Endonuclease-reverse transcriptase n=1 Tax=Bombyx mori RepID=D5LB38_BOMMO
tcaaccctttctatctgtacatttcccaaatgtatgcttgtttgtatgtttttttgcttagttatgatcatgaatttggtcatttttatattcatttttagtccatattcttcacagaaattgtttgttttgttcagtagtagttggagttgttcagcagagcttgccataatcacggtgtcatctgcatatcttatgttgttaatagatcttccgttaattattattccttcactttgagatagcaatgcttcttcaaaaatggcttcactatatgcattaaagagtaatggagacataatacatccctgccgaactcctctcctgatttcaatttctggactgggttcgttatctattacaatttgtgctctttgattccagtaaaggtttgttattattcgtaagtcccttttgtctatgttttttgtctttagaatttggactaatttttcatgtcttactttgtcaaaagctttctcaaaatcaacgtaacaaacatgcacatccacattcatgtccatgcatctttgagctaacacattaaaagcaaataacgcctctctggttcctagtccgtttctgaacccaaactgactatcatctattccttcttctagttttttgtttatacgaccatgtattattttcaagaataatttgagaatgtgacttattaatgatattgttctgtattcactgcaatctttagcgtttgtatttttagggatagcacaaaaggttgagagtaaccattgttttggtatgtttcctgttttgtacactgtgttaaacaagtctacgataatgtctaaggtttcatcatttatgcattttaagatttctactaggattttgaacctattgctttaccatttttttgtttttttaatgccattttaatttcctcttctaatatctttaaaaccatatccttattttccatatcctcttctacttctatttccatctgatctattgtattgtcgttgaacagttcattgatgtattctgtccatctctttaatttttcgttagtactcaacacaagtttcccatctgtatcttttagtattcccggtttctttttctgttg

SEQ ID NO: 2922 - DNA, 297 bp, Diabrotica virgifera
  SmartBlast Evalue=3E-11; Info=Endonuclease-reverse transcriptase n=1 Tax=Bombyx mori RepID=D5LB38_BOMMO
gttaaacaagtctacgataatgtctaaggtttcatcatttatacattttaagctttctactgggatttggtctggacctactgctttaccatttttgctgttttttaatgccgatttaatttcttcttttaatatcttcaaaaccgtatcatcttctacttcgacttccatctgctctgttctattgtctttgaacaattcattgatgtattctgtccatctctttaatttttcgttagtactcaacacaagtttcccatctgtatcttttagtattcccggtttctttttctgttg

SEQ ID NO: 2923 - DNA, 1212 bp, Diabrotica virgifera
  SmartBlast Evalue=4E-10; Info=Uncharacterized conserved secreted glycine-rich protein n=1 Tax=Glossina morsitans morsitans RepID=D3TP52_GLOMM
tgacagtcagtggtcggtcgtctcgtgtcgttggtttgaatagttgaataattttgtgactgcattgtgtttctatatttttattcgtctgccagtacgtctgcaagattttgacaagtattttgtggattaggttacatgacaccaaaatgaatctattccagtttgctattttcttaggatactttagtattggatactgttacacaaaatatggaagaacttgcaaagacataggatgtcccagtactcaagaatgtgtcatggccacagatccatgtagttactaccatagacaaggggaatgcggttcctatcccacatgccaaagagtttcaaatgcacccaggacatgctctacgtacgtttgtccgcctaccaaagtatgtagaatggatggagatacaccaaaatgttttgatgatgtgggcaaagttggccatgtaggttacgagactagtggaaacactaatcatttatcacaaagtggacataatggtaatctgtatcctaatctaccaaaaggagaaacaacacctaggccgaatattaacagaccagttagttcaggtggatatcaaggaggtcaagtaggttctggttatccaggaggacaagtaaattcaggttatccaggtggccaagtaggttcaggctatccaggaggtcaagtaggttcaggctatccaggaggtcaagtaggttcaggctatccaggaggtcaggtaggatctggatatcctggatacacacagcaaggaggttatcccagacaaggatatccacaacaaggatatccacaacagggttatccacaacaaggtaatcaaagacaaaccggataccaacaatatggaggatatccacaaaccaacaaaccaagctcggggacttccatatcagacaaaatcactagcggccttaaatccatagggctattctgtgttgtcttggtgtataccaggttatttagtatatgaaaatagatttgtataaatttaccaaactaatatacttaaattctacaaaaattcccggctataaatgtggattttttaataaactgcgtgtcaagtaaaagaagagatagtactgctagggaattcattttgtactccatgcatgatccatcatttttaattatttttttattttgtataaaaagactaaatccgtttataattatgtaaattaataaagatattatattat

SEQ ID NO: 2924 - DNA, 838 bp, Diabrotica virgifera
  SmartBlast Evalue=2E-10; Info=Uncharacterized conserved secreted glycine-rich protein n=1 Tax=Glossina morsitans morsitans RepID=D3TP52_GLOMM
tgacagtcagtggtcggtcgtctcgtgtcgttggtttgaatagttgaataattttgtgactgcattgtgtttctatatttttattcgtctgccagtacgtctgcaagattttgacaagtattttgtggattaggttacatgacaccaaaatgaatctattccagtttgctattttcttaggatactttagtattggatactgttacacaaaatatggaagaacttgcaaagacataggatgtcccagtactcaagaatgtgtcatggccacagatccatgtagttactaccatagacaaggggaatgcggttcctatcccacatgccaaagagtttcaaatgcacccaggacatgctctacgtacgtttgtccgcctaccaaagtatgtagaatggatggagatacaccaaaatgttttgatgatgtgggcaaagttggccatgtaggttacgagactagtggaaacactaatcatttatcacaaagtggacataatggtaatctgtatcctaatctaccaaaaggagaaacaacacctaggccgaatattaacagaccaggtaatcaaagacaaaccggataccaacaatatggaggatatccacaaaccaacaaaccaagctcggggacttccatatcagacaaaatcactagcggccttaaatccataggtggattttttaataaactgcgtgtcaagtaaaagaagagatagtactgctagggaattcattttgtactccatgcatgatccatcatttttaattatttttttattttgtataaaaagactaaatccgtttataattatgtaaattaataaagatattatattat

SEQ ID NO: 2925 - DNA, 653 bp, Diabrotica virgifera
gggggaatgcggttcctatcccacatgccaaagagtttcaaatgcacccaggacatgctccacgtacgtttgtccgcctaccaaagtatgtagaatggatggagatacaccaaaatgctttgatgatgtgggcaaagttggccatgtaggatacgagactagtggaaacactaatcatttatcacaaagtgggcataatggtaatctgtatcctaatctaccaagaggagaaacaacacctaggccgaatattaacagaccaggtaatcaaagacaaaccggataccaacaatatggaggatatccacaaaccaacaaaccaagctcggggacttccatatcagacaaaatcactagcggccttaaatccatagggctattctgtgttgtcttggtgtataccaggttatttagtatatgaaaatagatttgtataaatttaccaaactaatatacttaaattctacaaaaattcccggctataaatgtggattttttaataaactgcgtgtcaagtaaaagaagagatagtactgctagggaattcattttgtactccatgcatgatccatcatttttaattatttttttattttgtataaaaagactaaatccgtttataattatgtaaattaataaagatattatattat

SEQ ID NO: 2926 - DNA, 303 bp, Diabrotica virgifera
acgtcaaacccgcacaaagtttgtattataccacaatataacacgccagatttaaattttcgtttcgtactaacatttgctctttttgttattgtttacgaattttgtacagttaatattttgattttcttttgaaggtggattttttaataaactgcgtgtcaagtaaaagaagagatagtactgctagggaattcattttgtactccatgcatgatccatcatttttaattatttttttattttgtataaaaagactaaatccgtttataattatgtaaattaataaagatattatattat

SEQ ID NO: 2927 - DNA, 1060 bp, Diabrotica virgifera
aggtcattgacggctgaaactagagaatcatactacgcacttgctcgtaaaacttagttaggccaaacagttaagcaacattaaggtggggtatggtttgaaatatttaattttttttattatttcaaataaaagtgcatactttcaagaatactctctgaaaatttcaaaataatcggagtaaaattaccagagatacagggtgttgaatatccctaccttcgactcgcgttgccgcggcttcgcgccagcacgcttgagcgtagtgagaaacgttaaacaactgttcgccttctcttttgtagattactccgcaattcaaaaaacatattccaatgttcatcactttacgatttggcagacaaataagaagatgaagatgcagttgtcaaaactttaaacgcatttttctcaaaactgctttttcaaatgcggtggacattgtaactgaaaaactacttgaccgatctacctgaaattttgcatagattttctttagacatttcgtgaggtaacaacgtcgagatatttttcgttttgtgcttattttttgttcaacaatattaaatctgttggttttcacaaaatttttatcaaaaatttcgtatttttgacttctgagtgataccaaaaattcaaaaatcattaaaaataaaaaactcgacgttgtgacctcgtgaaactcataagctaattaaatctttttgaattttttgtttcgtatgatccagtgatgagttctgatgtccaccgcaaaatccatttttttgtgagctgcctgtcaaaatttgtcaccaatggcttatttttcaatattttggattgaatttttttctaaatattctttgaattgtacttaatatgtttatttaatttaaaaataaaataattctaccatagcttcgaaaaaaattcacaaaaatgtgcttgatatgttgatttcaaactataccccctccttaaatattgcattttaatcgagttctgagctattctgaaaatttcaggtgcctaggtagcctagaagtatgtttaaaatggattacaaaatttgccggac

SEQ ID NO: 2928 - DNA, 845 bp, Diabrotica virgifera
ccctaccttcgactcgctttgccgcgactttgcgccagcacgcttgagcgtagtgagaaacgttaaacaactgttcgccttctcttttgtagattactcatcgattcaaaaaacatattccaatgtgcatcactttacgatttggcagacaaataagaagatgaagatgcagttgtcaaaactttaaacgcatttttctcaaaactgctttttcaaatgcggtggacattgtaactgaaaaactactcggccgatctacctgatattttgcacagattttctttagacatttcatgaggtaacaacgtcgagatatttttctttttttgcttattttttgttcaacaataataaatctgttgattttcacaaatttttaccaaaatttcatttttttgatttctgagtgataccaaaaattcaaaaatcattaaaaataaaaaactcgacgttgtgacctcgtgaaactcataagctaattaaatctttttgaattttttgtttcgtatgatccagtgatgagttctgatgtccaccgcaaaatccatttttttgtgagctgcctgtcaaaatttgtcaccaatggcttatttttcaatattttggattgaatttttttctaaatattctttgaattgtacttaatatgtttatttaatttaaaaataaaataattctaccatagcttcgaaaaaaattcacaaaaatgtgcttgatatgttgatttcaaactataccccctccttaaatattgcattttaatcgagttctgagctattctgaaaatttcaggtgcctaggtagcctagaagtatgtttaaaatggattacaaaatttgccggac

SEQ ID NO: 2929 - DNA, 508 bp, Diabrotica virgifera
ccctaccttcgactcgctttgccgcgactttgcgccagcacgcttgagcgtagtgagaaacgttaaacaactgttcgccttctcttttgtagattactcatcgattcaaaaaacatattccaatgtgcatcactttacgatttggcagacaaataagaagatgaagatgcagttgtcaaaactttaaacgcatttttctcaaaactgctttttcaaatgcggtggacattgtaactgaaaaactactcggccgatctacctgatattttgcacagattttctttagacatttcatgaggtaacaacgtcgagatatttttctttttttgcttattttttgttcaacaataataaatctgttgattttcacaatatttttaccaaaaattacatcttttgatttctgagtgataccaaaaattcaaaatcattaaaaataaaaaaactacgacgttgtgacctcgtgaaactcataagctaattaaaatactttttgtaatttttgttt

SEQ ID NO: 2930 - DNA, 464 bp, Diabrotica virgifera
aggtcattgacggctgaaactagagaatcatactacgcacttgctcgtaaaacttagttaggccaaacagttaagcaacattaaggtggggtatggtttgaaatatttaattttttttattatttcaaataaaagtgcatactttcaagaatactctctgaaaatttcaaaataatcggagtaaaattaccagagatacagggtgttgaatatccctaccttcgactcgcgttgccgcggcttcgcgccagcacgcttgagcgtagtgagaaacgttaaacaactgttcgccttctcttttgtagattactcctcgattcaaaaacatattccaatgtgcatcactttacgatttggcagacaaataagaagatgaagatgcagttgtcaaaactttaaacgcatttttctcaaaactgctttttcaaatgcggtggacattgtaactgaaaaactactgggcc

SEQ ID NO: 2931 - DNA, 1501 bp, Diabrotica virgifera
  SmartBlast Evalue=6E-32; Info=Endonuclease-reverse transcriptase n=1 Tax=Bombyx mori RepID=D7F170_BOMMO
ccggtcggtcggctccagtgagtgtacagggttattcatattttgacccccttgtggattgctttatttatagaattagaaaaaaaatgtaaaattttaattatgatttttgacataatatatcgtactagtgacgtcattcatctgaataggggtcgtgttatagctcatttgaaaggttattcagttctctatgcagtactttgaacattaagatcattatttatacaagggtgtccaaataaatttttgaattattaattgaacaattaatttaattaattttttttgggcaccctgtataattgatgttaatgtttatattctgaatagagaattgaattactttcaaatgagctatcacacgaccactattaccattaaaagaatcatcgataacgtcatacgtcactggtatgttatatgtgccgaggggtcgcaatttaaaaataaaaattgacctgtttctggattttttttcaaaatcgtccattctcgagaaatgaatttgttcccacctttgcgtgctgactgtatatcatcatcatcggtgaccgctgacagcccatggagggccatggtcgcccgttggggtttctaggctctaaagttttacatggtgtggaggccagccacacgcataactcctcaaaagttctaaacgatatttatctaaaatattactttcttgtttctttttttgaggaggtcttttcggcgttatgtgtgctttgcttgtttgactatagctgcccatgtttttctttcctttgcttgtttttcccattctcgtattcctaggtctttcaaatcctggttaataccatcaatccatctctttctaggcctacctctcggtcttttcccatttaattattttctaagtaactttttttgtatttctcttatcatccatcctttctacgtgtcctaaccaactcagtcgtttacttcgtatttcttttgtgatagtaggtctgttaaacactctgtttatttcgtggttcattcttatacgccattctccattctcctgtataggtccatatattttccttaagatttttctttcccatctaagaagttgttcctcttgttcactagtcaaggcccatgtttctgatgcatacattactacaggtctcattattgttgtgtatatttttacttttgaattaatcgatactgattttgactttatgatattttgtaggctgtagaagcatttatttccaagcgaaattcttgctgttacctcatcactgttttattccttctgttattgttgatcctaaatatttgaaacggtccactctttcaaatatttgcccgctcagagatatgttgcctttcgtttgtactttttcccgagttgttatcatgtactttgtctttgagacattaacttctagacccatagtctgtgccgcttctttaaaatatgtataaatttttctaggtcttttaatgtccagctgattatgtctatatcatctacgta

SEQ ID NO: 2932 - DNA, 642 bp, Diabrotica virgifera
  SmartBlast Evalue=4E-22; Info=Endonuclease-reverse transcriptase n=1 Tax=Bombyx mori RepID=D7F170_BOMMO
cctctcggtctcttcccatttaattcttttctaagtactttttttgtattctcttatcatccatcctttctacgtgtcctaaccaactcagtcgtttacttcgtatttcttttgtgatagtaggtctgttaaacactctgtttatttcgtggttcattcttatacgccattctcctgtataggtccatatattttccttaagatttttctttcccatctaagaagttgttcctcttgttcactagtcaaggcccatgtttctgatgcatacattactacaggtctcattattgttgtgtatatttttacttttgaattaatcgatactgattttgactttatgatattttgtaggctgtagaagcatttatttccaagcgaaattcttgctgttacctcatcactgttttattccttctgttattgttgatcctaaatatttgaaacggtccactctttcaaatatttgcccgctcagagatatgttgcctttcgtttgtactttttcccgagttgttatcatgtactttgtctttgagacattaacttctagacccatagtctgtgccgcttctttaaaatatgtataaatttttctaggtcttttaatgtccagctgattatgtctatatcatctacgta

SEQ ID NO: 2933 - DNA, 466 bp, Diabrotica virgifera
ggagtctattcctctcaaaaagttagtttttaaatattggggactttgctgtttttgaaatgaccgattcaattataagtaattagacattatttttatttatgaaactattgttacaattttttaaaaaagtagaagcaaaacaaacattcacatcattcgaataaggacgaatttatattaataacgaatgacttttattttactatgcagttcacaaattatgtattccaatattcttactatacatacatttattatctgctagatttacttaggtccatttttcagatgtaaaaatatctggtgggcgcggtattgattgggtaaaaataaaaaagagtggagttggtgtgggattcgaactacggttgtccacgtccgaggaccgaagaccatttcccgtcaccacccgcttcaactgtcaatacatattactcgataaattgggatattcacgtcgttg

SEQ ID NO: 2934 - DNA, 396 bp, Diabrotica virgifera
  SmartBlast Evalue=1E-35; Info=60S ribosomal protein L40 (Fragment) n=6 Tax=Eukaryota RepID=Q5CYH8_CRYPV
attttagaaaacgttcaataagcagggtgcagggtcaagaagtaaagtgttctagaaatacagattaaattgtttcctttgtgttattgaaaggcaaaaataaaataatgcagatctttgtaaaaacactcactggtaaaaccatcaccctcgaggttgaaccatcagataccatcgagaatgtcaaagctaaaattcaagacaaagaaggtattccaccagatcaacaaagattaatctttgccggaaagcagttggaagatggccgtactctctcagactacaacattcaaaaagagtctacccttcacttggtacttcgtttaagaggaggaaattaatatggttgaaattaagcacatttttatattttcaataaataaattataaattaaa

SEQ ID NO: 2935 - DNA, 1795 bp, Diabrotica virgifera
  SmartBlast Evalue=0; Info=Eukaryotic translation initiation factor 3 subunit L (Fragment) n=1 Tax=Biston betularia RepID= E3UKK0_9NEOP
ttttaatgtttatagactgtattacaaaaggttattattgtaatttagaaaatacaattataatttcagttggtgaagtttcctgttgaggtcttcaaatttaatgatcttcctgatgaagaaatctccatatctgtgcgctaccttggtgtcggcaatatggatcatgtcattatctatgtagaagtcaagctctgatccactctggaactttccttccaaaccagaggcacctttagaccaaacaacattcttcatcttatgcttaaagcacaacaaatgtatgaccaaagactcgatttccttatccaaatcccttccttcgttattcctgctattctgagccataaacgtagccaatttgctcagcggcaaagtagtgtatagcttcaagtaactcctgatggtcggcaacattttctgctgagccacttcatccataaacacggcagtttggtgctgaatagcctcctttgagtagtctccagagacggaatcgattggaggtgggtaaggggacaaaaatttaggacaggcataaacgaagctgttctcgaattccgttaagtcgccatattgcattttgtacatcttttcatggtagcttttctctctcaagacttgttggattgattcatcgacacactgaggatgtaacaccaagcaaatcgctaacaagtgatacatttgatcagtttgtttgttaatctgatcgtgttggtacgttttagaggcaaataactgttttgttcgttgaatgtacaataaaatggacgagaaagttctgatagcatcggaatatcttcgcatcatcatgtaagcaaaacctacatagtacgaagttgatatttgacaggcagggatgtgagcatattgcgacttcttgtgtacttcaatattttctaatactttgatagcttgatagtaatctcctaataaggaatggagtcttagaagtcccaccaatgagaaataccccagcattttgtataaagaatggctgccgaattcaccggaaacagactcaggatcaccaccactagcatacacctccagctgctgcttaatgttactcttgtccaccaaagagtgcaaaacgttgaggacgcacaacacattccacactttattgttagagttcaaagtctccaattccaaaggtttcttgttttgtagacgagctctgtattgggcaaaggactggaactgatagacgaattcgtcgatgagttcccacagccacaggtcgggtagttctagtggcacgggttcttcagcgctgagaatgtagttgaacaagtcgcagtagttgaagaaggaattgaagcgttgttctaaagacggacctccttggatgcgggcgtaaatgtggcggaagtagagttctttatataaaatcataaatacaggatcattgtccacaatagcagctacttcattctcttcaggccatggcctcttttcaaagtagtcttctgtaagcttaggccacgtgtgttcatacaatgcttgcaattcaaaaattaatccctcgtttacattattacgaaagtaaaccaagaagtttttcacactatcgggcattttaaaatgttgtctattgtgttcgtccaagtttggatctcctgtatgagatccgtaatcatcatatccatagtcatagccctgctcgaagtcatctccgtagcccttcgacatattttacgtctaaaacagtctcaaaatcagtaaattattaaagaatgcgtggatttcttggttctaagcaatgtcgattctaaaagggattgactat

SEQ ID NO: 2936 - DNA, 1795 bp, Diabrotica virgifera
  SmartBlast Evalue=0; Info=Eukaryotic translation initiation factor 3 subunit L (Fragment) n=1 Tax=Biston betularia RepID= E3UKK0_9NEOP
ttttaatgtttatagactgtattacaaaaggttattattgtaatttagaaaatacaattataatttcagttggtgaagtttcctgttgaggtcttcaaatttaatgatcttcctgatgaagaaatctccatatctgtgcgctaccttggtgtcggcaatatggatcatgtcattatctatgtagaagtcaagctctgatccactctggaactttccttccaaaccagaggcacctttagaccaaacaacattcttcatcttatgcttaaagcacaacaaatgtatgaccaaagattcaatctccttatccaagtctcttccttcgttattcctgctattctgagccataaacgtagccaatttgctcagcggcaaagtagtgtatagcttcaagtaactcctgatggtcggcaacattttctgctgagccacttcatccataaacacggcagtttggtgctgaatagcctcctttgagtagtctccagagacggaatcgattggaggtgggtaaggggacaaaaatttaggacaggcgtacacaaagctgttctcgaattccgttaagtcgccgtactgcattttgtacatcttttcatggtagcttttttctctcaagacttgttggattgattcatcgacacattggggatgtaacaccaagcaaatcgctaataagtgatacatttgatcagtttgtttgttaatctgatcgtgttggtacgttttggaggcaaataactgttttgtacgttgaatgtacaataaaatggacgagaaagttctgatagcatcggaatatcttcgcatcatcatgtaagcaaaacctacatagtatgacgttgatatttgacaggcagggatgtgagcatattgcgacttcttgtgtacttcaatattttctaatactttgatagcttgatagtaatctcctaataaggaatggagtcttagaagtcccaccaatgagaaataccccagcattttgtataaagaatggctgccgaattcaccggaaacagactcaggatcaccaccactagcatacacctccagctgctgcttaatgttactcttgtccaccaaagagtgcaaaacgttgaggacgcacaacacattccacactttattgttagagttcaaagtctccaattccaaaggtttcttgttttgtagacgagctctgtattgggcaaaggactggaactgatagacgaattcgtcgatgagttcccacagccacaggtcgggtagttctagtggcacgggttcttcagcgctgagaatgtagttgaacaagtcgcagtagttgaagaaggaattgaagcgttgttctaaagacggacctccttggatgcgggcgtaaatgtggcggaagtagagttctttatataaaatcataaatacaggatcattgtccacaatagcagctacttcattctcttcaggccatggcctcttttcaaagtagtcttctgtaagcttaggccacgtgtgttcatacaatgcttgcaattcaaaaattaatccctcgtttacattattacgaaagtaaaccaagaagtttttcacactatcgggcattttaaaatgttgtctattgtgttcgtccaagtttggatctcctgtatgagatccgtaatcatcatatccatagtcatagccctgctcgaagtcatctccgtagcccttcgacatattttacgtctaaaacagtctcaaaatcagtaaattattaaagaatgcgtggatttcttggttctaagcaatgtcgattctaaaagggattgactat

SEQ ID NO: 2937 - DNA, 1795 bp, Diabrotica virgifera
  SmartBlast Evalue=0; Info=Eukaryotic translation initiation factor 3 subunit L (Fragment) n=1 Tax=Biston betularia RepID= E3UKK0_9NEOP
ttttaatgtttatagactgtattacaaaaggttattattgtaatttagaaaatacaattataatttcagttggtgaagtttcctgttgaggtcttcaaatttaatgatcttcctgatgaagaaatctccatatctgtgcgctaccttggtgtcggcaatatggatcatgtcattatctatgtagaagtcaagctctgatccactctggaactttccttccaaaccagaggcacctttagaccaaacaacattcttcatcttatgcttaaagcacaacaaatgtatgaccaaagactcgatttccttatccaaatcccttccttcgttattcctgctattctgagccataaacgtagccaatttgctcagcggcaaagtagtgtatagcttcaagtaactcctgatggtcggcaacattttctgctgagccacttcatccataaacacggcagtttggtgctgaatagcctcctttgagtagtctccagagacggaatcgattggaggtgggtaaggggacaaaaatttaggacaggcataaacgaagctgttctcgaattccgttaagtcgccgtactgcattttgtacatcttttcatggtagcttttttctctcaagacttgttggattgattcatcgacacattggggatgtaacaccaagcaaatcgctaacaagtgatacatttgatcagtttgtttgttaatctgatcgtgttggtacgttttagaggcaaataactgttttgttcgttgaatgtacaataaaatggacgagaaagttctgatagcatcggaatatcttcgcatcatcatgtaagcaaaacctacatagtatgacgttgatatttgacaggcagggatgtgagcatattgcgacttcttgtgtacttcaatattttctaatactttgatagcttggtagtaatctcctaataaggaatggagtcttagaagtcccaccaatgagaaatatcccagcattttgtataaagaatggctgccgaattcaccggaaacagactcaggatcaccaccactagcatacacctccagctgctgcttaatgttactcttatccaccaaagagtgcaaaacgttgaggacgcacaacacattccacactttattattagagttcaaagtctccaattccaaaggcttcttgttttgtagacgagctctgtattgggcgaaggactggaactggtagacgaattcgtcgatgagttcccacaaccagagatcgggtagttccagggggacgggctcttcagcgctgaggatgtaattgaacaaatcgcaatagttgaagaaggaattgaatcgttgttccaaagatggacctccttggatgcgggcgtaaatgtggcggaagtatagttctttatacaaaatcataaatacaggatcattgtccacaatagcagctacttcattctcttcaggccatggcctcttttcaaagtagtcttctgtaagcttaggccatgtgtgttcatacaatgcttgcaattcaaaaattaatccctcatttacattgttacgaaagtaaaccaagaagtttttcacactatcgggcattttaaaatgttgtctattgtgttcgtccaagtttggatctcctgtatgagatccgtaatcatcatatccatagtcatagccctgctcgaagtcatctccgtagcccttcgacatattttacgtctaaaacagtctcaaaatcagtaaattattaaagaatgcgtggatttcttggttctaagcaatgtcgattctaaaagggattgactat

SEQ ID NO: 2938 - DNA, 1375 bp, Diabrotica virgifera
  SmartBlast Evalue=1E-112; Info=Putative carboxypeptidase A-like n=7 Tax=Tenebrio molitor RepID=A1XG97_TENMO
tgtataatctttaactctggtatattttatcagcttcttctaaaatagtgagaagggaatctagtacttccaagcagttgggtataatctgttctggtggtagaataaatccatattctccttgatcacgaagttcatatgcatatgcgaatggtacttggtaaactcctttaacccaatccatatttgatcctgtggctatgccaatacctgtctcaacaatatcccctacagtatattcagttccgtatctttcagccaatgcttcagcagcctttaatgctactggataggttacattgtaattgtctaaatgttcgtcagtgtaaccataaggtaaaaggattaattcggaaaacgaatggaatgttataaaaagtaatagttcgtccaccactgtgctcatatactcagataaggttctagtttcaatttcggagaatgctttaggcccagcataaatttcatcgcatggatcgtcagttgatccgccttcattccatttgtaatcccagtttctgttgggatcagcacctctacattcttctccttgcccataatcagtacgtgtttttctccacatacggttcgtggtatgagtaaattcaaatccgtctggattaataactgggaagatataccaatcatggctttcagctatatctcggattctggaatcgtcactgcgcaatatctcattaagaatgtatgttgtcgtagcaccggatatccattcccttgcgtgaatttgtgaatcaagccatacacttcgtttgcctttttgtggtccaaaacttactttcacacccagtatatctcgaccttcgtatgactttcctccttcgattagagtaactttatcgtgatattcgctggcaagttttttcaaccaaaggtttattgcttccaaatcatagtacttatcccaagtaagttcaacaccttttacagtttgaagactgtgtactctagattcctcatctattctgtcttgtatattgtcagtaataacttcaaaatttaaattatttttaccgataatgtattcaaagctgtacttgtcttttggagaaacaagcacattaacaaattttctcaaagtagatggctcattccagaagtccaatttatattctttggacttttgtaggttttgaagaaattctaaatcattggtagactttggatatattttgtataatgtgtagttgtcatatctaactactgctgatgagaacaccagcagactagctagtatatacaatgaagtaaatttcatgttaccagtatttataacctacttagattgttcaaaaactgatgcggttttataggagaattacaaattaatggttcacctttaaacgagattatt

SEQ ID NO: 2939 - DNA, 1375 bp, Diabrotica virgifera
  SmartBlast Evalue=1E-112; Info=Putative carboxypeptidase A-like n=7 Tax=Tenebrio molitor RepID=A1XG97_TENMO
tgtataatctttaactctggtatattttatcagcttcttctaaaatagtgagaagggaatctagtacttccaagcagttgggtataatctgttctggtggtagaataaatccatattctccttgatcacgaagttcatatgcatatgcgaatggtacttggtaaactcctttaacccaatccatatttgatcctgttgctataccgatacctgtttcaacaatatcgccaacagtatattcagttccgtatctcttagccaatgcttcagcagcctttagtgctactggataggttacattgtaattgtctaaatgttcgtcagtgtaaccataaggtaaaaggattaattcggaaaacgaatggaatgttatgaaaagtaatagttcgtccaccactgtgctcatatactcagataaggttctagtttcaacttcggagaatgctttaggcccagcataaatttcatcgcatggatcgtcagttgatccgccttcattccatttgtaatcccagtttctgttgggatcagcacctctacattcttctccttgcccataatcagtacgtgtttttctccacatacggttcgtagtatgagtaaattcaaatccgtctggattaataactgggaagatataccaatcatgactttcagctatatctcggattctggaatcgtcactgcgcaatatctcatttagaatgtatgttgtcgtagcaccggatatccattcccttgcgtgaatttgtgaatcaagccatacacttcgtttgcctttttgtggtccaaaacttactttcacacccagtatatctcgaccttcgtatgactttcctccttcgattagagtaactttatcgtgatattcgctggcaagttttttcaaccaaaggtttattgcttccaaatcatagtacttatcccaagtaagttcaacaccttttacagtttgaagactgtgtactctagattcctcatctattctgtcttgtatattgtcagtaataacttcaaaatttaaattatttttaccgataatgtattcaaagctgtacttgtcttttggagaaacaagcacattaacaaattttctcaaagtagatggctcattccagaagtccaatttatattctttggacttttgtaggttttgaagaaattctaaatcattggtagactttggatatattttgtataatgtgtagttgtcatatctaactactgctgatgagaacaccagcagactagctagtatatacaatgaagtaaatttcatgttaccagtatttataacctacttagattgttcaaaaactgatgcggttttataggagaattacaaattaatggttcacctttaaacgagattatt

SEQ ID NO: 2940 - DNA, 1375 bp, Diabrotica virgifera
  SmartBlast Evalue=1E-112; Info=Putative carboxypeptidase A-like n=7 Tax=Tenebrio molitor RepID=A1XG97_TENMO
tgtataatctttaactctggtatattttatcagcttcttctaaaatagtgagaagggaatctagtacttccaagcagttgggtataatctgttctggtggtagaataaatccatattctccttgatcacgaagttcatatgcatatgcgaatggtacttggtaaactcctttaacccaatccatatttgatcctgtggctatgccaatacctgtctcaacaatatcccctacagtatattcagttccgtatctttcagccaatgcttcagcagcctttaatgctactggataggttacattgtaattgtctaaatgttcgtcagtgtaaccataaggtaaaaggattaattcggaaaacgaatggaatgttataaaaagtagtagttcgtccaccactgtgctcatatactcagataaagttctagtttcaacttcggagaatgctttaggcccagcataaatttcatcgcatggatcgtcagttgatccgccttcattccatttgtaatcccagttcctgttgggatcagcacctctacattcttctccttgcccataatcagtacgtgtttttctccacatacggttcgtggtatgagtaaattcaaatccgtctggattaataactgggaagatataccaatcatggctttcagctatatctcggattctgggatcgtcactgcgcaatatctcatttagaatgtatgttgtcgtagcaccggatatccattcccttgcgtgaatttgtgaatccagccatacacttcgtttgcctttttgtggtccaaaacttactttcacacccagtatatctcggccttcgtatgactttcctccttcgattagagtaactttatcgtgatattcgctggcaagttgttccaaccaaaggtttattgcttccaaatcatagtacttatcccaagtaagttcgacacccttaacagtttgaagactgtgtactctagattcctcatctattctgtcttgtatattgtcagtaataacttcaaaatttaaattatttttaccgataatgtattcaaagctgtacttgtcttttggagaaacaagcacattaacaaattttctcaaagtagatggctcattccagaagtccaatttatattctttggacttttgtaggttttgaagaaattctaaatcattggtagactttggatatattttgtataatgtgtagttgtcatatctaactactgctgatgagaacaccagcagactagctagtatatacaatgaagtaaatttcatgttaccagtatttataacctacttagattgttcaaaaactgatgcggttttataggagaattacaaattaatggttcacctttaaacgagattatt

SEQ ID NO: 2941 - DNA, 831 bp, Diabrotica virgifera
  SmartBlast Evalue=1E-116; Info=Proteasome subunit alpha type-2 n=5 Tax=Endopterygota RepID=E2AM64_9HYME
atcaaatccacaagtcatcaacacgaagaggaaagttgaaaattttgtttgtaattgcaagtaatcatggcttcagagagatatagcttttctttaactactttcagcccctctggaaagttggttcagattgaatatgcattagccgctgtagcggcgggtgctccatcagtaggaattaaagcatcaaatggtgtggttattgcaacagagaacaagcacaaatcaattctgtatgatgaacacagtgtccataaagtagaaatgatcacaaaacacattggtatggtttattctggtatgggtcctgactatcgccttcttgtgagacaagcacgcaagatggctcagcagtattacctagtataccatgaacccattcctacagtacagttggtgcaaagagtagcgactgtaatgcaagaatacacccaatcaggaggagttagaccatttggagtgtcgctactgatttgtggttgggataacaacagaccttacttgttccaatgcgatccttctggagcttactttgcttggaaagctactgcaatgggaaagaattatgtcaatggaaaaacgttcttagaaaaaaggtacagtgaagagctagaactcgacgatgctgtgcacactgctatccttaccctgaaagaaagttttgaaggccagatgacagctgacaacatagaagttggtatttgcgatgctaatggattcagaaggtttgatccatctactgttaaggatttcttagctaatattccttaaatttttttatagtttcgattttttaatattacttggattattaaatttactataagtatc

SEQ ID NO: 2942 - DNA, 831 bp, Diabrotica virgifera
  SmartBlast Evalue=1E-116; Info=Proteasome subunit alpha type-2 n=5 Tax=Endopterygota RepID=E2AM64_9HYME
atcaaatccacaagtcatcaacacgaagaggaaagttgaaaattgtgtttgtaattgcaagtaatcatggcttcagagagatatagcttttctttaactactttcagcccctctggaaagttggttcagattgaatatgcattagccgctgtagcggcgggtgctccatcagtaggaattaaagcatcaaatggtgtggttattgcaacagagaacaagcacaaatcaattctgtatgatgaacacagtgtccataaagtagaaatgatcacaaaacacattggtatggtttattctggtatgggtcctgactatcgccttcttgtgagacaagcacgcaagatggctcagcagtattacctagtataccatgaacccattcctacagtacagttggtgcaaagagtagcgactgtaatgcaagaatacacccaatcaggaggagttagaccatttggagtgtcgctactgatttgtggttgggataacaacagaccttacttgttccaatgcgatccttctggagcttactttgcttggaaagctactgcaatgggaaagaattatgtcaatggaaaaacgttcttagaaaaaaggtacagtgaagagctagaactcgacgatgctgtgcacactgctatccttaccctgaaagaaagttttgaaggccagatgacagctgacaacatagaagttggtatttgcgatgctaatggattcagaaggtttgatccatctactgttaaggatttcttagctaatattccttaaatttttttatagtttcgattttttaatattacttggattattaaatttactataagtatc

SEQ ID NO: 2943 - DNA, 831 bp, Diabrotica virgifera
  SmartBlast Evalue=1E-116; Info=Proteasome subunit alpha type-2 n=5 Tax=Endopterygota RepID=E2AM64_9HYME
atcaaatccacaagtcatcaacacgaagacgaacgttaaaaattttgtttttaattgcaagtaatcatggcttcagagagatatagtttttctttaactactttcagcccctctggaaagttggttcagattgaatatgctttagccgctgtagcggcgggtgctccatcagtaggaattaaagcatcaaatggtgtggtcattgcaacagagaacaagcacaaatcaattctatatgatgaacacagtgtccataaagtagaaatgatcacaaaacacattggtatggtttattctggtatgggccctgactatcgccttctcgtgagacaggcacgcaagatggctcagcagtattacctagtataccatgaacccattcctacagtacagttggtgcaaagagtagcgactgtaatgcaagaatacacccaatcaggaggagttagaccatttggagtgtcactactgatttgtggttgggataacaacagaccttacttgttccaatgcgatccttctggagcttactttgcttggaaagctactgcaatgggaaagaattatgtcaatggaaaaacgttcttagaaaaaaggtacagtgaagagctagaactcgacgatgctgtgcacactgctatccttaccctgaaagaaagttttgaaggccagatgacagctgacaacatagaagttggtatttgcgatgctaatggattcagaaggtttgatccatctactgttaaggatttcttagctaatattccttaaatttttttatagtttcgattttttaatattacttggattattaaatttactataagtatc

SEQ ID NO: 2944 - DNA, 1221 bp, Diabrotica virgifera
  SmartBlast Evalue=5E-89; Info=Myosin regulatory light chain sqh n=26 Tax=Neoptera RepID=SQH_DROME
aatggttcaatattttaatgaataattacatgatatataaaggtataaaatttataattacaataaatcttatgaataaataaaacgttgccaaaagttgtaaaaacccaaaataagctgactaacaatgctaaaaatactttgaaggaaaaatatcgatcttataatgataacatgcaattggatttgtagttttaatatacaaaatgtcgttttctattcaaaacattcaaggaatactttaaaataacaagcaagagatgttaagtacaataacaagatgtctatataattagactgttaattcattcaaaacctaccatttttcaaatccatttttgcagttttgttcaaggatgacatgtctatgtgcagaagatactgcaacggacaagacttgatggtctagtatgatgaatttcatatatttctaatcacaaaaatggaatgaaaatccaaatcattcaaactaagacatctttccatattaattacaaatcctttcatcatcaattcgtctcttattgctcatccttgtccttagccccgtgctttaaaatgcgggtgaattcaacataatcaaacaagccattcttaataggagcctccctgtacatctcgtcaacttcatcgtcagtgaatctatcacccatggacgtgaggagctccctgagacgttcttcgttgaggacaccattgttgtcttcgtcaaagcagccaaaagcgtttttaattacgtcttctgggtctgtgccttgtagacgttctccaaagagagttaagaacatggtgaagtttatgggaccaggagcttcattcatcatgccatctagatagtcatcagttgggtttttacctaaggaagcaagcatatcatgcagatcttctttatctacaaaaccatcatggttctggtcgatcatattgaaggcttctttgaactcagcaatctgagcctgatcaaacattgcgaatacattggatgtggctctttgggcacgtttctttgtggtaccacggcggcttacggttttgcgggaagacatgattctgtatgtaggttatatattttcctagaattaactatttgtatatttcaaagcaaatttagtgaatttaaaacgcttgtaatttttgttcaatcaaagaaacacccaaaaatgagtcaactcaactgcgattgcgatgttgcacgaccgcagtttaacaaatttgttgtaa

SEQ ID NO: 2945 - DNA, 1221 bp, Diabrotica virgifera
  SmartBlast Evalue=5E-89; Info=Myosin regulatory light chain sqh n=26 Tax=Neoptera RepID=SQH_DROME
aatggttcaatattttaatgaataattacatgatatataaaggtataaaatttataattacaataaatcttatgaataaataaaacgttgccaaaagttgtaaaaacccaaaataagctgactaacaatgctaaaaatactttgaaggaaaaatatcgatcttataatgataacatgcaattggatttgtagttttaatatacaaaatgtcgttttctattcaaaacattcaaggaatactttaaaataacaagcaagagatgttaagtacaataacaagatgtctatataatcagactgttgattcatttaaaacataccatttttcaaatccatttttgcagttttgttcaaggatgacatgtctatgtgcagaagatactgcaacggacaagacttgatggtctagtatgatgaatttcatatatttctagtcacaaaaatggaatgaaaatccaaatcattcaaactaagacatctttccatattaattacaaatcctttcatcatcaattggcttcttattgctcatccttgtccttagccccatgctttaaaatgcgggtgaattcaacataatcaaacaagccattcttaataggagcctccctgtacatctcgtcaacttcatcgtcagtgaatctgtcacccatggacgtgaggagctccctgagacgttcttcattgaggacaccattattgtcttcgtcaaagcagccaaaggcatttttgattacatcttcggggtctgtgccttggagacgttctccaaagagagttaggaacatggtgaagtttatagggccaggagcctcgttcatcatgccatctagatagtcatcggttgggtttttacctaacgaagcaagcatatcatgcagatcttctttatctacaaaaccatcatggttctggtcgatcatattgaaggcttctttgaactcagcaatctgagcctgatcaaacattgcgaatacattggatgtggctctttgggcacgtttctttgtggtaccacggcggcttacggttttgcgggaagacatgattctgtatgtaggttatatattttcctagaattaactatttgtatatttcaaagcaaatttagtgaatttaaaacgcttgtaatttttgttcaatcaaagaaacacccaaaaatgagtcaactcaactgcgattgcgatgttgcacgaccgcagtttaacaaatttgttgtaa

SEQ ID NO: 2946 - DNA, 622 bp, Diabrotica virgifera
gactgaacagacaccattcacagtaacaactgaaccgtcaccgttcacaataactactgaaacatccccattcacaataatgactgaacaaacaccattcacagtaacaactgaaccgtcaccattcacaatgactactgaaacgtcccctttcacaataacaactgaacagactccattcacaataacaactgaaccgtccccattttcaatatcaactgaagagtcaccattcacaataaccactgaaacgtccccattcacagtaacaactgaacaaacaccattcacagtaacaactgaaccgtcaccattcacaataactactgaaacgtccccattcacaataacaactgaaaagactccattcacaataacaactgaaccatcaccattaacaataactactgaaacgtccccattcacaataacaactgaacagacgccgttcacagtaacaactgaaagtcaccatttacaataactactgaaacgtccccatacaccgtaacaactgaacagactccattcacaataacaactgaaacgtccccattcacaataacaactgaacagacgccgttcacagtaacaaccgaaccgtcaccatttacaataacta

SEQ ID NO: 2947 - DNA, 595 bp, Diabrotica virgifera
gactgaacagacaccattcacagtaacaactgaaccgtcaccgttcacaataactactgaaacatccccattcacaataatgactgaacaaacaccattcacagtaacaactgaaccgtcaccattcacaatgactactgaaacgtcccctttcacaataacaactgaacagactccattcacaataacaactgaaccgtccccattttcaatatcaactgaagagtcaccattcacaataaccactgaaacgtccccattcacagtaacaactgaaccgtcaccattcacaataactactgaaacgtccccattcacaataacaactgaaaagactccattcacaataacaactgaaccatcaccattaacaataactactgaaacgtccccattcacaataacaactgaacagacgccgttcacagtaacaactgaaagtcaccatttacaataactactgaaacgtccccatacaccgtaacaactgaacagactccattcacaataacaactgaaacgtccccattcacaataacaactgaacagacgccgttcacagtaacaaccgaaccgtcaccatttacaataacta

SEQ ID NO: 2948 - DNA, 652 bp, Diabrotica virgifera
  SmartBlast Evalue=7E-72; Info="Ubiquitin (Ribosomal protein L40), putative n=4 Tax=Eukaryota RepID=C4Q9U2_SCHMA"
gtgattattgtaattcgccttttagtggaacaaattataatagagtacaaaaagtcagaaactatgggtgtctccaagtttctccttttattgggagcccttttttgtgccatagttgctattcaagcaaacaattatggaatgcagatctttgtaaaaacactcaccggtaaaaccatcacactcgaggttgaaccatcagataccatcgagaatgtcaaaggaaaagttcaagacaaggaagggattccaccagatcaacaaagattaatctttgttggaaagcagttggaagatagtcgtactctctcagactacaacattcaaaaagaatctactctccatttggtacttcgtcttagaggtggtatgcaaatctttgttaaaactttaactggaaagaccatcacccttgaagtagaaccttcagatactattgaaaacgtcaaaggtaaaattcaagacaaagaaggtataccaccagatcaacaaagttaatctttgctggaaagcagctggaagataaccgtagcctctcagactacaatattcagaaagagtccaccctgcatttagttcttcgtttaagaggaggaaaataatcttgttgaaattaaatatattttatattttcaataaataaattataatc

SEQ ID NO: 2949 - DNA, 1522 bp, Diabrotica virgifera
  SmartBlast Evalue=1E-156; Info="Putative fructose 1,6- bisphosphate aldolase n=2 Tax=Cicadellidae RepID=Q6PPI0_HOMVI"
cgcctccgtgtaatcaaaataaattgagacacatttttgacttctacgtccttaattcgtcctttacgtcagttccacccgttttccaaacgagtgaagaaggttggtttgaacatttccaaaaagtttacctgcaaccgtcgaaatgactacctcttggaactatcctgatgctgcactcagagctgaactcaagaaaatcgctgatgctatcaccgctcctggaaaaggtattttggctgccgacgaatctaccgctaccgtaggcaagcgttttgctgacatcggagtcgaaaacaacgaagagaaccgtcgtaaatacagacaacttcttttcaccaccgatccagccattggacaatacatttctggtgtaattttgttccacgaaagtttataccaaaaagccgatgatggtactccattcccagaacttcttaaacagagaggaatcattcccggcattaaagtcgactctggtgtagtacctctcttcggcagcaatgacgaatgcaccacacaaggtttggacgatttggccaagcgttgcgcccaatacaaaaaagatggttgccacttcgctaaatggcgttgcgtgttgaagatcagcgcacagacaccttccatccaatcactcattgaaaatgccaacgtactggctcgttatgcgtccatctgccaggccaacagaatcgtacccatcgtggaacctgaaatcttacctgacggtggacacgaccttctcacctgtcagaagacaacagaaacagtattggcatacgtctacaaagctcttgctgatcacaacgtctacctcgaaggaactctcttgaaacccaacatggttacagcaggtcaatcctctgcaaacaaagccacaccagcacaagtagcagaagccacagtaaccgctttacaacgcagattgccccctgcagttcccggtgtcaccttcttgtctggaggacaatccgaagaagaagctaccgtcaacttaaacgccatcaaccaattcccaggaaagagaccgtgggcgctaactttcagttatggacgtgcccttcaagcttccgttctccgcgcctggggaggaaaagacgaaaacgtcaaagctggacaagaagaattgatgaaacgtgcgaaggctaacagcgaagcttcccttggaaaatacgtagctggtagtgtgtcaggaaaagctggagatgcaggtctcttcatcaaagatcacgcctattaagcaaatcctcacaaatttgttgtgaatgtaacgttattagtgaaaaacatgttttagatctacattgaacaaacccaaattcataaagtctgttatatatattttatctgttatcgtgtatatacaattttgtttagaaatttatacaatatttattgtggactattatttataggtacacgtcgtgattgtactttattttatgaatcaattgttaatttcttagaacatctatttgtggaagtgaaattgaaaaataataaataataaatgtcttaaaaa

SEQ ID NO: 2950 - DNA, 1517 bp, Diabrotica virgifera
  SmartBlast Evalue=1E-156; Info="Putative fructose 1,6- bisphosphate aldolase n=2 Tax=Cicadellidae RepID=Q6PPI0_HOMVI"
cgcctccgtgtaatcaaaataaattgagacacatttttgacttctacgtccttaattcgtcctttacgtcagttccacccgttttccaaacgagtgaagaaggttggtttgaacatttccaaaaagtttacctgcaaccgtcgaaatgactacctcttggaactatcctgatgctgcactcagagctgaactcaagaaaatcgctgatgctatcaccgctcctggaaaaggtattttggctgccgacgaatctaccgctaccgtaggcaagcgttttgctgacatcggagtcgaaaacaacgaagagaaccgtcgtaaatacagacaacttcttttcaccaccgatccagccattggacaatacatttctggtgtaattttgttccacgaaagtttataccaaaaagccgatgatggtactccattcccagaacttcttaaacagagaggaatcattcccggcattaaagtcgactctggtgtagtacctctcttcggcagcaatgacgaatgcaccacacaaggtttggacgatttggccaagcgttgcgcccaatacaaaaaagatggttgccacttcgctaaatggcgttgcgtgttgaagatcagcgcacagacaccttccatccaatcactcattgaaaatgccaacgtactggctcgttatgcgtccatctgccaggccaacagaatcgtacccatcgtggaacctgaaatcttacctgacggtggacacgaccttctcacctgtcagaagacaacagaaacagtattggcatacgtctacaaagctcttgctgatcacaacgtctacctcgaaggaactctcttgaaacccaacatggttacagcaggtcaatcctctgcaaacaaagccacaccagcacaagtagcagaagccacagtaaccgctttacaacgcagattgccccctgcagttcccggtgtcaccttcttgtctggaggacaatccgaagaagaagctaccgtcaacttaaacgccatcaaccaattcccaggaaagagaccgtgggcgctaactttcagttatggacgtgcccttcaagcttccgttctccgcgcctggggaggaaaagacgaaaacgtcaaagctggacaagaagaattgatgaaacgtgcgaaggctaacagcgaagcttcccttggaaaatacgtagctggtagtgtgtcaggaaaagctggagatgcaggtctcttcatcaaagatcacgcctattaagcaaatcctcacaaatttgttgtgaatgtaacgttattagtgaaaaacatgttttagatctacattgaacaaacccaaattcataaagtctgttatatatattttatctgttatcgtgtatatacaattttgtttagaaatttatacaatatttattgtggactattatttataggtacacgtcgtgattgtactttattttatgaatcaattgttaatttcttagaacatctatttgtggaagtgaaattgaaaaataataaataataaatgtctt

SEQ ID NO: 2951 - DNA, 1502 bp, Diabrotica virgifera
  SmartBlast Evalue=1E-156; Info="Putative fructose 1,6- bisphosphate aldolase n=2 Tax=Cicadellidae RepID=Q6PPI0_HOMVI"
ttatcagttaactcatagcgataaacaaaataactaaatataagcatgtaatgcatttttatttgttacttgaaaggtaaaagttgtgctgtgtgtatacctacattttacctgcaaccgtcgaaatgactacctcttggaactatcctgatgctgcactcagagctgaactcaagaaaatcgctgatgctatcaccgctcctggaaaaggtattttggctgccgacgaatctaccgctaccgtaggcaagcgttttgctgacatcggagtcgaaaacaacgaagagaaccgtcgtaaatacagacaacttcttttcaccaccgatccagccattggacaatacatttctggtgtaattttgttccacgaaagtttataccaaaaagccgatgatggtactccattcccagaacttcttaaacagagaggaatcattcccggcattaaagtcgactctggtgtagtacctctcttcggcagcaatgacgaatgcaccacacaaggtttggacgatttggccaagcgttgcgcccaatacaaaaaagatggttgccacttcgctaaatggcgttgcgtgttgaagatcagcgcacagacaccttccatccaatcactcattgaaaatgccaacgtactggctcgttatgcgtccatctgccaggccaacagaatcgtacccatcgtggaacctgaaatcttacctgacggtggacacgaccttctcacctgtcagaagacaacagaaacagtattggcatacgtctacaaagctcttgctgatcacaacgtctacctcgaaggaactctcttgaaacccaacatggttacagcaggtcaatcctctgcaaacaaagccacaccagcacaagtagcagaagccacagtaaccgctttacaacgcagattgccccctgcagttcccggtgtcaccttcttgtctggaggacaatccgaagaagaagctaccgtcaacttaaacgccatcaaccaattcccaggaaagagaccgtgggcgctaactttcagttatggacgtgcccttcaagcttccgttctccgcgcctggggaggaaaagacgaaaacgtcaaagctggacaagaagaattgatgaaacgtgcgaaggctaacagcgaagcttcccttggaaaatacgtagctggtagtgtgtcaggaaaagctggagatgcaggtctcttcatcaaagatcacgcctattaagcaaatcctcacaaatttgttgtgaatgtaacgttattagtgaaaaacatgttttagatctacattgaacaaacccaaattcataaagtctgttatatatattttatctgttatcgtgtatatacaattttgtttagaaatttatacaatatttattgtggactattatttataggtacacgtcgtgattgtactttattttatgaatcaattgttaatttcttagaacatctatttgtggaagtgaaattgaaaaataataaataataaatgtcttaaaaa

SEQ ID NO: 2952 - DNA, 1497 bp, Diabrotica virgifera
  SmartBlast Evalue=1E-156; Info="Putative fructose 1,6- bisphosphate aldolase n=2 Tax=Cicadellidae RepID=Q6PPI0_HOMVI"
ttatcagttaactcatagcgataaacaaaataactaaatataagcatgtaatgcatttttatttgttacttgaaaggtaaaagttgtgctgtgtgtatacctacattttacctgcaaccgtcgaaatgactacctcttggaactatcctgatgctgcactcagagctgaactcaagaaaatcgctgatgctatcaccgctcctggaaaaggtattttggctgccgacgaatctaccgctaccgtaggcaagcgttttgctgacatcggagtcgaaaacaacgaagagaaccgtcgtaaatacagacaacttcttttcaccaccgatccagccattggacaatacatttctggtgtaattttgttccacgaaagtttataccaaaaagccgatgatggtactccattcccagaacttcttaaacagagaggaatcattcccggcattaaagtcgactctggtgtagtacctctcttcggcagcaatgacgaatgcaccacacaaggtttggacgatttggccaagcgttgcgcccaatacaaaaaagatggttgccacttcgctaaatggcgttgcgtgttgaagatcagcgcacagacaccttccatccaatcactcattgaaaatgccaacgtactggctcgttatgcgtccatctgccaggccaacagaatcgtacccatcgtggaacctgaaatcttacctgacggtggacacgaccttctcacctgtcagaagacaacagaaacagtattggcatacgtctacaaagctcttgctgatcacaacgtctacctcgaaggaactctcttgaaacccaacatggttacagcaggtcaatcctctgcaaacaaagccacaccagcacaagtagcagaagccacagtaaccgctttacaacgcagattgccccctgcagttcccggtgtcaccttcttgtctggaggacaatccgaagaagaagctaccgtcaacttaaacgccatcaaccaattcccaggaaagagaccgtgggcgctaactttcagttatggacgtgcccttcaagcttccgttctccgcgcctggggaggaaaagacgaaaacgtcaaagctggacaagaagaattgatgaaacgtgcgaaggctaacagcgaagcttcccttggaaaatacgtagctggtagtgtgtcaggaaaagctggagatgcaggtctcttcatcaaagatcacgcctattaagcaaatcctcacaaatttgttgtgaatgtaacgttattagtgaaaaacatgttttagatctacattgaacaaacccaaattcataaagtctgttatatatattttatctgttatcgtgtatatacaattttgtttagaaatttatacaatatttattgtggactattatttataggtacacgtcgtgattgtactttattttatgaatcaattgttaatttcttagaacatctatttgtggaagtgaaattgaaaaataataaataataaatgtctt

SEQ ID NO: 2953 - DNA, 1456 bp, Diabrotica virgifera
  SmartBlast Evalue=1E-156; Info="Putative fructose 1,6- bisphosphate aldolase n=2 Tax=Cicadellidae RepID=Q6PPI0_HOMVI"
cgttagttccactcgttttccaaaggagtgaagaaggttggtttgaacatttccaaaaagtctacctgcaaccgtcgaaatgactacctcttggaactatcctgatgctgcactcagagctgaactcaagaagatcgctgatgctatcaccgctcctggaaaaggtatcttagctgccgacgaatctaccgctaccgtaggcaagcgtttcgctgacatcggagttgaaaacaacgaagaaaaccgtcgtaaatacagacaacttcttttcaccaccgatccagccattggacaatacatttctggtgtaattttgttccacgaaagtttataccaaaaagccgatgatggtactccattcccagaacttcttaaacagagaggaatcattcccggcattaaagtcgactctggtgtagtacctctcttcggcagcaatgacgaatgcaccacacaaggtttggacgatttggccaagcgttgcgcccaatacaaaaaagatggttgccacttcgctaaatggcgttgcgtgttgaagatcagcgcacagacaccttccatccaatcactcattgaaaatgccaacgtactggctcgttatgcgtccatctgccaggccaacagaatcgtacccatcgtggaacctgaaatcttacctgacggtggacacgaccttctcacctgtcagaagacaacagaaacagtattggcatacgtctacaaagctcttgctgatcacaacgtctacctcgaaggaactctcttgaaacccaacatggttacagcaggtcaatcctctgcaaacaaagccacaccagcacaagtagcagaagccacagtaaccgctttacaacgcagattgccccctgcagttcccggtgtcaccttcttgtctggaggacaatccgaagaagaagctaccgtcaacttaaacgccatcaaccaattcccaggaaagagaccgtgggcgctaactttcagttatggacgtgcccttcaagcttccgttctccgcgcctggggaggaaaagacgaaaacgtcaaagctggacaagaagaattgatgaaacgtgcgaaggctaacagcgaagcttcccttggaaaatacgtagctggtagtgtgtcaggaaaagctggagatgcaggtctcttcatcaaagatcacgcctattaagcaaatcctcacaaatttgttgtgaatgtaacgttattagtgaaaaacatgttttagatctacattgaacaaacccaaattcataaagtctgttatatatattttatctgttatcgtgtatatacaattttgtttagaaatttatacaatatttattgtggactattatttataggtacacgtcgtgattgtactttattttatgaatcaattgttaatttcttagaacatctatttgtggaagtgaaattgaaaaataataaataataaatgtcttaaaaa

SEQ ID NO: 2954 - DNA, 1451 bp, Diabrotica virgifera
  SmartBlast Evalue=1E-156; Info="Putative fructose 1,6- bisphosphate aldolase n=2 Tax=Cicadellidae RepID=Q6PPI0_HOMVI"
cgttagttccactcgttttccaaaggagtgaagaaggttggtttgaacatttccaaaaagtctacctgcaaccgtcgaaatgactacctcttggaactatcctgatgctgcactcagagctgaactcaagaagatcgctgatgctatcaccgctcctggaaaaggtatcttagctgccgacgaatctaccgctaccgtaggcaagcgtttcgctgacatcggagttgaaaacaacgaagaaaaccgtcgtaaatacagacaacttcttttcaccaccgatccagccattggacaatacatttctggtgtaattttgttccacgaaagtttataccaaaaagccgatgatggtactccattcccagaacttcttaaacagagaggaatcattcccggcattaaagtcgactctggtgtagtacctctcttcggcagcaatgacgaatgcaccacacaaggtttggacgatttggccaagcgttgcgcccaatacaaaaaagatggttgccacttcgctaaatggcgttgcgtgttgaagatcagcgcacagacaccttccatccaatcactcattgaaaatgccaacgtactggctcgttatgcgtccatctgccaggccaacagaatcgtacccatcgtggaacctgaaatcttacctgacggtggacacgaccttctcacctgtcagaagacaacagaaacagtattggcatacgtctacaaagctcttgctgatcacaacgtctacctcgaaggaactctcttgaaacccaacatggttacagcaggtcaatcctctgcaaacaaagccacaccagcacaagtagcagaagccacagtaaccgctttacaacgcagattgccccctgcagttcccggtgtcaccttcttgtctggaggacaatccgaagaagaagctaccgtcaacttaaacgccatcaaccaattcccaggaaagagaccgtgggcgctaactttcagttatggacgtgcccttcaagcttccgttctccgcgcctggggaggaaaagacgaaaacgtcaaagctggacaagaagaattgatgaaacgtgcgaaggctaacagcgaagcttcccttggaaaatacgtagctggtagtgtgtcaggaaaagctggagatgcaggtctcttcatcaaagatcacgcctattaagcaaatcctcacaaatttgttgtgaatgtaacgttattagtgaaaaacatgttttagatctacattgaacaaacccaaattcataaagtctgttatatatattttatctgttatcgtgtatatacaattttgtttagaaatttatacaatatttattgtggactattatttataggtacacgtcgtgattgtactttattttatgaatcaattgttaatttcttagaacatctatttgtggaagtgaaattgaaaaataataaataataaatgtctt

SEQ ID NO: 2955 - DNA, 1949 bp, Diabrotica virgifera
  SmartBlast Evalue=1E-42; Info=Endonuclease-reverse transcriptase n=1 Tax=Bombyx mori RepID=D5LB38_BOMMO
gacgaaatattaaatctcctataagtcgaaatattaaatcaattaaaacaaaaataataaaaataaataataaaaacaaataaaggacttaggaaaccaaataacacatttctaaaaatcttggatgtggaaattaattgcgtgattgcgaaaatgatattaaaaataagaaaaacaaaacaaaaaaagtgacctttccaatgtgcttctatatttctcgatctaacaatatttttgcacattcttgaccctttccctgtattgcaactttcttatgaccctcttaaattgtatgaataggaaaacagaataatggtattcaaggatatcctaaattgtaccaaaaaggagatagggacggaagagattgcaaataaatgcaaagtgggctcatagttaaaaaatttactgaaaaatcatcaaaaagaaattgatgtagcaaaaaagaatatacctgcagcaatctttaaattaataccaccgtagtcgaatgtgtaaggttgtagtctagtcgcaacatagagggtcccgtccccgtgggcacttttagctcgccgcgatttgatggtggattataggcctcccgggtcgctgaatccaatggaagcggtctggaagcccaaatgtagtgcttcttcttctttaagtaccgtgcccaaatttttaggcgtgggtagcttccataacaatttgccgatatcgttctcgatcttgtgcggcatgtaacaattgatctgctgataagccagtccattgacgaaggtttcggagccatgaatatttctttcgaccaattcctctttttccgtcgatctttccattgagtattaactgcagcatcctgtatctgctacctctcattatatgccccagatattcaagttttctcttttttatcatcttcattaagtcaccttcgccttgacctactctgtttaagacttctctgtttgaaatgcgttgaacccaagatattctgagcattctacgatacgaccacatctcaaaggcttctaatttgttcatcatgttaaccttcatgatccaggtttcacatccatatagtaatacaggatacacataacattttaggaacttgattcttagttgtaagttcagctgagagttgctcagaatagatctaagtttcataaatgctcctcttgcaatttctatacgagttttaatttcttcatccggatttagtgtctcgtttatccaacatcctaggtatttaaagtggtattaaaatactaggtattaaaatcaactgtatttattctgttaaatacaacataatttggctgtctaaagcagtgtttgtgttgctgttgattaatatttctcttataaactgttttatttataggcgtgactttatctggagcaagtgtttcagtctgtttcagatttgtaaagggcttactacaaaaaaatggaaagacaccattaactcacacttgtttaagaactatgatggacacaatgaagttgtctatttttcatccacgcaaagaccagtgtgacagttgttttaaatttaaaaatggaaatttatctgaaaatgaatataatgaccacataatcagaaaagatcgagctagaagtgagaaagaacgtgacaaaaagtaggctattgaaggaaaactttttgttattatcatggatgttcagtcagtgaaactatctcctcaattaccggccagtgcactcaactataaaactaaactttgctgccataattatactatctataatttggctattagccaagctagttgctattggtacaatgagacagaggcagatggtcaggcttctacctaagcatcttttctgaaacattatttggaagaacattttctgaactcatcacacaaacttcccataactatgtatctattctgatgggtgtaatgcccaaaacggaacagtgtaatgtctaatac

SEQ ID NO: 2956 - DNA, 1825 bp, Diabrotica virgifera
  SmartBlast Evalue=3E-85; Info=Endonuclease-reverse transcriptase n=1 Tax=Bombyx mori RepID=D5LB38_BOMMO
gacgaaatattaaatctcctataagtcgaaatattaaatcaattaaaacaaaaataataaaaataaataataaaaacaaataaaggacttaggaaaccaaataacacatttctaaaaatcttggatgtggaaattaattgcgtgattgcgaaaatgatattaaaaataagaaaaacaaaacaaaaaaagtgacctttccaatgtgcttctatatttctcgatctaacaatatttttgcacattcttgaccctttccctgtattgcaactttcttatgaccctcttaaattgtatgaataggaaaacagaataatggtattcaaggatatcctaaattgtaccaaaaaggagatagggacggaagagattgcaaataaatgcaaagtgggctcatagttaaaaaatttactgaaaaatcatcaaaaagaaattgatgtagcaaaaaagaatatacctgcagcaatctttaaattaataccaccgtagtcgaatgtgtaaggttgtagtctagtcgcaacatagagggtcccgtccccgtgggcacttttagctcgccgcgatttgatggtggattataggcctcccgggtcgctgaatccaatggaagcggtctggaagcccaaatgtagtgcttcttcttctttaagtaccgtgcccaaatttttaggcgtgggtagcttccataacaatttgccgatatcgttctcgatcttgtgcggcatgtaacaattgatctgctgataagccagtccattgacgaaggtttcggagccatgaatatttctttcgaccaattcctctttttccgtcgatctttccattgagtattaactgcagcatcctgtatctgctacctctcattatatgccccagatattcaagttttctcttttttatcatcttcattaagtcaccttcgccttgacctactctgtttaagacttctctgtttgaaatgcgttgaacccaagatattctgagcattctacgatacgaccacatctcaaaggcttctaatttgttcatcatgttaaccttcatgatccaggtttcacatccatatagtaatacaggatacacataacattttaggaacttgattcttagttgtaagttcagctgagagttgctcagaatagatctaagtttcataaatgctcctcttgcaatttctatacgagttttaatttcttcatccggatttagtgtctcgtttatccaacatcctaggtatttaaaatggttaacttttgttattgattcatcactgacaattagttgcatagggccgacgtcttgtttactaaccacaagtaactttgtctttgttgcatttatgttaagtccgttattggagcattctctagtgactcgatctataaggaattgaagatcttcgatattttcagccatgatcgcggtgtcgtctgcatatctgatgttgttaatagtttctccccgattcgaactccacattgtccttccaaggcttcattaaaaattatttctgagtatacgttaaacaaagttggggataacacacaaccctgtctgacacctctttgaatgcaaattttgtctgtttctttgccgtctaccagaatagaagcttcttgattccaatatagatgttgtaaaagtctcagatctttatcatctattccaatcatttctagatattcaaacaacctatcatgttgaactcctatcaaacgccttctcaaaatctataaagcagacgtaaattggtttctgtacttcccatgatcgttgaagtaatgttaacattgagaacaaagcttcccttgttcccaatccttctctg

SEQ ID NO: 2957 - DNA, 1497 bp, Diabrotica virgifera
  SmartBlast Evalue=1E-42; Info=Endonuclease-reverse transcriptase n=1 Tax=Bombyx mori RepID=D5LB38_BOMMO
ctagagcagagtaggtatgtatttgtttttccttcgttaacttctagacctcctttccgtgattccttggccgggatggttactgcttcttttaatctttccttgtctcttcccataagaactaaatcatctgcatatgtaactatttgtgttgagaagtgggttgactgttacttctacttcttcttctttaagtaccgtgcccaaatttttaggcgtgggtagcttccataacaatttgccgatatcgttctcgatcttgtgcggcatgtaacaattgatctgctgataagccagtccattgacgaaggtttcggagccatgaatatttctttcgaccaattcctctttttccgtcgatctttccattgagtattaactgcagcatcctgtatctgctacctctcattatatgccccagatattcaagttttctcttttttatcatcttcattaagtcaccttcgccttgacctactctgtttaagacttctctgtttgaaatgcgttgaacccaagatattctgagcattctacgatacgaccacatctcaaaggcttctaatttgttcatcatgttaaccttcatgatccaggtttcacatccatatagtaatacaggatacacataacattttaggaacttgattcttagttgtaagttcagctgagagttgctcagaatagatctaagtttcataaatgctcctcttgcaatttctatacgagttttaatttcttcatccggatttagtgtctcgtttatccaacatcctaggtatttaaagtggtattaaaatactaggtattaaaatcaactgtatttattctgttaaatacaacataatttggctgtctaaagcagtgtttgtgttgctgttgattaatatttctcttataaactgttttatttataggcgtgactttatctggagcaagtgtttcagtctgtttcagatttgtaaagggcttactacaaaaaaatggaaagacaccattaactcacacttgtttaagaactatgatggacacaatgaagttgtctatttttcatccacgcaaagaccagtgtgacagttgttttaaatttaaaaatggaaatttatctgaaaatgaatataatgaccacataatcagaaaagatcgagctagaagtgagaaagaacgtgacaaaaagtaggctattgaaggaaaactttttgttattatcatggatgttcagtcagtgaaactatctcctcaattaccggccagtgcactcaactataaaactaaactttgctgccataattatactatctataatttggctattagccaagctagttgctattggtacaatgagacagaggcagatggtcaggcttctacctaagcatcttttctgaaacattatttggaagaacattttctgaactcatcacacaaacttcccataactatgtatctattctgatgggtgtaatgcccaaaacggaacagtgtaatgtctaatac

SEQ ID NO: 2958 - DNA, 1466 bp, Diabrotica virgifera
  SmartBlast Evalue=1E-42; Info=Endonuclease-reverse transcriptase n=1 Tax=Bombyx mori RepID=D5LB38_BOMMO
gcgtaacaatagatacaatgtgccgttttgtaaatttttcggattttagctttaacattttaacattaactgtaactttaacataactgttacattacagtaacaccgtcctgagtgatatggaattcatttctcggatgagccttttcttcttcttctttaagtaccgtgcccaaatttttaggcgtgggtagcttccataacaatttgccgatatcgttctcgatcttgtgcggcatgtaacaattgatctgctgataagccagtccattgacgaaggtttcggagccatgaatatttctttcgaccaattcctctttttccgtcgatctttccattgagtattaactgcagcatcctgtatctgctacctctcattatatgccccagatattcaagttttctcttttttatcatcttcattaagtcaccttcgccttgacctactctgtttaagacttctctgtttgaaatgcgttgaacccaagatattctgagcattctacgatacgaccacatctcaaaggcttctaatttgttcatcatgttaaccttcatgatccaggtttcacatccatatagtaatacaggatacacataacattttaggaacttgattcttagttgtaagttcagctgagagttgctcagaatagatctaagtttcataaatgctcctcttgcaatttctatacgagttttaatttcttcatccggatttagtgtctcgtttatccaacatcctaggtatttaaagtggtattaaaatactaggtattaaaatcaactgtatttattctgttaaatacaacataatttggctgtctaaagcagtgtttgtgttgctgttgattaatatttctcttataaactgttttatttataggcgtgactttatctggagcaagtgtttcagtctgtttcagatttgtaaagggcttactacaaaaaaatggaaagacaccattaactcacacttgtttaagaactatgatggacacaatgaagttgtctatttttcatccacgcaaagaccagtgtgacagttgttttaaatttaaaaatggaaatttatctgaaaatgaatataatgaccacataatcagaaaagatcgagctagaagtgagaaagaacgtgacaaaaagtaggctattgaaggaaaactttttgttattatcatggatgttcagtcagtgaaactatctcctcaattaccggccagtgcactcaactataaaactaaactttgctgccataattatactatctataatttggctattagccaagctagttgctattggtacaatgagacagaggcagatggtcaggcttctacctaagcatcttttctgaaacattatttggaagaacattttctgaactcatcacacaaacttcccataactatgtatctattctgatgggtgtaatgcccaaaacggaacagtgtaatgtctaatac

SEQ ID NO: 2959 - DNA, 1373 bp, Diabrotica virgifera
  SmartBlast Evalue=2E-85; Info=Endonuclease-reverse transcriptase n=1 Tax=Bombyx mori RepID=D5LB38_BOMMO
ctagagcagagtaggtatgtatttgtttttccttcgttaacttctagacctcctttccgtgattccttggccgggatggttactgcttcttttaatctttccttgtctcttcccataagaactaaatcatctgcatatgtaactatttgtgttgagaagtgggttgactgttacttctacttcttcttctttaagtaccgtgcccaaatttttaggcgtgggtagcttccataacaatttgccgatatcgttctcgatcttgtgcggcatgtaacaattgatctgctgataagccagtccattgacgaaggtttcggagccatgaatatttctttcgaccaattcctctttttccgtcgatctttccattgagtattaactgcagcatcctgtatctgctacctctcattatatgccccagatattcaagttttctcttttttatcatcttcattaagtcaccttcgccttgacctactctgtttaagacttctctgtttgaaatgcgttgaacccaagatattctgagcattctacgatacgaccacatctcaaaggcttctaatttgttcatcatgttaaccttcatgatccaggtttcacatccatatagtaatacaggatacacataacattttaggaacttgattcttagttgtaagttcagctgagagttgctcagaatagatctaagtttcataaatgctcctcttgcaatttctatacgagttttaatttcttcatccggatttagtgtctcgtttatccaacatcctaggtatttaaaatggttaacttttgttattgattcatcactgacaattagttgcatagggccgacgtcttgtttactaaccacaagtaactttgtctttgttgcatttatgttaagtccgttattggagcattctctagtgactcgatctataaggaattgaagatcttcgatattttcagccatgatcgcggtgtcgtctgcatatctgatgttgttaatagtttctccccgattcgaactccacattgtccttccaaggcttcattaaaaattatttctgagtatacgttaaacaaagttggggataacacacaaccctgtctgacacctctttgaatgcaaattttgtctgtttctttgccgtctaccagaatagaagcttcttgattccaatatagatgttgtaaaagtctcagatctttatcatctattccaatcatttctagatattcaaacaacctatcatgttgaactcctatcaaacgccttctcaaaatctataaagcagacgtaaattggtttctgtacttcccatgatcgttgaagtaatgttaacattgagaacaaagcttcccttgttcccaatccttctctg

SEQ ID NO: 2960 - DNA, 1342 bp, Diabrotica virgifera
  SmartBlast Evalue=2E-85; Info=Endonuclease-reverse transcriptase n=1 Tax=Bombyx mori RepID=D5LB38_BOMMO
gcgtaacaatagatacaatgtgccgttttgtaaatttttcggattttagctttaacattttaacattaactgtaactttaacataactgttacattacagtaacaccgtcctgagtgatatggaattcatttctcggatgagccttttcttcttcttctttaagtaccgtgcccaaatttttaggcgtgggtagcttccataacaatttgccgatatcgttctcgatcttgtgcggcatgtaacaattgatctgctgataagccagtccattgacgaaggtttcggagccatgaatatttctttcgaccaattcctctttttccgtcgatctttccattgagtattaactgcagcatcctgtatctgctacctctcattatatgccccagatattcaagttttctcttttttatcatcttcattaagtcaccttcgccttgacctactctgtttaagacttctctgtttgaaatgcgttgaacccaagatattctgagcattctacgatacgaccacatctcaaaggcttctaatttgttcatcatgttaaccttcatgatccaggtttcacatccatatagtaatacaggatacacataacattttaggaacttgattcttagttgtaagttcagctgagagttgctcagaatagatctaagtttcataaatgctcctcttgcaatttctatacgagttttaatttcttcatccggatttagtgtctcgtttatccaacatcctaggtatttaaaatggttaacttttgttattgattcatcactgacaattagttgcatagggccgacgtcttgtttactaaccacaagtaactttgtctttgttgcatttatgttaagtccgttattggagcattctctagtgactcgatctataaggaattgaagatcttcgatattttcagccatgatcgcggtgtcgtctgcatatctgatgttgttaatagtttctccccgattcgaactccacattgtccttccaaggcttcattaaaaattatttctgagtatacgttaaacaaagttggggataacacacaaccctgtctgacacctctttgaatgcaaattttgtctgtttctttgccgtctaccagaatagaagcttcttgattccaatatagatgttgtaaaagtctcagatctttatcatctattccaatcatttctagatattcaaacaacctatcatgttgaactcctatcaaacgccttctcaaaatctataaagcagacgtaaattggtttctgtacttcccatgatcgttgaagtaatgttaacattgagaacaaagcttcccttgttcccaatccttctctg

SEQ ID NO: 2961 - DNA, 1996 bp, Diabrotica virgifera
  SmartBlast Evalue=8E-53; Info=Reverse transcriptase n=2 Tax= Ostrinia nubilalis RepID=A4KWG0_OSTNU
gatccagatgttaaacgaggaggtcccaatagagtggtagagaagcacctctctcgcgctgacaggaagggtgtgtcgtgtggctacagaatcatgcgtctaccaagacttagtagtttacaagatgtgctaaaaatttggattacttcttaacgtagatgctcatagaacatatagatgctgcaggaactatgttggcatgatcagtaaggttctttttcttcttgatgtgcctatccgtgatgaatgttggcgatccccatggcaatctttacatatcttatctgcgcgaaaaagcttaacagatattgtgttgaaccagattcggaggttctttaatcaggatgttcctcttcttcctggaagtagctttccaaatattattcctggtaggatggcttgtaggagggcttatctggattcatttcgcataaagtgtccgaggtgggcagcatttggaaaactgagagaaacttttaaaagtgagttacccacatgtctaaagagaaaggtattcgatcagtgcgtcctcccagtcttgacgtacggatcagaaacacttaccttaactaaagcctcggctaccaaactaagagtcacgcagagaagaatggagcggtcaatgttaggaataactctgcgagacaaaatcagaaacgaagaaatcaggagaagaacaaaggtgactgacgtcatcgagaggatagccaggttgaagtggagatgggcaggacacgtagccagaatgacagatgggcgatggacgaagaggttattggaatggaggccaagagaagacaagagaagcgtcggtcgaccgcctacaagatggactgacgacttaagaaaggtaaataaaaactggatgagcggcgcaggatagatggggttggaaacgaggggaggaggcctatgttcagcagtggacttttgaggctggatgatgaaagtgtccgaagtattatgtatttcgagatttaatggtggtcagtacctctcggttcttcttcatttttttaaggacttcctcatttgtgaatcggcaagtctacaggatcgtaagtattttccgatacggtaaacaaggatacagtagacattgcattgcagaattcttatttttataccaagagagagattgtggctcttgaagaaagttcccatccagttgaaggtggatctaactttttcaatgcaagctcttacctcctgattgttaaccatttcttcatttattttgatgccgaggtaatagtagtaaaccactctttctactgggtttggttgaccttacgttatctttttctaattatcatgagctttgtcttctttacgtttatattgatctatattcttgactgtattacgtgattttggtcataaggacttgtagatcttctaggttgtccgcaaatactattgtgtcatctgaatatctgatgcagatttgcatataccagtaataatagtttagttgaatgcttttctcagtttcgtacaaagcttcgacagatatttcagaatagattcggtaaggtagaaaacgacaatttttgtactgacaaatgtcgaacatttgagaatctataaaactttaattcgaccaataacatgctatggcagtgaagcctgggtcctgaaagaaacatccaaaaacaaactcgacacattcgaaaggaaagtactgaggagaatactaggacctgtgagggaaaacggaatcttcagaagtcgatacaacaacgactttatcaactttataaggaacattcccctgtcagacttcattagaatacaaagattgcaatgggccggacatgtgataagaatgggagaggataggctaccaaaagagcactgaatgctagaatgcagggaaaaagaccggttggaaagctaagaaagcgctgggaagacacagtaaacagcgacgcacaagcccttttaggagtccgtgtatggagaagagcagctacagaccagcaagggtggaggc

SEQ ID NO: 2962 - DNA, 1754 bp, Diabrotica virgifera
  SmartBlast Evalue=5E-37; Info=Reverse transcriptase n=2 Tax= Ostrinia nubilalis RepID=A4KWG0_OSTNU
aataatcttgcactaaacctgctggataatagtaagcagactcggagactgaggaggcacaaaccactggagctaccacataggttctaagcagcagtgaagtgaagtgtcgtgcagtgcagtgcagtgaactacttaccctttcagggcacagttcaataatttaagaggctagtggagtctttgttatcattggataacaagtccaaatttatacttacacccctttgaacaaacaactaacatgcttataattttttgtttattgattacatgtagtgaataacctataataaaaaaaaaacggatcagaaacacttaccttaactaaagcctcggctaccaaactaagagtcacgcagagaagaatggagcggtcaatgttaggaataactctgcgagacaaaatcagaaacgaagaaatcaggagaagaacaaaggtgactgacgtcatcgagaggatagccaggttgaagtggagatgggcaggacacgtagccagaatgacagatgggcgatggacgaagaggttattggaatggaggccaagagaagacaagagaagcgtcggtcgaccgcctacaagatggactgacgacttaagaaaggtaaataaaaactggatgagcggcgcaggatagatggggttggaaacgaggggaggaggcctatgttcagcagtggacttttgaggctggatgatgaaagtgtccgaagtattatgtatttcgagatttaatggtggtcagtacctctcggttcttcttcatttttttaaggacttcctcatttgtgaatcggcaagtctacaggatcgtaagtattttccgatacggtaaacaaggatacagtagacattgcattgcagaattcttatttttataccaagagagagattgtggctcttgaagaaagttcccatccagttgaaggtggatctaactttttcaatgcaagctcttacctcctgattgttaaccatttcttcatttattttgatgccgaggtaatagtagtaaaccactctttctactgggtttggttgaccttacgttatctttttctaattatcatgagctttgtcttctttacgtttatattgatctatattcttgactgtattacgtgattttggtcataaggacttgtagatcttctaggttgtccgcaaatactattgtgtcatctgaatatctgatgcagatttgcatataccagtaataatagtttagttgaatgcttttctcagtttcgtacaaagcttcgacagatatttcagaatagattcggtaaggtagaaaacgacaatttttgtactgacaaatgtcgaacatttgagaatctataaaactttaattcgaccaataacatgctatggcagtgaagcctgggtcctgaaagaaacatccaaaaacaaactcgacacattcgaaaggaaagtactgaggagaatactaggacctgtgagggaaaacggaatcttcagaagtcgatacaacaacgactttatcaactttataaggaacattcccctgtcagacttcattagaatacaaagattgcaatgggccggacatgtgataagaatgggagaggataggctaccaaaagagcactgaatgctagaatgcagggaaaaagaccggttggaaagctaagaaagcgctgggaagacacagtaaacagcgacgcacaagcccttttaggagtccgtgtatggagaagagcagctacagaccagcaagggtggaggc

SEQ ID NO: 2963 - DNA, 1554 bp, Diabrotica virgifera
  SmartBlast Evalue=1E-53; Info=Reverse transcriptase n=2 Tax= Ostrinia nubilalis RepID=A4KWG0_OSTNU
gggtgggcagcatttggaaaactgagagaaacttttaaaagtgagttacccacatgtctaaagagaaaggtattcgatcagtgcgtcctcccagtcttgacgtacggatcagaaacacttaccttaactaaagcctcggctaccaaactaagagtcacgcagagaagaatggagcggtcaatgttaggaataactctgcgagacaaaatcagaaacgaagaaatcaggagaagaacaaaggtgactgacgtcatcgagaggatagccaggttgaagtggagatgggcaggacacgtagccagaatgacagatgggcgatggacgaagaggttattggaatggaggccaagagaagacaagagaagcgtcggtcgaccgcctacaagatggactgacgacttaagaaaggtaaataaaaactggatgagcggcgcaggatagatggggttggaaacgaggggaggaggcctatgttcagcagtggacttttgaggctggatgatgaaagtgtccgaagtattatgtatttcgagatttaatggtggtcagtacctctcggttcttcttcatttttttaaggacttcctcatttgtgaatcggcaagtctacaggatcgtaagtattttccgatacggtaaacaaggatacagtagacattgcattgcagaattcttatttttataccaagagagagattgtggctcttgaagaaagttcccatccagttgaaggtggatctaactttttcaatgcaagctcttacctcctgattgttaaccatttcttcatttattttgatgccgaggtaatagtagtaaaccactctttctactgggtttggttgaccttacgttatctttttctaattatcatgagctttgtcttctttacgtttatattgatctatattcttgactgtattacgtgattttggtcataaggacttgtagatcttctaggttgtccgcaaatactattgtgtcatctgaatatctgatgcagatttgcatataccagtaataatagtttagttgaatgcttttctcagtttcgtacaaagcttcgacagatatttcagaatagattcggtaaggtagaaaacgacaatttttgtactgacaaatgtcgaacatttgagaatctataaaactttaattcgaccaataacatgctatggcagtgaagcctgggtcctgaaagaaacatccaaaaacaaactcgacacattcgaaaggaaagtactgaggagaatactaggacctgtgagggaaaacggaatcttcagaagtcgatacaacaacgactttatcaactttataaggaacattcccctgtcagacttcattagaatacaaagattgcaatgggccggacatgtgataagaatgggagaggataggctaccaaaagagcactgaatgctagaatgcagggaaaaagaccggttggaaagctaagaaagcgctgggaagacacagtaaacagcgacgcacaagcccttttaggagtccgtgtatggagaagagcagctacagaccagcaagggtggaggc

SEQ ID NO: 2964 - DNA, 1109 bp, Diabrotica virgifera
  SmartBlast Evalue=4E-53; Info=Reverse transcriptase n=2 Tax= Ostrinia nubilalis RepID=A4KWG0_OSTNU
gatccagatgttaaacgaggaggtcccaatagagtggtagagaagcacctctctcgcgctgacaggaagggtgtgtcgtgtggctacagaatcatgcgtctaccaagacttagtagtttacaagatgtgctaaaaatttggattacttcttaacgtagatgctcatagaacatatagatgctgcaggaactatgttggcatgatcagtaaggttctttttcttcttgatgtgcctatccgtgatgaatgttggcgatccccatggcaatctttacatatcttatctgcgcgaaaaagcttaacagatattgtgttgaaccagattcggaggttctttaatcaggatgttcctcttcttcctggaagtagctttccaaatattattcctggtaggatggcttgtaggagggcttatctggattcatttcgcataaagtgtccgaggtgggcagcatttggaaaactgagagaaacttttaaaagtgagttacccacatgtctaaagagaaaggtattcgatcagtgcgtcctcccagtcttgacgtacggatcagaaacacttaccttaactaaagcctcggctaccaaactaagagtcacgcagagaagaatggagcggtcaatgttaggaataactctgcgagacaaaatcagaaacgaagaaatcaggagaagaacaaaggtgactgacgtcatcgagaggatagccaggttgaagtggagatgggcaggacacgtagccagaatgacagatgggcgatggacgaagaggttattggaatggaggccaagagaagacaagagaagcgtcggtcgaccgcctacaagatggactgacgacttaagaaaggtaaataaaaactggatgagcggcgcaggatagatggggttggaaacgaggggaggaggcctatgttcagcagtggacttttgaggctggatgatgatgattaactatcgaacatgaagcaacacaaaacataaatatagaaaatgtgatttcagaacttttcgctagtaaagactaaaaaaatattcaattcattcacatagtgtaaaacaaaaaagtaaataaactattatatagaactgccgggaactaggtagtg

SEQ ID NO: 2965 - DNA, 867 bp, Diabrotica virgifera
  SmartBlast Evalue=2E-37; Info=Reverse transcriptase n=2 Tax= Ostrinia nubilalis RepID=A4KWG0_OSTNU
aataatcttgcactaaacctgctggataatagtaagcagactcggagactgaggaggcacaaaccactggagctaccacataggttctaagcagcagtgaagtgaagtgtcgtgcagtgcagtgcagtgaactacttaccctttcagggcacagttcaataatttaagaggctagtggagtctttgttatcattggataacaagtccaaatttatacttacacccctttgaacaaacaactaacatgcttataattttttgtttattgattacatgtagtgaataacctataataaaaaaaaaacggatcagaaacacttaccttaactaaagcctcggctaccaaactaagagtcacgcagagaagaatggagcggtcaatgttaggaataactctgcgagacaaaatcagaaacgaagaaatcaggagaagaacaaaggtgactgacgtcatcgagaggatagccaggttgaagtggagatgggcaggacacgtagccagaatgacagatgggcgatggacgaagaggttattggaatggaggccaagagaagacaagagaagcgtcggtcgaccgcctacaagatggactgacgacttaagaaaggtaaataaaaactggatgagcggcgcaggatagatggggttggaaacgaggggaggaggcctatgttcagcagtggacttttgaggctggatgatgatgattaactatcgaacatgaagcaacacaaaacataaatatagaaaatgtgatttcagaacttttcgctagtaaagactaaaaaaatattcaattcattcacatagtgtaaaacaaaaaagtaaataaactattatatagaactgccgggaactaggtagtg

SEQ ID NO: 2966 - DNA, 667 bp, Diabrotica virgifera
  SmartBlast Evalue=3E-54; Info=Reverse transcriptase n=2 Tax= Ostrinia nubilalis RepID=A4KWG0_OSTNU
gggtgggcagcatttggaaaactgagagaaacttttaaaagtgagttacccacatgtctaaagagaaaggtattcgatcagtgcgtcctcccagtcttgacgtacggatcagaaacacttaccttaactaaagcctcggctaccaaactaagagtcacgcagagaagaatggagcggtcaatgttaggaataactctgcgagacaaaatcagaaacgaagaaatcaggagaagaacaaaggtgactgacgtcatcgagaggatagccaggttgaagtggagatgggcaggacacgtagccagaatgacagatgggcgatggacgaagaggttattggaatggaggccaagagaagacaagagaagcgtcggtcgaccgcctacaagatggactgacgacttaagaaaggtaaataaaaactggatgagcggcgcaggatagatggggttggaaacgaggggaggaggcctatgttcagcagtggacttttgaggctggatgatgatgattaactatcgaacatgaagcaacacaaaacataaatatagaaaatgtgatttcagaacttttcgctagtaaagactaaaaaaatattcaattcattcacatagtgtaaaacaaaaaagtaaataaactattatatagaactgccgggaactaggtagtg

SEQ ID NO: 2967 - DNA, 1285 bp, Diabrotica virgifera
taaaatataagatgtgcttttgcatgggcagcatttggtcaatcacaaagagtatttaaatcaaacttaccaagtactctaaaggcaaaaccttcaatcagtacgtattgcaagttctgacatatggaactgaaacttgggctgttaacaacaggatggacaacaaaacaagatgggctgaggacatgaatggatgcaaaaaacagcaaacagatatgactggacacacctaagggaggcttacatgtgacgatggatgaaatagctgttgatgatgatgatgtccttgatataagatccacaaattctgagatgtttggaattatatcaaatttaacctacaatgcagtatttcgttttcattagaacttatcagatacggaatatttgaatatgtacaaccaaaatccaaaggccaacaaacgacgccttaatgttgcccactcaagtagtaagcgtgtaatggtgtcatctacttcgacagctatgaacaaaaacaatttattaattacttttatctattcattgtattaccagagatttgcaaatatttacatgtatttacattttatgagtttttagagctccccttcaaggatttatttctaaacacagttttgaagtttaaattattaatagtttttatattttttctgccatttggatacaaatacaacttgatttatcatattatcaaatagtcttattaaaaaattttatattaggaaaattacacgagaaaattgatttttttaatattataatttttttattttatcaacgaaaatatatcatttaaataaataatagtagtgcataaatatatctaaatactactaaaggctaatcaataggctaatcaataaatactattgcatagtaactaactggttgcgcagttgtggaagtgatatttactacagcaaaagtgtcgagatatccaccttctataatttttggtgagctggcgcttcctttttgatcgattagcagtaagcaggtgataggtctttggtaatatccagttgctgggatacgagttttcacgctatatcctggtggcagtaaagagctgtatatcagatttttttgtctgttggtatttccaggacaattgctgtaatcgtatgcactagaataagcaactaacaccagcagtgtacacaaaagggatactttaaaaaccatttttaatgagagttttttcaaaaatatctagcccaatctgcgataagtttcttctggctaatggtgaaatctttaagatatatatacctactcaaat

SEQ ID NO: 2968 - DNA, 1232 bp, Diabrotica virgifera
taaaatataagatgtgcttttgcatgggcagcatttggtcaatcacaaagagtatttaaatcaaacttaccaagtactctaaaggcaaaaccttcaatcagtacgtattgcaagttctgacatatggaactgaaacttgggctgttaacaacaggatggacaacaaaacaagatgggctgaggacatgaatggatgcaaaaaacagcaaacagatatgactggacacacctaagggaggcttacatgtgacgatggatgaaatagctgttgatgatgatgatgtccttgatataagatccacaaattctgagatgtttggaattatatcaaatttaacctacaatgcagtatttcgttttcattagaacttatcagatacggaatatttgaatatgtacaaccaaaatccaaaggccaacaaacgacgccttaatgttgcccactcaagtagtaagcgtgtaatggtgtcatctacttcgacagctatgaacaaaaacaatttattaattacttttatctattcattgtattaccagagatttgcaaatatttacatgtatttacattttatgagtttttagagctccccttcaaggatttatttctaaacacagttttgaagtttaaattattaatagtttttatattttttctgccatttggatacaaatacaacttgatttatcatattatcaaatagtcttattaaaaaattttatattaggaaaattacacgagaaaattgatttttttaatattataatttttttattttatcaacgaaaatatatcatttaaataaataatagtagtgcataaatatatctaaatactactaaaggctaatcaataggctaatcaataaatactattgcatagtaactaactggttgcgcagttgtggaagtgatatttactacagcaaaagtgtcgagatatccaccttctataatttttggtgagctggcgcttcctttttgatcgattagcagtaagcaggtgataggtctttggtaatatccagttgctgggatacgagttttcacgctatatcctggtggcagtaaagagctgtatatcagatttttttgtctgttggtatttccaggacaattgctgtaatcgtatgcactagaataagcaactaacaccagcagtgtacacaaaagggatactttaaaaaccatttttaatgagagttttttcaaaaatatctagcccaatctgcgat

SEQ ID NO: 2969 - DNA, 1168 bp, Diabrotica virgifera
tccgcagcttgcctcatacttttatttctgtagtgtgcactacctatttcataaacactggtattcaccatacagatctacaagttttaaagtttcatcttcggtgaacttaactttcactaattacacaaaacataattccagccggaatgacagcgtccctatgtactctcctacctactctactctatcacttctaccagaattgagcgcgttccatgggtagtgaccgcaggcgagtggacattttggcgatggtggtggtggtggtggtggtggtggtagtagagtagagttactttgccacatgttgctagtcactctactttaccacctactatacactctacttgctactctactgtgctgagcgtttttacgggagagttactctactctatcaagtacttgcatcattactctacccgtgtaaacaagtctttagttattttttatttgaataaccaaaaaatataatttattaattaaattaacagtctaacaaaattctagcttatttgtataaaaaaaataatttagtcaataaatactagtgcgtagtaagtgactgggtcggctgtattggaagtaatgtttactaaggcataggtgtcgagatatccaccttccgatatttttggtgtgctggtactacctttttggtctattagcagtaagcatgtgataggtctgctgtaatatccagttgctggaagacgtgctctcacattgtatcctgatggcaatacagcgttgtaagtcaaaattttctggttgcgcagttgtggaagtgatatttactacagcaaaagtgtcgagatatccaccttctataatttttggtgagctggcgcttcctttttgatcgattagcagtaagcaggtgataggtctttggtaatatccagttgctgggatacgagttttcacgctatatcctggtggcagtaaagagctgtatatcagatttttttgtctgttggtatttccaggacaattgctgtaatcgtatgcactagaataagcaactaacaccagcagtgtacacaaaagggatactttaaaaaccatttttaatgagagttttttcaaaaatatctagcccaatctgcgataagtttcttctggctaatggtgaaatctttaagatatatatacctactcaaat

SEQ ID NO: 2970 - DNA, 1115 bp, Diabrotica virgifera
tccgcagcttgcctcatacttttatttctgtagtgtgcactacctatttcataaacactggtattcaccatacagatctacaagttttaaagtttcatcttcggtgaacttaactttcactaattacacaaaacataattccagccggaatgacagcgtccctatgtactctcctacctactctactctatcacttctaccagaattgagcgcgttccatgggtagtgaccgcaggcgagtggacattttggcgatggtggtggtggtggtggtggtggtggtagtagagtagagttactttgccacatgttgctagtcactctactttaccacctactatacactctacttgctactctactgtgctgagcgtttttacgggagagttactctactctatcaagtacttgcatcattactctacccgtgtaaacaagtctttagttattttttatttgaataaccaaaaaatataatttattaattaaattaacagtctaacaaaattctagcttatttgtataaaaaaaataatttagtcaataaatactagtgcgtagtaagtgactgggtcggctgtattggaagtaatgtttactaaggcataggtgtcgagatatccaccttccgatatttttggtgtgctggtactacctttttggtctattagcagtaagcatgtgataggtctgctgtaatatccagttgctggaagacgtgctctcacattgtatcctgatggcaatacagcgttgtaagtcaaaattttctggttgcgcagttgtggaagtgatatttactacagcaaaagtgtcgagatatccaccttctataatttttggtgagctggcgcttcctttttgatcgattagcagtaagcaggtgataggtctttggtaatatccagttgctgggatacgagttttcacgctatatcctggtggcagtaaagagctgtatatcagatttttttgtctgttggtatttccaggacaattgctgtaatcgtatgcactagaataagcaactaacaccagcagtgtacacaaaagggatactttaaaaaccatttttaatgagagttttttcaaaaatatctagcccaatctgcgat

SEQ ID NO: 2971 - DNA, 530 bp, Diabrotica virgifera
ttttttaatattattatttttttaatttattaacgaaaatatatatcatttaaataaataatatttctgcataaatatagctaaatactactaaaataggctaatcaataaatactattgcatagtaactaactggttgcgcagttgtggaagtgatatttactacagcaaaagtgtcgagatatccaccttctataatttttggtgagctggtgcttcctttttgatcgattagcagtaagcaggtgataggtctttggtaatatccagttgctgggatacgagttttcgcgctatacgctgatgggagtaaagagctgtatatcagatttttttgtctgttggtatttccaggacaattgctgtaatcgtatgcactagaataagcaactaacaccagcagtgtacacaaaagggatactttaaaaaccatttttaatgagagttttttcaaaaatatctagcccaatctgcgataagtttcttctggctaatggtgaaatctttaagatatatatacctactcaaat

SEQ ID NO: 2972 - DNA, 477 bp, Diabrotica virgifera
ttttttaatattattatttttttaatttattaacgaaaatatatatcatttaaataaataatatttctgcataaatatagctaaatactactaaaataggctaatcaataaatactattgcatagtaactaactggttgcgcagttgtggaagtgatatttactacagcaaaagtgtcgagatatccaccttctataatttttggtgagctggtgcttcctttttgatcgattagcagtaagcaggtgataggtctttggtaatatccagttgctgggatacgagttttcgcgctatacgctgatgggagtaaagagctgtatatcagatttttttgtctgttggtatttccaggacaattgctgtaatcgtatgcactagaataagcaactaacaccagcagtgtacacaaaagggatactttaaaaaccatttttaatgagagttttttcaaaaatatctagcccaatctgcgat

SEQ ID NO: 2973 - DNA, 1255 bp, Diabrotica virgifera
  SmartBlast Evalue=3E-30; Info=Transposase (Fragment) n=1 Tax= Teleopsis quinqueguttata RepID=A5WZ66_9DIOP
gccccgattcgttttgttatatatgcggcagttttaccattctcagtcaaaggacaaacatccgtacatttgtcagacaagcatattttgcctattttaaagtgaaactaggtaaccaagataaagcatgggcactcaatgggcacctcagtttaaaaagttgacgtgatagacaaaatctgaggatattctcagattcagacgccaaaaattagtcaaaaacaagtgtcagatctaactcaacaaaaaaatgtgttccccagtgtgtacatatacaaaaacatatataggtatgcttcttttcatgagcatttttcagtgcgtcacaaatgatagaaaaaaaggtaagtccgtgataatatacattttagtgacatgacattttagttaaatctgacagttgtcacattttatttgcaatttggcataaaaacaaatcaattgtgtttattgcatttataaaatggtattttctttgatttgtatagtcttataaattgtacagattatattcgtagatatattatataattcgaaaataattttttttcgattatagcgccatctattgacagctaaaataaatgttataaatgtcaccgacgaaatgtaatcaccgacgtgcgtttttttctgtcacgcgttagaaagaaatcgaaaaactgtgacgcgctgaaagatcctcatgagaaaaagcataccaaacggaaaataaacgccaattcgctgtgtggatatttcacgatgaggaaaaaccaacaaaagtgatctgttctcgaagtgtgtcaaagaaaatggtcgcaacttttgtgtcaaactctggtcatgtggcaacaattgctttagaagatcgaggaacggttactttgattggtatacaaccgtttgtttaccagaagttatcgcgaaacttcgacaaaaccacacaaaacggcgaatcatcctacatcatgaaaatgcaagtgctcacactgcccaaaagacaatagagtttttggaacttcaaaacatcgaattgttaaaccatccaccgtatagccccgacccaagtcccaacaacttctccacgttcaatgcatgggcggcgattccagtcgccagaagaagcgatcgatgcctttgaaacagcgatttttactgtttacgaaaaactgttttaccaattggtttgaacgtatgcaaaagtgtatgatcttggtggggcatattttgaaaagcaataaagttgtgacgataatataattttatcgtctag

SEQ ID NO: 2974 - DNA, 1161 bp, Diabrotica virgifera
  SmartBlast Evalue=2E-30; Info=Transposase (Fragment) n=1 Tax= Teleopsis quinqueguttata RepID=A5WZ66_9DIOP
ggcttatttcccataaaaaatacgtagttgaaaaatagtttttattattgtaagtaaccaatgttttaaattatttttaattataaacatactttctgtatattaattttcgttattgtcaaaaatagaaaaattcttgagcaaggagcacattttttacataggtacacagttcctatacagctaataaattgtgatatgcttcttttcatgagcatttttcagtgcgtcacaaatgatagaaaaaaaggtaagtccgtgataatatacattttagtgacatgacattttagttaaatctgacagttgtcacattttatttgcaatttggcataaaaacaaatcaattgtgtttattgcatttataaaatggtattttctttgatttgtatagtcttataaattgtacagattatattcgtagatatattatataattcgaaaataattttttttcgattatagcgccatctattgacagctaaaataaatgttataaatgtcaccgacgaaatgtaatcaccgacgtgcgtttttttctgtcacgcgttagaaagaaatcgaaaaactgtgacgcgctgaaagatcctcatgagaaaaagcataccaaacggaaaataaacgccaattcgctgtgtggatatttcacgatgaggaaaaaccaacaaaagtgatctgttctcgaagtgtgtcaaagaaaatggtcgcaacttttgtgtcaaactctggtcatgtggcaacaattgctttagaagatcgaggaacggttactttgattggtatacaaccgtttgtttaccagaagttatcgcgaaacttcgacaaaaccacacaaaacggcgaatcatcctacatcatgaaaatgcaagtgctcacactgcccaaaagacaatagagtttttggaacttcaaaacatcgaattgttaaaccatccaccgtatagccccgacccaagtcccaacaacttctccacgttcaatgcatgggcggcgattccagtcgccagaagaagcgatcgatgcctttgaaacagcgatttttactgtttacgaaaaactgttttaccaattggtttgaacgtatgcaaaagtgtatgatcttggtggggcatattttgaaaagcaataaagttgtgacgataatataattttatcgtctag

SEQ ID NO: 2975 - DNA, 1097 bp, Diabrotica virgifera
  SmartBlast Evalue=2E-30; Info=Transposase (Fragment) n=1 Tax= Teleopsis quinqueguttata RepID=A5WZ66_9DIOP
cattcgtgtatagtagtgtaataaacaacctgtttttctttgaataaaattttgattgttgtcttatgtacggtatattctgtagaataccaaatcacaataaattttattcgaagaaacacaagtatttgtatatgcttcttttcatgagcatttttcagtgcgtcacaaatgatagaaaaaaaggtaagtccgtgataatatacattttagtgacatgacattttagttaaatctgacagttgtcacattttatttgcaatttggcataaaaacaaatcaattgtgtttattgcatttataaaatggtattttctttgatttgtatagtcttataaattgtacagattatattcgtagatatattatataattcgaaaataattttttttcgattatagcgccatctattgacagctaaaataaatgttataaatgtcaccgacgaaatgtaatcaccgacgtgcgtttttttctgtcacgcgttagaaagaaatcgaaaaactgtgacgcgctgaaagatcctcatgagaaaaagcataccaaacggaaaataaacgccaattcgctgtgtggatatttcacgatgaggaaaaaccaacaaaagtgatctgttctcgaagtgtgtcaaagaaaatggtcgcaacttttgtgtcaaactctggtcatgtggcaacaattgctttagaagatcgaggaacggttactttgattggtatacaaccgtttgtttaccagaagttatcgcgaaacttcgacaaaaccacacaaaacggcgaatcatcctacatcatgaaaatgcaagtgctcacactgcccaaaagacaatagagtttttggaacttcaaaacatcgaattgttaaaccatccaccgtatagccccgacccaagtcccaacaacttctccacgttcaatgcatgggcggcgattccagtcgccagaagaagcgatcgatgcctttgaaacagcgatttttactgtttacgaaaaactgttttaccaattggtttgaacgtatgcaaaagtgtatgatcttggtggggcatattttgaaaagcaataaagttgtgacgataatataattttatcgtctag

SEQ ID NO: 2976 - DNA, 686 bp, Diabrotica virgifera
gccccgattcgttttgttatatatgcggcagttttaccattctcagtcaaaggacaaacatccgtacatttgtcagacaagcatattttgcctattttaaagtgaaactaggtaaccaagataaagcatgggcactcaatgggcacctcagtttaaaaagttgacgtgatagacaaaatctgaggatattctcagattcagacgccaaaaattagtcaaaaacaagtgtcagatctaactcaacaaaaaaatgtgttccccagtgtgtacatatacaaaaacatatataggtatgcttcttttcatgagcatttttcagtgcgtcacaaatgatagaaaaaaaggtaagtccgtgataatatacattttagtgacatgacattttagttaaatctgacagttgtcacattttatttgcaatttggcataaaaacaaatcaattgtgtttattgcatttataaaatggtattttctttgatttgtatagtcttataaattgtacagattatattcgtagatatattatataattcgaaaataattttttttcgattatagcgccatctattgacaactagaataaatgttataaatgtcaccgatgaaatgtaatcaccgacatgcgttttttctgtcacatgcaatttaacacgttagaatgaaatcgacaaactgtgacgcactg

SEQ ID NO: 2977 - DNA, 592 bp, Diabrotica virgifera
ggcttatttcccataaaaaatacgtagttgaaaaatagtttttattattgtaagtaaccaatgttttaaattatttttaattataaacatactttctgtatattaattttcgttattgtcaaaaatagaaaaattcttgagcaaggagcacattttttacataggtacacagttcctatacagctaataaattgtgatatgcttcttttcatgagcatttttcagtgcgtcacaaatgatagaaaaaaaggtaagtccgtgataatatacattttagtgacatgacattttagttaaatctgacagttgtcacattttatttgcaatttggcataaaaacaaatcaattgtgtttattgcatttataaaatggtattttctttgatttgtatagtcttataaattgtacagattatattcgtagatatattatataattcgaaaataattttttttcgattatagcgccatctattgacaactagaataaatgttataaatgtcaccgatgaaatgtaatcaccgacatgcgttttttctgtcacatgcaatttaacacgttagaatgaaatcgacaaactgtgacgcactg

SEQ ID NO: 2978 - DNA, 528 bp, Diabrotica virgifera
cattcgtgtatagtagtgtaataaacaacctgtttttctttgaataaaattttgattgttgtcttatgtacggtatattctgtagaataccaaatcacaataaattttattcgaagaaacacaagtatttgtatatgcttcttttcatgagcatttttcagtgcgtcacaaatgatagaaaaaaaggtaagtccgtgataatatacattttagtgacatgacattttagttaaatctgacagttgtcacattttatttgcaatttggcataaaaacaaatcaattgtgtttattgcatttataaaatggtattttctttgatttgtatagtcttataaattgtacagattatattcgtagatatattatataattcgaaaataattttttttcgattatagcgccatctattgacaactagaataaatgttataaatgtcaccgatgaaatgtaatcaccgacatgcgttttttctgtcacatgcaatttaacacgttagaatgaaatcgacaaactgtgacgcactg

SEQ ID NO: 2979 - DNA, 616 bp, Diabrotica virgifera
ttttgagcttaaaaattaaaaacgaaatatgcagatagtgttattttttatgaccgatcagtagcggagggattatgaattatgacctgcagtaattgtaaatgattgcgatcctgcagtaattgtaaatgattgtgatccgagcagtaaattgaggaatatgagttatgaccgagcagtaggggagagattattttaaatatgtaggtattatgtgcagaaataaaatactcagtgtaagatatctttttatgcacccgcttatgatcaaattcgatgttttcgaaagtcataccgctacgactactagggacgtgtaagatatttttaaaacgttactagttacaagtacggaaataccgattttaagttgcctactcaattcagtacaaggatcagatacatcagtattttgtaatcagtatttgtactcagtaccacttagaaccggtatcaaaagtaaccgttacatgtccgcactgattttgcccgtctctattcgccacgtcgatggccaacggttgggttggcttgtgttcaatatgcggtgcgctagaaaaataaatgcacgggtcacccgtgccgccggcgcaggttgtgtctcgcttagattaaa

SEQ ID NO: 2980 - DNA, 569 bp, Diabrotica virgifera
ttttgagcttaaaaattaaaaacgaaatatgcagatagtgttattttttatgaccgatcagtagcggagggattatgaattatgacctgcagtaattgtaaatgattgcgatcctgcagtaattgtaaatgattgtgatccgagcagtaaattgaggaatatgagttatgaccgagcagtaggggagagattattttaaatatgtaggtattatgtgcagaaataaaatactcagtgtaagatatctttttatgcacccgcttatgatcaaattcgatgttttcgaaagtcataccgctacgactactagggacgtgtaagatatttttaaaacgttactagttacaagtacggaaataccgattttaagttgcctactcaattcagtacaaggatcagatacatcaggtaccactgagaaccggtatcaaaagtaaccgttacatgtccgcactgattttgcccgtctctattcgccacgtcgatagccaagggttggattgggttgtgttcaatatgcggcacgctagaaaaataaatgcacgggtcacccgtcccgccggcgcagg

SEQ ID NO: 2981 - DNA, 531 bp, Diabrotica virgifera
cctgcagtaattgtaaatgattgcgatcctgcagtaattgtaaatgattgtgatccgagcagtaaattgaggaatatgagttatgaccgagcagtaggggagagattattttaaatatgtaggtattatgtgcagaaataaaatactcagtgtaagatatctttttatgcacccgcttatgatcaaattcgatgttttcgaaagtcataccgctacgactactagggacgtgtaagatatttttaaaacgttactagttacaagtacggaaataccgattttaagttgcctactcaattcagtacaaggatcagatacatcagtattttgtaatcagtatttgtactcagtaccacttagaaccggtatcaaaagtaaccgttacatgtccgcactgattttgcccgtctctattcgccacgtcgatggccaacggttgggttggcttgtgttcaatatgcggtgcgctagaaaaataaatgcacgggtcacccgtgccgccggcgcaggttgtgtctcgcttagattaaa

SEQ ID NO: 2982 - DNA, 484 bp, Diabrotica virgifera
cctgcagtaattgtaaatgattgcgatcctgcagtaattgtaaatgattgtgatccgagcagtaaattgaggaatatgagttatgaccgagcagtaggggagagattattttaaatatgtaggtattatgtgcagaaataaaatactcagtgtaagatatctttttatgcacccgcttatgatcaaattcgatgttttcgaaagtcataccgctacgactactagggacgtgtaagatatttttaaaacgttactagttacaagtacggaaataccgattttaagttgcctactcaattcagtacaaggatcagatacatcaggtaccactgagaaccggtatcaaaagtaaccgttacatgtccgcactgattttgcccgtctctattcgccacgtcgatagccaagggttggattgggttgtgttcaatatgcggcacgctagaaaaataaatgcacgggtcacccgtcccgccggcgcagg

SEQ ID NO: 2983 - DNA, 429 bp, Diabrotica virgifera
ttttgagcttaaaaattaaaaacgaaatatgcagatagtgttattttttatgaccgatcagtagcggagggattatgaattatgacctgcagtaattgtaaatgattgcgatcctgcagtaattgtaaatgattgtgatccgagcagtaaattgaggaatatgagttatgaccgagcagtaggggagagattattttaaatatgtaggtattatgtgcagaaataaaatactcagtgtaagatatctttttatgcacgactactagggacgtgtaagatatttttaaaacgttactagttacaagtacggaagtaccgattttaagttgcctactcaattcagtacaaggatcagatacatcagtattttgtaatcagtatttgtactcagtaccactgagaacccttttatgacacgactactaggga

SEQ ID NO: 2984 - DNA, 344 bp, Diabrotica virgifera
cctgcagtaattgtaaatgattgcgatcctgcagtaattgtaaatgattgtgatccgagcagtaaattgaggaatatgagttatgaccgagcagtaggggagagattattttaaatatgtaggtattatgtgcagaaataaaatactcagtgtaagatatctttttatgcacgactactagggacgtgtaagatatttttaaaacgttactagttacaagtacggaagtaccgattttaagttgcctactcaattcagtacaaggatcagatacatcagtattttgtaatcagtatttgtactcagtaccactgagaacccttttatgacacgactactaggga

SEQ ID NO: 2985 - DNA, 5095 bp, Diabrotica virgifera
  SmartBlast Evalue=0; Info=Cationic amino acid transporter n=2 Tax=Aedes aegypti RepID=Q16W17_AEDAE
atttcttttttatttttgtttctattttttttatttatttattatttttttgttattattttttatgttttttatatattatttttttcttttaatttttttcaaaccacattaacaaattatgcctattcagtagctaggtactcttggctattatacacataagtcacgtagataaatatttgacacacaagctgtagcgcccctccatcaagtttcacatctaccccctcctggccaacatccccggttttgggccagctgacacatcattatttgttaataagctttagaacacccaactaaataaaaagaaaagagccatgccaaaatgctccggtcaaacttgacaccacctcccggctatatagagttatatccctattatgtgtagcatcaaaacaatatgaaataaataatagtagaaagaaaaatcaaaatagaaatacagcataaaccagcactctttgatctgtttctgtttgggttgttttattgtcttttgtaggtgacgtactatagtgctgttgccgatataaaatgtcccatttctgcctgtcccatttgaaagaaaggtactatattaccatgttaaatattcaacacgaatgctttaatatcaaatattttctcgaagatattcttaactttcaaacagtaccatgttaacgtctaattgttattctttgttaccagacaatggtacctgtctgcaataccaatgtatttgaatctatcattatctttggtaaaaacactgaccagcagttgtatatataccgatagaagcctaatacattcttactgctcataaaaactggaaaaacaagatagtttgttagaaaaagctgaggtccaaaaaaaattaggttatgttctcaaaattttttggaagagtcatttttaagacctttttaagcattaaagacagtacttaagcaacaggaggaaaaatcacgagggtactgtttaaaagtgctggttttgtaaattataattcaataaatattataaaaaatgttctatatgttaccctaagtttatttccaaaaaatatctgtttggcattataatacttaatctgtattttatctgtattttttaattgattaatttccatagattctaataaagatagcttaaggccttttttaatatgaagaatttaaaactgttcaataaaagaatgatttgatgtatagggtgaagtgcgtacgtagaatctgtttttctgttattgaaagctcttttgtgttctgatattcgtctgttaaaggttctgcctgtttgaccaatgtaatttttttggacagtcaccacatgccagtttgtatacaccactctgtatgtagtgagattaacttataataaattttgtggaagtattgaaaagaaaagttatcagtgttttattgatagatgttctataatttactaaaaccagcactttttacaacagaaagaatacaggtataaagcaaaaaagcacaaaaatcggttaggaacaaggatttggattattatatacattttctacgtagttgcacaaatcgtgagctacgaccatcaattttcctgcagcaacagatctatcttgataatctcttgttttgttgtttcaattttcaatttcataaatcagatctttaacagtgcttctgaagaacgttagccaacttgtctattccagtttcttagtgacgaatctaaatgttgttctgaagctataattgacgaatctataccttcgactgttgcccagcactagctttcctcctcaactggatggttttaaaaatttccgacatagcttgcttgtgcttgtctttgtcatcaactttgtgttctctatgatccagggacttaaaattccgttccgaagtgttgggttctttagtcaattctccaactttcaagcttctaaaaacgttcttcattctgttctgatgtgccatgtagtctttgtcgaccgcttccactattggttcatcaacatcgtgggtctcagggctaggagttgatgggagatcgatctctacgttgggactaggtggagcacttgttactggtgagccttccttagacggatccaaccaactcaatctagatgtaacaaagagtccaagtttttctcttgcttggtccttgttgatgctttcttccagaacattctcgttctttttatgttcttgaggaggcttgggagcagcttgttttttcctaggcattatatagaacggtgtcattgggacttctgctagtttgttcgaaagtttttctttaaacgatttagctctttctgagcccaatttaaggttatcgtcgtcaggttcgtctgatttattctggtcttctatctgcacccttttcttggctatagacttcagcgtgatgcgttttatgtcatttgaattaattctcggcaaagtagacttgtgtttgttctctttttgctctttatcctttagtgtttcttgttctgtaatatccttgctttctggtatgatttctggcatttctgggtcgtttgaagtaattctaggtagggtagaattatgtttgttctctttttcctcttcctgcgcttcctgttctgtagtatttttactctcttgtatgagttctggcatagggattggaggtggtggaggaattgtaaatgttactaatttaggaataggaagaggggaaacattctctgaagggggtggagtaggtgttggcgagatttgctccggactagcagttgggtcatcatctgacgacacaggagccgacttgaaagatacaggagtatctggaggggctggagaatccacagaactagatcttcttaattctacagcattcttttgtacttccgcagattctatatcgtcgttcacgttggttgttagtgctagggttgttggacgctctagctttggatctggagggaaaggaacagcggggttaaggacgttatcacagtgaacatcagcaacaacattttcttcgcgtgacatagatacagacacactaccaactgatgattttcgatcgaattcgagatcttttgcgactttgtctagcatttcatctagttctccgatgattttgtcttcaattttatcttcaagtactggaggagcaacaggagctttctttttctttttgggtaccgtctctgcattagctgttagttcctccacaaatgcaacgttatcgtaataatattctcctccatttgaggtaccatttgccagaggctcgttaggtttgacttttgtctctgtcacttcgggattttgagattttatagaaaaatagtaggtgggtaggcctacggccatccagacggcgaaacgaatccaagtttctgagtctaagtttaacattaagtaaatgttggttaaaatactgagagcaggtataagaggcaccattggcactttaaagctaagttcctgtctggaaacgggctgtgtagctacggacatgatcaagatacatgctataccaatagctgtagatgccagcacaatagcccacgtttcaccttctgatataggattttttaaatatattgcactgagaccaataaagatgcaagttacacaataaagaaaaacgttgaaagccacaatattttgagactttttcgtcggctgagaatgtcgtccacagttcaaaaattgtgctatgtaacgtgtattggtcctttcaggagtcaactggtctgaatcactatacagttcgttatcatcagaatccgaattaaccctcactggagcgtactgtctcctctcctcatctgtatacctcaaaagtaatacactagcagctactactgtataagccattagagtaccaatggacatcatattgacgagttgcgcgagatcgaataaggctcccatcaaacctgtcagtacacctgctagaattgtgccgattacaggtgtttgaaatcgaggattaatctttccaaggaatttgaacactagtccgtctgaagccattgcgaaaattatcctgggtagaggaaacatcgctccgaataagctggccaataaaccacaagtccctccaacagcgacaacccatttggcccaaccccagccgatttgatcgaaagcgtatggtatcgatgctctagcgtcctgcagataatacggtaccatcaacgtaagtatcgtcgaaataccgaagtaagccaagaacacgatgccaagtgacactatgatcgcgataggaatggcttttctcggattcctaacctcttctccggtggtggcgatgcaatcgaatcctatgaatccgtagaagcaggtggcggctccggcgatggttccctccaggccgaaaggaaagaagccgccctcgccaatgtttgttgcgttcgttgtattactcggttgtatgttccagtttttgaaatcagctttaagtgatcctgctattatcacaaatagtacgattcctatgttcaatgaagtaaaaatattgttaaccaagctgctttccttcaaaccaaatgctagtgcaatcgctaaaacaattgatattccgaaagccataaaatcgaagtactctgacataaaagaaacatttatgggtgcgatttccttaaacgtattctcgagcgtattgttcaataacgtgtccaaatataaacaaagccctcttgccacgcttgctgaaccaatgacatattccaatataagattccatcctataacaaacgccacaaattctcctacacacacataggtatagacatacgctgatcctgtctttggagttctagctccaaattctgcatagcaaaggcctgcaaaaacagacgctatagcagctatcaaaaacgataaaatcactgaggggcccgcagtgagagcaacttttcctgccaaaacatatatgcccacacctaaagtactgcccacacctaaggctgttaaatcaaaagtgcccaaaactctggacagtcttgtctcttccacagattcagtatcaatttcctttttcctagttagcactttccaaattgttgacatttttttctaaatcctagagcactttatactgatacctccctaatcatttcattgtt

SEQ ID NO: 2986 - DNA, 5026 bp, Diabrotica virgifera
  SmartBlast Evalue=1E-180; Info=Cationic amino acid transporter n=2 Tax=Aedes aegypti RepID=Q16W17_AEDAE
atttcttttttatttttgtttctattttttttatttatttattatttttttgttattattttttatgttttttatatattatttttttcttttaatttttttcaaaccacattaacaaattatgcctattcagtagctaggtactcttggctattatacacataagtcacgtagataaatatttgacacacaagctgtagcgcccctccatcaagtttcacatctaccccctcctggccaacatccccggttttgggccagctgacacatcattatttgttaataagctttagaacacccaactaaataaaaagaaaagagccatgccaaaatgctccggtcaaacttgacaccacctcccggctatatagagttatatccctattatgtgtagcatcaaaacaatatgaaataaataatagtagaaagaaaaatcaaaatagaaatacagcataaaccagcactctttgatctgtttctgtttgggttgttttattgtcttttgtaggtgacgtactatagtgctgttgccgatataaaatgtcccatttctgcctgtcccatttgaaagaaaggtactatattaccatgttaaatattcaacacgaatgctttaatatcaaatattttctcgaagatattcttaactttcaaacagtaccatgttaacgtctaattgttattctttgttaccagacaatggtacctgtctgcaataccaatgtatttgaatctatcattatctttggtaaaaacactgaccagcagttgtatatataccgatagaagcctaatacattcttactgctcataaaaactggaaaaacaagatagtttgttagaaaaagctgaggtccaaaaaaaattaggttatgttctcaaaattttttggaagagtcatttttaagacctttttaagcattaaagacagtacttaagcaacaggaggaaaaatcacgagggtactgtttaaaagtgctggttttgtaaattataattcaataaatattataaaaaatgttctatatgttaccctaagtttatttccaaaaaatatctgtttggcattataatacttaatctgtattttatctgtattttttaattgattaatttccatagattctaataaagatagcttaaggccttttttaatatgaagaatttaaaactgttcaataaaagaatgatttgatgtatagggtgaagtgcgtacgtagaatctgtttttctgttattgaaagctcttttgtgttctgatattcgtctgttaaaggttctgcctgtttgaccaatgtaatttttttggacagtcaccacatgccagtttgtatacaccactctgtatgtagtgagattaacttataataaattttgtggaagtattgaaaagaaaagttatcagtgttttattgatagatgttctataatttactaaaaccagcactttttacaacagaaagaatacaggtataaagcaaaaaagcacaaaaatcggttaggaacaaggatttggattattatatacattttctacgtagttgcacaaatcgtgagctacgaccatcaattttcctgcagcaacagatctatcttgataatctcttgttttgttgtttcaattttcaatttcataaatcagatctttaacagtgcttctgaagaacgttagccaacttgtctattccagtttcttagtgacgaatctaaatgttgttctgaagctataattgacgaatctataccttcgactgttgcccagcactagctttcctcctcaactggatggttttaaaaatttccgacatagcttgcttgtgcttgtctttgtcatcaactttgtgttctctatgatccagggacttaaaattccgttccgaagtgttgggttctttagtcaattctccaactttcaagcttctaaaaacgttcttcattctgttctgatgtgccatgtagtctttgtcgaccgcttccactattggttcatcaacatcgtgggtctcagggctaggagttgatgggagatcgatctctacgttgggactaggtggagcacttgttactggtgagccttccttagacggatccaaccaactcaatctagatgtaacaaagagtccaagtttttctcttgcttggtccttgttgatgctttcttccagaacattctcgttctttttatgttcttgaggaggcttgggagcagcttgttttttcctaggcattatatagaacggtgtcattgggacttctgctagtttgttcgaaagtttttctttaaacgatttagctctttctgagcccaatttaaggttatcgtcgtcaggttcgtctgatttattctggtcttctatctgcacccttttcttggctatagacttcagcgtgatgcgttttatgtcatttgaattaattctcggcaaagtagacttgtgtttgttctctttttgctctttatcctttagtgtttcttgttctgtaatatccttgctttctggtatgatttctggcatttctgggtcgtttgaagtaattctaggtagggtagaattatgtttgttctctttttcctcttcctgcgcttcctgttctgtagtatttttactctcttgtatgagttctggcatagggattggaggtggtggaggaattgtaaatgttactaatttaggaataggaagaggggaaacattctctgaagggggtggagtaggtgttggcgagatttgctccggactagcagttgggtcatcatctgacgacacaggagccgacttgaaagatacaggagtatctggaggggctggagaatccacagaactagatcttcttaattctacagcattcttttgtacttccgcagattctatatcgtcgttcacgttggttgttagtgctagggttgttggacgctctagctttggatctggagggaaaggaacagcggggttaaggacgttatcacagtgaacatcagcaacaacattttcttcgcgtgacatagatacagacacactaccaactgatgattttcgatcgaattcgagatcttttgcgactttgtctagcatttcatctagttctccgatgattttgtcttcaattttatcttcaagtactggaggagcaacaggagctttctttttctttttgggtaccgtctctgcattagctgttagttcctccacaaatgcaacgttatcgtaataatattctcctccatttgaggtaccatttgccagaggctcgttaggtttgacttttgtctctgtcacttcgggattttgagattttatagaaaaatagtaggtgggtaggcctacggccatccagacggcgaaacgaatccaagtttctgagtctaagtttaacattaagtaaatgttggttaaaatactgagagcaggtataagaggcaccattggcactttaaagctaagttcctgtctggaaacgggctgtgtagctacggacatgatcaagatacatgctataccaatagctgtagatgccagcacaatagcccacgtttcaccttctgatataggattttttaaatatattgcactgagaccaataaagatgcaagttacacaataaagaaaaacgttgaaagccacaatattttgagactttttcgtcggctgagaatgtcgtccacagttcaaaaattgtgctatgtaacgtgtattggtcctttcaggagtcaactggtctgaatcactatacctcaaaagtaatacactagcagctactactgtataagccattagagtaccaatggacatcatattgacgagttgcgcgagatcgaataaggctcccatcaaacctgtcagtacacctgctagaattgtgccgattacaggtgtttgaaatcgaggattaatctttccaaggaatttgaacactagtccgtctgaagccattgcgaaaattatcctgggtagaggaaacatcgctccgaataagctggccaataaaccacaagtccctccaacagcgacaacccatttggcccaaccccagccgatttgatcgaaagcgtatggtatcgatgctctagcgtcctgcagataatacggtaccatcaacgtaagtatcgtcgaaataccgaagtaagccaagaacacgatgccaagtgacactatgatcgcgataggaatggcttttctcggattcctaacctcttctccggtggtggcgatgcaatcgaatcctatgaatccgtagaagcaggtggcggctccggcgatggttccctccaggccgaaaggaaagaagccgccctcgccaatgtttgttgcgttcgttgtattactcggttgtatgttccagtttttgaaatcagctttaagtgatcctgctattatcacaaatagtacgattcctatgttcaatgaagtaaaaatattgttaaccaagctgctttccttcaaaccaaatgctagtgcaatcgctaaaacaattgatattccgaaagccataaaatcgaagtactctgacataaaagaaacatttatgggtgcgatttccttaaacgtattctcgagcgtattgttcaataacgtgtccaaatataaacaaagccctcttgccacgcttgctgaaccaatgacatattccaatataagattccatcctataacaaacgccacaaattctcctacacacacataggtatagacatacgctgatcctgtctttggagttctagctccaaattctgcatagcaaaggcctgcaaaaacagacgctatagcagctatcaaaaacgataaaatcactgaggggcccgcagtgagagcaacttttcctgccaaaacatatatgcccacacctaaagtactgcccacacctaaggctgttaaatcaaaagtgcccaaaactctggacagtcttgtctcttccacagattcagtatcaatttcctttttcctagttagcactttccaaattgttgacatttttttctaaatcctagagcactttatactgatacctccctaatcatttcattgtt

SEQ ID NO: 2987 - DNA, 1946 bp, Diabrotica virgifera
  SmartBlast Evalue=0; Info=Cationic amino acid transporter n=2 Tax=Aedes aegypti RepID=Q16W17_AEDAE
tcaatataaatatattaggtataagttataaaatgtatatccgactatgtatacaaataaaattaaaaatcataatatattaaaaatataatcatatttttagtctagcagttcataatctctgtagttgcgtagactatttggaagaccatagcatatatacactgacaaacctacggccatccagacggcgaaacgaatccaagtttctgagtctaagtttaacattaagtaaatgttggttaaaatactgagagcaggtataagaggcaccattggcactttaaagctaagttcctgtctggaaacgggctgtgtagctacggacatgatcaagatacatgctataccaatagctgtagatgccagcacaatagcccacgtttcaccttctgatataggattttttaaatatattgcactgagaccaataaagatgcaagttacacaataaagaaaaacgttgaaagccacaatattttgagactttttcgtcggctgagaatgtcgtccacagttcaaaaattgtgctatgtaacgtgtattggtcctttcaggagtcaactggtctgaatcactatacagttcgttatcatcagaatccgaattaaccctcactggagcgtactgtctcctctcctcatctgtatacctcaaaagtaatacactagcagctactactgtataagccattagagtaccaatggacatcatattgacgagttgcgcgagatcgaataaggctcccatcaaacctgtcagtacacctgctagaattgtgccgattacaggtgtttgaaatcgaggattaatctttccaaggaatttgaacactagtccgtctgaagccattgcgaaaattatcctgggtagaggaaacatcgctccgaataagctggccaataaaccacaagtccctccaacagcgacaacccatttggcccaaccccagccgatttgatcgaaagcgtatggtatcgatgctctagcgtcctgcagataatacggtaccatcaacgtaagtatcgtcgaaataccgaagtaagccaagaacacgatgccaagtgacactatgatcgcgataggaatggcttttctcggattcctaacctcttctccggtggtggcgatgcaatcgaatcctatgaatccgtagaagcaggtggcggctccggcgatggttccctccaggccgaaaggaaagaagccgccctcgccaatgtttgttgcgttcgttgtattactcggttgtatgttccagtttttgaaatcagctttaagtgatcctgctattatcacaaatagtacgattcctatgttcaatgaagtaaaaatattgttaaccaagctgctttccttcaaaccaaatgctagtgcaatcgctaaaacaattgatattccgaaagccataaaatcgaagtactctgacataaaagaaacatttatgggtgcgatttccttaaacgtattctcgagcgtattgttcaataacgtgtccaaatataaacaaagccctcttgccacgcttgctgaaccaatgacatattccaatataagattccatcctataacaaacgccacaaattctcctacacacacataggtatagacatacgctgatcctgtctttggagttctagctccaaattctgcatagcaaaggcctgcaaaaacagacgctatagcagctatcaaaaacgataaaatcactgaggggcccgcagtgagagcaacttttcctgccaaaacatatatgcccacacctaaagtactgcccacacctaaggctgttaaatcaaaagtgcccaaaactctggacagtcttgtctcttccacagattcagtatcaatttcctttttcctagttagcactttccaaattgttgacatttttttctaaatcctagagcactttatactgatacctccctaatcatttcattgtt

SEQ ID NO: 2988 - DNA, 1877 bp, Diabrotica virgifera
  SmartBlast Evalue=0; Info=Cationic amino acid transporter n=2 Tax=Aedes aegypti RepID=Q16W17_AEDAE
tcaatataaatatattaggtataagttataaaatgtatatccgactatgtatacaaataaaattaaaaatcataatatattaaaaatataatcatatttttagtctagcagttcataatctctgtagttgcgtagactatttggaagaccatagcatatatacactgacaaacctacggccatccagacggcgaaacgaatccaagtttctgagtctaagtttaacattaagtaaatgttggttaaaatactgagagcaggtataagaggcaccattggcactttaaagctaagttcctgtctggaaacgggctgtgtagctacggacatgatcaagatacatgctataccaatagctgtagatgccagcacaatagcccacgtttcaccttctgatataggattttttaaatatattgcactgagaccaataaagatgcaagttacacaataaagaaaaacgttgaaagccacaatattttgagactttttcgtcggctgagaatgtcgtccacagttcaaaaattgtgctatgtaacgtgtattggtcctttcaggagtcaactggtctgaatcactatacctcaaaagtaatacactagcagctactactgtataagccattagagtaccaatggacatcatattgacgagttgcgcgagatcgaataaggctcccatcaaacctgtcagtacacctgctagaattgtgccgattacaggtgtttgaaatcgaggattaatctttccaaggaatttgaacactagtccgtctgaagccattgcgaaaattatcctgggtagaggaaacatcgctccgaataagctggccaataaaccacaagtccctccaacagcgacaacccatttggcccaaccccagccgatttgatcgaaagcgtatggtatcgatgctctagcgtcctgcagataatacggtaccatcaacgtaagtatcgtcgaaataccgaagtaagccaagaacacgatgccaagtgacactatgatcgcgataggaatggcttttctcggattcctaacctcttctccggtggtggcgatgcaatcgaatcctatgaatccgtagaagcaggtggcggctccggcgatggttccctccaggccgaaaggaaagaagccgccctcgccaatgtttgttgcgttcgttgtattactcggttgtatgttccagtttttgaaatcagctttaagtgatcctgctattatcacaaatagtacgattcctatgttcaatgaagtaaaaatattgttaaccaagctgctttccttcaaaccaaatgctagtgcaatcgctaaaacaattgatattccgaaagccataaaatcgaagtactctgacataaaagaaacatttatgggtgcgatttccttaaacgtattctcgagcgtattgttcaataacgtgtccaaatataaacaaagccctcttgccacgcttgctgaaccaatgacatattccaatataagattccatcctataacaaacgccacaaattctcctacacacacataggtatagacatacgctgatcctgtctttggagttctagctccaaattctgcatagcaaaggcctgcaaaaacagacgctatagcagctatcaaaaacgataaaatcactgaggggcccgcagtgagagcaacttttcctgccaaaacatatatgcccacacctaaagtactgcccacacctaaggctgttaaatcaaaagtgcccaaaactctggacagtcttgtctcttccacagattcagtatcaatttcctttttcctagttagcactttccaaattgttgacatttttttctaaatcctagagcactttatactgatacctccctaatcatttcattgtt

SEQ ID NO: 2989 - DNA, 1662 bp, Diabrotica virgifera
tcaatataaatatattaggtataagttataaaatgtatatccgactatgtatacaaataaaattaaaaatcataatatattaaaaatataatcatatttttagtctagcagttcataatctctgtagttgcgtagactatttggaagaccatagcatatatacactgacaaacctgtaaacaacttaatactagaaagactcatacaaaaacaaaacaaaacattaatatcaacgagatgcatgatcatttctgatgagtatgacaacaacttcaaatatctagacaaatatttgacatacaagcatattaccaaaaaaaaaatcctccgtggatcttctagggactatatttgtctgactttcgatgttttcattgaatgtagatcaagagtttggtatcccgtgcaccaactacataatctacagttactgtgttgtttgagctccgtttgtccattaaatattgctcacgttgagaaaaaagtaaagaagtaggaaaaaagtaagagaagaaaaagtatatgaatgttaagcaggactagaagcttaaggaagactaaaagtaaagaggtgaagataagtgagatgatagaactaagaaaagtgtagggatgggaacaagaatcagaaataatacaacggaaaccagtatagtggaagggaaagaacattcagaaaaatatactgcgataaaaatgtcgactatttttggagggctgcttaaatatgtacttaatttattttaataaaactaataacttaaaaatgttatgttccacttgaaatttcgctccaaaactctgatatttgtcacgtgacatagttatagaaacatagttttcagttatagaacactgaaaaacttacgaagcaacaaagaaattaagctaagacaaataattaccaataacagagcaatattaatcgacgatacggatataatggagagatggaggaaacatttcgaacaactgtagaatgaagagcacggaaaagcaaagggaaatgaaaacaacgtaattgacggatcagaggaaaacaccgaggaaacagaatctatacaggaagaactatccgaagcaataggacagataaagactgggaaagtcccgggagtgatgaaattagtccagaaaagattattatacatcacaaatatactttggaagaaaaaaaaatgtctagagagtggtcaaatgcaataattgtagcagtgcgcaagaagggtaataagagactgtcaaaactattagaccgggaggtagtgtcaaattcaaccggagcaccttagcatggctgatttcttcccatttagtcaggtgttccaaagcttataacaaatgatgtgtcagccggcccaaaaccggcgatttcaggcaagaaaaggcaaaatgtgaaacttgatggaaaaacgctacaacctacatgtcaaatatcatccccgtgacttacgtgtataatagccatacctagctactggctttcacccagaggactcgggttcaattcctggtccctgaaaatctttctgctttcaaaattgacactttgatttgaaaaaaaaccattccttgacaataccacgctttttatcatttatacgacacaatataaaaagtctgcacgtcttttacagaatcgtaaactttgcatttgatcat

SEQ ID NO: 2990 - DNA, 2757 bp, Diabrotica virgifera
  SmartBlast Evalue=6E-47; Info=AN1-type zinc finger protein 5 n= 3 Tax=Aculeata RepID=E2A5P7_9HYME
aacagaatcacgtagagatagggtgagaacgcgttctcacataggaaaagaactatccttattttttgttgattttatttgttcttgttgtagttcgcagtaagttgtgtaaattgtttgttgagtagtttttggtgcgttctcgagacaattttgaaattgaataacaagtgaagtggcagtagctgtcaatggcgcttgagtaacctacttcgtctgattttcgacggattcgcgtggttgacagtgaagcaaaatctctggatatcgagatattgtgcaaagtgttcgataatttttgttcgttaacagctgacagctttttaagtgtcacaaggaaacgtcttcctctctcaaggtcccccttcttttagatggtgtcctcctgacagggtccaactccttcaacttcgacagagaactgaagacccaagacctttaggattttgtgacgattgaattaggccgaatcaggagcgagtagtagatttggtggagtgtttttagttttcctttatttccttgcgccatggagcgtgaatcgaaccccatgcaggccttgtgccggtccggatgtggattttatggtagccccgcgactgacggactatgttcgttatgtttcaaggaaaatctaaaaaagaaacaacaattacctagcaccccttcaagtctgagcgctttaagagatacagcaacagcacaccctaccattagtcatattgtatccccaccactcacagatcttcccacagatgcctcagaagaatgttcgaacgcagcttcagctgccgcgggcaacgcctctgccgctgagacaattgccgccgaagctgctgcggctgccaccacctcctccggcgaaacggactccggcaccgggagcgaagacaaggacggcgataaggacgtgaagaaaaagaagaatcggtgtgccacttgtcgcaagaaggtcggcctaacaggttttgaatgtcgttgcggaggactattttgtgccatccaccgatacagcgataaacacgactgcagttttaactaccgggagatgggcgcccaagaaattagacgcaacaaccccgtcgtcgtaggcgaaaagatccaaaagatctgaacctcgccgcaacgttaactagaagtttgcgtgtgccatgcgcccataccgagtgatcaaatgagatatggacaaatttttttctgaaaaaacgaatcattgatcagaactggtcggggtgttattagtgcaaacacacaaacatacaaaaaagacttaagtgatttattattatatggtacttttatttacaattttgccactcaatttcgtctttagttttatttccattaataaatttagatatataaatatatgtcattttagcttctttgttgattgtatatacatattactgagggatgtcgggactgtgaactgtatttggtttcagtttaactgttctctaaaatctggtcatcagttagcaccaaatggtgctttagtccatgttttataaaaataattcaacaaacatttgcaatatctgtttatgactataaaatattgccatccttcaaaacacacaattttattgtttggttttttgaagtattgtttttgcatgttttataaaaacaattttaattcgtcaattaatacattttcaacaaatgggtatagccaaatcggcaatcgtttgcaacgttaaatgttgttccaaatatgaagttggttagaaaacaattagaaagctgtagaaaaacaagaagttgaaagatgtttttacgatccaaattgtatgtgtatatgtacaggtttcttaataacctccataaatcattccctacgcttttttcaaatacatatctggtaaaataataaataatacggaataataaatcatcttggtatcagcacttaaacgaaaacaaccacatggcaaaaatccttgaattaagtatattgccgaagaaaacagcaatattgataaagttgttgaaccactagaggaaattttaagaattaggaaagaagcattggaaaaacttacataatgccaagaggtcggaaagccagtaataatcaataacagaatctaaaataattgacgactacagccaagggcgtaagaatgataccgagattcgtgaaattttaatatggaatactatttaatatttattactatacttgccattaacatacactatgcacaacttatagcagataattctaatataacatcatcatattatgtaaaaataaaacttcataccttttaacagactgaaacttcgggcaacacataattgatcaaaagctatttacactacaaataattatgttagatatttttaatgatatattctacaaatgtaagatgttaaaattctagtatttatatagaaaatttctaacacatttttaaattaaaattttctggtatagatatatatctccaataatacagagtattgccacttttaaattccaatcccttattcgcatatctaatattatatttaaatagaaagttaaactgaaaccaacaaccagattttccctgatccacacaaattttctacagggtatcaaacaatgttgcactccttttacaagcacgttgtgggacatcctgtatatagatattatttacctttggtaagggacgtatagcgccctggcttctgcaattctaatccaatattaatgtagaagttttttttgttttattgaatcccatttagtcgcaggcgggc

SEQ ID NO: 2991 - DNA, 2574 bp, Diabrotica virgifera
  SmartBlast Evalue=6E-47; Info=AN1-type zinc finger protein 5 n= 3 Tax=Aculeata RepID=E2A5P7_9HYME
gttatgggtagccctgtcatttttgtttaatttgggataatctagaaataaaaattaattggtttttgcttttgagaatttttcatcagtttaccattagacacaacaaagcctgtaaaaggcaatatattgatgatgacataagtccattagaaagaaaaccataatattttcggtcccccttcttttagatggtgtcctcctgacagggtccaactccttcaacttcgacagagaactgaagacccaagacctttaggattttgtgacgattgaattaggccgaatcaggagcgagtagtagatttggtggagtgtttttagttttcctttatttccttgcgccatggagcgtgaatcgaaccccatgcaggccttgtgccggtccggatgtggattttatggtagccccgcgactgacggactatgttcgttatgtttcaaggaaaatctaaaaaagaaacaacaattacctagcaccccttcaagtctgagcgctttaagagatacagcaacagcacaccctaccattagtcatattgtatccccaccactcacagatcttcccacagatgcctcagaagaatgttcgaacgcagcttcagctgccgcgggcaacgcctctgccgctgagacaattgccgccgaagctgctgcggctgccaccacctcctccggcgaaacggactccggcaccgggagcgaagacaaggacggcgataaggacgtgaagaaaaagaagaatcggtgtgccacttgtcgcaagaaggtcggcctaacaggttttgaatgtcgttgcggaggactattttgtgccatccaccgatacagcgataaacacgactgcagttttaactaccgggagatgggcgcccaagaaattagacgcaacaaccccgtcgtcgtaggcgaaaagatccaaaagatctgaacctcgccgcaacgttaactagaagtttgcgtgtgccatgcgcccataccgagtgatcaaatgagatatggacaaatttttttctgaaaaaacgaatcattgatcagaactggtcggggtgttattagtgcaaacacacaaacatacaaaaaagacttaagtgatttattattatatggtacttttatttacaattttgccactcaatttcgtctttagttttatttccattaataaatttagatatataaatatatgtcattttagcttctttgttgattgtatatacatattactgagggatgtcgggactgtgaactgtatttggtttcagtttaactgttctctaaaatctggtcatcagttagcaccaaatggtgctttagtccatgttttataaaaataattcaacaaacatttgcaatatctgtttatgactataaaatattgccatccttcaaaacacacaattttattgtttggttttttgaagtattgtttttgcatgttttataaaaacaattttaattcgtcaattaatacattttcaacaaatgggtatagccaaatcggcaatcgtttgcaacgttaaatgttgttccaaatatgaagttggttagaaaacaattagaaagctgtagaaaaacaagaagttgaaagatgtttttacgatccaaattgtatgtgtatatgtacaggtttcttaataacctccataaatcattccctacgcttttttcaaatacatatctggtaaaataataaataatacggaataataaatcatcttggtatcagcacttaaacgaaaacaaccacatggcaaaaatccttgaattaagtatattgccgaagaaaacagcaatattgataaagttgttgaaccactagaggaaattttaagaattaggaaagaagcattggaaaaacttacataatgccaagaggtcggaaagccagtaataatcaataacagaatctaaaataattgacgactacagccaagggcgtaagaatgataccgagattcgtgaaattttaatatggaatactatttaatatttattactatacttgccattaacatacactatgcacaacttatagcagataattctaatataacatcatcatattatgtaaaaataaaacttcataccttttaacagactgaaacttcgggcaacacataattgatcaaaagctatttacactacaaataattatgttagatatttttaatgatatattctacaaatgtaagatgttaaaattctagtatttatatagaaaatttctaacacatttttaaattaaaattttctggtatagatatatatctccaataatacagagtattgccacttttaaattccaatcccttattcgcatatctaatattatatttaaatagaaagttaaactgaaaccaacaaccagattttccctgatccacacaaattttctacagggtatcaaacaatgttgcactccttttacaagcacgttgtgggacatcctgtatatagatattatttacctttggtaagggacgtatagcgccctggcttctgcaattctaatccaatattaatgtagaagttttttttgttttattgaatcccatttagtcgcaggcgggc

SEQ ID NO: 2992 - DNA, 1540 bp, Diabrotica virgifera
  SmartBlast Evalue=3E-47; Info=AN1-type zinc finger protein 5 n= 3 Tax=Aculeata RepID=E2A5P7_9HYME
aacagaatcacgtagagatagggtgagaacgcgttctcacataggaaaagaactatccttattttttgttgattttatttgttcttgttgtagttcgcagtaagttgtgtaaattgtttgttgagtagtttttggtgcgttctcgagacaattttgaaattgaataacaagtgaagtggcagtagctgtcaatggcgcttgagtaacctacttcgtctgattttcgacggattcgcgtggttgacagtgaagcaaaatctctggatatcgagatattgtgcaaagtgttcgataatttttgttcgttaacagctgacagctttttaagtgtcacaaggaaacgtcttcctctctcaaggtcccccttcttttagatggtgtcctcctgacagggtccaactccttcaacttcgacagagaactgaagacccaagacctttaggattttgtgacgattgaattaggccgaatcaggagcgagtagtagatttggtggagtgtttttagttttcctttatttccttgcgccatggagcgtgaatcgaaccccatgcaggccttgtgccggtccggatgtggattttatggtagccccgcgactgacggactatgttcgttatgtttcaaggaaaatctaaaaaagaaacaacaattacctagcaccccttcaagtctgagcgctttaagagatacagcaacagcacaccctaccattagtcatattgtatccccaccactcacagatcttcccacagatgcctcagaagaatgttcgaacgcagcttcagctgccgcgggcaacgcctctgccgctgagacaattgccgccgaagctgctgcggctgccaccacctcctccggcgaaacggactccggcaccgggagcgaagacaaggacggcgataaggacgtgaagaaaaagaagaatcggtgtgccacttgtcgcaagaaggtcggcctaacaggttttgaatgtcgttgcggaggactattttgtgccatccaccgatacagcgataaacacgactgcagttttaactaccgggagatgggcgcccaagaaattagacgcaacaaccccgtcgtcgtaggcgaaaagatccaaaagatctgaacctcgccgcaacgttaactagaagtttgcgtgtgccatgcgcccataccgagtgatcaaatgagatatggacaaatttttttctgaaaaaacgaatcattgatcagaactggtcggggtgttattagtgcaaacacacaaacatacaaaaaagacttaagtgatttattattatatggtacttttatttacaattttgccactcaatttcgtctttagttttatttccattaataaatttagatatataaatatatgtcattttagcttctttgttgattgtatatacatattactgaggagggctgcattgactgtgaactatataaggagtcaattttacttggtcataaaatctgtccatctgtaaaaaccaaacatatgcatcatttacaaaaaaaaacagagaaaacattacaaatgcct

SEQ ID NO: 2993 - DNA, 1357 bp, Diabrotica virgifera
  SmartBlast Evalue=3E-47; Info=AN1-type zinc finger protein 5 n= 3 Tax=Aculeata RepID=E2A5P7_9HYME
gttatgggtagccctgtcatttttgtttaatttgggataatctagaaataaaaattaattggtttttgcttttgagaatttttcatcagtttaccattagacacaacaaagcctgtaaaaggcaatatattgatgatgacataagtccattagaaagaaaaccataatattttcggtcccccttcttttagatggtgtcctcctgacagggtccaactccttcaacttcgacagagaactgaagacccaagacctttaggattttgtgacgattgaattaggccgaatcaggagcgagtagtagatttggtggagtgtttttagttttcctttatttccttgcgccatggagcgtgaatcgaaccccatgcaggccttgtgccggtccggatgtggattttatggtagccccgcgactgacggactatgttcgttatgtttcaaggaaaatctaaaaaagaaacaacaattacctagcaccccttcaagtctgagcgctttaagagatacagcaacagcacaccctaccattagtcatattgtatccccaccactcacagatcttcccacagatgcctcagaagaatgttcgaacgcagcttcagctgccgcgggcaacgcctctgccgctgagacaattgccgccgaagctgctgcggctgccaccacctcctccggcgaaacggactccggcaccgggagcgaagacaaggacggcgataaggacgtgaagaaaaagaagaatcggtgtgccacttgtcgcaagaaggtcggcctaacaggttttgaatgtcgttgcggaggactattttgtgccatccaccgatacagcgataaacacgactgcagttttaactaccgggagatgggcgcccaagaaattagacgcaacaaccccgtcgtcgtaggcgaaaagatccaaaagatctgaacctcgccgcaacgttaactagaagtttgcgtgtgccatgcgcccataccgagtgatcaaatgagatatggacaaatttttttctgaaaaaacgaatcattgatcagaactggtcggggtgttattagtgcaaacacacaaacatacaaaaaagacttaagtgatttattattatatggtacttttatttacaattttgccactcaatttcgtctttagttttatttccattaataaatttagatatataaatatatgtcattttagcttctttgttgattgtatatacatattactgaggagggctgcattgactgtgaactatataaggagtcaattttacttggtcataaaatctgtccatctgtaaaaaccaaacatatgcatcatttacaaaaaaaaacagagaaaacattacaaatgcct

SEQ ID NO: 2994 - DNA, 587 bp, Diabrotica virgifera
gttatgggtagccctgtcatttttgtttaatttgggataatctagaaataaaaattaattggtttttgcttttgagaatttttcatcagtttaccattagacacaacaaagcctgtaaaaggcaatatattgatgatgacataagtccattagaaagaaaaccataatattttcgagacccgttcgactggcggttcccattggcgatttggaagaagaatcgtcgagtcctgcttggcgattcaaccagaggcagcgattcaacttagccgaggcgtcgagaagaatcctgtagtggtatgacatcttaccttatttttatgtaagtgtgcattttgtttatatctctacatagaaactgtaactgcttcaactgtctggcaagtatgaatggggcttcaaacgaagtcttcgacggaatagatatgcatttgaatcagtcttaaatcatttaccaatggggttcattacttttcattaaaaagctaatatatcgttgaaggaatgtctacaataaataccaatgctccttcatctgctgatgcttgtcttagtattgtgcatagtttaatgtgtcatcgacaagg

SEQ ID NO: 2995 - DNA, 2903 bp, Diabrotica virgifera
  SmartBlast Evalue=4E-96; Info=Cytochrome P450-like protein n=1 Tax=Tribolium castaneum RepID=D7EJT1_TRICA
aaacagtgaagtgtgcaacaataataataattattattatattttacggtgaacttttggaaataccaaggacagtagagtagcagaatagtgatgtctttcctgtattcatcatggtcattaaactatgtaatattctgcattaccatatttttccttctatacaaatacttcactagacaatttgattactggaagaagcgaggggtatatacctcaaaaccggttccgttttttggcaacgtttttgacgttgtaatatttaaacgaaacttgtcagaacatataaaaaagctctacgatgaaactgacgaaccatattttgggatttttgtttttgacaaaccagtcttggtgctaaaatctcctaaattaattaaagacatcttgattaaagatttccacatgttttgtgatagaagtttagcagacggtagccatgataaaacaatctccaacttcgtatttttccaaaaaaacccaaatggaatctcacgaggaaaaagttaacttctttttttacttcttcgatgtcaaaagcattttttacaaatatagaattaatcaaccagaagtttatcgaacatttagaaaatatttctgagcccgttgatgcaaaaagctatagcgggacatttcagcacagaaatgattgcacgttgttttttcgcaactgatccacgctgttttgaaagagaaccatccaagttccgacactgtgttcacaggatatttcaatttagtgtaagaaacggactgatacaaactttctattttttaaaaccgagtttgataaaattattcaaattaaacttccttgaaacttcggtcatggaatatttccataaaatatttttggaagccatggaatgtaggaaggattatgatggcaaacctgttaatgcggttgatgtagtgaaccagttgcaaaaaaaagcataatggagagtttcctgatcagtatctttacatctcgaataccatgtttttattagtggctggacacgaaacaactagttctgcaattggttatgccttatatgaattggcagttaatccagatatacaggaaaagttgagaaattcagtccaagataattacaaaacttacgaaggccttacatatgaaggagtacaaaaaaataattatttggatatggttattaatgaaactttaagaaaatatggccttttaccggttcttgatagagatgcactcgccgactatcagtttgaaggtacagatcttgtcattgaaaagggaacagcagtttacattccttactttgctatgtttagggatcccaaatatttcccaaatcccctgaagtttaatccagaaagatttgctgataatactttcaattcagatggttacacctttttcccattcggagagggaccaagagcatgcataggtaaacgcctaggactcctagctattgctgcatgtgtctcaaatgtcgtattaaaatttaatattgaaaaatgtgaagcaactcctgatgcaattgaatttgaacccaaatcgttggctctgcagtcaaaggatggactaaagataaaactaatagccagagaataacatattacaaatatacgtaattaattttaacacaaaatgtcaaagctaatatattgttatgggtctaccccaaaatccctatagccaatattccgacaactaaaattccgacgaccaaaatcccgacacgccaaaatcccgacagccaaaatcctgacgaccaaaatcccgacaaatcaaaaatcccgccaaattttcaaaacaatggttgcgttcggacgaccacagcggctggatagctgagccagcagtagctgtcagacgtcaccgctggaagccagccgctgagagatttactaagctttccctatcacggctggatgcaaccactcagccgatttctgctgccagccagccgctatggtcgtccgaacgcacccaataatacatagtatctatctatttttgttacgttattgttttgttgttttgtttagtttaccatttaatacgaactaattttctaaataaaatttctaacataggtacgtgaattaaattatcttttgccaatatataattcaatatactgttattctctaccttttctatttatttagattaattagcaaattcttaatttgattgattacccaattattttatctattgcctatgtaaagacataactaaattcaaattaaattttccaatcaattttattgtcagggctaattttgtatttgatccaataccagtaatgtgtggattctagtatttctggttttttatttcttctagaaacagggaaattgacaacactcaaatttatatacatgtaatctattgtttttattaaatgccgtgtacatatgatttaaaattattaaaatttacctttgttgcaacaatctctaccttaataaattatctccttgatatctccttggtttgacaaaattatttatttaattaatttcttatttactcatactgaattgaatgaattttacttttcttcttttgaattgatttctcaaatttgaaatgactaactatgttacaaaaatattgttcaataaacaagtaaacaaatatggtcttgatataaataacttttctccattcagacaaatgatttgactaaccttttattcttaacttcctcgttttctggattgcgctgtccttgattctctcaacacgtgttctctggttgttgcgaaaaaatccccctcgtcaaaactgctcccaagaaaaacacacaggacttgctcgaatatctagtgcacaaagggaaaataatcagctactcgttctagacaaaacaaaggaatctccctcggaccatgaaaattaactcttcaaccggtcgacg

SEQ ID NO: 2996 - DNA, 2256 bp, Diabrotica virgifera
  SmartBlast Evalue=3E-96; Info=Cytochrome P450-like protein n=1 Tax=Tribolium castaneum RepID=D7EJT1_TRICA
aaacagtgaagtgtgcaacaataataataattattattatattttacggtgaacttttggaaataccaaggacagtagagtagcagaatagtgatgtctttcctgtattcatcatggtcattaaactatgtaatattctgcattaccatatttttccttctatacaaatacttcactagacaatttgattactggaagaagcgaggggtatatacctcaaaaccggttccgttttttggcaacgtttttgacgttgtaatatttaaacgaaacttgtcagaacatataaaaaagctctacgatgaaactgacgaaccatattttgggatttttgtttttgacaaaccagtcttggtgctaaaatctcctaaattaattaaagacatcttgattaaagatttccacatgttttgtgatagaagtttagcagacggtagccatgataaaacaatctccaacttcgtatttttccaaaaaaacccaaatggaatctcacgaggaaaaagttaacttctttttttacttcttcgatgtcaaaagcattttttacaaatatagaattaatcaaccagaagtttatcgaacatttagaaaatatttctgagcccgttgatgcaaaaagctatagcgggacatttcagcacagaaatgattgcacgttgttttttcgcaactgatccacgctgttttgaaagagaaccatccaagttccgacactgtgttcacaggatatttcaatttagtgtaagaaacggactgatacaaactttctattttttaaaaccgagtttgataaaattattcaaattaaacttccttgaaacttcggtcatggaatatttccataaaatatttttggaagccatggaatgtaggaaggattatgatggcaaacctgttaatgcggttgatgtagtgaaccagttgcaaaaaaaagcataatggagagtttcctgatcagtatctttacatctcgaataccatgtttttattagtggctggacacgaaacaactagttctgcaattggttatgccttatatgaattggcagttaatccagatatacaggaaaagttgagaaattcagtccaagataattacaaaacttacgaaggccttacatatgaaggagtacaaaaaaataattatttggatatggttattaatgaaactttaagaaaatatggccttttaccggttcttgatagagatgcactcgccgactatcagtttgaaggtacagatcttgtcattgaaaagggaacagcagtttacattccttactttgctatgtttagggatcccaaatatttcccaaatcccctgaagtttaatccagaaagatttgctgataatactttcaattcagatggttacacctttttcccattcggagagggaccaagagcatgcataggtaaacgcctaggactcctagctattgctgcatgtgtctcaaatgtcgtattaaaatttaatattgaaaaatgtgaagcaactcctgatgcaattgaatttgaacccaaatcgttggctctgcagtcaaaggatggactaaagataaaactaatagccagagaataacatattacaaatatacgtaattaattttaacacaaaatgtcaaagctaatatattgttatgggtctaccccaaaatccctatagccaatattccgacaactaaaattccgacgaccaaaatcccgacacgccaaaatcccgacagccaaaatcctgacgaccaaaatcccgacaaatcaaaaatcccgccaaattttcaaaacaatggttgcgttcggacgaccacagcggctggatagctgagccagcagtagctgtcagacgtcaccgctggaagccagccgctgagagatttactaagctttccctatcacggctggatgcaaccactcagccgatttctgctgccagccagccgctatggtcgtccgaacgcacccaataatacatagtatctatctatttttgttacgttattgttttgttgttttgtttagtttaccatttaatacgaactaattttctaaataaaatttctaacataggtacgtgaattaaattatcttttgccaatatataattcaatatactgttattctctaccttttctatttatttagattaattagcaaattcttaatttgattgattacccaattattttatctattgcctatgtaaagacataactaaattcaaattaaattttccaatcaattttattgtcaggg

SEQ ID NO: 2997 - DNA, 1206 bp, Diabrotica virgifera
acactgctgttagcccttattgttaatatttaaaaataacagattagtaataaaataatcacaacaatctcgtcaggatctagtatcccgctttaaactttgatttggttattttctgactttcataataataatttttaaccgaagtattaagaattgaaaatgaccattttcgcatttttcaaattttaagtcgcgtataattcgacgtatatatcaattgtagtgaaaaatcagaaacgacctttttttacttccgaacgcacccaataatacatagtatctatctatttttgttacgttattgttttgttgttttgtttagtttaccatttaatacgaactaattttctaaataaaatttctaacataggtacgtgaattaaattatcttttgccaatatataattcaatatactgttattctctaccttttctatttatttagattaattagcaaattcttaatttgattgattacccaattattttatctattgcctatgtaaagacataactaaattcaaattaaattttccaatcaattttattgtcagggctaattttgtatttgatccaataccagtaatgtgtggattctagtatttctggttttttatttcttctagaaacagggaaattgacaacactcaaatttatatacatgtaatctattgtttttattaaatgccgtgtacatatgatttaaaattattaaaatttacctttgttgcaacaatctctaccttaataaattatctccttgatatctccttggtttgacaaaattatttatttaattaatttcttatttactcatactgaattgaatgaattttacttttcttcttttgaattgatttctcaaatttgaaatgactaactatgttacaaaaatattgttcaataaacaagtaaacaaatatggtcttgatataaataacttttctccattcagacaaatgatttgactaaccttttattcttaacttcctcgttttctggattgcgctgtccttgattctctcaacacgtgttctctggttgttgcgaaaaaatccccctcgtcaaaactgctcccaagaaaaacacacaggacttgctcgaatatctagtgcacaaagggaaaataatcagctactcgttctagacaaaacaaaggaatctccctcggaccatgaaaattaactcttcaaccggtcgacg

SEQ ID NO: 2998 - DNA, 559 bp, Diabrotica virgifera
acactgctgttagcccttattgttaatatttaaaaataacagattagtaataaaataatcacaacaatctcgtcaggatctagtatcccgctttaaactttgatttggttattttctgactttcataataataatttttaaccgaagtattaagaattgaaaatgaccattttcgcatttttcaaattttaagtcgcgtataattcgacgtatatatcaattgtagtgaaaaatcagaaacgacctttttttacttccgaacgcacccaataatacatagtatctatctatttttgttacgttattgttttgttgttttgtttagtttaccatttaatacgaactaattttctaaataaaatttctaacataggtacgtgaattaaattatcttttgccaatatataattcaatatactgttattctctaccttttctatttatttagattaattagcaaattcttaatttgattgattacccaattattttatctattgcctatgtaaagacataactaaattcaaattaaattttccaatcaattttattgtcaggg

SEQ ID NO: 2999 - DNA, 387 bp, Diabrotica virgifera
acactgctgttagcccttattgttaatatttaaaaataacagattagtaataaaataatcacaacaatctcgtcaggatctagtatcccgctttaaactttgatttggttattttctgactttcataataataatttttaaccgaagtattaagaattgaaaatgaccattttcgcatttttcaaattttaagtcgcgtataattcgacgtatatatcaattgtagtgaaaaatcagaaacgaccttttttactccgaatgacccaaatgatttaaataaaattagttttaattgacaaaattgttttgtgtgaatttgtttaaaattttttaaacaatttttcgacggtacggtgtggcatcctgtgagtttgttataaggacctc

SEQ ID NO: 3000 - DNA, 2012 bp, Diabrotica virgifera
gcattgcaagcaaatcctgcgcctatgctcctaagtaacatttaaaaaaatataattttacacttctgactttaattttggcaaactcgtcaatcagattggtgtagtctagtggggatagataggtgtagcagctagtgagaactctattgaaataagtgttaaattttttagctttgtttgtcttatataatataatagtttttaattttgaaaaactcctcttcccactagctaccgagacagggagtatttataaaattcttagtttacagctacgtttgggtataaagaaattattatattttggcacaaatagttcaaaacctctaaaggtttcatggagtatggtataatttgaaatatatcacgcaattcttctagaagatcattatatcatcagatttttttttctttttctattgaaagtattgaatgaaatatttttctagtgttttataacggcaatatctaaaatatagatgaacaaatttattttaaatttagcttcatctgttaagagctcgtccaaagatttttcgtaatcaaataaacgcttttttcttctggctcgaatttcattttcagccggaaattcggaacttacatcaaaattttcatcagccatattgtctgtaagttttcactttttctatagtttctgacaacattttcacacaatctgacattattttgattttactgattatgccgcccctcttgtgatgccgcctgatgcgactgcctcgccgcatcatagcacggcacggccctgacaacttccatgtttcgactgaaaagatatgagagtggaagtttcatgccctacgataaatccaattctgattattctgtgtgttgatacattatttctacttacgtcttacgtgtaatgcgattctgtgtttgcgagttttcttaaattgttagttattagtgtgtaaattctcaaattgtatatgtacgtattttgtgttgcataagtattgctatgattgagaaccgtgtgttatattttctgatccgctattgttggtatattcttgtcgttcacttcttgttctttggcaaccaaagactgctgcattttggttttgctacacatttttttcatttagtacctaatataagggctgcttcttcactgttgtctgtgttcattgtcacatagtcattgtcatagtcattgtcactagcacacaaaacaagagcatacattaaaaactcaaaatacttcctgcaaaacctagtagaaacacattacacagttatagataatatactaaattcgctctatcgagattcactttgacactgacgttagtaatttcttttttaaaaagttcagttgtcagaagtgactggaaattactacaaaaccaacgcacctgctcatatccaatattattaatagtaaacagacataaaaataacataaaccttacgcaatcaataattatttatttgcaccattataatgtattgataacaaatgagaaaattatttattgtacaaaataaaaatattttgtagaaataaacttcacaaattttatgagattagtagacactcccactatttctaataattcttctttttttaatgaaagattaagttgatttgagttgattttagcagttaatagtgtgaggtaggaatttttgtgttgtatgtttcctattccgaatgtgtcaaaaaaaaatctcgcgagagcgaatgtagtatacctcggtacctacataaacagtcaatgggaccactctagtgaaataaaacaacacataggaaaagcgagatcagcgttcataatgatgtctcgtttcagaaatctcgtttaccacttggtaacaaaatttctattaggtttgttctagcatcagtttcaaacggtttgaaaccatcagcgaatagcggaccagcgcgagtagaggagatagcactggtgactgtattatgttctctcactgaccaagtgtttgctgacggtttctggctagtttgactgtttgct

SEQ ID NO: 3001 - DNA, 1811 bp, Diabrotica virgifera
gcattgcaagcaaatcctgcgcctatgctcctaagtaacatttaaaaaaatataattttacacttctgactttaattttggcaaactcgtcaatcagattggtgtagtctagtggggatagataggtgtagcagctagtgagaactctattgaaataagtgttaaattttttagctttgtttgtcttatataatataatagtttttaattttgaaaaactcctcttcccactagctaccgagacagggagtatttataaaattcttagtttacagctacgtttgggtataaagaaattattatattttggcacaaatagttcaaaacctctaaaggtttcatggagtatggtataatttgaaatatatcacgcaattcttctagaagatcattatatcatcagatttttttttctttttctattgaaagtattgaatgaaatatttttctagtgttttataacggcaatatctaaaatatagatgaacaaatttattttaaatttagcttcatctgttaagagctcgtccaaagatttttcgtaatcaaataaacgcttttttcttctggctcgaatttcattttcagccggaaattcggaacttacatcaaaattttcatcagccatattgtctgtaagttttcactttttctatagtttctgacaacattttcacacaatctgacattattttgattttactgattatgccgcccctcttgtgatgccgcctgatgcgactgcctcgccgcatcatagcacggcacggccctgacaacttccatgtttcgactgaaaagatatgagagtggaagtttcatgccctacgataaatccaattctgattattctgtgtgttgatacattatttctacttacgtcttacgtgtaatgcgattctgtgtttgcgagttttcttaaattgttagttattagtgtgtaaattctcaaattgtatatgtacgtattttgtgttgcataagtattgctatgattgagaaccgtgtgttatattttctgatccgctattgttggtatattcttgtcgttcacttcttgttctttggcaaccaaagactgctgcattttggttttgctacacatttttttcatttagtacctaatataagggctgcttcttcactgttgtctgtgttcattgtcacatagtcattgtcatagtcattgtcactagcacacaaaacaagagcatacattaaaaactcaaaatacttcctgcaaaacctagtagaaacacattacacagttatagataatatactaaattcgctctatcgagattcactttgacactgacgttagtaatttcttttttaaaaagttcagttgtcagaagtgactggaaattactacaaaaccaacgcacctgctcatatccaatattattaatagtaaacagacataaaaataacataaaccttacgcaatcaataattatttatttgcaccattataatgtattgataacaaatgagaaaattatttattgtacaaaataaaaatattttgtagaaataaacttcacaaattttatgagattagtagacactcccactatttctaataattcttctttttttaatgaaagattaagttgatttgagttgattttagcagttaatagtgtgaggtaggaatttttgtgttgtatgtttcctattccgaatgtgtcaaaaaaaaatctcgcgagagcgaatgtagtatatcattgtagtcagttttggcatcaccaacctttttccaatgtacctttggagggaacgccaaaaataatacgagttaaaataga

SEQ ID NO: 3002 - DNA, 844 bp, Diabrotica virgifera
taaagctagtttatgtctggccgtcagatggcagaagtgtcgtgactattattcgaaaaattggatcggcagtttccacaatattttcatatcttaaaaacacaagataatatactaaattcgctctatcgagattcactttgacactgacgttagtaatttcttttttaaaaagttcagttgtcagaagtgactggaaattactacaaaaccaacgcacctgctcatatccaatattattaatagtaaacagacataaaaataacataaaccttacgcaatcaataattatttatttgcaccattataatgtattgataacaaatgagaaaattatttattgtacaaaataaaaatattttgtagaaataaacttcacaaattttatgagattagtagacactcccactatttctaataattcttctttttttaatgaaagattaagttgatttgagttgattttagcagttaatagtgtgaggtaggaatttttgtgttgtatgtttcctattccgaatgtgtcaaaaaaaaatctcgcgagagcgaatgtagtatacctcggtacctacataaacagtcaatgggaccactctagtgaaataaaacaacacataggaaaagcgagatcagcgttcataatgatgtctcgtttcagaaatctcgtttaccacttggtaacaaaatttctattaggtttgttctagcatcagtttcaaacggtttgaaaccatcagcgaatagcggaccagcgcgagtagaggagatagcactggtgactgtattatgttctctcactgaccaagtgtttgctgacggtttctggctagtttgactgtttgct

SEQ ID NO: 3003 - DNA, 643 bp, Diabrotica virgifera
taaagctagtttatgtctggccgtcagatggcagaagtgtcgtgactattattcgaaaaattggatcggcagtttccacaatattttcatatcttaaaaacacaagataatatactaaattcgctctatcgagattcactttgacactgacgttagtaatttcttttttaaaaagttcagttgtcagaagtgactggaaattactacaaaaccaacgcacctgctcatatccaatattattaatagtaaacagacataaaaataacataaaccttacgcaatcaataattatttatttgcaccattataatgtattgataacaaatgagaaaattatttattgtacaaaataaaaatattttgtagaaataaacttcacaaattttatgagattagtagacactcccactatttctaataattcttctttttttaatgaaagattaagttgatttgagttgattttagcagttaatagtgtgaggtaggaatttttgtgttgtatgtttcctattccgaatgtgtcaaaaaaaaatctcgcgagagcgaatgtagtatatcattgtagtcagttttggcatcaccaacctttttccaatgtacctttggagggaacgccaaaaataatacgagttaaaataga

SEQ ID NO: 3004 - DNA, 282 bp, Diabrotica virgifera
gctgcattttggttttgctacctatttttttcatttagtacctaatataagggctgattcttcactgttgtctgtgttcattgtcacatagtcattgtcatagtcattgtcactagcacacaaaacaagagcatacattaaaaactcaaaatacttcctgcaaaacctagtagaaacacattacagttatagataatatcattgtagtcagttttggcatcaccaacctttttccaatgtacctttggagggaacgccaaaaataatacgagttaaaataga

SEQ ID NO: 3005 - DNA, 852 bp, Diabrotica virgifera
  misc_feature (844)..(844): n is a, c, g, or t
attattgtgtaacggttcaagaactctcaagatcttccggttttagtgacaagtgtttttagttgcagttaagcaaaagttaatcgagcgtaacagttctgctaaattcggagactaaattgattagtaccggaattttatagacagtttctacgtaacgtaaggaattttttactattttttcatattgtggaattgtggaattccacacagttttttgttgtgctgctaacgtgaagagacaaaaatgactagtgccttattagccggagtgggagctggactttcctatgttgcatgtgttctctgctgtaaaggaatagacaaatgtagtaataataaagcccaccaacaagatgatatttataacatcagtggcagagttcaaaaccaggagcaatggcccacacacgatgctcatttatcaatagaccacataagtgtcttgaaccaaatgaacaaaccggtatatgatgatgcacctccctcttatgaggaagttatgaaaacatcaattcaagttgttggagagacctccacaccaccatactcaccacctcaaccaccaagccaggttgtaatagttgtgccgccaacaacaaggtcgcagtgatataaacagcttccatttttgtacatatacgaaaaaaatgctcaatagtcattggagtagctagtaaactcataaaattaattaatttattgtaacattgggaagatagggaatttagttgtctcgagtcaattattattttcttgagtctccgtagtgttaaatatttcgataaagatctaaataaaaaccaaaccaaaatttaagtttataaactcattagtgacttanaactttta

SEQ ID NO: 3006 - DNA, 744 bp, Diabrotica virgifera
  misc_feature (736)..(736): n is a, c, g, or t
gtcaactaatcccctgtttaaataagataaagcacttttaatacctttgcacaaaaacaatcatgtgatcgttgttaacttttatatactcaaaggcgtccagtttcttcataagtttttcagagatgtagccaaaatgttgttctccattatttgggtggtgctcatctttattggtttcttcttgttcaatgtttacatccagtggaggttaagaaagaacagacttaaacttccccaccaacaagatgatatttataacatcagtggcagagttcaaaaccaggagcaatggcccacacacgatgctcatttatcaatagaccacataagtgtcttgaaccaaatgaacaaaccggtatatgatgatgcacctccctcttatgaggaagttatgaaaacatcaattcaagttgttggagagacctccacaccaccatactcaccacctcaaccaccaagccaggttgtaatagttgtgccgccaacaacaaggtcgcagtgatataaacagcttccatttttgtacatatacgaaaaaaatgctcaatagtcattggagtagctagtaaactcataaaattaattaatttattgtaacattgggaagatagggaatttagttgtctcgagtcaattattattttcttgagtctccgtagtgttaaatatttcgataaagatctaaataaaaaccaaaccaaaatttaagtttataaactcattagtgacttanaactttta

SEQ ID NO: 3007 - DNA, 706 bp, Diabrotica virgifera
  misc_feature (698)..(698): n is a, c, g, or t
atccgtaatagatctaaataatattttaaccaacgcgatttattgttgttttatattctaagaaaatgacaacgtatagtctacctaataacgggtccgtctctttttctgttgtggcattaatgtttttgttgatgtttttgagtatcagctggattagaaagaagtgtcaggaaaggagaggtagacgtacacatccccaccaacaagatgatatttataacatcagtggcagagttcaaaaccaggagcaatggcccacacacgatgctcatttatcaatagaccacataagtgtcttgaaccaaatgaacaaaccggtatatgatgatgcacctccctcttatgaggaagttatgaaaacatcaattcaagttgttggagagacctccacaccaccatactcaccacctcaaccaccaagccaggttgtaatagttgtgccgccaacaacaaggtcgcagtgatataaacagcttccatttttgtacatatacgaaaaaaatgctcaatagtcattggagtagctagtaaactcataaaattaattaatttattgtaacattgggaagatagggaatttagttgtctcgagtcaattattattttcttgagtctccgtagtgttaaatatttcgataaagatctaaataaaaaccaaaccaaaatttaagtttataaactcattagtgacttanaactttta

SEQ ID NO: 3008 - DNA, 636 bp, Diabrotica virgifera
  misc_feature (628)..(628): n is a, c, g, or t
taaaatgagcctgacaagtggtttggctttgggaggtgctatttttacagttattttgattgggattctcataaggatcaagtttagagaaaaaaagaaaactcaacatgagcctactgccccaacagcccaccaacaagatgatatttataacatcagtggcagagttcaaaaccaggagcaatggcccacacacgatgctcatttatcaatagaccacataagtgtcttgaaccaaatgaacaaaccggtatatgatgatgcacctccctcttatgaggaagttatgaaaacatcaattcaagttgttggagagacctccacaccaccatactcaccacctcaaccaccaagccaggttgtaatagttgtgccgccaacaacaaggtcgcagtgatataaacagcttccatttttgtacatatacgaaaaaaatgctcaatagtcattggagtagctagtaaactcataaaattaattaatttattgtaacattgggaagatagggaatttagttgtctcgagtcaattattattttcttgagtctccgtagtgttaaatatttcgataaagatctaaataaaaaccaaaccaaaatttaagtttataaactcattagtgacttanaactttta

SEQ ID NO: 3009 - DNA, 631 bp, Diabrotica virgifera
  misc_feature (623)..(623): n is a, c, g, or t
ctcgtattaaaatgaccaatgctggtagtgatctgtgtttttcatttgtgagtgttggatttattataattttgttctttattatttggattaagcacaaatgtatccgttcaccagatgcgtcccaccaacaagatgatatttataacatcagtggcagagttcaaaaccaggagcaatggcccacacacgatgctcatttatcaatagaccacataagtgtcttgaaccaaatgaacaaaccggtatatgatgatgcacctccctcttatgaggaagttatgaaaacatcaattcaagttgttggagagacctccacaccaccatactcaccacctcaaccaccaagccaggttgtaatagttgtgccgccaacaacaaggtcgcagtgatataaacagcttccatttttgtacatatacgaaaaaaatgctcaatagtcattggagtagctagtaaactcataaaattaattaatttattgtaacattgggaagatagggaatttagttgtctcgagtcaattattattttcttgagtctccgtagtgttaaatatttcgataaagatctaaataaaaaccaaaccaaaatttaagtttataaactcattagtgacttanaactttta

SEQ ID NO: 3010 - DNA, 4557 bp, Diabrotica virgifera
  SmartBlast Evalue=0; Info="Bullous pemphigoid antigen 1, isoforms 6/9/10 n=1 Tax=Camponotus floridanus RepID=E2AVR2_ 9HYME"
gtcccttttgccaatatacagattaaacctccgtacaattctaacggattctccaaatcacaaatcaatataaaaacatacctaatcactccaaattttttcttacagatatggcaacttaataaatttgaatatcttcattttaattacacaaacaataaataacttctgtgttttttggcttaatatactaagtagtttagtatagagtgctgttaattgtatataccaaaaaatccaaccatgtcttttgttcgacaaaccaacaattccatttgccgaacaaaaatcccagtaaatattttacatttatacaaaaatatgaacattttaagtttcttaacataacatgtcagtcagtgtgagttttttttttggaatagttaagagactaaattataacctaaaaggctcccgatcggaaagagaagactttttctttctagtttggcttgtgggagtgtctgtgccacccgtggaacgttttagtagtttggaaactgctgtctgttgatccggatgtacgggtgtgttggatcctgaaggtgtccgggtcctagaggctgtccttagcgaaggggcaacgccaatagtcacttgttttactttgcttgaacttgcactccttggcgtggatattcctgttaaagtgggtatgctcgatgctctgggtatccccgacgatcttccaacgggactagctggagatatcaaaccgcttggtgtgcgtggcctagagccagaaccgttgatgcttttagtcgtcgaaagagctgagcttcttcctgatgttggtgtccttcttggtattctcgatggagtagcatcatctgtgctatccaaagaaaggttcgatccgtgcctagacggcggcttgctgcccggcctgcttccagtcctggattggggcctagaattacttcttgaaccgcctggagttaacgttgacctgtaggacggcttcctgggagtacggaatgtagaactttcgttatctgagagagagtctggggttccagctgagagagacgatttcgatgttcttggtaggctgcccatgggcactgatcgctgggaacgttctctgaccttcgtaatggggccctgaggtgtgcgtgatgccgaagaaccagacgtgggactagacgccgacgttttgggcttgaacgccgtcatagtttgcgaaaccccgtcagctaagatgaattgctcgcgcagctctatatttgtgcgtcctttggctctgcaaggatcattcttcagtaggaactcgtctagagctacccaaccacctcctacacgtaccatcacagtacttcggaggatacggactagacgtagtttctgactttctccaaacctgtattttccctctcctacttggaaaactctgaatttctgtcggcaagtacataacataaccaatcgcttgacttcgtcatggatcttttgggcgtcgttgtcaggcgccttttcctcccaatcgggtctgagagctgctatgaacttcttccagtcgatcagtcctcggttgttctcgtcgaacatgtctgctacgtgtttcatctcaaggcgggaggtgtcgaatttggtcttgatgattccttcaatgaagtcatctctgggaatcagttcgttgttatccttatccatcttcctaaagagatctgtcaacctggacttcttgtaattcatgaatttcaagaagcgttttctccaatcgtcccaagagaagttgtcggccttttccttttccttcagataagccagatgatcgtacaattctctttgtctttcccatgatagcatccatacgtgacgccatttgtcgtataagaatttgactcttggtgaccggaattctggttcgatttgtcctttgcctttgacgaacttcttaggatctttaacgccagctgcaggcttaacctgcttggctttcaaaccctatcgacctctgcttgcctcttctgcgtattctccataaactctttgtggtccgcaataagctgttcggtggctggaatgtccataggcaattcttcgcgcttcagagcaataagagtgttctcaagacccatgagccattggataagttcttccaaagtatcgtccatatctctgagcgactgtaagtgctgtgacagtttctggtgacgttgaagagcccattgtgacacttcgtcccatctgctttgaataactttaatccaatttttgataacgttgatggaatctggatgggcctttgcaagaatgttgtgggctagttcaagagtttgatctttctcgatttctttttcatttagttgagctctgaagtgatccaaagctttaacttgttcgtaagcagttgcttcatcttcgggttggttaccaacaaatctcagtttcatttcagcttcggacaaccagtcgaggatcatgttcacggatctatgaagtttttcggcttctttcagtgcatctcttaacttatctgctctgattcttgttaagtctgtcaccgtttcccaaagttcggttagttcatttaattgagctctaatctggatagcgtcagttttggatgcagttctttctaactcctgaccatttttaataactgattccatttggtcgttacgtttttctagttctttttcaaacactttgtgcgcctctactaaatgattaacggtatccaaatcaccatgaacaggactgtcctttgaaagatctttttcagctttttgtagccattggactaaagctgctatggcgtctttgaactgtcctgaatataagagagcttcttcaagtttgcgttgcctgtcaacgctcttatgacaaactgaattccatttgctcttcagttccgagagcatatgtttaagagtaggttcatcaggtttgggagctttgtctttaagctgcttaccagtcttcattacgttatcataagtgccctgtttaccagatagagctttttgcagttcctgatgtttggcaagacgttgcttgatcttactaggatcattgctgatggcttcagactgaagttcatcaagagattcttcagtttcgtctaaccaatgcatgagggaagtccaagaatcgtggaactctttggcttctttgtaacccaagtcaagtgctctagttctttcagttgatttggaagcgactctctcccacctgtgctgtacactgataagtaagtttttgattagtatgacatcttgtttttgactgaaatacttgagatgcgttccctttttgtctaaagcaagcattatctctctgtgggcactaacgtctttttggaaaactttgtgttcttctatttgattctgaatagtttccaaaaccctagaaactggtttcacattttgaagatgtttctctgcattagttagccaatcaacgaatgcttgtagtgattcgtggaactctgtagcttccttaagagcaatttctaatttgatcttcttgtcgttagctctggcagtgacattatcccatctttgttttaatgtgcgcaaattctgctgtaagttagatgcaggtgaagtagctttcttcagatattcttgaccttgcgctaagactgtctcaactttaggtctgttatcctctatttcattatatatttccatgaacctctccaattgctcggaggcggtttctggtaaccctccaactggtttactggcggtaatgattccatcgacatctcctaaccacgacagaagatcttgaatctcagcattaaatctctgagcatctgtaagcgcatcttcaagctccctttgtctatccgctgctttctgcattagagaacgccattgagtattcagcgtgttgagtttttcttgggtaacactggcttcatcggattcaccactttcaattatttgtcttccagcatcattaagagtatcgacactagtttgatgcgcctgtatgtcattaaccaaaacctttaatttagctaattcgatctccaatacttgtggatctcccgcaacgggttttaactcgtctaaggtagcatcagtcttggagatccatacgaggagctcattaagagcgtgttggaattgacccaaacgcaacaaggcattctcaagctgcctttgcctttctacgattcctctaagaagatcatcccaccttctgttgacagctgaaagtggttctttgatggaggctgcttgatctgatgatgtgcgttctgtgagttcttgagcttgccttacgagactcctgtttaaagcttcaactttgaccatatgaggatcaacctcagctttgaatttctttaattgatcgatttgttttttgacggcatcaatatctgttcccagtggacctagtttttcgaatttgccttcagcttgggtcaagaatgcaagaaggttctgtagtgtttcatggaattccatagctttttccatggcatcaatgaggttttcttcacgtttggcatacagagcagtgatattatcccaggcatgatccaagtcttcaatatgtttcttcacatccggtttatcaggctcaccacacaatttc

SEQ ID NO: 3011 - DNA, 4551 bp, Diabrotica virgifera
  SmartBlast Evalue=0; Info="Bullous pemphigoid antigen 1, isoforms 6/9/10 n=1 Tax=Camponotus floridanus RepID=E2AVR2_ 9HYME"
gtcccttttgccaatatacagattaaacctccgtacaattctaacggattctccaaatcacaaatcaatataaaaacatacctaatcactccaaattttttcttacagatatggcaacttaataaatttgaatatcttcattttaattacacaaacaataaataacttctgtgttttttggcttaatatactaagtagtttagtatagagtgctgttaattgtatataccaaaaaatccaaccatgtcttttgttcgacaaaccaacaattccatttgccgaacaaaaatcccagtaaatattttacatttatacaaaaatatgaacattttaagtttcttaacataacatgtcagtcagtgtgagttttttttttggaatagttaagagactaaattataacctaaaaggctcccgatcggaaagagaagactttttctttctagtttggcttgtgggagtgtctgtgccacccgtggaacgttttagtagtttggaaactgctgtctgttgatccggatgtacgggtgtgttggatcctgaaggtgtccgggtcctagaggctgtccttagcgaaggggcaacgccaatagtcacttgttttactttgcttgaacttgcactccttggcgtggatattcctgttaaagtgggtatgctcgatgctctgggtatccccgacgatcttccaacgggactagctggagatatcaaaccgcttggtgtgcgtggcctagagccagaaccgttgatgcttttagtcgtcgaaagagctgagcttcttcctgatgttggtgtccttcttggtattctcgatggagtagcatcatctgtgctatccaaagaaaggttcgatccgtgcctagacggcggcttgctgcccggcctgcttccagtcctggattggggcctagaattacttcttgaaccgcctggagttaacgttgacctgtaggacggcttcctgggagtacggaatgtagaactttcgttatctgagagagagtctggggttccagctgagagagacgatttcgatgttcttggtaggctgcccatgggcactgatcgctgggaacgttctctgacccaatagcatgtgttaggattaacgtgggccatgtgtaaggtggggccagcggtggagcccacgtgcaagggatacgcatttccgcactctcctctagcttgaatttgatcgaaaataggcatcaattccgctaggtgttcgtgagctctgcaaggatcattcttcagtaggaactcgtctagagctacccaaccacctcctacacgtaccatcacagtacttcggaggatacggactagacgtagtttctgactttctccaaacctgtattttccctctcctacttggaaaactctgaatttctgtcggcaagtacataacataaccaatcgcttgacttcgtcatggatcttttgggcgtcgttgtcaggcgccttttcctcccaatcgggtctgagagctgctatgaacttcttccagtcgatcagtcctcggttgttctcgtcgaacatgtctgctacgtgtttcatctcaaggcgggaggtgtcgaatttggtcttgatgattccttcaatgaagtcatctctgggaatcagttcgttgttatccttatccatcttcctaaagagatctgtcaacctggacttcttgtaattcatgaatttcaagaagcgttttctccaatcgtcccaagagaagttgtcggccttttccttttccttcagataagccagatgatcgtacaattctctttgtctttcccatgatagcatccatacgtgacgccatttgtcgtataagaatttgactcttggtgaccggaattctggttcgatttgtcctttgcctttgacgaacttcttaggatctttaacgccagctgcaggcttaacctgcttggctttcaaaccctatcgacctctgcttgcctcttctgcgtattctccataaactctttgtggtccgcaataagctgttcggtggctggaatgtccataggcaattcttcgcgcttcagagcaataagagtgttctcaagacccatgagccattggataagttcttccaaagtatcgtccatatctctgagcgactgtaagtgctgtgacagtttctggtgacgttgaagagcccattgtgacacttcgtcccatctgctttgaataactttaatccaatttttgataacgttgatggaatctggatgggcctttgcaagaatgttgtgggctagttcaagagtttgatctttctcgatttctttttcatttagttgagctctgaagtgatccaaagctttaacttgttcgtaagcagttgcttcatcttcgggttggttaccaacaaatctcagtttcatttcagcttcggacaaccagtcgaggatcatgttcacggatctatgaagtttttcggcttctttcagtgcatctcttaacttatctgctctgattcttgttaagtctgtcaccgtttcccaaagttcggttagttcatttaattgagctctaatctggatagcgtcagttttggatgcagttctttctaactcctgaccatttttaataactgattccatttggtcgttacgtttttctagttctttttcaaacactttgtgcgcctctactaaatgattaacggtatccaaatcaccatgaacaggactgtcctttgaaagatctttttcagctttttgtagccattggactaaagctgctatggcgtctttgaactgtcctgaatataagagagcttcttcaagtttgcgttgcctgtcaacgctcttatgacaaactgaattccatttgctcttcagttccgagagcatatgtttaagagtaggttcatcaggtttgggagctttgtctttaagctgcttaccagtcttcattacgttatcataagtgccctgtttaccagatagagctttttgcagttcctgatgtttggcaagacgttgcttgatcttactaggatcattgctgatggcttcagactgaagttcatcaagagattcttcagtttcgtctaaccaatgcatgagggaagtccaagaatcgtggaactctttggcttctttgtaacccaagtcaagtgctctagttctttcagttgatttggaagcgactctctcccacctgtgctgtacactgataagtaagtttttgattagtatgacatcttgtttttgactgaaatacttgagatgcgttccctttttgtctaaagcaagcattatctctctgtgggcactaacgtctttttggaaaactttgtgttcttctatttgattctgaatagtttccaaaaccctagaaactggtttcacattttgaagatgtttctctgcattagttagccaatcaacgaatgcttgtagtgattcgtggaactctgtagcttccttaagagcaatttctaatttgatcttcttgtcgttagctctggcagtgacattatcccatctttgttttaatgtgcgcaaattctgctgtaagttagatgcaggtgaagtagctttcttcagatattcttgaccttgcgctaagactgtctcaactttaggtctgttatcctctatttcattatatatttccatgaacctctccaattgctcggaggcggtttctggtaaccctccaactggtttactggcggtaatgattccatcgacatctcctaaccacgacagaagatcttgaatctcagcattaaatctctgagcatctgtaagcgcatcttcaagctccctttgtctatccgctgctttctgcattagagaacgccattgagtattcagcgtgttgagtttttcttgggtaacactggcttcatcggattcaccactttcaattatttgtcttccagcatcattaagagtatcgacactagtttgatgcgcctgtatgtcattaaccaaaacctttaatttagctaattcgatctccaatacttgtggatctcccgcaacgggttttaactcgtctaaggtagcatcagtcttggagatccatacgaggagctcattaagagcgtgttggaattgacccaaacgcaacaaggcattctcaagctgcctttgcctttctacgattcctctaagaagatcatcccaccttctgttgacagctgaaagtggttctttgatggaggctgcttgatctgatgatgtgcgttctgtgagttcttgagcttgccttacgagactcctgtttaaagcttcaactttgaccatatgaggatcaacctcagctttgaatttctttaattgatcgatttgttttttgacggcatcaatatctgttcccagtggacctagtttttcgaatttgccttcagcttgggtcaagaatgcaagaaggttctgtagtgtttcatggaattccatagctttttccatggcatcaatgaggttttcttcacgtttggcatacagagcagtgatattatcccaggcatgatccaagtcttcaatatgtttcttcacatccggtttatcaggctcaccacacaatttc

SEQ ID NO: 3012 - DNA, 4497 bp, Diabrotica virgifera
  SmartBlast Evalue=0; Info="Bullous pemphigoid antigen 1, isoforms 6/9/10 n=1 Tax=Camponotus floridanus RepID=E2AVR2_ 9HYME"
gtcccttttgccaatatacagattaaacctccgtacaattctaacggattctccaaatcacaaatcaatataaaaacatacctaatcactccaaattttttcttacagatatggcaacttaataaatttgaatatcttcattttaattacacaaacaataaataacttctgtgttttttggcttaatatactaagtagtttagtatagagtgctgttaattgtatataccaaaaaatccaaccatgtcttttgttcgacaaaccaacaattccatttgccgaacaaaaatcccagtaaatattttacatttatacaaaaatatgaacattttaagtttcttaacataacatgtcagtcagtgtgagttttttttttggaatagttaagagactaaattataacctaaaaggctcccgatcggaaagagaagactttttctttctagtttggcttgtgggagtgtctgtgccacccgtggaacgttttagtagtttggaaactgctgtctgttgatccggatgtacgggtgtgttggatcctgaaggtgtccgggtcctagaggctgtccttagcgaaggggcaacgccaatagtcacttgttttactttgcttgaacttgcactccttccaacgggactagctggagatatcaaaccgcttggtgtgcgtggcctagagccagaaccgttgatgcttttagtcgtcgaaagagctgagcttcttcctgatgttggtgtccttcttggtattctcgatggagtagcatcatctgtgctatccaaagaaaggttcgatccgtgcctagacggcggcttgctgcccggcctgcttccagtcctggattggggcctagaattacttcttgaaccgcctggagttaacgttgacctgtaggacggcttcctgggagtacggaatgtagaactttcgttatctgagagagagtctggggttccagctgagagagacgatttcgatgttcttggtaggctgcccatgggcactgatcgctgggaacgttctctgaccttcgtaatggggccctgaggtgtgcgtgatgccgaagaaccagacgtgggactagacgccgacgttttgggcttgaacgccgtcatagtttgcgaaaccccgtcagctaagatgaattgctcgcgcagctctatatttgtgcgtcctttggctctgcaaggatcattcttcagtaggaactcgtctagagctacccaaccacctcctacacgtaccatcacagtacttcggaggatacggactagacgtagtttctgactttctccaaacctgtattttccctctcctacttggaaaactctgaatttctgtcggcaagtacataacataaccaatcgcttgacttcgtcatggatcttttgggcgtcgttgtcaggcgccttttcctcccaatcgggtctgagagctgctatgaacttcttccagtcgatcagtcctcggttgttctcgtcgaacatgtctgctacgtgtttcatctcaaggcgggaggtgtcgaatttggtcttgatgattccttcaatgaagtcatctctgggaatcagttcgttgttatccttatccatcttcctaaagagatctgtcaacctggacttcttgtaattcatgaatttcaagaagcgttttctccaatcgtcccaagagaagttgtcggccttttccttttccttcagataagccagatgatcgtacaattctctttgtctttcccatgatagcatccatacgtgacgccatttgtcgtataagaatttgactcttggtgaccggaattctggttcgatttgtcctttgcctttgacgaacttcttaggatctttaacgccagctgcaggcttaacctgcttggctttcaaaccctatcgacctctgcttgcctcttctgcgtattctccataaactctttgtggtccgcaataagctgttcggtggctggaatgtccataggcaattcttcgcgcttcagagcaataagagtgttctcaagacccatgagccattggataagttcttccaaagtatcgtccatatctctgagcgactgtaagtgctgtgacagtttctggtgacgttgaagagcccattgtgacacttcgtcccatctgctttgaataactttaatccaatttttgataacgttgatggaatctggatgggcctttgcaagaatgttgtgggctagttcaagagtttgatctttctcgatttctttttcatttagttgagctctgaagtgatccaaagctttaacttgttcgtaagcagttgcttcatcttcgggttggttaccaacaaatctcagtttcatttcagcttcggacaaccagtcgaggatcatgttcacggatctatgaagtttttcggcttctttcagtgcatctcttaacttatctgctctgattcttgttaagtctgtcaccgtttcccaaagttcggttagttcatttaattgagctctaatctggatagcgtcagttttggatgcagttctttctaactcctgaccatttttaataactgattccatttggtcgttacgtttttctagttctttttcaaacactttgtgcgcctctactaaatgattaacggtatccaaatcaccatgaacaggactgtcctttgaaagatctttttcagctttttgtagccattggactaaagctgctatggcgtctttgaactgtcctgaatataagagagcttcttcaagtttgcgttgcctgtcaacgctcttatgacaaactgaattccatttgctcttcagttccgagagcatatgtttaagagtaggttcatcaggtttgggagctttgtctttaagctgcttaccagtcttcattacgttatcataagtgccctgtttaccagatagagctttttgcagttcctgatgtttggcaagacgttgcttgatcttactaggatcattgctgatggcttcagactgaagttcatcaagagattcttcagtttcgtctaaccaatgcatgagggaagtccaagaatcgtggaactctttggcttctttgtaacccaagtcaagtgctctagttctttcagttgatttggaagcgactctctcccacctgtgctgtacactgataagtaagtttttgattagtatgacatcttgtttttgactgaaatacttgagatgcgttccctttttgtctaaagcaagcattatctctctgtgggcactaacgtctttttggaaaactttgtgttcttctatttgattctgaatagtttccaaaaccctagaaactggtttcacattttgaagatgtttctctgcattagttagccaatcaacgaatgcttgtagtgattcgtggaactctgtagcttccttaagagcaatttctaatttgatcttcttgtcgttagctctggcagtgacattatcccatctttgttttaatgtgcgcaaattctgctgtaagttagatgcaggtgaagtagctttcttcagatattcttgaccttgcgctaagactgtctcaactttaggtctgttatcctctatttcattatatatttccatgaacctctccaattgctcggaggcggtttctggtaaccctccaactggtttactggcggtaatgattccatcgacatctcctaaccacgacagaagatcttgaatctcagcattaaatctctgagcatctgtaagcgcatcttcaagctccctttgtctatccgctgctttctgcattagagaacgccattgagtattcagcgtgttgagtttttcttgggtaacactggcttcatcggattcaccactttcaattatttgtcttccagcatcattaagagtatcgacactagtttgatgcgcctgtatgtcattaaccaaaacctttaatttagctaattcgatctccaatacttgtggatctcccgcaacgggttttaactcgtctaaggtagcatcagtcttggagatccatacgaggagctcattaagagcgtgttggaattgacccaaacgcaacaaggcattctcaagctgcctttgcctttctacgattcctctaagaagatcatcccaccttctgttgacagctgaaagtggttctttgatggaggctgcttgatctgatgatgtgcgttctgtgagttcttgagcttgccttacgagactcctgtttaaagcttcaactttgaccatatgaggatcaacctcagctttgaatttctttaattgatcgatttgttttttgacggcatcaatatctgttcccagtggacctagtttttcgaatttgccttcagcttgggtcaagaatgcaagaaggttctgtagtgtttcatggaattccatagctttttccatggcatcaatgaggttttcttcacgtttggcatacagagcagtgatattatcccaggcatgatccaagtcttcaatatgtttcttcacatccggtttatcaggctcaccacacaatttc

SEQ ID NO: 3013 - DNA, 4491 bp, Diabrotica virgifera
  SmartBlast Evalue=0; Info="Bullous pemphigoid antigen 1, isoforms 6/9/10 n=1 Tax=Camponotus floridanus RepID=E2AVR2_ 9HYME"
gtcccttttgccaatatacagattaaacctccgtacaattctaacggattctccaaatcacaaatcaatataaaaacatacctaatcactccaaattttttcttacagatatggcaacttaataaatttgaatatcttcattttaattacacaaacaataaataacttctgtgttttttggcttaatatactaagtagtttagtatagagtgctgttaattgtatataccaaaaaatccaaccatgtcttttgttcgacaaaccaacaattccatttgccgaacaaaaatcccagtaaatattttacatttatacaaaaatatgaacattttaagtttcttaacataacatgtcagtcagtgtgagttttttttttggaatagttaagagactaaattataacctaaaaggctcccgatcggaaagagaagactttttctttctagtttggcttgtgggagtgtctgtgccacccgtggaacgttttagtagtttggaaactgctgtctgttgatccggatgtacgggtgtgttggatcctgaaggtgtccgggtcctagaggctgtccttagcgaaggggcaacgccaatagtcacttgttttactttgcttgaacttgcactccttccaacgggactagctggagatatcaaaccgcttggtgtgcgtggcctagagccagaaccgttgatgcttttagtcgtcgaaagagctgagcttcttcctgatgttggtgtccttcttggtattctcgatggagtagcatcatctgtgctatccaaagaaaggttcgatccgtgcctagacggcggcttgctgcccggcctgcttccagtcctggattggggcctagaattacttcttgaaccgcctggagttaacgttgacctgtaggacggcttcctgggagtacggaatgtagaactttcgttatctgagagagagtctggggttccagctgagagagacgatttcgatgttcttggtaggctgcccatgggcactgatcgctgggaacgttctctgacccaatagcatgtgttaggattaacgtgggccatgtgtaaggtggggccagcggtggagcccacgtgcaagggatacgcatttccgcactctcctctagcttgaatttgatcgaaaataggcatcaattccgctaggtgttcgtgagctctgcaaggatcattcttcagtaggaactcgtctagagctacccaaccacctcctacacgtaccatcacagtacttcggaggatacggactagacgtagtttctgactttctccaaacctgtattttccctctcctacttggaaaactctgaatttctgtcggcaagtacataacataaccaatcgcttgacttcgtcatggatcttttgggcgtcgttgtcaggcgccttttcctcccaatcgggtctgagagctgctatgaacttcttccagtcgatcagtcctcggttgttctcgtcgaacatgtctgctacgtgtttcatctcaaggcgggaggtgtcgaatttggtcttgatgattccttcaatgaagtcatctctgggaatcagttcgttgttatccttatccatcttcctaaagagatctgtcaacctggacttcttgtaattcatgaatttcaagaagcgttttctccaatcgtcccaagagaagttgtcggccttttccttttccttcagataagccagatgatcgtacaattctctttgtctttcccatgatagcatccatacgtgacgccatttgtcgtataagaatttgactcttggtgaccggaattctggttcgatttgtcctttgcctttgacgaacttcttaggatctttaacgccagctgcaggcttaacctgcttggctttcaaaccctatcgacctctgcttgcctcttctgcgtattctccataaactctttgtggtccgcaataagctgttcggtggctggaatgtccataggcaattcttcgcgcttcagagcaataagagtgttctcaagacccatgagccattggataagttcttccaaagtatcgtccatatctctgagcgactgtaagtgctgtgacagtttctggtgacgttgaagagcccattgtgacacttcgtcccatctgctttgaataactttaatccaatttttgataacgttgatggaatctggatgggcctttgcaagaatgttgtgggctagttcaagagtttgatctttctcgatttctttttcatttagttgagctctgaagtgatccaaagctttaacttgttcgtaagcagttgcttcatcttcgggttggttaccaacaaatctcagtttcatttcagcttcggacaaccagtcgaggatcatgttcacggatctatgaagtttttcggcttctttcagtgcatctcttaacttatctgctctgattcttgttaagtctgtcaccgtttcccaaagttcggttagttcatttaattgagctctaatctggatagcgtcagttttggatgcagttctttctaactcctgaccatttttaataactgattccatttggtcgttacgtttttctagttctttttcaaacactttgtgcgcctctactaaatgattaacggtatccaaatcaccatgaacaggactgtcctttgaaagatctttttcagctttttgtagccattggactaaagctgctatggcgtctttgaactgtcctgaatataagagagcttcttcaagtttgcgttgcctgtcaacgctcttatgacaaactgaattccatttgctcttcagttccgagagcatatgtttaagagtaggttcatcaggtttgggagctttgtctttaagctgcttaccagtcttcattacgttatcataagtgccctgtttaccagatagagctttttgcagttcctgatgtttggcaagacgttgcttgatcttactaggatcattgctgatggcttcagactgaagttcatcaagagattcttcagtttcgtctaaccaatgcatgagggaagtccaagaatcgtggaactctttggcttctttgtaacccaagtcaagtgctctagttctttcagttgatttggaagcgactctctcccacctgtgctgtacactgataagtaagtttttgattagtatgacatcttgtttttgactgaaatacttgagatgcgttccctttttgtctaaagcaagcattatctctctgtgggcactaacgtctttttggaaaactttgtgttcttctatttgattctgaatagtttccaaaaccctagaaactggtttcacattttgaagatgtttctctgcattagttagccaatcaacgaatgcttgtagtgattcgtggaactctgtagcttccttaagagcaatttctaatttgatcttcttgtcgttagctctggcagtgacattatcccatctttgttttaatgtgcgcaaattctgctgtaagttagatgcaggtgaagtagctttcttcagatattcttgaccttgcgctaagactgtctcaactttaggtctgttatcctctatttcattatatatttccatgaacctctccaattgctcggaggcggtttctggtaaccctccaactggtttactggcggtaatgattccatcgacatctcctaaccacgacagaagatcttgaatctcagcattaaatctctgagcatctgtaagcgcatcttcaagctccctttgtctatccgctgctttctgcattagagaacgccattgagtattcagcgtgttgagtttttcttgggtaacactggcttcatcggattcaccactttcaattatttgtcttccagcatcattaagagtatcgacactagtttgatgcgcctgtatgtcattaaccaaaacctttaatttagctaattcgatctccaatacttgtggatctcccgcaacgggttttaactcgtctaaggtagcatcagtcttggagatccatacgaggagctcattaagagcgtgttggaattgacccaaacgcaacaaggcattctcaagctgcctttgcctttctacgattcctctaagaagatcatcccaccttctgttgacagctgaaagtggttctttgatggaggctgcttgatctgatgatgtgcgttctgtgagttcttgagcttgccttacgagactcctgtttaaagcttcaactttgaccatatgaggatcaacctcagctttgaatttctttaattgatcgatttgttttttgacggcatcaatatctgttcccagtggacctagtttttcgaatttgccttcagcttgggtcaagaatgcaagaaggttctgtagtgtttcatggaattccatagctttttccatggcatcaatgaggttttcttcacgtttggcatacagagcagtgatattatcccaggcatgatccaagtcttcaatatgtttcttcacatccggtttatcaggctcaccacacaatttc

SEQ ID NO: 3014 - DNA, 6292 bp, Diabrotica virgifera
atgacacaactagattcgaaccagtgttggatgagtgtgaggcgtttgtgaaggcatgatagttcttatgtcgctgtaacagcacattttcttcagtttttctgcatttcttcagttttctgaggacctttctcaggttttctgaagactggaatgtgatgcatctatttttgaccacgagttcataaacgcatagatgtgcgtgaggaggatgagtttatcttctttcaatagtaaatattttcgttaacttgaccgtgaattggtgcacttagcgtgagccgagcgcctgaatccaatagcttcggagggctgtggcttcggaatggtagtttttcagacctggctcccatgatcttttttgatctgcgctctgagaactatcattgatcgaactttcgttgaatttgaccgggccacttttccataaggagtgttacggggttgtttctcggcctgtcgattgaaataaaatttcttaaaaatgattaatatacatataatgcttgtcgacggttatctaaggtgagtagttttaaacttaacagcacgttgtacctatacatagaatgtattataagattaataattatagttacagtgtgattcaacattacatgattcttattatcctgtaaacgtgtaatgtaacgtatcacatgaggtgctaagtgctactgctgcactatgctctcatcaaatattttgttttgtaattacttatatatgtacttcatatattaagagctgtaaagtactatgaataatattaaatagtatataataagctgtgataatggcgtgccagaccaacaggttgcgtccaaatttcatggttgcggcgatggtacttagaaaccccacaatctaccaattcagtctacagccgctctaccccaagtcaacacaacactattcatatttataattaaaatacagattcatcataaatgcataaaaacaatttcctaattgaataatatcgagatcattaaacagtctctccgaatataagaacaattaaaaaactacaaattacattaccaagaaaataaaaacaacagaatatttagataaacgataaagttgctgatgacaatattgaaacaaataataataataaaaaataatatatacattgtgtacacaaaatattttaatttgctaatataacgatttctgctaggtctacaaaaaataaaagttttcaaaaaaacttttgttaatttgcaccgtttacattttttcaatttttcatgatccttataatatatgtttgtacgttctaggttccgtatcgctccaatatatgcaattgttttcattaaaatggccgtttaaaattaatctacgagaaaaagtctcttgtttgtaaaatggaccatatttacctttagcattatactttcagaaaattatattctgcgatcaaaatcatcacgagtcgtataccaccataattttataagcgtgtatcttagttttttgggaatactaccaacggacctactcccaacgtcattatttaactcttcattattataatatttaacttttaaattttgtcaaaattttgttaatgtacgtattcttttgacttgtcaaaaacgaaagaaattttgtatatttgattgaataaattctattctatgcatcatgttctaatgcatttttctgtagggatggtgaaaccatctgaaccaccatttccagcgttttctgtcgaagaaatcttcagtttttaaatctctggcggacattgcatcttcgacatctttccaggaccgtcttggtctacttcgttttcttctagtggacggactccaattttatatcttttttgtccatttattttcaggcattctttgcaggtgtcaataccagttgagtcttttggcttcaattgtctctattatgtctagatcaatttttatttttctctgaatatcttcctttctcgccctatcaaatctagtgagtcgtctctaatagattatttccatggatttaatttttgatttgattctttgatttatttccctttttgatgttatttgaactcccacggatttggaggtttcagttgattttatagttcccatttccatttttatgctttctggtttttctcctgcaactaagtattcggatttttgtatattaattgtgaggcctcacttagtgtactcctcttccagttttctaagcatatagtctatataactctcgtctttagctagaatggcttggtcgtcagcgaagtgtatcctgtacaatatttcgtcttcgattggggtgcccagattgcagcacgttcttctcacattctgcatcaacattaaaggatttttcaatagcagctttggtcgttaaattttcaggtgattttaatttgatccggttatcaagatatttctgaatcagaatatttcataaataaaaaaccttttcataagcgtgttagaaatcgagagattaacaaaataggtttttgtatatgccatattacctatcctcaagaaagtgcagttattttctaattgcataaaaataataaatggtgtataggttgtgttgatttgtaagggagtgactcatttgtattgaccattttttactataattaggtatacaatgttactatggaataaagtactttcattccaaaattaaaagttaaaagataatacataagtagatatatagaagtacttacagataaaagtttgactccattttcaatcaataaacagggtgggtgggctcaatggtacgttgacgtttcacagaggtatttatatgttaaaaacaaaatatatacaccacgtagaacaccaactatatattctaaataattataattttcgtatcattcttggtatttaacatatttccacccctgtctagaaaaatgttcgcagattacaggaacaatacaactatgcgctgttagtaaataaagtgattcattttgaatagagctatgaatatagttattcttaaggtgattcagtgttcaatccaatttttcaaaaaatttttttcataatagcattttctctgttctggtctgtagcagtgtctcctctataatacgtagaagccaggaattttctatccgataaatatatctttgatggctctccttgatcgattgttagtctgatgcagaaaccacaaatttaatgaattctctcatgccactccatttttttaggtcttcaagttacgtccttagattttcgtaattggttttgcttcttgtaagatctatgtattaccaaaattgtttttccacgatctatcatgagacctgcatcatgtgttcagttgattgaaatatttggctcaatccatcttcagaattcgctagaatgctaggtagccaaagttcttctcaattgtatattttcacgtattatgtaaagttactaatacatgatcgaatccattggcatttattctttttccttgctttgaacggatttttgtaaagatatctgaacatatattgaacaggttcttattccagttttgaacacttccaactaagtatatacaccttggaactatttctggttaaaactacattttgatctgagtaaaagtcagtgtagttgtctacctgcgcattgttgtagtggatgagtctgttaaaatttgtctaccctagtatttgttcagtgaaatggttttaatgtgttgtagaatctttaggtacaaatactaatatacatgacagtatttttgtatgtgtcttggaagtggcctgtttttctggcccattcacgcacacatttatacacctactccgtatcggattttcgaaatgacggaacatgtcaaatcagaaagaatcaaaagttaaaaaaattgttctaaattaaaactgaaacacataaactatcagaaaaatgtttaattattttccaatataaatagtaatcttaaattttttataaacttacagttgctgcaaaaacaaattaagagactgtttttgtacaactccaccattacaggccagtggaaaaacgtatcttggtcctctaggtatgcgaaaatatgttatctttcatgcaacaattagttgaccttggaaaacaagaacaactatttttttaaatgaccaattttataaacaaaaaatgaataataagtaaattacaaaacgcacagaaatatccaaacaagtatggttattccaaataaatactgacacaagcctgaacacggaaatgaaatcaaaatgtaaaaagggaagaagaaaaagcactcaaaaagtaaaccagatgacagaccgacaaatatacagaacaattattgaagataggattgatctgctcgatgggatgtcacaaacaaatttagcgttaaaattagaagttcgcatccaattcgacgattgatattagtttggttgattaaaatttgggtgtataaaaaataaaataacgtttatgaatcgtatttctactggtcaagtggtagaacaggcaatatgccttatagattttaaaattcgtactttaagcaatgtttatctgtgaaatttctacagataataaaattgttacaatctacctcatttctatgtttgtgcacttgtggaaaatggatgtacatagcagatataagcattttcaatatatattttttaatgattttgactgcaatgggaaatgcaaacttctgtatatgaatgtgttacagtttgttgcactcatttagaataatttggatatttgaaaatctaatctccgaacagcacacattcggattagattggaaaaatgagcattctgatattgacaacacgttcctgaaagcaacatttgatctgctatactgagcatatcttatctgttactactttgttttatttatttgaacaagagctcctagcagaacgattgtggcaaacaagtatatgtgtttcactactgcacccttagtccaaataactccattttctcgttcaagtatctttgtctttttcaattagttttgaatcgattgtatattgttaataagacaaattaaatatacaaagtagtaagtcttccagactataaagacagcataacaatcactgagaatatggtacatcataaaaactaattttattttatgcaatttattaggaaaatgtttactggtggcactgttagctaaagcacctattgaaagttggtttaagaggaaattatgcttcttgtttatggaatggaaaatattcatcttgtatcttatttagtccatttttctgaggacaaaacatggattgctggagttaagaaaaatcatgtttaaaatgcttatttttggtatttttacttttctttttcacaccttattcatactcctgttttatttcatcagccacgccattatttttaattattgatattgttcttcctagtagattacacaatacccttttagtagctgtacaaaaaaggtatgtttatttcaagttagtgattttgtttgtatttacgattatttagagtaaatagatgttatttggacaaatgttgtgaaacacgtacatttcagttaattttaacttttagtgaactttgactatgttattttatctatttatctgtggttcgtctcaccctaatcatcatcccatgtcacatatagtatcaacgaacccgatttatatgacatatagttgtacaataccgtcttaacatatactttatttggatttccaacttcgtggaagtaccattttgttgtaatgggatgttattatacaaatatatctagaggtatataatatatactgaaaagtttaaagtgccggtttgaagtggcatatggtgcgcaccactcacaacactttaaaatgtaagaaataaaaaacagtaaaaactcctatttacttatgccaaacttaagacatggcatttcagttgaatgttgttatttgtaatggtacaatattaaatcgttaatttgttatagttgttattttatataatataaaataaagagtcgcctttcacgctctagtgttattggcccacggagggtggaatggagtatggttgatccattctaacataactttattgtatgtctgatgtgcttttatttatataataaaggtattttgagctttaaattttaagagaggtgaataacatacctacctgttgttaaggtgttttgttccattgtcatttatttttgtgaaccacattttagttatgaaatatatttcgatttaatgtaaatgttacctacttctttaactttgtaatataatttaagaaaa

SEQ ID NO: 3015 - DNA, 4783 bp, Diabrotica virgifera
  SmartBlast Evalue=1E-18; Info=Transposase n=1 Tax=Salmo salar RepID=A8C5I4_SALSA
atgacacaactagattcgaaccagtgttggatgagtgtgaggcgtttgtgaaggcatgatagttcttatgtcgctgtaacagcacattttcttcagtttttctgcatttcttcagttttctgaggacctttctcaggttttctgaagactggaatgtgatgcatctatttttgaccacgagttcataaacgcatagatgtgcgtgaggaggatgagtttatcttctttcaatagtaaatattttcgttaacttgaccgtgaattggtgcacttagcgtgagccgagcgcctgaatccaatagcttcggagggctgtggcttcggaatggtagtttttcagacctggctcccatgatcttttttgatctgcgctctgagaactatcattgatcgaactttcgttgaatttgaccgggccacttttccataaggagtgttacggggttgtttctcggcctgtcgattgaaataaaatttcttaaaaatgattaatatacatataatgcttgtcgacggttatctaaggtgagtagttttaaacttaacagcacgttgtacctatacatagaatgtattataagattaataattatagttacagtgtgattcaacattacatgattcttattatcctgtaaacgtgtaatgtaacgtatcacatgaggtgctaagtgctactgctgcactatgctctcatcaaatattttgttttgtaattacttatatatgtacttcatatattaagagctgtaaagtactatgaataatattaaatagtatataataagctgtgataatggcgtgccagaccaacaggttgcgtccaaatttcatggttgcggcgatggtacttagaaaccccacaatctaccaattcagtctacagccgctctaccccaagtcaacacaacactattcatatttataattaaaatacagattcatcataaatgcataaaaacaatttcctaattgaataatatcgagatcattaaacagtctctccgaatataagaacaattaaaaaactacaaattacattaccaagaaaataaaaacaacagaatatttagataaacgataaagttgctgatgacaatattgaaacaaataataataataaaaaataatatatacattgtgtacacaaaatattttaatttgctaatataacgatttctgctaggtctacaaaaaataaaagttttcaaaaaaacttttgttaatttgcaccgtttacattttttcaatttttcatgatccttataatatatgtttgtacgttctaggttccgtatcgctccaatatatgcaattgttttcattaaaatggccgtttaaaattaatctacgagaaaaagtctcttgtttgtaaaatggaccatatttacctttagcattatactttcagaaaattatattctgcgatcaaaatcatcacgagtcgtataccaccataattttataagcgtgtatcttagttttttgggaatactaccaacggacctactcccaacgtcattatttaactcttcattattataatatttaacttttaaattttgtcaaaattttgttaatgtacgtattcttttgacttgtcaaaaacgaaagaaattttgtatatttgattgaataaattctattctatgcatcatgttctaatgcatttttctgtagggatggtgaaaccatctgaaccaccatttccagcgttttctgtcgaagaaatcttcagtttttaaatctctggcggacattgcatcttcgacatctttccaggaccgtcttggtctacttcgttttcttctagtggacggactccaattttatatcttttttgtccatttattttcaggcattctttgcaggtgtcaataccagttgagtcttttggcttcaattgtctctattatgtctagatcaatttttatttttctctgaatatcttcctttctcgccctatcaaatctagtgagtcgtctctaatagattatttccatggatttaatttttgatttgattctttgatttatttccctttttgatgttatttgaactcccacggatttggaggtttcagttgattttatagttcccatttccatttttatgctttctggtttttctcctgcaactaagtattcggatttttgtatattaattgtgaggcctcacttagtgtactcctcttccagttttctaagcatatagtctatataactctcgtctttagctagaatggcttggtcgtcagcgaagtgtatcctgtacaatatttcgtcttcgattggggtgcccagattgcagcacgttcttctcacattctgcatcaacattaaaggatttttcaatagcagctttggtcgttaaattttcaggtgattttaatttgatccggttatcaagatatttctgaatcagaatatttcataaataaaaaaccttttcataagcgtgttagaaatcgagagattaacaaaataggtttttgtatatgccatattacctatcctcaagaaagtgcagttattttctaattgcataaaaataataaatggtgtataggttgtgttgatttgtaagggagtgactcatttgtattgaccattttttactataattaggtatacaatgttactatggaataaagtactttcattccaaaattaaaagttaaaagataatacataagtagatatatagaagtacttacagataaaagtttgactccattttcaatcaataaacagggtgggtgggctcaatggtacgttgacgtttcacagaggtatttatatgttaaaaacaaaatatatacaccacgtagaacaccaactatatattctaaataattataattttcgtatcattcttggtatttaacatatttccacccctgtctagaaaaatgttcgcagattacaggaacaatacaactatgcgctgttagtaaataaagtgattcattttgaatagagctatgaatatagttattcttaaggtgattcagtgttcaatccaatttttcaaaaaatttttttcataatagcattttctctgttctggtctgtagcagtgtctcctctataatacgtagaagccaggaattttctatccgataaatatatctttgatggctctccttgatcgattgttagtctgatgcagaaaccacaaatttaatgaattctctcatgccactccatttttttaggtcttcaagttacgtccttagattttcgtaattggttttgcttcttgtaagatctatgtattaccaaaattgtttttccacgatctatcatgagacctgcatcatgtgttcagttgattgaaatatttggctcaatccatcttcagaattcgctagaatgctaggtagccaaagttcttctcaattgtatattttcacgtattatgtaaagttactaatacatgatcgaatccattggcatttattctttttccttgctttgaacggatttttgtaaagatatctgaacatatattgaacaggttcttattccagttttgaacacttccaactaagtatatacaccttggaactatttctggttaaaactacattttgatctgagtaaaagtcagcttatacactgacccgcaaaaataaccggacaccaatgtacacttctccaagaaattaacgcaaattttctaattctgttgtccgatttgagtgatttttttaatatgttatagccttattatttaagaatgttgctgtagtagtgttgtttctagacgggtgaattgtcgttgtataccgggtgtaccaatgaaactgtgttttttctcaaacttcgcaacagcctgtggaatgttctagcttttgtaaagtgctgaaattgaaacccaactatactgcaggttttcttaaaataagtccgtaatttttttgttgtttggtggaaatggaacgcgctgcaaggaatttgacccgcgatgagtgtgttcaagcagtgaccttacatagcgaacataggacttagctaccatgctatcggtcggaggttagaagtttcacatacatcaatttcccgtattgttcaacgctttacagaaatgaacgactacagcagacgtcccggacaaggtagatctcgagttactacggtggttcaagaccattttattagattatgtgctttaaaagaacgattcagcacgtcaaggaatcttttaacggaacttaataatatccaaccccgcattgaaaccgcgggcgaaaccggagacgtcttgtagcatatgacttgcgtattcgaagatcagctacaggatcaactgcaaaccaccgcagagatagattgcaatttgccaaagcacacgtaaactggaataatgaccactgggaaaacgttctgtttacagatgaatccagatttggcctctatagttccaatcgacgtttaagagtaatccgagaccaatagagcgttacgccaagtgtaacatatgtacagaacgactttatttaatggagggtctacaacggtttggggagaaacttctttaacagcacgcgcagatcgtgttcctttacgtggcatttctttaaaaagtgaaaggtacatagccgatatttgacaatttaataaattaacaatttgacatttttctcaaattgtttatttctcattgcctattttaggcttgtttgttaaactaagcagaaaatgagaatatattgatgaaaagcatggctagttgttaaagtacctaactttttttattatccaacataagcgaatgaatc

SEQ ID NO: 3016 - DNA, 3155 bp, Diabrotica virgifera
ctgagtgcacaatctcggaagcgaggcattggcggacacacgtttatggagcaaactgtcattattttttcatgcatagttgccccttaaagtttgccgtacttgtttggaaacaccctgtattgacgggaagcaggggtagttgttaaagtacctaacttttttattgtccaacataagcgaatgaatcaaaaaacagaatgttaagaaaacctgaggctatagttgggttttaatttcagtattttataaatgctagaatattccacaggctgttgcgaactttgaaaagacacagtttgattggtacctacacagccggtatacaatgacaatttgactgtctagcaacaacactgttacagcgacgttcttaaaaaaataagacaatataacatattggaaaatctctcaaatcggacaacagatttaggaaatttgcgttaatttgtgtccggttatttttgcgggtcagtgtagttgtctacctgcgcattgttgtagtggatgagtctgttaaaatttgtctaccctagtatttgttcagtgaaatggttttaatgtgttgtagaatctttaggtacaaatactaatatacatgacagtatttttgtatgtgtcttggaagtggcctgtttttctggcccattcacgcacacatttatacacctactccgtatcggattttcgaaatgacggaacatgtcaaatcagaaagaatcaaaagttaaaaaaattgttctaaattaaaactgaaacacataaactatcagaaaaatgtttaattattttccaatataaatagtaatcttaaattttttataaacttacagttgctgcaaaaacaaattaagagactgtttttgtacaactccaccattacaggccagtggaaaaacgtatcttggtcctctaggtatgcgaaaatatgttatctttcatgcaacaattagttgaccttggaaaacaagaacaactatttttttaaatgaccaattttataaacaaaaaatgaataataagtaaattacaaaacgcacagaaatatccaaacaagtatggttattccaaataaatactgacacaagcctgaacacggaaatgaaatcaaaatgtaaaaagggaagaagaaaaagcactcaaaaagtaaaccagatgacagaccgacaaatatacagaacaattattgaagataggattgatctgctcgatgggatgtcacaaacaaatttagcgttaaaattagaagttcgcatccaattcgacgattgatattagtttggttgattaaaatttgggtgtataaaaaataaaataacgtttatgaatcgtatttctactggtcaagtggtagaacaggcaatatgccttatagattttaaaattcgtactttaagcaatgtttatctgtgaaatttctacagataataaaattgttacaatctacctcatttctatgtttgtgcacttgtggaaaatggatgtacatagcagatataagcattttcaatatatattttttaatgattttgactgcaatgggaaatgcaaacttctgtatatgaatgtgttacagtttgttgcactcatttagaataatttggatatttgaaaatctaatctccgaacagcacacattcggattagattggaaaaatgagcattctgatattgacaacacgttcctgaaagcaacatttgatctgctatactgagcatatcttatctgttactactttgttttatttatttgaacaagagctcctagcagaacgattgtggcaaacaagtatatgtgtttcactactgcacccttagtccaaataactccattttctcgttcaagtatctttgtctttttcaattagttttgaatcgattgtatattgttaataagacaaattaaatatacaaagtagtaagtcttccagactataaagacagcataacaatcactgagaatatggtacatcataaaaactaattttattttatgcaatttattaggaaaatgtttactggtggcactgttagctaaagcacctattgaaagttggtttaagaggaaattatgcttcttgtttatggaatggaaaatattcatcttgtatcttatttagtccatttttctgaggacaaaacatggattgctggagttaagaaaaatcatgtttaaaatgcttatttttggtatttttacttttctttttcacaccttattcatactcctgttttatttcatcagccacgccattatttttaattattgatattgttcttcctagtagattacacaatacccttttagtagctgtacaaaaaaggtatgtttatttcaagttagtgattttgtttgtatttacgattatttagagtaaatagatgttatttggacaaatgttgtgaaacacgtacatttcagttaattttaacttttagtgaactttgactatgttattttatctatttatctgtggttcgtctcaccctaatcatcatcccatgtcacatatagtatcaacgaacccgatttatatgacatatagttgtacaataccgtcttaacatatactttatttggatttccaacttcgtggaagtaccattttgttgtaatgggatgttattatacaaatatatctagaggtatataatatatactgaaaagtttaaagtgccggtttgaagtggcatatggtgcgcaccactcacaacactttaaaatgtaagaaataaaaaacagtaaaaactcctatttacttatgccaaacttaagacatggcatttcagttgaatgttgttatttgtaatggtacaatattaaatcgttaatttgttatagttgttattttatataatataaaataaagagtcgcctttcacgctctagtgttattggcccacggagggtggaatggagtatggttgatccattctaacataactttattgtatgtctgatgtgcttttatttatataataaaggtattttgagctttaaattttaagagaggtgaataacatacctacctgttgttaaggtgttttgttccattgtcatttatttttgtgaaccacattttagttatgaaatatatttcgatttaatgtaaatgttacctacttctttaactttgtaatataatttaagaaaa

SEQ ID NO: 3017 - DNA, 703 bp, Diabrotica virgifera
ctgagtgcacaatctcggaagcgaggcattggcggacacacgtttatggagcaaactgtcattattttttcatgcatagttgccccttaaagtttgccgtacttgtttggaaacaccctgtattgacgggaagcaggggtagttgttaaagtacctaacttttttattgtccaacataagcgaatgaatcaaaaaacagaatgttaagaaaacctgaggctatagttgggttttaatttcagtattttataaatgctagaatattccacagggtgatgcgaactttgagaaaaaacacagtttgattggtgcacccggtgtacggtgaaaatttgcctgtttagcagacaatattgttgcagtggtgttgttgaagaatcaggctgtaggatgttcaaaaaatcacttaaatcggccaacaggatttgggaaatgtgagacatcaagaatgaccaaatttttgagtggaccgatttctatgcacgtaagtttagttcggcaggtgcaatttttgtagccacgaatgtctccttctgtctggacctcttctgctgtctatttttccttcgataattcactgtagtactatatatttattgcagtggcgtagccaggggggttttgggggttataacccccctccccccattggtatgtacttcgagctctatacgcttaacattactattccatgcccccagac

SEQ ID NO: 3018 - DNA, 4244 bp, Diabrotica virgifera
  SmartBlast Evalue=0.000000004; Info=Endonuclease-reverse transcriptase n=1 Tax=Bombyx mori RepID=D7F173_BOMMO
ggaacttaacaatttattgatcagttattaaaagtaagtatctaaagatttgttatctaataaatgatttaacaccttgtttcgaaaaaattaattataaacagtaaattaaaggatattaatttttggttcatttcacaaaatattctatggaggagtttattgttttgtacagtaacaggttgtacatcaccataagtaattgtaattacaatttataaatacgataaattattggactttttcgcataattttcaaattattagtagctgaaacttggaattcagtatctttattaatgttacctgaaaagtcgctttgaattgaacatatcactttccaatcatgaacattggacgatattaaatatataacaataattactaagtcagctgaaatgtttcatcaacaattactcagaccaaaatatttaacgatataaaaaataattacagcagaagtatataaataattatctacaactaataagacattatagcaggcattatcactaaaattataaaaaaggtactaaagcatgaatattatgtatgtatggtaggctgtacaacgatgcagtgaaaatttttatttatttattcagaaaatgatgtaatagtctgtataaatgtaatatgtcatatctcaattcacgtcattttatagccccaagaaaatggttgatcaataccaaaaaattgacatatttttcctttcaatttaggtacttgtctgaaaagataatcatgttaaaaatatgccagaagagcttattcgaggttgattttttttaatatcttttttcctacaattatttttcgattatagaaatatttattttatttgtattttttgcttcttcttctttaacccgcgagtagtcgcgctgttagatagaatctcacattttatccttttttgcgataacttgatgaaacatgttgcaattttgaaaaaatttcgtaagtgcctcgagcaatggtgtagtaatgcgtaggaattttttatttatttttttcttctttttgtggaatttatggctttggggagagccaattagcttcaataattgctagaaataatatttgtaacataacaagtaaataaaaatactataaaataaaaatttgttgtaaatcagtatttaaattcgtattttttccacttttttcgttgagtattaactgcagtatctagtatctgctacctcccattatatgccccagatactctcccttcagttctgacccccctggagggagtgaaccatcatgggagggtcattttaattcatgcctaggtcttttacatattcctgtaatttggcagatccatcttgttgggatcttcctagtgattttcgtatttttaccttttcttggataattagtatttccatgtttctgtctgctctctaatatgtccaaagtattttaattgccggagatgaactttgcttgagagccatttgctgacctttgactcataatgatcttgaactccgaagcttcagtgaaaatgcgccatcgggttttatttcgcgcttaggccttcatctcactccaagactttccttgacttcttatctcgtccatgatggatcttctctaagtttagctgggtgacatctttttctttttcctggggatttcactctagggcagtcttggtaatacttgaactattttttactcatttaacatttatttgtcctgtggtcgcctcacagaattcgaaacattcttctacaacagaccatttcagtgacgtctatcttctttctgcttgtcgtagtacctttgcacataaactcataacattgacttaaatctcattaatactatgcacccatgaaatgtaaattgtaatttgctaataaaacgtgattcatcttagcgttttttttataccagataacaaaaatgacgacaaatatgacgtgaattgagaattgcgtatgtataggagtaactttgacagctcgtgaaaataatgaaaaaatgatatgatatataaatacgattgacgcttttgtttttctggtaaacaactttgtacaaaacccaatgtatcgataatgataataatatattttgtttaacgggtgtaaaccgccaaaaatgaaaaaatatacagtatgatattataaattatagacagttgtttcgttacaggtattaaattaaattcgtaattagaataatcagaaatacgcaatatataatacaatatattatatagaaaaagatatattatatctttttctccccgccttgccaatcaggcaagaggaaggtgcaacagtcagaaaagtttttggccgaagagggggccgattggacaacgagccagaggaaaattgagttgccagagacaggggataatgttggattgttctgaagaatgtcttggctcatatgtataaggttcttgaacccctcagtggagcatagagtttcagtgaaaacgcgccatcgggttctattttgcgctgaggccttcgcttcattccaagactttcctcgacttcttatctcatccatgatggatctcctccaagtttgtgctgggcgacctctttttccttggggattccactctagggcagtctttgcaatactggaactattttttcggagtgtgtgacgattcaactccacttctgaactttattccatttcatttttggttcaaacatctttttatttctttatgcttaaggtgctgctctactcactgaaaagcacttccattatatgcttcggaacatgtggtatggtagcaccttgaaacatttcaacgttcgtaaatgtgatatatccataagatcttcagaatccactatatgtccaaatatcaaatgattccaatcaaatcttttgatcgcctttcgattcagcattcatcttcttgtagtgtatccgttttggatgttggcgaccatcatggcaatatttactttgcacactgctgctctgaaaagatttgtggttgttgtgttgaaccacgtacgtatatttttcagtcaggaaatctttcgcctttctagtcatcgtttttcttctactttttcctgtaagcttagacattcatgattagactaaattttaacaaactgtaacatttggccaatcgtatttttagggctaatgtcaaatctctgcaacaaataatcttcggcattgtcatcattgcacgggcgaagcaattctaacatttatttcgaacttgggttttttgatgttaggtaggagtccatatctccactgcaatgaattattattctttctatatttgctaaattcttgcgtattattaaggtgtcatcatccatatttttatttaagtttttaacatacgatcacataaatattccaataaatatatcaaatatacatatatatcaaagtggactgtcagaatattcatatatacatatatatcaacgggggctttcagagaatattcaaatatacatatatcaaaggggataatataaaatattgaatgaccttgattcgagatcataaattgagtgttataagttgagactttaatcatgcactgagtaaggcaaaagtatgttcaccaaccatataaaattgaatgccaaggctaaaatacaattttagcgcgtatataaatcaatataaatatgtataattgcctagctttaaattaattataaataaatttaactacttataaattatatactatgtgactttcttattactatcacatactagcaacgtcaaaaaccagtgttctttaattcaatcacaattcaatttatcagtagagaaaataaaatttattaagtcttttattgtatgaatttaggaaataatgtaatattttagtatctatgtgtcgttgactatagaacttacagcgcatcttaaacaaagagaatgttgaatctccacttatactgtgcattgtaatataatgcactaatgaaattgtaatttataatgtaaaggaataatttccatgtactgtcacttttaatgttatttcagaagcaaagcaagtttttgacgatacaagttataatttcgtgaacatccgtacaatgtttatagtcgaacaagggaactaagagactcactaatattcagctgagctgcgtgctatttttcgaggtgtgaaattccataaaccagggatttacctgtttcatgaaattatccattgtgtatacagggtgattgattagtgtgatgaagctcagtagatc

SEQ ID NO: 3019 - DNA, 4217 bp, Diabrotica virgifera
  SmartBlast Evalue=0.000000004; Info=Endonuclease-reverse transcriptase n=1 Tax=Bombyx mori RepID=D7F173_BOMMO
ggaacttaacaatttattgatcagttattaaaagtaagtatctaaagatttgttatctaataaatgatttaacaccttgtttcgaaaaaattaattataaacagtaaattaaaggatattaatttttggttcatttcacaaaatattctatggaggagtttattgttttgtacagtaacaggttgtacatcaccataagtaattgtaattacaatttataaatacgataaattattggactttttcgcataattttcaaattattagtagctgaaacttggaattcagtatctttattaatgttacctgaaaagtcgctttgaattgaacatatcactttccaatcatgaacattggacgatattaaatatataacaataattactaagtcagctgaaatgtttcatcaacaattactcagaccaaaatatttaacgatataaaaaataattacagcagaagtatataaataattatctacaactaataagacattatagcaggcattatcactaaaattataaaaaaggtactaaagcatgaatattatgtatgtatggtaggctgtacaacgatgcagtgaaaatttttatttatttattcagaaaatgatgtaatagtctgtataaatgtaatatgtcatatctcaattcacgtcattttatagccccaagaaaatggttgatcaataccaaaaaattgacatatttttcctttcaatttaggtacttgtctgaaaagataatcatgttaaaaatatgccagaagagcttattcgaggttgattttttttaatatcttttttcctacaattatttttcgattatagaaatatttattttatttgtattttttgcttcttcttctttaacccgcgagtagtcgcgctgttagatagaatctcacattttatccttttttgcgataacttgatgaaacatgttgcaattttgaaaaaatttcgtaagtgcctcgagcaatggtgtagtaatgcgtaggaattttttatttatttttttcttctttttgtggaatttatggctttggggagagccaattagcttcaataattgctagaaataatatttgtaacataacaagtaaataaaaatactataaaataaaaatttgttgtaaatcagtatttaaattcgtattttttccacttttttcgttgagtattaactgcagtatctagtatctgctacctcccattatatgccccagatactctcccttcagttctgacccccctggagggagtgaaccatcatgggagggtcattttaattcatgcctaggtcttttacatattcctgtaatttggcagatccatcttgttgggatcttcctagtgattttcgtatttttaccttttcttggataattagtatttccatgtttctgtctgctctctaatatgtccaaagtattttaattgccggagatgaactttgcttgagagccatttgctgacctttgactcataatgatcttgaactccgaagcttcagtgaaaatgcgccatcgggttttatttcgcgcttaggccttcatctcactccaagactttccttgacttcttatctcgtccatgatggatcttctctaagtttagctgggtgacatctttttctttttcctggggatttcactctagggcagtcttggtaatacttgaactattttttactcatttaacatttatttgtcctgtggtcgcctcacagaattcgaaacattcttctacaacagaccatttcagtgacgtctatcttctttctgcttgtcgtagtacctttgcacataaactcataacattgacttaaatctcattaatactatgcacccatgaaatgtaaattgtaatttgctaataaaacgtgattcatcttagcgttttttttataccagataacaaaaatgacgacaaatatgacgtgaattgagaattgcgtatgtataggagtaactttgacagctcgtgaaaataatgaaaaaatgatatgatatataaatacgattgacgcttttgtttttctggtaaacaactttgtacaaaacccaatgtatcgataatgataataatatattttgtttaacgggtgtaaaccgccaaaaatgaaaaaatatacagtatgatattataaattatagacagttgtttcgttacaggtattaaattaaattcgtaattagaataatcagaaatacgcaatatataatatatatctttttctccccgccttgccaatcaggcaagaggaaggtgcaacagtcagaaaagtttttggccgaagagggggccgattggacaacgagccagaggaaaattgagttgccagagacaggggataatgttggattgttctgaagaatgtcttggctcatatgtataaggttcttgaacccctcagtggagcatagagtttcagtgaaaacgcgccatcgggttctattttgcgctgaggccttcgcttcattccaagactttcctcgacttcttatctcatccatgatggatctcctccaagtttgtgctgggcgacctctttttccttggggattccactctagggcagtctttgcaatactggaactattttttcggagtgtgtgacgattcaactccacttctgaactttattccatttcatttttggttcaaacatctttttatttctttatgcttaaggtgctgctctactcactgaaaagcacttccattatatgcttcggaacatgtggtatggtagcaccttgaaacatttcaacgttcgtaaatgtgatatatccataagatcttcagaatccactatatgtccaaatatcaaatgattccaatcaaatcttttgatcgcctttcgattcagcattcatcttcttgtagtgtatccgttttggatgttggcgaccatcatggcaatatttactttgcacactgctgctctgaaaagatttgtggttgttgtgttgaaccacgtacgtatatttttcagtcaggaaatctttcgcctttctagtcatcgtttttcttctactttttcctgtaagcttagacattcatgattagactaaattttaacaaactgtaacatttggccaatcgtatttttagggctaatgtcaaatctctgcaacaaataatcttcggcattgtcatcattgcacgggcgaagcaattctaacatttatttcgaacttgggttttttgatgttaggtaggagtccatatctccactgcaatgaattattattctttctatatttgctaaattcttgcgtattattaaggtgtcatcatccatatttttatttaagtttttaacatacgatcacataaatattccaataaatatatcaaatatacatatatatcaaagtggactgtcagaatattcatatatacatatatatcaacgggggctttcagagaatattcaaatatacatatatcaaaggggataatataaaatattgaatgaccttgattcgagatcataaattgagtgttataagttgagactttaatcatgcactgagtaaggcaaaagtatgttcaccaaccatataaaattgaatgccaaggctaaaatacaattttagcgcgtatataaatcaatataaatatgtataattgcctagctttaaattaattataaataaatttaactacttataaattatatactatgtgactttcttattactatcacatactagcaacgtcaaaaaccagtgttctttaattcaatcacaattcaatttatcagtagagaaaataaaatttattaagtcttttattgtatgaatttaggaaataatgtaatattttagtatctatgtgtcgttgactatagaacttacagcgcatcttaaacaaagagaatgttgaatctccacttatactgtgcattgtaatataatgcactaatgaaattgtaatttataatgtaaaggaataatttccatgtactgtcacttttaatgttatttcagaagcaaagcaagtttttgacgatacaagttataatttcgtgaacatccgtacaatgtttatagtcgaacaagggaactaagagactcactaatattcagctgagctgcgtgctatttttcgaggtgtgaaattccataaaccagggatttacctgtttcatgaaattatccattgtgtatacagggtgattgattagtgtgatgaagctcagtagatc

SEQ ID NO: 3020 - DNA, 3238 bp, Diabrotica virgifera
  SmartBlast Evalue=0.000000003; Info=Endonuclease-reverse transcriptase n=1 Tax=Bombyx mori RepID=D7F173_BOMMO
tgtggaatttatggctttggggagagccaattagctttaataattgctagaaataatatttctaacataagtaaataaaaaatactataaaataaaaatttgttgtaaatccgtattttttccacttttttcgttgagtattaactgcagtatctagtatctgctacctctcattatatgccccagatactctcccttcagttctgaccccctggagggagtgacccatcatgggagggtcattatgatgtcgtgtattgcccgtctctggtcatttattttaattcatgcctaggtcttttacatattcctgtaatttggcagatccatcttgttgggatcttcctagtgattttcgtatttttaccttttcttggataattagtatttccatgtttctgtctgctctctaatatgtccaaagtattttaattgccggagatgaactttgcttgagagccatttgctgacctttgactcataatgatcttgaactccgaagcttcagtgaaaatgcgccatcgggttttatttcgcgcttaggccttcatctcactccaagactttccttgacttcttatctcgtccatgatggatcttctctaagtttagctgggtgacatctttttctttttcctggggatttcactctagggcagtcttggtaatacttgaactattttttactcatttaacatttatttgtcctgtggtcgcctcacagaattcgaaacattcttctacaacagaccatttcagtgacgtctatcttctttctgcttgtcgtagtacctttgcacataaactcataacattgacttaaatctcattaatactatgcacccatgaaatgtaaattgtaatttgctaataaaacgtgattcatcttagcgttttttttataccagataacaaaaatgacgacaaatatgacgtgaattgagaattgcgtatgtataggagtaactttgacagctcgtgaaaataatgaaaaaatgatatgatatataaatacgattgacgcttttgtttttctggtaaacaactttgtacaaaacccaatgtatcgataatgataataatatattttgtttaacgggtgtaaaccgccaaaaatgaaaaaatatacagtatgatattataaattatagacagttgtttcgttacaggtattaaattaaattcgtaattagaataatcagaaatacgcaatatataatacaatatattatatagaaaaagatatattatatctttttctccccgccttgccaatcaggcaagaggaaggtgcaacagtcagaaaagtttttggccgaagagggggccgattggacaacgagccagaggaaaattgagttgccagagacaggggataatgttggattgttctgaagaatgtcttggctcatatgtataaggttcttgaacccctcagtggagcatagagtttcagtgaaaacgcgccatcgggttctattttgcgctgaggccttcgcttcattccaagactttcctcgacttcttatctcatccatgatggatctcctccaagtttgtgctgggcgacctctttttccttggggattccactctagggcagtctttgcaatactggaactattttttcggagtgtgtgacgattcaactccacttctgaactttattccatttcatttttggttcaaacatctttttatttctttatgcttaaggtgctgctctactcactgaaaagcacttccattatatgcttcggaacatgtggtatggtagcaccttgaaacatttcaacgttcgtaaatgtgatatatccataagatcttcagaatccactatatgtccaaatatcaaatgattccaatcaaatcttttgatcgcctttcgattcagcattcatcttcttgtagtgtatccgttttggatgttggcgaccatcatggcaatatttactttgcacactgctgctctgaaaagatttgtggttgttgtgttgaaccacgtacgtatatttttcagtcaggaaatctttcgcctttctagtcatcgtttttcttctactttttcctgtaagcttagacattcatgattagactaaattttaacaaactgtaacatttggccaatcgtatttttagggctaatgtcaaatctctgcaacaaataatcttcggcattgtcatcattgcacgggcgaagcaattctaacatttatttcgaacttgggttttttgatgttaggtaggagtccatatctccactgcaatgaattattattctttctatatttgctaaattcttgcgtattattaaggtgtcatcatccatatttttatttaagtttttaacatacgatcacataaatattccaataaatatatcaaatatacatatatatcaaagtggactgtcagaatattcatatatacatatatatcaacgggggctttcagagaatattcaaatatacatatatcaaaggggataatataaaatattgaatgaccttgattcgagatcataaattgagtgttataagttgagactttaatcatgcactgagtaaggcaaaagtatgttcaccaaccatataaaattgaatgccaaggctaaaatacaattttagcgcgtatataaatcaatataaatatgtataattgcctagctttaaattaattataaataaatttaactacttataaattatatactatgtgactttcttattactatcacatactagcaacgtcaaaaaccagtgttctttaattcaatcacaattcaatttatcagtagagaaaataaaatttattaagtcttttattgtatgaatttaggaaataatgtaatattttagtatctatgtgtcgttgactatagaacttacagcgcatcttaaacaaagagaatgttgaatctccacttatactgtgcattgtaatataatgcactaatgaaattgtaatttataatgtaaaggaataatttccatgtactgtcacttttaatgttatttcagaagcaaagcaagtttttgacgatacaagttataatttcgtgaacatccgtacaatgtttatagtcgaacaagggaactaagagactcactaatattcagctgagctgcgtgctatttttcgaggtgtgaaattccataaaccagggatttacctgtttcatgaaattatccattgtgtatacagggtgattgattagtgtgatgaagctcagtagatc

SEQ ID NO: 3021 - DNA, 3211 bp, Diabrotica virgifera
  SmartBlast Evalue=0.000000003; Info=Endonuclease-reverse transcriptase n=1 Tax=Bombyx mori RepID=D7F173_BOMMO
tgtggaatttatggctttggggagagccaattagctttaataattgctagaaataatatttctaacataagtaaataaaaaatactataaaataaaaatttgttgtaaatccgtattttttccacttttttcgttgagtattaactgcagtatctagtatctgctacctctcattatatgccccagatactctcccttcagttctgaccccctggagggagtgacccatcatgggagggtcattatgatgtcgtgtattgcccgtctctggtcatttattttaattcatgcctaggtcttttacatattcctgtaatttggcagatccatcttgttgggatcttcctagtgattttcgtatttttaccttttcttggataattagtatttccatgtttctgtctgctctctaatatgtccaaagtattttaattgccggagatgaactttgcttgagagccatttgctgacctttgactcataatgatcttgaactccgaagcttcagtgaaaatgcgccatcgggttttatttcgcgcttaggccttcatctcactccaagactttccttgacttcttatctcgtccatgatggatcttctctaagtttagctgggtgacatctttttctttttcctggggatttcactctagggcagtcttggtaatacttgaactattttttactcatttaacatttatttgtcctgtggtcgcctcacagaattcgaaacattcttctacaacagaccatttcagtgacgtctatcttctttctgcttgtcgtagtacctttgcacataaactcataacattgacttaaatctcattaatactatgcacccatgaaatgtaaattgtaatttgctaataaaacgtgattcatcttagcgttttttttataccagataacaaaaatgacgacaaatatgacgtgaattgagaattgcgtatgtataggagtaactttgacagctcgtgaaaataatgaaaaaatgatatgatatataaatacgattgacgcttttgtttttctggtaaacaactttgtacaaaacccaatgtatcgataatgataataatatattttgtttaacgggtgtaaaccgccaaaaatgaaaaaatatacagtatgatattataaattatagacagttgtttcgttacaggtattaaattaaattcgtaattagaataatcagaaatacgcaatatataatatatatctttttctccccgccttgccaatcaggcaagaggaaggtgcaacagtcagaaaagtttttggccgaagagggggccgattggacaacgagccagaggaaaattgagttgccagagacaggggataatgttggattgttctgaagaatgtcttggctcatatgtataaggttcttgaacccctcagtggagcatagagtttcagtgaaaacgcgccatcgggttctattttgcgctgaggccttcgcttcattccaagactttcctcgacttcttatctcatccatgatggatctcctccaagtttgtgctgggcgacctctttttccttggggattccactctagggcagtctttgcaatactggaactattttttcggagtgtgtgacgattcaactccacttctgaactttattccatttcatttttggttcaaacatctttttatttctttatgcttaaggtgctgctctactcactgaaaagcacttccattatatgcttcggaacatgtggtatggtagcaccttgaaacatttcaacgttcgtaaatgtgatatatccataagatcttcagaatccactatatgtccaaatatcaaatgattccaatcaaatcttttgatcgcctttcgattcagcattcatcttcttgtagtgtatccgttttggatgttggcgaccatcatggcaatatttactttgcacactgctgctctgaaaagatttgtggttgttgtgttgaaccacgtacgtatatttttcagtcaggaaatctttcgcctttctagtcatcgtttttcttctactttttcctgtaagcttagacattcatgattagactaaattttaacaaactgtaacatttggccaatcgtatttttagggctaatgtcaaatctctgcaacaaataatcttcggcattgtcatcattgcacgggcgaagcaattctaacatttatttcgaacttgggttttttgatgttaggtaggagtccatatctccactgcaatgaattattattctttctatatttgctaaattcttgcgtattattaaggtgtcatcatccatatttttatttaagtttttaacatacgatcacataaatattccaataaatatatcaaatatacatatatatcaaagtggactgtcagaatattcatatatacatatatatcaacgggggctttcagagaatattcaaatatacatatatcaaaggggataatataaaatattgaatgaccttgattcgagatcataaattgagtgttataagttgagactttaatcatgcactgagtaaggcaaaagtatgttcaccaaccatataaaattgaatgccaaggctaaaatacaattttagcgcgtatataaatcaatataaatatgtataattgcctagctttaaattaattataaataaatttaactacttataaattatatactatgtgactttcttattactatcacatactagcaacgtcaaaaaccagtgttctttaattcaatcacaattcaatttatcagtagagaaaataaaatttattaagtcttttattgtatgaatttaggaaataatgtaatattttagtatctatgtgtcgttgactatagaacttacagcgcatcttaaacaaagagaatgttgaatctccacttatactgtgcattgtaatataatgcactaatgaaattgtaatttataatgtaaaggaataatttccatgtactgtcacttttaatgttatttcagaagcaaagcaagtttttgacgatacaagttataatttcgtgaacatccgtacaatgtttatagtcgaacaagggaactaagagactcactaatattcagctgagctgcgtgctatttttcgaggtgtgaaattccataaaccagggatttacctgtttcatgaaattatccattgtgtatacagggtgattgattagtgtgatgaagctcagtagatc

SEQ ID NO: 3022 - DNA, 4869 bp, Diabrotica virgifera
  SmartBlast Evalue=0; Info=DNA-directed RNA polymerase II subunit RPB1 n=3 Tax=Endopterygota RepID=E2AC10_9HYME
ggtaaacgtattccatttggcttcagaaaacgcacgttgccgcacttcatcaaggacgattacggtcctgaatccagaggtttcgtagaaaattcgtatcttgccggtctcactccttcggagttctatttccacgctatgggaggtcgtgaaggtcttatcgatactgctgtaaaaactgccgaaactggttacatccaacgtcgtctgatcaaggctatggagagtgtaatggtacattacgacggtaccgtaagaaattctgtaggacaacttatccagctgagatacggtgaagacggactctgtggagagatggtagagtttcaatatttagcaacagtcaaattaagtaacaaggcgtttgagagaaaattcagatttgatccaagtaatgaaaggtatttgagaagagttttcaatgaagaagttatcaagcaactgatgggttcaggggaagtcatttccgaacttgagagagaatgggaacaactccagaaagacagagaagccttaagacaaatcttccctagcggagaatctaaagtagtactcccctgtaacttacaacgtatgatctggaatgtacaaaaaattttccacataaacaaacgagccccgacagacctgtccccgttaagagttatccaaggcgttcgagaattactcaggaaatgcgtcatcgtagctggcgaggatcgtctgtccaaacaagccaacgaaaacgcaacgttactcttccagtgtctagtcagatcgaccctctgcaccaaatgcgtttctgaagaattcaggctcagcaccgaagccttcgagtggttgataggagaaatcgagacgaggttccaacaagcccaagccaatcctggagaaatggtgggcgctctggccgcgcagtcactgggagaacccgctactcagatgacactgaacactttccattttgctggtgtatcctccaagaacgtaaccctgggtgtacctagattaaaggaaattattaatatttccaagaaacccaaggctccatctctaaccgtgtttttaactggtgcggctgctagagatgcggaaaaagcgaagaatgtgttatgcagacttgaacacaccactcttcgtaaagtaaccgccaacaccgccatctattacgatcctgacccacaaaataccgtcattcctgaggatcaggagttcgttaacgtctactatgaaatgcccgatttcgatcctacccgtatatcgccgtggttgcttcgtatcgaactggacagaaagagaatgacagataagaaactaactatggaacaaattgctgaaaagatcaacgctgggttcggggacgatttgaattgtattttcaacgacgacaatgctgaaaagttggtgttgcgtatcagaatcatgaacagcgacgatggaaaattcggagaaggtgctgatgaggacgtagacaaaatggatgacgacatgtttttgagatgcattgaagcgaacatgctcagtgatatgaccttgcaaggtatagaagcgatttccaaggtatacatgcacttgccacagactgactcgaaaaaaaaggatcgtcatcactgaaacaggcgaatttaaggccatcgcagaatggctattggaaactgacggtaccagcatgatgaaagtactgtcagaaagagacgtcgatccggtcagaacgttttctaacgacatttgtgaaatattttcggtacttggtatcgaggctgtgcgtaagtctgtagagaaggaaatgaacgctgtcctttcattctacggtctgtacgtaaactatcgccatcttgccttgctttgtgacgtaatgacagccaaaggtcacttaatggccatcacccgtcacggtatcaacagacaagacactggagctctgatgaggtgttccttcgaggaaactgtagatgtattgatggacgctgccagtcatgcggaggtcgacccaatgagaggagtatctgaaaacattatcctcggtcaactaccaagaatgggcacaggctgcttcgatcttttgctggacgccgaaaaatgtaaaatgggaattgccatacctcaagcgcacagcagcgatctaatggcttcaggaatgttctttggattagccgctacacccagcagtatgagtccaggtggtgctatgaccccatggaatcaagcagctacaccatacgttggcagtatctggtctccacagaatttaatgggcagtggaatgacaccaggtggtgccgctttctccccatcagctgcgtcagatgcatcaggaatgtcaccagcttatggcggttggtcaccaacaccacaatctcctgcaatgtcgccatatatggcttctccacatggacaatcgccttcctacagtccatcaagtccagcgttccaacctacttcaccatccatgacgccgacctctcctggatattctcccagttctcctggttattcacctaccagtctcaattacagtccaacgagtcccagttattcacccacttctcagagttactccccaacctcacctagttactcaccgacttctccaaattattcacctacttccccaagctacagtccaacatcccctaactattcaccaacatctcccaactattcacccacttcacctagttatccttcaacttcgccaggttacagccccacttcacgcagctactcacccacatctcctagttactcaggaacttcgccctcttattcaccaacttcgccaagttactcccctacttctcctagttattcgccgtcgtctcctaattactctcccacttctccaaattacagtcccacttctcctaattactcaccgtcctctcctaggtacacgcccggttctcctagtttttccccaagttcgaacagttactctcccacatctcctcaatattctccaacatctccaagttattcgccttcttcgcccaaatattcaccaacttcccccaattattcgccaacatctccatcattttctggaggaagtccacaatattcacccacatcaccgaaatactctccaacctcgcccaattacactctgtcgagtccgcagcacactccaacaggtagcagtcgatattcaccgtcaacttcgagttattctcctaattcgcccaattattcaccgacgtctccacaatactccatccacagtacaaaatattcccctgcaagtcctacattcacacccaccagtcctagtttctctcccgcttcacccgcatattcgcctcaacctatgtattcaccttcttctcctaattattctcccactagtcccagtcaagacactgactaaatataatcataagattgtagtggttagttgtattttatacatagattttaattcagaatttaatattattttttactatttaccagggacatttttaaagttgtaaaaacacttacatttgttccaacggatttttgcacaaacgtaacgaagttaaatcaaaacattacaactgaaacatacgtcggtatgtactgtcaatgtgatcattaggaaatggctattatcccggaggacgtattttataaagttattttattgaagtgtttgatcttttttcactattgaggagatttatggactcaacattaaacagcttgaacatcataccgactactactaatataaagataaatatagaacggtaagaaatagattaaaaaaaaatacaataagttaaacagtaatcataaaaataaataagtttccgttccgacagaactatagccagattcttgtagtataatgaaaatttgtaggttaaaaatattacttgtcacattagcttaaaaataaataattaccggaagtaatcaaataagagagcaacagttagtggttctaacaattaggtttgaaaataaaaattataatgaaatatacaaagactaaaagtttaaataatatgaaaaccatttttaaccctccgttagtcgctatcggtgtcacacaccgacgacagaattattcattcgggatttacaaaataactgtttttttctatcgccactttctgtacctcttcctatcaactaacctcgtgttagtttacattcttacctacttgggtacagttgtgcgagttttatagctattttcggtgcaagactccgtagcgactaacggtgtggttattactttattggcataacttgcagttcaggtaaagatttagcatcttattattgcattttatcggtaagttttggtcaaatcttatttatagatgtctttgaagccgaacaaaaacgtttgttggaattatgggaaatagcgtataattttatattacaaataacaatcctatacacaatataaaacatttgtatgaattttttagcaataactatttttttaagttgtcggtctctgacactgtagcgactcttgatgctctgtttatcctagcgactaacggagggttaaacacatcaaatgcgccaagtcagtgaaaatgatgaacgtcaaaattcttagcaaagacatgacgtatcgcttatctttgtttaacgtactgtttctatggacaagtggcttaattttgcgatactagtttctgtaattaaaaacggataaaaagtaattcgtgaataaatttaatgcatgtgcaatgatccgttggaaccgatgtacttattgtagatgatcctagttgtatcttttatattgcaaggagtggaaaaataaaaaaaacctgtagaggatttttgatcgactgcaaactgtggggcattttgaatgctacagatataaaaaaataatgtatagtttattaatatttttattatgtaaatgttcgttat

SEQ ID NO: 3023 - DNA, 4762 bp, Diabrotica virgifera
  SmartBlast Evalue=0; Info=DNA-directed RNA polymerase II subunit RPB1 n=3 Tax=Endopterygota RepID=E2AC10_9HYME
ggtaaacgtattccatttggcttcagaaaacgcacgttgccgcacttcatcaaggacgattacggtcctgaatccagaggtttcgtagaaaattcgtatcttgccggtctcactccttcggagttctatttccacgctatgggaggtcgtgaaggtcttatcgatactgctgtaaaaactgccgaaactggttacatccaacgtcgtctgatcaaggctatggagagtgtaatggtacattacgacggtaccgtaagaaattctgtaggacaacttatccagctgagatacggtgaagacggactctgtggagagatggtagagtttcaatatttagcaacagtcaaattaagtaacaaggcgtttgagagaaaattcagatttgatccaagtaatgaaaggtatttgagaagagttttcaatgaagaagttatcaagcaactgatgggttcaggggaagtcatttccgaacttgagagagaatgggaacaactccagaaagacagagaagccttaagacaaatcttccctagcggagaatctaaagtagtactcccctgtaacttacaacgtatgatctggaatgtacaaaaaattttccacataaacaaacgagccccgacagacctgtccccgttaagagttatccaaggcgttcgagaattactcaggaaatgcgtcatcgtagctggcgaggatcgtctgtccaaacaagccaacgaaaacgcaacgttactcttccagtgtctagtcagatcgaccctctgcaccaaatgcgtttctgaagaattcaggctcagcaccgaagccttcgagtggttgataggagaaatcgagacgaggttccaacaagcccaagccaatcctggagaaatggtgggcgctctggccgcgcagtcactgggagaacccgctactcagatgacactgaacactttccattttgctggtgtatcctccaagaacgtaaccctgggtgtacctagattaaaggaaattattaatatttccaagaaacccaaggctccatctctaaccgtgtttttaactggtgcggctgctagagatgcggaaaaagcgaagaatgtgttatgcagacttgaacacaccactcttcgtaaagtaaccgccaacaccgccatctattacgatcctgacccacaaaataccgtcattcctgaggatcaggagttcgttaacgtctactatgaaatgcccgatttcgatcctacccgtatatcgccgtggttgcttcgtatcgaactggacagaaagagaatgacagataagaaactaactatggaacaaattgctgaaaagatcaacgctgggttcggggacgatttgaattgtattttcaacgacgacaatgctgaaaagttggtgttgcgtatcagaatcatgaacagcgacgatggaaaattcggagaaggtgctgatgaggacgtagacaaaatggatgacgacatgtttttgagatgcattgaagcgaacatgctcagtgatatgaccttgcaaggtatagaagcgatttccaaggtatacatgcacttgccacagactgactcgaaaaaaaaggatcgtcatcactgaaacaggcgaatttaaggccatcgcagaatggctattggaaactgacggtaccagcatgatgaaagtactgtcagaaagagacgtcgatccggtcagaacgttttctaacgacatttgtgaaatattttcggtacttggtatcgaggctgtgcgtaagtctgtagagaaggaaatgaacgctgtcctttcattctacggtctgtacgtaaactatcgccatcttgccttgctttgtgacgtaatgacagccaaaggtcacttaatggccatcacccgtcacggtatcaacagacaagacactggagctctgatgaggtgttccttcgaggaaactgtagatgtattgatggacgctgccagtcatgcggaggtcgacccaatgagaggagtatctgaaaacattatcctcggtcaactaccaagaatgggcacaggctgcttcgatcttttgctggacgccgaaaaatgtaaaatgggaattgccatacctcaagcgcacagcagcgatctaatggcttcaggaatgttctttggattagccgctacacccagcagtatgagtccaggtggtgctatgaccccatggaatcaagcagctacaccatacgttggcagtatctggtctccacagaatttaatgggcagtggaatgacaccaggtggtgccgctttctccccatcagctgcgtcagatgcatcaggaatgtcaccagcttatggcggttggtcaccaacaccacaatctcctgcaatgtcgccatatatggcttctccacatggacaatcgccttcctacagtccatcaagtccagcgttccaacctacttcaccatccatgacgccgacctctcctggatattctcccagttctcctggttattcacctaccagtctcaattacagtccaacgagtcccagttattcacccacttctcagagttactccccaacctcacctagttactcaccgacttctccaaattattcacctacttccccaagctacagtccaacatcccctaactattcaccaacatctcccaactattcacccacttcacctagttatccttcaacttcgccaggttacagccccacttcacgcagctactcacccacatctcctagttactcaggaacttcgccctcttattcaccaacttcgccaagttactcccctacttctcctagttattcgccgtcgtctcctaattactctcccacttctccaaattacagtcccacttctcctaattactcaccgtcctctcctaggtacacgcccggttctcctagtttttccccaagttcgaacagttactctcccacatctcctcaatattctccaacatctccaagttattcgccttcttcgcccaaatattcaccaacttcccccaattattcgccaacatctccatcattttctggaggaagtccacaatattcacccacatcaccgaaatactctccaacctcgcccaattacactctgtcgagtccgcagcacactccaacaggtagcagtcgatattcaccgtcaacttcgagttattctcctaattcgcccaattattcaccgacgtctccacaatactccatccacagtacaaaatattcccctgcaagtcctacattcacacccaccagtcctagtttctctcccgcttcacccgcatattcgcctcaacctatgtattcaccttcttctcctaattattctcccactagtcccagtcaagacactgactaaatataatcataagattgtagtggttagttgtattttatacatagattttaattcagaatttaatattattttttactatttaccagggacatttttaaagttgtaaaaacacttacatttgttccaacggatttttgcacaaacgtaacgaagttaaatcaaaacattacaactgaaacatacgtcggtatgtactgtcaatgtgatcattaggaaatggctattatcccggaggacgtattttataaagttattttattgaagtgtttgatcttttttcactattgaggagatttatggactcaacattaaacagcttgaacatcataccgactactactaatataaagataaatatagaacggtaagaaatagattaaaaaaaaatacaataagttaaacagtaatcataaaaataaataagtttccgttccgacagaactatagccagattcttgtagtataatgaaaatttgtaggttaaaaatattacttgtcacattagcttaaaaataaataattaccggaagtaatcaaataagagagcaacagttagtggttctaacaattaggtttgaaaataaaaattataatgaaatatacaaagactaaaagtttaaataatatgaaaaccatttttaaccctccgttagtcgctatcggtgtcacacaccgacgacagaattattcattcgggatttacaaaataactgtttttttctatcgccactttctgtacctcttcctatcaactaacctcgtgttagtttacattcttacctacttgggtacagttgtgcgagttttatagctattttcggtgcaagactccgtagcgactaacggtgtggttattactttattggcataacttgcagttcaggtaaagatttagcatcttattattgcattttatcggtaagttttggtcaaatcttatttatagatgtcctttgaagccgaacaaaaacgttttgcaattgtgggaaatggttcctagcgaatatttttatattacaaataacaatatgtatattgttatactagggtttttcattttatatctattgtttttcaataaaacattttcaaaaatatttttcagtcattcttatatacaatataaaatattttgtttgaattttatagcaataactatttttttaattgtcggtctctgacaccgtagcgactcttgatgctccgtttatcctagcgactaacggagggttaagagattgatcagcatcttattaattcgattaattaattaattattttaattactattcatggaaacaaaaccaaatttaatgaaactttccaatgaaatttattctcagggctaattgattttaaagtattacctttagtttgtggcttctagtatttctcgttgctcacttcatccaggac

SEQ ID NO: 3024 - DNA, 4590 bp, Diabrotica virgifera
  SmartBlast Evalue=0; Info=DNA-directed RNA polymerase II subunit RPB1 n=3 Tax=Endopterygota RepID=E2AC10_9HYME
ggtaaacgtattccatttggcttcagaaaacgcacgttgccgcacttcatcaaggacgattacggtcctgaatccagaggtttcgtagaaaattcgtatcttgccggtctcactccttcggagttctatttccacgctatgggaggtcgtgaaggtcttatcgatactgctgtaaaaactgccgaaactggttacatccaacgtcgtctgatcaaggctatggagagtgtaatggtacattacgacggtaccgtaagaaattctgtaggacaacttatccagctgagatacggtgaagacggactctgtggagagatggtagagtttcaatatttagcaacagtcaaattaagtaacaaggcgtttgagagaaaattcagatttgatccaagtaatgaaaggtatttgagaagagttttcaatgaagaagttatcaagcaactgatgggttcaggggaagtcatttccgaacttgagagagaatgggaacaactccagaaagacagagaagccttaagacaaatcttccctagcggagaatctaaagtagtactcccctgtaacttacaacgtatgatctggaatgtacaaaaaattttccacataaacaaacgagccccgacagacctgtccccgttaagagttatccaaggcgttcgagaattactcaggaaatgcgtcatcgtagctggcgaggatcgtctgtccaaacaagccaacgaaaacgcaacgttactcttccagtgtctagtcagatcgaccctctgcaccaaatgcgtttctgaagaattcaggctcagcaccgaagccttcgagtggttgataggagaaatcgagacgaggttccaacaagcccaagccaatcctggagaaatggtgggcgctctggccgcgcagtcactgggagaacccgctactcagatgacactgaacactttccattttgctggtgtatcctccaagaacgtaaccctgggtgtacctagattaaaggaaattattaatatttccaagaaacccaaggctccatctctaaccgtgtttttaactggtgcggctgctagagatgcggaaaaagcgaagaatgtgttatgcagacttgaacacaccactcttcgtaaagtaaccgccaacaccgccatctattacgatcctgacccacaaaataccgtcattcctgaggatcaggagttcgttaacgtctactatgaaatgcccgatttcgatcctacccgtatatcgccgtggttgcttcgtatcgaactggacagaaagagaatgacagataagaaactaactatggaacaaattgctgaaaagatcaacgctgggttcggggacgatttgaattgtattttcaacgacgacaatgctgaaaagttggtgttgcgtatcagaatcatgaacagcgacgatggaaaattcggagaaggtgctgatgaggacgtagacaaaatggatgacgacatgtttttgagatgcattgaagcgaacatgctcagtgatatgaccttgcaaggtatagaagcgatttccaaggtatacatgcacttgccacagactgactcgaaaaaaaaggatcgtcatcactgaaacaggcgaatttaaggccatcgcagaatggctattggaaactgacggtaccagcatgatgaaagtactgtcagaaagagacgtcgatccggtcagaacgttttctaacgacatttgtgaaatattttcggtacttggtatcgaggctgtgcgtaagtctgtagagaaggaaatgaacgctgtcctttcattctacggtctgtacgtaaactatcgccatcttgccttgctttgtgacgtaatgacagccaaaggtcacttaatggccatcacccgtcacggtatcaacagacaagacactggagctctgatgaggtgttccttcgaggaaactgtagatgtattgatggacgctgccagtcatgcggaggtcgacccaatgagaggagtatctgaaaacattatcctcggtcaactaccaagaatgggcacaggctgcttcgatcttttgctggacgccgaaaaatgtaaaatgggaattgccatacctcaagcgcacagcagcgatctaatggcttcaggaatgttctttggattagccgctacacccagcagtatgagtccaggtggtgctatgaccccatggaatcaagcagctacaccatacgttggcagtatctggtctccacagaatttaatgggcagtggaatgacaccaggtggtgccgctttctccccatcagctgcgtcagatgcatcaggaatgtcaccagcttatggcggttggtcaccaacaccacaatctcctgcaatgtcgccatatatggcttctccacatggacaatcgccttcctacagtccatcaagtccagcgttccaacctacttcaccatccatgacgccgacctctcctggatattctcccagttctcctggttattcacctaccagtctcaattacagtccaacgagtcccagttattcacccacttctcagagttactccccaacctcacctagttactcaccgacttctccaaattattcacctacttccccaagctacagtccaacatcccctaactattcaccaacatctcccaactattcacccacttcacctagttatccttcaacttcgccaggttacagccccacttcacgcagctactcacccacatctcctagttactcaggaacttcgccctcttattcaccaacttcgccaagttactcccctacttctcctagttattcgccgtcgtctcctaattactctcccacttctccaaattacagtcccacttctcctaattactcaccgtcctctcctaggtacacgcccggttctcctagtttttccccaagttcgaacagttactctcccacatctcctcaatattctccaacatctccaagttattcgccttcttcgcccaaatattcaccaacttcccccaattattcgccaacatctccatcattttctggaggaagtccacaatattcacccacatcaccgaaatactctccaacctcgcccaattacactctgtcgagtccgcagcacactccaacaggtagcagtcgatattcaccgtcaacttcgagttattctcctaattcgcccaattattcaccgacgtctccacaatactccatccacagtacaaaatattcccctgcaagtcctacattcacacccaccagtcctagtttctctcccgcttcacccgcatattcgcctcaacctatgtattcaccttcttctcctaattattctcccactagtcccagtcaagacactgactaaatataatcataagattgtagtggttagttgtattttatacatagattttaattcagaatttaatattattttttactatttaccagggacatttttaaagttgtaaaaacacttacatttgttccaacggatttttgcacaaacgtaacgaagttaaatcaaaacattacaactgaaacatacgtcggtatgtactgtcaatgtgatcattaggaaatggctattatcccggaggacgtattttataaagttattttattgaagtgtttgatcttttttcactattgaggagatttatggactcaacattaaacagcttgaacatcataccgactactactaatataaagataaatatagaacggtaagaaatagattaaaaaaaaatacaataagttaaacagtaatcataaaaataaataagtttccgttccgacagaactatagccagattcttgtagtataatgaaaatttgtaggttaaaaatattacttgtcacattagcttaaaaataaataattaccggaagtaatcaaataagagagcaacagttagtggttctaacaattaggtttgaaaataaaaattataatgaaatatacaaagactaaaagtttaaataatatgaaaaccatttttaaccctccgttagtcgctatcggtgtcacacaccgacgacagaattattcattcgggatttacaaaataactgtttttttctatcgccactttctgtacctcttcctatcaactaacctcgtgttagtttacattcttacctacttgggtacagttgtgcgagttttatagctattttcggtgcaagactccgtagcgactaacggtgtggttattactttattggcataacttgcagttcaggtaaagatttagcatcttattattgcattttatcggtaagttttggtcaaatcttatttatagatgtcctttgaagccgaacaaaaacgttttgcaattgtgggaaatggttcctagcgaatatttttatattacaaataacaatatgtatattgttatactagggtttttcattttatatctattgtttttcaataaaacattttcaaaaatatttttcagtcattcttatatacaatataaaatatttgtatgaattttatagcaataactatttttttttttaaaattgtcggtctctgacaccgtagcgactcttgatgctccgtttgtcctagcgactaacggaggttaaacagct

SEQ ID NO: 3025 - DNA, 4444 bp, Diabrotica virgifera
  SmartBlast Evalue=0; Info="Succinate dehydrogenase [ubiquinone] flavoprotein subunit, mitochondrial n=3 Tax=Aculeata RepID= E2B4M1_9HYME"
aattatttcattttgcattaaccaaaaaaacagacaaatacagggttaaaaacagtgcgggattttcggtttattaattaattcaagaagcaattaaatatgagtagcatactaaaacttcaagcggcgtgtctaaaaaatgtaataggaaattcaatcaagctaaattccttggttaagcccatagctgctaccaggaaccttcacatccaagtcgacaggaaaaatgccagttcaagcgactcagtgtcgaaggtttaccccattgtagatcacacatacgatgcagtggttgttggtgctggaggagctggtcttagggctgcctatggcttggtacaagagggctttaagactgctgtcatcacaaaattgttccctacgaggtcgcacactgtggctgcccagggtggtatcaatgcagcattaggtaacatggaggaagacaactggcaatggcacatgtacgatacagtgaagggttccgattggcttggagaccaggatgctattcattacatgaccagggaagccccgaaggctgtcatcgaattagaaaacgctggcatgccattctcgagaacacaagaaggaaaaatctaccaaagagcttttggtggccagtccttgaagtttggaaaaggtggacaagcccacaggtgctgttgtgtcgccgataggaccggccacagtctacttcacaccctgtatggtcaaagtttaagatacgactgcaactatttcgtagaatatttcgctttagacttaatcatggaaggtggagagtgccgaggagtcatcgctctatgcctagaggatggtactttgcataggttcagagccaagaacacaattctggccacgggaggatatggtagagcgtacttctcatgcacttcagctcatacatgtactggtgatggtactgctatggtagctagagccggcttgccttctcaagatctcgaatttgtacagttccatcctactggtatttatggtgctggatgcctaatgacagaaggatgtagaggcgaaggaggctacctcatcaactctcaaggtgaacgatttatggaacgatacgcaccagtagctaaagatttagcttccagagatgtagtgtctagaagtatgaccatcgaaatcagagaaggccgtggctgcggacctgacaaagaccacgtctacctgcagctccaccatttgccagctgaacagttgcaccaaaggttgccaggtatctcagaaactgcgatgatctttgccggtgtcgatgttactagggaacccattccagtattaccaactgtacactacaatatgggaggagtacccaccaactataaaggacaggtattaactaccgttaacggtgaagacaaacgcgttcacggactatacgcttgtggtgaagctgcttcttcatctgtacacggtgctaacagactcggtgccaattctcttcttgacttggtcgtcttcggaagggcttgtgctttaaccattgctgaagaacacaaacccggcgaatctattggcagtattaaagataatgctggtgaagaatccgttgccaacttggactgggctcgatttgcaaacggtgccattcccacagctgacttaagattgcaaatgcaaaagactatgcaagtccatgctgctgtattccgtactgaagactcattgaaagaaggcgttaccaaaatggagaacttgtatggaaaaatgaaggatctcaaagtttctgacagcagcttgatctggaacacagatttggtagaaacgttcgagcttcaaaacttgatgttgaatgccgtacagaccatcgtcggtgcagaaaatagaaaagaatcacgaggtgctcacgcaagagaggattacaagctacgagttgacgaatacgactacagcaagccattggaaggacaacaaaagaaaccgtcgacagaacattggagaaaacacaccttgactacaatcgacgacaagacaggtaaggtcaacatcacctacagagaagtcatcgacgataccttagacaagagcgagtgtgccaccgtacctccagcaattagatcttactagtttacgcaacagcgcaaaaattatataaaaccgcaaacacagctactcaagaatttgtcaaatctattatagtgtctgaaattatggaaacctaacctcaattgtatgttaacaatgtcaaataatctgtcagtaagtatgacaagtgacatatgattgattatcgttttacgtttctttgacgtaccaagtttgtttttaaatgtttttttttactgaaaacgatgttttcttaatatttttttaccacatagtgccatttattagtacaaaaacacaacatgaagtcgattttctaagtttttaacagtcgttaattttagatcgggtaagtctgtgatttattggctaacgatgctccatctacagttctaaatgttacttttgaatcggaagaggtacccgcacatgcaaagggtagaaaaactagttcgaacatacataactatttgtccattgctgtggaacaccaatggcctacaaaaatgaagatatcagttattttataccgaaaatatgtttcaattgcacagatattccttgctaccgaaagttatcaaatcaaatgtgtactattacatcaaatacatgagtgtccaaactaactgttgcttgtataatatggcatttctctgttaatatgtccgattgcagttgaaacaaaattcatcattttcaaatagaaacattttacgactatgtctttgacgtttattgaactttactgaactattgtcatagactacctctgtttgaatagatagaggagtttacatagttgccatatttcgaactttatccgacgattcaaatattttacttcaatagccaataattgtatttttagtggttccataatttcagaatttagtatactttgtctgtaagcacatttaatcataatctaaggggcgcgtacttaaaaacgaacaagaacgacggttgtgtgctctttctagttgtttttcgattgaacaaatcacgtcaagtattttatttttgtgatatattatatctacagtatattcgataatttatttgttgttaataggtatagatctatttccaaaaatatttgcaataaaaaacaagtctgtttcaaagctacaatattttgcgttttttgtgaagctgaatcgcgttaatttttcaattaggcacagggtgccaaatgcggcatcattgatggatatgaacctccactttcagcgctgcctctccgactattaggagtgagtttagttttttcatacatacaatgttgccatttacttgaagtatgcctaattttaaaattgcatagattatgactttgttttttattgtatcttaataaactctcgttcaaagtcaaaaataatgttctggtacaatattttgaagcagtttcggtctaaaaagacgttatttttgaatgggatttcagttactataaatttataataaaaatacttatcgagtggatttttttgaacgagggtgtattgagttttcttatttaaacttcttttctactaaagtattctaatttattttgtacttagttcagattttgtgaattaatgaaatcatatattaaatattgtcaatacaaaaaaccttcatatgcgttgcatagtgaaggtttttagacttttgtgattatattcactaacaaaatctgaaaaacattgttaaaattatccggtacattcaaaattgttgttacttttgatcaacattcattgaaattaccaacattgattgatctgcttaattaaatcagatctattgctcaatgatctattttagcttgctgtgtgctgttttggaaaatatttgcttacttttcaaaagcgcaattttgttcctgactgctgacatggtccttagggccgtattgataaattcaacaatgaatattgatcaatgtatatattttgtaaatagtatttgtattttaacttattttttattgtgagttgatttttgggaggcgaatattgttcatcacaagattaaaattagtgtcataccggttcttgagttacctcattatttattaatcttcttgttcaacgaatcgttattttaaaatgcgcaatattggaatgtcccaaaacgttctttgaggaatagttttgttagcaataaatttttgttgtgattttgggacagtggaggatatgtcaaattctaagaaccaaattcgtaaacattaataagaaaatcgtcgattttaagtttcactaaattctaaccaattggtataataataagtaaacgtgtgtatagtgactttttcactgaaatttaagtattttgtaagagatatatttggagtttgttacggagatgcgatatgaatgtaaat

SEQ ID NO: 3026 - DNA, 3950 bp, Diabrotica virgifera
  SmartBlast Evalue=0; Info="Succinate dehydrogenase [ubiquinone] flavoprotein subunit, mitochondrial n=3 Tax=Aculeata RepID= E2B4M1_9HYME"
aattatttcattttgcattaaccaaaaaaacagacaaatacagggttaaaaacagtgcgggattttcggtttattaattaattcaagaagcaattaaatatgagtagcatactaaaacttcaagcggcgtgtctaaaaaatgtaataggaaattcaatcaagctaaattccttggttaagcccatagctgctaccaggaaccttcacatccaagtcgacaggaaaaatgccagttcaagcgactcagtgtcgaaggtttaccccattgtagatcacacatacgatgcagtggttgttggtgctggaggagctggtcttagggctgcctatggcttggtacaagagggctttaagactgctgtcatcacaaaattgttccctacgaggtcgcacactgtggctgcccagggtggtatcaatgcagcattaggtaacatggaggaagacaactggcaatggcacatgtacgatacagtgaagggttccgattggcttggagaccaggatgctattcattacatgaccagggaagccccgaaggctgtcatcgaattagaaaacgctggcatgccattctcgagaacacaagaaggaaaaatctaccaaagagcttttggtggccagtccttgaagtttggaaaaggtggacaagcccacaggtgctgttgtgtcgccgataggaccggccacagtctacttcacaccctgtatggtcaaagtttaagatacgactgcaactatttcgtagaatatttcgctttagacttaatcatggaaggtggagagtgccgaggagtcatcgctctatgcctagaggatggtactttgcataggttcagagccaagaacacaattctggccacgggaggatatggtagagcgtacttctcatgcacttcagctcatacatgtactggtgatggtactgctatggtagctagagccggcttgccttctcaagatctcgaatttgtacagttccatcctactggtatttatggtgctggatgcctaatgacagaaggatgtagaggcgaaggaggctacctcatcaactctcaaggtgaacgatttatggaacgatacgcaccagtagctaaagatttagcttccagagatgtagtgtctagaagtatgaccatcgaaatcagagaaggccgtggctgcggacctgacaaagaccacgtctacctgcagctccaccatttgccagctgaacagttgcaccaaaggttgccaggtatctcagaaactgcgatgatctttgccggtgtcgatgttactagggaacccattccagtattaccaactgtacactacaatatgggaggagtacccaccaactataaaggacaggtattaactaccgttaacggtgaagacaaacgcgttcacggactatacgcttgtggtgaagctgcttcttcatctgtacacggtgctaacagactcggtgccaattctcttcttgacttggtcgtcttcggaagggcttgtgctttaaccattgctgaagaacacaaacccggcgaatctattggcagtattaaagataatgctggtgaagaatccgttgccaacttggactgggctcgatttgcaaacggtgccattcccacagctgacttaagattgcaaatgcaaaagactatgcaagtccatgctgctgtattccgtactgaagactcattgaaagaaggcgttaccaaaatggagaacttgtatggaaaaatgaaggatctcaaagtttctgacagcagcttgatctggaacacagatttggtagaaacgttcgagcttcaaaacttgatgttgaatgccgtacagaccatcgtcggtgcagaaaatagaaaagaatcacgaggtgctcacgcaagagaggattacaagctacgagttgacgaatacgactacagcaagccattggaaggacaacaaaagaaaccgtcgacagaacattggagaaaacacaccttgactacaatcgacgacaagacaggtaaggtcaacatcacctacagagaagtcatcgacgataccttagacaagagcgagtgtgccaccgtacctccagcaattagatcttactagtttacgcaacagcgcaaaaattatataaaaccgcaaacacagctactcaagaatttgtcaaatctattatagtgtctgaaattatggaaacctaacctcaatggacagcctaagtctgacgtcacaaatgtcacaaaattgggaggagcttatattgactccaaacagttttgtttgtaacgttaaatggtcataaggaatttttcatttatgtgctttgtgtggcaaaataagacttcatttaggtatttcgttggagaaacgtgttaattaagagatttttattcgtttttgctcaggtggtttttattccttagtggttgaaaataaacataacctcaaaactgtttacgttctaatcattgcattaaattaactcacctgggcaaaaacgaataaaaatctcttaattgacacgtttctttactaaatacctaaatgaaaagtcttattttgtcacacaaaccacgtaaacaataaattaaaaattccttatgagtgtttaacattataaacagaattgtttggagtcaattataagctcctcccaattttgtgacgtcaagacttaggatgtccattcaacaaagcttcatcttaattcttaatctagtcttttggaccttggcgattttccatgtcaatttttataaggatatctactttcattagtcgtaactatttgcatctgtttatttttacaccgatctttttagttcaaagttacatatccaattttaattttatactgttgcgtttgaaaaatttaacattagagtgccacttgaactataaatactttcatctttattctacattatacaaaaaataaataacctattatttggtcaatcacctaatctctcaagaaatcaacccgaacagtcaatcggtgctttttaaaattctcacaagcagtatttgtcggtgttgtaccaccatttttaaagctataagctgtagtataagctatcataataaccagtcataaattggttcttgtcatacgtaaatactttcataagctatagctaagctaggcttaaagtgacctaaacattgattcaactaacgagtgtagaacccattaaaaatgggtccaaaatgtgtacccttctagtgtcatctatcaatgtataaaactgaaaattatttactacagagcaatgatccatcgttgctttgtaaattcttgtgatgtaaaacgtatgacgagtttcgataataaaggtaaaaagtaacatataaaaactattattctttcttacaaattcagttccacataatcaatttaaaaaatatgacatataatgtcaactgacgtaacaacgttatgacgtagaacacttcttttatacttttcacttgttatacttcaccacactgtgacttcttcccttattaaggtatatgtaacaagaaaagtcagagtaaggcgaaacatgccaaaaacatgttaattataagcaaattagggtagaagtgtcacaaaaatgtagttttaatttaaatattttatataataatggaattttgtcagataagagtcccttgagtttgatatatgtatattttcgttatttaaaaagtttctatgtcccttgaatagtcaactttgtgcaagcataaatttgaacatgtgattgatgacgtgaaacggattttgtagaaaaaacattacacatcgtaaaactaacctatatctttttgtaaaaacataaatcacaaaattcataatcaataaaaatcaaaattactttgaaaatacttcgtggtaactcgacgaataaacttaaccgctaaaattaaaatgtaaacaatgatataaaaacatgtataaaaatatacaacaaatatgt

SEQ ID NO: 3027 - DNA, 2279 bp, Diabrotica virgifera
  SmartBlast Evalue=2E-22; Info=Endonuclease-reverse transcriptase n=1 Tax=Bombyx mori RepID=D7F170_BOMMO
tcggatactttctttcgccactgcttgatgttcatggttttaagatcgcaatctacgtcgtatatccatcttttacaggaccttcctcctgttctatttccttagggcttccatctctggattacttttacagctcgattatctggcattctttttaagtgacgaagccagtttagtctttgtgactttacaaatttaacaatatctgcgctctgtattagtttatccagctcgtagttcattttaaattatccacgaaccatcgctgcaatgtggtggtccaaatatctttcttagtattttgcgatcaaatattctcagttgatgttcatctgtggttgagaaagtccacatatcgtatccatatctgaacattggtcgaattactgttttgtagattctaatcgactcacgattcaataacttacttttcattaagtgtttgtacgcataaaagaacttattaccgctaagaatccatgcttgtatttcttgactggtattgttgttgtcatttattatggacagcctaagtctgacgtcacaaatgtcacaaaattgggaggagcttatattgactccaaacagttttgtttgtaacgttaaatggtcataaggaatttttcatttatgtgctttgtgtggcaaaataagacttcatttaggtatttcgttggagaaacgtgttaattaagagatttttattcgtttttgctcaggtggtttttattccttagtggttgaaaataaacataacctcaaaactgtttacgttctaatcattgcattaaattaactcacctgggcaaaaacgaataaaaatctcttaattgacacgtttctttactaaatacctaaatgaaaagtcttattttgtcacacaaaccacgtaaacaataaattaaaaattccttatgagtgtttaacattataaacagaattgtttggagtcaattataagctcctcccaattttgtgacgtcaagacttaggatgtccattcaacaaagcttcatcttaattcttaatctagtcttttggaccttggcgattttccatgtcaatttttataaggatatctactttcattagtcgtaactatttgcatctgtttatttttacaccgatctttttagttcaaagttacatatccaattttaattttatactgttgcgtttgaaaaatttaacattagagtgccacttgaactataaatactttcatctttattctacattatacaaaaaataaataacctattatttggtcaatcacctaatctctcaagaaatcaacccgaacagtcaatcggtgctttttaaaattctcacaagcagtatttgtcggtgttgtaccaccatttttaaagctataagctgtagtataagctatcataataaccagtcataaattggttcttgtcatacgtaaatactttcataagctatagctaagctaggcttaaagtgacctaaacattgattcaactaacgagtgtagaacccattaaaaatgggtccaaaatgtgtacccttctagtgtcatctatcaatgtataaaactgaaaattatttactacagagcaatgatccatcgttgctttgtaaattcttgtgatgtaaaacgtatgacgagtttcgataataaaggtaaaaagtaacatataaaaactattattctttcttacaaattcagttccacataatcaatttaaaaaatatgacatataatgtcaactgacgtaacaacgttatgacgtagaacacttcttttatacttttcacttgttatacttcaccacactgtgacttcttcccttattaaggtatatgtaacaagaaaagtcagagtaaggcgaaacatgccaaaaacatgttaattataagcaaattagggtagaagtgtcacaaaaatgtagttttaatttaaatattttatataataatggaattttgtcagataagagtcccttgagtttgatatatgtatattttcgttatttaaaaagtttctatgtcccttgaatagtcaactttgtgcaagcataaatttgaacatgtgattgatgacgtgaaacggattttgtagaaaaaacattacacatcgtaaaactaacctatatctttttgtaaaaacataaatcacaaaattcataatcaataaaaatcaaaattactttgaaaatacttcgtggtaactcgacgaataaacttaaccgctaaaattaaaatgtaaacaatgatataaaaacatgtataaaaatatacaacaaatatgt

SEQ ID NO: 3028 - DNA, 1852 bp, Diabrotica virgifera
agttttattaatgtccatatttatttaaaaatacttcaacatcttaaatgacagacaaattttaggttttgaaagacttcaaacacatattgtacggtcataatggacagcctaagtctgacgtcacaaaattgggaggagcttatattgactccaaacagttttgtttgtaacgttaaatggtcataaggaatttttcatttatgtgctttgtgtggcaaaataagacttcatttaggtatttcgttggagaaacgtgttaattaagagatttttattcgtttttgctcaggtggtttttattccttagtggttgaaaataaacataacctcaaaactgtttacgttctaatcattgcattaaattaactcacctgggcaaaaacgaataaaaatctcttaattgacacgtttctttactaaatacctaaatgaaaagtcttattttgtcacacaaaccacgtaaacaataaattaaaaattccttatgagtgtttaacattataaacagaattgtttggagtcaattataagctcctcccaattttgtgacgtcaagacttaggatgtccattcaacaaagcttcatcttaattcttaatctagtcttttggaccttggcgattttccatgtcaatttttataaggatatctactttcattagtcgtaactatttgcatctgtttatttttacaccgatctttttagttcaaagttacatatccaattttaattttatactgttgcgtttgaaaaatttaacattagagtgccacttgaactataaatactttcatctttattctacattatacaaaaaataaataacctattatttggtcaatcacctaatctctcaagaaatcaacccgaacagtcaatcggtgctttttaaaattctcacaagcagtatttgtcggtgttgtaccaccatttttaaagctataagctgtagtataagctatcataataaccagtcataaattggttcttgtcatacgtaaatactttcataagctatagctaagctaggcttaaagtgacctaaacattgattcaactaacgagtgtagaacccattaaaaatgggtccaaaatgtgtacccttctagtgtcatctatcaatgtataaaactgaaaattatttactacagagcaatgatccatcgttgctttgtaaattcttgtgatgtaaaacgtatgacgagtttcgataataaaggtaaaaagtaacatataaaaactattattctttcttacaaattcagttccacataatcaatttaaaaaatatgacatataatgtcaactgacgtaacaacgttatgacgtagaacacttcttttatacttttcacttgttatacttcaccacactgtgacttcttcccttattaaggtatatgtaacaagaaaagtcagagtaaggcgaaacatgccaaaaacatgttaattataagcaaattagggtagaagtgtcacaaaaatgtagttttaatttaaatattttatataataatggaattttgtcagataagagtcccttgagtttgatatatgtatattttcgttatttaaaaagtttctatgtcccttgaatagtcaactttgtgcaagcataaatttgaacatgtgattgatgacgtgaaacggattttgtagaaaaaacattacacatcgtaaaactaacctatatctttttgtaaaaacataaatcacaaaattcataatcaataaaaatcaaaattactttgaaaatacttcgtggtaactcgacgaataaacttaaccgctaaaattaaaatgtaaacaatgatataaaaacatgtataaaaatatacaacaaatatgt

SEQ ID NO: 3029 - DNA, 3081 bp, Diabrotica virgifera
ggcttatatataaaatcatttttttaaataaattatggtttatttcccatttagaatagttgattacaaaaattccacaggaaatagcttcagaacaatcatttatgtgttacagattataaaaatgcacaaaaaaataacttttcttttcaataacacacaaagcatgtaggtcatccagaaagaattcattttatacccataatacagctaaatttgtgaaagtttttccaggattcttgattttagtcgacatcagcttttcatatcgttttacagattctttagtatgtagttttttcctgcctttcttttttttgaagaggaatttacttgaagatgcagtggtgggtactgtttgtccaaaggaggatcatagataggaccacaccagacttccttcgtcaaattcccttagtcgtgaatagcttggattttcaactttcaagttaacgttggcctgaccagtttctcattagtttttgagacgatggtagtatcacgtacttccatgcttgttgttccatgttactgcaggttacaccgggtctagccacgtacttaaggatagtggcgacaggtattggaaagcagtatcactaattacatttccaaaagcaagtagcaatctgtatcaccacaatttggtctgggagcagacctgctgcacgcttcccgtattgacaggaagtctttgcacagcaggcaggacgcaaagctcagtggaacccaagatcccaccgaactccacgcccgctcaaggaaccgtgtcaagataaatgggattgttcacgaaaatctcccctcgtcccatggtaagaagaatgctgacgctgagtaatctagcaactcccttttggtttaggtagggctatgcaaggtgaaacatgtgtttttatcctaacatgctctaacgaggccgtctctagttagggtgttacgtcagccattaacgtggaggtcctcttttccagtcacagatgtaacttaatgtatagttagatctagcctacaaaggtttgcagatggggcagttcctaggatttttggaatggtgaatctattggcctcacttgagccttttgaaatattgatcttttactattttgattgatttgggaagccataaattgtatagcatgttgtagataatcccaaggtcctcatctgttcggtaagtattcaaagcaatgtagtttttgacagttttcttagtccttttgcttcctaattcagggttgtgatgaaatgtgttactgaaaagagctaaagttactttatacctgtatcattttgccacctttcacattggacttatcactgcccaacattatacacaatatagtatagcaatgtattaaatgttatacattttgtagaggtaaactttttctgtgaaaaaatactaaatgtactggtcaacttatgtaatctttaatttttgaaagttgaaatatgaacgtctagaatgaaataggtacagaaagtattaaagataaattggtgcaatactggttagttgttcttgagaatagtttgaccaacagcacttttttatactggagatatagtccttttagatagaagtaattattccccgcctagatgattagttgagttttatcactatttttgtttgtttgctcctgtttggtactacgagcatttagggaatggaagaaggctcaccgaagcctgggtgtcgcctggtacccggaattgagccgtttttaccttccactcgatcgtgtccatctcccagaagtagcatctgtgactgagcacgaggtgcgctctttcaccacgacaagagttcacgatttttggcgaagatcagtcaaactaacccatatggtaaattagattacttcttatggttatatctaacccttcctaagcttcatctgatttacctcatcagcagtattttctgttcattacagaaatgttaatttcttccggtaccgtcagttatgttcgtcactttgatcaacatagtttggtaaggttatattgtatcaagagtgtttaagacatcaagggtactatttttgctgggagtactagtagaatactagtgcaacatgtttaaagttgaagcttggaaacaaaacaaaaggaaccgaactgaatcatctctaaatccataccggaccaagcttttttggagcgccatttgcaactacatattgtacagttatctactacatttaataagaattaacgtattttcaatcaaaattgtggttaattccaattgcatgtagtagataacatagaaataccacaaggaaatagtttcaaaacaacacattttacagtgtatattcatcaaaatggtgtagattgttatcgctctatttcacacagtttttggtacgtttaagctggattgcaaagccagtcataacggctggataaaagaatatatattgagtttcgttctaaacgttcacatttttctcttttgtctttctagactttaaaacttctgttacaggttttcatagattttctcaagtgctatctgtcttatcaaagattttattacatattaataattattttagtgaatatatcattttgtctgtaaatattgtttttgcacactgaaaccattgcttggagcacttcaaccagagccctggactgtaaggactcttggttctgattgaagctgatttcactgcgcatgttctacatttaaggaactatcgaagcctttgtgtactatcggcttgacacatcttcgtcttaagacagattttaacattttctttttgttaataattttatcatgtatatataagttttatcataggttttataggtcccggtaccgttaaatccatggaactagttctgtgtttgaaagggatttttgtttagaaaagctcgttggtaccggtaccatttgttattttcatagtatatattctagcttggtttcttctgaaacggatagattagctgtttcttcggaaggagtcaagtgtattatgtgtaaatttttagtctgttagttttgtttttttttctttaatgtgtataaacctagttttatcacttccttatttgcat

SEQ ID NO: 3030 - DNA, 3081 bp, Diabrotica virgifera
ggcttatatataaaatcatttttttaaataaattatggtttatttcccatttagaatagttgattacaaaaattccacaggaaatagcttcagaacaatcatttatgtgttacagattataaaaatgcacaaaaaaataacttttcttttcaataacacacaaagcatgtaggtcatccagaaagaattcattttatacccataatacagctaaatttgtgaaagtttttccaggattcttgattttagtcgacatcagcttttcatatcgttttacagattctttagtatgtagttttttcctgcctttcttttttttgaagaggaatttacttgaagatgcagtggtgggtactgtttgtccaaaggaggatcatagataggaccacaccagacttccttcgtcaaattcccttagtcgtgaatagcttggattttcaactttcaagttaacgttggcctgaccagtttctcattagtttttgagacgatggtagtatcacgtacttccatgcttgttgttccatgttactgcaggttacaccgggtctagccacgtacttaaggatagtggcgacaggtattggaaagcagtatcactaattacatttccaaaagcaagtagcaatctgtatcaccacaatttggtctgggagcagacctgctgcacgcttcccgtattgacaggaagtctttgcacagcaggcaggacgcaaagctcagtggaacccaagatcccaccgaactccacgcccgctcaaggaaccgtgtcaagataaatgggattgttcacgaaaatctcccctcgtcccatggtaagaagaatgctgacgctgagtaatctagcaactcccttttggtttaggtagggctatgcaaggtgaaacatgtgtttttatcctaacatgctctaacgaggccgtctctagttagggtgttacgtcagccattaacgtggaggtcctcttttccagtcacagatgtaacttaatgtatagttagatctagcctacaaaggtttgcagatggggcagttcctaggatttttggaatggtgaatctattggcctcacttgagccttttgaaatattgatcttttactattttgattgatttgggaagccataaattgtatagcatgttgtagataatcccaaggtcctcatctgttcggtaagtattcaaagcaatgtagtttttgacagttttcttagtccttttgcttcctaattcagggttgtgatgaaatgtgttactgaaaagagctaaagttactttatacctgtatcattttgccacctttcacattggacttatcactgcccaacattatacacaatatagtatagcaatgtattaaatgttatacattttgtagaggtaaactttttctgtgaaaaaatactaaatgtactggtcaacttatgtaatctttaatttttgaaagttgaaatatgaacgtctagaatgaaataggtactaaaagtactggagataaatttgcgcaatactggttagctgttcttgagaactgtttggccaacagctcttttttatactggaaatacagtccttttagatagaagtacttattccccgcctagatgattggttgagtttcatcactatttttgtttgtttgttcctgttttgtactacgagcatttagggaatggaagaaggctcaccgaagcctgggtgtcgcctggtacccggaattgagccgtttttaccttccactcgatcgtgtccatctcccagaagtagcatctgtgactgagcacgaggtgcgctctttcaccacgacaagagttcacgatttttggcgaagatcagtcaaactaacccatatggtaaattagattacttcttatggttatatctaacccttcctaagcttcatctgatttacctcatcagcagtattttctgttcattacagaaatgttaatttcttccggtaccgtcagttatgttcgtcactttgatcaacatagtttggtaaggttatattgtatcaagagtgtttaagacatcaagggtactatttttgctgggagtactagtagaatactagtgcaacatgtttaaagttgaagcttggaaacaaaacaaaaggaaccgaactgaatcatctctaaatccataccggaccaagcttttttggagcgccatttgcaactacatattgtacagttatctactacatttaataagaattaacgtattttcaatcaaaattgtggttaattccaattgcatgtagtagataacatagaaataccacaaggaaatagtttcaaaacaacacattttacagtgtatattcatcaaaatggtgtagattgttatcgctctatttcacacagtttttggtacgtttaagctggattgcaaagccagtcataacggctggataaaagaatatatattgagtttcgttctaaacgttcacatttttctcttttgtctttctagactttaaaacttctgttacaggttttcatagattttctcaagtgctatctgtcttatcaaagattttattacatattaataattattttagtgaatatatcattttgtctgtaaatattgtttttgcacactgaaaccattgcttggagcacttcaaccagagccctggactgtaaggactcttggttctgattgaagctgatttcactgcgcatgttctacatttaaggaactatcgaagcctttgtgtactatcggcttgacacatcttcgtcttaagacagattttaacattttctttttgttaataattttatcatgtatatataagttttatcataggttttataggtcccggtaccgttaaatccatggaactagttctgtgtttgaaagggatttttgtttagaaaagctcgttggtaccggtaccatttgttattttcatagtatatattctagcttggtttcttctgaaacggatagattagctgtttcttcggaaggagtcaagtgtattatgtgtaaatttttagtctgttagttttgtttttttttctttaatgtgtataaacctagttttatcacttccttatttgcat

SEQ ID NO: 3031 - DNA, 3002 bp, Diabrotica virgifera
gttgattacaaaaatgccacatggaaatagcttcgaacaatcatttatgtgttacagattataagaatgctcaaaaaaaacttttcttttcaataacacacaaatcatgtaggtcatccagaaagaattcattttatacccacaatagagctaaagtgaaagtttttccaggattctcgatttcagtcgacaccagctcttcatatcgtctcaaagattctttagcggttttctcctgtttttttttatttttaaagaggaatttacttgaaggtgcagtgggtactatttgtccaaaggagaatcatagatacgaccacaccagacgccctccgtcaaattcccttagtcgtgaacagcttggcttttcaacattcaagttaacgttggcctgaccagtttctcattagtttttgagacggtcgtagtagcaagtacttccatgcatccggttacaccgggtctagccacgaacttaaggatagtgccgacaggtattggaaagcagtattactaattacatttccaaaagcaactagcactcagtattaccacaaaatcttctggtctgcgagaagacctgctgcatgcttcccgtattgacagaaaacctttgcacagcaggcaggattcaaagctcagtggaacccaagatcccacctagctccacgcttgctcaaggaaccgtgtcaagataaatgggattgttcatgggatcttcacatggtaagaagaatgctgatgctgagcaacctagcaacccccttttgggttaaggcagggctatacagggtgcaacttcgcatatacatgtgtttctatcctaacatgctccgacgaggccatctccagttagggtgttacgtcagtcattaacgtggatgtcctcttttccagtcacaggtgtcacttaatgtatgtgttaggtcaagcccacaaaggtttgcagatgtggcagtttctaggattgttggaatggtgaatcagttgacctcacttgagcctttttaaatattgatctaagatcttgattgatttgggaagccgtaaattgtatctcatgttgtagataatcccaaggtcctcatctgttcggtaagtattcaaagcaatgtagtttttgacagttttcttagtccttttgcttcctaattcagggttgtgatgaaatgtgttactgaaaagagctaaagttactttatacctgtatcattttgccacctttcacattggacttatcactgcccaacattatacacaatatagtatagcaatgtattaaatgttatacattttgtagaggtaaactttttctgtgaaaaaatactaaatgtactggtcaacttatgtaatctttaatttttgaaagttgaaatatgaacgtctagaatgaaataggtacagaaagtattaaagataaattggtgcaatactggttagttgttcttgagaatagtttgaccaacagcacttttttatactggagatatagtccttttagatagaagtaattattccccgcctagatgattagttgagttttatcactatttttgtttgtttgctcctgtttggtactacgagcatttagggaatggaagaaggctcaccgaagcctgggtgtcgcctggtacccggaattgagccgtttttaccttccactcgatcgtgtccatctcccagaagtagcatctgtgactgagcacgaggtgcgctctttcaccacgacaagagttcacgatttttggcgaagatcagtcaaactaacccatatggtaaattagattacttcttatggttatatctaacccttcctaagcttcatctgatttacctcatcagcagtattttctgttcattacagaaatgttaatttcttccggtaccgtcagttatgttcgtcactttgatcaacatagtttggtaaggttatattgtatcaagagtgtttaagacatcaagggtactatttttgctgggagtactagtagaatactagtgcaacatgtttaaagttgaagcttggaaacaaaacaaaaggaaccgaactgaatcatctctaaatccataccggaccaagcttttttggagcgccatttgcaactacatattgtacagttatctactacatttaataagaattaacgtattttcaatcaaaattgtggttaattccaattgcatgtagtagataacatagaaataccacaaggaaatagtttcaaaacaacacattttacagtgtatattcatcaaaatggtgtagattgttatcgctctatttcacacagtttttggtacgtttaagctggattgcaaagccagtcataacggctggataaaagaatatatattgagtttcgttctaaacgttcacatttttctcttttgtctttctagactttaaaacttctgttacaggttttcatagattttctcaagtgctatctgtcttatcaaagattttattacatattaataattattttagtgaatatatcattttgtctgtaaatattgtttttgcacactgaaaccattgcttggagcacttcaaccagagccctggactgtaaggactcttggttctgattgaagctgatttcactgcgcatgttctacatttaaggaactatcgaagcctttgtgtactatcggcttgacacatcttcgtcttaagacagattttaacattttctttttgttaataattttatcatgtatatataagttttatcataggttttataggtcccggtaccgttaaatccatggaactagttctgtgtttgaaagggatttttgtttagaaaagctcgttggtaccggtaccatttgttattttcatagtatatattctagcttggtttcttctgaaacggatagattagctgtttcttcggaaggagtcaagtgtattatgtgtaaatttttagtctgttagttttgtttttttttctttaatgtgtataaacctagttttatcacttccttatttgcat

SEQ ID NO: 3032 - DNA, 3002 bp, Diabrotica virgifera
gttgattacaaaaatgccacatggaaatagcttcgaacaatcatttatgtgttacagattataagaatgctcaaaaaaaacttttcttttcaataacacacaaatcatgtaggtcatccagaaagaattcattttatacccacaatagagctaaagtgaaagtttttccaggattctcgatttcagtcgacaccagctcttcatatcgtctcaaagattctttagcggttttctcctgtttttttttatttttaaagaggaatttacttgaaggtgcagtgggtactatttgtccaaaggagaatcatagatacgaccacaccagacgccctccgtcaaattcccttagtcgtgaacagcttggcttttcaacattcaagttaacgttggcctgaccagtttctcattagtttttgagacggtcgtagtagcaagtacttccatgcatccggttacaccgggtctagccacgaacttaaggatagtgccgacaggtattggaaagcagtattactaattacatttccaaaagcaactagcactcagtattaccacaaaatcttctggtctgcgagaagacctgctgcatgcttcccgtattgacagaaaacctttgcacagcaggcaggattcaaagctcagtggaacccaagatcccacctagctccacgcttgctcaaggaaccgtgtcaagataaatgggattgttcatgggatcttcacatggtaagaagaatgctgatgctgagcaacctagcaacccccttttgggttaaggcagggctatacagggtgcaacttcgcatatacatgtgtttctatcctaacatgctccgacgaggccatctccagttagggtgttacgtcagtcattaacgtggatgtcctcttttccagtcacaggtgtcacttaatgtatgtgttaggtcaagcccacaaaggtttgcagatgtggcagtttctaggattgttggaatggtgaatcagttgacctcacttgagcctttttaaatattgatctaagatcttgattgatttgggaagccgtaaattgtatctcatgttgtagataatcccaaggtcctcatctgttcggtaagtattcaaagcaatgtagtttttgacagttttcttagtccttttgcttcctaattcagggttgtgatgaaatgtgttactgaaaagagctaaagttactttatacctgtatcattttgccacctttcacattggacttatcactgcccaacattatacacaatatagtatagcaatgtattaaatgttatacattttgtagaggtaaactttttctgtgaaaaaatactaaatgtactggtcaacttatgtaatctttaatttttgaaagttgaaatatgaacgtctagaatgaaataggtactaaaagtactggagataaatttgcgcaatactggttagctgttcttgagaactgtttggccaacagctcttttttatactggaaatacagtccttttagatagaagtacttattccccgcctagatgattggttgagtttcatcactatttttgtttgtttgttcctgttttgtactacgagcatttagggaatggaagaaggctcaccgaagcctgggtgtcgcctggtacccggaattgagccgtttttaccttccactcgatcgtgtccatctcccagaagtagcatctgtgactgagcacgaggtgcgctctttcaccacgacaagagttcacgatttttggcgaagatcagtcaaactaacccatatggtaaattagattacttcttatggttatatctaacccttcctaagcttcatctgatttacctcatcagcagtattttctgttcattacagaaatgttaatttcttccggtaccgtcagttatgttcgtcactttgatcaacatagtttggtaaggttatattgtatcaagagtgtttaagacatcaagggtactatttttgctgggagtactagtagaatactagtgcaacatgtttaaagttgaagcttggaaacaaaacaaaaggaaccgaactgaatcatctctaaatccataccggaccaagcttttttggagcgccatttgcaactacatattgtacagttatctactacatttaataagaattaacgtattttcaatcaaaattgtggttaattccaattgcatgtagtagataacatagaaataccacaaggaaatagtttcaaaacaacacattttacagtgtatattcatcaaaatggtgtagattgttatcgctctatttcacacagtttttggtacgtttaagctggattgcaaagccagtcataacggctggataaaagaatatatattgagtttcgttctaaacgttcacatttttctcttttgtctttctagactttaaaacttctgttacaggttttcatagattttctcaagtgctatctgtcttatcaaagattttattacatattaataattattttagtgaatatatcattttgtctgtaaatattgtttttgcacactgaaaccattgcttggagcacttcaaccagagccctggactgtaaggactcttggttctgattgaagctgatttcactgcgcatgttctacatttaaggaactatcgaagcctttgtgtactatcggcttgacacatcttcgtcttaagacagattttaacattttctttttgttaataattttatcatgtatatataagttttatcataggttttataggtcccggtaccgttaaatccatggaactagttctgtgtttgaaagggatttttgtttagaaaagctcgttggtaccggtaccatttgttattttcatagtatatattctagcttggtttcttctgaaacggatagattagctgtttcttcggaaggagtcaagtgtattatgtgtaaatttttagtctgttagttttgtttttttttctttaatgtgtataaacctagttttatcacttccttatttgcat

SEQ ID NO: 3033 - DNA, 3623 bp, Diabrotica virgifera
agttcgcatacttattaaggtgtgaatgaagtttatcaaggtgtcttagatttctacttcgtctgtcttagatttatacatatgtaacattttcctgattattaacgaccatgacgcttactattttgtcagcctgaaggaagcaaaagaaactgatgtctatgcgacatatcttgaaggggttattgcaaagaaagtcgaggacgacgtgtatttgaaaaataacttgacagcattggaacaagaccatttaaagttactaagttttgaagaacgccaagctatatttgatgaatttgttacaacttacaagaactatagcaattcgtgtacggccaactatagcatattacaaaaagtttttaaagtaaacctggttcagttcataaatattttaaacaatacaatggaatcaaccgaaccaataaagcaacctaccagaaagaacgatatctttaatgacattgcaataataataataattttttcatttaaattgctgtattatctattcaaaagaattattttcccgttaaaaaaattgttatcatcaatatgggagaatttatcttccctgtttacaaatcgtaatcatagtaaccaagtacgatacacggccccggtacaaaaagaccagaatggaggaaaataaatgtacatatatgttaggcaagccgcacaccaaagaaacatcaaacgaaaaacatgaaacatgaaacgtaaaacatgtttcatgaaaatgaaacactgctaaacaaatctcaaagtccgcctaccaatgaaacgagtgtgattcatgctcatgacacatttttattttcggagagtttcataaatagccgacgtatatttgtttagcagtgttttatttccatgaaacgtaatttacgtttcatgtttctttgatgtgcctaacagttcaagttgattctcagttagagttggctattcctagtgtcaactccaactaaaacgagcagtaagagttgatgtgaaaaatgtaggtaattcaacttttactagttgaagtagactcttcctaacccttgttagtaaaagtagatcgcaggaaaaatagaatcaactcttactacatagtttgagtttttagttgactattcctggatcgattcagtaaatgtagattatacgagtctaatctcaagtgcttttttgatgagtgtgcgtctctttgttttgaccgtttcaactaagtacttatcacgatttgaacatatccagtaacatttaatttctagaaccggttgtttgtgtgaattaactcttattaaatggcattgggaagagtatactttttctagttggagtgtacttttactaagctttgtttataaaccaagaggagtaaagtaaaaagacagattcgcacccaagaaactcactagaaatatcaccaaatacatcttcttttttcgttgatcatatcggcctttgacggtacctaatccataaatattatattatactaacacgtcgctaaagagttctaaaaacaacttttttttatataaaaacagactaaaaatctaaaaattaaaggaataacgcagaaaatacaaaaaatcgctgatataacttaattaacctatgaaatgccaatcatgtcaaaattttataaatgtcattagtgtcaaaatttgataaaagtggagtaaacttgcctgaggttgggccaattacaaacaagctttacggagcgggaaatttgaattactcttcttggtttaaaaacagactatagtaaatgttgaacagaaatctttattttatatttataatcaataatagtcaactccaactggataatcaacttgaactgtaacatattattataaatatgtactatctttatttcacgttaagaatagaacgttacgcttatggagatcagtgttgacaaacctcttgggcacgggtggctactcgactgccgatatacgattcattttaatcagtacggcgtggcatcgccgcgcgtctatcgttcataaaaaatgcatggggctatcttcgcaatgttctattcttaacgtgaaataaagatagtgattttgcccgtcgtcatgcgacgagaatacaatcaattacctctactatacggccactgtgctcaatatttttgactttctcctattttaccgtgtctccctacatttttttctgaatccctccaattttttctgactccctccaattttccttactccctccaattttccttactccctctattttttcctgattatttctattttttcctggcaccctctaatttttactgaatccgtttaatttatttttattatatttatatacctagatatagatttcaaaaacgaaagacaataaataacggtgcgtcgcacttagggagtgccgacagaagtgactacttataccgtgttattactacataggtacctatgtgagttagtgaaattgtatgtatacttattactgaattgttagtattttttatagtaacaccacacatttaagttaataaaaacgctgtacttaaactgccgtcaaacggtggtgcactgtaatgccgttaacagctatgctatggtgtcattcttatgatgcgtttgacggcattttcttcggctgccgttcgcttggaggctggccatcttagtatcaatttctgataaagaatttattaatattagaagattttcttataaacgaaaaagaaaacaaattgaagtattaaaacgtattttaattatgggtaatgataaatacataattaaattagtccaaaattagtctttatttattgtaaaacctgttgtaaactaagaagaaaaaaatatagaaattgaatcctttctttggaatggaaccctggatttatttggaaatgttttggggttccttttcttttcctttggtagccctattgttgtcaggccttgtccttttgggcgtcctcgtttctttactgccactggcattttaattgtcgacaaagcaacatcgttcatttgaagagtttggtgactaataggacgttcattttctcttgtatattcccctccacgttatctaccctacttatctcttgacgaaccacctcaccacacagcttattttcactttcaaatacaacttcatcattactttcaataataacttgcgtgtcattttcaaatacaactttatcattactttcaataataacttgagtgtcatattcaaatacaacttcatcattattgtcaataataacttgcgtgtcattttcgtctgtaacatctataggtgtaagtagaacagcagtatcattggcccacagtgttttgagtttttttaatagattaaacctttgctcaaataacatgacacttacctaagtcattcaagtttttcaaattcaaacttattatttccacaataattaacaattaggtacaaatataactatatactgcgactggcactataataaaataagagaatcgtcaactcgtgcattaactcaccacgtgtatatatgctgaactgcaagtgaaagcgaacggcagccgaagaaatgccgtcaagcgcatcatacgaatgacgtaatagctgttacggcattgtggtccaggacc

SEQ ID NO: 3034 - DNA, 3628 bp, Diabrotica virgifera
agttcgcatacttattaaggtgtgaatgaagtttatcaaggtgtcttagatttctacttcgtctgtcttagatttatacatatgtaacattttcctgattattaacgaccatgacgcttactattttgtcagcctgaaggaagcaaaagaaactgatgtctatgcgacatatcttgaaggggttattgcaaagaaagtcgaggacgacgtgtatttgaaaaataacttgacagcattggaacaagaccatttaaagttactaagttttgaagaacgccaagctatatttgatgaatttgttacaacttacaagaactatagcaattcgtgtacggccaactatagcatattacaaaaagtttttaaagtaaacctggttcagttcataaatattttaaacaatacaatggaatcaaccgaaccaataaagcaacctaccagaaagaacgatatctttaatgacattgcaataataataataattttttcatttaaattgctgtattatctattcaaaagaattattttcccgttaaaaaaattgttatcatcaatatgggagaatttatcttccctgtttacaaatcgtaatcatagtaaccaagtacgatacacggccccggtacaaaaagaccagaatggaggaaaataaatgtacatatatgttaggcaagccgcacaccaaagaaacatcaaacgaaaaacatgaaacatgaaacgtaaaacatgtttcatgaaaatgaaacactgctaaacaaatctcaaagtccgcctaccaatgaaacgagtgtgattcatgctcatgacacatttttattttcggagagtttcataaatagccgacgtatatttgtttagcagtgttttatttccatgaaacgtaatttacgtttcatgtttctttgatgtgcctaacagttcaagttgattctcagttagagttggctattcctagtgtcaactccaactaaaacgagcagtaagagttgatgtgaaaaatgtaggtaattcaacttttactagttgaagtagactcttcctaacccttgttagtaaaagtagatcgcaggaaaaatagaatcaactcttactacatagtttgagtttttagttgactattcctggatcgattcagtaaatgtagattatacgagtctaatctcaagtgcttttttgatgagtgtgcgtctctttgttttgaccgtttcaactaagtacttatcacgatttgaacatatccagtaacatttaatttctagaaccggttgtttgtgtgaattaactcttattaaatggcattgggaagagtatactttttctagttggagtgtacttttactaagctttgtttataaaccaagaggagtaaagtaaaaagacagattcgcacccaagaaactcactagaaatatcaccaaatacatcttcttttttcgttgatcatatcggcctttgacggtacctaatccataaatattatattatactaacacgtcgctaaagagttctaaaaacaacttttttttatataaaaacagactaaaaatctaaaaattaaaggaataacgcagaaaatacaaaaaatcgctgatataacttaattaacctatgaaatgccaatcatgtcaaaattttataaatgtcattagtgtcaaaatttgataaaagtggagtaaacttgcctgaggttgggccaattacaaacaagctttacggagcgggaaatttgaattactcttcttggtttaaaaacagactatagtaaatgttgaacagaaatctttattttatatttataatcaataatagtcaactccaactggataatcaacttgaactgtaacatattattataaatatgtactatctttatttcacgttaagaatagaacgttacgcttatggagatcagtgttgacaaacctcttgggcacgggtggctactcgactgccgatatacgattcattttaatcagtacggcgtggcatcgccgcgcgtctatcgttcataaaaaatgcatggggctatcttcgcaatgttctattcttaacgtgaaataaagatagtgattttgcccgtcgtcatgcgacgagaatacaatcaattacctctactatacggccactgtgctcaatatttttgactttctcctattttaccgtgtctccctacatttttttctgaatccctccaattttttctgactccctccaattttccttactccctccaattttccttactccctctattttttcctgattatttctattttttcctggcaccctctaatttttactgaatccgtttaatttatttttattatatttatatacctagatatagatttcaaaaacgaaagacaataaataacggtgcgtcgcacttagggagtgccgacagaagtgactacttataccgtgttattactacataggtacctatgtgagttagtgaaattgtatgtatacttattactgaattgttagtattttttatagtaacaccacacatttaagttaataaaaacgctgtacttaaactgccgtcaaacggtggtgcagtgcactataatataatgccgttaacagctatggtgtcattcttatgatgcgtttgacggcattttcttcggctgccgttcgcttggaggctggccatcttagtatcaatttctgataaagaatttattaatattagaagattttcttataaacgaaaaagaaaacaaattgaagtattaaaacgtattttaattatgggtaatgataaatacataattaaattagtccaaaattagtctttatttattgtaaaacctgttgtaaactaagaagaaaaaaatatagaaattgaatcctttctttggaatggaaccctggatttatttggaaatgttttggggttccttttcttttcctttggtagccctattgttgtcaggccttgtccttttgggcgtcctcgtttctttactgccactggcattttaattgtcgacaaagcaacatcgttcatttgaagagtttggtgactaataggacgttcattttctcttgtatattcccctccacgttatctaccctacttatctcttgacgaaccacctcaccacacagcttattttcactttcaaatacaacttcatcattactttcaataataacttgcgtgtcattttcaaatacaactttatcattactttcaataataacttgagtgtcatattcaaatacaacttcatcattattgtcaataataacttgcgtgtcattttcgtctgtaacatctataggtgtaagtagaacagcagtatcattggcccacagtgttttgagtttttttaatagattaaacctttgctcaaataacatgacacttacctaagtcattcaagtttttcaaattcaaacttattatttccacaataattaacaattaggtacaaatataactatatactgcgactggcactataataaaataagagaatcgtcaactcgtgcattaactcaccacgtgtatatatgctgaactgcaagtgaaagcgaacggcagccgaagaaatgccgtcaagcgcatcatacgaatgacgtaatagctgttacggcattgtggtccaggacc

SEQ ID NO: 3035 - DNA, 2454 bp, Diabrotica virgifera
gagtctgttctgtcggaagaaatggaatgtgccgttttcgtggtctgaccgttccaaatttttaacctgttccacaattaaaactgcccctgttccagtgttcccatatatcaaggtttgtccgactaggcgcccttgagctattaacaagttttcagcttgctattaatcaagctttgtttataaaccaagaggagtaaagtaaaaagacagattcgcacccaagaaactcactagaaatatcaccaaatacatcttcttttttcgttgatcatatcggcctttgacggtacctaatccataaatattatattatactaacacgtcgctaaagagttctaaaaacaacttttttttatataaaaacagactaaaaatctaaaaattaaaggaataacgcagaaaatacaaaaaatcgctgatataacttaattaacctatgaaatgccaatcatgtcaaaattttataaatgtcattagtgtcaaaatttgataaaagtggagtaaacttgcctgaggttgggccaattacaaacaagctttacggagcgggaaatttgaattactcttcttggtttaaaaacagactatagtaaatgttgaacagaaatctttattttatatttataatcaataatagtcaactccaactggataatcaacttgaactgtaacatattattataaatatgtactatctttatttcacgttaagaatagaacgttacgcttatggagatcagtgttgacaaacctcttgggcacgggtggctactcgactgccgatatacgattcattttaatcagtacggcgtggcatcgccgcgcgtctatcgttcataaaaaatgcatggggctatcttcgcaatgttctattcttaacgtgaaataaagatagtgattttgcccgtcgtcatgcgacgagaatacaatcaattacctctactatacggccactgtgctcaatatttttgactttctcctattttaccgtgtctccctacatttttttctgaatccctccaattttttctgactccctccaattttccttactccctccaattttccttactccctctattttttcctgattatttctattttttcctggcaccctctaatttttactgaatccgtttaatttatttttattatatttatatacctagatatagatttcaaaaacgaaagacaataaataacggtgcgtcgcacttagggagtgccgacagaagtgactacttataccgtgttattactacataggtacctatgtgagttagtgaaattgtatgtatacttattactgaattgttagtattttttatagtaacaccacacatttaagttaataaaaacgctgtacttaaactgccgtcaaacggtggtgcactgtaatgccgttaacagctatgctatggtgtcattcttatgatgcgtttgacggcattttcttcggctgccgttcgcttggaggctggccatcttagtatcaatttctgataaagaatttattaatattagaagattttcttataaacgaaaaagaaaacaaattgaagtattaaaacgtattttaattatgggtaatgataaatacataattaaattagtccaaaattagtctttatttattgtaaaacctgttgtaaactaagaagaaaaaaatatagaaattgaatcctttctttggaatggaaccctggatttatttggaaatgttttggggttccttttcttttcctttggtagccctattgttgtcaggccttgtccttttgggcgtcctcgtttctttactgccactggcattttaattgtcgacaaagcaacatcgttcatttgaagagtttggtgactaataggacgttcattttctcttgtatattcccctccacgttatctaccctacttatctcttgacgaaccacctcaccacacagcttattttcactttcaaatacaacttcatcattactttcaataataacttgcgtgtcattttcaaatacaactttatcattactttcaataataacttgagtgtcatattcaaatacaacttcatcattattgtcaataataacttgcgtgtcattttcgtctgtaacatctataggtgtaagtagaacagcagtatcattggcccacagtgttttgagtttttttaatagattaaacctttgctcaaataacatgacacttacctaagtcattcaagtttttcaaattcaaacttattatttccacaataattaacaattaggtacaaatataactatatactgcgactggcactataataaaataagagaatcgtcaactcgtgcattaactcaccacgtgtatatatgctgaactgcaagtgaaagcgaacggcagccgaagaaatgccgtcaagcgcatcatacgaatgacgtaatagctgttacggcattgtggtccaggacc

SEQ ID NO: 3036 - DNA, 2459 bp, Diabrotica virgifera
gagtctgttctgtcggaagaaatggaatgtgccgttttcgtggtctgaccgttccaaatttttaacctgttccacaattaaaactgcccctgttccagtgttcccatatatcaaggtttgtccgactaggcgcccttgagctattaacaagttttcagcttgctattaatcaagctttgtttataaaccaagaggagtaaagtaaaaagacagattcgcacccaagaaactcactagaaatatcaccaaatacatcttcttttttcgttgatcatatcggcctttgacggtacctaatccataaatattatattatactaacacgtcgctaaagagttctaaaaacaacttttttttatataaaaacagactaaaaatctaaaaattaaaggaataacgcagaaaatacaaaaaatcgctgatataacttaattaacctatgaaatgccaatcatgtcaaaattttataaatgtcattagtgtcaaaatttgataaaagtggagtaaacttgcctgaggttgggccaattacaaacaagctttacggagcgggaaatttgaattactcttcttggtttaaaaacagactatagtaaatgttgaacagaaatctttattttatatttataatcaataatagtcaactccaactggataatcaacttgaactgtaacatattattataaatatgtactatctttatttcacgttaagaatagaacgttacgcttatggagatcagtgttgacaaacctcttgggcacgggtggctactcgactgccgatatacgattcattttaatcagtacggcgtggcatcgccgcgcgtctatcgttcataaaaaatgcatggggctatcttcgcaatgttctattcttaacgtgaaataaagatagtgattttgcccgtcgtcatgcgacgagaatacaatcaattacctctactatacggccactgtgctcaatatttttgactttctcctattttaccgtgtctccctacatttttttctgaatccctccaattttttctgactccctccaattttccttactccctccaattttccttactccctctattttttcctgattatttctattttttcctggcaccctctaatttttactgaatccgtttaatttatttttattatatttatatacctagatatagatttcaaaaacgaaagacaataaataacggtgcgtcgcacttagggagtgccgacagaagtgactacttataccgtgttattactacataggtacctatgtgagttagtgaaattgtatgtatacttattactgaattgttagtattttttatagtaacaccacacatttaagttaataaaaacgctgtacttaaactgccgtcaaacggtggtgcagtgcactataatataatgccgttaacagctatggtgtcattcttatgatgcgtttgacggcattttcttcggctgccgttcgcttggaggctggccatcttagtatcaatttctgataaagaatttattaatattagaagattttcttataaacgaaaaagaaaacaaattgaagtattaaaacgtattttaattatgggtaatgataaatacataattaaattagtccaaaattagtctttatttattgtaaaacctgttgtaaactaagaagaaaaaaatatagaaattgaatcctttctttggaatggaaccctggatttatttggaaatgttttggggttccttttcttttcctttggtagccctattgttgtcaggccttgtccttttgggcgtcctcgtttctttactgccactggcattttaattgtcgacaaagcaacatcgttcatttgaagagtttggtgactaataggacgttcattttctcttgtatattcccctccacgttatctaccctacttatctcttgacgaaccacctcaccacacagcttattttcactttcaaatacaacttcatcattactttcaataataacttgcgtgtcattttcaaatacaactttatcattactttcaataataacttgagtgtcatattcaaatacaacttcatcattattgtcaataataacttgcgtgtcattttcgtctgtaacatctataggtgtaagtagaacagcagtatcattggcccacagtgttttgagtttttttaatagattaaacctttgctcaaataacatgacacttacctaagtcattcaagtttttcaaattcaaacttattatttccacaataattaacaattaggtacaaatataactatatactgcgactggcactataataaaataagagaatcgtcaactcgtgcattaactcaccacgtgtatatatgctgaactgcaagtgaaagcgaacggcagccgaagaaatgccgtcaagcgcatcatacgaatgacgtaatagctgttacggcattgtggtccaggacc

SEQ ID NO: 3037 - DNA, 2966 bp, Diabrotica virgifera
  SmartBlast Evalue=0; Info=Vacuolar proton atpases n=1 Tax=Aedes aegypti RepID=Q16HE2_AEDAE
aatggatattgataagaagtgagttggtagtaggagctcttattattattaaataataaattttagtaaccctcgcagctcgcaacgctaaattaataatgcatgctaaaatcgaaaacagtttaccaagttgagtcggcagtttgtaaaactaaagttagtcgtttcgaaggtgttctatggtttttgtgaactgctgatgtgctgctgataaaaataataagactgtcaaataaaacctcctcaagatggggagtatgtttagaagtgaggaaatggtcctcgcccaactgttcgtccaaccagaggcttcgtactacgctatttccgaattgggtgaaactggatgtgtacagtttagagatttaaatgaagaagtgaacgctttccaaagaaagttcgtcaacgaagtgagaagatgcgatgaaatggaaagaaagttaagatacattgaagcagaagtgagaaaagatgacgtcaatattcccgatgtcagcgaattaccaaaagcacccaatccccgtgaaattatagacttagaggctcaccttgaaaagaccgaaggtgatatcaaagagctctcagaaagtgcagttaacctcaagtccaactacctagaactaaccgagctcaaacacgttctggagaaaacacaagcgttcttcaacgagcaagacgaagcaaacggactctcggactcagtccacaaatcacttatacctgctgaagatcacaatgcttccattagaggccgtctaggtttcgtagctggagtaatcaatagagaaagagttcctgcttttgagagaatgttgtggcgtatttccagaggaaatgttttcctgaggcaagccgaaattgagacacctatggaagatcccgcaacggggattgcatacaacaagaccgtcttcgcagccttctttcaaggagaacagttaaaaacaagaataaagaaagtatgtgctggcttccatgcttctctctatccttgtccaaacacgatcactgaaagaaacgatatgcttaaaggtgttcgcactcgtcttgaggatcttaacctggtgttaaatcaaacaagagatcatcgtcaacgagtactggtcagcgttgccaaagaattacagaactggagtataatggtaagcaaaatgaaggctatataccacactttgaacttcttcaacatggatgtcaccaagaaatgtttaataggcgaatgttgggtaccaagcaacgatattcctgttgtccagaaggctttagccgatggatctagtgcttccggaagctcaatcccatcgtttctcaatgttatcaacactcacgaagcacccccaactttcaacagaactaacaaatttaccagaggcttccaaaacttgatagatgcctatggtgtggcctcctacagagaagtcaatccagccttatacacaattatcactttccctttcttattcgccgtgatgtttggagattgcggccacgccatgatcatgtttctatttggcttgtacttggtgttatcagaaaagaagatcaacgctatgaaaaataaaagcgaaatatttgtgatatttttcggaggaagatacatcatactgctcatgggtatattctccttctacacaggctttgtttataatgatatattttccaaatcgatgaatatatttggttcgaggtggtatgtgaatattaccaatgcaagcactcaaatacacgaagaaatggacttgttacctaagatgaactatatgggcacgccatattatattgggcttgatcccgtttggcagtcggcaaaaaataaaatcatcttcttgaattccttaaaaatgaaaatgtccatcatcttgggaatagtgcacatgttgttcggagtaatctgcagcacattcaactttgtacattttaaaaaatactacagcatcgtgtttgagttcttacctcaagtactgttgttattattcctcttcatgtacatggttataatgatgttcatgaaatgggtattgtattccggagaaaacgatggatgggataagaatgtaaccgctaaggacggttcatcgtgtgccccgtctgtactgatttacttcatcaacatgatgttgatgtcgccaagcactgctaataagggctgcgatatatacatgtacgattaccaacgtgaaattcaaatgggtttagttttttgtgcattgatttgcatccccttcatgttgctcggaaaaccattatatataatgcgtcaacgtaagaaccaagcgaaaaatggaagcgtacaactggtcagtaataataaaacaaacggtgacgtaaaccttggaatggaactggaagagatcgaaaacaaccttcaagatgtggccgaggtggctgctcaagctcatcatgaaaaagaagaagaggaggaacctatgagtgaaattttcattcactcagctatccatactattgaatacacacttagtacaatttctcataccgcttcgtatttgcgtttgtgggcgttgtcccttgcacatgcgcaattatcggaagtattatggactatgttattctcaaagatagctttgagaagagaaggattcataggagtgccgatgatcttcattctattttccgcatgggccttcttcactgtcgccatcttggtactcatggaaggtttatcggccttcttgcatacactccgtttgcattgggtagagttcatgagcaagttctactcaggcgtggggtacatttttgaaccattcagttttaagaggatactggaacaagaggcaggagaagaggattgaagcgatagctagtgttttgttttagacaagtttaaataaaaaatataatgtagcgttataaataaaactaatttttgattttcgttgttcaataataaaaaaaaaacaatctagtttttaatttgtttccaaattaaatactttttattcacc

SEQ ID NO: 3038 - DNA, 2929 bp, Diabrotica virgifera
  SmartBlast Evalue=0; Info=Vacuolar proton atpases n=1 Tax=Aedes aegypti RepID=Q16HE2_AEDAE
atcatcagcttatcaaacaattgaagttaactcctaattcatacaacctcgtcttaagtacacacacataccagcgcgctgtattaaaaatcatgtgacagacggcaactatatcgctcattacaacagctgccttcaaaggtgtggtgatttaaaaaaacagtgctccaattttttagtgttaaggactgtcaaataaaacctcctcaagatggggagtatgtttagaagtgaggaaatggtcctcgcccaactgttcgtccaaccagaggcttcgtactacgctatttccgaattgggtgaaactggatgtgtacagtttagagatttaaatgaagaagtgaacgctttccaaagaaagttcgtcaacgaagtgagaagatgcgatgaaatggaaagaaagttaagatacattgaagcagaagtgagaaaagatgacgtcaatattcccgatgtcagcgaattaccaaaagcacccaatccccgtgaaattatagacttagaggctcaccttgaaaagaccgaaggtgatatcaaagagctctcagaaagtgcagttaacctcaagtccaactacctagaactaaccgagctcaaacacgttctggagaaaacacaagcgttcttcaacgagcaagacgaagcaaacggactctcggactcagtccacaaatcacttatacctgctgaagatcacaatgcttccattagaggccgtctaggtttcgtagctggagtaatcaatagagaaagagttcctgcttttgagagaatgttgtggcgtatttccagaggaaatgttttcctgaggcaagccgaaattgagacacctatggaagatcccgcaacggggattgcatacaacaagaccgtcttcgcagccttctttcaaggagaacagttaaaaacaagaataaagaaagtatgtgctggcttccatgcttctctctatccttgtccaaacacgatcactgaaagaaacgatatgcttaaaggtgttcgcactcgtcttgaggatcttaacctggtgttaaatcaaacaagagatcatcgtcaacgagtactggtcagcgttgccaaagaattacagaactggagtataatggtaagcaaaatgaaggctatataccacactttgaacttcttcaacatggatgtcaccaagaaatgtttaataggcgaatgttgggtaccaagcaacgatattcctgttgtccagaaggctttagccgatggatctagtgcttccggaagctcaatcccatcgtttctcaatgttatcaacactcacgaagcacccccaactttcaacagaactaacaaatttaccagaggcttccaaaacttgatagatgcctatggtgtggcctcctacagagaagtcaatccagccttatacacaattatcactttccctttcttattcgccgtgatgtttggagattgcggccacgccatgatcatgtttctatttggcttgtacttggtgttatcagaaaagaagatcaacgctatgaaaaataaaagcgaaatatttgtgatatttttcggaggaagatacatcatactgctcatgggtatattctccttctacacaggctttgtttataatgatatattttccaaatcgatgaatatatttggttcgaggtggtatgtgaatattaccaatgcaagcactcaaatacacgaagaaatggacttgttacctaagatgaactatatgggcacgccatattatattgggcttgatcccgtttggcagtcggcaaaaaataaaatcatcttcttgaattccttaaaaatgaaaatgtccatcatcttgggaatagtgcacatgttgttcggagtaatctgcagcacattcaactttgtacattttaaaaaatactacagcatcgtgtttgagttcttacctcaagtactgttgttattattcctcttcatgtacatggttataatgatgttcatgaaatgggtattgtattccggagaaaacgatggatgggataagaatgtaaccgctaaggacggttcatcgtgtgccccgtctgtactgatttacttcatcaacatgatgttgatgtcgccaagcactgctaataagggctgcgatatatacatgtacgattaccaacgtgaaattcaaatgggtttagttttttgtgcattgatttgcatccccttcatgttgctcggaaaaccattatatataatgcgtcaacgtaagaaccaagcgaaaaatggaagcgtacaactggtcagtaataataaaacaaacggtgacgtaaaccttggaatggaactggaagagatcgaaaacaaccttcaagatgtggccgaggtggctgctcaagctcatcatgaaaaagaagaagaggaggaacctatgagtgaaattttcattcactcagctatccatactattgaatacacacttagtacaatttctcataccgcttcgtatttgcgtttgtgggcgttgtcccttgcacatgcgcaattatcggaagtattatggactatgttattctcaaagatagctttgagaagagaaggattcataggagtgccgatgatcttcattctattttccgcatgggccttcttcactgtcgccatcttggtactcatggaaggtttatcggccttcttgcatacactccgtttgcattgggtagagttcatgagcaagttctactcaggcgtggggtacatttttgaaccattcagttttaagaggatactggaacaagaggcaggagaagaggattgaagcgatagctagtgttttgttttagacaagtttaaataaaaaatataatgtagcgttataaataaaactaatttttgattttcgttgttcaataataaaaaaaaaacaatctagtttttaatttgtttccaaattaaatactttttattcacc

SEQ ID NO: 3039 - DNA, 2966 bp, Diabrotica virgifera
  SmartBlast Evalue=0; Info=Vacuolar proton atpases n=1 Tax=Aedes aegypti RepID=Q16HE2_AEDAE
aatggatattgataagaagtgagttggtagtaggagctcttattattattaaataataaattttagtaaccctcgcagctcgcaacgctaaattaataatgcatgctaaaatcgaaaacagtttaccaagttgagtcggcagtttgtaaaactaaagttagtcgtttcgaaggtgttctatggtttttgtgaactgctgatgtgctgctgataaaaataataagactgtcaaataaaacctcctcaagatggggagtatgtttagaagtgaggaaatggtcctcgcccaactgttcgtccaaccagaggcttcgtactacgctatttccgaattgggtgaaactggatgtgtacagtttagagatttaaatgaagaagtgaacgctttccaaagaaagttcgtcaacgaagtgagaagatgcgatgaaatggaaagaaagttaagatacattgaagcagaagtgagaaaagatgacgtcaatattcccgatgtcagcgaattaccaaaagcacccaatccccgtgaaattatagacttagaggctcaccttgaaaagaccgaaggtgatatcaaagagctctcagaaagtgcagttaacctcaagtccaactacctagaactaaccgagctcaaacacgttctggagaaaacacaagcgttcttcaacgagcaagacgaagcaaacggactctcggactcagtccacaaatcacttatacctgctgaagatcacaatgcttccattagaggccgtctaggtttcgtagctggagtaatcaatagagaaagagttcctgcttttgagagaatgttgtggcgtatttccagaggaaatgttttcctgaggcaagccgaaattgagacacctatggaagatcccgcaacggggattgcatacaacaagaccgtcttcgcagccttctttcaaggagaacagttaaaaacaagaataaagaaagtatgtgctggcttccatgcttctctctatccttgtccaaacacgatcactgaaagaaacgatatgcttaaaggtgttcgcactcgtcttgaggatcttaacctggtgttaaatcaaacaagagatcatcgtcaacgagtactggtcagcgttgccaaagaattacagaactggagtataatggtaagcaaaatgaaggctatataccacactttgaacttcttcaacatggatgtcaccaagaaatgtttaataggcgaatgttgggtaccaagcaacgatattcctgttgtccagaaggctttagctgatggatctagtgcttccggaagctcaatcccatcgtttctcaatgttatcaacactcacgaagcacccccaactttcaacagaactaacaaatttaccagaggcttccaaaacttgatagatgcctatggtgtggcctcctacagagaagtcaatccagccttatacacgattatcactttccccttcctattcgccgtgatgtttggggattgcggtcatgctatgatcatgttcctatttggcttgtacttggtgttatcagaaaaaaagatcaacgctatgaaaaataaaagcgaaatatttgtgatatttttcggaggaagatacatcatattgctcatgggtatcttctccttctacaccggctttgtttataatgatatattttccaaatcgatgaatatatttggttcgaggtggtatgtgaatattaccaatgcaagcactcaaatacacgaagaaatggacttgttacctaagatgaactatatgggcacgccatattatattgggcttgatcccgtttggcagtcggcaaaaaataaaatcatcttcttgaattccttaaaaatgaaaatgtccatcatcttgggaatagtgcacatgttgttcggagtaatctgcagcacattcaactttgtacattttaaaaaatactacagcatcgtgtttgagttcttacctcaagtactgttgttattattcctcttcatgtacatggttataatgatgttcatgaaatgggtattgtattccggagaaaacgatggatgggataagaatgtaaccgctaaggacggttcatcgtgtgccccgtctgtactgatttacttcatcaacatgatgttgatgtcgccaagcactgctaataagggctgcgatatatacatgtacgattaccaacgtgaaattcaaatgggtttagttttttgtgcattgatttgcatccccttcatgttgctcggaaaaccattatatataatgcgtcaacgtaagaaccaagcgaaaaatggaagcgtacaactggtcagtaataataaaacaaacggtgacgtaaaccttggaatggaactggaagagatcgaaaacaaccttcaagatgtggccgaggtggctgctcaagctcatcatgaaaaagaagaagaggaggaacctatgagtgaaattttcattcactcagctatccatactattgaatacacacttagtacaatttctcataccgcttcgtatttgcgtttgtgggcgttgtcccttgcacatgcgcaattatcggaagtattatggactatgttattctcaaagatagctttgagaagagaaggattcataggagtgccgatgatcttcattctattttccgcatgggccttcttcactgtcgccatcttggtactcatggaaggtttatcggccttcttgcatacactccgtttgcattgggtagagttcatgagcaagttctactcaggcgtggggtacatttttgaaccattcagttttaagaggatactggaacaagaggcaggagaagaggattgaagcgatagctagtgttttgttttagacaagtttaaataaaaaatataatgtagcgttataaataaaactaatttttgattttcgttgttcaataataaaaaaaaaacaatctagtttttaatttgtttccaaattaaatactttttattcacc

SEQ ID NO: 3040 - DNA, 2929 bp, Diabrotica virgifera
  SmartBlast Evalue=0; Info=Vacuolar proton atpases n=1 Tax=Aedes aegypti RepID=Q16HE2_AEDAE
atcatcagcttatcaaacaattgaagttaactcctaattcatacaacctcgtcttaagtacacacacataccagcgcgctgtattaaaaatcatgtgacagacggcaactatatcgctcattacaacagctgccttcaaaggtgtggtgatttaaaaaaacagtgctccaattttttagtgttaaggactgtcaaataaaacctcctcaagatggggagtatgtttagaagtgaggaaatggtcctcgcccaactgttcgtccaaccagaggcttcgtactacgctatttccgaattgggtgaaactggatgtgtacagtttagagatttaaatgaagaagtgaacgctttccaaagaaagttcgtcaacgaagtgagaagatgcgatgaaatggaaagaaagttaagatacattgaagcagaagtgagaaaagatgacgtcaatattcccgatgtcagcgaattaccaaaagcacccaatccccgtgaaattatagacttagaggctcaccttgaaaagaccgaaggtgatatcaaagagctctcagaaagtgcagttaacctcaagtccaactacctagaactaaccgagctcaaacacgttctggagaaaacacaagcgttcttcaacgagcaagacgaagcaaacggactctcggactcagtccacaaatcacttatacctgctgaagatcacaatgcttccattagaggccgtctaggtttcgtagctggagtaatcaatagagaaagagttcctgcttttgagagaatgttgtggcgtatttccagaggaaatgttttcctgaggcaagccgaaattgagacacctatggaagatcccgcaacggggattgcatacaacaagaccgtcttcgcagccttctttcaaggagaacagttaaaaacaagaataaagaaagtatgtgctggcttccatgcttctctctatccttgtccaaacacgatcactgaaagaaacgatatgcttaaaggtgttcgcactcgtcttgaggatcttaacctggtgttaaatcaaacaagagatcatcgtcaacgagtactggtcagcgttgccaaagaattacagaactggagtataatggtaagcaaaatgaaggctatataccacactttgaacttcttcaacatggatgtcaccaagaaatgtttaataggcgaatgttgggtaccaagcaacgatattcctgttgtccagaaggctttagctgatggatctagtgcttccggaagctcaatcccatcgtttctcaatgttatcaacactcacgaagcacccccaactttcaacagaactaacaaatttaccagaggcttccaaaacttgatagatgcctatggtgtggcctcctacagagaagtcaatccagccttatacacgattatcactttccccttcctattcgccgtgatgtttggggattgcggtcatgctatgatcatgttcctatttggcttgtacttggtgttatcagaaaaaaagatcaacgctatgaaaaataaaagcgaaatatttgtgatatttttcggaggaagatacatcatattgctcatgggtatcttctccttctacaccggctttgtttataatgatatattttccaaatcgatgaatatatttggttcgaggtggtatgtgaatattaccaatgcaagcactcaaatacacgaagaaatggacttgttacctaagatgaactatatgggcacgccatattatattgggcttgatcccgtttggcagtcggcaaaaaataaaatcatcttcttgaattccttaaaaatgaaaatgtccatcatcttgggaatagtgcacatgttgttcggagtaatctgcagcacattcaactttgtacattttaaaaaatactacagcatcgtgtttgagttcttacctcaagtactgttgttattattcctcttcatgtacatggttataatgatgttcatgaaatgggtattgtattccggagaaaacgatggatgggataagaatgtaaccgctaaggacggttcatcgtgtgccccgtctgtactgatttacttcatcaacatgatgttgatgtcgccaagcactgctaataagggctgcgatatatacatgtacgattaccaacgtgaaattcaaatgggtttagttttttgtgcattgatttgcatccccttcatgttgctcggaaaaccattatatataatgcgtcaacgtaagaaccaagcgaaaaatggaagcgtacaactggtcagtaataataaaacaaacggtgacgtaaaccttggaatggaactggaagagatcgaaaacaaccttcaagatgtggccgaggtggctgctcaagctcatcatgaaaaagaagaagaggaggaacctatgagtgaaattttcattcactcagctatccatactattgaatacacacttagtacaatttctcataccgcttcgtatttgcgtttgtgggcgttgtcccttgcacatgcgcaattatcggaagtattatggactatgttattctcaaagatagctttgagaagagaaggattcataggagtgccgatgatcttcattctattttccgcatgggccttcttcactgtcgccatcttggtactcatggaaggtttatcggccttcttgcatacactccgtttgcattgggtagagttcatgagcaagttctactcaggcgtggggtacatttttgaaccattcagttttaagaggatactggaacaagaggcaggagaagaggattgaagcgatagctagtgttttgttttagacaagtttaaataaaaaatataatgtagcgttataaataaaactaatttttgattttcgttgttcaataataaaaaaaaaacaatctagtttttaatttgtttccaaattaaatactttttattcacc

SEQ ID NO: 3041 - DNA, 2778 bp, Diabrotica virgifera
  SmartBlast Evalue=3E-97; Info=Putative helicase mov-10-B.1 n=1 Tax=Danio rerio RepID=M10B1_DANRE
cattgataaaaataatatttaaaagataacagtttttctcacttagactaaaaacatataatttttacaaatgcacagtttattgatgatactgggtatctatttggacggctccaatactttgagtgatttgattaacagcagcatcagtctttctaggaactggaactccccagaaagtggatagcgtatcacatagatccatgtatttcaaccattttctgtccgtagccaaaacttgcgcgcatccgatgattattaatttactcatagctctggtaagtgcaacattgaatctcttttcatttttaacgaagcctaacttataaagtttatcgtacagcaacaaatctttttgggctcttacagtagatataataataattcttttctcccgtccctgaaacgtttcagttgttccgacatcgacaccttcgatttgatttcctttaaggagggctttcaatgtatacacctgtctggcatacggcgtaacaataccgatatcggaaggtttcactttgtcttcctcatctagaaattctaaagcttgcagagctctaatgtactttattaccatttgcgcctctttcacgttgaaataactaggcgactttccctgcctttgctctttggataataaactacaaaattcaacagcatcgcctgtgaattttgggtgtgagttcttctttcccgcaacactgtacatttcttgtagcttttggaagacgcaagttgttgctaaggggtctaataatgacctttgtgactgggcctgcaactggtctccgtagaacagctcgttaggcaacgttagaatctttggatggtttctaaaattctgtatcaacatggtgatacaccgctggttatgttggtgatacaattcggtttgcataattctctcaaggagagatatacctaagccatatcggatcgcagaatcagaagttaatgatggtccaagctgcttggggtctccggccaatactatctgctgtccatgtttaaccatacctaaggctatgcaaacttcaggttcacatgcttgtgcagcttcatcaacgaataccacgtctggtttgtagtaaccacccattataccgacgtgaattaaagtaatcacgactattctataagttttcaaggatgccgaatccatttttttatattgccacgatccctcatattcttcgtagttggaatatcgtaataccggttcatgaacatttgacaagtcaacagtagatgacataactctaatcaactcattcgtagtgcaatgttccagcagcttttcggtaattaaatcacaagcagcatttgaaggggcacagacaagaatattgtgagtggtcttaaatttaagctgtaaaatagcctctacgatcgttacagtctttcctgttcccggaggcccaaatactatgtaaggatatggaactgaagttgcatttaaaatatttctaactgcagtcttctgctcttgatttctagcaatcgtttgattaaggaattctccatcgttaatgattctttctgtttgtctacctcttaatgttgcatcatgagatggaaatatacacggaagtaaaccatttgccgaaacttgatctacaccttgatgttgtcgttcaaatgataaccgacttaacacaaattttacatcataaatatccctcacttctgattggctctcaatgatcattatcaactctctattcacgttcccaatctctacagtcgaatcagtaactcttcttataattcccgtgtaaccagtatggtcaatgtgagcacgaatctgtaccatatctccaacaattagcgaaggacgtttctcagctaaacctggcacttctagttttagtagctcattatccaataagtctaaagacacattctccatattgtactgttgaataccaagtgtttgtccgatttcttcaatccaaaggacattatgccaaaaatttttgaaattatctctagtgacttctcctggttccatttgtctctgtaattctcttaaacggtaaaaatcttctcccctcatttctggaaattcttgtaaaccgaaaaaataaaatcgttttgaagcctctggaattggatatctgttggagtaattcattctacctgtaggtgggagtataagctgtacgtcccgccatggatttccagtaaatggactcgccatgtattgctcattttcttcaatggtctcttccaatgagatattaattgatcgaatgatggagaaagtttgttgattgtttgtctggaaattgaaacaaactggaatgttgtaacctccaacaattgacttgtccggagaaaatctaaccataacttgatgatttgtatttggcattagctgtactacagtatctggggtaatattctcgttagtagtaaaaataggaaaaatattcatattcacataatagtagtactctagtaagaaatatatcgtctcttcttctgtttgtcgccgtacatgtaaaatcaagtacatttccttgttgcctcaacgaatccaacgtaattttataataatgttttccattattaacattggctactaacgaagcgtttccgagttttattgtaacttctgcaccatgacgattttttaccaatgacttcctatcaatatgccattgctttaacaaataattgagcctgtgtctaatggagttattgtgcacaccatcatgttcatcgtgctctacagaggcaggacatactggacatccccgctgattccttggc

SEQ ID NO: 3042 - DNA, 2769 bp, Diabrotica virgifera
  SmartBlast Evalue=3E-97; Info=Putative helicase mov-10-B.1 n=1 Tax=Danio rerio RepID=M10B1_DANRE
cattgataaaaataatatttaaaagataacagtttttctcacttagactaaaaacatataatttttacaaatgcacagtttattgatgatactgggtatctatttggacggctccaatactttgagtgatttgattaacagcagcatcagtctttctaggaactggaactccccagaaagtggatagcgtatcacatagatccatgtatttcaaccattttctgtccgtagccaaaacttgcgcgcatccgatgattattaatttactcatagctctggtaagtgcaacattgaatctcttttcatttttaacgaagcctaacttataaagtttatcgtacagcaacaaatctttttgggctcttacagtagatataataataattcttttctcccgtccctgaaacgtttcagttgttccgacatcgacaccttcgatttgatttcctttaaggagggctttcaatgtatacacctgtctggcatacggcgtaacaataccgatatcggaaggtttcactttgtcttcctcatctagaaattctaaagcttgcagagctctaatgtactttattaccatttgcgcctctttcacgttgaaataactaggcgactttccctgcctttgctctttggataataaactacaaaattcaacagcatcgcctgtgaattttgggtgtgagttcttctttcccgcaacactgtacatttcttgtagcttttggaagacgcaagttgttgctaaggggtctaataatgacctttgtgactgggcctgcaactggtctccgtagaacagctcgttaggcaacgttagaatctttggatggtttctaaaattctgtatcaacatggtgatacaccgctggttatgttggtgatacaattcggtttgcataattctctcaaggagagatatacctaagccatatcggatcgcagaatcagaagttaatgatggtccaagctgcttggggtctccggccaatactatctgctgtccatgtttaaccatacctaaggctatgcaaacttcaggttcacatgcttgtgcagcttcatcaacgaataccacgtctggtttgtagtaaccacccattataccgacgtgaattaaagtaatcacgactattctataagttttcaaggatgccgaatccatttttttatattgccacgatccctcatattcttcgtagttggaatatcgtaataccggttcatgaacatttgacaagtcaacagtagatgacataactctaatcaactcattcgtagtgcaatgttccagcagcttttcggtaattaaatcacaagcagcatttgaaggggcacagacaagaatattgtgagtggtcttaaatttaagctgtaaaatagcctctacgatcgttacagtctttcctgttcccggaggcccaaatactatgtaaggatatggaactgaagttgcatttaaaatatttctaactgcagtcttctgctcttgatttctagcaatcgtttgattaaggaattctccatcgttaatgattctttctgtttgtctacctcttaatgttgcatcatgagatggaaatatacacggaagtaaaccatttgccgaaacttgatctacaccttgatgttgtcgttcaaatgataaccgacttaacacaaattttacatcataaatatccctcacttctgattggctctcaatgatcattatcaactctctattcacgttcccaatctctacagtcgaatcagtaactcttcttataattcccgtgtaaccagtatggtcaatgtgagcacgaatctgtaccatatctccaacaattagcgaaggacgtttctcagctaaacctggcacttctagttttagtagctcattatccaataagtctaaagacacattctccatattgtactgttgaataccaagtgtttgtccgatttcttcaatccaaaggacattatgccaaaaatttttgaaattatctctagtgacttctcctggttccatttgtctctgtaattctcttaaacggtaaaaatcttctcccctcatttctggaaattcttgtaaaccgaaaaaataaaatcgttttgaagcctctggaattggatatctgttggagtaattcattctacctgtaggtgggagtataagctgtacgtcccgccatggatttccagtaaatggactcgccatgtattgctcattttcttcaatggtctcttccaatgagatattaattgatcgaatgatggagaaagtttgttgattgtttgtctggaaattgaaacaaactggaatgttgtaacctccaacaattgacttgtccggagaaaatctaaccataacttgatgatttgtatttggcattagctgtactacagtatctggggtaatattctcgttagtagtaaaaataggaaaaatattcatattcacataatagtagtactctagtaagaaatatatcgtctcttcttctgtttgtcgccgtacatgtaaaatcaagtacatttccttgttgcctcaacgaatccaacgtaattttataataatgttttccattattaacatttgttattaagggggtccttccaagtccaattgtgacttctacaccatgacgatttcttaccaatgacttcctatcattatgccattgctttaacataaaattgagcctgtgcctattggagttattgtgcacaccatcatgttcatcatgctctacagcacatacaggacatacccgctgattcctt

SEQ ID NO: 3043 - DNA, 2778 bp, Diabrotica virgifera
  SmartBlast Evalue=3E-99; Info=Putative helicase mov-10-B.1 n=1 Tax=Danio rerio RepID=M10B1_DANRE
cattgataaaaataatatttaaaagataacagtttttctcacttagactaaaaacatataatttttacaaatgcacagtttattgatgatactgggtatctatttggacggctccaatactttgagtgatttgattaacagcagcatcagtctttctaggaactggaactccccagaaagtggatagcgtatcacatagatccatgtatttcaaccattttctgtccgtagccaaaacttgcgcgcatccgatgattattaatttactcatagctctggtaagtgcaacattgaatctcttttcatttttaacgaagcctaacttataaagtttatcgtacagcaacaaatctttttgggctcttacagtagatataataataattcttttctcccgtccctgaaacgtttcagttgttccgacatcgacaccttcgatttgatttcctttaaggagggctttcaatgtatacacctgtctggcatacggcgtaacaataccgatatcggaaggtttcactttgtcttcctcatctagaaattctaaagcttgcagagctctaatgtactttattaccatttgcgcctctttcacgttgaaataactaggcgactttccctgcctttgctctttggataataaactacaaaattcaacagcatcgcctgtgaattttgggtgtgagttcttctttcccgcaacactgtacatttcttgtagcttttggaagacgcaagttgttgctaaggggtctaataatgacctttgtgactgggcctgcaactggtctccgtagaacagctcgttaggcaacgttagaatctttggatggtttctaaaattctgtatcaacatggtgatacaccgctggttatgttggtgatacaattcggtttgcataattctctcaaggagagatatacctaagccatatcggatcgcagaatcagaagttaatgatggtccaagctgcttggggtctccggccaatactatctgctgtccatgtttaaccatacctaaggctatgcaaacttcaggttcacatgcttgtgcagcttcatcaacgaataccacgtctggtttgtagtaaccacccattataccgacgtgaattaaagtaatcacgactattctataagttttcaaggatgccgaatccatttttttatattgccacgatccctcatattcttcgtagttggaatatcgtaataccggttcatgaacatttgacaagtcaacagtagatgacataactctaatcaactcattcgtagtgcaatgttccagcagcttttcggtaattaaatcacaagcagcatttgaaggggcacagacaagaatattgtgagtggtcttaaatttaagctgtaaaatagcctctacgatcgttacagtctttcctgttcccggaggcccaaatactatgtaaggatatggaactgaagttgcatttaaaatatttctaactgcagtcttctgctcttgatttctagcaatcgtttgattaaggaattctccatcgttaatgattctttctgtttgtctacctcttaatgttgcatcatgagatggaaatatacacggaagtaaaccatttgccgaaacttgatctacaccttgatgttgtcgttcaaatgataaccgacttaacacaaattttacatcataaatatccctcacttctgattggctctcaatgatcattatcaactctctattcacgttcccaatctctacagtcgaatcagtaactcttcttataattcccgtgtaaccagtatggtcaatgtgagcacgaatctgtaccatatctccaacaattagcgaaggacgtttctcagctaaacctggcacttctagttttagtagctcattatccaataagtctaaagacacattctccatattgtactgttgaataccaagtgtttgtccgatttcttcaatccaaaggacattatgccaaaattttttgaaattctctctagtaacttctcctggttgcatttgtctctgtaattctcttaaatggtttaagtcttctcttctcatgtcttgaaattcttgtaaaccgtaaaagtaaaatcgttttgaagactctggaattgcatatctgtcggagtacttcgatttgcctgtaggtgggagtatatgctgtacgtcccaccatggatttccagtaaatggactcgtcaggtattgctcattttcttcaatggtttcttccactgagatattaattgatcgaatgatggagaaagtttgtcgattgtttgtctggaaattgaaacaaactggaatgttgtaacctccaacaattgacttgtccggagaaaatctaaccataacttgatgatttgtatttggcattagctgtactacagtatctggggtaatattctcgttagtagtaaaaataggaaaaatattcatattcacataatagtagtactctagtaagaaatatatcgtctcttcttctgtttgtcgccgtacatgtaaaatcaagtacatttccttgttgcctcaacgaatccaacgtaattttataataatgttttccattattaacattggctactaacgaagcgtttccgagttttattgtaacttctgcaccatgacgattttttaccaatgacttcctatcaatatgccattgctttaacaaataattgagcctgtgtctaatggagttattgtgcacaccatcatgttcatcgtgctctacagaggcaggacatactggacatccccgctgattccttggc

SEQ ID NO: 3044 - DNA, 2769 bp, Diabrotica virgifera
  SmartBlast Evalue=3E-99; Info=Putative helicase mov-10-B.1 n=1 Tax=Danio rerio RepID=M10B1_DANRE
cattgataaaaataatatttaaaagataacagtttttctcacttagactaaaaacatataatttttacaaatgcacagtttattgatgatactgggtatctatttggacggctccaatactttgagtgatttgattaacagcagcatcagtctttctaggaactggaactccccagaaagtggatagcgtatcacatagatccatgtatttcaaccattttctgtccgtagccaaaacttgcgcgcatccgatgattattaatttactcatagctctggtaagtgcaacattgaatctcttttcatttttaacgaagcctaacttataaagtttatcgtacagcaacaaatctttttgggctcttacagtagatataataataattcttttctcccgtccctgaaacgtttcagttgttccgacatcgacaccttcgatttgatttcctttaaggagggctttcaatgtatacacctgtctggcatacggcgtaacaataccgatatcggaaggtttcactttgtcttcctcatctagaaattctaaagcttgcagagctctaatgtactttattaccatttgcgcctctttcacgttgaaataactaggcgactttccctgcctttgctctttggataataaactacaaaattcaacagcatcgcctgtgaattttgggtgtgagttcttctttcccgcaacactgtacatttcttgtagcttttggaagacgcaagttgttgctaaggggtctaataatgacctttgtgactgggcctgcaactggtctccgtagaacagctcgttaggcaacgttagaatctttggatggtttctaaaattctgtatcaacatggtgatacaccgctggttatgttggtgatacaattcggtttgcataattctctcaaggagagatatacctaagccatatcggatcgcagaatcagaagttaatgatggtccaagctgcttggggtctccggccaatactatctgctgtccatgtttaaccatacctaaggctatgcaaacttcaggttcacatgcttgtgcagcttcatcaacgaataccacgtctggtttgtagtaaccacccattataccgacgtgaattaaagtaatcacgactattctataagttttcaaggatgccgaatccatttttttatattgccacgatccctcatattcttcgtagttggaatatcgtaataccggttcatgaacatttgacaagtcaacagtagatgacataactctaatcaactcattcgtagtgcaatgttccagcagcttttcggtaattaaatcacaagcagcatttgaaggggcacagacaagaatattgtgagtggtcttaaatttaagctgtaaaatagcctctacgatcgttacagtctttcctgttcccggaggcccaaatactatgtaaggatatggaactgaagttgcatttaaaatatttctaactgcagtcttctgctcttgatttctagcaatcgtttgattaaggaattctccatcgttaatgattctttctgtttgtctacctcttaatgttgcatcatgagatggaaatatacacggaagtaaaccatttgccgaaacttgatctacaccttgatgttgtcgttcaaatgataaccgacttaacacaaattttacatcataaatatccctcacttctgattggctctcaatgatcattatcaactctctattcacgttcccaatctctacagtcgaatcagtaactcttcttataattcccgtgtaaccagtatggtcaatgtgagcacgaatctgtaccatatctccaacaattagcgaaggacgtttctcagctaaacctggcacttctagttttagtagctcattatccaataagtctaaagacacattctccatattgtactgttgaataccaagtgtttgtccgatttcttcaatccaaaggacattatgccaaaattttttgaaattctctctagtaacttctcctggttgcatttgtctctgtaattctcttaaatggtttaagtcttctcttctcatgtcttgaaattcttgtaaaccgtaaaagtaaaatcgttttgaagactctggaattgcatatctgtcggagtacttcgatttgcctgtaggtgggagtatatgctgtacgtcccaccatggatttccagtaaatggactcgtcaggtattgctcattttcttcaatggtttcttccactgagatattaattgatcgaatgatggagaaagtttgtcgattgtttgtctggaaattgaaacaaactggaatgttgtaacctccaacaattgacttgtccggagaaaatctaaccataacttgatgatttgtatttggcattagctgtactacagtatctggggtaatattctcgttagtagtaaaaataggaaaaatattcatattcacataatagtagtactctagtaagaaatatatcgtctcttcttctgtttgtcgccgtacatgtaaaatcaagtacatttccttgttgcctcaacgaatccaacgtaattttataataatgttttccattattaacatttgttattaagggggtccttccaagtccaattgtgacttctacaccatgacgatttcttaccaatgacttcctatcattatgccattgctttaacataaaattgagcctgtgcctattggagttattgtgcacaccatcatgttcatcatgctctacagcacatacaggacatacccgctgattcctt

SEQ ID NO: 3045 - DNA, 2800 bp, Diabrotica virgifera
tatattttattcaaaattctaataaaatatttaatataaatattatacttatataatataaaaaattaatattaaacaattatatttaattaaataatatataaagaaaaaacaatcgcgttactaaagaaaataaaaataaataatatgggttcctcgtaaaaatatacagcaagaaatatttagacatttaaaatgttgttgacatacaatatttgttgaaattgtcaaaaacactaagtggcagtaaaggtattcaactaaaatttatattaaaacttaagtaataaataaagctttataaaacaagttttttctacgagcgtgcaaaaatgtctactttcgcgcacgcgttttagtttagaaagttttacttttccgcacgcgttttacttttccgcacgcgtgttaatttagatatgttaatatggccttaaagtaattataatacatgcaataaactaatatttagatattatttactaatttatttcaaatatatcttattgtgttcctgttttaatgaaattaacgcgataattcgatgaaataaaataattttgacataatattcgaaagtcaaatcagtagacaataacagtggttttgaatcgtcgtcacggaaaccaagatcgtcgtcatgctaaccaattatgctgaaagtttggttttgacaaccttgtcaaagaattaatttgtgtatgtattttcatattaattaaattaattgattaagatttggtcattttttaaagactcgtagaaaaaatattgttcctaacgcttgcagaaagtctcttttccgcattcgactgcttaccgaactcccgcttcgcgtcgttcggcgaactgcaggcgcgtgcggaaaagaatgagtttctgcacttgttaggaaaataactattatacaaacgatcacaagatacctacgaagaaagtttttccaattttcaggccactataaatcatatacattatcgagcatacaattaggggcacccgtaccttttttgttttgtttctggccttggtttggaacctttagccacgtaattcatatcactagctcagtggagtaatgtgtagtacctatgtgtgttgagtaggtaaatgtcatgttacttggtaaagtcgacttcattgtcgccttattgaatccgaatctctgcgatccctattccgtacctaatttgaatttattttagaaattattattatcttttaactattttcagttgtaggtaacatagtttattaatggattgcgtgaacaaattgttgctgttgctgtttcgataactgataacagttgtagataaacagagccccttaacctaattcctaaaatctattatcagcatagtttttttctgggattttaatgccaattgtaaattgtttatgtagtgttgtctgttgtgttcaagttttgttgaggcggcaagaattgtggcggtgtcaacgcgaaactgcgacaaacgttggtgtaagtctctagagtgtgcaacaagtatggcgacggtatgtagagcccagtctacttactcgaggacctggttcaggtcgaggcagaattacaacagctagagataaccattttgtcgtttatgaaattatccacaaaaaataagaaatataaatataagtgaatggaaagttaggaggcaacttcatgctgctagtttatcttctcgaactagagaaactggatagctgctttcccatgaacaccgaattgccagattgagttttgcacgagaacacttggcctcaacaagatagagttgaagtcgtgtattattattgtgttccgatgaatcgagattttaccttatgggcccagacaaacgtgtaaagcctggtttatgttaggacggggacgtggacgacacggctgtcttacggggcacgttgaagaatcctctgatatgaaaagcattggctagtttatcatacaagggaatggggcgacaccggggatgtgcgcgttctataaggctgatttatgttaggacggggatttggacgacactaccgtcttacggagcacgttgaagaatcgtctgatatgaaaatcattggctagtgctgcgacgtgcgctttctattgtttttcgtctaacacaaatcagccttaagagtgtggcgatgtacaggcgagagatatgtcaagcatgtgttgctgagcgatttcaatttggtgggggtcagttatagcacggaaaggaatatcgtttgacgctcgcacggagttgtctttatcgagaatgggacattgacaacgcatagatacctgaaactggttctagaagaccatgttttactgtttatggttattcttggagacgactcctctgatagttactgagtatcttgaggaaatttaaatcacacgatttgtttggccttttcccaatccaaatatcaatcccatagaacatgttgggatgaattgaagagatgtttatcatgtgccggccctcataacttccgtggagctttgtgacatattaatgcagaaatggaccaatctttcgcagaatgtgatccaaaatctgatcaaaagcataatcttgtagtgatgttgattatagttactttcgagtattcgttacaaatcgttacttttgtataaagtaatcatttagagtattcgttactttgattactatgataacttttgtatttgagtaccggtaatcatatctcagtaggtaggtatttcgtataagtattccgatatatcaacgatttctccaatcagtttaagggataaaaatgatttgattactatgattac

SEQ ID NO: 3046 - DNA, 2800 bp, Diabrotica virgifera
tatattttattcaaaattctaataaaatatttaatataaatattatacttatataatataaaaaattaatattaaacaattatatttaattaaataatatataaagaaaaaacaatcgcgttactaaagaaaataaaaataaataatatgggttcctcgtaaaaatatacagcaagaaatatttagacatttaaaatgttgttgacatacaatatttgttgaaattgtcaaaaacactaagtggcagtaaaggtattcaactaaaatttatattaaaacttaagtaataaataaagctttataaaacaagttttttctacgagcgtgcaaaaatgtctactttcgcgcacgcgttttagtttagaaagttttacttttccgcacgcgttttacttttccgcacgcgtgttaatttagatatgttaatatggccttaaagtaattataatacatgcaataaactaatatttagatattatttactaatttatttcaaatatatcttattgtgttcctgttttaatgaaattaacgcgataattcgatgaaataaaataattttgacataatattcgaaagtcaaatcagtagacaataacagtggttttgaatcgtcgtcacggaaaccaagatcgtcgtcatgctaaccaattatgctgaaagtttggttttgacaaccttgtcaaagaattaatttgtgtatgtattttcatattaattaaattaattgattaagatttggtcattttttaaagactcgtagaaaaaatattgttcctaacgcttgcagaaagtctcttttccgcattcgactgcttaccgaactcccgcttcgcgtcgttcggcgaactgcaggcgcgtgcggaaaagaatgagtttctgcacttgttaggaaaataactattatacaaacgatcacaagatacctacgaagaaagtttttccaattttcaggccactataaatcatatacattatcgagcatacaattaggggcacccgtaccttttttgttttgtttctggccttggtttggaacctttagccacgtaattcatatcactagctcagtggagtaatgtgtagtacctatgtgtgttgagtaggtaaatgtcatgttacttggtaaagtcgacttcattgtcgccttattgaatccgaatctctgcgatccctattccgtacctaatttgaatttattttagaaattattattatcttttaactattttcagttgtaggtaacatagtttattaatggattgcgtgaacaaattgttgctgttgctgtttcgataactgataacagttgtagataaacagagccccttaacctaattcctaaaatctattatcagcatagtttttttctgggattttaatgccaattgtaaattgtttatgtagtgttgtctgttgtgttcaagttttgttgaggcggcaagaattgtggcggtgtcaacgcgaaactgcgacaaacgttggtgtaagtctctagagtgtgcaacaagtatggcgacggtatgtagagcccagtctacttactcgaggacctggttcaggtcgaggcagaattacaacagctagagataaccattttgtcgtttatgacattatccacaaaaaataagaaatataaacataagtgaatggaaagttaggaggcaactgcatgctgctagtttatcttctcgaactagagaaactggatagctgctttcccatgaacaccgaattgccagattgagttttgcacgagaacacttggcctcaacaagatagggttgaagtcgtgtattattattgtgttccgatgaatcgagattttaccttatgggaccagacaaacgtgtaaagcctgatttatgttaggacggggacgtggacgacacggctgtcttacggggcacgttgaagaatcctctgatatgaaaagcattggctagtttatcatacaagggaatggggcgacaccggggatgtgcgcgttctataaggctgatttatgttaggacggggatttggacgacactaccgtcttacggagcacgttgaagaatcgtctgatatgaaaatcattggctagtgctgcgacgtgcgctttctattgtttttcgtctaacacaaatcagccttaagagtgtggcgatgtacaggcgagagatatgtcaagcatgtgttgctgagcgatttcaatttggtgggggtcagttatagcacggaaaggaatatcgtttgacgctcgcacggagttgtctttatcgagaatgggacattgacaacgcatagatacctgaaactggttctagaagaccatgttttactgtttatggttattcttggagacgactcctctgatagttactgagtatcttgaggaaatttaaatcacacgatttgtttggccttttcccaatccaaatatcaatcccatagaacatgttgggatgaattgaagagatgtttatcatgtgccggccctcataacttccgtggagctttgtgacatattaatgcagaaatggaccaatctttcgcagaatgtgatccaaaatctgatcaaaagcataatcttgtagtgatgttgattatagttactttcgagtattcgttacaaatcgttacttttgtataaagtaatcatttagagtattcgttactttgattactatgataacttttgtatttgagtaccggtaatcatatctcagtaggtaggtatttcgtataagtattccgatatatcaacgatttctccaatcagtttaagggataaaaatgatttgattactatgattac

SEQ ID NO: 3047 - DNA, 2737 bp, Diabrotica virgifera
tatattttattcaaaattctaataaaatatttaatataaatattatacttatataatataaaaaattaatattaaacaattatatttaattaaataatatataaagaaaaaacaatcgcgttactaaagaaaataaaaataaataatatgggttcctcgtaaaaatatacagcaagaaatatttagacatttaaaatgttgttgacatacaatatttgttgaaattgtcaaaaacactaagtggcagtaaaggtattcaactaaaatttatattaaaacttaagtaataaataaagctttataaaacaagttttttctacgagcgtgcaaaaatgtctactttcgcgcacgcgttttagtttagaaagttttacttttccgcacgcgttttacttttccgcacgcgtgttaatttagatatgttaatatggccttaaagtaattataatacatgcaataaactaatatttagatattatttactaatttatttcaaatatatcttattgtgttcctgttttaatgaaattaacgcgataattcgatgaaataaaataattttgacataatattcgaaagtcaaatcagtagacaataacagtggttttgaatcgtcgtcacggaaaccaagatcgtcgtcatgctaaccaattatgctgaaagtttggttttgacaaccttgtcaaagaattaatttgtgtatgtattttcatattaattaaattaattgattaagatttggtcattttttaaagactcgtagaaaaaatattgttcctaacgcttgcagaaagtctcttttccgcattcgactgcttaccgaactcccgcttcgcgtcgttcggcgaactgcaggcgcgtgcggaaaagaatgagtttctgcacttgttaggaaaataactattatacaaacgatcacaagatacctacgaagaaagtttttccaattttcaggccactataaatcatatacattatcgagcatacaattaggggcacccgtaccttttttgttttgtttctggccttggtttggaacctttagccacgtaattcatatcactagctcagtggagtaatgtgtagtacctatgtgtgttgagtaggtaaatgtcatgttacttggtaaagtcgacttcattgtcgccttattgaatccgaatctctgcgatccctattccgtacctaatttgaatttattttagaaattattattatcttttaactattttcagttgtaggtaacatagtttattaatggattgcgtgaacaaattgttgctgttgctgtttcgataactgataacagttgtagataaacagagccccttaacctaattcctaaaatctattatcagcatagtttttttctgggattttaatgccaattgtaaattgtttatgtagtgttgtctgttgtgttcaagttttgttgaggcggcaagaattgtggcggtgtcaacgcgaaactgcgacaaacgttggtgtaagtctctagagtgtgcaacaagtatggcgacggtatgtagagcccagtctacttactcgaggacctggttcaggtcgaggcagaattacaacagctagagataaccattttgtcgtttatgaaattatccacaaaaaataagaaatataaatataagtgaatggaaagttaggaggcaacttcatgctgctagtttatcttctcgaactagagaaactggatagctgctttcccatgaacaccgaattgccagattgagttttgcacgagaacacttggcctcaacaagatagagttgaagtcgtgtattattattgtgttccgatgaatcgagattttaccttatgggcccagacaaacgtgtaaagcctggtttatgttaggacggggacgtggacgacacggctgtcttacggggcacgttgaagaatcctctgatatgaaaagcattggctagtttatcatacaagggaatggggcgacaccggggatgtgcgcgttctataaggctgatttatgttaggacggggatttggacgacactaccgtcttacggagcacgttgaagaatcgtctgatatgaaaatcattggctagtgctgcgacgtgcgctttctattgtttttcgtctaacacaaatcagccttaagagtgtggcgatgtacaggcgagagatatgtcaagcatgtgttgctgagcgatttcaatttggtgggggtcagttatagcacggaaaggaatatcgtttgacgctcgcacggagttgtctttatcgagaatgggacattgacaacgcatagatacctgaaactggttctagaagaccatgttttactgtttatggttattcttggagacgactcctctgatagttactgagtatcttgaggaaatttaaatcacacgatttgtttggccttttcccaatccaaatatcaatcccatagaacatgttgggatgaactgaacgggatgtttacgaaataatgtaccggccctcataacttccgtagagctttgtgacgtattaatgcaggaatggaccaatcttccgcaaaatgtgatccaaaatctgattaaaagcataccttgtcttttgcagactgttatcactaccagaggagggaatactggctacagaagttcttaaaatttcttttgtttcaacaaaaaacacatcaaattaaaatcttatatatatatatatatatatatatatatatatacatatatacatatatatatata

SEQ ID NO: 3048 - DNA, 2737 bp, Diabrotica virgifera
tatattttattcaaaattctaataaaatatttaatataaatattatacttatataatataaaaaattaatattaaacaattatatttaattaaataatatataaagaaaaaacaatcgcgttactaaagaaaataaaaataaataatatgggttcctcgtaaaaatatacagcaagaaatatttagacatttaaaatgttgttgacatacaatatttgttgaaattgtcaaaaacactaagtggcagtaaaggtattcaactaaaatttatattaaaacttaagtaataaataaagctttataaaacaagttttttctacgagcgtgcaaaaatgtctactttcgcgcacgcgttttagtttagaaagttttacttttccgcacgcgttttacttttccgcacgcgtgttaatttagatatgttaatatggccttaaagtaattataatacatgcaataaactaatatttagatattatttactaatttatttcaaatatatcttattgtgttcctgttttaatgaaattaacgcgataattcgatgaaataaaataattttgacataatattcgaaagtcaaatcagtagacaataacagtggttttgaatcgtcgtcacggaaaccaagatcgtcgtcatgctaaccaattatgctgaaagtttggttttgacaaccttgtcaaagaattaatttgtgtatgtattttcatattaattaaattaattgattaagatttggtcattttttaaagactcgtagaaaaaatattgttcctaacgcttgcagaaagtctcttttccgcattcgactgcttaccgaactcccgcttcgcgtcgttcggcgaactgcaggcgcgtgcggaaaagaatgagtttctgcacttgttaggaaaataactattatacaaacgatcacaagatacctacgaagaaagtttttccaattttcaggccactataaatcatatacattatcgagcatacaattaggggcacccgtaccttttttgttttgtttctggccttggtttggaacctttagccacgtaattcatatcactagctcagtggagtaatgtgtagtacctatgtgtgttgagtaggtaaatgtcatgttacttggtaaagtcgacttcattgtcgccttattgaatccgaatctctgcgatccctattccgtacctaatttgaatttattttagaaattattattatcttttaactattttcagttgtaggtaacatagtttattaatggattgcgtgaacaaattgttgctgttgctgtttcgataactgataacagttgtagataaacagagccccttaacctaattcctaaaatctattatcagcatagtttttttctgggattttaatgccaattgtaaattgtttatgtagtgttgtctgttgtgttcaagttttgttgaggcggcaagaattgtggcggtgtcaacgcgaaactgcgacaaacgttggtgtaagtctctagagtgtgcaacaagtatggcgacggtatgtagagcccagtctacttactcgaggacctggttcaggtcgaggcagaattacaacagctagagataaccattttgtcgtttatgacattatccacaaaaaataagaaatataaacataagtgaatggaaagttaggaggcaactgcatgctgctagtttatcttctcgaactagagaaactggatagctgctttcccatgaacaccgaattgccagattgagttttgcacgagaacacttggcctcaacaagatagggttgaagtcgtgtattattattgtgttccgatgaatcgagattttaccttatgggaccagacaaacgtgtaaagcctgatttatgttaggacggggacgtggacgacacggctgtcttacggggcacgttgaagaatcctctgatatgaaaagcattggctagtttatcatacaagggaatggggcgacaccggggatgtgcgcgttctataaggctgatttatgttaggacggggatttggacgacactaccgtcttacggagcacgttgaagaatcgtctgatatgaaaatcattggctagtgctgcgacgtgcgctttctattgtttttcgtctaacacaaatcagccttaagagtgtggcgatgtacaggcgagagatatgtcaagcatgtgttgctgagcgatttcaatttggtgggggtcagttatagcacggaaaggaatatcgtttgacgctcgcacggagttgtctttatcgagaatgggacattgacaacgcatagatacctgaaactggttctagaagaccatgttttactgtttatggttattcttggagacgactcctctgatagttactgagtatcttgaggaaatttaaatcacacgatttgtttggccttttcccaatccaaatatcaatcccatagaacatgttgggatgaactgaacgggatgtttacgaaataatgtaccggccctcataacttccgtagagctttgtgacgtattaatgcaggaatggaccaatcttccgcaaaatgtgatccaaaatctgattaaaagcataccttgtcttttgcagactgttatcactaccagaggagggaatactggctacagaagttcttaaaatttcttttgtttcaacaaaaaacacatcaaattaaaatcttatatatatatatatatatatatatatatatatacatatatacatatatatatata

SEQ ID NO: 3049 - DNA, 2827 bp, Diabrotica virgifera
  SmartBlast Evalue=1E-106; Info=Endonuclease-reverse transcriptase n=1 Tax=Bombyx mori RepID=D7F164_BOMMO
cagcgaataatgagcatattattaaacggtacgtagaaaaagaattattttataccaggaacaacaaaaaataattctttttatctgtacactcacgaagatcataactcccaaaatatttatgacgaaaacatctagttcttaatatatgacgacgaatataattatttacattcctgttcttgcggaaaaaataactcctcgaagatttacattaaacaaaaattattttccagtaaagtagctacgaaaataaaatttgccgtcgctaatttaggattattcttttcgccgcgcattattaggattcataatcttcgcaaacatagaaatagaaatgatttttttttgctgtcattcatcgaagagtaattattttggccgagaaatttctagtaatattaattttcgtggaaacataatcagaaataattatttttacaggtaattattgtaaactttttcttatcaccgcaccgtattagaagttatggtcttcgaaagtatagaacagaaaaaatatttttcgctctcattcatccaggatcatacttttcaccgcgcattattaggagttataatcttcatgaatacagaattagaaataattttttcaatgttattgatcgaagaataattattttcaatgagaactttttagtaattaaaattttcgtgaacccacaaacagaaatgatgtatttgctgatacttctcaaaaaatatttttcgctaacactttattagggattataatttttacgatcatataatcgaaaataatatttttcgcggcgttctttgaaagttatattcttaacggcatttttcggagttatacttttcatagacggctgcgatatattgaaattttaaatttaatattatttctacatttttatatttaaatgtacaagcgcatcaacaggcacattgtgtaaagctaataagtttaaaatctattttgaaatttttatttcgtaagaaatgcaaaagttggataggtgagacaaaatctcacgcgcgaccactgacgtaaaagccaacctagcgaccaatgccgagttaatcatatatatcattatatttgtggctctaaaacaaacgaaaatgagtcattaccaaaaaaattgttgtatagtacaaaatttcgtaattaaactatttaattatcaaaatgtttatttatgtttattgatttcgtattatatattcatatactaaacaggcgggatttcgaaaagggtttggtactaacgatcacttacaaaccatcagaacactggtagaaaaaaccacagaatataatgtacccttacatatggcatttattgactttcacaaggctttccatagtattgaaacctggtcctttttgtcagccctaagggatgctcgaatagacttacagtacactacactcattaaaaacatttatgaacaggccacattccacatcaacatcaatgaagaccaaaaaaccgaaaaaatacgccttggtaaaggtattagacaaggtgatactatttcaccaaaactttttaccttagcattggaaaatgtattcaaacagctcgactgggaggaaaaaggtctaaacattgatggtgtacgtttgagtcatttgaggtttgcggacgacatagtattattcagtacagatatcaaggaactggagcaaatgatgaaggaactaaaccagcagtcaaatataaaataggtctcaaaatgaatcttcagaaaacaaaaataatgagtaatgtacaaactaatcttgttattgacaacgtcagtcttgaaaatgtagaccactatatatatcttggacataccattaaaatcggcaaagaaaaccaaatagccgaaatagaaagacgcatacaattgtcttgggtagctttcggcaagttaagctgtatcttgaaaaatagaaatataccaatgtgtctaaaacgtagagtttatgacaaatgtatcttgcctgtaactacatatggactggataccatggcctttacaaagaaaaccttagatcagctcagtacaactcaaaaagcgatggagagggccacgctagggattagtttgagagacaaaattcgaaatatcgacattcgcgaaagaacaaagattactgatgtcgcagaacgtatagcaaggctcaagtggcaatgggtcggacatgttgcccgaaataatcccgaaaaatggacacagaggctaacaaactggagaccaagagagaacaggcgaggagtaggcagaccgcagaagaggtgggcagatgatatcaaacaagtcgcgggcaaacaagagtagaaatcgatggaagcaaatggaataggcctatgtccagcagtggacgaacacaggctgaagaagaaaaagaattcatatacttgtcaataacgctgaaatatactatatctgtaaaaaaatttcactaattttgacaataatacttgcttacctaagagccacagatatttaagtataaaactgggatacttatacatagtaatacctatttgtacaaagaataaatcaaatcactggaaaacatattctttgcacatttggcgtttaagttttactctggttatataggttgatattttattaagtaataagggaaagtgggggaatggtgcgcacttagcagaaatcgattctgttgtaaattctttaaattcatcataacggctagtatgttacagtaagctctaattattcccatactttgaatatttaaattaggttttagagaaatacaaaatactaaagcaaaatattaaaaaacgaaaagaaagtgcctttgtgcacgatt

SEQ ID NO: 3050 - DNA, 2792 bp, Diabrotica virgifera
  SmartBlast Evalue=9E-99; Info=Endonuclease-reverse transcriptase n=1 Tax=Bombyx mori RepID=D7F164_BOMMO
cagcgaataatgagcatattattaaacggtacgtagaaaaagaattattttataccaggaacaacaaaaaataattctttttatctgtacactcacgaagatcataactcccaaaatatttatgacgaaaacatctagttcttaatatatgacgacgaatataattatttacattcctgttcttgcggaaaaaataactcctcgaagatttacattaaacaaaaattattttccagtaaagtagctacgaaaataaaatttgccgtcgctaatttaggattattcttttcgccgcgcattattaggattcataatcttcgcaaacatagaaatagaaatgatttttttttgctgtcattcatcgaagagtaattattttggccgagaaatttctagtaatattaattttcgtggaaacataatcagaaataattatttttacaggtaattattgtaaactttttcttatcaccgcaccgtattagaagttatggtcttcgaaagtatagaacagaaaaaatatttttcgctctcattcatccaggatcatacttttcaccgcgcattattaggagttataatcttcatgaatacagaattagaaataattttttcaatgttattgatcgaagaataattattttcaatgagaactttttagtaattaaaattttcgtgaacccacaaacagaaatgatgtatttgctgatacttctcaaaaaatatttttcgctaacactttattagggattataatttttacgatcatataatcgaaaataatatttttcgcggcgttctttgaaagttatattcttaacggcatttttcggagttatacttttcatagacggctgcgatatattgaaattttaaatttaatattatttctacatttttatatttaaatgtacaagcgcatcaacaggcacattgtgtaaagctaataagtttaaaatctattttgaaatttttatttcgtaagaaatgcaaaagttggataggtgagacaaaatctcacgcgcgaccactgacgtaaaagccaacctagcgaccaatgccgagttaatcatatatatcattatatttgtggctctaaaacaaacgaaaatgagtcattaccaaaaaaattgttgtatagtacaaaatttcgtaattaaactatttaattatcaaaatgtttatttatgtttattgatttcgtattatatattcatatactaaacaggcgggatttcgaaaagggtttggtactaacgatcacttacaaaccatcagaacactggtagaaaaaaccacagaatataatgtacccttacatatggcatttattgactttcacaaggctttccatagtattgaaacctggtcctttttgtcagccctaagggatgctcgaatagacttacagtacactacactcattaaaaacatttatgaacaggccacattccacatcaacatcaatgaagaccaaaaaaccgaaaaaatacgccttggtaaaggtattagacaaggtgatactatttcaccaaaactttttaccttagcattggaaaatgtattcaaacagctcgactgggaggaaaaaggtctaaacattgatggtgtacgtttgagtcatttgaggtttgcggacgacatagtattattcagtacagatatcaaggaactggagcaaatgatgaaggaactaaaccagcagtcaaatataaaataggtctcaaaatgaatcttcagaaaacaaaaataatgagtaatgtacaaactaatcttgttattgacaacgtcagtcttgaaaatgtagaccactatatatatcttggacataccattaaaatcggcaaagaaaaccaaatagccgaaatagaaagacgcatacaattgtcttgggtagctttcggcaagttaagctgtatcttgaagaataaagatataccgatgtgtctaaaacgtagagtttatgacaaatgtatcttgcctgtaactacatatggactggagaccatggcatttacaaagaaaacctttaagcatgctagggattagtttgagagacaaaattcgaaatatcgacattcgcgaaagaacaaagattactgatgtcgcagaacgtatagcaaggctcaagtggcaatgggtcggacatgttgcccgaaataatccagaaaaatggacacagagactaacaaactggagaccaagagagaacaggcgaggagtaggcagaccgcagaagaggtgggcagatgatatcaaacaagtcgcgggcaaacaagagtagaaatcgatggaagcaaatggaataggcctatgtccagcagtggacgaacacaggctgaagaagaaaaagaattcatatacttgtcaataacgctgaaatatactatatctgtaaaaaaatttcactaattttgacaataatacttgcttacctaagagccacagatatttaagtataaaactgggatacttatacatagtaatacctatttgtacaaagaataaatcaaatcactggaaaacatattctttgcacatttggcgtttaagttttactctggttatataggttgatattttattaagtaataagggaaagtgggggaatggtgcgcacttagcagaaatcgattctgttgtaaattctttaaattcatcataacggctagtatgttacagtaagctctaattattcccatactttgaatatttaaattaggttttagagaaatacaaaatactaaagcaaaatattaaaaaacgaaaagaaagtgcctttgtgcacgatt

SEQ ID NO: 3051 - DNA, 2618 bp, Diabrotica virgifera
  SmartBlast Evalue=1E-113; Info=Endonuclease-reverse transcriptase n=1 Tax=Bombyx mori RepID=D7F164_BOMMO
cagcgaataatgagcatattattaaacggtacgtagaaaaagaattattttataccaggaacaacaaaaaataattctttttatctgtacactcacgaagatcataactcccaaaatatttatgacgaaaacatctagttcttaatatatgacgacgaatataattatttacattcctgttcttgcggaaaaaataactcctcgaagatttacattaaacaaaaattattttccagtaaagtagctacgaaaataaaatttgccgtcgctaatttaggattattcttttcgccgcgcattattaggattcataatcttcgcaaacatagaaatagaaatgatttttttttgctgtcattcatcgaagagtaattattttggccgagaaatttctagtaatattaattttcgtggaaacataatcagaaataattatttttacaggtaattattgtaaactttttcttatcaccgcaccgtattagaagttatggtcttcgaaagtatagaacagaaaaaatatttttcgctctcattcatccaggatcatacttttcaccgcgcattattaggagttataatcttcatgaatacagaattagaaataattttttcaatgttattgatcgaagaataattattttcaatgagaactttttagtaattaaaattttcgtgaacccacaaacagaaatgatgtatttgctgatacttctcaaaaaatatttttcgctaacactttattagggattataatttttacgatcatataatcgaaaataatatttttcgcggcgttctttgaaagttatattcttaacggcatttttcggagttatacttttcatagacggctgcgatatattgaaattttaaatttaatattatttctacatttttatatttaaatgtacaagcgcatcaacaggcacattgtgtaaagctaataagtttaaaatctattttgaaatttttatttcgtaagaaatgcaaaagttggataggtgagacaaaatctcacgcgcgaccactgacgtaaaagccaacctagcgaccaatgccgagttaatcatatatatcattatatttgtggctctaaaacaaacgaaaatgagtcattaccaaaaaaattgttgtatagtacaaaatttcgtaattaaactatttaattatcaaaatgtttatttatgtttattgatttcgtattatatattcatatactaaacaggcgggatttcgaaaagggtttggtactaacgatcacttacaaaccatcagaacactggtagaaaaaaccacagaatataatgtacccttacatatggcatttattgactttcacaaggctttccatagtattgaaacctggtcctttttgtcagccctaagggatgctcgaatagacttacagtacactacactcattaaaaacatttatgaacaggccacattccacatcaacatcaatgaagaccaaaaaaccgaaaaaatacgccttggtaaaggtattagacaaggtgatactatttcaccaaaactttttaccttagcattggaaaatgtattcaaacagctcgactgggaggaaaaaggtctaaacattgatggtgtacgtttgagtcatttgaggtttgcggacgacatagtattattcagtacagatatcaaggaactggagcaaatgatgaaggaactaaaccagcagtcaaatataaaataggtctcaaaatgaatcttcagaaaacaaaaataatgagtaatgtacaaactaatcttgttattgacaacgtcagtcttgaaaatgtagaccactatatatatcttggacataccattaaaatcggcaaagaaaaccaaatagccgaaatagaaagacgcatacaattgtcttgggtagctttcggcaagttaagctgtatcttgaaaaatagaaatataccaatgtgtctaaaacgtagagtttatgacaaatgtatcttgcctgtaactacatatggactggataccatggcctttacaaagaaaaccttagatcagctcagtacaactcaaaaagcgatggagagggccacgctagggattagtttgagagacaaaattcgaaatatcgacattcgcgaaagaacaaagattactgatgtcgcagaacgtatagcaaggctcaagtggcaatgggtcggacatgttgcccgaaataatcccgaaaaatggacacagaggctaacaaactggagaccaagagagaacaggcgaggagtaggcagaccgcagaagaggtgggcagatgatatcaaacaagtcgcgggcaagcagtggatgagaattgccaagagtagaaattgatggaagcaaatggaaaagacctatgtccagcagtggacgaacacaggctgaagaagaagatgacataacgcatgtcagtggttaagggtaaaaaaacatacatgtatttttttttagggaagtacaatatcgaggagtatatcctttctggccggtgtttgtattgatacattgctttctagactttatctttcatgatctagagttatttctttccgacaaatgtctacattcccttttattcagttatcacatattatcacaagtggtacggc

SEQ ID NO: 3052 - DNA, 2583 bp, Diabrotica virgifera
  SmartBlast Evalue=1E-105; Info=Endonuclease-reverse transcriptase n=1 Tax=Bombyx mori RepID=D7F164_BOMMO
cagcgaataatgagcatattattaaacggtacgtagaaaaagaattattttataccaggaacaacaaaaaataattctttttatctgtacactcacgaagatcataactcccaaaatatttatgacgaaaacatctagttcttaatatatgacgacgaatataattatttacattcctgttcttgcggaaaaaataactcctcgaagatttacattaaacaaaaattattttccagtaaagtagctacgaaaataaaatttgccgtcgctaatttaggattattcttttcgccgcgcattattaggattcataatcttcgcaaacatagaaatagaaatgatttttttttgctgtcattcatcgaagagtaattattttggccgagaaatttctagtaatattaattttcgtggaaacataatcagaaataattatttttacaggtaattattgtaaactttttcttatcaccgcaccgtattagaagttatggtcttcgaaagtatagaacagaaaaaatatttttcgctctcattcatccaggatcatacttttcaccgcgcattattaggagttataatcttcatgaatacagaattagaaataattttttcaatgttattgatcgaagaataattattttcaatgagaactttttagtaattaaaattttcgtgaacccacaaacagaaatgatgtatttgctgatacttctcaaaaaatatttttcgctaacactttattagggattataatttttacgatcatataatcgaaaataatatttttcgcggcgttctttgaaagttatattcttaacggcatttttcggagttatacttttcatagacggctgcgatatattgaaattttaaatttaatattatttctacatttttatatttaaatgtacaagcgcatcaacaggcacattgtgtaaagctaataagtttaaaatctattttgaaatttttatttcgtaagaaatgcaaaagttggataggtgagacaaaatctcacgcgcgaccactgacgtaaaagccaacctagcgaccaatgccgagttaatcatatatatcattatatttgtggctctaaaacaaacgaaaatgagtcattaccaaaaaaattgttgtatagtacaaaatttcgtaattaaactatttaattatcaaaatgtttatttatgtttattgatttcgtattatatattcatatactaaacaggcgggatttcgaaaagggtttggtactaacgatcacttacaaaccatcagaacactggtagaaaaaaccacagaatataatgtacccttacatatggcatttattgactttcacaaggctttccatagtattgaaacctggtcctttttgtcagccctaagggatgctcgaatagacttacagtacactacactcattaaaaacatttatgaacaggccacattccacatcaacatcaatgaagaccaaaaaaccgaaaaaatacgccttggtaaaggtattagacaaggtgatactatttcaccaaaactttttaccttagcattggaaaatgtattcaaacagctcgactgggaggaaaaaggtctaaacattgatggtgtacgtttgagtcatttgaggtttgcggacgacatagtattattcagtacagatatcaaggaactggagcaaatgatgaaggaactaaaccagcagtcaaatataaaataggtctcaaaatgaatcttcagaaaacaaaaataatgagtaatgtacaaactaatcttgttattgacaacgtcagtcttgaaaatgtagaccactatatatatcttggacataccattaaaatcggcaaagaaaaccaaatagccgaaatagaaagacgcatacaattgtcttgggtagctttcggcaagttaagctgtatcttgaagaataaagatataccgatgtgtctaaaacgtagagtttatgacaaatgtatcttgcctgtaactacatatggactggagaccatggcatttacaaagaaaacctttaagcatgctagggattagtttgagagacaaaattcgaaatatcgacattcgcgaaagaacaaagattactgatgtcgcagaacgtatagcaaggctcaagtggcaatgggtcggacatgttgcccgaaataatccagaaaaatggacacagagactaacaaactggagaccaagagagaacaggcgaggagtaggcagaccgcagaagaggtgggcagatgatatcaaacaagtcgcgggcaagcagtggatgagaattgccaagagtagaaattgatggaagcaaatggaaaagacctatgtccagcagtggacgaacacaggctgaagaagaagatgacataacgcatgtcagtggttaagggtaaaaaaacatacatgtatttttttttagggaagtacaatatcgaggagtatatcctttctggccggtgtttgtattgatacattgctttctagactttatctttcatgatctagagttatttctttccgacaaatgtctacattcccttttattcagttatcacatattatcacaagtggtacggc

SEQ ID NO: 3053 - DNA, 2697 bp, Diabrotica virgifera
  SmartBlast Evalue=2E-24; Info=Eukaryotic translation initiation factor 4E-binding protein 2 n=2 Tax=Formicidae RepID=E1ZYZ8_ 9HYME
aaggagaatatttgagttgtgcggttgatttgataagttgtttttagtgtcattacatattagctatttttaaaatgtctgcatcacccatggcaagacaagcggtggaaagtaaggcgattcctattaggagagtgttaattaatgatcattccgagttacctgcacattattcctctacccccggtggaactttgttttcaactacacctggaggtacaaaaatagtatacgaaaaatcggttcttctgaacctaaggaactccccaatttccaaaacaccccctcagttcgagattccagacaccatcttaggcggctccgctaagaacgtagttagaaaacaaaaccattccaggccattacctccaagtccaagaaagtcacagccagaaatcaacaaccacaatacctccgaggaccaatttgacatggaactttagtattatcgactagtcaggaagtggaatatgttaaaattataagattgctgcgcaggaagtggttacttgcaggttccgtcaccaaaaacaaccagattcctacagtggcgtaaccaggggggttttggggattataacccccccattgggatttactttgagctctatgcttgacaccattaacatggtgttaagcatagagtaccagataccctccagtagttgtaacccccccttaggatcatcctggttacgccattgagataccctccagtagttgtaaccacccttaggatcatcctggttacgccattgaatttatagctttttccatatccaaaaaataaatcattgataaaagaaaacgacatagcaagcaattgttggattcggtgatttaaaacaggtccacgttttattaattattacttaacaatagtgagaaggagtaaaatacgaagaataattcacattcaaagaagtattcctgtgggacagcaaatatattatgtaaatccggtaatgtttcaaacaatacccagttctcaccgtgacgtcatcataccaaattttggttgatttttggattctaaacaaaccaaattgcgcattttacaaacattgggtataatttttactcattttgtgaatttatttggaaattaattaattgtattaattagtcaagacttttattatacaaattggacatgtttagaattagaatgaaaatgattgtgacgtcactaatgaggcgcatattgcgcatattataaactccttctgattattaaatgatctgtagctttttaattgttttttaataatatacaaataaatatttcaatatatgtatacttataaaaataaaaattcctttagttcgtttggtaataacgaaaaatgacggttcctgtattgtttatatctatatcatctgtttaggagacatcaatatattgtattgaggaaagtatttgataagtaatgttttaaattacttttaagggaataactacgcagaatatttaagatgagcaattattccttgcattataagctgtaggaactcatttcttgtgcctctaggcaaaagtggccaaatgcataagttcaatactcagtatttccaggattgcctgatttgtgactgtatccctctataactctctgagaacgcatctgtagacccacattttaaaagcctctaccttttaagagttccttattgagtgtccaactttcgacactgttggaatattgaaaactaaaacataacacctaattattctaattattgaagttatacttctttacgtgaaattttataattccctggcgcatgcgtacacagacagtatgtagttcgttgctaatctttcaagataggtatgtacacctggttccaaaaaaaaactgatacgactcttgaagcgtattttgtagaaaattgagcagtgtattttgaaggataaatacttaatatttacatactgtcaatgtcactgccaaatcttaaaatttgtcagatagcttattctgttccacggttattagactttattattaatctttattattaatactttctccgcaactgagggtatcttatcaactgtattgtttttaaacaatagatgataaaataaaaatattgacagttcaaaaatgtgaacattattgcattgtgtgtggcctaagtttgggctgaaaactgaaatgtattacatttttacaaaattttggaatatgtttaattacgtagaccaattttaacagttgttttcaatacagatttcaatacaaatagtttctaatgtcttttgatgtcaaataattagggaagctggaattcaacagtttagaattttacattgagttaatgcaaaattgtgacgcatgtcaaaattctcaatgtattttaattgtattcatttttttttcgaatcctgagaaagctaataaatatttttgaaaaatttaaactcagaatgaagactacattattaccgagggctgaaagtccctgaaaacttctataatatttattttaataagttacagggctgaattgaatattaatttgttttgttgtataatccacgtttacaataattatgtgatctatttgatgtaaaaactatcatttatatactctttataaaatataggaattcaaaataatataaacatttagaccttaataattagtacaatttatgaattaacataatatgtaatcagttgtttgttg

SEQ ID NO: 3054 - DNA, 2685 bp, Diabrotica virgifera
  SmartBlast Evalue=2E-24; Info=Eukaryotic translation initiation factor 4E-binding protein 2 n=2 Tax=Formicidae RepID=E1ZYZ8_ 9HYME
aaggagaatatttgagttgtgcggttgatttgataagttgtttttagtgtcattacatattagctatttttaaaatgtctgcatcacccatggcaagacaagcggtggaaagtaaggcgattcctattaggagagtgttaattaatgatcattccgagttacctgcacattattcctctacccccggtggaactttgttttcaactacacctggaggtacaaaaatagtatacgaaaaatcggttcttctgaacctaaggaactccccaatttccaaaacaccccctcagttcgagattccagacaccatcttaggcggctccgctaagaacgtagttagaaaacaaaaccattccaggccattacctccaagtccaagaaagtcacagccagaaatcaacaaccacaatacctccgaggaccaatttgacatggaactttagtattatcgactagtcaggaagtggaatatgttaaaattataagattgctgcgcaggaagtggttacttgcaggttccgtcaccaaaaacaaccagattcctacagtggcgtaaccaggggggttttggggattataacccccccattgggatttactttgagctctatgcttgacaccattaacatggtgttaagcatagagtaccagataccctccagtagttgtaacccccccttaggatcatcctggttacgccattgagataccctccagtagttgtaaccacccttaggatcatcctggttacgccattgaatttatagctttttccatatccaaaaaataaatcattgataaaagaaaacgacatagcaagcaattgttggattcggtgatttaaaacaggtccacgttttattaattattacttaacaatagtgagaaggagtaaaatacgaagaataattcacattcaaagaagtattcctgtgggacagcaaatatattatgtaaatccggtaatgtttcaaacaatacccagttctcaccgtgacgtcatcctaccagattttggttgatttttggattctaaacaaaccaaattgcgcatttttgcaagcattgggtataatttttactcaatttgtgaatttatttggaagttaattaattgtattaattagtcaagacttttattatacaaattggacatgtttagaattaaaatgattgtgacgtcactaatgaggcgcatattgcgcatattataaactcctgattattaaacgatctgtagctttttaattgttttttaataatatataaataaatatttaaatatatgtatataaaataaaaatacctttagttcgtttggtaataacgaaaaaatgacggttcctgtattgtttatatctatatcatctgtttaggagacatcaatatattgtattgaggaaagtatttgataagtaatgttttaaattacttttaagggaataactacgcagaatatttaagatgagcaattattccttgcattataagctgtaggaactcatttcttgtgcctctaggcaaaagtggccaaatgcataagttcaatactcagtatttccaggattgcctgatttgtgactgtatccctctataactctctgagaacgcatctgtagacccacattttaaaagcctctaccttttaagagttccttattgagtgtccaactttcgacactgttggaatattgaaaactaaaacataacacctaattattctaattattgaagttatacttctttacgtgaaattttataattccctggcgcatgcgtacacagacagtatgtagttcgttgctaatctttcaagataggtatgtacacctggttccaaaaaaaaactgatacgactcttgaagcgtattttgtagaaaattgagcagtgtattttgaaggataaatacttaatatttacatactgtcaatgtcactgccaaatcttaaaatttgtcagatagcttattctgttccacggttattagactttattattaatctttattattaatactttctccgcaactgagggtatcttatcaactgtattgtttttaaacaatagatgataaaataaaaatattgacagttcaaaaatgtgaacattattgcattgtgtgtggcctaagtttgggctgaaaactgaaatgtattacatttttacaaaattttggaatatgtttaattacgtagaccaattttaacagttgttttcaatacagatttcaatacaaatagtttctaatgtcttttgatgtcaaataattagggaagctggaattcaacagtttagaattttacattgagttaatgcaaaattgtgacgcatgtcaaaattctcaatgtattttaattgtattcatttttttttcgaatcctgagaaagctaataaatatttttgaaaaatttaaactcagaatgaagactacattattaccgagggctgaaagtccctgaaaacttctataatatttattttaataagttacagggctgaattgaatattaatttgttttgttgtataatccacgtttacaataattatgtgatctatttgatgtaaaaactatcatttatatactctttataaaatataggaattcaaaataatataaacatttagaccttaataattagtacaatttatgaattaacataatatgtaatcagttgtttgttg

SEQ ID NO: 3055 - DNA, 2643 bp, Diabrotica virgifera
  SmartBlast Evalue=2E-24; Info=Eukaryotic translation initiation factor 4E-binding protein 2 n=2 Tax=Formicidae RepID=E1ZYZ8_ 9HYME
aaggagaatatttgagttgtgcggttgatttgataagttgtttttagtgtcattacatattagctatttttaaaatgtctgcatcacccatggcaagacaagcggtggaaagtaaggcgattcctattaggagagtgttaattaatgatcattccgagttacctgcacattattcctctacccccggtggaactttgttttcaactacacctggaggtacaaaaatagtatacgaaaaatcggttcttctgaacctaaggaactccccaatttccaaaacaccccctcagttcgagattccagacaccatcttaggcggctccgctaagaacgtagttagaaaacaaaaccattccaggccattacctccaagtccaagaaagtcacagccagaaatcaacaaccacaatacctccgaggaccaatttgacatggaactttagtattatcgactagtcaggaagtggaatatgttaaaattataagattgctgcgcaggaagtggttacttgcaggttccgtcaccaaaaacaaccagattcctacagtggcgtaaccaggggggttttggggattataacccccccattgggatttactttgagctctatgcttgacaccattaacatggtgttaagcatagagtaccagataccctccagtagttgtaacccccccttaggatcatcctggttacgccattgaatttatagctttttccatatccaaaaaataaatcattgataaaagaaaacgacatagcaagcaattgttggattcggtgatttaaaacaggtccacgttttattaattattacttaacaatagtgagaaggagtaaaatacgaagaataattcacattcaaagaagtattcctgtgggacagcaaatatattatgtaaatccggtaatgtttcaaacaatacccagttctcaccgtgacgtcatcataccaaattttggttgatttttggattctaaacaaaccaaattgcgcattttacaaacattgggtataatttttactcattttgtgaatttatttggaaattaattaattgtattaattagtcaagacttttattatacaaattggacatgtttagaattagaatgaaaatgattgtgacgtcactaatgaggcgcatattgcgcatattataaactccttctgattattaaatgatctgtagctttttaattgttttttaataatatacaaataaatatttcaatatatgtatacttataaaaataaaaattcctttagttcgtttggtaataacgaaaaatgacggttcctgtattgtttatatctatatcatctgtttaggagacatcaatatattgtattgaggaaagtatttgataagtaatgttttaaattacttttaagggaataactacgcagaatatttaagatgagcaattattccttgcattataagctgtaggaactcatttcttgtgcctctaggcaaaagtggccaaatgcataagttcaatactcagtatttccaggattgcctgatttgtgactgtatccctctataactctctgagaacgcatctgtagacccacattttaaaagcctctaccttttaagagttccttattgagtgtccaactttcgacactgttggaatattgaaaactaaaacataacacctaattattctaattattgaagttatacttctttacgtgaaattttataattccctggcgcatgcgtacacagacagtatgtagttcgttgctaatctttcaagataggtatgtacacctggttccaaaaaaaaactgatacgactcttgaagcgtattttgtagaaaattgagcagtgtattttgaaggataaatacttaatatttacatactgtcaatgtcactgccaaatcttaaaatttgtcagatagcttattctgttccacggttattagactttattattaatctttattattaatactttctccgcaactgagggtatcttatcaactgtattgtttttaaacaatagatgataaaataaaaatattgacagttcaaaaatgtgaacattattgcattgtgtgtggcctaagtttgggctgaaaactgaaatgtattacatttttacaaaattttggaatatgtttaattacgtagaccaattttaacagttgttttcaatacagatttcaatacaaatagtttctaatgtcttttgatgtcaaataattagggaagctggaattcaacagtttagaattttacattgagttaatgcaaaattgtgacgcatgtcaaaattctcaatgtattttaattgtattcatttttttttcgaatcctgagaaagctaataaatatttttgaaaaatttaaactcagaatgaagactacattattaccgagggctgaaagtccctgaaaacttctataatatttattttaataagttacagggctgaattgaatattaatttgttttgttgtataatccacgtttacaataattatgtgatctatttgatgtaaaaactatcatttatatactctttataaaatataggaattcaaaataatataaacatttagaccttaataattagtacaatttatgaattaacataatatgtaatcagttgtttgttg

SEQ ID NO: 3056 - DNA, 2631 bp, Diabrotica virgifera
  SmartBlast Evalue=2E-24; Info=Eukaryotic translation initiation factor 4E-binding protein 2 n=2 Tax=Formicidae RepID=E1ZYZ8_ 9HYME
aaggagaatatttgagttgtgcggttgatttgataagttgtttttagtgtcattacatattagctatttttaaaatgtctgcatcacccatggcaagacaagcggtggaaagtaaggcgattcctattaggagagtgttaattaatgatcattccgagttacctgcacattattcctctacccccggtggaactttgttttcaactacacctggaggtacaaaaatagtatacgaaaaatcggttcttctgaacctaaggaactccccaatttccaaaacaccccctcagttcgagattccagacaccatcttaggcggctccgctaagaacgtagttagaaaacaaaaccattccaggccattacctccaagtccaagaaagtcacagccagaaatcaacaaccacaatacctccgaggaccaatttgacatggaactttagtattatcgactagtcaggaagtggaatatgttaaaattataagattgctgcgcaggaagtggttacttgcaggttccgtcaccaaaaacaaccagattcctacagtggcgtaaccaggggggttttggggattataacccccccattgggatttactttgagctctatgcttgacaccattaacatggtgttaagcatagagtaccagataccctccagtagttgtaacccccccttaggatcatcctggttacgccattgaatttatagctttttccatatccaaaaaataaatcattgataaaagaaaacgacatagcaagcaattgttggattcggtgatttaaaacaggtccacgttttattaattattacttaacaatagtgagaaggagtaaaatacgaagaataattcacattcaaagaagtattcctgtgggacagcaaatatattatgtaaatccggtaatgtttcaaacaatacccagttctcaccgtgacgtcatcctaccagattttggttgatttttggattctaaacaaaccaaattgcgcatttttgcaagcattgggtataatttttactcaatttgtgaatttatttggaagttaattaattgtattaattagtcaagacttttattatacaaattggacatgtttagaattaaaatgattgtgacgtcactaatgaggcgcatattgcgcatattataaactcctgattattaaacgatctgtagctttttaattgttttttaataatatataaataaatatttaaatatatgtatataaaataaaaatacctttagttcgtttggtaataacgaaaaaatgacggttcctgtattgtttatatctatatcatctgtttaggagacatcaatatattgtattgaggaaagtatttgataagtaatgttttaaattacttttaagggaataactacgcagaatatttaagatgagcaattattccttgcattataagctgtaggaactcatttcttgtgcctctaggcaaaagtggccaaatgcataagttcaatactcagtatttccaggattgcctgatttgtgactgtatccctctataactctctgagaacgcatctgtagacccacattttaaaagcctctaccttttaagagttccttattgagtgtccaactttcgacactgttggaatattgaaaactaaaacataacacctaattattctaattattgaagttatacttctttacgtgaaattttataattccctggcgcatgcgtacacagacagtatgtagttcgttgctaatctttcaagataggtatgtacacctggttccaaaaaaaaactgatacgactcttgaagcgtattttgtagaaaattgagcagtgtattttgaaggataaatacttaatatttacatactgtcaatgtcactgccaaatcttaaaatttgtcagatagcttattctgttccacggttattagactttattattaatctttattattaatactttctccgcaactgagggtatcttatcaactgtattgtttttaaacaatagatgataaaataaaaatattgacagttcaaaaatgtgaacattattgcattgtgtgtggcctaagtttgggctgaaaactgaaatgtattacatttttacaaaattttggaatatgtttaattacgtagaccaattttaacagttgttttcaatacagatttcaatacaaatagtttctaatgtcttttgatgtcaaataattagggaagctggaattcaacagtttagaattttacattgagttaatgcaaaattgtgacgcatgtcaaaattctcaatgtattttaattgtattcatttttttttcgaatcctgagaaagctaataaatatttttgaaaaatttaaactcagaatgaagactacattattaccgagggctgaaagtccctgaaaacttctataatatttattttaataagttacagggctgaattgaatattaatttgttttgttgtataatccacgtttacaataattatgtgatctatttgatgtaaaaactatcatttatatactctttataaaatataggaattcaaaataatataaacatttagaccttaataattagtacaatttatgaattaacataatatgtaatcagttgtttgttg

SEQ ID NO: 3057 - DNA, 2299 bp, Diabrotica virgifera
  SmartBlast Evalue=1E-112; Info=Signal transducing adapter molecule 1 n=1 Tax=Camponotus floridanus RepID=E2B1M2_9HYME
tacattatccttgcaaaactcagattatttcctagttatgtcgattaatttattagtgtaacagtttaaatcatatttagagcaatagcgaacaaaatttaagagtttagtaaaaatagttaaagcaaaatgggtatatttggtaccgcagctgatgcagctatcacagaagaaattgaaactgcgactacagaaaaaaatgatgatgaagattggggtcttatcatgaccatttgtgataaagctggacagacgtcagataatgcaaaagcttattttagagcaattataaaacgattgtatcatgaagatccacacgttggagtaaaagctgttacattattagacgcttgtgtaaagaattcaggaaaagtattccacgtagaagtagcttctagggaatttgaaaatgatttttctaaattaatgaataaatcacaccatacagtagcgaaaaaattacgagcatctctttgtaaatgggcggagaacgaattcaaatctgatccacaactaaatctcattccttctatgtataataagctaaagaacaaagggttggattgttcctctacagatatgcctgttaagaagccagcgcccctcagcaaagatccagacgtagttgaatctcaggaagaggaagaacaaattctgaaagccatcgaattgtcgctgaaagagagcgggggctcccctcgttcttcgacgaacactacaaccacccattcgacttctctgtatccgtcaatgaacttgaacgctccttcgagcgcgccggcaggagcaactgctgctgccgctccctctgctaaggaacccaggaaggttagagctttgtatgattttgaagctgccgaggataacgagcttacgtttaatagtggggaaatattatttgtattagatgatagtaatccaaattggtggaagggaaccaatcagcgaggtgaaggactttttccagcaaatttcgtcacagcagatctttccgtggaaccagaaaaattcttgtacgagaaagcaaaaaagatggtacaatttaaggaaaccgctgaggtaaaagttgtaaaagacgaaccagaagatgtagaaataaatgaacaaaaaatagacaggctgttacatctgttacacgaagcggaccctactaatcctgaaaaagatactgatgaaatgttaaatttagaaagagaagcaaacggtatgggacctctaatagacgccgagttggagaaagttgatagaaagcatgcccagttaacacaacttagtgccgatttagttgaagctttaggtctttaccatactttgatgagggaaccacccttcccctcaataagtaaaatgccttatggatatcctccgtcgtcacacatgcccttcaatggtacgctaccccccaacgcccatattccgatgatgctccaagggaaccaaggccccgatagagcaccttttatgcatgccccaggtggtgttccccaagccatgatgcagcagatgcatatgcaacacatacctcccatggcaggtggacctcagttacctcatccgcagatgcagcaacagctgcaagggcctcctcaattaccgccacagatgcagcaacagatgatggaggaacggaggatggaacctcatatgatgcaatatggacttccaaactatggtccagctagttcggtgcctcagccttttccaccacagtcgatcccggggtcaacatcacaaacgaacgtatccaatggcgcccaacaacacccaggcgtccaatatgttacttccagtactcatatgacgaactgagaagatttacgtacctaccgaaatgataatatgtgatgtattatagttttatgagattattgagtgtcccccgaacttctgtcgaataacaatcgtattctagctgactttggtcgtatttatattttagagtatgctgaagagctttaacatcactttttttgttgttgtatgctggttttgatactaaacgatagaagtgaatggtaccaaagaatttgtttaatgtaggaggctttaacaaacattaagacttgtaatagcttgttaatagtcgaaattttgaaaaatgtgttacgcacttttgtaaatcattccagacttgttaaagtgtccttaattgaatgtggactttggcgatactcgataataatcaatattattgtgtatagatttgtttccttattataacgcctaaaatgtatatcctttctgttcattattgtataaaactattttcaagttatgaacaaaacataattattaaaga

SEQ ID NO: 3058 - DNA, 2302 bp, Diabrotica virgifera
  SmartBlast Evalue=1E-112; Info=Signal transducing adapter molecule 1 n=1 Tax=Camponotus floridanus RepID=E2B1M2_9HYME
tacattatccttgcaaaactcagattatttcctagttatgtcgattaatttattagtgtaacagtttaaatcatatttagagcaatagcgaacaaaatttaagagtttagtaaaaatagttaaagcaaaatgggtatatttggtaccgcagctgatgcagctatcacagaagaaattgaaactgcgactacagaaaaaaatgatgatgaagattggggtcttatcatgaccatttgtgataaagctggacagacgtcagataatgcaaaagcttattttagagcaattataaaacgattgtatcatgaagatccacacgttggagtaaaagctgttacattattagacgcttgtgtaaagaattcaggaaaagtattccacgtagaagtagcttctagggaatttgaaaatgatttttctaaattaatgaataaatcacaccatacagtagcgaaaaaattacgagcatctctttgtaaatgggcggagaacgaattcaaatctgatccacaactaaatctcattccttctatgtataataagctaaagaacaaagggttggattgttcctctacagatatgcctgttaagaagccagcgcccctcagcaaagatccagacgtagttgaatctcaggaagaggaagaacaaattctgaaagccatcgaattgtcgctgaaagagagcgggggctcccctcgttcttcgacgaacactacaaccacccattcgacttctctgtatccgtcaatgaacttgaacgctccttcgagcgcgccggcaggagcaactgctgctgccgctccctctgctaaggaacccaggaaggttagagctttgtatgattttgaagctgccgaggataacgagcttacgtttaatagtggggaaatattatttgtattagatgatagtaatccaaattggtggaagggaaccaatcagcgaggtgaaggactttttccagcaaatttcgtcacagcagatctttccgtggaaccagaaaaattcttgtacgagaaagcaaaaaagatggtacaatttaaggaaaccgctgaggtaaaagttgtaaaagacgaaccagaagatgtagaaataaatgaacaaaaaatagacaggctgttacatctgttacacgaagcggaccctactaatcctgaaaaagatactgatgaaatgttaaatttagaaagagaagcaaacggtatgggacctctaatagacgccgagttggagaaagttgatagaaagcatgcccagttaacacaacttagtgccgatttagttgaagctttaggtctttaccatactttgatgagggaaccacccttcccctcaataagtaaaatgccttatggatatcctccgtcgtcacacatgcccttcaatggtacgctacctcccaacgcccatcttccgatgatgctccaaggaaaccaaggccccgatagagcaccttttatgcatggtccaggcggaattcctccagccataatgcagcagatgcatatgcaacacatacctcccatggcgggtggacctcagttacctcatccgcagatgcagcaacagctgcaaggacctccttctcagataccgccacagatgcagcaacagatgatggaggaacggaggatggaacctcatatgatgcaatatggacttccaaactatggtccagctagttcggtgcctcagccttttccaccacagtcgatcccggggtcaacatcacaaacgaacgtatccaatggcgcccaacaacacccaggcgtccaatatgttacttccagtactcatatgacgaactgagaagatttacgtacctaccgaaatgataatatgtgatgtattatagttttatgagattattgagtgtcccccgaacttctgtcgaataacaatcgtattctagctgactttggtcgtatttatattttagagtatgctgaagagctttaacatcactttttttgttgttgtatgctggttttgatactaaacgatagaagtgaatggtaccaaagaatttgtttaatgtaggaggctttaacaaacattaagacttgtaatagcttgttaatagtcgaaattttgaaaaatgtgttacgcacttttgtaaatcattccagacttgttaaagtgtccttaattgaatgtggactttggcgatactcgataataatcaatattattgtgtatagatttgtttccttattataacgcctaaaatgtatatcctttctgttcattattgtataaaactattttcaagttatgaacaaaacataattattaaaga

SEQ ID NO: 3059 - DNA, 1859 bp, Diabrotica virgifera
  SmartBlast Evalue=1E-69; Info=Signal transducing adapter molecule 1 n=1 Tax=Culex quinquefasciatus RepID=B0W8U1_CULQU
cagtacagtgacagtgtacaggtgactcacaacatgttccaataaaccttgggttaccattgcacaaaaatattattttagtgttagtgttcattcaatcgtttgagtgtggtttttatagtggttatgaattacataaatgcctgttaagaagccagcgcccctcagcaaagatccagacgtagttgaatctcaggaagaggaagaacaaattctgaaagccatcgaattgtcgctgaaagagagcgggggctcccctcgttcttcgacgaacactacaaccacccattcgacttctctgtatccgtcaatgaacttgaacgctccttcgagcgcgccggcaggagcaactgctgctgccgctccctctgctaaggaacccaggaaggttagagctttgtatgattttgaagctgccgaggataacgagcttacgtttaatagtggggaaatattatttgtattagatgatagtaatccaaattggtggaagggaaccaatcagcgaggtgaaggactttttccagcaaatttcgtcacagcagatctttccgtggaaccagaaaaattcttgtacgagaaagcaaaaaagatggtacaatttaaggaaaccgctgaggtaaaagttgtaaaagacgaaccagaagatgtagaaataaatgaacaaaaaatagacaggctgttacatctgttacacgaagcggaccctactaatcctgaaaaagatactgatgaaatgttaaatttagaaagagaagcaaacggtatgggacctctaatagacgccgagttggagaaagttgatagaaagcatgcccagttaacacaacttagtgccgatttagttgaagctttaggtctttaccatactttgatgagggaaccacccttcccctcaataagtaaaatgccttatggatatcctccgtcgtcacacatgcccttcaatggtacgctaccccccaacgcccatattccgatgatgctccaagggaaccaaggccccgatagagcaccttttatgcatgccccaggtggtgttccccaagccatgatgcagcagatgcatatgcaacacatacctcccatggcaggtggacctcagttacctcatccgcagatgcagcaacagctgcaagggcctcctcaattaccgccacagatgcagcaacagatgatggaggaacggaggatggaacctcatatgatgcaatatggacttccaaactatggtccagctagttcggtgcctcagccttttccaccacagtcgatcccggggtcaacatcacaaacgaacgtatccaatggcgcccaacaacacccaggcgtccaatatgttacttccagtactcatatgacgaactgagaagatttacgtacctaccgaaatgataatatgtgatgtattatagttttatgagattattgagtgtcccccgaacttctgtcgaataacaatcgtattctagctgactttggtcgtatttatattttagagtatgctgaagagctttaacatcactttttttgttgttgtatgctggttttgatactaaacgatagaagtgaatggtaccaaagaatttgtttaatgtaggaggctttaacaaacattaagacttgtaatagcttgttaatagtcgaaattttgaaaaatgtgttacgcacttttgtaaatcattccagacttgttaaagtgtccttaattgaatgtggactttggcgatactcgataataatcaatattattgtgtatagatttgtttccttattataacgcctaaaatgtatatcctttctgttcattattgtataaaactattttcaagttatgaacaaaacataattattaaaga

SEQ ID NO: 3060 - DNA, 1862 bp, Diabrotica virgifera
  SmartBlast Evalue=1E-69; Info=Signal transducing adapter molecule 1 n=1 Tax=Culex quinquefasciatus RepID=B0W8U1_CULQU
cagtacagtgacagtgtacaggtgactcacaacatgttccaataaaccttgggttaccattgcacaaaaatattattttagtgttagtgttcattcaatcgtttgagtgtggtttttatagtggttatgaattacataaatgcctgttaagaagccagcgcccctcagcaaagatccagacgtagttgaatctcaggaagaggaagaacaaattctgaaagccatcgaattgtcgctgaaagagagcgggggctcccctcgttcttcgacgaacactacaaccacccattcgacttctctgtatccgtcaatgaacttgaacgctccttcgagcgcgccggcaggagcaactgctgctgccgctccctctgctaaggaacccaggaaggttagagctttgtatgattttgaagctgccgaggataacgagcttacgtttaatagtggggaaatattatttgtattagatgatagtaatccaaattggtggaagggaaccaatcagcgaggtgaaggactttttccagcaaatttcgtcacagcagatctttccgtggaaccagaaaaattcttgtacgagaaagcaaaaaagatggtacaatttaaggaaaccgctgaggtaaaagttgtaaaagacgaaccagaagatgtagaaataaatgaacaaaaaatagacaggctgttacatctgttacacgaagcggaccctactaatcctgaaaaagatactgatgaaatgttaaatttagaaagagaagcaaacggtatgggacctctaatagacgccgagttggagaaagttgatagaaagcatgcccagttaacacaacttagtgccgatttagttgaagctttaggtctttaccatactttgatgagggaaccacccttcccctcaataagtaaaatgccttatggatatcctccgtcgtcacacatgcccttcaatggtacgctacctcccaacgcccatcttccgatgatgctccaaggaaaccaaggccccgatagagcaccttttatgcatggtccaggcggaattcctccagccataatgcagcagatgcatatgcaacacatacctcccatggcgggtggacctcagttacctcatccgcagatgcagcaacagctgcaaggacctccttctcagataccgccacagatgcagcaacagatgatggaggaacggaggatggaacctcatatgatgcaatatggacttccaaactatggtccagctagttcggtgcctcagccttttccaccacagtcgatcccggggtcaacatcacaaacgaacgtatccaatggcgcccaacaacacccaggcgtccaatatgttacttccagtactcatatgacgaactgagaagatttacgtacctaccgaaatgataatatgtgatgtattatagttttatgagattattgagtgtcccccgaacttctgtcgaataacaatcgtattctagctgactttggtcgtatttatattttagagtatgctgaagagctttaacatcactttttttgttgttgtatgctggttttgatactaaacgatagaagtgaatggtaccaaagaatttgtttaatgtaggaggctttaacaaacattaagacttgtaatagcttgttaatagtcgaaattttgaaaaatgtgttacgcacttttgtaaatcattccagacttgttaaagtgtccttaattgaatgtggactttggcgatactcgataataatcaatattattgtgtatagatttgtttccttattataacgcctaaaatgtatatcctttctgttcattattgtataaaactattttcaagttatgaacaaaacataattattaaaga

SEQ ID NO: 3061 - DNA, 3153 bp, Diabrotica virgifera
ttctcatccattcgtcttacatggttgtacaacatcctcatgggctgccttcccatcttaccatcttgaactttgcattaccctctaatttgtatttctcaccctgtctcttcttgttttccccactgttgttcttagggttttcatttcggcaaccctcagcaactgtttcgttttgttggtgtcttcccgcacttctgtgccgtatatcatgatcggtcgtatgcaatagggtggaacgaaaaattcgaagtcaatattttttatggagctagtgagaaaaagttgtgctttgatgtataataaaactgtaagaaatcttttttgtattggaacctatcttcaggttccatattatatttaaatttttgggaataacaaaaaaattagatttaaaaaatttatttttttatcagttctttgaatctaaataattgttttgtgatacaatatacattttaagattggtattgattttgtgcctcaacttgagtgccttgattcgttcaaccttgaacgaataaagccatcccttgattctggtccacaaacaacggctgatgcttcagttactaacttaacagttctttccacggattttgtatgacaaggccagtttaagacctctatgttgttgtaattcccagaatcaatcatatcccttacatcttcattgcaaatatgtgttagcaaaggaggagccgtaactttgaattcagaaataaaaattaagtcgttataatctgcagcactaaaatttaatgttggtattttgaatctccgggtattttttctttctgactttctctagctttcggcactctgcgtagtcctagctccagtatatgtttgcgttcatctttcatcataccgattaatatattttcgggatgggcaaaataaccattcctttggataacggcatcgacaatttttctttagtcaactggtagaaatcgtgaataatggatcattcgccataaatgttttgaaccatcagaacagctaggatacagttttatataaaaccaaactgatgcatacactttttggatgaaacttactaacaaaattaattgggggatgagacattcagttccaacatacaattgaagcaaccgattagcaactgtcagccaccttgcgtgtgatgttttcctaggttttttaaggctcaaatcattagggcattttcccgcagcaactgcttgactgatttggtacaagtacttctgatcggcactaaggtctgttgtttctaataatattgctaggttgttttctattgcgacaaaatcgacgacagccttctcttcaatgcgttccagaagtttccctattgaccctgaaaaaccaagtggtccagtggtgcgtctatctaactgttgaattaaatgacgtagaggtagctcattgcaatgaaatacgcatactaaccattgaagtggggtgccgcaatatttgtgacgtagatggttggactgtaacggttgacaaaggagcaatgaattcttcttcatgatcatctgcatcagaagaatttgagtcagacaagctgctacttatcgaacgattagaggcatcaacggtacatgctttaaaaacaatttcgtcagtattatatttttgagaacttgcctttgtcttcatgattctttcaattttcttccttattgctgcatatgctgtaatatccactggtccaattgccattttacgacaggatcgttgatcttgaagaaaaattcgctcattttgtggtactttcttgattttatcacaagtacacacatgcagttccagtcatgttgtacttgcaagccgcgatattcaataacttttcacactcctttcgaaactggcaaatcttttctattcatgaatcagatgcttgctgaatttttgtgtatcgcttaagattttgatattctgtataaatatttttaatcatatcttgaatgcgcttatgcgataatgttggaatataagcttttattcgtatttgttctaatttcgttgcaacggcattcaagacgtcggcgatagatgtttattattattggtcaacttaagttcattacgaataaagagaaagcactttagaatgtcacacttagttggtaaacacgatcattgaaatttgatcagagcaatattgatttttttcgacaaaatattttttttgttttttcatttttcaaatccaatatggaacctcaagatatttttttatttcaaaatgctctcgcaccaattgtcttcatcacttgacacaacttttaaacgatagccacatgaatttttcttttatttttttgacctctttcgttccaccctagtatgcaagtcttgtagattctaattttactatctgtgcacatatgcggatttgaccagactatctccctcagacatcttcacaatgcagatgctttgttgatctgcttactcaggtcctttactgggtcgtgggtgcttgatatatctatgcccagatatctgaattgcatcacctgttctatgaggttgttctcaaccactaacttacattagagcggattttttgatattgtaatacatttacttttgttggtagaaatgttcgtatttagttggcggcttatttgaaagaactgaaaaagctgtctctgaagatcatcttctgattcggcaataattgctgcatcatctgcgtaacacaccataccaattcttttgttgcccattctatatccggaattaagagatgttactttgtttataattttgcccatgagtaggttaaacaagaaggggcttgaactgtcgccttgtctaattcctcccggtgtgttggaatattttcagtgaattggtgtcctgctataactttggttacgttgttgttatttaggttatggtctatctttgttatgctggtcggtgttttattttctattaatatatttagaatgtctcccaggcgaaccctgtcaaacgccttcgtcagatcaatgaagcaaatatacgctggcatgccgaactctataagctttttcgtttatgtgttttattataaatactgcgtctgttatagaccgctgctttaaataaatgtaaaacacatttatttaaaattaaaaaatgtttatattactatcaacttttattact

SEQ ID NO: 3062 - DNA, 3126 bp, Diabrotica virgifera
  SmartBlast Evalue=3E-10; Info=Endonuclease-reverse transcriptase n=1 Tax=Bombyx mori RepID=D7F175_BOMMO
ttctcatccattcgtcttacatggttgtacaacatcctcatgggctgccttcccatcttaccatcttgaactttgcattaccctctaatttgtatttctcaccctgtctcttcttgttttccccactgttgttcttagggttttcatttcggcaaccctcagcaactgtttcgttttgttggtgtcttcccgcacttctgtgccgtatatcatgatcggtcgtatgcaatagggtggaacgaaaaattcgaagtcaatattttttatggagctagtgagaaaaagttgtgctttgatgtataataaaactgtaagaaatcttttttgtattggaacctatcttcaggttccatattatatttaaatttttgggaataacaaaaaaattagatttaaaaaatttatttttttatcagttctttgaatctaaataattgttttgtgatacaatatacattttaagattggtattgattttgtgcctcaacttgagtgccttgattcgttcaaccttgaacgaataaagccatcccttgattctggtccacaaacaacggctgatgcttcagttactaacttaacagttctttccacggattttgtatgacaaggccagtttaagacctctatgttgttgtaattcccagaatcaatcatatcccttacatcttcattgcaaatatgtgttagcaaaggaggagccgtaactttgaattcagaaataaaaattaagtcgttataatctgcagcactaaaatttaatgttggtattttgaatctccgggtattttttctttctgactttctctagctttcggcactctgcgtagtcctagctccagtatatgtttgcgttcatctttcatcataccgattaatatattttcgggatgggcaaaataaccattcctttggataacggcatcgacaatttttctttagtcaactggtagaaatcgtgaataatggatcattcgccataaatgttttgaaccatcagaacagctaggatacagttttatataaaaccaaactgatgcatacactttttggatgaaacttactaacaaaattaattgggggatgagacattcagttccaacatacaattgaagcaaccgattagcaactgtcagccaccttgcgtgtgatgttttcctaggttttttaaggctcaaatcattagggcattttcccgcagcaactgcttgactgatttggtacaagtacttctgatcggcactaaggtctgttgtttctaataatattgctaggttgttttctattgcgacaaaatcgacgacagccttctcttcaatgcgttccagaagtttccctattgaccctgaaaaaccaagtggtccagtggtgcgtctatctaactgttgaattaaatgacgtagaggtagctcattgcaatgaaatacgcatactaaccattgaagtggggtgccgcaatatttgtgacgtagatggttggactgtaacggttgacaaaggagcaatgaattcttcttcatgatcatctgcatcagaagaatttgagtcagacaagctgctacttatcgaacgattagaggcatcaacggtacatgctttaaaaacaatttcgtcagtattatatttttgagaacttgcctttgtcttcatgattctttcaattttcttccttattgctgcatatgctgtaatatccactggtccaattgccattttacgacaggatcgttgatcttgaagaaaaattcgctcattttgtggtactttcttgattttatcacaagtacacacatgcagttccagtcatgttgtacttgcaagccgcgatattcaataacttttcacactcctttcgaaactggcaaatcttttctattcatgaatcagatgcttgctgaatttttgtgtatcgcttaagattttgatattctgtataaatatttttaatcatatcttgaatgcgcttatgcgataatgttggaatataagcttttattcgtatttgttctaatttcgttgcaacggcattcaagacgtcggcgatagatgtttattattattggtcaacttaagttcattacgaataaagagaaagcactttagaatgtcacacttagttggtaaacacgatcattgaaatttgatcagagcaatattgatttttttcgacaaaatattttttttgttttttcatttttcaaatccaatatggaacctcaagatatttttttatttcaaaatgctctcgcaccaattgtcttcatcacttgacacaacttttaaacgatagccacatgaatttttcttttatttttttgacctctttcgttccaccctagtatgcaagtcttgtagattctaattttactatctgtgcacatatgcggatttgaccagactatctccctcagacatcttcacaatgcagatgctttgttgatctgcttactcaggtcctttactgggtcgtgggtgcttgatatatctatgcccagatatctgaattgcatcacctgttctatgaggttgttctcaaccactaacttacattagagcggattttttgatattgtaatacatttacttttgttggtagaaatgttcgtatttagttggcggcttatttgaaagaactgtctctgaagatcatcttctgcatcatctgcgtaacacaccataccaattcttttgttgcccattctatatccggaattaagagatgttactttgtttataattttgcccatgagtaggttaaacaagaaggggcttgaactgtcgccttgtctaattcctcccggtgtgttggaatattttcagtgaattggtgtcctgctataactttggttacgttgttgttatttaggttatggtctatctttgttatgctggtcggtgttttattttctattaatatatttagaatgtctcccaggcgaaccctgtcaaacgccttcgtcagatcaatgaagcaaatatacgctggcatgccgaactctataagctttttcgtttatgtgttttattataaatactgcgtctgttatagaccgctgctttaaataaatgtaaaacacatttatttaaaattaaaaaatgtttatattactatcaacttttattact

SEQ ID NO: 3063 - DNA, 974 bp, Diabrotica virgifera
tcttgaattttgcattgctctctaatgcttgtagttctcacccggtctcttcttgttttccccactgctgttcttagggttttcatttcggcaaccttagcatatatttcgttgtgttggtgtcttcgcacacttctgtgccatatgtcatgatcggtcgtatgcaagtcttgtagattctaattttactatctgtgcacatatgcggatttgaccagactatctccctcagacatcttcacaatgcagatgctttgttgatctgcttactcaggtcctttactgggtcgtgggtgcttgatatatctatgcccagatatctgaattgcatcacctgttctatgaggttgttctcaaccactaacttacattagagcggattttttgatattgtaatacatttacttttgttggtagaaatgttcgtatttagttggcggcttatttgaaagaactgaaaaagctgtctctgaagatcatcttctgattcggcaataattgctgcatcatctgcgtaacacaccataccaattcttttgttgcccattctatatccggaattaagagatgttactttgtttataattttgcccatgagtaggttaaacaagaaggggcttgaactgtcgccttgtctaattcctcccggtgtgttggaatattttcagtgaattggtgtcctgctataactttggttacgttgttgttatttaggttatggtctatctttgttatgctggtcggtgttttattttctattaatatatttagaatgtctcccaggcgaaccctgtcaaacgccttcgtcagatcaatgaagcaaatatacgctggcatgccgaactctataagctttttcgtttatgtgttttattataaatactgcgtctgttatagaccgctgctttaaataaatgtaaaacacatttatttaaaattaaaaaatgtttatattactatcaacttttattact

SEQ ID NO: 3064 - DNA, 947 bp, Diabrotica virgifera
  SmartBlast Evalue=1E-12; Info=Endonuclease-reverse transcriptase n=1 Tax=Schistosoma mansoni RepID=Q4QQE8_SCHMA
tcttgaattttgcattgctctctaatgcttgtagttctcacccggtctcttcttgttttccccactgctgttcttagggttttcatttcggcaaccttagcatatatttcgttgtgttggtgtcttcgcacacttctgtgccatatgtcatgatcggtcgtatgcaagtcttgtagattctaattttactatctgtgcacatatgcggatttgaccagactatctccctcagacatcttcacaatgcagatgctttgttgatctgcttactcaggtcctttactgggtcgtgggtgcttgatatatctatgcccagatatctgaattgcatcacctgttctatgaggttgttctcaaccactaacttacattagagcggattttttgatattgtaatacatttacttttgttggtagaaatgttcgtatttagttggcggcttatttgaaagaactgtctctgaagatcatcttctgcatcatctgcgtaacacaccataccaattcttttgttgcccattctatatccggaattaagagatgttactttgtttataattttgcccatgagtaggttaaacaagaaggggcttgaactgtcgccttgtctaattcctcccggtgtgttggaatattttcagtgaattggtgtcctgctataactttggttacgttgttgttatttaggttatggtctatctttgttatgctggtcggtgttttattttctattaatatatttagaatgtctcccaggcgaaccctgtcaaacgccttcgtcagatcaatgaagcaaatatacgctggcatgccgaactctataagctttttcgtttatgtgttttattataaatactgcgtctgttatagaccgctgctttaaataaatgtaaaacacatttatttaaaattaaaaaatgtttatattactatcaacttttattact

SEQ ID NO: 3065 - DNA, 1966 bp, Diabrotica virgifera
  SmartBlast Evalue=0; Info="Thioredoxin reductase 1, mitochondrial n=1 Tax=Harpegnathos saltator RepID=E2BEC5_9HYME"
ataataagaattatttattttcattcacgatcaacgatacaatatcgttttaacagagtttataggattttaaatcaaaaatctaatttcaacagtttctggggtgcgacaaggtgtttattttactaatacaaaagtgatggatgaccttaactaggctgtacatatacaaaaataaaaatatttggaaatgagtattttttttctctaactgcagcatgacgcagggttggggtcttttccgatcgttttgtgacgttaattctcgtgaattcctctgctatggttggatggatgccgacggtttccattaaatcctttactgttaaatttaatttgattgctgtggcaaatccttgaatgatctccccagcgtttggtccaatgaagtgcaatcctacaactttttgattaccctctctatgggcgactacctttaagtaacaattggcaatacttttctgtggaataaagaactcagtgggcttgtaatatccgtggtagacttcgatgttgtcttcaccgaatcgttcgatggctgtttcttcgctcaagccgacacaaccatactctagggggctgaatactgtagtggccacgttttcgtaatccataacttgactggcgccaccgaaaagacggcgagctaagaaacgtccggcgaggatggccaccggggtaagttctggctttttatataaaacatctcctacggcataaatattgggtacgttggtctgttcgttgaccacatcaatcttttctccatctccagcaactttgacgccggcgttttctaaatgtagctctttcgtcagagcccttctgccgatggcaaaaagaaccgtgtcgaaaatgtctgaggcggtttctcctttatcgttcttatacgcaacgtgtaatctgccgtcatcgcctttttttatttcagtggggacggttctgggtaagaatttgactcctttctctttcatctcggcttgtatcacattggccatctgttggtcgaagcctctgaggataatcgatctcaccatgatggtagcgtcataacctagaccgttcaaaaacccagcgcactccaaaccgatgtatccggcacctacgactagagtttttcctggaggtttttctaaactgaagatgtcgtcactgctgattccgtattctactgcacctggtatgtctgggtatctgggtctgccgccgaccgctatgatgatgttcttgcctgtgagtgtcttgtcgccctttttcgtttgggcgtggatggtgtgtgggtcacgaatgtacctagaccgttgatgtattcaacagatttatccctaagttctaccctggttacccaattaactgacttgatgtggccctgtactgcatccttgagtgcttcccaattgtgcgaaatgttttctggttgaggtagttgccatccatatgtttgggcatcatggacagcttctcctaataaggcggcctggtgcatcagcttcttggggatgcatcctacgttgacgcacgtaccccccaaaccccatttcgtacccttcggactaggagtgacgtaatcgagtactgctaccttagctcctaagttgctggcttccttggcggcggccaaaccaccggaaccacctccgataacgatgaggtcatattctgcagtttgatatctacatctcgaagtgctgaattttcttgcgaaatttactcgcagatttggaactgtgtcactggcccataaaacccccttaactactccccgaaaattgacatgacgaaaacaaaaaactgtcgccatttgactaaaataccgctacagtgatcttttgatattagctgaataaccttgagattgattatttcattagattatgaagttatatttatcgtgagccgccgaaacacttaaatattaatgaattccattgttataacaggttgtaacagaggaataggcttgggc

SEQ ID NO: 3066 - DNA, 1966 bp, Diabrotica virgifera
  SmartBlast Evalue=0; Info="Thioredoxin reductase 1, mitochondrial n=1 Tax=Harpegnathos saltator RepID=E2BEC5_9HYME"
ataataagaattatttattttcattcacgatcaacgatacaatatcgttttaacagagtttataggattttaaatcaaaaatctaatttcaacagtttctggggtgcgacaaggtgtttattttactaatacaaaagtgatggatgaccttaactaggctgtacatatacaaaaataaaaatatttggaaatgagtattttttttctctaactgcagcatgacgcagggttggggtcttttccgatcgttttgtgacgttaattctcgtgaattcctctgctatggttggatggatgccgacggtttccattaaatcctttactgttaaatttaatttgattgctgtggcaaatccttgaatgatctccccagcgtttggtccaatgaagtgcaatcctacaactttttgattaccctctctatgggcgactacctttaagtaacaattggcaatacttttctgtggaataaagaactcagtgggcttgtaatatccgtggtagacttcgatgttgtcttcaccgaatcgttcgatggctgtttcttcgctcaagccgacacaaccatactctagggggctgaatactgtagtggccacgttttcgtaatccataacttgactggcgccaccgaaaagacggcgagctaagaaacgtccggcgaggatggccaccggggtaagttctggctttttatataaaacatctcctacggcataaatattgggtacgttggtctgttcgttgaccacatcaatcttttctccatctccagcaactttgacgccggcgttttctaaatgtagctctttcgtcagagcccttctgccgatggcaaaaagaaccgtgtcgaaaatgtctgaggcggtttctcctttatcgttcttatacgcaacgtgtaatctgccgtcatcgcctttttttatttcagtggggacggttctgggtaagaatttgactcctttctctttcatctcggcttgtatcacattggccatctgttggtcgaagcctctgaggataatcgatctcaccatgatggtagcgtcataacctagaccgttcaaaaacccagcgcactccaaaccgatgtatccggcacctacgactagagtttttcctggaggtttttctaaactgaagatgtcgtcactgctgattccgtattctactgcacctggtatgtctgggtatcgcggtctgccgcctacagctatgatgatgttcttgcctgtgagtgtcttgtcgccctttttcgtttgggcgtggatggtgtgtgggtcacgaatgtacctagaccgttgatgtattcaacagatttatccctaagttctaccctggttacccaattaactgacttgatgtggccctgtactgcatccttgagtgcttcccaattgtgcgaaatgttttctggttgaggtagttgccatccatatgtttgggcatcatggacagcttctcctaataaggcggcctggtgcatcagcttcttggggatgcatcctacgttgacgcacgtaccccccaaaccccatttcgtacccttcggactaggagtgacgtaatcgagtactgctaccttagctcctaagttgctggcttccttggcggcggccaaaccaccggaaccacctccgataacgatgaggtcatattctgcagtttgatatctacatctcgaagtgctgaattttcttgcgaaatttactcgcagatttggaactgtgtcactggcccataaaacccccttaactactccccgaaaattgacatgacgaaaacaaaaaactgtcgccatttgactaaaataccgctacagtgatcttttgatattagctgaataaccttgagattgattatttcattagattatgaagttatatttatcgtgagccgccgaaacacttaaatattaatgaattccattgttataacaggttgtaacagaggaataggcttgggc

SEQ ID NO: 3067 - DNA, 1871 bp, Diabrotica virgifera
  SmartBlast Evalue=0; Info="Thioredoxin reductase 1, mitochondrial n=1 Tax=Harpegnathos saltator RepID=E2BEC5_9HYME"
ataataagaattatttattttcattcacgatcaacgatacaatatcgttttaacagagtttataggattttaaatcaaaaatctaatttcaacagtttctggggtgcgacaaggtgtttattttactaatacaaaagtgatggatgaccttaactaggctgtacatatacaaaaataaaaatatttggaaatgagtattttttttctctaactgcagcatgacgcagggttggggtcttttccgatcgttttgtgacgttaattctcgtgaattcctctgctatggttggatggatgccgacggtttccattaaatcctttactgttaaatttaatttgattgctgtggcaaatccttgaatgatctccccagcgtttggtccaatgaagtgcaatcctacaactttttgattaccctctctatgggcgactacctttaagtaacaattggcaatacttttctgtggaataaagaactcagtgggcttgtaatatccgtggtagacttcgatgttgtcttcaccgaatcgttcgatggctgtttcttcgctcaagccgacacaaccatactctagggggctgaatactgtagtggccacgttttcgtaatccataacttgactggcgccaccgaaaagacggcgagctaagaaacgtccggcgaggatggccaccggggtaagttctggctttttatataaaacatctcctacggcataaatattgggtacgttggtctgttcgttgaccacatcaatcttttctccatctccagcaactttgacgccggcgttttctaaatgtagctctttcgtcagagcccttctgccgatggcaaaaagaaccgtgtcgaaaatgtctgaggcggtttctcctttatcgttcttatacgcaacgtgtaatctgccgtcatcgcctttttttatttcagtggggacggttctgggtaagaatttgactcctttctctttcatctcggcttgtatcacattggccatctgttggtcgaagcctctgaggataatcgatctcaccatgatggtagcgtcataacctagaccgttcaaaaacccagcgcactccaaaccgatgtatccggcacctacgactagagtttttcctggaggtttttctaaactgaagatgtcgtcactgctgattccgtattctactgcacctggtatgtctgggtatctgggtctgccgccgaccgctatgatgatgttcttgcctgtgagtgtcttgtcgccctttttcgtttgggcgtggatggtgtgtgggtcacgaatgtacctagaccgttgatgtattcaacagatttatccctaagttctaccctggttacccaattaactgacttgatgtggccctgtactgcatccttgagtgcttcccaattgtgcgaaatgttttctggttgaggtagttgccatccatatgtttgggcatcatggacagcttctcctaataaggcggcctggtgcatcagcttcttggggatgcatcctacgttgacgcacgtaccccccaaaccccatttcgtacccttcggactaggagtgacgtaatcgagtactgctaccttagctcctaagttgctggcttccttggcggcggccaaaccaccggaaccacctccgataacgatgaggtcatattctgcagtttgatctatcggtgccattttgtcaatttacactaacacctggtgagagaaaacaaagttctgacacgttattctcgatttattaaataatgtagccacaaacacacctatgtacaaggctaacgtaaccgcgccagcgcaaacttggaacttctgttttgttgcgttaatttaaatgatcttctatttgtccaatcctctatga

SEQ ID NO: 3068 - DNA, 1871 bp, Diabrotica virgifera
  SmartBlast Evalue=0; Info="Thioredoxin reductase 1, mitochondrial n=1 Tax=Harpegnathos saltator RepID=E2BEC5_9HYME"
ataataagaattatttattttcattcacgatcaacgatacaatatcgttttaacagagtttataggattttaaatcaaaaatctaatttcaacagtttctggggtgcgacaaggtgtttattttactaatacaaaagtgatggatgaccttaactaggctgtacatatacaaaaataaaaatatttggaaatgagtattttttttctctaactgcagcatgacgcagggttggggtcttttccgatcgttttgtgacgttaattctcgtgaattcctctgctatggttggatggatgccgacggtttccattaaatcctttactgttaaatttaatttgattgctgtggcaaatccttgaatgatctccccagcgtttggtccaatgaagtgcaatcctacaactttttgattaccctctctatgggcgactacctttaagtaacaattggcaatacttttctgtggaataaagaactcagtgggcttgtaatatccgtggtagacttcgatgttgtcttcaccgaatcgttcgatggctgtttcttcgctcaagccgacacaaccatactctagggggctgaatactgtagtggccacgttttcgtaatccataacttgactggcgccaccgaaaagacggcgagctaagaaacgtccggcgaggatggccaccggggtaagttctggctttttatataaaacatctcctacggcataaatattgggtacgttggtctgttcgttgaccacatcaatcttttctccatctccagcaactttgacgccggcgttttctaaatgtagctctttcgtcagagcccttctgccgatggcaaaaagaaccgtgtcgaaaatgtctgaggcggtttctcctttatcgttcttatacgcaacgtgtaatctgccgtcatcgcctttttttatttcagtggggacggttctgggtaagaatttgactcctttctctttcatctcggcttgtatcacattggccatctgttggtcgaagcctctgaggataatcgatctcaccatgatggtagcgtcataacctagaccgttcaaaaacccagcgcactccaaaccgatgtatccggcacctacgactagagtttttcctggaggtttttctaaactgaagatgtcgtcactgctgattccgtattctactgcacctggtatgtctgggtatcgcggtctgccgcctacagctatgatgatgttcttgcctgtgagtgtcttgtcgccctttttcgtttgggcgtggatggtgtgtgggtcacgaatgtacctagaccgttgatgtattcaacagatttatccctaagttctaccctggttacccaattaactgacttgatgtggccctgtactgcatccttgagtgcttcccaattgtgcgaaatgttttctggttgaggtagttgccatccatatgtttgggcatcatggacagcttctcctaataaggcggcctggtgcatcagcttcttggggatgcatcctacgttgacgcacgtaccccccaaaccccatttcgtacccttcggactaggagtgacgtaatcgagtactgctaccttagctcctaagttgctggcttccttggcggcggccaaaccaccggaaccacctccgataacgatgaggtcatattctgcagtttgatctatcggtgccattttgtcaatttacactaacacctggtgagagaaaacaaagttctgacacgttattctcgatttattaaataatgtagccacaaacacacctatgtacaaggctaacgtaaccgcgccagcgcaaacttggaacttctgttttgttgcgttaatttaaatgatcttctatttgtccaatcctctatga

SEQ ID NO: 3069 - DNA, 3429 bp, Diabrotica virgifera
attcgaaaacgttgtgtgatttacccttgaaagggtttttaattttttatacattttacgaagaattttaattaaaaattgtttttattattttgagactttcatttgtgttccaaaaatacttaaatggtcccctggtgcacaatatgaacaacaacatggacatattatattttatcactatttaaaagctgttaaatggtgatttgccaaagggaaatctatcatttccatttaggtgatgtttttgtcataggcaaaacatctttctgatgcctatccctcatacattgttgtttaagcatgggatacgtaaaagatggaagtatcagttgttatgatggagagacaacaaatatgtcggtagattttggaaaggcattacaagaaaaactaaaaaataccctgtttatggcatcttaagcaaattgtgtatttaaataaaggggataaagtaacctttggacagacatgaatttcaattgtatcgataacaatcagccttgtgatggataacaatcagccttgtgatcgatgaccgatgttatctttaacgtaaagttatcctgtagttaagttataatcctcgaattggtgtgatgtatcatatttaacttgcgttatttcttgactacttgcgttatttcttgacttatctgatatatcaactgtcactttataacgcgatgttaaacctcaagttatgagatcactctgtagttatgttaaggattgtaaagttaggtttatgttttgatttgtttttaaatagaaatcaagtgaatatttaatgtagaacgctgcttcagattgtcctaggccttgtgcgacattttattaatttaataaaataaattcaatatcgaatataaagcagcacaaaattatcaaaaacatagacctaagataacaattaaaaacacgtagataggtacctaataaaattaaaacaataataaaaatgaaaaagaaagctaataatttaaaaatagaagggtaatgcaattttaaaaattatacaaaaatcaaatcgagatacaagttgaaatttttatttataaacatccaagggttttaagtactgttctttttctttgttccttctatctacttttacgattcaccaccgaacatcgaacagctgtttggtcatcggtagccggtatgtaggtataccaacttctcgtgattctctttctcgctcaaaatgtactgattctacataaggttctctttttagacaacttaatattttcttccgtctattaacgtctaagaaataacttctcataacggtggatgatccatcacaccgaatttacgttttataggtatggagatagttatgttaactttaacgcaaacgttaaaaataacttccgtaattcatcacacggctgaatatgtgataatgtaaaacttccaattctggtcattggctcttaaccgaaattcctttttttgtatatacaaaataaagtagacaaaaaacttcgtttcttttaacattaaagtaaatgttggttttcagatcgaatgtatgtacttgcgactgaaagctcaaatggtagaatgtttgactgacactagcgtaaacatgcagatatttctaaaatatccaaaagccccattgcgactcaatatgtaccttgggtaaacctatggctgatatcgaatgaactttacttttaagatgaaaatgtgtacacataaggcaccaagttaatataacaaatgacttgaaaacagatacaaccacttctattatgtttcatggacaattagttagggtacgatatgaagttaatacacattcaattcatgtactaaaaagagacaacggtatgtacaaaacacaaaatttatcgagatgcgaaaattacaactaatatttgggcgtaacattatataaacatctatagaccaattattttacttcgtccatttttcttcatgcgattttatattcagtatgttcggtcacagggaatgtcctggtaatattgataccaccttcaactaaactagaaaaaaacgaatcgattttttatttaaatcacttagaatgacactttcactgtgagttactaaatattttttgttggccaatatgcgaatttgccttattttgatgaatctgtttggactactaaaattgggacataatattttatggagattacggacctttccaaacttataattaatgaaaatccataaaatatgctaaaaactaatttgttcgacataagtcaatctctgtttgcagatttgttttctttatgttaacctacaaagtgaccactattttttattgaagcttacttatgtccatatttttcatgtcttccatcattctttggtttgcatgtcatatttctttcataaatatgttcatacttaaattacagagttgtcggcccagtgactcggcatgcaggcactctcaattgagtgtgagatgtctagaggattgatgacagaaaaataacttaaacgtggcagtttaaaatccaaaacggatctgcgattttcgattgaaatacgcgagaggatcggatcggctatggattaatagtacgatagtacttacatcttggtatcactcattcattgatcactaccgaaaggcgttagggatttttggtactggaaagaacctttgtggttgttgctgagggtgttctgatcaaattgtgtacagctcccgaactgattcatggccggtgaaagaagtcctgtctacgtaaagtgtaggtgggtgtacaaccgacgacatcgtttgtcatcggctatagttcgctccgggagctgtaaaaaatggtactttttgggacaaaatatttttatatttatgagttaaactacttgtttaagattgattgaaatgtatagtttttcacacggttgattcctctttcattctacactatgcacttgattgaatttagatgttgatatgtaactataaaaagtatccagtttgcttatattagtcgtattttataaacttgcaagtgtataatttttaattttgtcagttaaaaatagtttttgtacaagaaatgtagatgtgaaaaagacgtattggatgttttaagatacctacaaaaagggtagcctatctcctccaagattttttaatgtaccgtacactttttactcctcctttaagttaaattattacagtgtaaaatatcaaatcttattacatgataaggaaacttagaatatttgttatatatattttttctcgtaattaaacaggacacattaaatgttgaaattcacaggagtgtatttttctttattttcttcttagtgttttgtgatagtgagcgagactctcaaaaagttttttatatagtgaatttttcgttggttatatgggacaataaagcgatatatctgtttactcaaaatgttttt

SEQ ID NO: 3070 - DNA, 2945 bp, Diabrotica virgifera
taatgaacacaataatagtacatattgtcaataataatcagccgtgtgatggatgaccgaagttatctttaacgtaaagttatcctgtagttaagttataatcctcgaattggtgtgatgtatcatatttaacttaactacttgcgttatttcttgacagttcttgagttatctgatatatcaactgtcactttataacgcgacgttaaacctcaagttatgagataactctgtagttatgtaagaattgtaaggttaggtttatgttttgatttgtttttagatagaaatcaagtgactatttaacgtagaacgctgcttcagattgtcccaggaccttgtgcggcattttattaatttaataaatcaaatttaatatcgaatataaagcagcacaaaattatcaaaaacatagacctaagataacaattaaaaacacgtagataggtacctaataaaattaaaacaataataaaaatgaaaaagaaagctaataatttaaaaatagaagggtaatgcaattttaaaaattatacaaaaatcaaatcgagatacaagttgaaatttttatttataaacatccaagggttttaagtactgttctttttctttgttccttctatctacttttacgattcaccaccgaacatcgaacagctgtttggtcatcggtagccggtatgtaggtataccaacttctcgtgattctctttctcgctcaaaatgtactgattctacataaggttctctttttagacaacttaatattttcttccgtctattaacgtctaagaaataacttctcataacggtggatgatccatcacaccgaatttacgttttataggtatggagatagttatgttaactttaacgcaaacgttaaaaataacttccgtaattcatcacacggctgaatatgtgataatgtaaaacttccaattctggtcattggctcttaaccgaaattcctttttttgtatatacaaaataaagtagacaaaaaacttcgtttcttttaacattaaagtaaatgttggttttcagatcgaatgtatgtacttgcgactgaaagctcaaatggtagaatgtttgactgacactagcgtaaacatgcagatatttctaaaatatccaaaagccccattgcgactcaatatgtaccttgggtaaacctatggctgatatcgaatgaactttacttttaagatgaaaatgtgtacacataaggcaccaagttaatataacaaatgacttgaaaacagatacaaccacttctattatgtttcatggacaattagttagggtacgatatgaagttaatacacattcaattcatgtactaaaaagagacaacggtatgtacaaaacacaaaatttatcgagatgcgaaaattacaactaatatttgggcgtaacattatataaacatctatagaccaattattttacttcgtccatttttcttcatgcgattttatattcagtatgttcggtcacagggaatgtcctggtaatattgataccaccttcaactaaactagaaaaaaacgaatcgattttttatttaaatcacttagaatgacactttcactgtgagttactaaatattttttgttggccaatatgcgaatttgccttattttgatgaatctgtttggactactaaaattgggacataatattttatggagattacggacctttccaaacttataattaatgaaaatccataaaatatgctaaaaactaatttgttcgacataagtcaatctctgtttgcagatttgttttctttatgttaacctacaaagtgaccactattttttattgaagcttacttatgtccatatttttcatgtcttccatcattctttggtttgcatgtcatatttctttcataaatatgttcatacttaaattacagagttgtcggcccagtgactcggcatgcaggcactctcaattgagtgtgagatgtctagaggattgatgacagaaaaataacttaaacgtggcagtttaaaatccaaaacggatctgcgattttcgattgaaatacgcgagaggatcggatcggctatggattaatagtacgatagtacttacatcttggtatcactcattcattgatcactaccgaaaggcgttagggatttttggtactggaaagaacctttgtggttgttgctgagggtgttctgatcaaattgtgtacagctcccgaactgattcatggccggtgaaagaagtcctgtctacgtaaagtgtaggtgggtgtacaaccgacgacatcgtttgtcatcggctatagttcgctccgggagctgtaaaaaatggtactttttgggacaaaatatttttatatttatgagttaaactacttgtttaagattgattgaaatgtatagtttttcacacggttgattcctctttcattctacactatgcacttgattgaatttagatgttgatatgtaactataaaaagtatccagtttgcttatattagtcgtattttataaacttgcaagtgtataatttttaattttgtcagttaaaaatagtttttgtacaagaaatgtagatgtgaaaaagacgtattggatgttttaagatacctacaaaaagggtagcctatctcctccaagattttttaatgtaccgtacactttttactcctcctttaagttaaattattacagtgtaaaatatcaaatcttattacatgataaggaaacttagaatatttgttatatatattttttctcgtaattaaacaggacacattaaatgttgaaattcacaggagtgtatttttctttattttcttcttagtgttttgtgatagtgagcgagactctcaaaaagttttttatatagtgaatttttcgttggttatatgggacaataaagcgatatatctgtttactcaaaatgttttt

SEQ ID NO: 3071 - DNA, 667 bp, Diabrotica virgifera
taatgaacacaataatagtacatattgtcaataataatcagccgtgtgatggatgaccgaagttatctttaacgtaaagttatcctgtagttaagttataatcctcgaattggtgtgatgtatcatatttaacttaactacttgcgttatttcttgacagttcttgagttatctgatatatcaactgtcactttataacgcgacgttaaacctcaagttatgagataactctgtagttatgtaaggatatgtaaggttaggttcatcttttgacttgtttttagacagaaatcaagtgaatttggaagctaataatttaataattaagaatagaagggtaatacaattttaaaaattatacaaaaatcaaatcgagagatataagttgaaattttattttaagtgtctactgagctttctatccagagttgccagatgatattttataaatccccacttagaaactgaaattccctcaaattgaagctcaaataccccaaatttaaatttttgccgaattttaataaattagtagtcaaatgaagagaacagtaaaccaaaattatactacttatcaacgagagccatggaaataattcatagttcctatcgtcttcgattatatgggagtataatatacagttctacgtaaattcgcaaatttaat

SEQ ID NO: 3072 - DNA, 491 bp, Diabrotica virgifera
taatgaacacaataatagtacatattgtcaataataatcagccgtgtgatggatgaccgaagttatctttaacgtaaagttatcctgtagttaagttataatcctcgaattggtgtgatgtatcatatttaacttaactacttgcgttatttcttgacagttcttgagttatctgatatatcaactgtcactttataacgcgacgttaaacctcaagttatgagataactctgtagttatgtaaggttgggttcatcttttgacttgtttttagacagaaatcaagtgaatttagaagttaataatttaataattaagaatagaagtgtaatacaattttaaaattatacaaaaatcaaatcgaaagatataaattgaaattgtattttaagtacctactgatctttctatccagagttgctagatgatattttataaatctcccacttagaaactgaaattccctcaaattgaagctcaaatgccccaaa

SEQ ID NO: 3073 - DNA, 1709 bp, Diabrotica virgifera
  SmartBlast Evalue=1E-132; Info=Alpha-galactosidase/alpha-n- acetylgalactosaminidase n=1 Tax=Aedes aegypti RepID=Q17AU1_AEDAE
tgcatttcgtctagtagtttttatatatttaatatttgttaacataaataggttttcaaactaaaacaaagcttgtaattataatttattctaaaataacacacgttctgaatacagagatagaattcattcgtttactgaacgataagatagcattcatttgcatacgctgtatagaagaactcggcaactaatcaaaagtgataaaagtgattgaattaagcgaagatatcaaaactgacgaaactgtttataaaacaatttttatttttatttgagtgtattaacatcaagcgataggtaccaccaaatttctcgtagtttactagatttttagcaaaaataatttagaaaagtgatctggttatgctaatcaagaactgagaaggaacaatggtttcaagacttgtgttagcgttggttggacttatttcaaccgtgaatggtttggataatggacttgcccgtacgccaccaatgggctggatggattggcaaagatttaggtgtctgacaaattgtacactatatcctgatgaatgtataagtgaaaaattgttccgagacatggccgatcgtatggcagcggatgggtatcttgctgctggctatgaatacattatgatcgacgattgttggtcttctaaagagagagatagtaaaggaagattggttcctgatcctgatagattcccaagtggcattaaaaacttatcagattatatacacagcaaaggtcttaaatttggaatttacgctgattatggaaccttaacatgtgctggttatcccggtagtaaagagtatcttaaaattgatgctgatagatttgcagaatgggaagtagattacttaaagtttgatgggtgcaattcagattggatatttatcgacaaaggttacattgaaatgggtaaacatttaaacgcaacaggtcgtcctattgtttactcatgtagttggcctgcttatcaggaaccaaataaaatgcaatctaactacacagctttggctgaaacttgtaacctttggagaaattgggacgacattgatgatagctgggaaagtgtcacatctatcatagagtggttttccgacaatcaagatcgaattggaccattttcagcacctggtcactggaatgatcccgatatgcttgtgattggaaattttggattgagttttgaacagagcaaaggacagatgtcagtttggtcggtaatggcggcaccgttgataatgtcagtggatttaagaactattgagcctaaatttagagcaattctcctcaacaaagatgctattgctgtgaatcaagatcccttaggtgaaatgggtcggctagtgctaaagaaaaacaatatttatatatggacgaagaagctaacagctaaagctgatggcagacaacctcacgccattgccgtactaagccaaagaaccgatgggtacaaatatagaatggaatttactttaaaggatttgaatattaccggtccaaacggattcttgataaaggatatttttgatgaagataaatctgtggcatccatagcagatgatgaaccgttcgtcctaagaatggcacctacaggaggcactttgttggttgcaactcccaaaaaataaacgaaaaaggatttagtcagtgaccaaaatattaaatactttttagatattttataaataaataaataaattattttaat

SEQ ID NO: 3074 - DNA, 1710 bp, Diabrotica virgifera
  SmartBlast Evalue=1E-134; Info=Alpha-galactosidase/alpha-n- acetylgalactosaminidase n=1 Tax=Aedes aegypti RepID=Q17AU1_AEDAE
tgcatttcgtctagtagtttttatatatttaatatttgttaacataaataggttttcaaactaaaacaaagcttgtaattataatttattctaaaataacacacgttctgaatacagagatagaattcattcgtttactgaacgataagatagcattcatttgcatacgctgtatagaagaactcggcaactaatcaaaagtgataaaagtgattgaattaagcgaagatatcaaaactgacgaaactgtttataaaacaatttttatttttatttgagtgtattaacatcaagcgataggtaccaccaaatttctcgtagtttactagatttttagcaaaaataatttagaaaagtgatctggttatgctaatcaagaactgagaaggaacaatggtttcaagacttgtgttagcgttggttggacttatttcaaccgtgaatggtttggataatggacttgcccgtacgccaccaatgggctggatggattggcaaagatttaggtgtctgacaaattgtacactatatcctgatgaatgtataagtgaaaaattgttccgagacatggccgatcgtatggcagcggatgggtatcttgctgctggctatgaatacattatgatcgacgattgttggtcttctaaagagagagatagtaaaggaagattggttcctgatcctgatagattcccaagtggcattaaaaacttatcagattatatacacagcaaaggtcttaaatttggaatttacgctgattatggaaccttaacatgtgctggttatcccggtagtaaagagtaccttaaaattgatgctgatagatttgcagaatgggaagtagattatttaaagtttgatggatgcaattcagattggatatttatcgacaaaggttatattgaaatgggtaaacatttaaatgcaacaggtcgtcctattgtttactcatgtagttggcctgcatatcaggaaccaaacaaaatgcaatctaactacacagctttggctgaaacttgtaacctttggagaaattgggacgacatcgatgatagctgggaaagtgtcacatctatcatagagtggttttccgacaatcaagatcgaattggaccattttcagcacctgggcactggaatgatcccgatatgcttgtgattggaaattttggattaagttttgaacagagcaaaggacagatgtcagtttggtcggtaatggcggcaccattgataatgtcagtggatttaagaactattgagcctaaatttagagaaattctcctcaacaaagatgctattgctgtgaatcaagatcccttaggtgaaatgggtcggctagtgctaaagaaaaacaagatttatatatggacgaagaagctaacacctaaagatgatggcagacaacctcacgccattgccgtactaagccaaagaaccgatgggtacaaatatagagtggaatttattttaaaggatttgaatattaccagtccaaacggattcttgataaaggatatttttgatgaagataaatctgtggcatccatagcagatgatgaaccgttcgtcctaagaatggcacctacaggaggcactttgttggttgcaactcccaaaaaataaacgaaaaaggatttagtcagtgaccaaaatattaaatactttttagatattttataaataaataaatcaaattattttaat

SEQ ID NO: 3075 - DNA, 1456 bp, Diabrotica virgifera
  SmartBlast Evalue=1E-132; Info=Alpha-galactosidase/alpha-n- acetylgalactosaminidase n=1 Tax=Aedes aegypti RepID=Q17AU1_AEDAE
caagtacatcgtgactcacacgactcagacaaagataatctctaagtatcaagctatataacataaatatagctgcatcagtcttattgccgatattattgattgttttagttatgctaatcaagaactgagaaggaacaatggtttcaagacttgtgttagcgttggttggacttatttcaaccgtgaatggtttggataatggacttgcccgtacgccaccaatgggctggatggattggcaaagatttaggtgtctgacaaattgtacactatatcctgatgaatgtataagtgaaaaattgttccgagacatggccgatcgtatggcagcggatgggtatcttgctgctggctatgaatacattatgatcgacgattgttggtcttctaaagagagagatagtaaaggaagattggttcctgatcctgatagattcccaagtggcattaaaaacttatcagattatatacacagcaaaggtcttaaatttggaatttacgctgattatggaaccttaacatgtgctggttatcccggtagtaaagagtatcttaaaattgatgctgatagatttgcagaatgggaagtagattacttaaagtttgatgggtgcaattcagattggatatttatcgacaaaggttacattgaaatgggtaaacatttaaacgcaacaggtcgtcctattgtttactcatgtagttggcctgcttatcaggaaccaaataaaatgcaatctaactacacagctttggctgaaacttgtaacctttggagaaattgggacgacattgatgatagctgggaaagtgtcacatctatcatagagtggttttccgacaatcaagatcgaattggaccattttcagcacctggtcactggaatgatcccgatatgcttgtgattggaaattttggattgagttttgaacagagcaaaggacagatgtcagtttggtcggtaatggcggcaccgttgataatgtcagtggatttaagaactattgagcctaaatttagagcaattctcctcaacaaagatgctattgctgtgaatcaagatcccttaggtgaaatgggtcggctagtgctaaagaaaaacaatatttatatatggacgaagaagctaacagctaaagctgatggcagacaacctcacgccattgccgtactaagccaaagaaccgatgggtacaaatatagaatggaatttactttaaaggatttgaatattaccggtccaaacggattcttgataaaggatatttttgatgaagataaatctgtggcatccatagcagatgatgaaccgttcgtcctaagaatggcacctacaggaggcactttgttggttgcaactcccaaaaaataaacgaaaaaggatttagtcagtgaccaaaatattaaatactttttagatattttataaataaataaataaattattttaat

SEQ ID NO: 3076 - DNA, 1457 bp, Diabrotica virgifera
  SmartBlast Evalue=1E-134; Info=Alpha-galactosidase/alpha-n- acetylgalactosaminidase n=1 Tax=Aedes aegypti RepID=Q17AU1_AEDAE
caagtacatcgtgactcacacgactcagacaaagataatctctaagtatcaagctatataacataaatatagctgcatcagtcttattgccgatattattgattgttttagttatgctaatcaagaactgagaaggaacaatggtttcaagacttgtgttagcgttggttggacttatttcaaccgtgaatggtttggataatggacttgcccgtacgccaccaatgggctggatggattggcaaagatttaggtgtctgacaaattgtacactatatcctgatgaatgtataagtgaaaaattgttccgagacatggccgatcgtatggcagcggatgggtatcttgctgctggctatgaatacattatgatcgacgattgttggtcttctaaagagagagatagtaaaggaagattggttcctgatcctgatagattcccaagtggcattaaaaacttatcagattatatacacagcaaaggtcttaaatttggaatttacgctgattatggaaccttaacatgtgctggttatcccggtagtaaagagtaccttaaaattgatgctgatagatttgcagaatgggaagtagattatttaaagtttgatggatgcaattcagattggatatttatcgacaaaggttatattgaaatgggtaaacatttaaatgcaacaggtcgtcctattgtttactcatgtagttggcctgcatatcaggaaccaaacaaaatgcaatctaactacacagctttggctgaaacttgtaacctttggagaaattgggacgacatcgatgatagctgggaaagtgtcacatctatcatagagtggttttccgacaatcaagatcgaattggaccattttcagcacctgggcactggaatgatcccgatatgcttgtgattggaaattttggattaagttttgaacagagcaaaggacagatgtcagtttggtcggtaatggcggcaccattgataatgtcagtggatttaagaactattgagcctaaatttagagaaattctcctcaacaaagatgctattgctgtgaatcaagatcccttaggtgaaatgggtcggctagtgctaaagaaaaacaagatttatatatggacgaagaagctaacacctaaagatgatggcagacaacctcacgccattgccgtactaagccaaagaaccgatgggtacaaatatagagtggaatttattttaaaggatttgaatattaccagtccaaacggattcttgataaaggatatttttgatgaagataaatctgtggcatccatagcagatgatgaaccgttcgtcctaagaatggcacctacaggaggcactttgttggttgcaactcccaaaaaataaacgaaaaaggatttagtcagtgaccaaaatattaaatactttttagatattttataaataaataaatcaaattattttaat

SEQ ID NO: 3077 - DNA, 1431 bp, Diabrotica virgifera
  SmartBlast Evalue=1E-14; Info="Adipophilin/perilipin, putative n=1 Tax=Pediculus humanus corporis RepID=E0VM08_PEDHC"
ttttgaaatttggaacatatatttaaataaaaacgtaaatattcagtgatattttcatcctcgacttaattctatattagtataaaatatacatttataaatattgtaaactattaagggtgacatccttatgtactataggcacttgtgtgtattgatttacttcgttaatactctagataaccatcatacacttaaggttttcctgctagatatgtaacattaacttattatatagatattaacgttgaaaataacaataactttaccatctttccagtattcaaattaaagaaaactcttatttgaatactgaatacagaaagaaggaaaattacaaaagtaataaatgtattattaaataataaagtatttctttttgaaaacaccgtaatatttttaaatatttgtaattatgaaaactttttggaaaaggcacatattcagactaatgttctggaagccacccttagattaaaatctaaaaacagtcttaaaatacaattgggacgttaaacatagaaaacactataaactaatacaaaacgcgcgttattattggccctcgggatgttgatcttgttgctgctgttcgttttggttgtcctgctgttgttgtgcctctaatcttttcctgatttggacacattcttggcattcgactacttcaccttcttggtgggagaggtgcaaatactcatcaaccctctgcataacattttctttgatggcattagctttgtccaaagcaggctgtacaattggttctacaatatgtctggccctctccagggttggttcaacagctgacttggccctttcataagcgggttccacgagatctttagcggtcttgacagctggctctgcgtaggctttggcggtttcaacagcgggtgttatcgtgttgttgacgtagtctttggtggtgttgtaaatctcgttggtgggaagttttacagcagggatcttttcttctacataatccaaacctgagcaaagaacattgtcgactttcttaataggtccttcgaagttcttgataacgggagtggcaataggcattcccaagtcgactgccttgcagagggtggtttctgctgtcgagaaagtccaatgggtgagaccgttcaagtccttactttttcgtatagacttgtagctgtcttgatggtggaatcaacaactggaagctttgaaaatctgttgacagactccaagcaggttaggttggattgagcaacgggagcttcacttacttctgttattgctgccatttttatttaggttatttgccggtaaatacgaaagtaaacaagaaaactgataaaaacactgagaaacagtcaaaaatagcacgatcacttgtcactgaaatacaaatcgagaatggtagaaaatgcacgtagacgctatttatttatagaagga

SEQ ID NO: 3078 - DNA, 1431 bp, Diabrotica virgifera
  SmartBlast Evalue=1E-14; Info="Adipophilin/perilipin, putative n=1 Tax=Pediculus humanus corporis RepID=E0VM08_PEDHC"
ttttgaaatttggaacatatatttaaataaaaacgtaaatattcagtgatattttcatcctcgacttaattctatattagtataaaatatacatttataaatattgtaaactattaagggtgacatccttatgtactataggcacttgtgtgtattgatttacttcgttaatactctagataaccatcatacacttaaggttttcctgctagatatgtaacattaacttattatatagatattaacgttgaaaataacaataactttaccatctttccagtattcaaattaaagaaaactcttatttgaatactgaatacagaaagaaggaaaattacaaaagtaataaatgtattattaaataataaagtatttctttttgaaaacaccgtaatatttttaaatttttctaattctgaaaactttttggaaaaggcacatgttcagactaatgttctggaagccacccttagattaaaatctaaaaacagtcttaaaatacaattgggacgttaaacatagaaaacactataaactaatacaaaacgcgctttattattgcccctcgggatgttgatcttgttgctgctgttcgttctggttgtcctgctgttgttgtgcttctaatcttttcctgatttgtacgcattcttggcattcgactacttcaccttcttggtgggagaggtgcaaatactcatcaaccctctgcataacattttctttgatggcattagctttgtccaaagcaggctgtacaattggttctacaatatgtctggccctctccagggttggttcaacagctgacttggccctttcataagcgggttccacgagatctttagcggtcttgacagctggctctgcgtaggctttggcggtttcaacagcgggtgttatcgtgttgttgacgtagtctttggtggtgttgtaaatctcgttggtgggaagttttacagcagggatcttttcttctacataatccaaacctgagcaaagaacattgtcgactttcttaataggtccttcgaagttcttgataacgggagtggcaataggcattcccaagtcgactgccttgcagagggtggtttctgctgtcgagaaagtccaatgggtgagaccgttcaagtccttactttttcgtatagacttgtagctgtcttgatggtggaatcaacaactggaagctttgaaaatctgttgacagactccaagcaggttaggttggattgagcaacgggagcttcacttacttctgttattgctgccatttttatttaggttatttgccggtaaatacgaaagtaaacaagaaaactgataaaaacactgagaaacagtcaaaaatagcacgatcacttgtcactgaaatacaaatcgagaatggtagaaaatgcacgtagacgctatttatttatagaagga

SEQ ID NO: 3079 - DNA, 1392 bp, Diabrotica virgifera
  SmartBlast Evalue=2E-20; Info=Lipid storage droplets surface- binding protein 1 n=1 Tax=Camponotus floridanus RepID=E1ZZJ4_ 9HYME
ttttgaaatttggaacatatatttaaataaaaacgtaaatattcagtgatattttcatcctcgacttaattctatattagtataaaatatacatttataaatattgtaaactattaagggtgacatccttatgtactataggcacttgtgtgtattgatttacttcgttaatactctagataaccatcatacacttaaggttttcctgctagatatgtaacattaacttattatatagatattaacgttgaaaataacaataactttaccatctttccagtattcaaattaaagaaaactcttatttgaatactgaatacagaaagaaggaaaattacaaaagtaataaatgtattattaaataataaagtatttctttttgaaaacaccgtaatatttttaaatatttgtaattatgaaaactttttggaaaaggcacatattcagactaatgttctggaagccacccttagattaaaatctaaaaacagtcttaaaatacaattgggacgttaaacatagaaaacactataaactaatacaaaacgcgcgttattattggccctcgggatgttgatcttgttgctgctgttcgttttggttgtcctgctgttgttgtgcctctaatcttttcctgatttggacacattcttggcattcgactacttcaccttcttggtgggagaggtgcaaatactcatcaaccctctgcataacattttctttgatggcattagctttgtccaaagcaggctgtacaattggttctacaatatgtctggccctctccagggttggttcaacagctgacttggccctttcataagcgggttccacgagatctttagcggtcttgacagctggctctgcgtaggctttggcggtttcaacagcgggtgttatcgtgttgttgacgtagtctttggtggtgttgtaaatctcgttggtgggaagttttacagcagggatcttttcttctacataatccaaacctgagcaaagaacattgtcgactttcttaataggtccttcgaagttcttgataacgggagtggcaataggcattcccaagtcgactgccttgcagagggtggtttctgctgtcgagaaagtccaatgggtgagaccgttcaagtcctttactttttcgtatagacttgtagctgtcttgatggtggaatcaacaactggaagctttgaaaatctgttgacagactccaagcaggttaggttggattgagcaacgggagcttcacttacttctgttattgctgccatttttatttaggttccttaagtacactgaaaaagtttcacagattggttgtaaaggtaaaatcgaaagtttttagtctaggtctctacaatttaaaatttcaacagcaaatgatt

SEQ ID NO: 3080 - DNA, 1392 bp, Diabrotica virgifera
  SmartBlast Evalue=2E-20; Info=Lipid storage droplets surface- binding protein 1 n=1 Tax=Camponotus floridanus RepID=E1ZZJ4_ 9HYME
ttttgaaatttggaacatatatttaaataaaaacgtaaatattcagtgatattttcatcctcgacttaattctatattagtataaaatatacatttataaatattgtaaactattaagggtgacatccttatgtactataggcacttgtgtgtattgatttacttcgttaatactctagataaccatcatacacttaaggttttcctgctagatatgtaacattaacttattatatagatattaacgttgaaaataacaataactttaccatctttccagtattcaaattaaagaaaactcttatttgaatactgaatacagaaagaaggaaaattacaaaagtaataaatgtattattaaataataaagtatttctttttgaaaacaccgtaatatttttaaatttttctaattctgaaaactttttggaaaaggcacatgttcagactaatgttctggaagccacccttagattaaaatctaaaaacagtcttaaaatacaattgggacgttaaacatagaaaacactataaactaatacaaaacgcgctttattattgcccctcgggatgttgatcttgttgctgctgttcgttctggttgtcctgctgttgttgtgcttctaatcttttcctgatttgtacgcattcttggcattcgactacttcaccttcttggtgggagaggtgcaaatactcatcaaccctctgcataacattttctttgatggcattagctttgtccaaagcaggctgtacaattggttctacaatatgtctggccctctccagggttggttcaacagctgacttggccctttcataagcgggttccacgagatctttagcggtcttgacagctggctctgcgtaggctttggcggtttcaacagcgggtgttatcgtgttgttgacgtagtctttggtggtgttgtaaatctcgttggtgggaagttttacagcagggatcttttcttctacataatccaaacctgagcaaagaacattgtcgactttcttaataggtccttcgaagttcttgataacgggagtggcaataggcattcccaagtcgactgccttgcagagggtggtttctgctgtcgagaaagtccaatgggtgagaccgttcaagtcctttactttttcgtatagacttgtagctgtcttgatggtggaatcaacaactggaagctttgaaaatctgttgacagactccaagcaggttaggttggattgagcaacgggagcttcacttacttctgttattgctgccatttttatttaggttccttaagtacactgaaaaagtttcacagattggttgtaaaggtaaaatcgaaagtttttagtctaggtctctacaatttaaaatttcaacagcaaatgatt

SEQ ID NO: 3081 - DNA, 1455 bp, Diabrotica virgifera
  SmartBlast Evalue=2E-13; Info=Senescence-associated protein n=2 Tax=Trichoplax adhaerens RepID=B3SDD4_TRIAD
gtatgccctaacatgttttactcaacaaaccattcaatatcagtttcagagttcattttccaattgcaaggataatttatttagattcattcagtttgacgatgacttaaagcaagtgaaaagaagatatttttgtaagcagttgattactgtatagtcagcgtttcccaaccagtgggtcgcgacccattagtgggtcggtcgcggcatggcttttacagtagctgaataacgtacattatgtattatcatgggtgagggatgggtcgcgaatatgaaaaaacatcagaaggtgggtcgccagacataaaatgttggtaatcactgcgtgtatagtaaagttttagggggttttgatatgtggtacggaagggttctctaatagatacttcgaaagagaatatttctgacaagaataatgaagacattaaacggtttcggtaattgtgtttgaactgtttgctaaaaatttaatgtctattaacacacttaagatgaaggcagatacttaacatattcaaatagtgactagacaataaaatctctgtattctaaccaaacaacaaacggatagactttaactaaaaggggatactcgaactttaaactataatgctgaaaaccacttgaaagttaaattttcattcctatggtagcttcgtaccattaccaattcgaggaagtccaaacctgcggttcctctcgtactgagcaggattactatcacaactacgagtcatcagtagggtaaaactaacctgtgccacggcaatctaaacccaactgacgttaatatgggtgaacaatccaacgcttggcgaattatgcttcacaatgataggaaaagcgacgtcgctatgatcgcttggccgccacaagccagttatccaggtgacaacttttcggacacctcttgctgaaactgttcaaaccaaaagaattgataggctgtgctttcacagtccctatgcatactgaacatcgagatcaagccagcttttacccttttgctctactcaaggtttctgtctcattgagctggccttagcagaggcattctttgacagatgtactgccccagtcaaactctccgactggaattgtcctcgaatcaaatcaggctggaggcaacttgatgctctaaacgaagcacactaaagtagctgggtatcagaaaggcaagtcttatcggaaccatgaaaacgaaacaccattccatttcctttctgaaactaataaaatactaataatcatccattcgagtgcttttctgtagatccttttatctaattaagttttaatttggctttgtttgaatttcacgagagaaaagtttttaatcctcttttccttgcaaatggaaaacgtttctgttccaagtagagtgcttctttacacttatatcaaccaaatcatttattagtctcacaattaaattgtatgaatattggaagc

SEQ ID NO: 3082 - DNA, 1446 bp, Diabrotica virgifera
  SmartBlast Evalue=1E-13; Info=Senescence-associated protein n=2 Tax=Trichoplax adhaerens RepID=B3SDD4_TRIAD
gtatgccctaacatgttttactcaacaaaccattcaatatcagtttcagagttcattttccaattgcaaggataatttatttagattcattcagtttgacgatgacttaaagcaagtgaaaagaagatatttttgtaagcagttgattactgtatagtcagcgtttcccaaccagtgggtcgcgacccattagtgggtcggtcgcggcatggcttttacagtagctgaataacgtacattatgtattatcatgggtgagggatgggtcgcgaatatgaaaaaacatcagaaggtgggtcgccagacataaaatgttggtaatcactgcgtgtatagtaaagttttagggggttttgatatgtggtacggaagggttctctaatagatacttcgaaagagaatatttctgacaagaataatgaagacattaaacggtttcggtaattgtgtttgaactgtttgctaaaaatttaatgtctattaacacacttaagatgaaggcagatacttaacatattcaaatagtgactagacaataaaatctctgtattctaaccaaacaacaaacggatagactttaactaaaaggggatactcgaactttaaactataatgctgaaaaccacttgaaagttaaattttcattcctatggtagcttcgtaccattaccaattcgaggaagtccaaacctgcggttcctctcgtactgagcaggattactatcacaactacgagtcatcagtagggtaaaactaacctgtgccacggcaatctaaacccaactgacgttaatatgggtgaacaatccaacgcttggcgaattatgcttcacaatgataggaaaagcgacgtcgctatgatcgcttggccgccacaagccagttatccaggtgacaacttttcggacacctcttgctgaaactgttcaaaccaaaagaattgataggctgtgctttcacagtccctatgcatactgaacatcgagatcaagccagcttttacccttttgctctactcaaggtttctgtctcattgagctggccttagcagaggcattctttgacagatgtactgccccagtcaaactctccgactggaattgtcctcgaatcaaatcaggctggaggcaacttgatgctctaaaccgtatctccatggtatcagaaaggcaagtcttatcggaaccatgaaaacgaaacaccattccatttcctttctgaaactaataaaatactaataatcatccattcgagtgcttttctgtagatccttttatctaattaagttttaatttggctttgtttgaatttcacgagagaaaagtttttaatcctcttttccttgcaaatggaaaacgtttctgttccaagtagagtgcttctttacacttatatcaaccaaatcatttattagtctcacaattaaattgtatgaatattggaagc

SEQ ID NO: 3083 - DNA, 1272 bp, Diabrotica virgifera
  SmartBlast Evalue=2E-13; Info=Senescence-associated protein n=2 Tax=Trichoplax adhaerens RepID=B3SDD4_TRIAD
gccctaacatgttttactcaacaaaccattcaatatcagtttcagagttcgttttccaattgcaaggataatttatttagattcatttagtttgacgatgacttaaaggaagtgaaaagaagagatttttgtaagcagttgattactgtatagtaaagtgttagggggttttgatatgtggtacggaagggttctctaatagatacttcgaaagagaatatttctgacaagaataatgaagacattaaacggtttcggtaattgtgtttgaactgtttgctaaaaatttaatgtctattaacacacttaagatgaaggcagatacttaacatattcaaatagtgactagacaataaaatctctgtattctaaccaaacaacaaacggatagactttaactaaaaggggatactcgaactttaaactataatgctgaaaaccacttgaaagttaaattttcattcctatggtagcttcgtaccattaccaattcgaggaagtccaaacctgcggttcctctcgtactgagcaggattactatcacaactacgagtcatcagtagggtaaaactaacctgtgccacggcaatctaaacccaactgacgttaatatgggtgaacaatccaacgcttggcgaattatgcttcacaatgataggaaaagcgacgtcgctatgatcgcttggccgccacaagccagttatccaggtgacaacttttcggacacctcttgctgaaactgttcaaaccaaaagaattgataggctgtgctttcacagtccctatgcatactgaacatcgagatcaagccagcttttacccttttgctctactcaaggtttctgtctcattgagctggccttagcagaggcattctttgacagatgtactgccccagtcaaactctccgactggaattgtcctcgaatcaaatcaggctggaggcaacttgatgctctaaacgaagcacactaaagtagctgggtatcagaaaggcaagtcttatcggaaccatgaaaacgaaacaccattccatttcctttctgaaactaataaaatactaataatcatccattcgagtgcttttctgtagatccttttatctaattaagttttaatttggctttgtttgaatttcacgagagaaaagtttttaatcctcttttccttgcaaatggaaaacgtttctgttccaagtagagtgcttctttacacttatatcaaccaaatcatttattagtctcacaattaaattgtatgaatattggaagc

SEQ ID NO: 3084 - DNA, 1263 bp, Diabrotica virgifera
  SmartBlast Evalue=8E-14; Info=Senescence-associated protein n=2 Tax=Trichoplax adhaerens RepID=B3SDD4_TRIAD
gccctaacatgttttactcaacaaaccattcaatatcagtttcagagttcgttttccaattgcaaggataatttatttagattcatttagtttgacgatgacttaaaggaagtgaaaagaagagatttttgtaagcagttgattactgtatagtaaagtgttagggggttttgatatgtggtacggaagggttctctaatagatacttcgaaagagaatatttctgacaagaataatgaagacattaaacggtttcggtaattgtgtttgaactgtttgctaaaaatttaatgtctattaacacacttaagatgaaggcagatacttaacatattcaaatagtgactagacaataaaatctctgtattctaaccaaacaacaaacggatagactttaactaaaaggggatactcgaactttaaactataatgctgaaaaccacttgaaagttaaattttcattcctatggtagcttcgtaccattaccaattcgaggaagtccaaacctgcggttcctctcgtactgagcaggattactatcacaactacgagtcatcagtagggtaaaactaacctgtgccacggcaatctaaacccaactgacgttaatatgggtgaacaatccaacgcttggcgaattatgcttcacaatgataggaaaagcgacgtcgctatgatcgcttggccgccacaagccagttatccaggtgacaacttttcggacacctcttgctgaaactgttcaaaccaaaagaattgataggctgtgctttcacagtccctatgcatactgaacatcgagatcaagccagcttttacccttttgctctactcaaggtttctgtctcattgagctggccttagcagaggcattctttgacagatgtactgccccagtcaaactctccgactggaattgtcctcgaatcaaatcaggctggaggcaacttgatgctctaaaccgtatctccatggtatcagaaaggcaagtcttatcggaaccatgaaaacgaaacaccattccatttcctttctgaaactaataaaatactaataatcatccattcgagtgcttttctgtagatccttttatctaattaagttttaatttggctttgtttgaatttcacgagagaaaagtttttaatcctcttttccttgcaaatggaaaacgtttctgttccaagtagagtgcttctttacacttatatcaaccaaatcatttattagtctcacaattaaattgtatgaatattggaagc

SEQ ID NO: 3085 - DNA, 2284 bp, Diabrotica virgifera
  SmartBlast Evalue=0; Info="Very long-chain specific acyl-CoA dehydrogenase, mitochondrial n=1 Tax=Harpegnathos saltator RepID=E2BYV9_9HYME"
cacataaaaacctatttgttgagtgtaaaataattgtttatattgtacacattattttttagaaatttatttttattatagtcataattcaaagatgttgcgaacggttattaaaactggtatcaaggagcaaaaaattgtacaaagtattttattgccaagatgtatatctacctctacaacacataataagactgttcaaacttctgaaaaagctcaaccaactcatagtaatgaaagtgcttcttttgtgatgaatatattccgtgggcagttggagcccaagcaaatgtttccttatccaaatgttttaaatgaagaacagagggagacacttcaaatgatgattgaaccaacactacagtttttcgagaaagtcaacaatcctactaagaatgatgaacttgaaaaagttgaagagaatactcttaaagggctatgggagcttggagcatttgctttacaagttccccaggaattaggaggctcagaattatctaatacacaatatgcaaggctagttgaaattgtaggagcaaatgatttaggtgttggaattactttgggagctcatcagtccattggatttaaaggaattcttctttttggaaatcctgaacaaaaggccaagtatttaaccatgtgttctagtggtaaagtggctgctttttgtttaactgagccaagttcaggttcagatgctgcatctattcaaacaagagcagaattatctccagatggaaaacactatatcctcaatggttccaaaatttggatcagtaatggaggaactgccgatgttatgacagtatttgcgaggacgaaggtgactaatccaaaaacaggaaaagtcgatgataaagttagtgcatttatcgttgaaagagggtttggaggagtaactagtgggccaccagagaaaaaactaggaatcaagtgttcaaatacaacagcattattttttgataacaccaaaatccccgctgaaaaccttttgggtggtctaggaaatggtttcaaagtagcaatgaatattttgaacaatggacgttttggtatggcagctgctctttccggtacaatgaggacatgtataaagaaagctgttgaatttgctactcaacgaaaacagttcggtcacaaattagagagttatggaggtatacaagagaaattagctcgtatggctatgtatcattatgtaactgagtctatggcgtatatgatttctggaaatatggatagtgggtgcacggattatcagttagaagcggctatatccaagtgttttgcttctgaagccgcgtggtatgtttgtgacgaagctatccaaattttaggcggtatgggctttatgaaagaaaccggtttggaaaggattttaagagacttaagaattttcaggatatttgaaggaaccaatgacattttacggttgtttgtagccttaactggaattcaatattcaggagcacatttaagagaattgcaaagtgctttcaagaatccaacagccaatttaggtcttatatttgaagaagcgtccaaaagagtgggtagaaaagttggtttgagttcgcctccctccatggatcatttggttcacagagagttaattccgtcatcacaagtagttgcaagatctgtggattcctttgggcaagcagttgaaatgttgttgataaaatatggaaaaaatattgtaaatgaacagtgcgtcttaaatcgtctagcaaacgcagcctttgacatttatagcagtactgtcgtactttcaagagctagtcaatcccttaaagaaaattcaccgacagctaatcacgaaaaattgatgacggaggcatggattcttgaagcaacagacagggtgaaagccaacttggatattgtagcttcaggcaagtatctagacaatttttcaaaaatgagtgccatttccagaacagtgtgtcaagcagaaggtgttgcacaaactaatccattgaagctctgatatgtttattgagaatggaagattgaaaggaactcccaaagtcctttggaacaaaggactttgaaacacaactcttgtattctatggcttgatgtccatggtgtaatcttctgttgatctttagagaagttttctttcatttattttgaaagtatgtaatttttatttattctcgataattggatgaaatattgtcaattgtctataagatttatcgtgttatacatgccaatattttatatttaaataatttacgtcgccttcacattaaataatagtttcaaattacaa

SEQ ID NO: 3086 - DNA, 1704 bp, Diabrotica virgifera
ccaagtttataatcaatcagtgggaaagttaaaaataaaaacaactcttgcttcttgccatgttacattgaaccaaccaaagtcttcagttggaaatctcgaactagtctgtgagttaatgccatactttatagctaaattctacacctgtgacatagtagatagggagaacatggatgtgtattgttttccctatttactaggttaaaagttagctgacgatgacaaaattgagctcaaatcttgacaagtgacgtttgacggttgatgctttctgtatatggatttgttagtggcgacctctatagttcaacgtgggacttattgagtgacatgctagttattggcattgaatggtatgagttgaacaaattactgtatagagaaatttctaattcatatatacgttcttggtaaaatattttatggctcattcaaattaaaaacacgtaagattaagatttctaaaatttatgtgtcaatctaacgaagtcatgtttttgcctttacagagagaggttatgagtctgagagtgtgtaaaatttaactggccatatcagagaatattctcgattattgttttcggaagaaatgattgttttactaactaaaaattatgtgcgaacaaaaataaacaaaaaaataaaacatggtcagtaatatttgccaactatcggatgtgtttggacacatagtgtggattctagtctgttggagcttctgttggtggattttttaaactagatttggagatgtttaactttacctgtgttaacaacaataaatatgttgataattccgtattgacaaagtatttcagtatattttgaggcatatactttttcttgacattgttgaactttgctttcttaactattgaactgtttaaaattaatattttgagcagaacttgcttagatagtcatttaagacatacaatttgatgtatcgtcctgtattgtcatatttaatctattaaaaggtgattttagagaaggttccttcgaattcgcaccttttctatgttatcatataattcactaaaggaatcaagtattgaaacacttatgccaagaagtgaatcgtcaaacaggccataggaaactaaagaattaaagaaaagaattaaaattcttctacgaattaatcacattccaaaattttgcaaagatatattaccttttctaggatattgttgtgaaagttgggccacacgtggtgcagaatgcgtataacgggttgctttaaatcacaatgtgactaaacacaactcatgatagatattctgcactacgtgtggtctaacttgtacagcaatactctggaaaatgtattatgtttttggaaaattttgaaatgtgtttgattcgtaaaacaattttatcgtttgttttttcaatgcagatttcagtcctctacaaatagtttctcatgacttttgatgtaaaataactacggtaacagaaattcaccagtttagaatttcctatttggttcctatgggtcgtttgactcgttcaaggcacttgactattattgtgtaacaagtggtaaagttaagtctgtcctcttctaactagaagaatagttttttattataactttttaatactacaagctaaaatttaatatgctttaatttagtgttaagtgagtttcagcgtatttcttgaaactcatattatcgaagataataaaatgtt

SEQ ID NO: 3087 - DNA, 724 bp, Diabrotica virgifera
ccaagtttataatcaatcagtgggaaagttaaaaataaaaacaactcttgcttcttgccatgttacattgaaccaaccaaagtcttcagttggaaatctcgaactagtctgtgagttaatgccatactttatagctaaattctacacctgtgacatagtagatagggagaacatggatgtgtattgttttccctatttactaggttaaaagttagctgacgatgacaaaaggtttgttccaacatgaacttttggacggcccagaaaccgtcacgaaactacttgtaccgtttgttgtgcgcatgttcgtaattgtatcgcccagttatcgtcccatgacggtaatcatatatttgtcatttttgttggtgacagcttgtgtgcttttagtcgatcaaaggctcaaaaaatttaaagaattaaatcctagtgctcaagtcagtccaaccagcacattatgcatttgcccgattactgaaatgatcatcacgaaaccgtcaccgaaagatcacaattcttgttggaacagtgggaaggacgatccgatgacgatcatatttttgttggaacggattttgtttactgcgcaggagcgttaccgtttcgtgacggttctcggtcgtgttggaacaaacctataagatttatcgtgttatacatgccaatattttatatttaaataatttacgtcgccttcacattaaataatagtttcaaattacaa

SEQ ID NO: 3088 - DNA, 678 bp, Diabrotica virgifera
tccattgtgttggggtttgttccaacatgaacttttggacggtccagaaaccgtcacgaaactacttgtaccgtttgttgtgcgcatgttcgtaattgtatcgtccagttatcgtcccatgacggtaatttggaaaccgatgttggaacgggtatctgactgataactgatttatctatcattaggtttgttccaacatgaacttttggacggcccagaaaccgtcacgaaactacttgtaccgtttgttgtgcgcatgttcgtaattgtatcgcccagttatcgtcccatgacggtaatcatatatttgtcatttttgttggtgacagcttgtgtgcttttagtcgatcaaaggctcaaaaaatttaaagaattaaatcctagtgctcaagtcagtccaaccagcacattatgcatttgcccgattactgaaatgatcatcacgaaaccgtcaccgaaagatcacaattcttgttggaacagtgggaaggacgatccgatgacgatcatatttttgttggaacggattttgtttactgcgcaggagcgttaccgtttcgtgacggttctcggtcgtgttggaacaaacctataagatttatcgtgttatacatgccaatattttatatttaaataatttacgtcgccttcacattaaataatagtttcaaattacaa

SEQ ID NO: 3089 - DNA, 1383 bp, Diabrotica virgifera
  SmartBlast Evalue=1E-34; Info=LSM14 protein-like protein A n=2 Tax=Formicidae RepID=E2B6N4_9HYME
aatcaaggataccagcaacactaccaacagcaccccagaggcaattgggtgaataatagaggtccaatgaggatgagaggtcgaggacaaaggggcccaggctacagaaacaacatgggtgttggtggaaatagaccaagaaataccttgaaatttgacaatgattatgattttgagcaggctaatactgaatttgaggaacttagaagtcagctgggaaaattaaaattgatgaagtaggaagtgtaagtactactaagagtgaagtgaatggagatgtggacaaaaaagatgattctggaaatgaaacgggtgctggagagactgaacaagaggaggaccatgaagtatattatgacaagagtaaatccttctttgacaagatttcatgtgaagcagtagaacgagctaaaggaaaatctcagaggactgactggcgtgtggaacgtaaattgaactctgagacatttggagtagcagctgcaagaagaggaagttacaggggtcgaggtggatttagagggatgggctaccgaggaggataccgtacaaacaactaccgacaaccccaacaacaaaatcagcgtcgtggtggaggacctagcagtgataatcgacagacatcccagcaacagcaaccagcacaacaaccacagcagcagcaacaacaagtgaaatagaagatctgaccaggaacacctgacactagattgagaaaaaaatacacaataagtgttttagtttataaaaaatacaacaatctgtgatggagtgagtttgtactactagaaaaatgtttttgttagatctacaagtatcgcgcggatttattctacacaactaaatcggttcactcgttcattgagccaaaatctcattggtgtttagaaaaaagctgcgggtccggctcaactcgtttactgatcgatatttgtctttccaacaaaaacgttagaataaaaattgaaaagagaaaagaaacaaaaatttgtcctggtgtcagtattaagattttagacttatagcgatacgcattttgacgtgtccctgattttgatcgtttttatatatcgcgaatcgtctttccaatcaagcgttggattatatatatacaacaaataaaaaattcgttatcgaaaaaatactaaatagaatttacaagtttgtcgtaattttttaacaagtatttttaaaatggttaaagtgggggacaaagaaaatgctactacgatttttcaacaccaaaacattaatggcaccaactaggtccctctttttgtgtgtttagcgattgattatagactgtaaatgacgtgttatgattattttatatatgttgccaaaatggagagggatattataaaaaaaaatctttagaaatta

SEQ ID NO: 3090 - DNA, 1165 bp, Diabrotica virgifera
  SmartBlast Evalue=1E-109; Info=Serine protease htra2 n=1 Tax= Aedes aegypti RepID=Q176F8_AEDAE
ttaagatctaaatttgtagctaatagtttttatcaatttaaaaatgcgggaaacacgcaagtcaacaaggttgtcatcaagaatatacttcaggaagattcaagtggccaaataacacattttaaactttttctattcttaatgacaggttacctctcttataaggcaagtaaaacgttctcctgtgttcccgttgtaaatgcagctactctctttggtggtgctactcctttagctggcaggcgaaaacaatacaactttattgcagatgtagttgaaacctcagctccagcagtagtttacatagaaatcaaagattcaagaaaagttgattttttcactggaaggccaaaaacgatatcaaatggatcaggttttataatagaagaaaatggcctaatccttacaaatgcccatgtagttacaaacaaacccaatgctaaagtagaggtaaaactcatagatggatcaatttacaatggagttgtggaagacattgatctggtaagtgatttagcaacggtgaggattccagcaaagaaactacctgtcatgaaactgggaagttcatcagatttgaaacctggagaatttgttgtagctatcggtagccctttggcccttagcaatactgtaaccagtggtgtagtcagttccactcaaaggggatcagctgaattaggtttagttggaaaagatatgcattacatccaaacagatgctgccattacattcggtaattcaggaggccccttagtaaatttagatggagaagcaattggtgttaacagtatgaaagtaacggcaggtatttctttcgcaatacctatagattatgttaaggaatttcttaatactacgaaaggtcctagaaagtcaattgataagcccaagaggatatacatgggaataacgatgttaacgcttactcctcagatcatacacgaattgcaacaaagagaccatcaaattccaagggatattgaaagaggcgtgctgatatggaaagttatttatgggtcaccagcacacaatggaggtttgcgtccaggggatattgtaactcatatagacggcaaaagaatacagcactcaaatgatgtatatggaattttagctgaaagtaaatcaagagaactgaatatatctgtgaatagaagtggaa

SEQ ID NO: 3091 - DNA, 1101 bp, Diabrotica virgifera
gtctagggaaagttacacagacgtacaaacaagatcaacatccactagtgaaggttgacaattcctatagtgaatgacaacctcctctacaacagtctagggaaagttagagagaaataaaagactaatcttaaatcacgtatacttttataacaaaagtaaatttagaatttgaaagatgaacaaataagaacaaaataaaacgtgaaactatagtctacaatttaaagactataatagagacgaaaatactatagtcaacaataataaaattatttgttgcaacatgataatgctttatggcatttggaattgcataaaacattgttttttatgcagtaacacttctttgtttggcacttcttgttacaactgcacttaaaaaatccttgcccacttccggttgactgagtagtagcaactgttcgtaaagtaagtgtcttttccattggaatttcatcttcttttataatgtttactggacaagtattaaactgggatctgcaaataaaaagatacttgcaggcttaaatgtaaaattactaattattatactatgcggtattaaatacgttcaaacaagttaaacttcataaaagtattaaaaatgtaaactaaattgacgacaggtcaaggtcgttcgcccgccgtgcacatccgccagatgttcaacattccctaggctgattccgtgaaggttcaccttccctagtgaaagctgatatatattttctactatcaacattcactggtcatttcagtgaaggtcgacaatcactagcgacggtacaccttgactaatattcagctttcactgtaacatatatatacaacaaataaaaaattcgttatcgaaaaaatactaaatagaatttacaagtttgtcgtaattttttaacaagtatttttaaaatggttaaagtgggggacaaagaaaatgctactacgatttttcaacaccaaaacattaatggcaccaactaggtccctctttttgtgtgtttagcgattgattatagactgtaaatgacgtgttatgattattttatatatgttgccaaaatggagagggatattataaaaaaaaatctttagaaatta

SEQ ID NO: 3092 - DNA, 874 bp, Diabrotica virgifera
  SmartBlast Evalue=1E-13; Info=Serine protease htra2 n=1 Tax= Culex quinquefasciatus RepID=B0WE06_CULQU
gtctagggaaagttacacagacgtacaaacaagatcaacatccactagtgaaggttgacaattcctatagtgaatgacaacctcctctacaacagtctagggaaagttagagagaaataaaagactaatcttaaatcacgtatacttttataacaaaagtaaatttagaatttgaaagatgaacaaataagaacaaaataaaacgtgaaactatagtctacaatttaaagactataatagagacgaaaatactatagtcaacaataataaaattatttgttgcaacatgataatgctttatggcatttggaattgcataaaacattgttttttatgcagtaacacttctttgtttggcacttcttgttacaactgcacttaaaaaatccttgcccacttccggttgactgagtagtagcaactgttcgtaaagtaagtgtcttttccattggaatttcatcttcttttataatgtttactggacaagtattaaactgggatctgatccatttgatatcgtttttggccttccagtgaaaaaatcaacttttcttgaatctttgatttctatgtaaactactgctggagctgaggtttcaactacatctgcaataaagttgtattgttttcgcctgccagctaaaggagtagcaccaccaaagagagtagctgcatttacaacgggaacacaggagaacgttttacttgccttataagagaggtaacctgtcattaagaatagaaaaagtttaaaatgtgttatttggccacttgaatcttcctgaagtatattcttgatgacaaccttgttgacttgcgtgtttcccgcatttttaaattgataaaaactattagctacaaatttagatcttaa

SEQ ID NO: 3093 - DNA, 1129 bp, Diabrotica virgifera
  SmartBlast Evalue=8E-86; Info=Annexin n=2 Tax=Culicini RepID= Q16QE7_AEDAE
tatacctattgtctgcatagaatttaaaatgatctttatgaaatgtctcaaatccatttttaataacttttaactaaactaatactataataactctgtggcaagtgttataattcaaaattcaacaaaaattttgtccatcttagcctattattgtcaacaatgtcttaagatattttccagtagcatcatccgacaccctttcgtacaaagtcttagcgtatttggcctcataggcttctttaatatcttcaagatctatttctgatctagatactataattctgataagtgttttgtcgtctgtgcccataccatgcattgcgtcgtggagtttggtggccaagtacacgggtttatccctaattgacgttactagggctaagtaagcatttttggtacttcctgaaaattcattgtcgatggcgtcttcaatggaatgtccgatcatagtttcgtattcgtcgaaaatgagtttaagttgtcttttattttttaggcaaagaatggaattgaaaacagattcctcagttccccacgatgattcaccggcatcgtatagtgcttgggcatcggcaatggctgagtttttgtcaaccaatccagagtcgtctctaccacccgttgacaaagaaacgagaagtctttgtaacgtgcctgactcatcacctctaatggcgtcttctaaagaagtttcatacaattcttggtacctctcggagagacgttgaatctcttcgttgtcatgtacaaccaatatttctaccaaggaatcgtcgtctgttcccattccactgatcgctctatgtaattcttcaacttggaagtccaacggctctttcatcagagccagtattacgtcctcgaaatcgcctcctagttccccttttagagtttctattaggtcctctccaaacatggttttgtaagtatgttcaatttgccgtctttgttcatttgttctccttgctaaaatctcgatgatagcattttcgttcgttcctagaccatccatggcatcttttaacgcttgtgcgtcttcatcgtctctgaagttttcgtacggaaatactgttggcgccattttttatatatatattcctgcaggacactatcacaatcgcaacac

SEQ ID NO: 3094 - DNA, 1125 bp, Diabrotica virgifera
  SmartBlast Evalue=9E-85; Info=Annexin n=2 Tax=Culicini RepID= Q16QE7_AEDAE
tcaatagaaataaatacattttagaataggtttaacataacttttttttataaaaatttagcaaatatcaggtgcagtctaccgtttcaagcattttgtgaattttaagctcacatttatcaaacattatttaaaagttcactcaattaaagcgagcaggatctttctgacgtttgaagattcgtcgctcgacaccctttcgtacaaagtcttagcgtatttggcctcataggcttctttaatatcttcaagatctatttctgatctagatactataattctgataagtgttttgtcgtctgtgcccataccatgcattgcgtcgtggagtttggtggccaagtacacgggtttatccctaattgacgttactagggctaagtaagcatttttggtacttcctgaaaattcattgtcgatggcgtcttcaatggaatgtccgatcatagtttcgtattcgtcgaaaatgagtttaagttgtcttttattttttaggcaaagaatggaattgaaaacagattcctcagttccccacgatgattcaccggcatcgtatagtgcttgggcatcggcaatggctgagtttttgtcaaccaatccagagtcgtctctaccacccgttgacaaagaaacgagaagtctttgtaacgtgcctgactcatcacctctaatggcgtcttctaaagaagtttcatacaattcttggtacctctcggagagacgttgaatctcttcgttgtcatgtacaaccaatatttctaccaaggaatcgtcgtctgttcccattccactgatcgctctatgtaattcttcaacttggaagtccaacggctctttcatcagagccagtattacgtcctcgaaatcgcctcctagttccccttttagagtttctattaggtcctctccaaacatggttttgtaagtatgttcaatttgccgtctttgttcatttgttctccttgctaaaatctcgatgatagcattttcgttcgttcctagaccatccatggcatcttttaacgcttgtgcgtcttcatcgtctctgaagttttcgtacggaaatactgttggcgccattttttatatatatattcctgcaggacactatcacaatcgcaacac

SEQ ID NO: 3095 - DNA, 1100 bp, Diabrotica virgifera
  SmartBlast Evalue=4E-86; Info=Annexin n=2 Tax=Culicini RepID= Q16QE7_AEDAE
attcaaaatacagtaattctgatatattaacttttatgttgaccgcaatactgaacaagtatacacctagcaaaaagtacacactaaattttggaaaagaacatttcgaaaagttaaccaattaatgtcaataatgcttttgcgtattttccagtagcatcatccgacaccctttcgtacaaagtcttagcgtatttggcctcataggcttctttaatatcttcaagatctatttctgatctagatactataattctgataagtgttttgtcgtctgtgcccataccatgcattgcgtcgtggagtttggtggccaagtacacgggtttatccctaattgacgttactagggctaagtaagcatttttggtacttcctgaaaattcattgtcgatggcgtcttcaatggaatgtccgatcatagtttcgtattcgtcgaaaatgagtttaagttgtcttttattttttaggcaaagaatggaattgaaaacagattcctcagttccccacgatgattcaccggcatcgtatagtgcttgggcatcggcaatggctgagtttttgtcaaccaatccagagtcgtctctaccacccgttgacaaagaaacgagaagtctttgtaacgtgcctgactcatcacctctaatggcgtcttctaaagaagtttcatacaattcttggtacctctcggagagacgttgaatctcttcgttgtcatgtacaaccaatatttctaccaaggaatcgtcgtctgttcccattccactgatcgctctatgtaattcttcaacttggaagtccaacggctctttcatcagagccagtattacgtcctcgaaatcgcctcctagttccccttttagagtttctattaggtcctctccaaacatggttttgtaagtatgttcaatttgccgtctttgttcatttgttctccttgctaaaatctcgatgatagcattttcgttcgttcctagaccatccatggcatcttttaacgcttgtgcgtcttcatcgtctctgaagttttcgtacggaaatactgttggcgccattttttatatatatattcctgcaggacactatcacaatcgcaacac

SEQ ID NO: 3096 - DNA, 460 bp, Diabrotica virgifera
tcaatagaaataaatacattttagaataggtttaacataacttttttttataaaaatttagcaaatatcaggtgcagtctaccgtttcaagcattttgtgaattttaagctcacatttatcaaacattatttaaaagttcactcaattaaagcgagcaggatctttctgacgtttgaagattcgtcgctctggaaaagaagtagataaagtaacagttctcaaaacaactttgtataaaacgtgtatttttgttatttaattagaaataaaacaagaaagtgcttataagataagaaaatattgttatttttcccaaagtagtatatatgagcatattttcgatatgatttcttgccacgtggtatggtaaactaaataatctgctaatatatagagggtatcaaatccatcgcataggcttcaactgagattttgcttttgataaggatgatagtatta

SEQ ID NO: 3097 - DNA, 1342 bp, Diabrotica virgifera
  SmartBlast Evalue=9E-24; Info=Endonuclease-reverse transcriptase n=1 Tax=Bombyx mori RepID=D7F158_BOMMO
acaattctccttccttttcttttacatatctaggcctatgatttgtcattgtttttttttctagtactattttttttaatttcgtaccaattgcccagttgttcttctgttttctctaccgtttcatttttagtatctttctttgatattactcttggaatttatttgtgtatttcaatgtttttgtacacaattagtgaggaacaacaaggttttcggaaaaataggtccgcaatagacgccatattcatagccagacacatttctgagaaagcactggaatattaataaacctgcatttatgtgctttatagatctaactaaagcattcgattgtgtaagattagaagatgagttaagattgctaaaggagaaaaatcagcccaacaagataataaggataaaattaaaggcattaattcgaggagcaaaaccagaataaaagtcgagaatgaactaacatcggaagtagaaatcaactcgggaatcagacaaggggatagcttgagcccattgcttttaatttagtaatgacaaaatcatagaaaacattaaaggtactggaaaaggatataagatggcaggaaaaacaaataaaaatcctctgttatgctgacgacgcaatcttaatctccgataacgaggataacctacagcgaatggcacaaattttcaatacagtggcgaagaactacaacatgaaaatatcaacagctaagacaaaatccttggtagtgtcaagggaacccataagatgcaaattagtaattaacaacgaactaattgaacaagtctcgagattccaatatctgggatcgaaatatgtagttatggagatgttaaagagagcgtccgaaacaagcaaataaagccaattacgtgtcaggatgtctgagatgtcatctggagaaacaaagatatgaggctggaagggaaagtacgcatatacaaatcatgtgtaagaccgatcatgacgtacgcgatagaaacaagatgtgacacagcagaaaccaagaggatactgagaacatcagaaatgagaacgctgaggtcaataactgggaaaacactgagagacagaataccgaacgacagaataagagatctctgtaacatacaagatatagtacggtggggaagacagagacgacgagagtggaatcagcatgtgacgagaatggacagcgagagaatagcccgtatagccagggattcgaagccaacaggcaagagaccaataggaaggccctttaaaaggtggcgagatagctggcagtcaacatcacagctacgaatacaagctcaaaatcggttaagaacaggccaagaggcctaataaaga

SEQ ID NO: 3098 - DNA, 1020 bp, Diabrotica virgifera
  SmartBlast Evalue=6E-11; Info=Endonuclease-reverse transcriptase n=1 Tax=Bombyx mori RepID=D5LB38_BOMMO
acaattctccttccttttcttttacatatctaggcctatgatttgtcattgtttttttttctagtactattttttttaatttcgtaccaattgcccagttgttcttctgttttctctaccgtttcatttttagtatctttctttgatattactcttggaatttatttgtgtatttcaatgtttttgtacacaattagtgaggaacaacaaggttttcggaaaaataggtccgcaatagacgccatattcatagccagacacatttctgagaaagcactggaatattaataaacctgcatttatgtgctttatagatctaactaaagcattcgattgtgtaagattagaagatgagttaagattgctaaaggagaaaaatcagcccaacaagataataaggataaaattaaaggcattaattcgaggagcaaaaccagaataaaagtcgagaatgaactaacatcggaagtagaaatcaactcgggaatcagacaaggggatagcttgagcccattgcttttaatttagtaatgacaaaatcatagaaaacattaaaggtactggaaaaggatataagatggcaggaaaaacaaataaaaatcctctgttatgctgacgacgcaatcttaatctccgataacgaggataacctacagcgaatggcacaaattttcaatacagtggcgaagaactacaacatgaaaatatcaacatctaggacaaaatccctggtagtgtcaaggcaacccagaaggtgcaaattagtaattaacaacgaataattgaaccagtctcgagattccaatatctgggagtcgaaatatatagttatggagatgttaaagagagcgtccgaaagcaagcaaataaagccaattatgtgttaggattaccgagggatgtgatctggagaaacaaagatggaaggctggaaggtaaagtacgcatatacaaatcatgtgtaagacccatcatgacgtacgcgatagaaaccagatgtgacaaaacagaaaccaagag

SEQ ID NO: 3099 - DNA, 882 bp, Diabrotica virgifera
acaattctccttccttttcttttacatatctaggcctatgatttgtcattgtttttttttctagtactattttttttaatttcgtaccaattgcccagttgttcttctgttttctctaccgtttcatttttagtatctttctttgatattactcttggaatttatttgtgtatttcaatgtttttgtacacaattagtgaggaacaacaaggttttcggaaaaataggtccgcaatagacgccatattcatagccagacacatttctgagaaagcactggaatattaataaacctgcatttatgtgctttatagatctaactaaagcattcgattgtgtaagattagaagatgagttaagattgctaaaggagaaaaatcagcccaacaagataataaggataaaattaaaggcattaattcgaggagcaaaaccagaataaaagtcgagaatgaactaacatcggaagtagaaatcaactcgggaatcagacaaggggatagcttgagcccattgcttttaatttagtaatgacaaaatcatagaaaacattaaaggtactggaaaaggatataagatggcaggaaaaacaaataaaaatcctctgttatgctgacgacgcaatcttaatctccgataacgaggataacctacagcgaatggcacaaattttcaatacagtggcgaagaactacagcatgaaaatatcaacagctaagggaacccataaggtgcaaaataataattaacaacgagctaattgaacaagtctggtgattctaatatctgggagtcgaaatatgtacttattgagatgttatgtaaagagagtatgtcatctggacaaataaagatatatgaggctgaaaggggaagtacgca

SEQ ID NO: 3100 - DNA, 308 bp, Diabrotica virgifera
atatctctgtaaataagacaatgattgttaatatgctgggcaacatgagagccaacgatcgacaaacggtctcgggcaccttaagaagtaacattcaagacatagtatggcggggaagacgagagtggaatcagcatgtgacaatagactgcgagagaatagtccatatagccagagattcgaagccaacaggcaagagaccaataggaaggccctttaaaaggtggcgagatagctggcagtcaacatcacagctacgaatacaagctcaaaatcggttaagaacaggtcaagaggcctaataaaga

SEQ ID NO: 3101 - DNA, 1103 bp, Diabrotica virgifera
  SmartBlast Evalue=1E-85; Info=Acaloleptin A n=1 Tax=Acalolepta luxuriosa RepID=Q76K70_ACALU
tagagtatgcttttaaatttatttgatttcttctaatatatacacgtataaatacataaataatcctaactattgaacacatattttcactgttaagtattaatggcacatttgtagttaagaggacgctatttgttgttcttcttcaggaaaaactaccaggggtacatcatctgcaatatccacggaccttttaaatctaaagtaccacctacatgccatgttggtttagctctatcgggtcctcttactaccttgttccatccagcttcaaagtcgtgtttttctccttttcttttaacctcaacacctgcatttacgttaccattatcatcacgattagcaccaggattaacctcccattggggttcgggtgatcgtttaaacctccaagtaccacctacatgccatgtgggtttggctcggtttggtccccgtataactttgttccatccagcattaaaatcatgatctttgcctttgttctttatttcaacaccagcatttacgttaccgtcttcatctcgattacccccagggttgacttgccaatcaggtacaggtgacctcttgaatctaaaggtaccaccgacatgccatgttggtttagctctattgggcccactgactactttattccatcctgcatcaaagtcgtgtttttctcctttcctcttaagctcaacaccagcgttaacgttaccattttcatctcggtttgcaccaggattgacttcccattgtggatccggcgatcttttgaacctccacgtaccacctacgtgccatgtgggcttggctctattgggtcctcgtactactttgctccagccagcttcgaaatcatggttcttcccagagtttttcacttctactcctgcattaacgtttccagctccgtcacgaccaacgtctggttgaacctgccagtttttcttcttgtggtggtgtttagctgaagtcgagactactaccgctagtaccatgagcagcgcaaggtatacagaaaacttcatttttgatctgtgtaattatatattaattattattaattactattactttcacttcacccactctcgttcgatattagaagctgatct

SEQ ID NO: 3102 - DNA, 1094 bp, Diabrotica virgifera
  SmartBlast Evalue=1E-85; Info=Acaloleptin A n=1 Tax=Acalolepta luxuriosa RepID=Q76K70_ACALU
tagagtatgcttttaaatttatttgatttcttctaatatatacacgtataaatacataaataatcctaactattgaacacatattttcactgttaagtattaatggcacatttgtagttaagaggacgctatttgttgttcttcttcaggaaaaactaccaggggtacatcatctgcaatatccacggaccttttaaatctaaagtaccacctacatgccatgttggtttagctctatcgggtcctcttactaccttgttccatccagcttcaaagtcgtgtttttctccttttcttttaacctcaacacctgcatttacgttaccattatcatcacgattagcaccaggattaacctcccattggggttcgggtgatcgtttaaacctccaagtaccacctacatgccatgtgggtttggctcggtttggtccccgtataactttgttccatccagcattaaaatcatgatctttgcctttgttctttatttcaacaccagcatttacgttaccgtcttcatctcgattacccccagggttgacttgccaatcaggtacaggtgacctcttgaatctaaaggtaccaccgacatgccatgttggtttagctctattgggcccactgactactttattccatcctgcatcaaagtcgtgtttttctcctttcctcttaagctcaacaccagcattgacgttaccattttcatcgcgattagcaccaggattgacttcccattgtggatccggcgatcttttaaacctccaagtaccgcctacgtgccatgtgggcttggctctattcggtcctcgtactactttgctccagccagcttcgaaatcatggttcttcccagagtttttcacttctactcctgcattgacgtttccagctccgtcacgaccaacgtctggttgaacctgccagttctttcttttcttatggtgcttggctgaagtcgagactaccaccgccagtaccatgagcaatgcaaggtatgcagagaccttcatttttgatctgtgtaattatatattaataattactattactttcacttcacccactctcgttcgataatagaagctgat

SEQ ID NO: 3103 - DNA, 1096 bp, Diabrotica virgifera
  SmartBlast Evalue=1E-86; Info=Acaloleptin A n=1 Tax=Acalolepta luxuriosa RepID=Q76K70_ACALU
tagagtatgcttttaaatttatttgatttcttctaatatatacacgtataaatacataaataatcctaactattgaacacatattttcactgttaagtattaatggcacatttgtagttaagaggacgctatttgttgttcttcttcaggaaaaactaccaggggtacatcatctgcaatatccacggaccttttaaatctaaagtaccacctacatgccatgttggtttagctctatcgggtcctcttactaccttgttccatccagcttcaaagtcgtgtttttctccttttcttttaacctcaacacctgcatttacgttaccattatcatcacgattagcaccaggattaacctcccattggggttcgggtgatcgtttaaacctccaagtaccacctacatgccatgttggtttggctcgatttggaccccgtacaactttgttccatccagcttcaaaatcatgatctttgcctttatttttaatttgaacaccagcattgacgttcccgtcttcatcacggttagccccagggttgacttgccagtcaggtactggtgatctcttgaatctaaaggtaccaccgacgtgccatgttggtttagctctattaggcccactgactactttattccatcctgcatcaaagtcgtgtttttctcctttccttttaagctcaacaccggcgttgacgttaccattttcatctcggtttgcaccaggattgacttcccattgtggatccggcgatcttttgaacctccaagtaccgcctacgtgccatgtaggcttggctctattgggtcctcgtactactttgctccagccagcttcgaaatcatggttcttcccagaatttttcacttctactcctgcattgacgtttccagctccgtcacgaccaacgcctggttgaacctgccagttctttctcttcttgtggtgcttggctgaagtcgagactaccaccgccagtaccatgagcagtggaaggtatgcacagaacttcatttttgatctgtattatagttatatgctgtttgctgttgctttcacttcacccactctcgttcaatattagaagctgatct

SEQ ID NO: 3104 - DNA, 821 bp, Diabrotica virgifera
  SmartBlast Evalue=4E-24; Info="Gamma-interferon inducible lysosomal thiol reductase, putative n=1 Tax=Ixodes scapularis RepID=B7Q846_IXOSC"
tttagttcaatgattttatttaaaactattgttctataaaatgtatttttaatgatactaaagaagttttgagaaaaatcattttacccacaaacctcaggtttattgtcttttaatactttgcaaatagtggcaaaaaaatccttggtagcctcatcttccaattccgtatcataaacaccattaaatcgtatatttgggacaaatggtagtgcaggatacaattttgattgtctctcggagtatgccatcaaaagttcgtctgcatgagatccttctacacaattttgaacacgatcaaaagaaatagtacctccagagcaatcttttgccatatccatcaactcctcataaatgttatatgcgctagcttgagataaatggcattgcataaagcttataagatctgattgagttggattttggtcaatgacacaagcgtgtattctattaacggtgcattcgttttctccatgttgacaagtatattgtattgttccatcggctagttttttataagtctcccatccatacggtactacatccaatttaaagctgtctcctaatttttgatatccagggtataattgatccactataaaattatggcaatatggacataatccttcgtaaaacagagtcacatttaaatctgaatcctgcgcactgcacgaaatgcacaaagaagctgctaaaactaatattacctttgaaaaacattttgaaagtgttatggcaaacattcaataaaattagcttatatattgttctgattataagattagagtacttctgaagatttaatctaagataagtagtaa

SEQ ID NO: 3105 - DNA, 814 bp, Diabrotica virgifera
  SmartBlast Evalue=4E-24; Info="Gamma-interferon inducible lysosomal thiol reductase, putative n=1 Tax=Ixodes scapularis RepID=B7Q846_IXOSC"
aaatgattttatttaaaactattgttctataaaatgtatttttaataatactgaagaagtttcgaggaaaatcattttacccacaaacctcaggtttattgtcttttaataatttgcaaatagtggcaaaaaaatccttggtagcctcatcttccaattccgtatcataaacaccattaaatcgtatatttgggacaaatggtagtgcaggattcaattttgattgtctctcggaatatgccatcaaaagttggtctgcatgagatccttctacacaattttgaacacgatcaaaagaaatagtacctccagagcaatcttttgccatatccatcaactcctcataaatgttatatgcgctagcttgagataaatggcattgcataaagcttataagatctgattgagttggattttggtcaatgacacaagcgtgtattctattaacggtgcattcgttttctccatgttgacaagtatattgtattgttccatcggctagttttttataagtctcccatccatacggtactacatccaatttaaagctgtctcctaatttttgatatccagggtataattgatccactataaaattatggcaatatggacataatccttcgtaaaacagagtcacatttaaatctgaatcctgcgcactgcacgaaatgcacaaagaagctgctaaaactaatattacctttgaaaaacattttgaaagtgttatggcaaacattcaataaaattagcttatatattgttctgattataagattagagtacttctgaagatttaatctaagataagtagtaa

SEQ ID NO: 3106 - DNA, 820 bp, Diabrotica virgifera
  SmartBlast Evalue=7E-24; Info=Gamma-interferon-inducible lysosomal thiol reductase n=1 Tax=Salmo salar RepID=B5X8K4_SALSA
tttagttcaatgattttatttaaaactattgttctataaaatgtatttttaatgatactaaagaagttttgagaaaaatcattttacccacaaacctcaggtttattgtcttttaatactttgcaaatagtggcaaaaaaatccttggtagcctcatcttccaattccgtatcataaacaccattaaatcgtatatttgggacaaatggtagtgcaggatacaattttgattgtctctcggagtatgccatcaaaagttcgtctgcatgagatcctgctacacaattttgaacacgatcaaaagaaatagtacctccagagcaatcttttgccatatccaccaactcctcataactgttatatgcgctagcttgagataaatggcagtgcataaagcttataagatctgattgagttgggttttggtcaatgacacaagcgtgtattctattaacggtgcattcgttttctccatgttgacaagtatattgtattgttccatcggctagttttttataagtctcccatccatacggtactacatccaatttaaagctgtctcctaatttttgatatccagggtataattgatccactataaaattatggcaatatggacataatccttcgtaaaacagagtcacatttaaatctgaatcctgcgcactgcacgaaatgcacaaagaagctgctaaaactaatattacctttgaaaacattttgaaagtgttatggcaaacattcaataaaattagcttatatattgttctgattataagattagagtacttctgaagatttaatctaagataagtagtaa

SEQ ID NO: 3107 - DNA, 813 bp, Diabrotica virgifera
  SmartBlast Evalue=1E-24; Info=Gamma-interferon-inducible lysosomal thiol reductase n=1 Tax=Salmo salar RepID=B5X8K4_SALSA
aaatgattttatttaaaactattgttctataaaatgtatttttaataatactgaagaagtttcgaggaaaatcattttacccacaaacctcaggtttattgtcttttaataatttgcaaatagtggcaaaaaaatccttggtagcctcatcttccaattccgtatcataaacaccattaaatcgtatatttgggacaaatggtagtgcaggattcaattttgattgtctctcggaatatgccatcaaaagttggtctgcatgagatcctgctacacaattttgaacacgatcaaaagaaatagtacctccagagcaatcttttgccatatccaccaactcctcataactgttatatgcgctagcttgagataaatggcagtgcataaagcttataagatctgattgagttgggttttggtcaatgacacaagcgtgtattctattaacggtgcattcgttttctccatgttgacaagtatattgtattgttccatcggctagttttttataagtctcccatccatacggtactacatccaatttaaagctgtctcctaatttttgatatccagggtataattgatccactataaaattatggcaatatggacataatccttcgtaaaacagagtcacatttaaatctgaatcctgcgcactgcacgaaatgcacaaagaagctgctaaaactaatattacctttgaaaacattttgaaagtgttatggcaaacattcaataaaattagcttatatattgttctgattataagattagagtacttctgaagatttaatctaagataagtagtaa

SEQ ID NO: 3108 - DNA, 1015 bp, Diabrotica virgifera
aacctccgttcataacttcccgccaaaacataacagcgccatctgtaaggtaccaaggtaattaataccttaattcatccataatcaataatcatcataatcaataccaaactcttcacgaactttccacattctaaagaaagtgttgtttacatttcctattttgagttcgtcatattttgatggtgtcaaaaaatgacggagatcaacgaattttcattaagttttgatttgaacttaaaaatgcaaaagttatttgaatatgattgtatgagcaaaaatatacataaaagaattattcaatcagtttaaaaaatggtcccacgtctgttgacagtgacaagcgttctcgtcaacatatcaggaaaacaccgaaaaatatcgattccaaaagtaaaagtaggggagagtcggctaattgtgcgcatcgggtaattgtgcgcatcaatgtttctaatctcctatttataaaattgtaaaaactatattgtcgggtcatctagtagcaactgccgtatctatccgacacaaacgaacgtcgggagatactttaccggttgcagttatcgtttacatgttttcgcgtggtttgatattctttgtgtgactgagaaaataagcgataactttttttcttggcagaaatatagtttaaaaggtacttatatccttcatttatttaccattttaaacactgatatagttagtttggctcgattcttttttgtttttatcaaattttgtgttatgtggtgaagtgtaacgtcgtctaatggtgcgcattgcgcaccattagccggcaaggtatataaaggcattttttacgttttgtgactgcgtcataaaacgtaaacaagcgtaaacaaccgtcaaagtagagaaaggggcaaagagaaaatcacgaaattgaaaaaagtacaaaaaggaaaatttttgaacacaacagctccgaagttatttcagaaagtgaactgtgccatgatgatgagttggacgatctcgtgtcagatcaaaa

SEQ ID NO: 3109 - DNA, 851 bp, Diabrotica virgifera
aacctccgttcataacttcccgccaaaacataacagcgccatctgtaaggtaccaaggtaattaataccttaattcatccataatcaataatcatcataatcaataccaaactcttcacgaactttccacattctaaagaaagtgttgtttacatttcctattttgagttcgtcatattttgatggtgtcaaaaaatgacggagatcaacgaattttcattaagttttgatttgaacttaaaaatgcaaaagttatttgaatatgattgtatgagcaaaaatatacataaaagaattattcaatcagtttaaaaaatggtcccacgtctgttgacagtgacaagcgttctcgtcaacatatcaggaaaacaccgaaaaatatcgattccaaaagtaaaagtaggggagagtcggctaattgtgcgcatcgggtaattgtgcgcatcaatgtttctaatctcctatttataaaattgtaaaaactatattgtcgggtcatctagtagcaactgccgtatctatccgacacaaacgaacgtcgggagatactttaccggttgcagttatcgtttacatgttttcgcttagtatgatatcatattagtatgatattgcgcattgcgcaccattagccggcaaggtatataaaggcattttttacgttttgtgactgcgtcataaaacgtaaacaagcgtaaacaaccgtcaaagtagagaaaggggcaaagagaaaatcacgaaattgaaaaaagtacaaaaaggaaaatttttgaacacaacagctccgaagttatttcagaaagtgaactgtgccatgatgatgagttggacgatctcgtgtcagatcaaaa

SEQ ID NO: 3110 - DNA, 720 bp, Diabrotica virgifera
gtaaaactttatgtttgcatctgtacttccataaaatatatcattttcctttatcgattcaaagatgttccctagaatttttcttttaaaaatgtcttactgacttaggggagagtcgggtaatggtgcgcgtcggataattgtgcgcatcaatgtttctaatctcctatttataaaattgtaaaaactatattgtcgggtcatctagtagcaactgccgtatctatccgacacaaacgaacgtcgggagatactttaccggttgcagttatcgtttacatgttttcgcgtggtttgatattctttgtgtgactgagaaaataagcgataactttttttcttggcagaaatatagtttaaaaggtacttatatccttcatttatttaccattttaaacactgatatagttagtttggctcgattcttttttgtttttatcaaattttgtgttatgtggtgaagtgtaacgtcgtctaatggtgcgcattgcgcaccattagccggcaaggtatataaaggcattttttacgttttgtgactgcgtcataaaacgtaaacaagcgtaaacaaccgtcaaagtagagaaaggggcaaagagaaaatcacgaaattgaaaaaagtacaaaaaggaaaatttttgaacacaacagctccgaagttatttcagaaagtgaactgtgccatgatgatgagttggacgatctcgtgtcagatcaaaa

SEQ ID NO: 3111 - DNA, 556 bp, Diabrotica virgifera
gtaaaactttatgtttgcatctgtacttccataaaatatatcattttcctttatcgattcaaagatgttccctagaatttttcttttaaaaatgtcttactgacttaggggagagtcgggtaatggtgcgcgtcggataattgtgcgcatcaatgtttctaatctcctatttataaaattgtaaaaactatattgtcgggtcatctagtagcaactgccgtatctatccgacacaaacgaacgtcgggagatactttaccggttgcagttatcgtttacatgttttcgcttagtatgatatcatattagtatgatattgcgcattgcgcaccattagccggcaaggtatataaaggcattttttacgttttgtgactgcgtcataaaacgtaaacaagcgtaaacaaccgtcaaagtagagaaaggggcaaagagaaaatcacgaaattgaaaaaagtacaaaaaggaaaatttttgaacacaacagctccgaagttatttcagaaagtgaactgtgccatgatgatgagttggacgatctcgtgtcagatcaaaa

SEQ ID NO: 3112 - DNA, 1140 bp, Diabrotica virgifera
  SmartBlast Evalue=3E-26; Info=Novel protein (Fragment) n=2 Tax= Danio rerio RepID=Q1LV84_DANRE
atatttcattactataaaaataacttttaagagagtgatgtagaaatacgtttgattcatgccaaagcagatattgcacttagttttcgccaaaaatgggctaacgaagttgtgacgtcatacttggtgtgcggagtttaccaatatttgtaaagaaattaatgaacacacgcagaagttcgtaaaatgcatataaattaaaaaactagatagatagatagatagatagataaatgcatatagatctttaaatgcacatacaatataggaatgtcgtacataagttatgtattatggactttatatacgtaattaaaactttaatgaaaaaaatcatcacctccacctaccatatgacgtcatacttcagtagttcatttacaaattcacttacttgtatgctgaatatagtaacaactgacccaatttaaaattttcgttcaataatgcagcggcggctcgtgggtcaatcttcaggggggtcattttggtttgaaaacttcaaactgttgattttttaaagtatttaaaagatcttttagcatttatattttagataaaaaatacagacttagataaaactcaatactatttaccctagttttccgaaaattaaatttgtctttttttagagtaaatcttttaaaaaatataggaaaaatggtatgaacaggttattgactgatatatagataggaatatttatagtataataaattgtaaatttattaaaaacgaaacttactttaaatatttttatattttaagtcaattcttctatcctttagttctgcaaaatagtctatgaccttctcattgaaatttggaatgctcttgacaagcgttttctcgatgctcagcatagacaaggcactaagtctaggttgtcccatcgtattacgcaggaatgttttttactcttttttaaagtagaaaaacatctctcactttccacggttgtcatagggagtgtgcacaaaatatttaataacttcactgcttcagaaaatgtttcagacaaattcatgttaataaaaagctgaagtatggctactgcaccagcactattgcgaaaatcctcacgacaatataagacttcaagttccgattttagtttggaaatattcactgtgggataat

SEQ ID NO: 3113 - DNA, 824 bp, Diabrotica virgifera
  SmartBlast Evalue=2E-26; Info=Novel protein (Fragment) n=2 Tax= Danio rerio RepID=Q1LV84_DANRE
aataatgtaaatagtatttatcagagtatacctgttaatacggatattatatatgtaaatgctcaaagtataattggtaattatgatcaaatatgtcaaagtttactttgctataatcctaaagtgttgctaccagcggcggctcgtgggtcaatcttcaggggggtcattttggtttgaaaacttcaaactgttgattttttaaagtatttaaaagatcttttagcatttatattttagataaaaaatacagacttagataaaactcaatactatttaccctagttttccgaaaattaaatttgtctttttttagagtaaatcttttaaaaaatataggaaaaatggtatgaacaggttattgactgatatatagataggaatatttatagtataataaattgtaaatttattaaaaacgaaacttactttaaatatttttatattttaagtcaattcttctatcctttagttctgcaaaatagtctatgaccttctcattgaaatttggaatgctcttgacaagcgttttctcgatgctcagcatagacaaggcactaagtctaggttgtcccatcgtattacgcaggaatgttttttactcttttttaaagtagaaaaacatctctcactttccacggttgtcatagggagtgtgcacaaaatatttaataacttcactgcttcagaaaatgtttcagacaaattcatgttaataaaaagctgaagtatggctactgcaccagcactattgcgaaaatcctcacgacaatataagacttcaagttccgattttagtttggaaatattcactgtgggataat

SEQ ID NO: 3114 - DNA, 608 bp, Diabrotica virgifera
atatttcattactataaaaataacttttaagagagtgatgtagaaatacgtttgattcatgccaaagcagatattgcacttagttttcgccaaaaatgggctaacgaagttgtgacgtcatacttggtgtgcggagtttaccaatatttgtaaagaaattaatgaacacacgcagaagttcgtaaaatgcatataaattaaaaaactagatagatagatagatagatagataaatgcatatagatctttaaatgcacatacaatataggaatgtcgtacataagttatgtattatggactttatatacgtaattaaaactttaatgaaaaaaatcatcacctccacctaccatatgacgtcatacttcagtagttcatttacaaattcacttacttgtatgctgaatatagtaacaactgacccaatttaaaattttcgttcaataatgttgtataagtgtgtagaaagcttcacaaaaaatgatttacacttttttatattatacattaatagatcagatattgtacattgtacatgatagtgcgttaactcagactgttatggtactcgtgtccccttaaataaggtttcaatgtaagatatctaa

SEQ ID NO: 3115 - DNA, 564 bp, Diabrotica virgifera
  SmartBlast Evalue=8E-27; Info=Novel protein (Fragment) n=2 Tax= Danio rerio RepID=Q1LV84_DANRE
gcccggagggggatgtgtcacgagaaaaatctcatttctctggactactgctgaatctcataatatttcacattgctgcgtgaatccatcatagatacaaaccaatttttttagtcgaagcactgactgtttgatagtatgttacaaaaccgtgaattattttcgctactttaaatatttttatattttaagtcaattcttctatcctttagttctgcaaaatagtctatgaccttctcattgaaatttggaatgctcttgacaagcgttttctcgatgctcagcatagacaaggcactaagtctaggttgtcccatcgtattacgcaggaatgttttttactcttttttaaagtagaaaaacatctctcactttccacggttgtcatagggagtgtgcacaaaatatttaataacttcactgcttcagaaaatgtttcagacaaattcatgttaataaaaagctgaagtatggctactgcaccagcactattgcgaaaatcctcacgacaatataagacttcaagttccgattttagtttggaaatattcactgtgggataat

SEQ ID NO: 3116 - DNA, 806 bp, Diabrotica virgifera
  SmartBlast Evalue=4E-10; Info=Membrane-associated LPS-inducible TNF alpha factor protein-like protein (Fragment) n=1 Tax= Phlebotomus papatasi RepID=A8CA04_PHLPP
caagtcgccaggcaattcgtttcgaggccacctaacgttcagttcgcgtaccctcctagttcgagccggcaacattttggtgtcgacatcagttggtgaagtttgttaatttttgagttcagggatctaaaacaaatatattcaagcatggagaaacaaggaaatcccccaccatatactggcccatacaacggacctccaggaccccaagctggattccacatgcctccacctggaatgcctcaggatcaacaacaacaaacagtgattgttactcacaccgtagcccaggttcctgttggccccactccaacatcgacaacatgtccatcatgtcatgctcagatagttacttcggtggagactgaaacaacaacaaagacacacttgttcgccttattgctgtgccttttcggatgttggccatgttgcttaattccatattgtgtggattcatgccaagctaaaactcattactgccccaattgcagagcttacatcggaagattcgagaactaagaacgttctaaaattcttaaaaagagttaccaactgaagaagctaaaattccatctaaatctgttttctaagaaacaacttcaatttattttatattttaatactttttatctatacaatatatatgttataaattagaataatatgaaaacgtcaggttatgtttaaatgttttaatgatatacgttttaatcttaacataaatattaagtaagtttaagcatgtcaaacatatgaatatgttattatatccgttattttattaaagatgtaaattctattcacct

SEQ ID NO: 3117 - DNA, 723 bp, Diabrotica virgifera
caagtcgccaggcaattcgtttcgaggccacctaacgttcagttcgcgtaccctcctagttcgagccggcaacattttggtgtcgacatcagttggtgaagtttgttaatttttgagttcagggatctaaaacaaatatattcaagcatggagaaacaaggaaatcccccaccatatactggcccatacaacggacctccaggaccccaagctggattccacatgcctccacctggaatgcctcaggatcaacaacaacaaacagtgattgttactcacaccgtagcccaggttcctgttggccccactccaacatcgacaacatgtccatcatgtcatgctcagatagttacttcggtggagactgaaacaacaacaaagacacacttgttcgccttattgctgtgccttttcggatgctgtctttgctcttgcattccgtactgcgtggattcatgccaagccaaaacacattactgccccaattgtagagcatacattggcagattcgaaaattaagaagaacgaaacttcaaagatggcttaaacacaaatagaaaattctttatatacttaatataaacttataaaaaacccacatatattttatgtatatagataatcagtatattacatatctatacttcattattatacttcttttatttttataattgttattggattgtatcttttaaaataaatcttaatgtataaggaaaa

SEQ ID NO: 3118 - DNA, 718 bp, Diabrotica virgifera
caagtcgccaggcaattcgtttcgaggccacctaacgttcagttcgcgtaccctcctagttcgagccggcaacattttggtgtcgacatcagttggtgaagtttgttaatttttgagttcagggatctaaaacaaatatattcaagcatggagaaacaaggaaatcccccaccatatactggcccatacaacggacctccaggaccccaagctggattccacatgcctccacctggaatgcctcaggatcaacaacaacaaacagtgattgttactcacaccgtagcccaggttcctgttggccccactccaacatcgacaacatgtccatcatgtcatgctcagatagttacttcggtggagactgaaacaacaacaaagacacacttgttcgccttattgctgtgccttttcggatgctgtctttgctcttgcattccgtactgcgtggattcatgccaagccaaaacacattactgccccaattgtagagcatacattggcagattcgaaaattaagaagaacgaaacttcaaagatggcttaaacacaaatagaaaattctttatatacttaatataaacttataaaaacccacatatattttatgtatatagataatcagtatattacatatctatacttcattattatacttcttttatttttataattgttattggattgtatcttttaaaataaatcttaatgtataagg

SEQ ID NO: 3119 - DNA, 688 bp, Diabrotica virgifera
caagtcgccaggcaattcgtttcgaggccacctaacgttcagttcgcgtaccctcctagttcgagccggcaacattttggtgtcgacatcagttggtgaagtttgttaatttttgagttcagggatctaaaacaaatatattcaagcatggagaaacaaggaaatcccccaccatatactggcccatacaacggacctccaggaccccaagctggattccacatgcctccacctggaatgcctcaggatcaacaacaacaaacagtgattgttactcacaccgtagcccaggttcctgttggccccactccaacatcgacaacatgtccatcatgtcatgctcagatagttacttcggtggagactgaaacaacaacaaagacacacttgttcgccttattgctgtgccttttcggatgctgtctttgctcttgcattccgtactgcgtggattcatgccaagccaaaacacattactgccccaattgtagagcatacattggcagattcgaaaattaagaacgaaatttcaaagatggcttaaacatatagataattctttatatataaacttatataaaaaaacccacatatattttaataatatgattgtacttcttttatttttattttattattgttattggattgtatctattaaaataaatcttaatgtataatatcacgt

SEQ ID NO: 3120 - DNA, 853 bp, Diabrotica virgifera
cctctctgtaatgttcaatcaatttgttcgatgtttgtgacatagaatttatgaaagcggtttaatgcatactgtaaacgtacaaataatattttatttattcttttacttagtcccttttgacacggaaaaaaagataggtgtggaaaaagaggaaggaactatgtggtcatttaatttaggtttattacattacattatattatctaatattaactggtacaagaaaacgaccgccaccaatggtatattcagcagatacacctgtcctatctatgtataaaccaccatcctttcgaccattatctgtttctggtagaccatgatatacttttcctacattgttccctcccaaagctggaatgtcacccactcccatatataccgttgcgttgtatcctaatattgaatttgcctcccaaccagccacgatgggggcaaaagtaggatcattcaataagtcatcaaaattttctgcttttgtccatttccatgacaagtaagtagggtttttaaaacatagaatctgaagattttccttaactaaatagcttttatcatttaaagttacgtttgcatagtcgaaaccttcaaccaaatttacaggaagataagcttcagactgagctacatcatcaataacgtgtgctaggccaatgtaaatagttggggtatattcagtttggatttgaattactattgcacggtcatctggtaatccattaaatggtcgccattcaatagctgaatcctggcctccaattacaagaggagcaataatggatatgattagaataagtgacgcaattttaaacatattcgctatcgatagatctgtttatgatcgacgaca

SEQ ID NO: 3121 - DNA, 850 bp, Diabrotica virgifera
cctctctgtaatgttcaatcaatttgttcgatgtttgtgacatagaatttatgaaagcggtttaatgcatactgtaaacgtacaaataatattttatttattcttttacttagtcccttttgacacggaaaaaaagataggtgtggaaaaagaggaaggaactatgtggtcatttaatttaggtttattacattacattatattatctaatattaactggtacaagaaaacgaccgccaccaatggtatattcagcagatacacctgtcctatctatgtataaaccaccatcctttcgaccattatctgtttctggtagaccatgatatacttttcctacattgttccctcccaaagctggaatgtcacccactcccatatataccgttgcgttgtatcctaatattgaatttgcctcccaaccagccacgatgggggcaaaagtaggatcattcaataagtcatcaaaattttctgcttttgtccatttccatgacaagtaagtagggtttttaaaacatagaatctgaagattctccttaaccaaatagcttttatcatttaaagttacgtttgcgtagtcgaaaccttcaactaaatttacaggaagataagcttcagactgagctgcattatcaacaacgtgtgctaggccaatgtaaatagttggggtatattcagtttggatttgaattactattgcacggtcatctggtaatccattaaatggtcgccattcaatagctgaatcctggcctccaattacgagaggagcaataattgatatgattagaacaagtgacgcaattttcaacattttcgctaccgacagatctgtttatgatcgaca

SEQ ID NO: 3122 - DNA, 670 bp, Diabrotica virgifera
aatttatgatttatttccattacttattataaagtgctacaataaaattaccgccagtacttttatattcatcagatatacctgtcctatctatgtataaactaccatcttttcgaccattatgtgtttctggtagcccatgatatactttacctacattgtttcctcccaaaactggaaggtgacccactcccatatataccgttgcgttgtatcctaatattgaatttgcctcccaaccagccacgatgggggcaaaagtaggatcattcaataagtcatcaaaattttctgcttttgtccatttccatgacaagtaagtagggtttttaaaacatagaatctgaagattttccttaactaaatagcttttatcatttaaagttacgtttgcatagtcgaaaccttcaaccaaatttacaggaagataagcttcagactgagctacatcatcaataacgtgtgctaggccaatgtaaatagttggggtatattcagtttggatttgaattactattgcacggtcatctggtaatccattaaatggtcgccattcaatagctgaatcctggcctccaattacaagaggagcaataatggatatgattagaataagtgacgcaattttaaacatattcgctatcgatagatctgtttatgatcgacgaca

SEQ ID NO: 3123 - DNA, 667 bp, Diabrotica virgifera
aatttatgatttatttccattacttattataaagtgctacaataaaattaccgccagtacttttatattcatcagatatacctgtcctatctatgtataaactaccatcttttcgaccattatgtgtttctggtagcccatgatatactttacctacattgtttcctcccaaaactggaaggtgacccactcccatatataccgttgcgttgtatcctaatattgaatttgcctcccaaccagccacgatgggggcaaaagtaggatcattcaataagtcatcaaaattttctgcttttgtccatttccatgacaagtaagtagggtttttaaaacatagaatctgaagattctccttaaccaaatagcttttatcatttaaagttacgtttgcgtagtcgaaaccttcaactaaatttacaggaagataagcttcagactgagctgcattatcaacaacgtgtgctaggccaatgtaaatagttggggtatattcagtttggatttgaattactattgcacggtcatctggtaatccattaaatggtcgccattcaatagctgaatcctggcctccaattacgagaggagcaataattgatatgattagaacaagtgacgcaattttcaacattttcgctaccgacagatctgtttatgatcgaca

SEQ ID NO: 3124 - DNA, 421 bp, Diabrotica virgifera
acaaaatgttgaaaatattaattgtgacgctagtcttttgggctggtgtcagttatgcaaaagatgtcaaaaatgatctaaatgacgttattttatctaattctgaagatggtaaaatattgtttgaatcattaatagacccaaagccaacagaaccaccaccaccaccaccaccaccccttactgatcctcctactgattctcctggtccaccagagcctccaagtgacgtttcagaggccctatctaacaaacgccccagacctccaccaagcaaacgacctagaccaccaagtcctccaccaagcagacgtccaaaaccaccaggtcctccccctaccagacgtcctagaccaccaggccctccaccaagcagacgccctagaccatcaggccctccaccaagcagacgtccaagacc

SEQ ID NO: 3125 - DNA, 407 bp, Diabrotica virgifera
acaaaatgttgaaaatattaattgtgacgctagtcttttgggctggtgtcagttatgcaaaagatgtcaaaaatgatctaaatgacgttattttatctaattctgaagatggtaaaatattgtttcaatcattaatagacccaaagccaacagaagcaccacaaccaccaccgccccctactgatcctcctggtccaccagagcctccaagtgacgttccagaggccctatctagcaaacgtcccagaccttcaccaagcaaacgacctagaccaccaagtcctccacctagcagacgtccaaaaccaccaggtcctccacctaccagacgtactagaccaccaggccctccaccaagcaaacgccctagaccaccaggccctccacctaccagacgtccaaaacca

SEQ ID NO: 3126 - DNA, 403 bp, Diabrotica virgifera
acaaaatgttgaaaatattaattgtgacgctagtcttttgggctggtgtcagttatgcaaaagatgtcaaaaatgatctaaatgacgttattttatctaattctgaagatggtaaaataatgtttgaatcattaatagacccaaagccaacagaaccaccaccaccaccaccaccccctactgatcctcctactgattctcctggtccaccagagcctccaagtgacgtttcagaagccctatctaacaaacgtcccagacctccccctaccagacgtcctagaccaccaggccctccaccgagcagacgccctagaccaccaggccctccaccaagcagacgtccaagaccgccaggccctccaccaagcagacgtccaaaaccaccaggtcctccaccaag

SEQ ID NO: 3127 - DNA, 420 bp, Diabrotica virgifera
acaaaatgttgaaaatattaattgtgacgctagtcttttgggctggtgtcagttatgcaaaagatgtcaaaaatgatctaaatgacgttattttatctaattctgaagatggtaaaatattgtttcaatcattaatagatccaaagctaacagaaccaccaccaccaccaccccctactgatcctcttggtccaccagagcctccaagtgacgttccagaggacctatctaacaaacgtcccagacctccaccaagcgaacgacctagaccaccaactcctccaccaagcagacgtccaaaaccaccaggtcctccacctaccagacgtcctagaccaccaggccctccaccaagccgacgccctagaccaccaggccctccaccaagcagacgtgcaagaccgccaggccctccaccaa

SEQ ID NO: 3128 - DNA, 807 bp, Diabrotica virgifera
agttgtattgtacaaactagttatatgttatgattaaaatatgatcacattgtcttttagaccgaaagatacctaattatgggatatataagatttttaaaacattcaaacaaattttcgtatcattctcctacgtacacttcgcgtcaaaaaaaaactggtacaactcttataaccgaaaatcgtgtttttcaagttgtgtaagttgatcttgtcacaagtgtcattctaatttctagggcaacgttgccagttcaacgaaaatattatatcaaactaggtaaaaacggggctgtgcgacagaccgcattttttaatatactaaaaactaaaacaattgtaattttccgtcatctcaattaagtatccatacattgattcgtgttttattataatttatgaaaatatttcaattcaaaaataatgatagataataaatcttgacatgactttaaattattatgtttaatgtcaaatcgagaggtgtgattggtttctcgtaaattgtaggacaaaactgcattaagttgtgtagaataaataaaacacactggaaaattaaaaatttaatttgaaattaatacaaaatgaataacttttacagtgaacaagtgtggaatttaaatatatgtattacaattcgaaatatacattttaaacgttatttttttgtatttagatttagtgcaattccgttatctgtgatggcaacaacgaagtgattcacgaacaataattgtcagtctgaacacaggtttacattggaaaaaaaagtgtaccagttttatatgacgcgaagtgtactat

SEQ ID NO: 3129 - DNA, 400 bp, Diabrotica virgifera
gccactggtaacgtcactttgatgtaaaaggtgcgtttaaacgaggtaaaaattcaaaaaattggccactggatattaaagggtgcaaactattcagtgattgtgactgtacgtattatttttaaaaattttaatatgagcaacttaataaacatttaccgtacacaaatttttcattttaaatacatttcattttatcattttaaatactcgatccatcacaataccccaaagatacgtcgctgattaaaaatctctggtggcggtttggcttcacttttggtcataggattactcgtcctctctctttccttgtccaaggttcatgcaataagatcatccaaaaccaaaaagcaactggaccagacaacatgtcagctgaactcttaaaaatgacaaa

SEQ ID NO: 3130 - DNA, 588 bp, Diabrotica virgifera
tagtaatattaaaagtacaattagttaatgaggcattttcaaaattgaaaccgtgcaaaaatgttcccgactcttgatacgcattggtaattgttgatgatactgatggtcgaacacaactttcagcaatcattcccgatgttggcgaatcatgagggtttatcccaccgacgacttaattattttaatttctaacatctagacgactttgatagtcgtcacagttaatttcgagtaaaaatagcgtatgaattgtactatttatggttgaaaattgctacgtttgaagaaaaaatagtatactttattcggcaaagaagcacttttcttgaccttgcctctattacgcgcctcacttcgttcggcgcgtaatatcgggcgcgtcaagaaaagtcatgcttctccgcctcataaagtaatatactattctcgagaacgggcgactctggagataaatctcgaaacagaccggttcatttctaaattataattcttggcataggcctatatttggcctatatatcacactagtgacgtcacgtcagccatctgagtgtgatgacgcaatcgacgacttcttttaaatga

SEQ ID NO: 3131 - DNA, 590 bp, Diabrotica virgifera
cattgtatagcatccatagaaaacaaatgttttaaattaagtccacaacacttaagtatacacaacagtaagtagtatcaacaaatgatgtaataatgtttcagcttttatttgggtaatttgtaatttgaaaaaattatattttttacttacgattttgagttttgaaaatcgttatcttttcagttttaaattgtttgtaactcgaatacgatcaactttcaacgaaattttacaaaaaaacttgttttcttcaaacgtcaaataatgatgacattacttatctaacttgatcctgtcaaagtttgatgtctccgccggcagcagtttttttcccatttctttacggcggagggaaaaatgttgtcatggcaacaatatgaaacatgtcacaaagcaacaatacaaatgtcattatcaacaattaaacatcatttttatttatagtaatattagaagtacagttaattaatgaggcattttcaaaattgaaaccgtgaaaaatgttcccgactcttgatacgcattggtaattgttgataatactgatggtcgagcacaactttcagcaatcattccgacgacttcga

SEQ ID NO: 3132 - DNA, 7048 bp, Diabrotica virgifera
cagaagtaaaagtcaacaacgcgacaacctaactcatctttttacaaaaatatgataaaagatttgacttgaccgacctaaaagtatccaaatgagcaatcatagtcaaaacttctcccacattggctaataattattgcaaatgattgcataaactcgttaagaaacaaaaaatcgctgccaagtttttgtctttcgacagaaagatcgatcgaactttttcacgtaagatgcttataaattttgacgccaaactgaccccttggtctgtatatgccaaaaaaggtagatgtgtttcaaaacttgcaatgatctatcgtttctttcttgataaacagtacatattaacaaaaacaatttttacatgagcaatttttacaggatatttacaaatgcgagatcgattgtggagcttgcttccaaaacgacatggagtcaaaaacaacgtccgcataacaaaaaataaaacgaaaagcacagtaccctacatctaaatcagtcaacagtacgcctggaaaaaagacatcaaccgacccgcttaaaacaattgttattgggtacaaaaatacaccgaaatagacttgtcaaagtagtagttaaacccgaaaaaggcaagccacgacaaaagggattgtagttcacttactattttgaatttcgagtggtttgcctgttttggtttactggcacaaaatttaaacttatatcgtccttccactggaaaaaaagctatatattgtcacagactggtaagtcagaggtgtttcttcttctatatgtatatgcactggcattgtttaaaaagtgcttaaacaaaagagatacttttaacttctcaagaattatgattggttcttacaaatgttgtacatgcaactagtaacaggagtgttatattaccctgtcgtcacacatcgcgagtttggcttacacaatgattgagtattttgttaagagagattccagtaaggggcagatcttgcaaatttactttctactgaaaatttgaaacatttgtgctattgaaaactataaggaagttataacaatttaagaaataaaggaaatctaaagcttttatctgagttacctacacttgtacataaatatctgaaactgcgaagatcatccaggtagcaaatcaaggagcggggacttcagttgaaagcatttgtacaaagagtaaacattcatttaaaatgcattgtgcacgaaatcagtggttttgcgacattgccagataaaatggtcgagtagttgtatatttagaatacattcaatatatatattttttgtaaatatgaatatttcaagtgccgtgaaaaataggacattaagtgtaggggtcgacaagacaagaattcttgtcttgataacaacttcttgtcttgtcttgagaaaaaatcaagaaatttaaaaaatcttgtcttgacgttttcttgacatgttatatcttgtcttgactcaagaaatttcgagatcttgaaatttcttgattacctggtccagtgattcatcggcgacctttttattgcgatgcgtgctgacacggcttaataaatcccagaatgacctacagaatctaacaccagagtcaaagaatacttaaatgagcctaggtcagaagatgctgagaatctacttgatttgtagagaagacacgagaatgtctacccgttataatcgaaaatggttgaggattttctcaaaacgccagtaacatctatacctgcggaaaggctattttcaatagcagatttaacaataacaaagtgaagaaatcggtaagacgttaactccgtaatgctgaggccacagtaacgtctaatgccgttatggtggccccagcataagaagtattatctgccttaattcatggctcattaattccgatttaaaaatttatgttacatttacttgatttacatttgtaaatatttttagcaaaaaagtgttcaatatattaaaatacgttattttatgttaaaatatgttatctttttcacaaattaatacctagtcaagatatttcaagatttctgatttcttgacaagaaatctcaaaatttcaagatcttgtcttgatcttgtcttgatttcaagacaagtaattttgtaaattttagatttcaagacaagacaagaaattccctgtcaataccacgatttcttgtcaagaaatcaagaaatcttggtattgacaaaaaatttcttgtcttgtcttgaaatcaaaacaagatcaagacaagatcttgaaattttcaagaacttggcgacccctaattaagtgcacaattccgtaaaattatacacaatgttttgatatttacgcaggaagcagaaggaaattttactgtgaaacagataacaaataaaaaatccgaaaaacctttgaaatctgattgatttgacaacgtcgcgtaaccaaaattttcgatcgatctgatcttggcggtttcacatatttgtgtcgacttgtactaaaattattttcggtcgtcttgtgactaatacaaagttgaaatttaaattgatgaatacaggatttattttattccaattttaacactcatttggtaatatgaaatcaaatttattaaacgtattttcatactgcatggcatgggaaaataaagatgagtgagagaataaaaaagtatctattttgccttaaaccgcttcgaataacatccaactaaatcattaattacttcctctttgacaagtctactgttctctactttattcatacttacaggcaggccttttaaaatttcaaaatttcaaaactcttatatatattatattatatatagggacagtccaaatctattaaatagtaatgctagtacactgaaagcacacagtaacgcctttacgacgttgtcaaatatatttcttcattataagaatatcgatgttgctctctacaattatattgaaatttttaaaaatgtttcattacagctattaattaattgtctattacaagtttgtgcgttgacttttttgaaaaatctctaaaaatggaccgtgagcttatacaaatgattactggtttggttttgtgatgacgcaaaaatgattgtaccgacagtatcgctgggattttgcgaaatcactatgacgataacttactagaaacaaaatctaaacatttcacagtaaatgaagcggtgatgaagacatacatagcacctcctacaccatcagtgtcatgagacgcctttcatcatcctcacaattctgcctatgataacaaaacaaaacttaattttaaaaacaattatttcaacgaatatcctgcatggatatttaaggaatttatcttaatataacaatgagatcttgtagaaggttctcacactctctttagaaaaaattaataaaaattatatataaaaggcatatttatattaaaaaagagccctttgggttacatcacagaacgttttaagaaaaacaattccatcatcagtgttgcttacaggtatacatgctttgagctactaaaatgtatgggtgaaaatcctttaaatggcataacgttgttataaagttttgttataaagtgcattttgtataaaataatatgtgacgtttaaaattgtccatgattttacattacgacaacgtaggactttcccacactgtgggttgctggttctgaggttaaaaccttacaatatggactctagatagcaactctaagcaacctaatcactaaacagcattgatgatggaattcttagtcccaaaacgctctgtggtgtaatccgaaagagtcctttccaatataaatatggcttttatacaggattttaattaattttttgtgattaatgatatacaaccgactacagcaaattattttttaatgtggattctctttagactgttattttataaatgatttgtagttattaaatttaaaacaagaaacatatttatagatgaatacaaatttggcaataaagaaaatcagtggtgtaaatattacagatttatcaaaaaactataacaatgaaattactgatggttcgtagattacgttttagtaagttacctacgaaaaaaaaaattaagaaaaccggtcagtgagtaaaactacccaaaatatataacgattagagtgagtcttacactcacttcaagttagtgtgttagttgatagttttaaaccaagttgtgttaagtacgacaaatcgtcaggattttgtttagttttaatcaataattttgaaacaccttcccattcggaaaccgactaaacatattcaatttgacagctgcacaaacgtttctaccctacttgtaatatcgattgttatatcgaatgtcgatttctactactactaccacccgagtgctcgatttaagatttttttacagctttacaatgggaacttttaagtacaaatctggacgaaacaattgtggtaagttagttctattgtacgatttcgtctaaaaaaattggctacagttccactttattggtaatttataatccagtctgcgggaatgttttaagaaaaagtattttcattacaatcaacgaaatttatgcgttctgaaaggagaatagaaaacttcttgcaaattaaaggaaagagacaaactataagtcctgatgttttggttacgtttagactctcaatcgtttttgatgtgtaaaaacaagtgggtttattcggaggtttttatcatatgaattgtttttatcaaaaaacaatacagccactgagattttggagaaatcgaacatatcgaacagcagaagcatttagagaatggtctactagagggatacatccaagggatctgaagataatgagtaaccttgaaaaacgtttggggaagctatagaagaaggctgaaagtgaaaaatattctgaactggaagaatgtaaatattaaacgaaaagtaatatccatacctcgtctaacctgccattctgtgacaagtgtttcgctatgtttagctcttcagatagaacttgcttgaaagacgaggtaaataggtcattcactgactagtgcactctggattttatagtcaaattttagaaatcgtacaagagtctcactctggaaaacaaagtcgcatttcgataaatataaaattatattacaagtctttcagattatattcttattaaatttaaaaagttgacatcgaaagcaattgacaattgacagcgtaacatggatgttttttcgaataagaaagcacgcatgctcagttcatccgacaaaattattttgtaaaatcgataacactagaatgtacatctactggtagtaacgaaaaaataccagatcgaaatggctaaaatacacccgatatcgaacttagtatacgccaaaaagaacgtagcagttccaaaactttgctatttcaaaaatataccctgtacatcaaaaggtattattgtggtttattatacgaaactgacagtagagtttaaaaacgagttcaatgaagaatttttatttattgatgattttacattctctacataaaaattcgaagtttttcaaaaattattatagattagaactgttgtatataagaacgtcataatcatatcttagttagttgttttacatgaaggtgccaatccttagcatatctaaactaatttttctatctcatcataccgtagaggtaaataaaaattttgtacgcgtcactcacacccaattacgttttaaatttagtgggcatagatgcctacgcacctgaacgtgagggacgcagagatcagtgttcacattcaaaaccacacaaatgcatatctgtcgcgcttcaaatgcaataaaagtttttcatttaattcagtaaatacaaaacacttcaagtgtaagctacaacgttggtccttcgagtcggatcaacttattagcttacgcttgaagtgttttgtatttagtgtattaaatgaaaacctacattataaatgctaggtatttattgcatttgaaagcacgacaaatatgcatgtgtatggttctgaatgtgaacagagacacagaatatctgcatccctcaggtccaagtgcatagtcacctatgcgtgccgaatttaagtcaattgggggtgagtggcgcgtacagatttaatttgttttttttttcggtaacataactttcattgacctggtttttctggcttattctagtttcgccaattcacaagatatttagtagacacaacggccctatattttactattatacgttagtaaattactcatgaattggatattgttatcgttagaattgttttcgtgttgtttttcttaagtttctcgtattacatttcttttactttaagaataaacatttttggacggttgcgtgttttattctataaacttcgttgctagtcctccatcgacgtgaaaactcgtccttaaattccctatcaataaacgtaccttttggcgaaaaactttttaacatcaacatacgccactgaattgaaacaaggtcaagcggcagcagaacctttaaaatgactacacggacttttgacaactaaatattggtcatcaaacagatgaatcacagcctgtttttgtgttctgttaccgtttttatgaggtaacagtcattaaaaagtcgaaaactaataccgggctagccgggccgacaaacgtactgagctaggcactattagtgttcagtcactttagagagaagctgtgatcaccagaaaaccacaaccgaaggtactaggtctggtcataactgacaaaacaacaaaatggatgtatatctttagtcgctaattctaattaagttaatttaatgcaaacttactgaataataacatatatatgtattgtaattaataaataattatatgaataaatagaaaatttacttcttaataaaggaagattagcaaagttgaactaaacttgcgtggacagaaatcggaccacttaaacctttgattctaactatatttatttctgaaactaattacttccaataaaaaaggtatatatactttttgaaagacaattcaataggctt

SEQ ID NO: 3133 - DNA, 7052 bp, Diabrotica virgifera
cagaagtaaaagtcaacaacgcgacaacctaactcatctttttacaaaaatatgataaaagatttgacttgaccgacctaaaagtatccaaatgagcaatcatagtcaaaacttctcccacattggctaataattattgcaaatgattgcataaactcgttaagaaacaaaaaatcgctgccaagtttttgtctttcgacagaaagatcgatcgaactttttcacgtaagatgcttataaattttgacgccaaactgaccccttggtctgtatatgccaaaaaaggtagatgtgtttcaaaacttgcaatgatctatcgtttctttcttgataaacagtacatattaacaaaaacaatttttacatgagcaatttttacaggatatttacaaatgcgagatcgattgtggagcttgcttccaaaacgacatggagtcaaaaacaacgtccgcataacaaaaaataaaacgaaaagcacagtaccctacatctaaatcagtcaacagtacgcctggaaaaaagacatcaaccgacccgcttaaaacaattgttattgggtacaaaaatacaccgaaatagacttgtcaaagtagtagttaaacccgaaaaaggcaagccacgacaaaagggattgtagttcacttactattttgaatttcgagtggtttgcctgttttggtttactggcacaaaatttaaacttatatcgtccttccactggaaaaaaagctatatattgtcacagactggtaagtcagaggtgtttcttcttctatatgtatatgcactggcattgtttaaaaagtgcttaaacaaaagagatacttttaacttctcaagaattatgattggttcttacaaatgttgtacatgcaactagtaacaggagtgttatattaccctgtcgtcacacatcgcgagtttggcttacacaatgattgagtattttgttaagagagattccagtaaggggcagatcttgcaaatttactttctactgaaaatttgaaacatttgtgctattgaaaactataaggaagttataacaatttaagaaataaaggaaatctaaagcttttatctgagttacctacacttgtacataaatatctgaaactgcgaagatcatccaggtagcaaatcaaggagcggggacttcagttgaaagcatttgtacaaagagtaaacattcatttaaaatgcattgtgcacgaaatcagtggttttgcgacattgccagataaaatggtcgagtagttgtatatttagaatacattcaatatatatattttttgtaaatatgaatatttcaagtgccgtgaaaaataggacattaagtgtaggggtcgacaagacaagaattcttgtcttgataacaacttcttgtcttgtcttgagaaaaaatcaagaaatttaaaaaatcttgtcttgacgttttcttgacatgttatatcttgtcttgactcaagaaatttcgagatcttgaaatttcttgattacctggtccagtgattcatcggcgacctttttattgcgatgcgtgctgacacggcttaataaatcccagaatgacctacagaatctaacaccagagtcaaagaatacttaaatgagcctaggtcagaagatgctgagaatctacttgatttgtagagaagacacgagaatgtctacccgttataatcgaaaatggttgaggattttctcaaaacgccagtaacatctatacctgcggaaaggctattttcaatagcagatttaacaataacaaagtgaagaaatcggtaagacgttaactccgtaatgctgaggccacagtaacgtctaatgccgttatggtggccccagcataagaagtattatctgccttaattcatggctcattaattccgatttaaaaatttatgttacatttacttgatttacatttgtaaatatttttagcaaaaaagtgttcaatatattaaaatacgttattttatgttaaaatatgttatctttttcacaaattaatacctagtcaagatatttcaagatttctgatttcttgacaagaaatctcaaaatttcaagatcttgtcttgatcttgtcttgatttcaagacaagtaattttgtaaattttagatttcaagacaagacaagaaattccctgtcaataccacgatttcttgtcaagaaatcaagaaatcttggtattgacaaaaaatttcttgtcttgtcttgaaatcaaaacaagatcaagacaagatcttgaaattttcaagaacttggcgacccctaattaagtgcacaattccgtaaaattatacacaatgttttgatatttacgcaggaagcagaaggaaattttactgtgaaacagataacaaataaaaaatccgaaaaacctttgaaatctgattgatttgacaacgtcgcgtaaccaaaattttcgatcgatctgatcttggcggtttcacatatttgtgtcgacttgtactaaaattattttcggtcgtcttgtgactaatacaaagttgaaatttaaattgatgaatacaggatttattttattccaattttaacactcatttggtaatatgaaatcaaatttattaaacgtattttcatactgcatggcatgggaaaataaagatgagtgagagaataaaaaagtatctattttgccttaaaccgcttcgaataacatccaactaaatcattaattacttcctctttgacaagtctactgttctctactttattcatacttacaggcaggccttttaaaatttcaaaatttcaaaactcttatatatattatattatatatagggacagtccaaatctattaaatagtaatgctagtacactgaaagcacacagtaacgcctttacgacgttgtcaaatatatttcttcattataagaatatcgatgttgctctctacaattatattgaaatttttaaaaatgtttcattacagctattaattaattgtctattacaagtttgtgcgttgacttttttgaaaaatctctaaaaatggaccgtgagcttatacaaatgattactggtttggttttgtgatgacgcaaaaatgattgtaccgacagtatcgctgggattttgcgaaatcactatgacgataacttactagaaacaaaatctaaacatttcacagtaaatgaagcggtgatgaagacatacatagcacctcctacaccatcagtgtcatgagacgcctttcatcatcctcacaattctgcctatgataacaaaacaaaacttaattttaaaaacaattatttcaacgaatatcctgcatggatatttaaggaatttatcttaatataacaatgagatcttgtagaaggttctcacactctctttagaaaaaattaataaaaattatatataaaaggcatatttatattaaaaaagagccctttgggttacatcacagaacgttttaagaaaaacaattccatcatcagtgttgcttacaggtatacatgctttgagctactaaaatgtatgggtgaaaatcctttaaatggcataacgttgttataaagttttgttataaagtgcattttgtataaaataatatgtgacgtttaaaattgtccatgattttacattacgacaacgtaggactttcccacactgtgggttgctggttctgaggttaaaaccttacaatatggactctagatagcaactctaagcaacctaatcactaaacagcattgatgatggaattcttagtcccaaaacgctctgtggtgtaatccgaaagagtcctttccaatataaatatggcttttatacaggattttaattaattttttgtgattaatgatatacaaccgactacagcaaattattttttaatgtggattctctttagactgttattttataaatgatttgtagttattaaatttaaaacaagaaacatatttatagatgaatacaaatttggcaataaagaaaatcagtggtgtaaatattacagatttatcaaaaaactataacaatgaaattactgatggttcgtagattacgttttagtaagttacctacgaaaaaaaaaattaagaaaaccggtcagtgagtaaaactacccaaaatatataacgattagagtgagtcttacactcacttcaagttagtgtgttagttgatagttttaaaccaagttgtgttaagtacgacaaatcgtcaggattttgtttagttttaatcaataattttgaaacaccttcccattcggaaaccgactaaacatattcaatttgacagctgcacaaacgtttctaccctacttgtaatatcgattgttatatcgaatgtcgatttctactactactaccacccgagtgctcgatttaagatttttttacagctttacaatgggaacttttaagtacaaatctggacgaaacaattgtggtaagttagttctattgtacgatttcgtctaaaaaaattggctacagttccactttattggtaatttataatccagtctgcgggaatgttttaagaaaaagtattttcattacaatcaacgaaatttatgcgttctgaaaggagaatagaaaacttcttgcaaattaaaggaaagagacaaactataagtcctgatgttttggttacgtttagactctcaatcgtttttgatgtgtaaaaacaagtgggtttattcggaggtttttatcatatgaattgtttttatcaaaaaacaatacagccactgagattttggagaaatcgaacatatcgaacagcagaagcatttagagaatggtctactagagagatacatcaaagggatctgaagataatcgaggcaaatgagtaactttgaaaaacgtttgggatagaaaaaggctgaaagtgaaaaataatctgaactggaagaatgtaaatattaaacgaaaagtaatatttataccacgtctaacctgccattctgtgacaagtgtttcgctatgtttagctcttcagacagaacttgcttgaaagacgaggtaaataggtcattcactgactagtgcactctggattttatagtcaaattttagaaatcgtacaagagtctcactctggaaaacaaagtcgcatttcgataaatataaaattatattacaagtctttcagattatattcttattaaatttaaaaagttgacatcgaaagcaattgacaattgacagcgtaacatggatgttttttcgaataagaaagcacgcatgctcagttcatccgacaaaattattttgtaaaatcgataacactagaatgtacatctactggtagtaacgaaaaaataccagatcgaaatggctaaaatacacccgatatcgaacttagtatacgccaaaaagaacgtagcagttccaaaactttgctatttcaaaaatataccctgtacatcaaaaggtattattgtggtttattatacgaaactgacagtagagtttaaaaacgagttcaatgaagaatttttatttattgatgattttacattctctacataaaaattcgaagtttttcaaaaattattatagattagaactgttgtatataagaacgtcataatcatatcttagttagttgttttacatgaaggtgccaatccttagcatatctaaactaatttttctatctcatcataccgtagaggtaaataaaaattttgtacgcgtcactcacacccaattacgttttaaatttagtgggcatagatgcctacgcacctgaacgtgagggacgcagagatcagtgttcacattcaaaaccacacaaatgcatatctgtcgcgcttcaaatgcaataaaagtttttcatttaattcagtaaatacaaaacacttcaagtgtaagctacaacgttggtccttcgagtcggatcaacttattagcttacgcttgaagtgttttgtatttagtgtattaaatgaaaacctacattataaatgctaggtatttattgcatttgaaagcacgacaaatatgcatgtgtatggttctgaatgtgaacagagacacagaatatctgcatccctcaggtccaagtgcatagtcacctatgcgtgccgaatttaagtcaattgggggtgagtggcgcgtacagatttaatttgttttttttttcggtaacataactttcattgacctggtttttctggcttattctagtttcgccaattcacaagatatttagtagacacaacggccctatattttactattatacgttagtaaattactcatgaattggatattgttatcgttagaattgttttcgtgttgtttttcttaagtttctcgtattacatttcttttactttaagaataaacatttttggacggttgcgtgttttattctataaacttcgttgctagtcctccatcgacgtgaaaactcgtccttaaattccctatcaataaacgtaccttttggcgaaaaactttttaacatcaacatacgccactgaattgaaacaaggtcaagcggcagcagaacctttaaaatgactacacggacttttgacaactaaatattggtcatcaaacagatgaatcacagcctgtttttgtgttctgttaccgtttttatgaggtaacagtcattaaaaagtcgaaaactaataccgggctagccgggccgacaaacgtactgagctaggcactattagtgttcagtcactttagagagaagctgtgatcaccagaaaaccacaaccgaaggtactaggtctggtcataactgacaaaacaacaaaatggatgtatatctttagtcgctaattctaattaagttaatttaatgcaaacttactgaataataacatatatatgtattgtaattaataaataattatatgaataaatagaaaatttacttcttaataaaggaagattagcaaagttgaactaaacttgcgtggacagaaatcggaccacttaaacctttgattctaactatatttatttctgaaactaattacttccaataaaaaaggtatatatactttttgaaagacaattcaataggctt

SEQ ID NO: 3134 - DNA, 4124 bp, Diabrotica virgifera
cagaagtaaaagtcaacaacgcgacaacctaactcatctttttacaaaaatatgataaaagatttgacttgaccgacctaaaagtatccaaatgagcaatcatagtcaaaacttctcccacattggctaataattattgcaaatgattgcataaactcgttaagaaacaaaaaatcgctgccaagtttttgtctttcgacagaaagatcgatcgaactttttcacgtaagatgcttataaattttgacgccaaactgaccccttggtctgtatatgccaaaaaaggtagatgtgtttcaaaacttgcaatgatctatcgtttctttcttgataaacagtacatattaacaaaaacaatttttacatgagcaatttttacaggatatttacaaatgcgagatcgattgtggagcttgcttccaaaacgacatggagtcaaaaacaacgtccgcataacaaaaaataaaacgaaaagcacagtaccctacatctaaatcagtcaacagtacgcctggaaaaaagacatcaaccgacccgcttaaaacaattgttattgggtacaaaaatacaccgaaatagacttgtcaaagtagtagttaaacccgaaaaaggcaagccacgacaaaagggattgtagttcacttactattttgaatttcgagtggtttgcctgttttggtttactggcacaaaatttaaacttatatcgtccttccactggaaaaaaagctatatattgtcacagactggtaagtcagaggtgtttcttcttctatatgtatatgcactggcattgtttaaaaagtgcttaaacaaaagagatacttttaacttctcaagaattatgattggttcttacaaatgttgtacatgcaactagtaacaggagtgttatattaccctgtcgtcacacatcgcgagtttggcttacacaatgattgagtattttgttaagagagattccagtaaggggcagatcttgcaaatttactttctactgaaaatttgaaacatttgtgctattgaaaactataaggaagttataacaatttaagaaataaaggaaatctaaagcttttatctgagttacctacacttgtacataaatatctgaaactgcgaagatcatccaggtagcaaatcaaggagcggggacttcagttgaaagcatttgtacaaagagtaaacattcatttaaaatgcattgtgcacgaaatcagtggttttgcgacattgccagataaaatggtcgagtagttgtatatttagaatacattcaatatatatattttttgtaaatatgaatatttcaagtgccgtgaaaaataggacattaagtgtaggggtcgacaagacaagaattcttgtcttgataacaacttcttgtcttgtcttgagaaaaaatcaagaaatttaaaaaatcttgtcttgacgttttcttgacatgttatatcttgtcttgactcaagaaatttcgagatcttgaaatttcttgattacctggtccagtgattcatcggcgacctttttattgcgatgcgtgctgacacggcttaataaatcccagaatgacctacagaatctaacaccagagtcaaagaatacttaaatgagcctaggtcagaagatgctgagaatctacttgatttgtagagaagacacgagaatgtctacccgttataatcgaaaatggttgaggattttctcaaaacgccagtaacatctatacctgcggaaaggctattttcaatagcagatttaacaataacaaagtgaagaaatcggtaagacgttaactccgtaatgctgaggccacagtaacgtctaatgccgttatggtggccccagcataagaagtattatctgccttaattcatggctcattaattccgatttaaaaatttatgttacatttacttgatttacatttgtaaatatttttagcaaaaaagtgttcaatatattaaaatacgttattttatgttaaaatatgttatctttttcacaaattaatacctagtcaagatatttcaagatttctgatttcttgacaagaaatctcaaaatttcaagatcttgtcttgatcttgtcttgatttcaagacaagtaattttgtaaattttagatttcaagacaagacaagaaattccctgtcaataccacgatttcttgtcaagaaatcaagaaatcttggtattgacaaaaaatttcttgtcttgtcttgaaatcaaaacaagatcaagacaagatcttgaaattttcaagaacttggcgacccctaattaagtgcacaattccgtaaaattatacacaatgttttgatatttacgcaggaagcagaaggaaattttactgtgaaacagataacaaataaaaaatccgaaaaacctttgaaatctgattgatttgacaacgtcgcgtaaccaaaattttcgatcgatctgatcttggcggtttcacatatttgtgtcgacttgtactaaaattattttcggtcgtcttgtgactaatacaaagttgaaatttaaattgatgaatacaggatttattttattccaattttaacactcatttggtaatatgaaatcaaatttattaaacgtattttcatactgcatggcatgggaaaataaagatgagtgagagaataaaaaagtatctattttgccttaaaccgcttcgaataacatccaactaaatcattaattacttcctctttgacaagtctactgttctctactttattcatacttacaggcaggccttttaaaatttcaaaatttcaaaactcttatatatattatattatatatagggacagtccaaatctattaaatagtaatgctagtacactgaaagcacacagtaacgcctttacgacgttgtcaaatatatttcttcattataagaatatcgatgttgctctctacaattatattgaaatttttaaaaatgtttcattacagctattaattaattgtctattacaagtttgtgcgttgacttttttgaaaaatctctaaaaatggaccgtgagcttatacaaatgattactggtttggttttgtgatgacgcaaaaatgattgtaccgacagtatcgctgggattttgcgaaatcactatgacgataacttactagaaacaaaatctaaacatttcacagtaaatgaagcggtgatgaagacatacatagcacctcctacaccatcagtgtcatgagacgcctttcatcatcctcacaattctgcctatgataacaaaacaaaacttaattttaaaaacaattatttcaacgaatatcctgcatggatatttaaggaatttatcttaatataacaatgagatcttgtagaaggttctcacactctctttagaaaaaattaataaaaattatatataaaaggcatatttatattaaaaaagagccctttgggttacatcacagaacgttttaagaaaaacaattccatcatcagtgttgcttacaggtatacatgctttgagctactaaaatgtatgggtgaaaatcctttaaatggcataacgttgttataaagttttgttataaagtgcattttgtataaaataatatgtgacgtttaaaattgtccatgattttacattacgacaacgtaggactttcccacactgtgggttgctggttctgaggttaaaaccttacaatatggactctagatagcaactctaagcaacctaatcactaaacagcattgatgatggaattgttagtccgaaaacgtcctgtgatgtagtcaagagttctttcctgatataaatatgccctttataaagaattttgactaattttttgtgattaatgatatagaacggactacagcaaattattttttaatgtggattctctttagactggtataagctctgttttataaatgatttctagttattaaatttaaaacaagatacatatttatagatgaatacaaatttggcagtaaagaaaatcagtggtgtaaataatacagatttatcaaaaaattataacaatgaaattactgatggctcgtagattatatttcagtaagttccctacgaaaaaaaaattaagaaaaccggtcagtgagtaaaactacccaaaat

SEQ ID NO: 3135 - DNA, 6399 bp, Diabrotica virgifera
  SmartBlast Evalue=0; Info="Sec24B protein, putative n=1 Tax= Aedes aegypti RepID=Q17BF4_AEDAE"
ggcagagtgaagtgtaaaagtgatgtcctttatttatttacctttttaagaagatttttagttaaatttgaattggtaatttaaaatgaacccacaatatctgcctccacaacagtttggaggtccaccacagggttttcctcccactagcagagtatccccaaatacaacatttcaaagtgctcctgttggtcctccaaaacctggtcaacttcctcctcaaagtgatcatcatgcagctccaacaggtccactgaattccatgggacatcctacgaatagtctgcaaggtcaatttccaccaaatttaagcggccaacaacccagaccaccaattccatccagtcagttgccaccatcagtgggacatgacatgagtaactcatttggaccttcaccaacaaaaaatgatagtattcctccaagtaatctacaaaatgggcctcctcagtttcagaacggacctccacaattccagaatggacagtcagttcctccgacaagtcaaccaaacagaccaccctctaatttcatgcctccaaatcagaaccagtttgcaccttcccaaacatcaaatcaaaacatgcctcccagaccttcatctaatcagtcaaatagtatgggacaacctcctctgccaagtggccctccctctcaatttggacaaccaccattgtcaacagcaccaccatcagtttcaaatgcttcaccattgatgtcaactggacctccaacattatcaaatgtgcctccaacgttatctagtgggcctccaacaagtggttctcctcaaacaggccatttaggtgctccaccaaatcaatctcccttgtctggaggagttccacctcaaatgggacctaatcaacaattaggacagccaccatcggcagctggtccaccaagccaccttggacagacttctttgactaaccccccaccccatccaggtcaaccgaatctcccctggcgcccacctcaatctgtaggtcaacctggtggccctcctggatatcctccattgccaggacatcaaggacaacccacatcacagttcgacacacaaggtccaatgtcacaaaatggacctccaaacatgtatggaaatccaccaaatcaatttaataatcagatgggtcctccaaaagtgggacaatttcctcaacaacaaaggccaatgcaacctcccctacctggacagccgcctatgccgggacaaggtcctttaatcagtgctccaggtccatacggaccttcttcaggaccagcacaccaaatgccacctcatcaaggacaaccacctcatcaaggacaatcaccatatggacctggccaaataactagtcagttgcagcaaatgaatttatctggtccaaagccggcttatccagtaccaccaggcggtcccatgagaccgatgaacggagacagcggtccgcatatgcctccagcaatgaaccaaccgggatatatgaataatcaacagggcagagttcctcctggacctggttatccaccgatgccggggcaagcaccgatgcaaggacaaggacacatgcctggtcaagggcaatacccaggacctggtggggggtatccgcaaggcaactaccaacaagctgcgccggcgcaacacaagattgatcctgatcatgtgccgaatccaattcaagttatccgagatgatcagcaagacagggacagcgtttttgttactaatcaaaaaggacttgtaccgcctatggtaactaccaattttattgttcaagatcaaggaaattgcagtccacgattcatgagatctaccatatataatgttccaatttcacaggatttgttaaaacaatctgcacttccattcagtcttttaataagtccaatggccaggcaagtagagcaagaataccctccaccaatcgttaatttcggaagcctcggtcctgtcagatgcatccgttgcaaggcctacatgtgtccgttcatgcagttcgtcgattctggaaggaggttccagtgtctgttttgtaacgcaactactgatgttccaacagaatatttccagcatctagatcagaccggcctaagaatggaccgctttgaacgaccagaattgatccttggtacctacgaattcgtcgctacccccgattactgccgaaacaacgttctgcccaaaccgccagccgtcattttcgttatcgacgtttcatataacaacattaaatccggaatggtttccttgttgtgcaatcagatgaaagagatcattcaaaatcttccggtggaccaaggccacgaaaagagcaacatgaaagttggatttattacgtataatagttcggtgcatttttataatatcaagggaagtttgacagctccacaaatgttggtggtaggagatgtccaagaaatgttcatgcctttgttggatggtttcttatgtactccagaagaatcgggacccgtaatagatctactcatgcaacagattcccgcaatgtttgcagatactaaggaaaccgaagtcgttttgcttcccgcaattcaagctggattagaagccctaaaggcttccgaaagtacaggcaaacttctagtattccactccactttaccaatagcagaggctccaggtaaattgaagaaccgcgacgatagaaaagtcttaggaaccgataaagaaaaaactgtcttgacaccacaaacacaagcatacaaccaattgggccaggaatgcgtcagcaacggttgctccgttgatatgtatatcttcaataacgcttacatcgatatagcgactattggtcaagtgtctagattgacgggaggagaagtgtttaagtatacttatttccaggctgatattgatggagaacgtttcataacagacgttatcttaaatattagtcgaccaatagcgtttgatgctgtaatgagggttagaacgtcaacaggagtgaggcccactgacttttatggtcatttctacatgtcaaatactacggatatcgaactagcggcagtagattgcgataaagccatagcagtcgaaataaaacacgacgacaaactgaatgaagacacgggggtattcattcaaacggcgctgttatacacatcgtgctcaggacagcgacggttgcgaattatgaatctttcactgaagacttgctcacaaatggccgatctctttagaagttgtgatttagatactttaatcaattacatgagtaaacaggctacgtataaattattggacggcagccccagcgttgtaaaggagggacttgtccatagagccgctcagatcttagcaatatacaggaagcactgcgcaagtccaagtagcgcgggtcaactaattcttcccgaatgcatgaagctgctaccgatctacaccaattgtcttctcaagaacgacgctatctcaggaggttcggatatgaccatcgacgacaaatcgttcgtcatgcaggtggtcttgagcatggaccttaacttctcggtgtactatttctatcctaggttaattccactacacgatatcgatcccaaccaggatcctatcacagttccgaatcctatgaggtgtagttatgataaaatgaatgaacagggagtgtatatattagaaaatggtatccatatgttcttatggtttggtctcggcgtgaatcccaactttattcagcaactctttggtgcgccttcagcaatacaagttgatatcgataggagtagtttgccggaattagataacccattgtcggtagcagttaggacaataatcgacgaaatcaggatacagaaacataggtgtatgaggttaaccctggttagacaaagagaaaaactagaaccagtcttcaagcatttcttagtagaggaccgcggcacagacggttcagccagctatgtcgacttcctatgtcatatgcacagagaaatcagaaacatcctcagctagcacagaaggtgatccaaaggcagacggaagataagatgatagaaaatcttgaaatttgtactctgatcctcgataacatatttcctcttgtataaagtattattaagatctatttttgtatagcgcatgcgtttgtaaagggtgccagacggtgttcttttggatttctagatattctattatattatgcattattttggggtctagcttgtcggtgcttttacatattaaagaaaatcagtttgtttccgtatgctcaggaaacaaacaacgcttttttttctattttattggttattacacgtcgacagaactatctgaaaccgccaaggtcagatcgaaaactttcgttacgcgacgttgtcagattaatcgaagtttaaaggttttccggtttttatttgttacctgtttcacagtaaaattgataacaattctataacgcttttgcatttttattataatcgaaatattagacgtgataagttacagtgtatattggtgaaattccttttgtcaattatttcagttaaatacaaataaggagtcttaactgtttattaatgactgtgtgacaggtacttcttttaggacaacagactcagtaaaacaggttaaaataaaataaatgtattgaggatatttatatagttcaatattaaaaataacaaaataaaaagactccctaaaaagcagttgcggataaagctccctagccggacgtctgcaaaataaaaataaaattgtatcaaaattgtattgtcatcaaaaatataataacaatattagaataatacaatacataacacagtatgtagaatagcaatcacgctacacggaatcaatctatctacctacataattacacacacagactcgtagtccattacacttcagtccaatgtaaccacaatcaaatatcgacgcagagttacccatcatttaccgctcactacggtcacggttccggcaaagcatcttttcagtccaaagaatctttgccacggcagagttccaactcactccattgcataactgccgtttgagttctttcccggttcagtacaccgtgtggaactgatttcatgatcctcaattctcttaagtacactctcggtaaccatcactccttggcttcatcggagaggtggcacgtagtggggctgcgctggtatggaaacgcgttcggttctctgttgactagctgtcgaacgccgattggacagcacgtcgttacaacctcaaccaacaaacgtctattaatgcagaaagctaaatttcgtgcatctgtttttcttagtccattattactagttttactccatttttctttgaagtatgactttaacaaataagtctcatcattgaaaacaataaatttatttttttccatgcttttctaatgttttgagctactgcaatcttaaatgtcgtaatgtcgtgtttcccaataaatatttttctatcgattgatgtctttctccaacgaaccccaagttggtgaaattcatgtctcatactttctctgctacctttagagttcaataattctacaaatttcagacgaatctttttaagagtgggaacctgttgccagtaaggtgaaaattgttggtatatctcttttcgtaatataccttggtcagatccatctaatttaattttggacgatttttcgtgtgtcgtttgttgggtctgtgaaatctagaggtttgtacattctgaatatcacgaccttctttggcgatttttttacactggataaactgtcacatgtaaacatgtatccatttaataattgttaacatgttatacaacaaaaaatccttgtatattttggtggtagtcactgtaattcaataaatagtgtatttaatttcacgagattttacacatagtgttctatttttcacggcaattgtattattcatgtttatttaaaaaatattaaatgtagtctaaacaaacaactattcgacaattttatctggcaatgtcgcaaaaccacggatttcgtgcttacatgcattttaagtggatgtttactctttgcaccaacgcgttcaattgaagtcccctctccttgatttgctacctgaccttcgagtgacctttgcggtttcatatattactgtatacctgtatatagctggcgttttatgcgtataagcacgcggagccaattttttaatacgcaacggaatatggcatcctctacattcaaatttttgttgcatcatttgcacccagatgaacttgtactagcatttatagcgtttttatttttgatggtttttatcataattcgatttgttcgatattgcgactagtatagagcgtttcggagtgcagatttcgtactgagaagaaggaattatgcttaatatgtagagagattagtgaattatatttaattattttgtatctatatt

SEQ ID NO: 3136 - DNA, 6398 bp, Diabrotica virgifera
  SmartBlast Evalue=0; Info="Sec24B protein, putative n=1 Tax= Aedes aegypti RepID=Q17BF4_AEDAE"
ggcagagtgaagtgtaaaagtgatgtcctttatttatttacctttttaagaagatttttagttaaatttgaattggtaatttaaaatgaacccacaatatctgcctccacaacagtttggaggtccaccacagggttttcctcccactagcagagtatccccaaatacaacatttcaaagtgctcctgttggtcctccaaaacctggtcaacttcctcctcaaagtgatcatcatgcagctccaacaggtccactgaattccatgggacatcctacgaatagtctgcaaggtcaatttccaccaaatttaagcggccaacaacccagaccaccaattccatccagtcagttgccaccatcagtgggacatgacatgagtaactcatttggaccttcaccaacaaaaaatgatagtattcctccaagtaatctacaaaatgggcctcctcagtttcagaacggacctccacaattccagaatggacagtcagttcctccgacaagtcaaccaaacagaccaccctctaatttcatgcctccaaatcagaaccagtttgcaccttcccaaacatcaaatcaaaacatgcctcccagaccttcatctaatcagtcaaatagtatgggacaacctcctctgccaagtggccctccctctcaatttggacaaccaccattgtcaacagcaccaccatcagtttcaaatgcttcaccattgatgtcaactggacctccaacattatcaaatgtgcctccaacgttatctagtgggcctccaacaagtggttctcctcaaacaggccatttaggtgctccaccaaatcaatctcccttgtctggaggagttccacctcaaatgggacctaatcaacaattaggacagccaccatcggcagctggtccaccaagccaccttggacagacttctttgactaaccccccaccccatccaggtcaaccgaatctcccctggcgcccacctcaatctgtaggtcaacctggtggccctcctggatatcctccattgccaggacatcaaggacaacccacatcacagttcgacacacaaggtccaatgtcacaaaatggacctccaaacatgtatggaaatccaccaaatcaatttaataatcagatgggtcctccaaaagtgggacaatttcctcaacaacaaaggccaatgcaacctcccctacctggacagccgcctatgccgggacaaggtcctttaatcagtgctccaggtccatacggaccttcttcaggaccagcacaccaaatgccacctcatcaaggacaaccacctcatcaaggacaatcaccatatggacctggccaaataactagtcagttgcagcaaatgaatttatctggtccaaagccggcttatccagtaccaccaggcggtcccatgagaccgatgaacggagacagcggtccgcatatgcctccagcaatgaaccaaccgggatatatgaataatcaacagggcagagttcctcctggacctggttatccaccgatgccggggcaagcaccgatgcaaggacaaggacacatgcctggtcaagggcaatacccaggacctggtggggggtatccgcaaggcaactaccaacaagctgcgccggcgcaacacaagattgatcctgatcatgtgccgaatccaattcaagttatccgagatgatcagcaagacagggacagcgtttttgttactaatcaaaaaggacttgtaccgcctatggtaactaccaattttattgttcaagatcaaggaaattgcagtccacgattcatgagatctaccatatataatgttccaatttcacaggatttgttaaaacaatctgcacttccattcagtcttttaataagtccaatggccaggcaagtagagcaagaataccctccaccaatcgttaatttcggaagcctcggtcctgtcagatgcatccgttgcaaggcctacatgtgtccgttcatgcagttcgtcgattctggaaggaggttccagtgtctgttttgtaacgcaactactgatgttccaacagaatatttccagcatctagatcagaccggcctaagaatggaccgctttgaacgaccagaattgatccttggtacctacgaattcgtcgctacccccgattactgccgaaacaacgttctgcccaaaccgccagccgtcattttcgttatcgacgtttcatataacaacattaaatccggaatggtttccttgttgtgcaatcagatgaaagagatcattcaaaatcttccggtggaccaaggccacgaaaagagcaacatgaaagttggatttattacgtataatagttcggtgcatttttataatatcaagggaagtttgacagctccacaaatgttggtggtaggagatgtccaagaaatgttcatgcctttgttggatggtttcttatgtactccagaagaatcgggacccgtaatagatctactcatgcaacagattcccgcaatgtttgcagatactaaggaaaccgaagtcgttttgcttcccgcaattcaagctggattagaagccctaaaggcttccgaaagtacaggcaaacttctagtattccactccactttaccaatagcagaggctccaggtaaattgaagaaccgcgacgatagaaaagtcttaggaaccgataaagaaaaaactgtcttgacaccacaaacacaagcatacaaccaattgggccaggaatgcgtcagcaacggttgctccgttgatatgtatatcttcaataacgcttacatcgatatagcgactattggtcaagtgtctagattgacgggaggagaagtgtttaagtatacttatttccaggctgatattgatggagaacgtttcataacagacgttatcttaaatattagtcgaccaatagcgtttgatgctgtaatgagggttagaacgtcaacaggagtgaggcccactgacttttatggtcatttctacatgtcaaatactacggatatcgaactagcggcagtagattgcgataaagccatagcagtcgaaataaaacacgacgacaaactgaatgaagacacgggggtattcattcaaacggcgctgttatacacatcgtgctcaggacagcgacggttgcgaattatgaatctttcactgaagacttgctcacaaatggccgatctctttagaagttgtgatttagatactttaatcaattacatgagtaaacaggctacgtataaattattggacggcagccccagcgttgtaaaggagggacttgtccatagagccgctcagatcttagcaatatacaggaagcactgcgcaagtccaagtagcgcgggtcaactaattcttcccgaatgcatgaagctgctaccgatctacaccaattgtcttctcaagaacgacgctatctcaggaggttcggatatgaccatcgacgacaaatcgttcgtcatgcaggtggtcttgagcatggaccttaacttctcggtgtactatttctatcctaggttaattccactacacgatatcgatcccaaccaggatcctatcacagttccgaatcctatgaggtgtagttatgataaaatgaatgaacagggagtgtatatattagaaaatggtatccatatgttcttatggtttggtctcggcgtgaatcccaactttattcagcaactctttggtgcgccttcagcaatacaagttgatatcgataggagtagtttgccggaattagataacccattgtcggtagcagttaggacaataatcgacgaaatcaggatacagaaacataggtgtatgaggttaaccctggttagacaaagagaaaaactagaaccagtcttcaagcatttcttagtagaggaccgcggcacagacggttcagccagctatgtcgacttcctatgtcatatgcacagagaaatcagaaacatcctcagctagcacagaaggtgatccaaaggcagacggaagataagatgatagaaaatcttgaaatttgtactctgatcctcgataacatatttcctcttgtataaagtattattaagatctatttttgtatagcgcatgcgtttgtaaagggtgccagacggtgttcttttggatttctagatattctattatattatgcattattttggggtctagcttgtcggtgcttttacatattaaagaaaatcagtttgtttccgtatgctcaggaaacaaacaacgcttttttttctattttattggttattacacgtcgacagaactatctgaaaccgccaaggtcagatcgaaaactttcgttacgcgacgttgtcagattaatcgaagtttaaaggttttccggtttttatttgttacctgtttcacagtaaaattgataacaattctataacgcttttgcatttttattataatcgaaatattagacgtgataagttacagtgtatattggtgaaattccttttgtcaattatttcagttaaatacaaataaggagtcttaactgtttattaatgactgtgtgacaggtacttcttttaggacaacagactcagtaaaacaggttaaaataaaataaatgtattgaggatatttatatagttcaatattaaaaataacaaaataaaatataattctatcttctaccagttgcggataaagctccctaaccggacgtctgcaaaagaaaaataaaattgtatttattacagtcatcaaaaacataataacaatattagaataatacaatacataacacagtatatacaatagcaatcacgctacacggaatcaatctatctacctacataattacacacacagactcgtagtccattacacttcagtccaatgtaaccacaatcaaatatcgacgcagagttacccatcatttaccgctcactacggtcacggttccggcaaagcatcttttcagtccaaagaatctttgccacggcagagttccaactcactccattgcataactgccgtttgagttctttcccggttcagtacaccgtgtggaactgatttcatgatcctcaattctcttaagtacactctcggtaaccatcactccttggcttcatcggagaggtggcacgtagtggggctgcgctggtatggaaacgcgttcggttctctgttgactagctgtcgaacgccgattggacagcacgtcgttacaacctcaaccaacaaacgtctattaatgcagaaagctaaatttcgtgcatctgtttttcttagtccattattactagttttactccatttttctttgaagtatgactttaacaaataagtctcatcattgaaaacaataaatttatttttttccatgcttttctaatgttttgagctactgcaatcttaaatgtcgtaatgtcgtgtttcccaataaatatttttctatcgattgatgtctttctccaacgaaccccaagttggtgaaattcatgtctcatactttctctgctacctttagagttcaataattctacaaatttcagacgaatctttttaagagtgggaacctgttgccagtaaggtgaaaattgttggtatatctcttttcgtaatataccttggtcagatccatctaatttaattttggacgatttttcgtgtgtcgtttgttgggtctgtgaaatctagaggtttgtacattctgaatatcacgaccttctttggcgatttttttacactggataaactgtcacatgtaaacatgtatccatttaataattgttaacatgttatacaacaaaaaatccttgtatattttggtggtagtcactgtaattcaataaatagtgtatttaatttcacgagattttacacatagtgttctatttttcacggcaattgtattattcatgtttatttaaaaaatattaaatgtagtctaaacaaacaactattcgacaattttatctggcaatgtcgcaaaaccacggatttcgtgcttacatgcattttaagtggatgtttactctttgcaccaacgcgttcaattgaagtcccctctccttgatttgctacctgaccttcgagtgacctttgcggtttcatatattactgtatacctgtatatagctggcgttttatgcgtataagcacgcggagccaattttttaatacgcaacggaatatggcatcctctacattcaaatttttgttgcatcatttgcacccagatgaacttgtactagcatttatagcgtttttatttttgatggtttttatcataattcgatttgttcgatattgcgactagtatagagcgtttcggagtgcagatttcgtactgagaagaaggaattatgcttaatatgtagagagattagtgaattatatttaattattttgtatctatatt

SEQ ID NO: 3137 - DNA, 4611 bp, Diabrotica virgifera
  SmartBlast Evalue=0; Info="Sec24B protein, putative n=1 Tax= Aedes aegypti RepID=Q17BF4_AEDAE"
ggcagagtgaagtgtaaaagtgatgtcctttatttatttacctttttaagaagatttttagttaaatttgaattggtaatttaaaatgaacccacaatatctgcctccacaacagtttggaggtccaccacagggttttcctcccactagcagagtatccccaaatacaacatttcaaagtgctcctgttggtcctccaaaacctggtcaacttcctcctcaaagtgatcatcatgcagctccaacaggtccactgaattccatgggacatcctacgaatagtctgcaaggtcaatttccaccaaatttaagcggccaacaacccagaccaccaattccatccagtcagttgccaccatcagtgggacatgacatgagtaactcatttggaccttcaccaacaaaaaatgatagtattcctccaagtaatctacaaaatgggcctcctcagtttcagaacggacctccacaattccagaatggacagtcagttcctccgacaagtcaaccaaacagaccaccctctaatttcatgcctccaaatcagaaccagtttgcaccttcccaaacatcaaatcaaaacatgcctcccagaccttcatctaatcagtcaaatagtatgggacaacctcctctgccaagtggccctccctctcaatttggacaaccaccattgtcaacagcaccaccatcagtttcaaatgcttcaccattgatgtcaactggacctccaacattatcaaatgtgcctccaacgttatctagtgggcctccaacaagtggttctcctcaaacaggccatttaggtgctccaccaaatcaatctcccttgtctggaggagttccacctcaaatgggacctaatcaacaattaggacagccaccatcggcagctggtccaccaagccaccttggacagacttctttgactaaccccccaccccatccaggtcaaccgaatctcccctggcgcccacctcaatctgtaggtcaacctggtggccctcctggatatcctccattgccaggacatcaaggacaacccacatcacagttcgacacacaaggtccaatgtcacaaaatggacctccaaacatgtatggaaatccaccaaatcaatttaataatcagatgggtcctccaaaagtgggacaatttcctcaacaacaaaggccaatgcaacctcccctacctggacagccgcctatgccgggacaaggtcctttaatcagtgctccaggtccatacggaccttcttcaggaccagcacaccaaatgccacctcatcaaggacaaccacctcatcaaggacaatcaccatatggacctggccaaataactagtcagttgcagcaaatgaatttatctggtccaaagccggcttatccagtaccaccaggcggtcccatgagaccgatgaacggagacagcggtccgcatatgcctccagcaatgaaccaaccgggatatatgaataatcaacagggcagagttcctcctggacctggttatccaccgatgccggggcaagcaccgatgcaaggacaaggacacatgcctggtcaagggcaatacccaggacctggtggggggtatccgcaaggcaactaccaacaagctgcgccggcgcaacacaagattgatcctgatcatgtgccgaatccaattcaagttatccgagatgatcagcaagacagggacagcgtttttgttactaatcaaaaaggacttgtaccgcctatggtaactaccaattttattgttcaagatcaaggaaattgcagtccacgattcatgagatctaccatatataatgttccaatttcacaggatttgttaaaacaatctgcacttccattcagtcttttaataagtccaatggccaggcaagtagagcaagaataccctccaccaatcgttaatttcggaagcctcggtcctgtcagatgcatccgttgcaaggcctacatgtgtccgttcatgcagttcgtcgattctggaaggaggttccagtgtctgttttgtaacgcaactactgatgttccaacagaatatttccagcatctagatcagaccggcctaagaatggaccgctttgaacgaccagaattgatccttggtacctacgaattcgtcgctacccccgattactgccgaaacaacgttctgcccaaaccgccagccgtcattttcgttatcgacgtttcatataacaacattaaatccggaatggtttccttgttgtgcaatcagatgaaagagatcattcaaaatcttccggtggaccaaggccacgaaaagagcaacatgaaagttggatttattacgtataatagttcggtgcatttttataatatcaagggaagtttgacagctccacaaatgttggtggtaggagatgtccaagaaatgttcatgcctttgttggatggtttcttatgtactccagaagaatcgggacccgtaatagatctactcatgcaacagattcccgcaatgtttgcagatactaaggaaaccgaagtcgttttgcttcccgcaattcaagctggattagaagccctaaaggcttccgaaagtacaggcaaacttctagtattccactccactttaccaatagcagaggctccaggtaaattgaagaaccgcgacgatagaaaagtcttaggaaccgataaagaaaaaactgtcttgacaccacaaacacaagcatacaaccaattgggccaggaatgcgtcagcaacggttgctccgttgatatgtatatcttcaataacgcttacatcgatatagcgactattggtcaagtgtctagattgacgggaggagaagtgtttaagtatacttatttccaggctgatattgatggagaacgtttcataacagacgttatcttaaatattagtcgaccaatagcgtttgatgctgtaatgagggttagaacgtcaacaggagtgaggcccactgacttttatggtcatttctacatgtcaaatactacggatatcgaactagcggcagtagattgcgataaagccatagcagtcgaaataaaacacgacgacaaactgaatgaagacacgggggtattcattcaaacggcgctgttatacacatcgtgctcaggacagcgacggttgcgaattatgaatctttcactgaagacttgctcacaaatggccgatctctttagaagttgtgatttagatactttaatcaattacatgagtaaacaggctacgtataaattattggacggcagccccagcgttgtaaaggagggacttgtccatagagccgctcagatcttagcaatatacaggaagcactgcgcaagtccaagtagcgcgggtcaactaattcttcccgaatgcatgaagctgctaccgatctacaccaattgtcttctcaagaacgacgctatctcaggaggttcggatatgaccatcgacgacaaatcgttcgtcatgcaggtggtcttgagcatggaccttaacttctcggtgtactatttctatcctaggttaattccactacacgatatcgatcccaaccaggatcctatcacagttccgaatcctatgaggtgtagttatgataaaatgaatgaacagggagtgtatatattagaaaatggtatccatatgttcttatggtttggtctcggcgtgaatcccaactttattcagcaactctttggtgcgccttcagcaatacaagttgatatcgataggagtagtttgccggaattagataacccattgtcggtagcagttaggacaataatcgacgaaatcaggatacagaaacataggtgtatgaggttaaccctggttagacaaagagaaaaactagaaccagtcttcaagcatttcttagtagaggaccgcggcacagacggttcagccagctatgtcgacttcctatgtcatatgcacagagaaatcagaaacatcctcagctagcacagaaggtgatccaaaggcagacggaagataagatgatagaaaatcttgaaatttgtactctgatcctcgataacatatttcctcttgtataaagtattattaagatctatttttgtatagcgcatgcgtttgtaaagggtgccagacggtgttcttttggatttctagatattctattatattatgcattattttggggtctagcttgtcggtgcttttacatattaaagaaaatcagtttgtttccgtatgctcaggaaacaaacaacgcttttttttctattttattggttattacacgtcgacagaactatctgaaaccgccaaggtcagatcgaaaactttcgttacgcgacgttgtcagattaatcgaagtttaaaggttttccggtttttatttgttacctgtttcacagtaaaattgataacaattctataacgcttttacatttttattataatctaagtaacagtgtatattggttaaattccttttgtcaattatttcagttaaatacaaataaggagtcttaattgtttattaatgactgtgtgacaggtacttcttttaggacaacagactcagtaaaacaggttaaaataaaataaatgtattgaggatatttatatagttcaatatt

SEQ ID NO: 3138 - DNA, 4840 bp, Diabrotica virgifera
  SmartBlast Evalue=3E-85; Info=Endonuclease-reverse transcriptase n=1 Tax=Bombyx mori RepID=D5LB38_BOMMO
tgtatagaacgtttttttgcttagaatgaatggttttaacaacttttgcggtcaaaatataataaaaaatttccatccccccagatggggtggcaaccaccccatggtaaaagcgcctttcgacatcatatagattttgatccttggaatatccactactcattctcaaatttttaagcaaattgatccattctgtaaaaattgcgaggttttgtcctactttaagcttcattacttagactaaatatgtatatagacagattttttttgttcttatatcgatcacacacagagcatggtataagtgaagtccctcactttagatcaaaaatcattacattaactttacatctttacatttacaatgtaaattgccatgtttttggtgagtttttgagccatattttcttaaatgttaatttctttgatcaatgtaaataatatgggaagtttttaagcaatgaaccaacaatgatagatataatcgttcttttctttaatttattagtatctacttcactggttgtcaaaaaaattgatagatacgtgtagagatttttacagcagatagggaatattgttcaaatttatctatcaattttaaaattgatttaagcaatcaatttcctctgacgtataatgttttaattatacagagatattttactttgtaagataaataccttttttaaaaatttattaaattgcaatatctgcaggcggaatttttctgaattccttatgttagatttttttttcacactagcgatttttagcatttgatccatgcctttatgtagaattagttgttaaaaaatggtataaattgtccattgtttataattgttactattaccacattaaataaaataaaaattagtattctgcgggtttataggccatgatctgaaattatctcttcaggatatttcgtctgccgcttgagtctttgacgtttgagcttaactaaaatgtgagcaagaaacaattcagtttataagccttgaaaataatgtatcattacaaaacgtcggtcatgaaagtccgcaccttcttcttcttcatgtaccatgtcctttcagaacgatggttaccatcatagctatcttaattttattcactgccaccctaaatagcatacctgtatcaataccataccaatctcgcgagttcttcaaccatgaagtcttccttcgtcctggactacttttgaatgctattttcccctgcatgatatgttgtctttttctataagtgtcatctatattacaaagattggcaatcatcatggttattctgaccttcgaggcagctgctacgaacaactggcttgagctgcaaccaaacgtgtttgttttaagcgttgtctatcatcatattaacaaactgatgaaatgtttctctgatgaaaaagatattagaataataactaatttgtattggaatcaaacagcacgagtcaaggtagatgatgaaatgactgaggagatcaaaatatgtagaggagtaagacaggggtgtattctgtctcctcttttgtttaatttttatagcgaagtcatatttaaagaagctctgtcggacgttagttgtggtgtagtgatcaacggaaatacaatcaataatttgagatacgctgacgacacagtgatattagcagacaatcttacagatctgcaacgactgatggaacgcactaaccactactgcaacagctacggacttacattaaacctcagaaaaactaaatggatggtaataacaaaagatccacacgccaggaatgatttggttgtcaataacacggttatagaaagggtatcctcctataaataccttggagcttgcctggatcatacaggcgatcaaacaaaagaaataagagcaagaatagaaatagctagatcagcatttaacaagatgaaaatatttctctgtagtcgtgacataaatcttgatctgagagtgcgtatgctgcggtgttatatcttctccactttattatacggagttgagtcatggaccatcaagatgggcagcattaaaaacattgaagcttttgagatgtggtgttaccgtagaatgctacgtgtatcttgggtggaccacgtgacgaatgccgaaattttacgtcggatcggaaaaggatgtgaagttgtacttactgttaaaagaagaaagcttgaatactttggccatgttatgagaggtgacaaatactcgctgctgagactgatcattcagggtaaaatcaggggtaagagaagtatcggtaggcgcagaatatcttggttaagaaatctgagggaatggttcggctgcagttccatcgacctatttagggcagccgccagtaaaataagaatagctgtgatgatttccaacctccgataggagacggacttgaagaagaagaagaagaaatgtttctcattcgacagctagatgaaactattcttcgacctgtccagtatctaattattgttacgcagctaggacagagtcttcaaacccaccgttttccttcgattttgccctgaattatcaactggagtaagcgatatttaggtcctctcatggcatatatgtaagtatattttagtacctttgtcattttggtgatattgatcaattctcgctctttgtgcatgggattttgagcatacgacggtaacaccacaactcaaaacccttcgaatatttatctttgttgtccaggtttctttaaaaatatgattgaaaaagactaacacattattttaaatatttgtttccaaatttttttaacactaacattaaaattttgatattttatgtgtctgcaaatatgtggtaattgaaacaattaaaaacaaataattaatttgctaggtagcagaacctaaaaaggcagcaaaaaacatctggtagggtttttataacttacagttttgaaattttttaattgaatacgtttatatgtgaacattataagacttttagatacactaaattttaaagtagtttttatggcaaaaatacaatatttgactttatgtaaaacttattcttggtaggagtttgctggcaagctgttaccaagaggtatatttttattctatgttcctttgagagatttttacctctttatctttactaaaaattctattttccgcaacgatttttttttaactgagtatttatgtcattatacttaaattatacaattttctctatatcttcctgtttacattttctttccatcaaaagattcacagtatcctttcttgaagtaactgagtcctttcctttagattagaacattcaaaaattgggcgaaaaatctttaaactcacaaatgtcttttcgaggtttttaaagtttttgcggcgctaataatattttttgagatcggtaggaacaacttgaattgatgcgtctgtaattcgtattcacaaaatatatgacaaatcctataaaataacatgagacgacgtatttttcatattcagagaagctagaaatttcttgaaacatgcgaaaaagccgttttcaagtatttttgaggattttattggattttctaatttctttgcctttatgttctattaaatagcacgtttcaaaatatgttcttagaaaacatgagattataatatgtattttccggccgtagagaaataggtataaatatgcaacctcatcttatgggaaaaccccagttttccaatgtttttggatttttgcatttttatcaactttaaacactaaaaaacttacctttgtgttagaggggaggggatggaggattaacattacgcctagtcttgttttttaatcacataaaacgcaaaaaaaaaattaataaaaaatgattcagcttgtattgatttatgattaaccgagcaaaaagttgtatgaacacttaaaatcattcaaaaataggttttttgcgggtcaaacatgtttcgccagtctataaaatgaggaaaatcagcaaaaacccctaagaaaacagttttttagtttttgaagttgccgcttcttaggaaaaatctgaaaataatcaaaaatatatgttttgataaaatacacaacataaaaaaattgaaatgaagccatctccaaaaagagttataactaagcattatttcgaaaaaaaaaatgcatttttctgctacgtatactcaacctacggatgtataaaaaaacagacaagttttgcaaaagcctcaattattatgcgtgtgaattttttgaaatttcttgaaattttttgaagttaattggggcgcacaagaaaaaaataaaacgaaaaaatgaggggtaggaagtaaaaaagagtgttattcttatttttaatcctatagaatatagaacgtaaaaaaaattaaaaatcgaattctgagagtgagtgtaatttgtttatcttaacagggggtacgctttgaaatattgacttgtataaagcaatttttatttaccatgtaaaagttttcttgaaagttaccaacgaaattttttggttaagttcctattattatatagtgtttagtgtatctaagatatctttactataattcgacgccatattatattccagcattctagtcaattgtaatttttccacacagttgcaatacactcacctgtttgtagacattgatgataactgtgtcttgagtgaatttttaaataaatgttttgtaaataaataaataagatagaaatgtatatgtgtaaatagttgatggtagatttgtgtatagagtagataagacataaacttaactgactgtgttatcgcactatatttgttttctcctggtgtacaaaaaataatttattgaaacaaataaaa

SEQ ID NO: 3139 - DNA, 4791 bp, Diabrotica virgifera
  SmartBlast Evalue=3E-85; Info=Endonuclease-reverse transcriptase n=1 Tax=Bombyx mori RepID=D5LB38_BOMMO
tgtatagaacgtttttttgcttagaatgaatggttttaacaacttttgcggtcaaaatataataaaaaatttccatccccccagatggggtggcaaccaccccatggtaaaagcgcctttcgacatcatatagattttgatccttggaatatccactactcattctcaaatttttaagcaaattgatccattctgtaaaaattgcgaggttttgtcctactttaagcttcattacttagactaaatatgtatatagacagattttttttgttcttatatcgatcacacacagagcatggtataagtgaagtccctcactttagatcaaaaatcattacattaactttacatctttacatttacaatgtaaattgccatgtttttggtgagtttttgagccatattttcttaaatgttaatttctttgatcaatgtaaataatatgggaagtttttaagcaatgaaccaacaatgatagatataatcgttcttttctttaatttattagtatctacttcactggttgtcaaaaaaattgatagatacgtgtagagatttttacagcagatagggaatattgttcaaatttatctatcaattttaaaattgatttaagcaatcaatttcctctgacgtataatgttttaattatacagagatattttactttgtaagataaataccttttttaaaaatttattaaattgcaatatctgcaggcggaatttttctgaattccttatgttagatttttttttcacactagcgatttttagcatttgatccatgcctttatgtagaattagttgttaaaaaatggtataaattgtccattgtttataattgttactattaccacattaaataaaataaaaattagtattctgcgggtttataggccatgatctgaaattatctcttcaggatatttcgtctgccgcttgagtctttgacgtttgagcttaactaaaatgtgagcaagaaacaattcagtttataagccttgaaaataatgtatcattacaaaacgtcggtcatgaaagtccgcaccttcttcttcttcatgtaccatgtcctttcagaacgatggttaccatcatagctatcttaattttattcactgccaccctaaatagcatacctgtatcaataccataccaatctcgcgagttcttcaaccatgaagtcttccttcgtcctggactacttttgaatgctattttcccctgcatgatatgttgtctttttctataagtgtcatctatattacaaagattggcaatcatcatggttattctgaccttcgaggcagctgctacgaacaactggcttgagctgcaaccaaacgtgtttgttttaagcgttgtctatcatcatattaacaaactgatgaaatgtttctctgatgaaaaagatattagaataataactaatttgtattggaatcaaacagcacgagtcaaggtagatgatgaaatgactgaggagatcaaaatatgtagaggagtaagacaggggtgtattctgtctcctcttttgtttaatttttatagcgaagtcatatttaaagaagctctgtcggacgttagttgtggtgtagtgatcaacggaaatacaatcaataatttgagatacgctgacgacacagtgatattagcagacaatcttacagatctgcaacgactgatggaacgcactaaccactactgcaacagctacggacttacattaaacctcagaaaaactaaatggatggtaataacaaaagatccacacgccaggaatgatttggttgtcaataacacggttatagaaagggtatcctcctataaataccttggagcttgcctggatcatacaggcgatcaaacaaaagaaataagagcaagaatagaaatagctagatcagcatttaacaagatgaaaatatttctctgtagtcgtgacataaatcttgatctgagagtgcgtatgctgcggtgttatatcttctccactttattatacggagttgagtcatggaccatcaagatgggcagcattaaaaacattgaagcttttgagatgtggtgttaccgtagaatgctacgtgtatcttgggtggaccacgtgacgaatgccgaaattttacgtcggatcggaaaaggatgtgaagttgtacttactgttaaaagaagaaagcttgaatactttggccatgttatgagaggtgacaaatactcgctgctgagactgatcattcagggtaaaatcaggggtaagagaagtatcggtaggcgcagaatatcttggttaagaaatctgagggaatggttcggctgcagttccatcgacctatttagggcagccgccagtaaaataagaatagctgtgatgatttccaacctccgataggagacggacttgaagaagaagaagaagaaatgtttctcattcgacagctagatgaaactattcttcgacctgtccagtatctaattattgttacgcagctaggacagagtcttcaaacccaccgttttccttcgattttgccctgaattatcaactggagtaagcgatatttaggtcctctcatggcatatatgtaagtatattttagtacctttgtcattttggtgatattgatcaattctcgctctttgtgcatgggattttgagcatacgacggtaacaccacaactcaaaacccttcgaatatttatctttgttgtccaggtttctttaaaaatatgattgaaaaagactaacacattattttaaatatttgtttccaaatttttttaacactaacattaaaattttgatattttatgtgtctgcaaatatgtggtaattgaaacaattaaaaacaaataattaatttgctaggtagcagaacctaaaaaggcagcaaaaaacatctggtagggtttttataacttacagttttgaaattttttaattgaatacgtttatatgtgaacattataagacttttagatacactaaattttaaagtagtttttatggcaaaaatacaatatttgactttatgtaaaacttattcttggtaggagtttgctggcaagctgttaccaagaggtatatttttattctatgttcctttgagagatttttacctctttatctttactaaaaattctattttccgcaacgatttttttttaactgagtatttatgtcattatacttaaattatacaattttctctatatcttcctgtttacattttctttccatcaaaagattcacagtatcctttcttgaagtaactgagtcctttcctttagattagaacattcaaaaattgggcgaaaaatctttaaactcacaaatgtcttttcgaggtttttaaagtttttgcggcgctaataatattttttgagatcggtaggaacaacttgaattgatgcgtctgtaattcgtattcacaaaatatatgacaaatcctataaaataacatgagacgacgtatttttcatattcagagaagctagaaatttcttgaaacatgcgaaaaagccgttttcaagtatttttgaggattttattggattttctaatttctttgcctttatgttctattaaatagcacgtttcaaaatatgttcttagaaaacatgagattataatatgtattttccggccgtagagaaataggtataaatatgcaacctcatcttatgggaaaaccccagttttccaatgtttttggatttttgcatttttatcaactttaaacactaaaaaacttacctttgtgttagaggggagggggtaaaaaaaaattaataaaaaatgattcagcttgtattgatttatgattaaccgagcaaaaagttgtatgaacacttaaaatcattcaaaaataggttttttgcgggtcaaacatgtttcgccagtctataaaatgaggaaaatcagcaaaaacccctaagaaaacagttttttagtttttgaagttgccgcttcttaggaaaaatctgaaaataatcaaaaatatatgttttgataaaatacacaacataaaaaaattgaaatgaagccatctccaaaaagagttataactaagcattatttcgaaaaaaaaaatgcatttttctgctacgtatactcaacctacggatgtataaaaaaacagacaagttttgcaaaagcctcaattattatgcgtgtgaattttttgaaatttcttgaaattttttgaagttaattggggcgcacaagaaaaaaataaaacgaaaaaatgaggggtaggaagtaaaaaagagtgttattcttatttttaatcctatagaatatagaacgtaaaaaaaattaaaaatcgaattctgagagtgagtgtaatttgtttatcttaacagggggtacgctttgaaatattgacttgtataaagcaatttttatttaccatgtaaaagttttcttgaaagttaccaacgaaattttttggttaagttcctattattatatagtgtttagtgtatctaagatatctttactataattcgacgccatattatattccagcattctagtcaattgtaatttttccacacagttgcaatacactcacctgtttgtagacattgatgataactgtgtcttgagtgaatttttaaataaatgttttgtaaataaataaataagatagaaatgtatatgtgtaaatagttgatggtagatttgtgtatagagtagataagacataaacttaactgactgtgttatcgcactatatttgttttctcctggtgtacaaaaaataatttattgaaacaaataaaa

SEQ ID NO: 3140 - DNA, 3584 bp, Diabrotica virgifera
  SmartBlast Evalue=2E-85; Info=Endonuclease-reverse transcriptase n=1 Tax=Bombyx mori RepID=D5LB38_BOMMO
tgtatagaacgtttttttgcttagaatgaatggttttaacaacttttgcggtcaaaatataataaaaaatttccatccccccagatggggtggcaaccaccccatggtaaaagcgcctttcgacatcatatagattttgatccttggaatatccactactcattctcaaatttttaagcaaattgatccattctgtaaaaattgcgaggttttgtcctactttaagcttcattacttagactaaatatgtatatagacagattttttttgttcttatatcgatcacacacagagcatggtataagtgaagtccctcactttagatcaaaaatcattacattaactttacatctttacatttacaatgtaaattgccatgtttttggtgagtttttgagccatattttcttaaatgttaatttctttgatcaatgtaaataatatgggaagtttttaagcaatgaaccaacaatgatagatataatcgttcttttctttaatttattagtatctacttcactggttgtcaaaaaaattgatagatacgtgtagagatttttacagcagatagggaatattgttcaaatttatctatcaattttaaaattgatttaagcaatcaatttcctctgacgtataatgttttaattatacagagatattttactttgtaagataaataccttttttaaaaatttattaaattgcaatatctgcaggcggaatttttctgaattccttatgttagatttttttttcacactagcgatttttagcatttgatccatgcctttatgtagaattagttgttaaaaaatggtataaattgtccattgtttataattgttactattaccacattaaataaaataaaaattagtattctgcgggtttataggccatgatctgaaattatctcttcaggatatttcgtctgccgcttgagtctttgacgtttgagcttaactaaaatgtgagcaagaaacaattcagtttataagccttgaaaataatgtatcattacaaaacgtcggtcatgaaagtccgcaccttcttcttcttcatgtaccatgtcctttcagaacgatggttaccatcatagctatcttaattttattcactgccaccctaaatagcatacctgtatcaataccataccaatctcgcgagttcttcaaccatgaagtcttccttcgtcctggactacttttgaatgctattttcccctgcatgatatgttgtctttttctataagtgtcatctatattacaaagattggcaatcatcatggttattctgaccttcgaggcagctgctacgaacaactggcttgagctgcaaccaaacgtgtttgttttaagcgttgtctatcatcatattaacaaactgatgaaatgtttctctgatgaaaaagatattagaataataactaatttgtattggaatcaaacagcacgagtcaaggtagatgatgaaatgactgaggagatcaaaatatgtagaggagtaagacaggggtgtattctgtctcctcttttgtttaatttttatagcgaagtcatatttaaagaagctctgtcggacgttagttgtggtgtagtgatcaacggaaatacaatcaataatttgagatacgctgacgacacagtgatattagcagacaatcttacagatctgcaacgactgatggaacgcactaaccactactgcaacagctacggacttacattaaacctcagaaaaactaaatggatggtaataacaaaagatccacacgccaggaatgatttggttgtcaataacacggttatagaaagggtatcctcctataaataccttggagcttgcctggatcatacaggcgatcaaacaaaagaaataagagcaagaatagaaatagctagatcagcatttaacaagatgaaaatatttctctgtagtcgtgacataaatcttgatctgagagtgcgtatgctgcggtgttatatcttctccactttattatacggagttgagtcatggaccatcaagatgggcagcattaaaaacattgaagcttttgagatgtggtgttaccgtagaatgctacgtgtatcttgggtggaccacgtgacgaatgccgaaattttacgtcggatcggaaaaggatgtgaagttgtacttactgttaaaagaagaaagcttgaatactttggccatgttatgagaggtgacaaatactcgctgctgagactgatcattcagggtaaaatcaggggtaagagaagtatcggtaggcgcagaatatcttggttaagaaatctgagggaatggttcggctgcagttccatcgacctatttagggcagccgccagtaaaataagaatagctgtgatgatttccaacctccgataggagacggacttgaagaagaagaagaagaaatgtttctcattcgacagctagatgaaactattcttcgacctgtccagtatctaattattgttacgcagctaggacagagtcttcaaacccaccgttttccttcgattttgccctgaattatcaactggagtaagcgatatttaggtcctctcatggcatatatgtaagtatattttagtacctttgtcattttggtgatattgatcaattctcgctctttgtgcatgggattttgagcatacgacggtaacaccacaactcaaaacccttcgaatatttatctttgttgtccaggtttctttaaaaatatgattgaaaaagactaacacattattttaaatatttgtttccaaatttttttaacactaacattaaaattttgatattttatgtgtctgcaaatatgtggtaattgaaacaattaaaaacaaataattaatttgctaggtagcagaacctaaaaaggcagcaaaaaacatctggtagggtttttataacttacagttttgaaattttttaattgaatacgtttatatgtgaacattataagacttttagatacactaaattttaaagtagtttttatggcaaaaatacaatatttgactttatgtaaaacttattcttggtaggagtttgctggcaagctgttaccaagaggtatatttttattctatgttcctttgagagatttttacctctttatctttactaaaaattctattttccgcaacgatttttttttaactgagtatttatgtcattatacttaaattatacaattttctctatatcttcctgtttacattttctttccatcaaaatattcacagtatcctttcttgaagtaactgagtcttttcctttagaacattcaaaaattgggcgaaaaatcttgaaactcacaaaaagccatgttatttcaaggtttttaaagtttttgcagcgctaataatattttttgagatcggtacaacttgaattgatgcgtctgtaattcgtattcaaaaaatatatgagaaatcatataaaataacatgacacgacgtattttcatattcagagaagctagaaatttcttgaaacatgcgaaaaagccgttttgaagtatttttggggattttattggattttctatttttgtgcctttatgttccatt

SEQ ID NO: 3141 - DNA, 4301 bp, Diabrotica virgifera
  SmartBlast Evalue=1E-153; Info=Probable multidrug resistance- associated protein lethal(2)03659 n=1 Tax=Harpegnathos saltator RepID=E2B3S7_9HYME
tatcaagtatttgggctcttaaaaaattgtcgataagtatgtgttatctaatacttaatattctcaagtttaatttttttttcgcttttattgcctaatcgattggattgataataattagacgcaaaagttaagattcagattaaaaagtttgaacaaagtggttactttgttctgctttgatttccttaatttaaatctttgagtaaggcaaaaagttaacatggaagaagccacaagaaacgaaaacaccaaagaaataaatccgttagatacatctaacgtattttccaaggtattattttggtggttgatacctcttttcaagaaaggatacaataaggaactgactgaagatgatatgtaccaacatcgtgaaagtcacgactcaggagatcttggggatcagtttgagaagatatggaataaacaattgaccaaaaggaagccttctgttattaaagccatagctaaacggttcataccagaatggataatgttgaattgcattatcattatttctgaaactatcagaatttcacagcctttcttgataactcaactaatttacgtctacgaatccaataaggtcaacgatgacaagagcgatgtctatatctacgcactattaataataataacctcattcataaccaacaacatggcacataacttcaacctactcaacagtcagatggctctgaagatgagagtttcggtttgctcgttgatctataggaaagcattgaggttgagtaagtccgctttggcggaaactactattggacaaatggttaatttactgtctaatgacgtggacagattcgataactccattttttacttccaatatacgtatgtggcacctatagagatgttggtggttatgtatttactttatcataatattggtactacagccttagccggagcagtgttgttattgtccatcattcctttacaattttggcttggtaaaaagacatcaaaattcaggctccaaactgcaaacagaactgatgagagagtaagactgatgaatgaaattataactggaatacaagttattaaaatgtatacttgggaatatccctttacgaaactggtcgaatttgtcagaatgaaagaaatgaagtacattcgatttacctcaatcatccgagcaatacttatgtcctgcgctttgctgttgaacagatgcgcagtgggtatatgcatccttgtctatgtgttaacgggtaataccctaactgccacttatgcctacgcaattacatcatactacagactcttgtatactgtgaccaattatttccctagcgcagtatctctatcagccgaattgtatgtttccatcaagagaatacaaacctttttgttatacgacgaagtaagtgctgagattgctccacctacagaaaccttttcggcaagcaaaggcagcaagttatggcttaccggagctagcaagacgtcccttaatacaggaagcaagcttactttgagtggtgagccaagacttcgaggtcctgacgcaagtataagcattcgaaacgcttcagccaaatggcttaaatcattaaatgaaaataatttggataacataaatttcgatgtcatagctggtaatgtagtagctgtaataggtactgtaggaagcgggaagactaccttacttcatgtaataatgaaggaactagagctgcaaagtggttccgtaaacgtcagaggaatagtatcttacgcctctcaagaaccttggctctttggaggcagcattagacagaacatccttttcggccaaaaattcgaccaaagaaagtacgatgatgtagttagagcttgcgcattgaaacgggattttaatcttcttcctcacggagatagaactttagcaggggaacgtggagtcactttaagtggaggacaaagggctagaatcaacttggcaagagctgtttacaaagatgctgatatatacttactagatgatcctttatctgctgtagatactcatgttggaaaacaacttttcgacgaatgtatatgtggttatctcagcagcaaatgcgtggtactagtcactcaccaactgcaatttttaaagaaagtcaaaaatatttaccttatgaacaacggtagaatcgaagtctctggtccttactctcttttgaagaactctaccaatgaatacagcaaactcctagcgaatatcgaagacgaggaagaagaagtcaggcgtagatctaggatgatttcgatgagcagtgaaagcgaaggcatggatgatgacttccaaattatgaacaaggagaaaataggtagtggtaccatttctaagcgagtttatattaacttcgctaaagcaggtggtaacatgctcaaagttgttgcattaatattcgcctttctctttagccagcttctggatagctctgctgagtattttgtgtctatttgggtaaacgttcagcagagaatgtcacacatatccaacttttcacaaacacttgatacatccaacttttcgcaaatacttgacacatcaaatacaactaatatcaccactaccactattttaccgttaaatcttaccgccaatattttaccgttaaattttaccaccagtattttaccgttaaattttaccaccactattttaccgttaaattttaccaccactattttaccgttaaataacactgctacgacgctgaatctcaccaatgatgatccatacgcagactggtggctaactccaatatttactgacaacaccgtgttctactacagtattcttattctagtcattattgtattgtgtttgatacgttctttagccttctatagctggagtttaacggcttcgacgaggctgcacaacaaaatgtttgctaacgtagtatacagtccgatgaggttcttcaatgtcaacccttcaggaagaattcttaataggttttccaaagatataggatccatagatgaagcgttgcctagaacattgttggatacagtacaaattggtctgatggcaattgcaaatagtttcgttataggaacactgacagtttggatcctcattcctacaatattaactgcaatattgttttattttctacgaaaggtttacgttagtacaagtagaaatgtgaagagggtggaatcagttactagaagtccagtatttacgcatctctctcaatctctacaaggactaacaaccatcagagcatttagagctcaagaaatactcaaaaacgaattcgacaactaccaaaatttaaacagtgctgcatatttcctctatttctcctgcgccaggacttttggatattggctggacttcttttgtctgatatactttacgttggtcctagcgtcgctaatatttattgaaggggaacaatatggaggaaatatgggtttggccctaactcaagctatggccataactggaatattacaatatggcatgcgtcaatggagtgagttcgaaaaccaaatgacgtcagtcgaaagagtgcaggagtacgcagatttggtacaagaggaagacagccattctagtgaacctgctaaaacatggccccgagagggaagggttgaattcaacaatatgtctttaaaatacgccccagaagatccagcagtactcaaaggattaaactttgttatacaacccagggagaaaattggtatcgtgggaagaactggagcggggaaatcgtctctaatccaagcactgttccgactggctcatattgacggaagtattttaattgatggagttgatacaaaaaagatcagtctaaggtcgctcaggtcaaagatttctataatacctcaagaaccagttctgttttcgggaacgcttagaaagaatttggatccatttgacgaatatagcgatgaggtcctctggaatgctttggaagaagtagaactaaaacatgcagttgatgagttacctgcagctttagacagtaaaatggcagaaggaggttcaaacttcagtgtcggtcaacgacagttggtctgtctagcaagagctatagtaagaaacaacaaaattctcgttttagatgaagctacagcaaacgtagatccgcatactgatggtctaatccaaaaaacaattagacaaaagtttgctaactgcacagtactaactattgctcataggctgcatactattatggattgtgataaagttttggtgatggatgctggtaaaaaatgtcgaattcgaccaccctcacgatcttctccaaaatacaaaaggaatattttactcgctg

SEQ ID NO: 3142 - DNA, 4274 bp, Diabrotica virgifera
  SmartBlast Evalue=1E-153; Info=Probable multidrug resistance- associated protein lethal(2)03659 n=1 Tax=Harpegnathos saltator RepID=E2B3S7_9HYME
tatcaagtatttgggctcttaaaaaattgtcgataagtatgtgttatctaatacttaatattctcaagtttaatttttttttcgcttttattgcctaatcgattggattgataataattagacgcaaaagttaagattcagattaaaaagtttgaacaaagtggttactttgttctgctttgatttccttaatttaaatctttgagtaaggcaaaaagttaacatggaagaagccacaagaaacgaaaacaccaaagaaataaatccgttagatacatctaacgtattttccaaggtattattttggtggttgatacctcttttcaagaaaggatacaataaggaactgactgaagatgatatgtaccaacatcgtgaaagtcacgactcaggagatcttggggatcagtttgagaagatatggaataaacaattgaccaaaaggaagccttctgttattaaagccatagctaaacggttcataccagaatggataatgttgaattgcattatcattatttctgaaactatcagaatttcacagcctttcttgataactcaactaatttacgtctacgaatccaataaggtcaacgatgacaagagcgatgtctatatctacgcactattaataataataacctcattcataaccaacaacatggcacataacttcaacctactcaacagtcagatggctctgaagatgagagtttcggtttgctcgttgatctataggaaagcattgaggttgagtaagtccgctttggcggaaactactattggacaaatggttaatttactgtctaatgacgtggacagattcgataactccattttttacttccaatatacgtatgtggcacctatagagatgttggtggttatgtatttactttatcataatattggtactacagccttagccggagcagtgttgttattgtccatcattcctttacaattttggcttggtaaaaagacatcaaaattcaggctccaaactgcaaacagaactgatgagagagtaagactgatgaatgaaattataactggaatacaagttattaaaatgtatacttgggaatatccctttacgaaactggtcgaatttgtcagaatgaaagaaatgaagtacattcgatttacctcaatcatccgagcaatacttatgtcctgcgctttgctgttgaacagatgcgcagtgggtatatgcatccttgtctatgtgttaacgggtaataccctaactgccacttatgcctacgcaattacatcatactacagactcttgtatactgtgaccaattatttccctagcgcagtatctctatcagccgaattgtatgtttccatcaagagaatacaaacctttttgttatacgacgaagtaagtgctgagattgctccacctacagaaaccttttcggcaagcaaaggcagcaagttatggcttaccggagctagcaagacgtcccttaatacaggaagcaagcttactttgagtggtgagccaagacttcgaggtcctgacgcaagtataagcattcgaaacgcttcagccaaatggcttaaatcattaaatgaaaataatttggataacataaatttcgatgtcatagctggtaatgtagtagctgtaataggtactgtaggaagcgggaagactaccttacttcatgtaataatgaaggaactagagctgcaaagtggttccgtaaacgtcagaggaatagtatcttacgcctctcaagaaccttggctctttggaggcagcattagacagaacatccttttcggccaaaaattcgaccaaagaaagtacgatgatgtagttagagcttgcgcattgaaacgggattttaatcttcttcctcacggagatagaactttagcaggggaacgtggagtcactttaagtggaggacaaagggctagaatcaacttggcaagagctgtttacaaagatgctgatatatacttactagatgatcctttatctgctgtagatactcatgttggaaaacaacttttcgacgaatgtatatgtggttatctcagcagcaaatgcgtggtactagtcactcaccaactgcaatttttaaagaaagtcaaaaatatttaccttatgaacaacggtagaatcgaagtctctggtccttactctcttttgaagaactctaccaatgaatacagcaaactcctagcgaatatcgaagacgaggaagaagaagtcaggcgtagatctaggatgatttcgatgagcagtgaaagcgaaggcatggatgatgacttccaaattatgaacaaggagaaaataggtagtggtaccatttctaagcgagtttatattaacttcgctaaagcaggtggtaacatgctcaaagttgttgcattaatattcgcctttctctttagccagcttctggatagctctgctgagtattttgtgtctatttgggtaaacgttcagcagagaatgtcacacatatccaacttttcacaaacacttgatacatccaacttttcgcaaatacttgacacatcaaatacaactaatatcaccactaccactattttaccgttaaatcttaccgccaatattttaccgttaaattttaccaccagtattttaccgttaaattttaccaccactattttaccgttaaataacactgctacgacgctgaatctcaccaatgatgatccatacgcagactggtggctaactccaatatttactgacaacaccgtgttctactacagtattcttattctagtcattattgtattgtgtttgatacgttctttagccttctatagctggagtttaacggcttcgacgaggctgcacaacaaaatgtttgctaacgtagtatacagtccgatgaggttcttcaatgtcaacccttcaggaagaattcttaataggttttccaaagatataggatccatagatgaagcgttgcctagaacattgttggatacagtacaaattggtctgatggcaattgcaaatagtttcgttataggaacactgacagtttggatcctcattcctacaatattaactgcaatattgttttattttctacgaaaggtttacgttagtacaagtagaaatgtgaagagggtggaatcagttactagaagtccagtatttacgcatctctctcaatctctacaaggactaacaaccatcagagcatttagagctcaagaaatactcaaaaacgaattcgacaactaccaaaatttaaacagtgctgcatatttcctctatttctcctgcgccaggacttttggatattggctggacttcttttgtctgatatactttacgttggtcctagcgtcgctaatatttattgaaggggaacaatatggaggaaatatgggtttggccctaactcaagctatggccataactggaatattacaatatggcatgcgtcaatggagtgagttcgaaaaccaaatgacgtcagtcgaaagagtgcaggagtacgcagatttggtacaagaggaagacagccattctagtgaacctgctaaaacatggccccgagagggaagggttgaattcaacaatatgtctttaaaatacgccccagaagatccagcagtactcaaaggattaaactttgttatacaacccagggagaaaattggtatcgtgggaagaactggagcggggaaatcgtctctaatccaagcactgttccgactggctcatattgacggaagtattttaattgatggagttgatacaaaaaagatcagtctaaggtcgctcaggtcaaagatttctataatacctcaagaaccagttctgttttcgggaacgcttagaaagaatttggatccatttgacgaatatagcgatgaggtcctctggaatgctttggaagaagtagaactaaaacatgcagttgatgagttacctgcagctttagacagtaaaatggcagaaggaggttcaaacttcagtgtcggtcaacgacagttggtctgtctagcaagagctatagtaagaaacaacaaaattctcgttttagatgaagctacagcaaacgtagatccgcatactgatggtctaatccaaaaaacaattagacaaaagtttgctaactgcacagtactaactattgctcataggctgcatactattatggattgtgataaagttttggtgatggatgctggtaaaaaatgtcgaattcgaccaccctcacgatcttctccaaaatacaaaaggaatattttactcgctg

SEQ ID NO: 3143 - DNA, 2770 bp, Diabrotica virgifera
  SmartBlast Evalue=1E-152; Info=ATP-dependent bile acid permease (Fragment) n=1 Tax=Aedes aegypti RepID=Q16IR9_AEDAE
tatcaagtatttgggctcttaaaaaattgtcgataagtatgtgttatctaatacttaatattctcaagtttaatttttttttcgcttttattgcctaatcgattggattgataataattagacgcaaaagttaagattcagattaaaaagtttgaacaaagtggttactttgttctgctttgatttccttaatttaaatctttgagtaaggcaaaaagttaacatggaagaagccacaagaaacgaaaacaccaaagaaataaatccgttagatacatctaacgtattttccaaggtattattttggtggttgatacctcttttcaagaaaggatacaataaggaactgactgaagatgatatgtaccaacatcgtgaaagtcacgactcaggagatcttggggatcagtttgagaagatatggaataaacaattgaccaaaaggaagccttctgttattaaagccatagctaaacggttcataccagaatggataatgttgaattgcattatcattatttctgaaactatcagaatttcacagcctttcttgataactcaactaatttacgtctacgaatccaataaggtcaacgatgacaagagcgatgtctatatctacgcactattaataataataacctcattcataaccaacaacatggcacataacttcaacctactcaacagtcagatggctctgaagatgagagtttcggtttgctcgttgatctataggaaagcattgaggttgagtaagtccgctttggcggaaactactattggacaaatggttaatttactgtctaatgacgtggacagattcgataactccattttttacttccaatatacgtatgtggcacctatagagatgttggtggttatgtatttactttatcataatattggtactacagccttagccggagcagtgttgttattgtccatcattcctttacaattttggcttggtaaaaagacatcaaaattcaggctccaaactgcaaacagaactgatgagagagtaagactgatgaatgaaattataactggaatacaagttattaaaatgtatacttgggaatatccctttacgaaactggtcgaatttgtcagaatgaaagaaatgaagtacattcgatttacctcaatcatccgagcaatacttatgtcctgcgctttgctgttgaacagatgcgcagtgggtatatgcatccttgtctatgtgttaacgggtaataccctaactgccacttatgcctacgcaattacatcatactacagactcttgtatactgtgaccaattatttccctagcgcagtatctctatcagccgaattgtatgtttccatcaagagaatacaaacctttttgttatacgacgaagtaagtgctgagattgctccacctacagaaaccttttcggcaagcaaaggcagcaagttatggcttaccggagctagcaagacgtcccttaatacaggaagcaagcttactttgagtggtgagccaagacttcgaggtcctgacgcaagtataagcattcgaaacgcttcagccaaatggcttaaatcattaaatgaaaataatttggataacataaatttcgatgtcatagctggtaatgtagtagctgtaataggtactgtaggaagcgggaagactaccttacttcatgtaataatgaaggaactagagctgcaaagtggttccgtaaacgtcagaggaatagtatcttacgcctctcaagaaccttggctctttggaggcagcattagacagaacatccttttcggccaaaaattcgaccaaagaaagtacgatgatgtagttagagcttgcgcattgaaacgggattttaatcttcttcctcacggagatagaactttagcaggggaacgtggagtcactttaagtggaggacaaagggctagaatcaacttggcaagagctgtttacaaagatgctgatatatacttactagatgatcctttatctgctgtagatactcatgttggaaaacaacttttcgacgaatgtatatgtggttatctcagcagcaaatgcgtggtactagtcactcaccaactgcaatttttaaagaaagtcaaaaatatttaccttatgaacaacggtagaatcgaagtctctggtccttactctcttttgaagaactctaccaatgaatacagcaaactcctagcgaatatcgaagacgaggaagaagaagtcaggcgtagatctaggatgatttcgatgagcagtgaaagcgaaggcatggatgatgacttccaaattatgaacaaggagaaaataggtagtggtaccatttctaagcgagtttatattaacttcgctaaagcaggtggtaacatgctcaaagttgttgcattaatattcgcctttctctttagccagcttctggatagctctgctgagtattttgtgtctatttgggtaaacgttcagcagagaatgtcacacatatccaacttttcgcaaatacttgacacatccaactttccacaaacaattgatacatccaacttttcgcaaatacttgacacatcaaatgcaactaatatcaccacgaccactattttaccgttaaatcttaccgccaatattttaccgttaaattttaccaccactattttaccgttaaataacactgctacgacgctgaatctcaccaatgatgatccatacgcagactggtggttaactccaatatttactgacaacactgtgttctactacagtatt

SEQ ID NO: 3144 - DNA, 4237 bp, Diabrotica virgifera
  SmartBlast Evalue=0; Info=Moesin/ezrin/radixin homolog 1 n=2 Tax=Culicini RepID=MOEH_AEDAE
atcttgacaatttgtcacgataagttgtctcgtgtgtgtaaagggtgtgtgcccgaaaaatatcgcgtgtgaaacttcatgcggtggactaaagtgtataaactctttaattgaaaaatttccgataggattgtttgacagcacaaacaaacaagatgcctaaacaaatgaacgtacgggtgaccaccatggacgcggagctggaattcgcgatccaccaaacgacgaccggaaaacaacttttcgaccaagttatcaaaaccgtcggcctaagagaagtgtggttcttcggattacaatataccgattctaaaggcgatcttacctgggttaagctgtataagaaggtgctgagtcaagatttgaaaaaagaaaacccattccagttcaaattccgtgccaaattctaccccgaagacgtcgccgaagaactcatccaagatatcactttacgcttattctacttgcaagtgaagaactccattctctccgatgaaatctactgcccgcccgaaacttccgtccttctggcttcgtacgccgtacaagccaggcatggagattatgataaatcaactcacacgccaggattcctagccaacgataggttgttacctcaaagggtaatggatcaacataaaatgtcaaaagatgaatgggagaatagcatcatgacctggtggaaggaacatagaggtatgttaagggaagatgccatgatggagtacttgaagatagctcaagatctagaaatgtacggagttaactatttcgaaatacgtaacaaaaagcagacagaattgtacttaggtgtcgatgcgcttggacttaacatttacgaaaaagatgaccaacttacacctaaaatcggtttcccgtggtcggaaatccgcaacatctctttcaacgatcggaagttcatcatcaaacccatcgacaagaaagcacccgatttcgttttctttgctccacgcgtgcgcatcaacaagagaattctcgctctttgtatgggcaaccacgaactgtacatgcgcagacgtaaacctgataccatcgacgtgcaacaaatgaaagcgcaagcgcgtgaagaaaagatggcaaaacaacagcagaaagaaaagctccagtctgaaatagcggcaagagaaagggccgaaaagaaacagcaagagtatgaagatagaatcaaagccatgcaagaagagatggaaagaagtcaagctaactatatggaagctcaagagatgattagacgattggaggaacaattgaaacaattgcaggctgccaaagaagagatggaaaagagacagaacgagttacagtccatgatggagcgtttggaagagagcaagaacatggaagccgccgagaggcaaaaattggaagaggagatcagggccaaacaagaggaggttctacgtatccaacaagaagtcgaggctaaggacagcgagaccaaacgtcttcaggaagaggtcgaaaatgctcgtcgcaaggaggaagaacttaaacaactgcaactcgcccaagctgccaaaggtcatttggaagaaaatgaccataatgaagatgatgaaatggtcaatggtgatgttagcaaggatcttagcactgacgaaaacatcgtcgatccaatcgaagatagacgtacgcttgctgaaagaaacgaacgtcttcaagatcaattattggctttgaagaaagacctcgctcaatctcgcgacgaaaccaaggaaactgccatggacaaaatccacagagagaatgttcgtcaaggaagagacaaatacaagactcttcgtgaaatccgcaagggcaacaccaagcgcagagtcgaccaattcgaaaatatgtaaattgtttttaaccttcatatcaaacaatctaggagtcctacctattatttcgagttaaaaaaaaccaatattactaaagaacctttcaatgctcaacgcgagatgatcattttttcaaaatacttttaaaaaatatttttaagtttttcggttcagttattacttaacacgttaagtattattcttatattttctttttgatatgtattagagccctattggctcagttaagtggccttagaagttaactactttttgctttgttagattattttgctttttatatatatttaactaatgttatacgaaaattgttttccattgtttttgtgataactaacaacaattttgggtcaatttgaaaatcggatcctcacattaaacacggatccgagctgaactgataaaaaaatatataacactccagatctgcaattagtccagataccgagtaaggtacactgaagatttgtagcagtttttcaaaatcttgcaactaacttctacaatttttcatcgaccttctttttcttttctatctctggactaataatttttattcaaaattttcttattcaaggacgcattccaatattgagtagttttctgtttttaatgttagtgtgccattcggtgatcaaaaaatcaaaaccttgtttaacatactttaaaaaatcttccttgtcttcacagatttaaacaaattattaaatatcttttacatcaacatgtttgagtcattaccttccaatattaaacttttgaagaaaatattttaaaaaacaataacaaaacatttaccttccaatattaaacttttgaagagaatacttaaaaaaataacaaaataataagtggcgcggcataatatgctatcctgtataatacagcaatatgtgattgtgaattaaaaatatttatttgcgcctgcgcattagactttttaaatttccaatttatggatgtcaaaagtcaatgtgaatttcaaacatgtcaactgccaaatggaggttaatttcataaaaagatctgcacgagatacgctctaactacacaaaatacagattttaataatttgttgtaagtctttttaaaactgtacacttttaaaatttatttttctattatctagaactatcaacgagttttaatcgcaatatgcaatgatgagatactatatttttacactgttccttcttggcctggtgcttcctaaaataattgagcagcagttaacaatattttaggtatttttgtattctatacaattccaaaattataagaatttttgattttctgcaaatctaaactgattaatccaaatttatttgatataaagtgaaattatttaaaacgtttgttgaattttaagactttttaatctttcactcgtttgtaaagtacaataagtgtttcataaaaaatattgtttaagaaagagggcgagaaaacattttgaataacaaaaaagtagtagttgcagtagcttacttgatttatatgtcagcatccatggtcaaaccaaaatgggggcttgaacaatctattaaacaagaatgtgctacatccaacgccattggcgtgggagcagaagcacagaactgttccaaggtacgactcaccccctattcactctagcacttttttacgatcattcgaccaatttgatatcggaaagtatcctgtcggtataaatatccacagacaatattttttaggaaacacttgacttacatctgttgctcaatacctacttatccgtgtaaataccagttttccaaacatgtaatttgtttttatatgaacaaagttgcaaatcaataataattgtcgaaaagaatcaattcttcgcggtcgttttatttgcaactttgctagtttgtgtatataagtgtataccacgttgcctttttgtagagtagataattttggatgatattttacacatagcattgtaagtaacattgagttttatggttaaggaagtccattttttctacaaatggggaacaaatgagatatttaaaatcgctaagaaattaacaatgtttgtttgattagtaaatttaagattttgaacgtatatattcatgaattagttaatgatggtttaaatgttgtttcttagtgatacttaaaattgattaaaaaagaaggccagaaataagaccgacaacttttatattattgaatggctgcatttggaattttatacacttgtaacttttttataagttttctactgttaacatctttgtcacattgtcagcgaccatttgtatattatacttaaagctactcttgtagttctctaatatttctattctaaatagttcatcagttatgtatttctaagggtaaataattattatttggac

SEQ ID NO: 3145 - DNA, 4181 bp, Diabrotica virgifera
  SmartBlast Evalue=0; Info=Moesin/ezrin/radixin homolog 1 n=2 Tax=Culicini RepID=MOEH_AEDAE
atcttgacaatttgtcacgataagttgtctcgtgtgtgtaaagggtgtgtgcccgaaaaatatcgcgtgtgaaacttcatgcggtggactaaagtgtataaactctttaattgaaaaatttccgataggattgtttgacagcacaaacaaacaagatgcctaaacaaatgaacgtacgggtgaccaccatggacgcggagctggaattcgcgatccaccaaacgacgaccggaaaacaacttttcgaccaagttatcaaaaccgtcggcctaagagaagtgtggttcttcggattacaatataccgattctaaaggcgatcttacctgggttaagctgtataagaaggtgctgagtcaagatttgaaaaaagaaaacccattccagttcaaattccgtgccaaattctaccccgaagacgtcgccgaagaactcatccaagatatcactttacgcttattctacttgcaagtgaagaactccattctctccgatgaaatctactgcccgcccgaaacttccgtccttctggcttcgtacgccgtacaagccaggcatggagattatgataaatcaactcacacgccaggattcctagccaacgataggttgttacctcaaagggtaatggatcaacataaaatgtcaaaagatgaatgggagaatagcatcatgacctggtggaaggaacatagaggtatgttaagggaagatgccatgatggagtacttgaagatagctcaagatctagaaatgtacggagttaactatttcgaaatacgtaacaaaaagcagacagaattgtacttaggtgtcgatgcgcttggacttaacatttacgaaaaagatgaccaacttacacctaaaatcggtttcccgtggtcggaaatccgcaacatctctttcaacgatcggaagttcatcatcaaacccatcgacaagaaagcacccgatttcgttttctttgctccacgcgtgcgcatcaacaagagaattctcgctctttgtatgggcaaccacgaactgtacatgcgcagacgtaaacctgataccatcgacgtgcaacaaatgaaagcgcaagcgcgtgaagaaaagatggcaaaacaacagcagaaagaaaagctccagtctgaaatagcggcaagagaaagggccgaaaagaaacagcaagagtatgaagatagaatcaaagccatgcaagaagagatggaaagaagtcaagctaactatatggaagctcaagagatgattagacgattggaggaacaattgaaacaattgcaggctgccaaagaagagatggaaaagagacagaacgagttacagtccatgatggagcgtttggaagagagcaagaacatggaagccgccgagaggcaaaaattggaagaggagatcagggccaaacaagaggaggttctacgtatccaacaagaagtcgaggctaaggacagcgagaccaaacgtcttcaggaagaggtcgaaaatgctcgtcgcaaggaggaagaacttaaacaactgcaactcgcccaagctgccaaaggtcatttggaagaaaatgaccataatgaagatgatgaaatggtcaatggtgatgttagcaaggatcttagcactgacgaaaacatcgtcgatccaatcgaagatagacgtacgcttgctgaaagaaacgaacgtcttcaagatcaattattggctttgaagaaagacctcgctcaatctcgcgacgaaaccaaggaaactgccatggacaaaatccacagagagaatgttcgtcaaggaagagacaaatacaagactcttcgtgaaatccgcaagggcaacaccaagcgcagagtcgaccaattcgaaaatatgtaaattgtttttaaccttcatatcaaacaatctaggagtcctacctattatttcgagttaaaaaaaaccaatattactaaagaacctttcaatgctcaacgcgagatgatcattttttcaaaatacttttaaaaaatatttttaagtttttcggttcagttattacttaacacgttaagtattattcttatattttctttttgatatgtattagagccctattggctcagttaagtggccttagaagttaactactttttgctttgttagattattttgctttttatatatatttaactaatgttatacgaaaattgttttccattgtttttgtgataactaacaacaattttgggtcaatttgaaaatcggatcctcacattaaacacggatccgagctgaactgataaaaaaatatataacactccagatctgcaattagtccagataccgagtaaggtacactgaagatttgtagcagtttttcaaaatcttgcaactaacttctacaatttttcatcgaccttctttttcttttctatctctggactaataatttttattcaaaattttcttattcaaggacgcattccaatattgagtagttttctgtttttaatgttagtgtgccattcggtgatcaaaaaatcaaaaccttgtttaacatactttaaaaaatcttccttgtcttcacagatttaaacaaattattaaatatcttttacatcaacatgtttgagtcattaccttccaatattaaacttttgaagagaatacttaaaaaaaataacaaaataataagtggcgcggcataatatgctatcctgtataatacagcaatatgtgattgtgaattaaaaatatttatttgcgcctgcgcattagactttttaaatttccaatttatggatgtcaaaagtcaatgtgaatttcaaacatgtcaactgccaaatggaggttaatttcataaaaagatctgcacgagatacgctctaactacacaaaatacagattttaataatttgttgtaagtctttttaaaactgtacacttttaaaatttatttttctattatctagaactatcaacgagttttaatcgcaatatgcaatgatgagatactatatttttacactgttccttcttggcctggtgcttcctaaaataattgagcagcagttaacaatattttaggtatttttgtattctatacaattccaaaattataagaatttttgattttctgcaaatctaaactgattaatccaaatttatttgatataaagtgaaattatttaaaacgtttgttgaattttaagactttttaatctttcactcgtttgtaaagtacaataagtgtttcataaaaaatattgtttaagaaagagggcgagaaaacattttgaataacaaaaaagtagtagttgcagtagcttacttgatttatatgtcagcatccatggtcaaaccaaaatgggggcttgaacaatctattaaacaagaatgtgctacatccaacgccattggcgtgggagcagaagcacagaactgttccaaggtacgactcaccccctattcactctagcacttttttacgatcattcgaccaatttgatatcggaaagtatcctgtcggtataaatatccacagacaatattttttaggaaacacttgacttacatctgttgctcaatacctacttatccgtgtaaataccagttttccaaacatgtaatttgtttttatatgaacaaagttgcaaatcaataataattgtcgaaaagaatcaattcttcgcggtcgttttatttgcaactttgctagtttgtgtatataagtgtataccacgttgcctttttgtagagtagataattttggatgatattttacacatagcattgtaagtaacattgagttttatggttaaggaagtccattttttctacaaatggggaacaaatgagatatttaaaatcgctaagaaattaacaatgtttgtttgattagtaaatttaagattttgaacgtatatattcatgaattagttaatgatggtttaaatgttgtttcttagtgatacttaaaattgattaaaaaagaaggccagaaataagaccgacaacttttatattattgaatggctgcatttggaattttatacacttgtaacttttttataagttttctactgttaacatctttgtcacattgtcagcgaccatttgtatattatacttaaagctactcttgtagttctctaatatttctattctaaatagttcatcagttatgtatttctaagggtaaataattattatttggac

SEQ ID NO: 3146 - DNA, 3261 bp, Diabrotica virgifera
  SmartBlast Evalue=1E-103; Info=annexin B11 isoform B n=1 Tax= Nasonia vitripennis RepID=UPI0001A46D4B
cgttgttgacgtagtagagattactcatcttaaatagaaggattatactgttatcatcaaattttaaaatagaattggattgtgcttgtgttagttgtgaagttgtgcatcaagatgagttatcctgggtataatccatatcaacagggatcagcaccgggagcacccagcccatacccccaacaccctcaaggaggagcaccttcctacccaccactcaatcctaacgctttcggttatccctctaacatgcccatgcaaatgccccaacccatgcaaatgcccacttaccctcccagcatgccaggctatccccccgccgttcccgggggctatcccccaccccagtctagcggaggatacccgccatcgagtgggggatatcattcgggcggcggtggggcttcgtatcctccgaacacgtatccctcaggtccgcagcagccctattctagtgctcctggtgctcctcccggtggacatggccatcaaggatctcagggaccttacggagggttttcgtatacacagcacagtgctcctcaaagttatgcagctcctcgcaggacccagaggactcccaccgtcagacctgcccaaccattcaaccccaatgatgatgctcaagttcttagaacagcgatgaaaggtttcggaaccgatgagaaggccattatcaattgcttggcaagaagaaccaatgaacagagactacatattgctgctgcgtttaaaactatgtacggaaaggatttgatcaaggacttgaagagcgaactcagcggaaacttcgaaaactgcatcgtggctatgatgactcctcttcccgaatactacgccaaagaattgcacgatgctatgagcggtgttggaactgatgaagacgtcctcatcgaggtcatgtgtaccatgtccaacagggaaattatggtcatcagggaagcgtaccacaaattatactatcgccctctggaggaagacctattgggcgacacttccggaaccttcagaaggatgatggtgtctctgtgtacagccaatcgtgacgaaagtatgatggtggatcataattcagctgcagccgatgctcaggctttgctgactgcaggtgaattgcgtctgggcactgatgaatctgcgttcaatgctattttgtgccagagaaactacgctcagctgggacttatcttccacgagtacgaaaaattgtcaggtcatgatattgaagaggccatcaaaggagagttttctggtgattccgaagaaggtttcttggcaattgttcgtgctgtcaaacatcaacccacattctttgctagacaaatccatcatgcagttaagggtgctggtacagatgatcaaaagctagtacgcaccattgtgacaagatgtgaggttgatatggaggatattaagaatgcttatcaagccaaatatggcgaatctcttgcggaagctatacagggagacgcttccggtgattacaagaaatgtctactggccttgattggagaatactaaatagatgccaaagaaaacttgaaactattttcatatatacaaatatatatgttttatattactgcacttattacgtactatcaaattttcaagatacagcgaaagagcacatttctgattaaaaaattgttagggttgtggattttagatcaagaaaaaagttattaatgatttctagattatattaagaggttttagtgtacaagcaacatttaggttaagcctcttccatgcgatttgtcttttcaaatataacagcaggaacagatatttaatttgcgagtaattcagaagaatttgtcttattaagtcacagtcacagtcgagtttgttttttgtgtgttttttacatcggaatgataacatttgatacttggatctaaaaaataattggagaaccaattttagttaaatgtcattaggggaacagctgttaaacctttctcactacactcaagtcgcggcaaagcggtattttcggtaattatgctccgattaatctgacattttcagagagtattcttgaagttataaactttcatttaaaataatgaaaaatcgaaaatttctaatttttcaaaccaaacttcccccatccttaaaatattatgttatagataagagacatagtctaaatgttgcttcattattagaggctgtagagccttataatctcagtgtggttatttacgctttaaagtgcctaatgttgccaaataaataactagttaatttttcaggatctagataattataaataaaatgcctttttgtttttgttaacaaggcaaatttttttttaccgtcgtcttttaaggagattattagatgaaatctcataattttaacgacatattacaaaactaataattatatcacttagttctgtgtgctacgtcgaactttcaagtctttctttggagtcttcaccaggactttttctgggccttcggtcaactaaatcctcatatcacgttactgacaaagcggatactggaatagagaccaagagatgatgcctaccaaagcagaggtcgtccaccaacacgttggactgatgatctaaaacgttgtcataggaattggattcaagaagcacaagatcgaaatagatggaaaattatgagggagatctatgtccagcagtggacaagcgaagatttaatgatgatcacgttactactatactcaccgacatactaatactgcttttctatactgagatggtacttttgtactgtcgattatgaagcaaaagagcaaagcaaaccaaacagactcgcaggttgcctgaatgaaacaatatggagaaataaaaatatcggaaaagaaatgaaaggcagaatttaggacaaaaagaatgctataaacagcagagatgaaaacccttctaaaaatcgatggaagacactatgggatagagctatactaaatttacaatcgggatgcagcagaagtgaacaagccgagacacgtttgatgctgctgggagcactcccgaatcataatttacaatgtataaactttggaaatcatgacttgtgatttacaatgtatatacattgtagattatgattcgggggtgctcttagtagcatttgacgtgtcttggtttgtttgtttctgctgcgtcttgattgtaaatttagtatagaagtgcagatatacgacggagatgcaaggtggacaacattaataactgggtagaaacagaagagtagaacggaatgaccacataag

SEQ ID NO: 3147 - DNA, 3240 bp, Diabrotica virgifera
  SmartBlast Evalue=1E-103; Info=annexin B11 isoform B n=1 Tax= Nasonia vitripennis RepID=UPI0001A46D4B
cgttgttgacgtagtagagattactcatcttaaatagaaggattatactgttatcatcaaattttaaaatagaattggattgtgcttgtgttagttgtgaagttgtgcatcaagatgagttatcctgggtataatccatatcaacagggatcagcaccgggagcacccagcccatacccccaacaccctcaaggaggagcaccttcctacccaccactcaatcctaacgctttcggttatccctctaacatgcccatgcaaatgccccaacccatgcaaatgcccacttaccctcccagcatgccaggctatccccccgccgttcccgggggctatcccccaccccagtctagcggaggatacccgccatcgagtgggggatatcattcgggcggcggtggggcttcgtatcctccgaacacgtatccctcaggtccgcagcagccctattctagtgctcctggtgctcctcccggtggacatggccatcaaggatctcagggaccttacggagggttttcgtatacacagcacagtgctcctcaaagttatgcagctcctcgcaggacccagaggactcccaccgtcagacctgcccaaccattcaaccccaatgatgatgctcaagttcttagaacagcgatgaaaggtttcggaaccgatgagaaggccattatcaattgcttggcaagaagaaccaatgaacagagactacatattgctgctgcgtttaaaactatgtacggaaaggatttgatcaaggacttgaagagcgaactcagcggaaacttcgaaaactgcatcgtggctatgatgactcctcttcccgaatactacgccaaagaattgcacgatgctatgagcggtgttggaactgatgaagacgtcctcatcgaggtcatgtgtaccatgtccaacagggaaattatggtcatcagggaagcgtaccacaaattatactatcgccctctggaggaagacctattgggcgacacttccggaaccttcagaaggatgatggtgtctctgtgtacagccaatcgtgacgaaagtatgatggtggatcataattcagctgcagccgatgctcaggctttgctgactgcaggtgaattgcgtctgggcactgatgaatctgcgttcaatgctattttgtgccagagaaactacgctcagctgggacttatcttccacgagtacgaaaaattgtcaggtcatgatattgaagaggccatcaaaggagagttttctggtgattccgaagaaggtttcttggcaattgttcgtgctgtcaaacatcaacccacattctttgctagacaaatccatcatgcagttaagggtgctggtacagatgatcaaaagctagtacgcaccattgtgacaagatgtgaggttgatatggaggatattaagaatgcttatcaagccaaatatggcgaatctcttgcggaagctatacagggagacgcttccggtgattacaagaaatgtctactggccttgattggagaatactaaatagatgccaaagaaaacttgaaactattttcatatatacaaatatatatgttttatattactgcacttattacgtactatcaaattttcaagatacagcgaaagagcacatttctgattaaaaaattgttagggttgtggattttagatcaagaaaaaagttattaatgatttctagattatattaagaggttttagtgtacaagcaacatttaggttaagcctcttccatgcgatttgtcttttcaaatataacagcaggaacagatatttaatttgcgagtaattcagaagaatttgtcttattaagtcacagtcacagtcgagtttgttttttgtgtgttttttacatcggaatgataacatttgatacttggatctaaaaaataattggagaaccaattttagttaaatgtcattaggggaacagctgttaaacctttctcactacactcaagtcgcggcaaagcggtattttcggtaattatgctccgattaatctgacattttcagagagtattcttgaagttataaactttcatttaaaataatgaaaaatcgaaaatttctaatttttcaaaccaaacttcccccatccttaaaatattatgttatagataagagacatagtctaaatgttgcttcattattagaggctgtagagccttataatctcagtgtggttatttacgctttaaagtgcctaatgttgccaaataaataactagttaatttttcaggatctagataattataaataaaatgcctttttgtttttgttaacaaggcaaatttttttttaccgtcgtcttttaaggagattattagatgaaatctcataattttaacgacatattacaaaactaagaattatatcacttagttctgtgtgctacgtcgcactttcaagtctttctttggagtcttcatcaggactttttctgggccttcggtcaactaaatcctcatatcacgttactgacaaagcggatactgctcgtccaccaaagcggaggtcgtccaccaacacgttggactgatgatctaaaacgtcatagaaattggatgcaagaggcatatgatcgaaacagatggaaaattatgagggagatctatgtccagcagtggacaagcgaagatttaatgatgatcacgttactactatactcaccgacatactaatactgcttttctatactgagatggtacttttgtactgtcgattatgaagcaaaagagcaaagcaaaccaaacagactcgcaggttgcctgaatgaaacaatatggagaaataaaaatatcggaaaagaaatgaaaggcagaatttaggacaaaaagaatgctataaacagcagagatgaaaacccttctaaaaatcgatggaagacactatgggatagagctatactaaatttacaatcgggatgcagcagaagtgaacaagccgagacacgtttgatgctgctgggagcactcccgaatcataatttacaatgtataaactttggaaatcatgacttgtgatttacaatgtatatacattgtagattatgattcgggggtgctcttagtagcatttgacgtgtcttggtttgtttgtttctgctgcgtcttgattgtaaatttagtatagaagtgcagatatacgacggagatgcaaggtggacaacattaataactgggtagaaacagaagagtagaacggaatgaccacataag

SEQ ID NO: 3148 - DNA, 1863 bp, Diabrotica virgifera
  SmartBlast Evalue=1E-106; Info=annexin B11 isoform B n=1 Tax= Nasonia vitripennis RepID=UPI0001A46D4B
cgttgttgacgtagtagagattactcatcttaaatagaaggattatactgttatcatcaaattttaaaatagaattggattgtgcttgtgttagttgtgaagttgtgcatcaagatgagttatcctgggtataatccatatcaacagggatcagcaccgggagcacccagcccatacccccaacaccctcaaggaggagcaccttcctacccaccactcaatcctaacgctttcggttatccctctaacatgcccatgcaaatgccccaacccatgcaaatgcccacttaccctcccagcatgccaggctatccccccgccgttcccgggggctatcccccaccccagtctagcggaggatacccgccatcgagtgggggatatcattcgggcggcggtggggcttcgtatcctccgaacacgtatccctcaggtccgcagcagccctattctagtgctcctggtgctcctcccggtggacatggccatcaaggatctcagggaccttacggagggttttcgtatacacagcacagtgctcctcaaagttatgcagctcctcgcaggacccagaggactcccaccgtcagacctgcccaaccattcaaccccaatgatgatgctcaagttcttagaacagcgatgaaaggtttcggaaccgatgagaaggccattatcaattgcttggcaagaagaaccaatgaacagagactacatattgctgctgcgtttaaaactatgtacggaaaggatttgatcaaggacttgaagagcgaactcagcggaaacttcgaaaactgcatcgtggctatgatgactcctcttcccgaatactacgccaaagaattgcacgatgctatgagcggtgttggaactgatgaagacgtcctcatcgaggtcatgtgtaccatgtccaacagggaaattatggtcatcagggaagcgtaccacaaattatattacagatcgttagaaagcgatctcaaaggcgacaccgctggcacattcaagcgcttgatggtctctctctgtaacgcctccagagacgaaagcaacgtcaccgatcctcaaagagctttacaagacgcccaggctctactccaagccggagagcttcgtttgggcacagacgaatccaccttcaacatggttttatgccaaagaaactacgcccagctccagctcgttttccaagagtaccagaagatcaccggccacgatatcgagaaagctgtcaaaaatgagttctctggagactcggaagatgctcttttagccattatcaggtccataaagaaccaagcggcgttctttgctaaatatttgaataagagcatgaaagggctaggaaccaacgatagacagttgattcgactggtagtaacgaggtctgaaattgacatggttgaaattaagagcgaataccaggccaaatacggtgaatctttagctgatgctattaagggcgactgctccggacattacaaaaagtgtttactggcactcattggcgaatactaataatctgcacgtataattttttactggagtttttccattattattgttaatctttagaaattttatgtagtttttactttaaaccaacaaacagatttgatactattcattttttccctctgtaatcagcgattcctcgtgcctattgggtgccacactgtccaataaaagctgtaaatggtcagtcaaaccttatttttactaatactatgcctatttcgatgcatccctttagttcggttgccttttaaatgaccacaagatccaggtatttggtccgattttcaaaacaataacttttgataaatttcaataatacaaaacacgtgctcgtttttctaa

SEQ ID NO: 3149 - DNA, 3660 bp, Diabrotica virgifera
ataaaaagaacactatagtaaaatgtattgtagaaggaaaacgatgcatttaaattcccgtggatgaggggctaaataaacttctcatttttttcttgaaatacgttagtcatcaaattttttgagtttatctcgcatagtttgaatgtaatcgacatttaatattgcttaatttaaggtcttttcaagcacaacaaaagttattggtagcattgtacacctaaaatcgaccgtttctctgttatttcaggttgaatacactgatttgagcatgcaccaagaaaacaagtttttttcgcttaccatattattatctctttttgtgttataactagaagattcataaagaaaagaatctctttgttattttataagctacaaaatgttttatatagttttttagttagatgcatagtttttaaggtattcgcaaagaaccgtttgaaaaggtgttatgtttcaatgaaagtggccaattttcaaccaggaataactcaaaaagtattgttttcgaaaaaaaaattatagaacagtttttgcttagtgttgggttctctagcaacttccgtagttgtttgggcaaagggttttccacccccgagaggtggtgggagccgccccagacaggggcacacgtcggcatagggtagactttgtttcttgggctacttactgtcacgtaaatcgatatagtaggatagaattcggagccacataccctcattgactgccctaagggtagttgcgtcgttattgaaatatgcaccatttcagaccttgtttcttcaaattcggaccaatagggatgaaaataaaagccatcgctgtaagaataaacggcatactaaatatttaaaaatctttttttttgtacagaaaaagtttaagatgtcgccactgtagatatggttgaaaatggggggattaaattgctgggagataatgaaattcagaccaataaggatgaaactaaaagccatcattgtaagaataaacgccataccgttgctccttgacggttactctttatttaatcactattttaaatgtttaaaaaattttagatgaataatgacgcaactgtagatagggttgaaaatgtgggaattaaattaagataaggaaattcgaaccaatagagataaaaataaaagccatcattggaagaataaaccccataccgatgctcctggacgatcactcctcatttaatccctattttaaatatttaaaaatcgttttttgctctcatgagaaatttggctttttgcagttacgtaattcttgttccctacctgcgatataggtatcgtataatgatttatgagctaaagaattaaggtaaaatactacatatacatgatgatgaagaaatcagctttgatatctcataaaaaacaatcattaccagcatttggaattttataattgtatataaacaactgtatgtacccctaaggcttatgtatataatagtgcatagcaccatagaaaaattaatttgtacatatctttactcttatttttgtgatttaaatggttaggtgttgacgtaaggaacgtggaggggatctttttagttaatagacgtagaaaatatattaagcatttaataatacctatataactcaatatttgtttgtcataacttgtttggattgagtggcaatgtaataaaaacaagtttaatttggttcaaatcattattaatattttttattggctaagtagcacttggtacagttgaccatttaaggacggcacctattttcccttgcaatgccacacagacggaagttttatagcttgccttctaaatggatggcacatattatattagtcagaataaaattaataaggacatgttcaataaaaaactgtgcattatgtaaagacaaagatattttttaacttggagatgaattgagtttttgtcactgtaatcacattattgatttgtatggcactatatttttaaatattattttgatttaaaatcaatgggaaaatcccaattattttgattgttttcgtcaaaatttaatctccctatttggcaaatattcactcccaatattggtaaattgccaatctgtgtgctttttttcatcactgggtggggaatctgcatgtagacgacggaagtaaacattttcgacagtgctgggttgctaagctaaaacctcatcagagtcaagtccaaccagctaagtcggacctctctgccctccttagctccgatgtggtcaggaccagctaaatcccacccctctcatactagggtattagagtggaatcatctgttaagagcataacttctcccgatgtctttcttttgcccgattctcagttgctcaccatcacacatcagattctgtctctcgtcctcatccgaccacaccgtccgcctctgcctaactgcctcccaccatttccacctctttcactctattattagtctgcctttatccccatgctgtcaacgttcctactttctacctctgcgggcccagttctgcctcttcgatacctgacataactgcatctagctcccgctcttccttctcttttatcgacagcacctttctcacatagttgtagattttctttcatcatcgcatcgctcatccatcaccatctcttctatcatctcactcaccgattcaaacacgctctagttcattcctttcgcttgtccatctgacccacttcaaaagagtatgtgacacagtgtccgaattcccacaatacagacaattgtccgattcggcctttttaaatctgtgccagtagctaagcgcctgtgtccgcagtccagccagctccgcagactggtctgtatggactggtaaacatagtgacatgtattggtcagctgtcctgaaagggctaatagatggtttgttctagtttcaccagctttatgtggtcaatgaagtactaagaggaaaataattacacattccaaagaaatatagtgtttttattttaagactaaattagatgtgtatttagaaactgaattattttttaacttactcaataaatttaagggtacaaaataggcgcataaattctcaatttgatacataaagaatattctgtgttatatagaatactttttaatttatcccataatcgacttatttttcttcgttacatttattaccatgattttttacttattcctgtcacggatagaagctcgttaaatgacttcaatatgggcacagagttgtgtaaggttaaaacactttttgtcagttctcctagacgtttatttacttatttgcaacgctcaacaggccttggaggtctcgacgacatatatacagttatctctttattattatttaaaaaattccgaagaaaaagatcttttgttcaaaaaagtatatattttattactgattaactttggttggattttggtttattccgaagaaatttctaacacacatttttggtatctaggtcatattttatgccagttaataaaaaatcattttttcctcttggacttgtcaaatctttaatttgtcttttactagtcactagagccaagaaaatatatagttattaagtttatattgaaatttcaccgtcaattgtacaaatatctaccagaaataataaattttgcaaatacatgttgttgtt

SEQ ID NO: 3150 - DNA, 3191 bp, Diabrotica virgifera
ataaaaagaacactatagtaaaatgtattgtagaaggaaaacgatgcatttaaattcccgtggatgaggggctaaataaacttctcatttttttcttgaaatacgttagtcatcaaattttttgagtttatctcgcatagtttgaatgtaatcgacatttaatattgcttaatttaaggtcttttcaagcacaacaaaagttattggtagcattgtacacctaaaatcgaccgtttctctgttatttcaggttgaatacactgatttgagcatgcaccaagaaaacaagtttttttcgcttaccatattattatctctttttgtgttataactagaagattcataaagaaaagaatctctttgttattttataagctacaaaatgttttatatagttttttagttagatgcatagtttttaaggtattcgcaaagaaccgtttgaaaaggtgttatgtttcaatgaaagtggccaattttcaaccaggaataactcaaaaagtattgttttcgaaaaaaaaattatagaacagtttttgcttagtgttgggttctctagcaacttccgtagttgtttgggcaaagggttttccacccccgagaggtggtgggagccgccccagacaggggcacacgtcggcatagggtagactttgtttcttgggctacttactgtcacgtaaatcgatatagtaggatagaattcggagccacataccctcattgactgccctaagggtagttgcgtcgttattgaaatatgcaccatttcagaccttgtttcttcaaattcggaccaatagggatgaaaataaaagccatcgctgtaagaataaacggcatactaaatatttaaaaatctttttttttgtacagaaaaagtttaagatgtcgccactgtagatatggttgaaaatggggggattaaattgctgggagataatgaaattcagaccaataaggatgaaactaaaagccatcattgtaagaataaacgccataccgttgctccttgacggttactctttatttaatcactattttaaatgtttaaaaaattttagatgaataatgacgcaactgtagatagggttgaaaatgtgggaattaaattaagataaggaaattcgaaccaatagagataaaaataaaagccatcattggaagaataaaccccataccgatgctcctggacgatcactcctcatttaatccctattttaaatatttaaaaatcgttttttgctctcatgagaaatttggctttttgcagttacgtaattcttgttccctacctgcgatataggtatcgtataatgatttatgagctaaagaattaaggtaaaatactacatatacatgatgatgaagaaatcagctttgatatctcataaaaaacaatcattaccagcatttggaattttataattgtatataaacaactgtatgtacccctaaggcttatgtatataatagtgcatagcaccatagaaaaattaatttgtacatatctttactcttatttttgtgatttaaatggttaggtgttgacgtaaggaacgtggaggggatctttttagttaatagacgtagaaaatatattaagcatttaataatacctatataactcaatatttgtttgtcataacttgtttggattgagtggcaatgtaataaaaacaagtttaatttggttcaaatcattattaatattttttattggctaagtagcacttggtacagttgaccatttaaggacggcacctattttcccttgcaatgccacacagacggaagttttatagcttgccttctaaatggatggcacatattatattagtcagaataaaattaataaggacatgttcaataaaaaactgtgcattatgtaaagacaaagatattttttaacttggagatgaattgagtttttgtcactgtaatcacattattgatttgtatggcactatatttttaaatattattttgatttaaaatcaatgggaaaatcccaattattttgattgttttcgtcaaaatttaatctccctatttggcaaatattcactcccaatattggtaaattgccaatctgtgtgctttttttcatcactgggtggggaatctgcatgtagacgacggaagtaaacattttcgacagtgctgggttgctaagctaaaacctcatcagagtcaagtccaaccagctaagtcggacctctctgccctccttagctccgatgtggtcaggaccagctaaatcccacccctctcatactagggtattagagtggaatcatctgttaagagcataacttctcccgatgtctttcttttgcccgattctcagttatcagattatgtctctcgtactcatccgaccacaccgtccgcctctgcctaactacgtcctgaaagggctaatagatggtttgttctagtttcaccagctttatgtggtcaatgaagtactaagaggaaaataattacacattccaaagaaatatagtgtttttattttaagactaaattagatgtgtatttagaaactgaattattttttaacttactcaataaatttaagggtacaaaataggcgcataaattctcaatttgatacataaagaatattctgtgttatatagaatactttttaatttatcccataatcgacttatttttcttcgttacatttattaccatgattttttacttattcctgtcacggatagaagctcgttaaatgacttcaatatgggcacagagttgtgtaaggttaaaacactttttgtcagttctcctagacgtttatttacttatttgcaacgctcaacaggccttggaggtctcgacgacatatatacagttatctctttattattatttaaaaaattccgaagaaaaagatcttttgttcaaaaaagtatatattttattactgattaactttggttggattttggtttattccgaagaaatttctaacacacatttttggtatctaggtcatattttatgccagttaataaaaaatcattttttcctcttggacttgtcaaatctttaatttgtcttttactagtcactagagccaagaaaatatatagttattaagtttatattgaaatttcaccgtcaattgtacaaatatctaccagaaataataaattttgcaaatacatgttgttgtt

SEQ ID NO: 3151 - DNA, 760 bp, Diabrotica virgifera
ataaaaagaacactatagtaaaatgtattgtagaaggaaaacgatgcatttaaattcccgtggatgaggggctaaataaacttctcatttttttcttgaaatacgttagtcatcaaattttttgagtttatctcgcatagtttgaatgtaatcgacatttaatattgcttaatttaaggtcttttcaagcacaacaaaagttattggtagcattgtacacctaaaatcgaccgtttctctgttatttcaggttgaatacactgatttgagcatgcaccaagaaaacaagtttttttcgcttaccatattattatctctttttgtgttataactagaagattcataaagaaaagaatctctttgttattttataagctacaaaatgttttatatagttttttagttagatgcatagtttttaaggtattcgcaaagaaccgtttgaaaaggtgttatgtttcaatgaaagtggccaattttcaaccaggaataactcaaaaagtattgttttcgaaaaaaaaattatagaacagtttttgcttagtgttgggttctctagcaacttccgtagttgtttaaccaaaaaaattttccaccccgagaaggggtgggaaccgcccccaagataaaagcacacatcggcatagggtagactttgaataaggagttattttcaggctattcctaaaatttcgttaaaatccatgcagtaggatagaattcggaggtaataacctgttcttgctctcattgactgccc

SEQ ID NO: 3152 - DNA, 3617 bp, Diabrotica virgifera
  SmartBlast Evalue=3E-19; Info=Death-associated protein 1 n=2 Tax=Formicidae RepID=E2AA24_9HYME
ctatttattctgacatcaaataaatttttttttctttccattttagacttaaattaaaaacccaaaccgttaaacttcaaatttaaattgaaaacaaaatagctatgttaagtattacaaaagcaataaaaaatataacaacttttaaacactcactgaatatgatctttaaaaaagtgaaaatttaaagtatttgaatggaataatgcataagtcattacttgatgaatatataaaaaaaattaagacattttaaaaatatctatcaatatcaacgaactgtcaatacaacgtcccgaatggccccgtcccattcaaacagtgaagcgagattgcggccaacatacaagagagagacagagaatgccagagaaaattttctacaactaccaccagagttgccagatgtgattttataaatcccccacttagaaactgaaattccctcaaattgaagctcaaatcccccaaatttaaatttgtgccgcattttaataaattagtagtcaaatgtagagaacagtaaaacaaaattatactatgtacttatcaacagagggccctggaaataattcataggtcctatcgtcttcggttatatgagagtataatatacagtcctatgtatattcgcaaatttaatttaccatgacttcttaaaatcgtccataattgtccccccaaaaaaatctcccaaccatttttgcttagaaaaattcacctagacactttcaaattactccaaaattgtgggaaaatacaccaatctggcaaccctgactaccactatcaatttttttgtttacgaaagatggcgattatcttcctgactacgctatctcatcctggccgcattaaattcgcttcatgcccattccattagtattgacatttcgttgatcgatatacatatttaacacatggtaaaatattcgatataaatgatcagagtattttcattttataataattataaatccaacggaacttttttgtcgtaattgatctgaattttagttaataaaagacaaattttgaaatcagaaatgaaattttctttcagtttgcttttatttagaacattcttgaatcccgaattattttcctttccttaagaggtaaatctataataactcatgcaaaattccacatctaattattacataataaattcaattgcacattttataaaaatttaaaaaactttttctgccttcgagtacacattttataaaatcaattatctttgggaaacgtttaatgaaatcaaaaatatatttaaaaatatatacggaacacacattgacaaatactggctaccattaaacaaatcattgaataaatatggatctataatttagattatttcattctactttcaagtttgtcacgcaaccttacataatttataaatgcaggaaatcgcgaagtggaaccaaaaagcgactggatggtatatatagtgatttctttccttcgatggcgaccgtcaaaaattattggtttaatgagtttcaacgaggttacacgtctgtttttgatgaaccacgcccaggtgccccgaaaatggttatcacggaggataacgtgtcaaaatccacgtattggcagaccaataacgtggataacgtgtcaaatccacgatatccgatcacgtattggcagaccgccgattaaaggtgcgtgagataaatgagtcagtagtctcttaagatcgcgtacgtcatatcctgcatgacattttgggcatgagaaagcctttgcttgctcataccgggcaagcccaattgtgagaccacttcagcgcttttcgatgctattgttttctgggacttgcaaggtgtgctacccggagaaggacaaaatggtcatagagttctgctatgacaaattattggaccgatttgacaacgatttgcggaaaaaacgactcgatttgtagaagaaaaagtgctcttccaccttattctccagaattggccccgtgcggtttagttttgtttccaaactgtcgcacgtttgcaaaagttttatcggaccaccctcatgcacacggtgttaaatgcgttgaactttgtgtattcaataactaaatacctgaatataatcgacactaccagactggcccgccttaattacagatctaagtcccactgaatatttttctatgataaaatcaaactccgtggtcacttactgaagacgaaaaattcaacggaagaataattataagggcagcattttaaaattttttattttatcaaagttgtccgctttttgtcggtgtgtctaatgaaaacttattataatcgtttaagtacctcaagttttaaaatttaccaaaacttatacaaacattttcctctagttacagcaagtaagttgttacaacattaattgtatattactgctcactcaagaacgaaaatatcttagaaaaaaatgaagttacattaaaaaatgtatctgtttagtaaaaaatctgagtgacttataagtaacaaaacaaaaatttcgctcggagtcagcaatggtataaaatatcacacatttttaaatcaatggtcaattacttctttgaagcagacactatgtttcgccaatatttaaactcgaggtcgaaaatctcaattttgattaatatctaaggcataatttggagtgtcaaatgtgctgaatgttgaaagactcaatcataagaatattaagaataaaaaatgcattttaaagtatgtactgaattccataacgacatttcattacaaaaaataatttaataattcatttttgttaatttgataatatagacatttaacaagtgtaatagattttatcaaatttacatactaaattaacaataatagacataatttgtgagttagtctatattatttgtcaaaaagacgttctgatagtaataaagacaaagaaaacatcaacaacgacgtattatatcaacaaaacaaagtaatattatgtatctacttcttcttcgtcaatataaactcattatgactgactatatgtacataaaaataataattataaaatattgaagtacgtgtaacatttttaacaaactattactaagtactttcatttaaacaaatattaatagactatgtcgttatggaaatcttggatcttacataagttcttttaggaataatttggcaactatctaatctatttcctgggttgttggatgtgagccactggcttgttaggatggattgctgggggcttttctttgtgaaaactttgcactgcttccgcaggaaaatcggcgtgtcccttgacgaccgcgccagaaacggtagtcgtcttcggtggactgccggagactgtgataccggtgacatcttcagttatgcctccggaatcttttcttgttttgtgttgagttatcctcataccgcctgctttcactgcaggagggtgacctgcttttagggcagaatcttgctttggacttgacatagttttcgttaaaattgcacgaaagcgtaccagatggttaaactaataccgctatcacgttgaacaagtaataaattatttaaatatttgttgaattggccacttttaattcaaacaataaacacgtacgcagtttt

SEQ ID NO: 3153 - DNA, 3581 bp, Diabrotica virgifera
  SmartBlast Evalue=3E-19; Info=Death-associated protein 1 n=2 Tax=Formicidae RepID=E2AA24_9HYME
ctatttattctgacatcaaataaatttttttttctttccattttagacttaaattaaaaacccaaaccgttaaacttcaaatttaaattgaaaacaaaatagctatgttaagtattacaaaagcaataaaaaatataacaacttttaaacactcactgaatatgatctttaaaaaagtgaaaatttaaagtatttgaatggaataatgcataagtcattacttgatgaatatataaaaaaaattaagacattttaaaaatatctatcaatatcaacgaactgtcaatacaacgtcccgaatggccccgtcccattcaaacagtgaagcgagattgcggccaacatacaagagagagacagagaatgccagagaaaattttctacaactaccaccagagttgccagatgtgattttataaatcccccacttagaaactgaaattccctcaaattgaagctcaaattagtagtcaaatgtagagaacagtaaaacaaaattatactatgtacttatcaacagagggccctggaaataattcataggtcctatcgtcttcggttatatgagagtataatatacagtcctatgtatattcgcaaatttaatttaccatgacttcttaaaatcgtccataattgtccccccaaaaaaatctcccaaccatttttgcttagaaaaattcacctagacactttcaaattactccaaaattgtgggaaaatacaccaatctggcaaccctgactaccactatcaatttttttgtttacgaaagatggcgattatcttcctgactacgctatctcatcctggccgcattaaattcgcttcatgcccattccattagtattgacatttcgttgatcgatatacatatttaacacatggtaaaatattcgatataaatgatcagagtattttcattttataataattataaatccaacggaacttttttgtcgtaattgatctgaattttagttaataaaagacaaattttgaaatcagaaatgaaattttctttcagtttgcttttatttagaacattcttgaatcccgaattattttcctttccttaagaggtaaatctataataactcatgcaaaattccacatctaattattacataataaattcaattgcacattttataaaaatttaaaaaactttttctgccttcgagtacacattttataaaatcaattatctttgggaaacgtttaatgaaatcaaaaatatatttaaaaatatatacggaacacacattgacaaatactggctaccattaaacaaatcattgaataaatatggatctataatttagattatttcattctactttcaagtttgtcacgcaaccttacataatttataaatgcaggaaatcgcgaagtggaaccaaaaagcgactggatggtatatatagtgatttctttccttcgatggcgaccgtcaaaaattattggtttaatgagtttcaacgaggttacacgtctgtttttgatgaaccacgcccaggtgccccgaaaatggttatcacggaggataacgtgtcaaaatccacgtattggcagaccaataacgtggataacgtgtcaaatccacgatatccgatcacgtattggcagaccgccgattaaaggtgcgtgagataaatgagtcagtagtctcttaagatcgcgtacgtcatatcctgcatgacattttgggcatgagaaagcctttgcttgctcataccgggcaagcccaattgtgagaccacttcagcgcttttcgatgctattgttttctgggacttgcaaggtgtgctacccggagaaggacaaaatggtcatagagttctgctatgacaaattattggaccgatttgacaacgatttgcggaaaaaacgactcgatttgtagaagaaaaagtgctcttccaccttattctccagaattggccccgtgcggtttagttttgtttccaaactgtcgcacgtttgcaaaagttttatcggaccaccctcatgcacacggtgttaaatgcgttgaactttgtgtattcaataactaaatacctgaatataatcgacactaccagactggcccgccttaattacagatctaagtcccactgaatatttttctatgataaaatcaaactccgtggtcacttactgaagacgaaaaattcaacggaagaataattataagggcagcattttaaaattttttattttatcaaagttgtccgctttttgtcggtgtgtctaatgaaaacttattataatcgtttaagtacctcaagttttaaaatttaccaaaacttatacaaacattttcctctagttacagcaagtaagttgttacaacattaattgtatattactgctcactcaagaacgaaaatatcttagaaaaaaatgaagttacattaaaaaatgtatctgtttagtaaaaaatctgagtgacttataagtaacaaaacaaaaatttcgctcggagtcagcaatggtataaaatatcacacatttttaaatcaatggtcaattacttctttgaagcagacactatgtttcgccaatatttaaactcgaggtcgaaaatctcaattttgattaatatctaaggcataatttggagtgtcaaatgtgctgaatgttgaaagactcaatcataagaatattaagaataaaaaatgcattttaaagtatgtactgaattccataacgacatttcattacaaaaaataatttaataattcatttttgttaatttgataatatagacatttaacaagtgtaatagattttatcaaatttacatactaaattaacaataatagacataatttgtgagttagtctatattatttgtcaaaaagacgttctgatagtaataaagacaaagaaaacatcaacaacgacgtattatatcaacaaaacaaagtaatattatgtatctacttcttcttcgtcaatataaactcattatgactgactatatgtacataaaaataataattataaaatattgaagtacgtgtaacatttttaacaaactattactaagtactttcatttaaacaaatattaatagactatgtcgttatggaaatcttggatcttacataagttcttttaggaataatttggcaactatctaatctatttcctgggttgttggatgtgagccactggcttgttaggatggattgctgggggcttttctttgtgaaaactttgcactgcttccgcaggaaaatcggcgtgtcccttgacgaccgcgccagaaacggtagtcgtcttcggtggactgccggagactgtgataccggtgacatcttcagttatgcctccggaatcttttcttgttttgtgttgagttatcctcataccgcctgctttcactgcaggagggtgacctgcttttagggcagaatcttgctttggacttgacatagttttcgttaaaattgcacgaaagcgtaccagatggttaaactaataccgctatcacgttgaacaagtaataaattatttaaatatttgttgaattggccacttttaattcaaacaataaacacgtacgcagtttt

SEQ ID NO: 3154 - DNA, 3523 bp, Diabrotica virgifera
  SmartBlast Evalue=1E-35; Info=Plasminogen activator inhibitor 1 RNA-binding protein n=1 Tax=Camponotus floridanus RepID=E2ADR8_ 9HYME
gaaaagtcgcctgctattacctcgtgcgaccgcgaccggccatattgtagtgaatgattgactgagtgacgtacggctaaagtagccataaataaatcttccaacatctgaaagttgcgaagagctttccaataattaaccatcatggaaaatacgtatggaattggcattgccaataggtacgctctttttttggatgatgaatccgatccattggaaacgcttactttaaaagagcaggaaaaagaactgaaaaagaaaagcaaagtggccgagaaagaaaacaaagtgaaaacaccgaccataccaaagggaaaaccgaccccagctcaaaaaaaaccggttaaagatgtaaatcataagccccaggaaaataaacgcgacgaaactaaacctgccccaagaaacaatgttgacggaaaaccagaacggtcctttaatagattcaataatgaaaatcgtgaagaaagaaataataggcgaaaccgtgaggatagaccatataatggaccatctgaaaatagggatcgtgaagaaaggcctaggagagaacctgcgactggagattttgaaaaccgcaacaatcgtgatcgaggagaacgacgtgaaggacgtgagggacgcgcaattggaaacagacccggagcaccacgtggccaacgtaggaattttgatggagacaggcgaggcaaaagggaattcgataggcaaagcggatcagacaagacccatggttacagaggagttaagccgatcgacaagcgtgacggagctggggcacacaattggggatctcacaaggatgttattgaggaagcagacaggcctaataccgatgctaacgaaagttggggagacgaagttaaaattgaacctattgaaacggaaaagaaagaggaaggaagaccagaggaaggaagaggaggagaggaacagacaccagtagaagaagaaccaaaagaattgaccctagatgaatggaaggctcaacgcgctggacgtgctaaaccccaattcaatattaggaaagctggtgaaggagaggacccaagccaatggaaaaaaatgtttgaacttaggaaaaaagaaaaggatgaggaaactgatgaagaagaatatgatgtctcagaatatccccaacgtgttggtagacaaaagcatctcttggacatcgagattcaattcaatgacagtgtacgcagaggtggtggacgcggaagaggacaaagatctgggggcccaagaggtggtggaaatcgcggtggtggtactggtggtagtggtggcggcggtggcaatcgagctagagaaagtgatagagatagaccagaaagacgttaccataatgatgctgttgatgagagaaacgatgcccgccaagctcctaaggtagatgacgaacgtgatttcccctctcttggctaatggttagcccccagacagtcgttcactaagtattatcagctattttagtggattactacaatggggcgactatcatcacaataaaactgtatattattacaatttaactactttgttatgtcggattccgacataaacaggtctttagaatttcttagcaagtttttcaaatattctataggaatttctttcgaaaatatctcattttgagctattgcaacacgtggactgccgcgcctttgacgccataatataaacaaaagtacagcagacaccgtttctaatgcggtatttttttgaggaataaactatattcagtgtagactggaacactctgaaaggtggtgactactagtcagtgttatgctgtattgttaaacagtttcaattgtcgctgatgctcatgttaacatttgttcatgatgccatttttcaatttgcattttttattacgaagttttaattatttagttataggtttaaaaaaatcgacaggaaaaatttggacatggatgatagtaacgccagtctcgatatattcatattataattaatttatcatattgtaaatgtattttttgggttgctttgtcgcttttctgtatccttaaatatagcatcagctgtatcattttgtcaatgtattgctgtcattaattcaatgagaggaagagtactcattatatcagttcagaaaggcttggaccattttgctcaaggggatattcatgtaccaatcgaacaaaaacctagagttattcattttacagtacgggtatacaagaattaatacaaaatgcaaaaggttaagtgtacaattttttcggataggatataccggatatcctacaaaagacagacaccttccaaagcatttaacgaatcgggcctaagtggatgtgatatctgtaggtttgagtcaacgtttctgacttacgaaatgcttcagtcgaaactgctgtatctatcttcctctttaccaactatttataatcccatcctatttgctcgcattgatcatgtacatacacagggccgctgtatccattaggcaatataggcagttgcctagggcggcaaattatgagagggcggcaaaagcaaaaatacgcaaaaatggtacatgtttgaagggcggctactagagaattacctagggcgtcaattcacctaaatgcggctctgtacatacatacatacttacataatcgatgttcctcttataccggaaggtgtcgaggattgatcatgtttttgacataattttcaacaaaaagaacaacacgaattatgcaaggaaagaataacacaaaaataaaatattaatcagttgcaaaagtacgagagtattgaaaagcgacaacgttcgtatcgacaatagtttattttttgttaaaagcttttttaattatagacttgtaattaattgtattttatagctattggctcatgttgctggtattacgaaccaattgtattgccagtaacatgttaattttgaaagataacacaaaaatggactccgatctgtgaaatgaacaatttctgtccttatggtgacatatgttcactttcgcagaaactggaaaggtgtgtgttgcgggcaggcgcatccgtttagttttactgaagttgtctgccaaattaacactttcagctctgggccaatatcagatattggtctcatgtgccacttttatacagtcattggaaaattgttgaaacgtgaacacggtagtcgtgtcggcggtacctgattaaaaacagtgaacacgcgagtcgtgtcgccggacttgaaagtgttaagacctgaaataattttgcttttccatttaacagtttttctatcagtgttagatgtcaatacatttacaatttgggacatactcgtatcatatttttttactacgactgaatagttttgtattcatctaaatgtgtcgagaacactagtaacactacgggattttcatgtgtggtaattttaagttacaattgattatatattgttgtaaaaaccttcaattcaaaacaacattttcgagtagttaaacgtgtatgatacacacatttcttcaataaaatgttttgttgtaac

SEQ ID NO: 3155 - DNA, 3511 bp, Diabrotica virgifera
  SmartBlast Evalue=3E-37; Info=Plasminogen activator inhibitor 1 RNA-binding protein n=1 Tax=Camponotus floridanus RepID=E2ADR8_ 9HYME
gaaaagtcgcctgctattacctcgtgcgaccgcgaccggccatattgtagtgaatgattgactgagtgacgtacggctaaagtagccataaataaatcttccaacatctgaaagttgcgaagagctttccaataattaaccatcatggaaaatacgtatggaattggcattgccaataggtacgctctttttttggatgatgaatccgatccattggaaacgcttactttaaaagagcaggaaaaagaactgaaaaagaaaagcaaagtggccgagaaagaaaacaaagtgaaaacaccgaccataccaaagggaaaaccgaccccagctcaaaaaaaaccggttaaagatgtaaatcataagccccaggaaaataaacgcgacgaaactaaacctgccccaagaaacaatgttgacggaaaaccagaacggtcctttaatagattcaataatgaaaatcgtgaagaaagaaataataggcgaaaccgtgaggatagaccatataatggaccatctgaaaatagggatcgtgaagaaaggcctaggagagaacctgcgactggagattttgaaaaccgcaacaatcgtgatcgaggagaacgacgtgaaggacgtgagggacgcgcaattggaaacagacccggagcaccacgtggccaacgtaggaattttgatggagacaggcgaggcaaaagggaattcgataggcaaagcggatcagacaagacaggagttaagccgatcgacaagcgtgacggagctggggcacacaattggggatctcacaaggatgttattgaggaagcagacaggcctaataccgatgctaacgaaagttggggagacgaagttaaaattgaacctattgaaacggaaaagaaagaggaaggaagaccagaggaaggaagaggaggagaggaacagacaccagtagaagaagaaccaaaagaattgaccctagatgaatggaaggctcaacgcgctggacgtgctaaaccccaattcaatattaggaaagctggtgaaggagaggacccaagccaatggaaaaaaatgtttgaacttaggaaaaaagaaaaggatgaggaaactgatgaagaagaatatgatgtctcagaatatccccaacgtgttggtagacaaaagcatctcttggacatcgagattcaattcaatgacagtgtacgcagaggtggtggacgcggaagaggacaaagatctgggggcccaagaggtggtggaaatcgcggtggtggtactggtggtagtggtggcggcggtggcaatcgagctagagaaagtgatagagatagaccagaaagacgttaccataatgatgctgttgatgagagaaacgatgcccgccaagctcctaaggtagatgacgaacgtgatttcccctctcttggctaatggttagcccccagacagtcgttcactaagtattatcagctattttagtggattactacaatggggcgactatcatcacaataaaactgtatattattacaatttaactactttgttatgtcggattccgacataaacaggtctttagaatttcttagcaagtttttcaaatattctataggaatttctttcgaaaatatctcattttgagctattgcaacacgtggactgccgcgcctttgacgccataatataaacaaaagtacagcagacaccgtttctaatgcggtatttttttgaggaataaactatattcagtgtagactggaacactctgaaaggtggtgactactagtcagtgttatgctgtattgttaaacagtttcaattgtcgctgatgctcatgttaacatttgttcatgatgccatttttcaatttgcattttttattacgaagttttaattatttagttataggtttaaaaaaatcgacaggaaaaatttggacatggatgatagtaacgccagtctcgatatattcatattataattaatttatcatattgtaaatgtattttttgggttgctttgtcgcttttctgtatccttaaatatagcatcagctgtatcattttgtcaatgtattgctgtcattaattcaatgagaggaagagtactcattatatcagttcagaaaggcttggaccattttgctcaaggggatattcatgtaccaatcgaacaaaaacctagagttattcattttacagtacgggtatacaagaattaatacaaaatgcaaaaggttaagtgtacaattttttcggataggatataccggatatcctacaaaagacagacaccttccaaagcatttaacgaatcgggcctaagtggatgtgatatctgtaggtttgagtcaacgtttctgacttacgaaatgcttcagtcgaaactgctgtatctatcttcctctttaccaactatttataatcccatcctatttgctcgcattgatcatgtacatacacagggccgctgtatccattaggcaatataggcagttgcctagggcggcaaattatgagagggcggcaaaagcaaaaatacgcaaaaatggtacatgtttgaagggcggctactagagaattacctagggcgtcaattcacctaaatgcggctctgtacatacatacatacttacataatcgatgttcctcttataccggaaggtgtcgaggattgatcatgtttttgacataattttcaacaaaaagaacaacacgaattatgcaaggaaagaataacacaaaaataaaatattaatcagttgcaaaagtacgagagtattgaaaagcgacaacgttcgtatcgacaatagtttattttttgttaaaagcttttttaattatagacttgtaattaattgtattttatagctattggctcatgttgctggtattacgaaccaattgtattgccagtaacatgttaattttgaaagataacacaaaaatggactccgatctgtgaaatgaacaatttctgtccttatggtgacatatgttcactttcgcagaaactggaaaggtgtgtgttgcgggcaggcgcatccgtttagttttactgaagttgtctgccaaattaacactttcagctctgggccaatatcagatattggtctcatgtgccacttttatacagtcattggaaaattgttgaaacgtgaacacggtagtcgtgtcggcggtacctgattaaaaacagtgaacacgcgagtcgtgtcgccggacttgaaagtgttaagacctgaaataattttgcttttccatttaacagtttttctatcagtgttagatgtcaatacatttacaatttgggacatactcgtatcatatttttttactacgactgaatagttttgtattcatctaaatgtgtcgagaacactagtaacactacgggattttcatgtgtggtaattttaagttacaattgattatatattgttgtaaaaaccttcaattcaaaacaacattttcgagtagttaaacgtgtatgatacacacatttcttcaataaaatgttttgttgtaac

SEQ ID NO: 3156 - DNA, 2646 bp, Diabrotica virgifera
  SmartBlast Evalue=6E-85; Info=Inter-alpha-trypsin inhibitor heavy chain H4 n=3 Tax=Bos taurus RepID=ITIH4_BOVIN
tatttgttcatcgctacttgattcagtcgatcgtgtgagaaagtagaagacagaggtgttaaatagcaataattatgaaggtaaagttccttatattaccatttttggtaatattaaatttaagggccgtattttccgcaccaggagatgtaagttttattatatcgacaactgaacaaccaaaagaaggcaaggaaggagtgaccacagatattgaagatgtttacttggtgcctgtgatttatgaaatggatgtacattccaatgtaacgaatcgttacgctaagactgtgataacaaatagggtaaaaaacccagctaagtcagccaagcaaacaaccttctctgttgttcttccagaaaaagcatttatttcggaattcgtgatggaaattggctggaacaagtaccaagcttacgtcagggaaaaagaagaggctaaaaaaatttatactaaggcagtagaaagtggccaaagcgcagctcacgtagcgataagtaccaaagattccaacaccttcacagtttccgttaacgttggagctgaagaaaaggcaacattctatttgacatatgaagaacttttggaaagaaaaaataaccaatacgatttagttcttaacattcgtcccggacaaatagttgaccatcttaatgttcaagtatacatcaacgaatccagacctttggtctttgtgaaaactccatctctaagatctggcaatgaaatcgctaaaaacagcgataaacttgaccctgcctcttttgtagaaatcattaactctaccagtgctctagttaagttccaaccagacgttgttaaacaacaagaatatgctaaggaattaggaggaatagaattaaatggtcttgcagcgcaatttatagttcagtacgaagttgaaagagacccacaaggtggagaggtgttgttgcaagatggatacttcgtacactttttcgtaccaaaggacgcagaagtcatccccaagcatgtatacttcatcttagatacaagttccagtatgtacggtaacaaactccagcaagtcaaagatgccatgaccagtattttggaggagataaaacccgaagactcactcagtattgtcgaattcaacagcgaaatatacgtgtgggacatagacaatgagaaatcagttcttgctcagtgggacaactacagagaaccgtttgaacaattaggtaaacttaacttaccaggaccagtgtcagcaacaaaggaagcaattgagaaagctaagaaacttgtcgaaaacatgcaagctggaggtggcactcacatgattggtggattggatgctggcctgtatcttgtaaaatctgaaatagaaagaactaaagaaagcaacgatcatagacaacctcttataatattcctaactgacggacagcccaacataggtttacattctacaattgaaatcattgatgtggtcactaagttaaacgaaaacatcaaaactccactgtacactctagcttttggagaatctgccgacgaaaatttcttaagaaaactctctttgaaaaacaaagcattctcaagacaaatatacgaatcagcagatgccgccatccaactgcaacaattctacagacaaatatcctctccacttctatcaaatgtccatttcaaatacaacgacgatgctagtgaagttacaaacacaggatttcctattttgtacgctggtggagaaattgttgttactggacgattcgtaggtaatagttttgatcctgcaattagcgctgttggtaaacgaggacctttaatatatagaccaagggttcacaagcctgtaaattcgttggaacgtctttgggcgtacttgactgtaagggaaaccctcgagaaaatgaaaattgccaaagataaaacagaacttactaagaaagctttgaagctggcacttaagtactcgtttgttactgaggtgacatcattggttgtagtgaaacccaactctacacgtcccatatatgcagatgacggatatcttcgaagtgaaggacaagaatattcgaccccggcttttcacgcatacggaagaggtggacgacctgctggaggtcaacacaaagtagcatactccgccgtctcatccagttcattcgtaagcaacagagaatctgttgtacatgtacaacaaataccacgaccacgaagaccaagagtacaaacaacaacacataaaccaacaccactaccaacaccgactgaaacatctaaaaacgccacactagaagactctttaaaatggttgtcggccgctttaagtgaaaagaaaactttaaccgtgccatcaggtgaattaaaacttggtgatgattcattaaaaattgctgccactgaaacttgtccaaaaactcccgaaggcaaagaaggtgtttgctctctcattaaagattgccctcaagtattcccacaattggctgatttcgaagtatacaagaccttctcctgtgttatgcaaaaagaatatgctggagtctgctgcccaaagaaagctgaagttgctgcttaagaatattgttgattgttgttattttctaatgaaatctagaagttgttaaaggttatttttataagtgtaattttttttaaatatataaattcat

SEQ ID NO: 3157 - DNA, 2646 bp, Diabrotica virgifera
  SmartBlast Evalue=2E-85; Info=Inter-alpha-trypsin inhibitor heavy chain H4 n=3 Tax=Bos taurus RepID=ITIH4_BOVIN
tatttgttcatcgctacttgattcagtcgatcgtgtgagaaagtagaagacagaggtgttaaatagcaataattatgaaggtaaagttccttatattaccatttttggtaatattaaatttaagggccgtattttccgcaccaggagatgtaagttttattatatcgacaactgaacaaccaaaagaaggcaaggaaggagtgaccacagatattgaagatgtttacttggtgcctgtgatttatgaaatggatgtacattccaatgtaacgaatcgttacgctaagactgtgataacaaatagggtaaaaaacccagctaagtcagccaagcaaacaaccttctctgttgttcttccagaaaaagcatttatttcggaattcgtgatggaaattggctggaacaagtaccaagcttacgtcagggaaaaagaagaggctaaaaaaatttatactaaggcagtagaaagtggccaaagcgcagctcacgtagcgataagtaccaaagattccaacaccttcacagtttccgttaacgttggagctgaagaaaaggcaacattctatttgacatatgaagaacttttggaaagaaaaaataaccaatacgatttagttcttaacattcgtcccggacaaatagttgaccatcttaatgttcaagtatacatcaacgaatccagacctttggtctttgtgaaaactccatctctaagatctggcaatgaaatcgctaaaaacagcgataaacttgaccctgcctcttttgtagaaatcattaactctaccagtgctctagttaagttccaaccagacgttgttaaacaacaagaatatgctaaggaattaggaggaatagaaataaatggtcttgcagcgcaatttatagttcagtacgaagttgaaagagacccacaaggtggagaggttttgttgcaagatggatacttcgtacactttttcgtaccaaaggacgcagaagtcatccccaagcatgtatacttcatcttagatacaagttccagtatgtacggcaacaaactccagcaagtcaaagatgccatgaccagtattctggaggagatcaaacccgaagactcactcagtattgtcgaattcaacagcgaaatatacgtgtgggacatagaaaatgagaaatcagttcttgctcagtgggacaactatagagaaccgtttgaacaattaggtaaacttaacttaccaggaccagtgtcagcaacaaaggaagcaattgagaaggctaagaaacttgtcgataacatgcaagctggaggtggcactcacatgattggtggattggatgctggcctgtatcttgtaaaatctgaaatagaaagaactaaagcaagcaatgaccatagacaacctcttgtaatattcctaaccgatggacagcccaacataggtttacattctacaattgaaattattgatgtggtcactaagttaaacgaaaacatcaaaactccactgtacactctagcttttggagaatctgccgacgaaaatttcttaagaaaactctctttgaaaaacaaagcattctcaagacaaatatacgaatcagcagatgccgccatccaactgcaacaattctacagacaaatatcctctccacttctatcaaatgtccatttcaaatacaacgacgatgctagtgaagtaacaaacacaggatttcctattttgtacgctggtggagaaattgttgttactggacgattcgtaggtaatagttttgatcctgcaattagcgctgttggtaaacgaggacctttaatatatagaccaagggttcacaagcctgtaaattcgttggaacgtctttgggcgtacttgactgtaagggaaaccctcgagaaaatgaaaattgccaaagataaaacagaacttactaagaaagctttgaagctggcacttaagtactcgtttgttactgaggtgacatcattggttgtagtgaaacccaactctacacgtcccatatatgcagatgacggatatcttcgaagtgaaggacaagaatattcgaccccggcttttcacgcatacggaagaggtggacgacctgctggaggtcaacacaaagtagcatactccgccgtctcatccagttcattcgtaagcaacagagaatctgttgtacatgtacaacaaataccacgaccacgaagaccaagagtacaaacaacaacacataaaccaacaccactaccaacaccgactgaaacatctaaaaacgccacactagaagactctttaaaatggttgtcggccgctttaagtgaaaagaaaactttaaccgtgccatcaggtgaattaaaacttggtgatgattcattaaaaattgctgccactgaaacttgtccaaaaactcccgaaggcaaagaaggtgtttgctctctcattaaagattgccctcaagtattcccacaattggctgatttcgaagtatacaagaccttctcctgtgttatgcaaaaagaatatgctggagtctgctgcccaaagaaagctgaagttgctgcttaagaatattgttgattgttgttattttctaatgaaatctagaagttgttaaaggttatttttataagtgtaattttttttaaatatataaattcat

SEQ ID NO: 3158 - DNA, 1382 bp, Diabrotica virgifera
  SmartBlast Evalue=1E-73; Info=Serpin peptidase inhibitor 19 n=1 Tax=Tribolium castaneum RepID=D6WWG8_TRICA
tatttgttcatcgctacttgattcagtcgatcgtgtgagaaagtagaagacagaggtgttaaatagcaataattataaaacagaccatgaagcgtgccatcattttagcactcgctatagctacaacactagcagctccatctgacgtccaaggtccacttcaacaattagcaattggaaatcaacaactaacgtcaaatgtatacaaagaaattcttaaaactaagaatggaagtattatcttcagtcctttttctgctgaaaccgtattagcgctgacctctgaaggagcgaaaggtgacactagaagccagctaatatctgcgctacaccttccagaatcacaagagactatccaacaaggatttaaggaacttttaccacaactgaatatcaataatgagtacgcagtattagcttcagctaataaaatatatgtagccaacggtatcaagctagaagacgattttaaaaagaccgctgaaagcatttacgcatcaggactggaacaagtagatttctcaaacagtgcaaaggcagccaacataattaaccagtgggtggaaagccaaacaaacaaaaaaattaaagatctcattaaacctgagtatattaccagcgacactataatggctttaattaatgcattatatctaagcgctgaatggtctacagtttttcaagattataacactgtaacagataaattctacataacagcttccgaacagatagatcaaccaaccatggcaatgactgaaatatttaaatattctgaaaacaaagacctcgacactcaatttttggaaattccgttcaaagcgaatggtcttgtttttagcgttgctttacccaacaaaaaagatggcatagctgccttagaaaataacattgaaaaagtatttgaacctcagcaatatactcataaacctgtacatttgaggctaccaaaatttaccgttgaaaccgagttgaatttgaaaaccattcttaaatcgttgggtgttcaaaagctcttcaactttgacgctgatcttagtggattggcaaagaacgccaaagagttacgtgtgtcagaggtaattcaaaaagctttcatcaaagttggtgaaagtggcgtcgaagcagcggctgccactgctgttttagttgaaaccaggtccggacgtttcttcatcgaaaacccaatcaagtttttcgccgatcatcctttcgtgtactttattaaatataataatgttatattgtttgctggaaagtacagtccttagggtgctcgtcacgacactacaattgtttgtatagttccaataattaacttcataaatgtcataatatgatgtgttctttatgttataaaattatattgacctaatgaatat

SEQ ID NO: 3159 - DNA, 2922 bp, Diabrotica virgifera
  SmartBlast Evalue=0; Info="Calnexin, putative n=1 Tax=Pediculus humanus corporis RepID=E0W030_PEDHC"
acttattcatttcatccatgttaattaagtatgcagatacgattagaagttatttcttagatgattcgatacaaatgtgcaaaataccaattgttcaaataatttgctcacaagcaaatgttatagtaatgtcttttttctttttttgcatctgaaaattgtatcagcaaattatgtcacaacctgtttacaataaaaaaggtatacccatgtttaaattacaactaataaatacatattggtccatacagaaatatgattaaattaaacatattacaataaaacctccgttaaccgaaacctttttaatcgaaacatcgtttttaaacgaaacggctgacagtttcaataattttgtcaataaaaagtaaatttttatcgcaaaacgttatcgaaacaattaatgttaatttttcaacatcgtcaacattgctttcaaacaactaaagaacgcaatcacgtcatagtcctttttaatactaactttgaccaaatgtaatttggtacaagaagaatacaaaaaacaatgttatttttatccgaaattcgacccccccccccccccacaattatttcggttagcgtaggttttactgtagtatcaaacttaattgtcgaataatcccatttataaagaaatcttcaatttggttaaatatccgtaaaaaatctaatttttattcttaaaatttaatcaaactgatctcaaactaatcaatgttcattgattggcaaacatttgacttttttaaagcccatgctcatttaaagtgttcaaataattaagattacaaacatttttatttctactatgtaaaaaagtgaatttataatttgtctattggctagaaataataataaataaaacgcaattcctccatctttttatgtgtagtatatacaagtcttggaacgaaaagaacatatacaaggtgatacctagtgacgatacagttttaaataaaacgtaatgagaattcagctacaatcgtacacatcaataatttagaaaaagttcgattttttcttttttggtgttgacgaaaatatacacgaacataatgcgattcaatccaatcgctttttattcttttctgactttcctctttctggtaccatctcctgaaggctggctcttttcgccctcttccggctccgcagtttcattatctgaatcaggttcagaatttttctcttgttcttcgtcatcgccttcctcctcttcagcttcaggtgcttcattctcttcctcgactccctcagtcaattcatcagtcttttttgtttctgccgctttattgagttcctctctttcctgtttctgactagcagaggaactgggtttacagcaaaggtacaaaataaatattacaggtacagcaaggacaagaatgtaaaccgcccataggaatggatattcgttagtaaggctagctaacctttgaacaaagctttccgaatccttggcaattttttgacgtttcttgtcaaaggtatcagaagcccatttattggctatagttatatcttctgttatgagtaaattatcaaaaagaatatcttgagacatcgaccaaagctctaaaccaacggcagacacagtggtcatcttgaatggatgttgatcatcaaaataatctggatttggaatcttcttaggcctccattttcccttatagttaggattggtaatgagacgtggtctccatttacctttataacttggattattgatcaatgggggttcccaatgtccacatcctgcggcagctttgcatgctggattttctatcaatggtggttcccattcaccatccatatcgctgtcccagtctgctggttttatagcatctggatctggaacgtgagttggctcgttttctaaccaaccttctggtatcgactctgattcgtcaaatatttgtggtggagcatcttcatcccaatcagctggttttctatcgtcaggatctggaattttctccctctcatcccaatcttctggttttttatcattagggtcatcgatttcggctggaggatttactggaggtacgaaatcttcaagtagacttccagagtttactactttcttatctacggaaatttcaaaagtattgtctggatttagaactaaggtgtataaatggggaagtttatcggaaaagtactcctctaggcgttcctttggcttctgacaatgtttttcttcgatgctaccattcaatggatttctatgcctgaagataaaatgcaatttatgatcgtttccacacttatcaggcccaaacataatggtgtagggagttttatcatggaaattattgagattcttggattctggaccttcacttagtaattttaagtaagatcctccacattcttggccttcttgtaacagtacttcatactgtaagatcaatggcttatccgcaaacacaaacggctttgatagatgcgctgaaatcgctgcatgtttggctttagttttgagtaccaaaccactgtcattgggtaagctatcctttgttgcagcttctacttcccactgtccatcatattttgctatgtcttcttctattccttcttttttagcttgagatttaatccatcgcttttgaaatagtgcaggatcatcaaaatgttctgcgaagtacactttcttgggatctaatgggactgggctttcataagcaacatcaggaactgactcatctactgtttcaactgttatgtcatcatcatcagcattatcacctattactccacctattaataaaaccaccaggatgagagttcttatcctacaattcattgctatatccacaaggcatacaactctgatatttaataacagtgttattcagagttttcaactttccaaaattgaataatgattaaaaagcaataaccggaatactg

SEQ ID NO: 3160 - DNA, 2922 bp, Diabrotica virgifera
  SmartBlast Evalue=0; Info="Calnexin, putative n=1 Tax=Pediculus humanus corporis RepID=E0W030_PEDHC"
acttattcatttcatccatgttaattaagtatgcagatacgattagaagttatttcttagatgattcgatacaaatgtgcaaaataccaattgttcaaataatttgctcacaagcaaatgttatagtaatgtcttttttctttttttgcatctgaaaattgtatcagcaaattatgtcacaacctgtttacaataaaaaaggtatacccatgtttaaattacaactaataaatacatattggtccatacagaaatatgattaaattaaacatattacaataaaacctccgttaaccgaaacctttttaatcgaaacatcgtttttaaacgaaacggctgacagtttcaataattttgtcaataaaaagtaaatttttatcgcaaaacgttatcgaaacaattaatgttaatttttcaacatcgtcaacattgctttcaaacaactaaagaacgcaatcacgtcatagtcctttttaatactaactttgaccaaatgtaatttggtacaagaagaatacaaaaaacaatgttatttttatccgaaattcgacccccccccccccccacaattatttcggttagcgtaggttttactgtagtatcaaacttaattgtcgaataatcccatttataaagaaatcttcaatttggttaaatatccgtaaaaaatctaatttttattcttaaaatttaatcaaactgatctcaaactaatcaatgttcattgattggcaaacatttgacttttttaaagcccatgctcatttaaagtgttcaaataattaagattacaaacatttttatttctactatgtaaaaaagtgaatttataatttgtctattggctagaaataataataaataaaacgcaattcctccatctttttatgtgtagtatatacaagtcttggaacgaaaagaacatatacaaggtgatacctagtgacgatacagttttaaataaaacgtaatgagaattcagctacaatcgtacacatcaataatttagaaaaagttcgattttttcttttttggtgttgacgaaaatatacacgaacataatgcgattcaatccaatcgctttttattcttttctgactttcctctttctggtaccatctcctgaaggctggctcttttcgccctcttccggctccgcagtttcattatctgaatcaggttcagaatttttctcttgttcttcgtcatcgccttcctcctcttcagcttcaggtgcttcattctcttcctcgactccctcagtcaattcatcagtcttttttgtttctgccgctttattgagttcctctctttcctgtttctgactagcagaggaactgggtttacagcaaaggtacaaaataaatattacaggtacagcaaggacaagaatgtaaaccgcccataggaatggatattcgttagtaaggctagctaacctttgaacaaagctttccgaatccttggcaattttttgacgtttcttgtcaaaggtatcagaagcccatttattggctatagttatatcttctgttatgagtaaattatcaaaaagaatatcttgagacatcgaccaaagctctaaaccaacggcagacacagtggtcatcttgaatggatgttgatcatcaaaataatctggatttggaatcttcttaggcctccattttcccttatagttaggattggtaatgagacgtggtctccatttacctttataacttggattattgatcaatgggggttcccaatgtccacatcctgcggcagctttgcatgctggattttctatcaatggtggttcccattcaccatccatatcgctgtcccagtctgctggttttatagcatctggatctggaacgtgagttggctcgttttctaaccaaccttctggtatcgactctgattcgtcaaatatttgtggtggagcatcttcatcccaatcagctggttttctatcgtcaggatctggaattttctccctctcatcccaatcttctggttttttatcattagggtcatcgatttcggctggaggatttactggaggtacgaaatcttcaagtagacttccagagtttactactttcttatctacggaaatttcaaaagtattgtctggatttagaattaaggtgtataaatgaggaagtttatcggaaaagtactcctctaggcgttcctttggcttctgacaatgtttttcttcgatgctaccattcaatggatttctatgcctgaagataaaatgcaatttatgatcgtttccacacttatcaggcccaaacataatagtgtagggagttttatcgtggaaattattgagattcttggattctggaccttcacttagtaattttaagtaagatcctccacattcttggccttcttgtaacagtacttcatactgtaagatcaatggcttatccgcaaacacaaacggctttgatagatgcgctgaaatcgctgcatgtttggctttagttttgagtaccaaaccactgtcattgggtaagctatcctttgttgcagcttctacttcccactgtccatcatattttgctatgtcttcttctattccttcttttttagcttgagatttaatccatcgcttttgaaatagtgcaggatcatcaaaatgttctgcgaagtacactttcttgggatctaatgggactgggctttcataagcaacatcaggaactgactcatctactgtttcaactgttatgtcatcatcatcagcattatcacctattactccacctattaataaaaccaccaggatgagagttcttatcctacaattcattgctatatccacaaggcatacaactctgatatttaataacagtgttattcagagttttcaactttccaaaattgaataatgattaaaaagcaataaccggaatactg

SEQ ID NO: 3161 - DNA, 567 bp, Diabrotica virgifera
acttattcatttcatccatgttaattaagtatgcagatacgattagaagttatttcttagatgattcgatacaaatgtgcaaaataccaattgttcaaataatttgctcacaagcaaatgttatagtaatgtcttttttctttttttgcatctgaaaattgtatcagcaaattatgtcacaacctgtttacaataaaaaaggtatacccatgtttaaattacaactaataaatacatattggtccatacagaaatatgattaaattaaacatattacaataaaacctccgttaaccgaaacctttttaatcgaaacatcgtttttaaacgaaacggctgacagtttcaataattttgtcaataaaaagtaaatttttatcgcaaaacgttatcgaaacaattaatgttaatttttcaacatcgtcaacattgctttcatacaactaaagaacgcaatcacctcatagtcctttttaatactaactttgaccaagaatactatgtaatttgatacaaaaatacaaaaaaaaatgttatttttatccgaaattcttgttatcagaaacg

SEQ ID NO: 3162 - DNA, 2713 bp, Diabrotica virgifera
  SmartBlast Evalue=9E-11; Info="Variable membrane protein, putative n=1 Tax=Trichomonas vaginalis RepID=A2FNC4_TRIVA"
gtttatttcttccttactaggtttaccgtcctgttctttgtcagaagacttctttttggaaaacagtcctccaaatcgtttactcttttccttttcttttactaaaggttcatcttgtctttcaataagttttacgtcatgataattgtttatttcatcccctaaaaagtcatcagaagaaaccaaatcttctaattcttgactggctttttctggttgtgtagtatcagatttttttggtgtgctgtcttcgtatttgtccaattcagtattcaaaaagttagaagtctcgtgtttttttaattcctcagcttctactgtcctcatgtcagttgtatagactctcttttctgttgtttctttcacgaatacttcgttcaaataaccaccttctttgataaaatgtttttctgtaataataatttgtttattgccttcaccttctggtttgctgatttttgaaggactcgctttaacttctggatcggaggttgttttcataactggctcgatttctgttgctggtggtgcacttggtactcgttccaatggacgaacatcatggtacttttcaatttcacttctgaggaaattgtctgaatcattcatagacttagtaacgtctacagatattggtttttgaacttcacgttcttttttgatagatttttcttcctttgtaggtaattttttaatggtgtctgttttttgtttaatctctttttcttcagattcctttttcttaaagattccaaacaggcctttgccttctttagtcttggtttcttttacatatttctcgtcagtcgttgtagaaagagtttgtgcaacatcatggaaagtatcgatttctggtttcaagattttatcgctatcgatagttggttctgcacctgaaggtagttcagtggtgaagatttcgtgtgtaacgtgagttgttgtaatcagtttagcttcaggagctcgttcggtgattgcaatttctgttttaggagaaggaatatctatggagataggttctttaaatttcactttagtctcttctacgttatcgacaatctccttgatagcttttacgttgtcatctattggtctgacgtcatgatatttatctacctcagtttgcaagaagttgttactctgcgttatgttctgaattgtttcttctgataacttaggctgtttctttttaataccaaatattgggcttactttttcagacttttctttttgtaaaactttcacttcgctttctaaagaatctgcttttttcttaaagatggtaacactttccttttctccctttgttttagattttctaggcaatttttctggcttttgttcgtcaggagctgctctgacatcaactttaatatgttcatctttgactggttgtctaataatgggcctcacgtcatgatatcggtctatttcatcttttaagaacgaattactatcaagcatgtctttcacaactgtgtctgatagaataggtttatcttctttaccaacgggatctagtttggttcctctttctagtgatcctcccttcttcttaaataaaccaaaaaagccaccctttccgtccttatctttatcttttttctttgagttttcttcaggctttatagattcttctggcttggcagtgactgtaacaacttcctttttcactgtcattataataggtcgaacatcgtggtatttatcgatttcggtgtccaggaatttgttgcttttatcaatgttctcaatgactgattctgaaagtttggaagcttctttgggaatagctatatccatctttacagcaggcatatctacttctgttactttctgatattcttgttgagattcctttactatctcggtactaatatcttttgagggatcagtttcttttcccaaatcttgtagcttttcattaatttctttttctaatttttctatatccgttaagacatccgaagtaagttgtattgtaccagttattacctctgatgttactttggtaactctttcaccatgaggtatttcttctttagttattgttgtagttactgttcttttgggactttcatctttaagactttcaagtaatttgtcagtagtacctgttgatatttgttctttaatagtttgactttgatctttttctgttattaccttttgttctagtaaaggtgctgatattattgttattgtttttgatgagtctttttgaggaagaggtttaacatcatgatacttttcaatttccaaatttaagaaattgctactgtcatctatttctttaagttttgtttccgacaacttgggtttagtttcttcgggagatatttttttaatagtagttgttactttagttttaacgatttcaccagattcctttaagtcttgcttaatttgttgagtttcatctttaaagtctttttcgatagattctgattttcttttaaagataccaaaaataccaccactttctttgtctccttttgcttttgattttctaggcaccttttctggcttttttcttcaggagtttctctgacatcaactttaatatgctcctcttcaactggttgtccaatactgggtctcacgtcatgatatctgtctatttcatcttttaagaacgaactgctatcaagcatatctttcacaactgtatctgagagaataggtttatcttctttgccaacatgttctagtt

SEQ ID NO: 3163 - DNA, 2420 bp, Diabrotica virgifera
gtttatttcttccttactaggtttaccgtcctgttctttgtcagaagacttctttttggaaaacagtcctccaaatcgtttactcttttccttttcttttactaaaggttcatcttgtctttcaataagttttacgtcatgataattgtttatttcatcccctaaaaagtcatcagaagaaaccaaatcttctaattcttgactggctttttctggttgtgtagtatcagatttttttggtgtgctgtcttcgtatttgtccaattcagtattcaaaaagttagaagtctcgtgtttttttaattcctcagcttctactgtcctcatgtcagttgtatagactctcttttctgttgtttctttcacgaatacttcgttcaaataaccaccttctttgataaaatgtttttctgtaataataatttgtttattgccttcaccttctggtttgctgatttttgaaggactcgctttaacttctggatcggaggttgttttcataactggctcgatttctgttgctggtggtgcacttggtactcgttccaatggacgaacatcatggtacttttcaatttcacttctgaggaaattgtctgaatcattcatagacttagtaacgtctacagatattggtttttgaacttcacgttcttttttgatagatttttcttcctttgtaggtaattttttaatggtgtctgttttttgtttaatctctttttcttcagattcctttttcttaaagattccaaacaggcctttgccttctttagtcttggtttcttttacatatttctcgtcagtcgttgtagaaagagtttgtgcaacatcatggaaagtatcgatttctggtttcaagattttatcgctatcgatagttggttctgcacctgaaggtagttcagtggtgaagatttcgtgtgtaacgtgagttgttgtaatcagtttagcttcaggagctcgttcggtgattgcaatttctgttttaggagaaggaatatctatggagataggttctttaaatttcactttagtctcttctacgttatcgacaatctccttgatagcttttacgttgtcatctattggtctgacgtcatgatatttatctacctcagtttgcaagaagttgttactctgcgttatgttctgaattgtttcttctgataacttaggctgtttctttttaataccaaatattgggcttactttttcagacttttctttttgtaaaactttcacttcgctttctaaagaatctgcttttttcttaaagatggtaacactttccttttctccctttgttttagattttctaggcaatttttctggcttttgttcgtcaggagctgctctgacatcaactttaatatgttcatctttgactggttgtctaataatgggcctcacgtcatgatatcggtctatttcatcttttaagaacgaattactatcaagcatgtctttcacaactgtgtctgatagaataggtttatcttctttaccaacgggatctagtttggttcctctttctagtgatcctcccttcttcttaaataaaccaaaaaagccaccctttccgtccttatctttatcttttttctttgagttttcttcaggctttatagattcttctggcttggcagtgactgtaacaacttcctttttcactgtcattataataggtcgaacatcgtggtatttatcgatttcggtgtccaggaatttgttgcttttatcaatgttctcaatgactgattctgaaagtttggaagcttctttgggaatagctatatccatctttacagcaggcatatctacttctgttactttctgatattcttgttgagattcctttactatctcggtactaatatcttttgagggatcagtttcttttcccaaatcttgtagcttttcattaatttctttttctaatttttctatatccgttaagacatccgaagtaagttgtattgtaccagttattacctctgatgttactttggtaactctttcaccatgaggtatttcttctttagttattgttgtagttactgttcttttgggactttcgtctttaaggctttcaagtaaattgtcactagtatcagttgagattttttcttttatttgactttggtctttgtctattgtcagtttttgtttcagcacaggtgctgctatcactgttgctgtttttgatgagtctctttgaggaagaggtttaacatcgtgatacttttcaatttccaaatttaagaaattgttactgtcatctatttctttaactgttgtttccgacaactttgatttagtttcttcaggagatatatttgtaatagtagttgttactttagttttaattatttcacctgagtcttttaaatcttgcttaattgattcagtttcatctt

SEQ ID NO: 3164 - DNA, 628 bp, Diabrotica virgifera
aacaatacaacttacttcggacaccttaacagatgtagacaaattagagaaagaaattaatgaaaagctaaatgatttgagaaaagaaactgatccttcaaaacacatcagcacggagatagtacagaaacctcaagtgtatcagaaagtaacagaggtagatgtgcctgctgtaaagatggatatagctatgccaaaagaagtgtccaaactttcagaatcagtcattgagaacattgacagtagcaacaaattcctggacacagaaatcaataaatatcatgacgtgcgacctacaataacgacagagaaacaggaagttgttacagttactacccagccagaagaatctatcaaatctgaagataagtctaagaaaaaagataaagataaggacggaaaaggtggatttttcggtatatttaagaaaaagggaggatcattagaaagaggtgtcaaactagaacctgttggtaaagaagataaacctattctctcagatacagttgtgaaagatatgcttgatagcacttcgttcttaaaagatgaaatagacagatatcatgatgtcaggcccattgttagacatccagttgaagaagagcacgttaaagttgatgtcagagcc

SEQ ID NO: 3165 - DNA, 1957 bp, Diabrotica virgifera
  SmartBlast Evalue=1E-13; Info=22 kDa salivary protein n=1 Tax= Phlebotomus arabicus RepID=C6FFU7_9DIPT
gccgacctgaccgtccccccatacttatatttagcggcaggaatccgtacaaagcttcagattttcagaatcatcgagcgagattgtaccgaccgaaagagctactaacaaacatttttactaattttcgtacgtggagtgatatcaacaattttgaatatgaggggaacattggctgttattgcccttttggggtatttgtgctgcacaactgctttaccagcaacttcaaaacaaatagatgacgatattgaacttttttcacctaaagaaacccacgtggaacaacctgttattgacacagatgcaggatttggctttgatggcttctccaaccattttagtggattgtttgacaactttgaatctatattgacaaagataaagcaacaaatggaccagttgatgaacagctttccagtatttagaactggaaattctaccggcgactttcccgattttcctaactttggaggggaccttccacaaatcccccaattcggtgacattgacttaagcaaaggaaacaccacatcagaaactaagatcatcgatggccacaaagttgttatcaataacacacaataccacaaagacggtgaaaacggcagtgccttcttccaagtccgtgtcatagatgtacaacctactgaagctgaagacgctacagcatcagctaacgcaatgcctaaagacagagaggatgtagaaaatagtatagataacgaaattattaaaaacaaagaggttggtacccaaagtgctcccgaaaaactgagagccatctaaaagcatgcgaaaagcctatccttcttccgcaattacaatatataattaatactaatacatctgtaatatatcatatgatccgttttaaatgcagatatcactcatctagaagaaaagcgtcacaactcaaaaaaccgctttttttcgggaaagacaaaaatggattttttagatcttaatttaactgttagtttccaacggtagctgaaaagtttataaattaaaacgaagaatacggataagtgaatgtttctaattatttgataagaaacaaaaccaaaaaactattatatctgatttaaccaaaaaaaaaagatcaacattttgagttatgtcacttttctttaaaacagttggtcacttttttaaatattaaagaaacatactagggagcttctctaaatacaacggttttcctgataaataccgattcgttctcgtcaaatgtcttaaaaccgtcaaatgtcttacgaagttggaagtaaacatctatgtgacacttttcctggtaaaagtatcgaattttcggagccaatttaacaagataactgcaaataactggacttatgcatttttgagttgtgtctttttcttccggaccagcgataggtatatgttcacaaacgacacacgatttcatcaaattatttttatttaatttagactactttgccatatcaaaattcttgtacattaaaaactaatttagcgactattggtattaacagtatactattagtataaataacaataagcttcaagctaaacctgagaatataatagattataataatatactataaaatatagcaactcctggttgttttctccattaattctttttatggttcattttagagctcaataaacgcttctcatcactatattatacaatccaatattttatgtaacattggcatttaaacgaattaatagtttatgcatttgaaacggatatatagattttatacatatacataacaatacagtgatgcttttacctaatagttgtagatgaatacttaatatcagagtatttttattactacttattactattaaaaattaatataatagctgacaggagtctgacgtagtgtaatataaatattatatcgcagtttttattcaattgtataaattttattggtaaataaaggttttgatc

SEQ ID NO: 3166 - DNA, 1939 bp, Diabrotica virgifera
  SmartBlast Evalue=1E-13; Info=22 kDa salivary protein n=1 Tax= Phlebotomus arabicus RepID=C6FFU7_9DIPT
gccgacctgaccgtccccccatacttatatttagcggcaggaatccgtacaaagcttcagattttcagaatcatcgagcgagattgtaccgaccgaaagagctactaacaaacatttttactaattttcgtacgtggagtgatatcaacaattttgaatatgaggggaacattggctgttattgcccttttggggtatttgtgctgcacaactgctttaccagcaacttcaaaacaaatagatgacgatattgaacttttttcacctaaagaaacccacgtggaacaacctgttattgacacagatgcaggatttggctttgatggcttctccaaccattttagtggattgtttgacaactttgaatctatattgacaaagataaagcaacaaatggaccagttgatgaacagctttccagtatttagaactggaaattctaccggcgactttcccgattttcctaactttggaggggaccttccacaaatcccccaattcggtgacattgacttaagcaaaggaaacaccacatcagaaactaagatcatcgatggccacaaagttgttatcaataacacacaataccacaaagacggtgaaaacggcagtgccttcttccaagtccgtgtcatagatgtacaacctactgaagctgaagacgctacagcatcagctaacgcaatgcctaaagacagagaggatgtagaaaatagtatagataacgaaattattaaaaacaaagaggttggtacccaaagtgctcccgaaaaactgagagccatctaaaagcatgcgaaaagcctatccttcttccgcaattacaatatataattaatactaatacatctgtaatatatcatatgatccgttttaaatgcagatatcactcatctagaagaaaagcgtcacaactcaaaaaaccgctttttttcgggaaagacaaaaatggattttttagatcttaatttaactgttagtttccaacggtagctgaaaagtttataaattaaaacgaagaatacggataagtgaatgtttctaattatttgataagaaacaaaaccaaaaaactattatatctgatttaaccaaaaaaaaaagatcaacattttgagttatgtcacttttctttaaaactgttggtcacttttttaaatattaaagaaaaatactagggagcttctctaaatacaacggttttcctgataaataccgatacgttctcgtcaaatgtcttacgaagttggaagtaaacatctatgtgacacttttcctggtaaaagtatcgaattttcggagccaatttaacaagataactgcaaataactggacttatgcatttttgagttgtgtctttttcttccggaccagcgataggtatatgttcacaaacgacacacgatttcatcaaattatttttatttaatttagactactttgccatatcaaaattcttgtacattaaaaactaatttagcgactattggtattaacagtatactattagtataaataacaataagcttcaagctaaacctgagaatataatagattataataatatactataaaatatagcaactcctggttgttttctccattaattctttttatggttcattttagagctcaataaacgcttctcatcactatattatacaatccaatattttatgtaacattggcatttaaacgaattaatagtttatgcatttgaaacggatatatagattttatacatatacataacaatacagtgatgcttttacctaatagttgtagatgaatacttaatatcagagtatttttattactacttattactattaaaaattaatataatagctgacaggagtctgacgtagtgtaatataaatattatatcgcagtttttattcaattgtataaattttattggtaaataaaggttttgatc

SEQ ID NO: 3167 - DNA, 1487 bp, Diabrotica virgifera
  SmartBlast Evalue=8E-14; Info=22 kDa salivary protein n=1 Tax= Phlebotomus arabicus RepID=C6FFU7_9DIPT
gccgacctgaccgtccccccatacttatatttagcggcaggaatccgtacaaagcttcagattttcagaatcatcgagcgagattgtaccgaccgaaagagctactaacaaacatttttactaattttcgtacgtggagtgatatcaacaattttgaatatgaggggaacattggctgttattgcccttttggggtatttgtgctgcacaactgctttaccagcaacttcaaaacaaatagatgacgatattgaacttttttcacctaaagaaacccacgtggaacaacctgttattgacacagatgcaggatttggctttgatggcttctccaaccattttagtggattgtttgacaactttgaatctatattgacaaagataaagcaacaaatggaccagttgatgaacagctttccagtatttagaactggaaattctaccggcgactttcccgattttcctaactttggaggggaccttccacaaatcccccaattcggtgacattgacttaagcaaaggaaacaccacatcagaaactaagatcatcgatggccacaaagttgttatcaataacacacaataccacaaagacggtgaaaacggcagtgccttcttccaagtccgtgtcatagatgtacaacctactgaagctgaagacgctacagcatcagctaacgcaatgcctaaagacagagaggatgtagaaaatagtatagataacgaaattattaaaaacaaagaggccgtctactatcaacccctagacttagacgaactggattcaggaagcaaattccgacctactggtttatcctacctagtagataactctgaatgggatgacctaaacaagatcgagtccattgacgacaacgctttaaacttcaacggaaatcaacccgagtttgacttaagcagggacacttacgttaacgaattattggcaaaatcgggagctccagtgaatccagacgcagaaatcatcaaaccaattcgggtatctactcaaagagttcagcctgacgcagaaatcatcaagccaattcgagtatctactcagggagttcaacctctgatatcatctagtgaaaaaccttacgacttgagcagggatacttatgttaacgagatactagcaaaatctggagctacaactaattctgatgcagaggtcttcgaaacttcacctaaagcttctactgcagcacccatgttgatcagatttcaacctaagagataactgttcgtttaattgtttttaatttatttatttattattgactaacccacttcgaagaagactgacaacttgattcaccatgttcattatatatccttgccttatcatttaaatgtatctggattattttttaaacgaaaaaaattgtactaacaatgatttcaaaacgaatttataattgcatacataccagtgaagaatctcataatatttggtgactccctttaattttgcatttcata

SEQ ID NO: 3168 - DNA, 1917 bp, Diabrotica virgifera
ccaaaaacgcttatttctcgagatattaaccactgtgtggtgaatggctaattttggtcttcctttatgtgtgtgtgctatcggatttcttgactgtggacttaatccattagccgaactaaatttgcttacgaactaaaatcttatgagatatctgttatacctactctcattatatttttgaatatgaatgacctatttaataataatgatttacaaatataagtacttatctatttcaatgatagcttttttcaattttttttatatctatttttttatttattttatttattattgttttttttaactctaaggattattaactgggatacataagtgctcaggggtctttcagagcaaaatcaaacaagaccagaccacggaaaggagggtcaacaaatggggtaaacaaaggtaacttatatacataatatcacaattttagttttatattattaatgtgtttaattaggatctcatagatacttttatcttttgtagcaatcaatgtatgtaaattaaaaggttttcttatgtcttgtggtcttcctttatgttcatgaacaattcataacttttattataataagacagaaaggttaaaacatgtcccattgtcttcagaaaggtgagaaatatataccatcaaaatttcagattaaagtattaaaatggaacagagttgtagcgattaaacgcaaaaaaacgtgatttcatttttttttattttcagcgtaaaattgcgattttgacaaggtttccccaagtaaaattcaaaatagacctaattttcgttttcagcaccatcaaaaacataaaatatgaccaaaattagccattcaccacaccgtggtcagtatctcgagagagaagcgttgtttggggtgtgccgctcttctataaagtcacataactattttttctatggcatattttgacttaaaattttccagaaaacttcttcatgaattatggtgtattcctgttttcgttaaaattataaactaaaaagtttgtcactaaacttttaaatacacatgaaactaaggcaatctgaagacaaaatgttcaaaaattaacaacttttttttaatttgtttaaacattttggacaaatctcattgtgatctaatacttcagagatgacacagtaaaatttttaaaggaaatgtttacagcgactaaagatacaacgaggtaaaattgaagaatcatcaaaatttatttttctaatttttgcataaaatttgattttttaacatgttccaccaattctataaaaaaataaacttcatattcggattcagcgacgtctaaaacatgaagattgactaaaattggttattcaccttaaagtttactttcgtggtcggtataacgtaattttaggggttgctgccgctcccttaggaagtcactgccatactgtacatcactgagaataaagtgaaagtacataaatattttgaagtttaaactcggggaacactattttgcaatgtattctgatcccagagaaaataacaaaattattgtaaatgtttttaaacacttgcaatatattttattatttttaatttttgtttcataaaaaaatgtcaggtgattcctttttcaaaatattctgtcatattatttacaactctatttacaacagtattttaattttttttattgatagttaagtatgaatttgaaagagtaaaatatatagtttctttaaataaagttttaaatttagatcacaagcagttttcggatgaaaaacgaatggtgtgatctatgtttgaaggatgtgtatcatttctgtagaaaatgttttttagtaataagtatgtatttatttttgtgataactgtttagtgtagcttttgtatattaatgcaatcgtactgtgtaggagaattcaataaa

SEQ ID NO: 3169 - DNA, 1347 bp, Diabrotica virgifera
ccaaaaacgcttatttctcgagatattaaccactgtgtggtgaatggctaattttggtcttcctttatgtgtgtgtgctatcggatttcttgactgtggacttaatccattagccgaactaaatttgcttacgaactaaaatcttatgagatatctgttatacctactctcattatatttttgaatatgaatgacctatttaataataatgatttacaaatataagtacttatctatttcaatgatagcttttttcaattttttttatatctattttttttatttatttatttattttatttattattttttttaactctaaggattattaactgggatacataagtgctcaggggtcaacataattttgacttaaaattttccagaaaacttcttcatgaattatagtgtattcctgttttcgttaaaattataaactaaaaagtttgtcactaaacttttaaatacacatgaaactaaggcaatctgaagacaaaatgttcaaaaattaacaacttttttttaatttgtttaaacattttggacaaatctcattgtgatctaatacttcagagatgacacagtaaaatttttaaaggaaatgtttacagcgactaaagatacaacgaggtaaaattgaagaatcatcaaaatttatttttctaatttttgcataaaatttgattttttaacatgttccaccaattctataaaaaaataaacttcatattcggattcagcgacgtctaaaacatgaagattgactaaaattggttattcaccttaaagtttactttcgtggtcggtataacgtaattttaggggttgctgccgctcccttaggaagtcactgccatactgtacatcactgagaataaagtgaaagtacataaatattttgaagtttaaactcggggaacactattttgcaatgtattctgatcccagagaaaataacaaaattattgtaaatgtttttaaacacttgcaatatattttattatttttaatttttgtttcataaaaaaatgtcaggtgattcctttttcaaaatattctgtcatattatttacaactctatttacaacagtattttaattttttttattgatagttaagtatgaatttgaaagagtaaaatatatagtttctttaaataaagttttaaatttagatcacaagcagttttcggatgaaaaacgaatggtgtgatctatgtttgaaggatgtgtatcatttctgtagaaaatgttttttagtaataagtatgtatttatttttgtgataactgtttagtgtagcttttgtatattaatgcaatcgtactgtgtaggagaattcaataaa

SEQ ID NO: 3170 - DNA, 1273 bp, Diabrotica virgifera
aagatatcgttagtttcatgtttacttggaaaatttatgtgacggtctttttattttataatttttaatcaacacagcattaaaacatgtcataaagatgttttctggaagatctcgtcaaaatttgcaataggaaagaagttatgtgactttgtggatgactgcactcacccaaagaacgcttatttctcgagatattcaccacaccgtggtcggtatctcgagagagaagcgttgtttggggtgtgccgctcttctataaagtcacataactattttttctatggcatattttgacttaaaattttccagaaaacttcttcatgaattatggtgtattcctgttttcgttaaaattataaactaaaaagtttgtcactaaacttttaaatacacatgaaactaaggcaatctgaagacaaaatgttcaaaaattaacaacttttttttaatttgtttaaacattttggacaaatctcattgtgatctaatacttcagagatgacacagtaaaatttttaaaggaaatgtttacagcgactaaagatacaacgaggtaaaattgaagaatcatcaaaatttatttttctaatttttgcataaaatttgattttttaacatgttccaccaattctataaaaaaataaacttcatattcggattcagcgacgtctaaaacatgaagattgactaaaattggttattcaccttaaagtttactttcgtggtcggtataacgtaattttaggggttgctgccgctcccttaggaagtcactgccatactgtacatcactgagaataaagtgaaagtacataaatattttgaagtttaaactcggggaacactattttgcaatgtattctgatcccagagaaaataacaaaattattgtaaatgtttttaaacacttgcaatatattttattatttttaatttttgtttcataaaaaaatgtcaggtgattcctttttcaaaatattctgtcatattatttacaactctatttacaacagtattttaattttttttattgatagttaagtatgaatttgaaagagtaaaatatatagtttctttaaataaagttttaaatttagatcacaagcagttttcggatgaaaaacgaatggtgtgatctatgtttgaaggatgtgtatcatttctgtagaaaatgttttttagtaataagtatgtatttatttttgtgataactgtttagtgtagcttttgtatattaatgcaatcgtactgtgtaggagaattcaataaa

SEQ ID NO: 3171 - DNA, 1177 bp, Diabrotica virgifera
  SmartBlast Evalue=1E-146; Info=Cathepsin L-like cysteine proteinase CAL1 (Fragment) n=1 Tax=Diabrotica virgifera virgifera RepID=Q9GU62_DIAVI
gtaaatcccaatattgatgttttcaaaaaaaatgtatacttaactgttgtctggtgataggctcttgaatataattaaagtgtattttcgattgctatatatagttcgaatttagaaggattctcaaagtatcattttgttgttcttagaaaaatcaaaatgaaactatttgtcgccttcgcagccatcattttgagcgtcagtgctttgtcactcaacgaccattgggaaaactttaaggtcaaacatggcaaagcttacaaaaacccaatcgaggaaagagtccgcttttcagttttccaatccaatctgaaactcatcaacgaacacaatgccaaatacgagcaaggtcttgtaggttacacaatggcagtcaaccagttcgctgacatgacccaagaagagttcaaagccaagctcggtatgcaagcaaagaatatccctaacatcaagacaactcgtcatgttcaagatgtaaatgctgaggttccagactccattgactggagacaaaaaggtgccgttttaggtgttaaagatcaaggacagtgtggatcttgctgggctttcagtgctactggttccctggaaggacaaaattacatcatcaatggccaatcagtaggcctcagcgagcaagaacttttggattgttcctcagactacggaaatggcgactgcgactacggtggtcttatgaccagcgctttcgaatatatcgaagaccacggaatcgaatctgaatctagctatccttacgaagctgaacaaagagaatgcagacgcagttctggcaaagctgcagttaacattcaaggttacaaagaagtagcagccaatgaagaatctttaagacaagcagttggtactgttggtccaatttctgcagcaattaacgctaatcccatccaattctactcaagtggtgtttttgacggccagtgcgcaaatagcaggaatgacttggatcacggcatcctggtcgtaggttatggtgaagaaaacaacaagccttattggatcatcaagaactcatggggtgcagattggggtgagcaaggttacttcagactggagagaaatgttaatatgtgcggattggatttagtgacaagttacccagttctgtaaacatattctcagtcttcataattgaataaaatgtttttataaaaaa

SEQ ID NO: 3172 - DNA, 1192 bp, Diabrotica virgifera
  SmartBlast Evalue=1E-150; Info=Cathepsin L-like cysteine proteinase CAL1 (Fragment) n=1 Tax=Diabrotica virgifera virgifera RepID=Q9GU62_DIAVI
gtaaatcccaatattgatgttttcaaaaaaaatgtatacttaactgttgtctggtgataggctcttgaatataattaaagtgtattttcgattgctatatatagttcgaatttagaaggattctcaaagtatcattttgttgttctttaagaaaaatcaaaatgaaactatttgtcgccttcgccgtcatcatcttgagcgccagtgctttgtcactcaacgaccattgggaaaactttaaggttaaacatggcaaagcttacaaaaacccaatcgaggaaagagtccgcttctcagttttccaatccaatctaaaactcatcaatgaacacaatgcaaaatacgagcaaggacttgttggttacacaatggcaataaatcagttcgctgacataactccagaagagttcaaagccaagctaggtatgcaagcaaagaacatccctaacatcaagaaaactcctcatgttcaagatgtaaatgctgaggttccagactccatcgattggagacaaaaaggtgccgtattgggagttaaagaccaaggagactgcggatcctgctgggcattcagtactactggttcccttgaaggacaaaactacatcatcaatggcaaatcagtaggcctcagcgagcaagaacttttggattgttcctcagactacggaaatggcgactgcgatgaaggtggtcttatgaccagcgctttcgaatatatcgaagaccacggaatcgaatctgagtctagctacccctacgaaggcgagcaaggaagctgcagacgcagctctggcaaagctgaagttaacattaaaggttacaaagaaccagcagccaatgaagaagctttaagacaagctgttggtactgttggtccaatttctgcagccatctacgctgatcccatccaattctactccagaggtatttttgatagcagagagtgcgtaaatgatagggattacttggatcacggcatcttggtcgtaggttatggtgaagaaaacaacgagccctactggattatcaagaactcatggggtgcagattggggtgaagaaggttacttcagattgaagagaaatgctaaattgtgcggtttgtctttaatgacaagttatccagttttgtaaacataagtattcttactcttataatagaataaacattttgataaaactaacaaaaa

SEQ ID NO: 3173 - DNA, 1190 bp, Diabrotica virgifera
  SmartBlast Evalue=1E-143; Info=Cathepsin L-like cysteine proteinase CAL1 (Fragment) n=1 Tax=Diabrotica virgifera virgifera RepID=Q9GU62_DIAVI
gtaaatcccaatattgatgttttcaaaaaaaatgtatacttaactgttgtctggtgataggctcttgaatataattaaagtgtattttcgattgctatatatagttcgaatttagaaggattctcaaagtatcattttgttgttcttagaaaaatcaaaatgaaactatttgtcgccttcgcagccatcattttgggcgccagtgctttgtcactcaacgaccattgggaaaactttaaggtcaaacatggcaaagcttacaaaaacccaatcgaggaaagagtccgcttctcagttttccaatccaatctaaaactcatcaacgaacacaatgcaaaatacgagcaaggacttgttggttacacaatggctattaatcagttcgctgacataactccagaagagttcaaagccaagctaggtgtgcaagcaaagaacatccctaacatcaagaaaactcctcatgttcaagatgtaaatgctgaggttccagactccatcgattggagacaaaaaggtgccgtattgggagttaaagaccaaggagactgcggatcctgctgggcattcagtactactggttcccttgaaggacaaaactacatcatcaatggcaaatcagtaggcctcagcgagcaagaacttttggattgttcctcagactacggaaatggcgactgcgatgaaggtggtcttatgaccagcgctttcgaatatatcgaagaccacggaatcgaatctgagtctagctacccctacgaaggcgagcaaggaagctgcagacgcagctctggcaaagctgaagttaacattaaaggttacaaagaaccagcagccaatgaagaagctttaagacaagctgttggtactgttggtccaatttctgcagccatctacgctgatcccatccaattctactccagaggtatttttgatagcagagagtgcgtaaatgatagggattacttggatcacggcatcttggtcgtaggttatggtgaagaaaacaacgagccctactggattatcaagaactcatggggtgcagattggggtgaagaaggttacttcagattgaagagaaatgctaaattgtgcggtttgtctttaatgacaagttatccagttttgtaaacataagtattcttactcttataatagaataaacattttgataaaactaacaaaaa

SEQ ID NO: 3174 - DNA, 1290 bp, Diabrotica virgifera
caaatatgttattaaacaaattgtgtatggtttttttactacaaaaatacccttacgtcatttaaagatttctgacggtagagcgttaccaaaacattagaatatgacttttcatcatggcgacgatcctcggtacagtgacaagctaggcatcatcactggtcagagatatttttctttgttcgtgtttactgtaatatatttcggcaagtaatgaaaaccgattgacataatcaattagaataaagaattgtagatattatttttacagtaaacaagaacaaagaaaaaaatactcagacaagtaatgatgcccagctcctcactgtacaagaaacatggccacgatgaaaattctgttttggcaatagggcattccaaaactttgacgtttataatatcgctcggagtcaagctgtcaaacgttgtatttgtttatatttgtaccacattgtttcttaagttttttactgttaacagttttttagttgtattttccgaacactttgttgtagattttgtatagttttttgactttatttagttttaagcagtgaataaacatgagtgaatatgattaactatttagacgagaaacaagccacaattaaattgaaaaataattttattattttgtattttgacgacacgacacgacgagcgtcgaaacgttaatacaattattttttcaatttaattgtggcccatttcccatctaaacagtcaatcataaaaatgccacaaggaaatagcttcagaacaacgagtgaatattttcgaaagttgatggtagccaatagatgttactagtagataccagcaaaagattggcaaaataaatataggtccattttccctcaaggggcctgagttaacctactgtggagacagttttccaagcgtaagtaacatggacgtagttagttatttagcatttttataggacgtttatagcatttaaccattgttttgtctctcagatgataacttatttagttgttttatgcttaaaaattagcactgatggtgaccgataaaactgaacaatatcatgattacttcgcattccacacttcaaaacacaacagaaaggaggcatattatcttttagattaattcttctagcgagaatgttaaattaatccgtgtataaaacaaaattttaacataataaaaagaaatgatataaaacacattaagaactgatagaacatttatgtcatgatagaataagatgtttctattataaatggacggagagttggcgccctctctcgttgtttttggtag

SEQ ID NO: 3175 - DNA, 1140 bp, Diabrotica virgifera
caaatatgttattaaacaaattgtgtatggtttttttactacaaaaatacccttacgtcatttaaagatttctgacggtagagcgttaccaaaacattagaatatgacttttcatcatggcgacgatcctcggtacagtgacaagctaggcatcatcactggtcagagatatttttctttgttcgtgtttactgtaatatatttcggcaagtaatgaaaaccgattgacataatcaattagaataaagaattgtagatattatttttacagtaaacaagaacaaagaaaaaaatactcagacaagtaatgatgcccagctcctcactgtacaagaaacatggccacgatgaaaattctgttttggcaatagggcattccaaaactttgacgtttataatatcgctcggagtcaagctgtcaaacgttgtatttgtttatatttgtaccacattgtttcttaagttttttactgttaacagttttttagttgtattttccgaacactttgttgtagattttgtatagttttttgactttatttagttttaagcagtgaataaacatgagtgaatatgattaactatttagacgagaaacaagccacaattaaattgaaaaataattttattattttgtattttgacgacacgacacgacgagcgtcgaaacgttaatacaattattttttcaatttaattgtggcccatttcccatctaaacagtcaatcataaaaatgccacaaggaaatagcttcagaacaacgagtgaatattttcgaaagttgatggtagccaatagatgttactagtagataccagcaaaagattggcaaaataaatataggtccattttccctcaaggggcctgagttaacctactgtggagacagttttccaagcgtaagtaacatggacgtagttagttatttagcatttttataggacgtttatagcatttaaccattgttttgtctctcagatgataacttatttagttgttttatgcttaaaatctagcactgatggtaacctataaaactgaactttataataattacttcgcattctacacttcaaaaacacaacaaaaatgaggcatattgtcttttttaaatgaattcctctagtgaacatggtaa

SEQ ID NO: 3176 - DNA, 1022 bp, Diabrotica virgifera
ctaccaaaaacaacgagagagggcgccaactctccgtccatttataatagaaacatcttattctatcatgacataaatgttctatgtttcggtgtcatttcgatgacagtaacgtcatccccgtcggtcacggtaaccatctatggaggtgacagaattaatttatttaaagatgcctgtgtgaagtacgcatgctcatcttctttatcgggaacaaggaaccttatataattatcttgtataataaataacgtttgttcatgtaaactgtgtgtttaaattaaatatctctgcaaaaacttccaagttttgaaagttaaaccggacaaatattataatttctgaacttcctttttcaaatacccaaaatccttgttcgcaaacgcaaaacaacacttctatttcctaaaattacattcctttgagccattcatgagaaaatcatcataatgtgcaatgctctattcaagtcaggtttctgtagtttcctgagtagacttcacaattaaactgtttggaaacattagttaacagttttttagttgtatttttcgaacattttgttgtagattttgtgtagtttttagttgcagaagtacttgaacgacattatttagttttaagcagtgaataaataaacatgagtgcatataaagttgttggcaaacaatacaaatgctgctacatagtaggtacaagcaaaagattgccaatataaataatataggcccactttccctcaagtggcttgagttaaactacggtttagacagttttccaagcgtaagtaacatggacgtagttagttatttagcatttttataggacgtttatagcatttaaccattgttttgtctctcagatgataacttatttagttgttttatgcttaaaatctagcactgatggtaacctataaaactgaactttataataattacttcgcattctacacttcaaaaacacaacaaaaatgaggcatattgtcttttttaaatgaattcctctagtgaacatggtaa

SEQ ID NO: 3177 - DNA, 1147 bp, Diabrotica virgifera
  SmartBlast Evalue=0; Info=Cathepsin L-like proteinase n=1 Tax= Diabrotica virgifera virgifera RepID=Q70EW9_DIAVI
tttttacttggtttaatgtttattggttaaaaattcataaaatattctacataaaatacaatcttatatagttgggtatgtagcgtcagtggcaataccacattggttatttttatttctgctcatccatatatagccatccattccccagtcagctccccaggagtttttcacgatccagtaatcttgctctttctctgtcccatagcctacaaccagtactccatggttcaaagaattgaagtcactgtagcatgatgagtcatcgagtattcctgaatcatataattgaaaattaaaactggcatcaatagctactgatatgggtccctttgcaataacggcatttttcaggtcatcttcatcgttcttcttaatataagtaaagttactaatttttgcagctactttggagctatcaaatctgcatttatcatcaataccttcataaggataatcgttttcagacattattcctccagctgtttcaatgtattctaatgccttgtccatgtacccacctgaacatccataacagtcttcttttgcgcaatctacgagattttgttcacttaaagagaccaattttcctgttttaagaaaataagctccttccactgttccagtcgtactaaaactccaacaggatccacaagatccttgatccttgacttcagtcactgcccctttttctctccaatcaaacttagacggaagatcttttactggagtaagtgagtgaataacacgaggtctagaggatttggtacttctagaaattcctaacatatccgaaaattccttttctgtcaaatctgcaaattttgttacccccaacttgaatgtagacagtccatgatcgtatttgtcattatgattttcaatttttcttagacttccttgaaaaattgtaaaacgtttttgttcctcaatataatttctgtaacttttattattcctaaccttaaattgtacccattcttctttgtcacttaacgcgtgaactgatgcaaaagccagcaaaataaaaacaaaaactttcatcttgaaaataattattgtaataactaaatagtcttgatttaaacaataacttatttacaacactactcgaaggctctatctttgtactaatacaaaactgaaa

SEQ ID NO: 3178 - DNA, 1147 bp, Diabrotica virgifera
  SmartBlast Evalue=0; Info=Cathepsin L-like proteinase n=1 Tax= Diabrotica virgifera virgifera RepID=Q70EW9_DIAVI
tttttacttggtttaatgtttattggttaaaaattcataaaatattctacataaaatacaatcttatatagttgggtatgtagcgtcagtggcaataccacattggttatttttatttctgctcatccatatatagccatccattccccagtcagctccccaggagtttttcacgatccagtaatcttgctctttctctgtcccatagcctacaaccagtactccatggttcaaagaattgaagtcactgtagcatgatgagtcatcgagtattcctgaatcatataattgaaaattaaaactggcatcaatagctactgatatgggtccctttgcaataacggcatttttcaggtcatcttcatcgttcttcttaatataagtaaagttactaatttttgcagctactttggagctatcaaatctgcatttatcatcaataccttcataaggataatcgttttcagacattattcctccagctgtttcaatgtattctaatgccttgtccatgtacccacctgaacatccataacagtcttcttttgcgcaatctacgagattttgttcacttaaagagaccaattttcctgttttaagaaaataagctccttccactgttccagtcgtactaaaactccaacaggatccacaagatccttgatccttgacttcagtcactgcccctttttctctccaatcaaacttagacggaagatcttttactggagtaagtgagtgaataacacgaggtctagacgacttggtacttttagaaattcctaacatatccgaaaattccttttctgtcaaatctgcaaattttgttacccccaacttgaatgtagacagtccatgatcgtatttgtcattatgattttcaatttttcttagacttccttgaaaaattgtaaaacgtttttgttcctcaatataatttctgtaacttttattattcctaaccttaaattgtacccattcttctttgtcacttaacgcgtgaactgatgcaaaagccagcaaaataaaaacaaaaactttcatcttgaaaataattattgtaataactaaatagtcttgatttaaacaataacttatttacaacactactcgaaggctctatctttgtactaatacaaaactgaaa

SEQ ID NO: 3179 - DNA, 1147 bp, Diabrotica virgifera
  SmartBlast Evalue=0; Info=Cathepsin L-like proteinase n=1 Tax= Diabrotica virgifera virgifera RepID=Q70EW9_DIAVI
tttttacttggtttaatgtttattggttaaaaattcataaaatattctacataaaatacaatcttatatagttgggtatgtagcgtcagtggcaataccacattggttatttttatttctgctcatccatatatagccatccattccccagtcagctccccaggagtttttcacgatccagtaatcttgctctttctctgtcccatagcctacaaccagtactccatggttcaaagaattgaagtcactgtagcatgatgagtcatcgagtattcctgaatcatataattgaaaattaaaactggcatcaatagctactgatatgggtccctttgcaataacggcatttttcaggtcatcttcatcgttcttcttaatataagtaaagttactaatttttgcagctactttggagctatcaaatctgcatttatcatcaataccttcataaggataatcgttttcagacattattcctccagctgtttcaatgtattctaatgccttgtccatgtacccacctgaacatccataacagtcttcttttgcgcaatctacgagattttgttcacttaaagagaccaattttcctgttttaagaaaataagctccttccactgttccagtcgtactaaaactccaacaggatccacaagatccttgatccttgacttcagtcactgcccctttttctctccaatcaaacttagacggaagatcttttactggagtaagtgagtgaataacacgaggtctagaggatttggtacttctagaaattcctaacatatccgaaaattccttttgtgtcaaatcagcaaattttgttacccccaacttgaatgtagacagtccatgatcgtatttgttattatgattttcgatttttcttagactttcttggaaaattgtaaaacgtttttgttcctcaatataatttctgtaacttttgttattcctaaccttaaattgtacccattcttctttatcgcttaacgcgtgaactgatgcaatagccagcaaaataaaaacaaaaactttcatcttgaaaataattattgtagtaactaaatagtcttgatttaaacaataacttatttacaacactactcgaaggctctatctttgtactaatacaaaactgaaa

SEQ ID NO: 3180 - DNA, 1600 bp, Diabrotica virgifera
  SmartBlast Evalue=6E-97; Info=Venom serine carboxypeptidase n=1 Tax=Apis mellifera RepID=VCP_APIME
aataataatatcaccttcacataacatgctatctgtaagtggataaatacgttctaaatatgtggatatatctataaatatagtccggatatatgccacatacattattattccaagtatctttaagcagtgacatcgagtgttaggcttcaaagatgaaggtttttctaagtattagtattggactttttgtactttgttcaatagaatcaaggtctctaaatagcaagctttctaaaaagccaatatttaaagacttttacggaaagctaaacatagaagtaagaggaaaccctggagagccactgatattaactgacttgattaaagcagggaagctggatgaagctcagaaccaatcactcgtgcaaggattggacacagaggttaaaagttattccggctatttcactgttgataaaaagcatgattctaatatcttcttctggtttttcccttcacaaagtgatcccagttcggatccggttgttctatggctccaaggaggaccaggatctacatccatgtttggactttttcaagaaaatggacctcttacattaaaagatggtgagcttggtattagaccaacgtcttggaatagaaatcactcagttatctacatcgatcagccagctggaactggatggagttatactaatggaggatacgccaaggatcagcataaagtagccactgatttgtacgaagccttgcaacaatttttcaccctcttctatcaataccaggagagagaatttttcgttacaggcgagtcttatgggggaaagtatgttcccgctataagctataaaattcaccaagagaacgaggatgcaaagttgaagatcaatcttaaaggtttggctataggtaatggttttactgatcctaaagtacaagtgagatattcagactacgtctatcaacatggactcattgatttgaaaacgagaaatgcgctccacaaaaaagaaaataaagctgtacaggatataacatcaggggagtactataatgcatttgaattatggaatgaaatcgtaggcactatacaagaatatacggaattagatatatacaactatctgtcacttaaaggaagcgctgctgatgaagaagagttaaacgaatttttcagtaaagaagaggtaagaaaagcaattcacgttggcagcactgaattcggcgatggtgaggtttatacaaatcttgaagaagatattcccaaatcggaggcacataaagtcgctgaactcttaaagcactatcgagttttaatctacaatgggcaaacagatcttatagttccttatgctttaacagtaaactatttgcagcaattacacttccctgggtctgaagaatacgcagaagcagacaggactgtatggcatgatgataacgattccgatgtggttgctgggtacgtgaaaacagctggaaagttaacagaaattatggttaggaattctggccatatggtaccgacagatcaaccagaatgggctttgcagctcattaataaatttaccagaaatataccttttaattaaatttaattaaaattatatagtatttaataaatacgctaaacatt

SEQ ID NO: 3181 - DNA, 1600 bp, Diabrotica virgifera
  SmartBlast Evalue=6E-97; Info=Venom serine carboxypeptidase n=1 Tax=Apis mellifera RepID=VCP_APIME
aataataatatcaccttcacataacatgctatctgtaagtggataaatacgttctaaatatgtggatatatctataaatatagtccggatatatgccacatacattattattccaagtatctttaagcagtgacatcgagtgttaggcttcaaagatgaaggtttttctaagtattagtattggactttttgtactttgttcaatagaatcaaggtctctaaatagcaagctttctaaaaagccaatatttaaagacttttacggaaagctaaacatagaagtaagaggaaaccctggagagccactgatattaactgacttgattaaagcagggaagctggatgaagctcagaaccaatcactcgtgcaaggattggacacagaggttaaaagttattccggctatttcactgttgataaaaagcatgattctaatatcttcttctggtttttcccttcacaaagtgatcccagttcggatccggttgttctatggctccaaggaggaccaggatctacatccatgtttggactttttcaagaaaatggacctcttacattaaaagatggtgagcttggtattagaccaacgtcttggaatagaaatcactcagttatctacatcgatcagccagctggaactggatggagttatactaacggaggatacgccaaggatcaacataaagtagccactgatttgtacgaagccttgcagcaatttttcaccctcttctatcaataccaggagagagaattcttcgttacaggcgagtcttatgggggaaagtatgttcccgctataagctataaaattcaccaagagaacgaggatgcaaagttgaagatcaatcttaaaggtttggctataggtaatggttttactgatcctaaagtacaagtgagatattcagactacgtctatcaacatggactcattgatttgaaaacgagaaatgcgctccacaaaaaagaaaataaagctgtacaggatataacatcaggggagtactataatgcatttgaattatggaatgaaatcgtaggcactatacaagaatatacggaattagatatatacaactatctgtcacttaaaggaagcgctgctgatgaagaagagttaaacgaatttttcagtaaagaagaggtaagaaaagcaattcacgttggcagcactgaattcggcgatggtgaggtttatacaaatcttgaagaagatattcccaaatcggaggcacataaagtcgctgaactcttaaagcactatcgagttttaatctacaatgggcaaacagatcttatagttccttatgctttaacagtaaactatttgcagcaattacacttccctgggtctgaagaatacgcagaagcagacaggactgtatggcatgatgataacgattccgatgtggttgctgggtacgtgaaaacagctggaaagttaacagaaattatggttaggaattctggccatatggtaccgacagatcaaccagaatgggctttgcagctcattaataaatttaccagaaatataccttttaattaaatttaattaaaattatatagtatttaataaatacgctaaacatt

SEQ ID NO: 3182 - DNA, 1042 bp, Diabrotica virgifera
  SmartBlast Evalue=0; Info=Cathepsin L-like cysteine proteinase CAL1 (Fragment) n=1 Tax=Diabrotica virgifera virgifera RepID= Q9GU62_DIAVI
ttttgttgttctttaagaaaaatcaaaatgaaactattcatcgcctttgcagctgttattctaagcgccggtgctctgtcactcaatcagcattgggaaagctttaaagtccaacatggcaaagtttacaaaaacccaatcgaggaaagagtccgcttctctgttttccaagcaaatttgaaaaccataaacgaacacaacgctaaatacgaacaaggacttgttggttacacaatggcagtcaaccagtttgctgacatgaccccagaagaattcaaagccaagcttggtatgcaagctaagaacatgcccaagatcaagaaatcccgtcatgttcaaaatgtaaatgctgaggttccggactccattgattggagacaaaaaggtgccgttttaggtgttaaagatcaaggacagtgtggatcctgctgggctttcagtgctactggttctcttgaaggacaaaactacatcgtcaatggaaaatcagaacccctcagtgagcaggaacttctggattgttccgtagaatacggaaatggtgactgcgatgaaggtggtcttatgacccttgcttttgagttcgtcgaggaaaacggaatcgtatctgaagctagctatccgtacgaagctatccaaggagattgcagaacaaccaatgacaaagcagtacttcatattcaaggttacaatgaagtatatccaagtgaagaagctttgagacaagctgtcggtactgttggtcccatttctgcagctatttgggctgaaccaatccagttctactcaagcggtatatatgacgacccaaattgcttgaactatgtcgaatacttggatcacggaattctcgtcgtaggttacggtgaagagaatggcacaccctactggattgtcaagaactcatggggagcaacttggggtgaagaaggttacttcaggttgaagagaaatattgcattatgtggtttggctcagatggccagttatccagttttgtaaaggtgcaatataagtaaataaaataaggtaaaatggaaaa

SEQ ID NO: 3183 - DNA, 1044 bp, Diabrotica virgifera
  SmartBlast Evalue=1E-180; Info=Cathepsin L-like cysteine proteinase CAL1 (Fragment) n=1 Tax=Diabrotica virgifera virgifera RepID=Q9GU62_DIAVI
cattttgttgttctttaagaaaaatcaaaatgaaactattcatcgcctttgcagctgttattctaagcgccagtgctttgtcactcaatcagcattgggaaagctttaaagtccaacatggcaaagtttacaaaaacccaatcgaggaaagagtccgcttctctgttttccaagcaaatttgaaaaccataaacgaacacaacgctaaatacgaacaaggacttgttggttacacaatggcagtcaaccagttcgctgacatgaccccagaagaattcaaagccaagcttggtatgcaagctaagaacatgcccaagatcaagaaatcccgtcatgttcaaaatgtaaatgctgaggttccggactccattgattggagacaaaaaggtgccgtattgggagtcaaagatcaaggacagtgtggatcctgctgggctttcagtgctactggttctcttgaaggacaaaactacatcgtcaatggaaaatcagaacccctcagtgagcaggaacttctggattgttccgtagaatacggaaatggtgactgcgatgaaggtggtcttatgacccttgcttttgagttcgtcgaggaaaacggaatcgtatctgaagctagctatccgtacgaagctatccaaggagattgcagaacaaccaatgacaaagcagtacttcatattcaaggttacaatgaagtatatccaagtgaagaagctttgagacaagctgtcggtactgttggtcccatttctgcagctatttgggctgaaccaatccagttctactcaagcggtatatatgacgacccaaattgcttgaactatgtcgaatacttggatcacggaattctcgtcgtaggttacggtgaagagaatggcacaccctactggattgtcaagaactcatggggagcaacttggggtgaagaaggttacttcaggttgaagagaaatattgcattatgtggtttggctcagatggccagttatccagttttgtaaaggtgcaatataagtaaataaaataaggtaaaatggaaaa

SEQ ID NO: 3184 - DNA, 1044 bp, Diabrotica virgifera
  SmartBlast Evalue=1E-180; Info=Cathepsin L-like cysteine proteinase CAL1 (Fragment) n=1 Tax=Diabrotica virgifera virgifera RepID=Q9GU62_DIAVI
cattttgttgttctttaagaaaaatcaaaatgaaactattcatcgcctttgcagctgttattctaagcgccagtgctttgtcactcaatcagcattgggaaagctttaaagtccaacatggcaaagtttacaaaaacccaatcgaggaaagagtccgcttctctgttttccaagcaaatttgaaaaccataaacgaacacaacgctaaatacgaacaaggacttgttggttacacaatggcagtcaaccagttcgctgacatgaccccagaagaattcaaagccaagcttggtatgcaagctaagaacatgcccaagatcaagaaatcccgtcatgttcaaaatgtaaatgctgaggttccagactccattgactggagacaaaaaggtgccgttttaggtgttaaagatcaaggacaatgtggatcttgctgggctttcagtgctactggttctcttgaaggacaaaactacatcgtcaatggaaaatcagaacccctcagtgagcaggaacttctggattgttccgtagaatacggaaatggtgactgcgatgaaggtggtcttatgacccttgcttttgagttcgtcgaggaaaacggaatcgtatctgaagctagctatccgtacgaagctatccaaggagattgcagaacaaccaatgacaaagcagtacttcatattcaaggttacaatgaagtatatccaagtgaagaagctttgagacaagctgtcggtactgttggtcccatttctgcagctatttgggctgaaccaatccagttctactcaagcggtatatatgacgacccaaattgcttgaactatgtcgaatacttggatcacggaattctcgtcgtaggttacggtgaagagaatggcacaccctactggattgtcaagaactcatggggagcaacttggggtgaagaaggttacttcaggttgaagagaaatattgcattatgtggtttggctcagatggccagttatccagttttgtaaaggtgcaatataagtaaataaaataaggtaaaatggaaaa

SEQ ID NO: 3185 - DNA, 996 bp, Diabrotica virgifera
ctttggatttgtcttcctcggtagtaagataataaaatatctagatataacatttttatacttcagaatgtgaagttatatgacacataatgtcattatgatctatttgtcaccgtgttgtgtaattatatccgagatactatatgtcacgtacaaggggctcgatagcttggttagtagagcattggaccagagattgggaggtcccgggttccaatcccagatgattcatactatttttttaattttggtaatttaaaaaaaaattgagactggtaggtaagaaagttagtttaatatttaaataaaatacaactaacttgttaagtatattatttatttcgttgaaattataatagaagtataacttcttacgtgcgtacaaagtacacatacattcttttttgaagattaaggtatttagaggattttttgaagttaccagacgtttttatctatatattgtttcacaaagttaacacataggaagaatattacgcctagattttctgagcgtaccgagttttccttttggctttataatgtcttctttactaatcctgaatctcaatccttcatcagtttaatcatacctgttgcatctttgattttctcaattaaaggatctgattttctttggttcggctaaattttatttcgatctaatgaggcaagtagcaacaagacacctggttaagcagtaatataaaaatggtgtaggatacaagaataagaatgatctgggtagcagtaggtaaactaagctttatcattagtaattcaaaaatctcaattaagttaaaacgaaagactaataagtcaggaaataaaattcgaaattatttatcctctgagctttttaagttggagtaataaagcacaacaaagtggcgaaatattcgacaagggaaatctaaattgcatttcacgtcctgtcattcaccgtgataataattttagcgaactatttcctttaataaaaaaccatacagaagc

SEQ ID NO: 3186 - DNA, 902 bp, Diabrotica virgifera
gtgcctttctcgtaataaacgcttgttaatattttccttcattatactctggtatcattgacctaccgaagttcaatattgtttttgccctaatatttttatgaccaataattctttcttttaaaatacgtgtcatttacgaggtatcgtatcatattcacttcggagattttatcatctcagatggttagagtgttattaattattgttttgattcatttacgatatttttaacagctgatttggttatttaggtcaagtacaatattgtatgtaatttcgtaaaagggtttttctcagcttttataattgtgtctatttgtcgtgattgtcaaaaatattgtgtaaatttgtgaataattggtcgtttcaacattaaataatgtattttaagctatttttttttgttttcattttacttgatcttaattagaataatacagtccacttgcttcgtataatatgttagtatacactttattcgaaggggaaaaaccagcgagttctagactgaatttacatatctacccccttctggtggtctcaaatgtgcatttagaggccatcgtctgtgcagaaagcaacaacaagacacctggttaagcagtaatataaaaatggtgtaggatacaagaataagaatgatctgggtagcagtaggtaaactaagctttatcattagtaattcaaaaatctcaattaagttaaaacgaaagactaataagtcaggaaataaaattcgaaattatttatcctctgagctttttaagttggagtaataaagcacaacaaagtggcgaaatattcgacaagggaaatctaaattgcatttcacgtcctgtcattcaccgtgataataattttagcgaactatttcctttaataaaaaaccatacagaagc

SEQ ID NO: 3187 - DNA, 898 bp, Diabrotica virgifera
gtgcctttctcgtaataaacgcttgttaatattttccttcattatactctggtatcattgacctaccgaagttcaatattgtttttgccctaatatttacgaccataaaattctttctttaaaaaaggggctgtttatcggtatcagattcgctccggagatttaacgtcttagctgtttagaatactattaattattgttgtatttcctttacgatatttctaacagctgatttggtaaggtcaatggcaatattgtatctattaattgggtcagtggtttttctgaactttttataattgtatctgtttgtctgtattgtcaaaatatttgtgtaaatttgcaaataattcgtcgtcttaacattaaatgatgtattgtagctatttcatttgtttcattttacttgatcacaattagaataaaacagtccacttcagtccgcttcatataatattatattagtatacactttattcgaaggggaaaaaccagcgagttctagactgaatttacatatctacccccttctggtggtctcaaatgtgcatttagaggccatcgtctgtgcagaaagcaacaacaagacacctggttaagcagtaatataaaaatggtgtaggatacaagaataagaatgatctgggtagcagtaggtaaactaagctttatcattagtaattcaaaaatctcaattaagttaaaacgaaagactaataagtcaggaaataaaattcgaaattatttatcctctgagctttttaagttggagtaataaagcacaacaaagtggcgaaatattcgacaagggaaatctaaattgcatttcacgtcctgtcattcaccgtgataataattttagcgaactatttcctttaataaaaaaccatacagaagc

SEQ ID NO: 3188 - DNA, 701 bp, Diabrotica virgifera
cattgtgttgggtgcagctttaacatattttaaaacaaaaactttactttacaatgaaaagcatagctatcattgctttctgcatttccgcagtcgtatctctacctttggatgtcattgaagatgaaagtggacaagagtatgttttagttccagtccatagagaaagaagagacctaacctggggcgccaaccaaaatggatacagtcttggccaaaaaggaaatatctgggaaaatggtgcccacaaatttgacggtgcttacagtggttcaaaagcttgggattcccatggactaaaaccagattcttttggaggtcgtgtagaatacactaataagccaacaaaaactactgcttttgtaggcgcagacagaacgcctgggtatggtactgatctcaatgctggagttaaatacaactttgttcaagataaaaaacttaacatagatttaacaggacaagtaagtcagcaccaaggcggacctttggaaatacaaaacctgaagcaggagtatatttaaattttgaggctagaccctaattcacaacaaagataaaaaagactgtacctactaaatatttaaaataaattattattttttaaaattgatttataaattctataaatcctcagagttttatctcaaatttttttcatgaaatgtatagtttacaaatacataatacgataaacacaa

SEQ ID NO: 3189 - DNA, 684 bp, Diabrotica virgifera
agcagctttaaagtaatcaagaaagttatatttcacaatgaaaggtctagttatctttgctttttgcattgccgtggttgtatcccttccattggatctcattgaagatgagagtggacaggagtatcttgtagttccagtacatagagaaaggagagacttaacctgggcgccaaccaaaatggatacactcttggtcaaaagggaaatatctgggaaaatggtgcacacaaatttgacggtgcttacactggttcgaaagcttgggattcccatggactgaaaccagattcttttggaggtcgtgtagaatacactaataagccaacaaaaactactgcttttgtaggcgcagacagaacgcctgggtatggtactgatctcaatgctggagttaaatacaactttgttcaagataaaaaacttaacatagatttaacaggacaagtaagtcagcaccaaggcggacctttggaaatacaaaacctgaagcaggagtatatttaaattttgaggctagaccctaattcacaacaaagataaaaaagactgtacctactaaatatttaaaataaattattattttttaaaattgatttataaattctataaatcctcagagttttatctcaaatttttttcatgaaatgtatagtttacaaatacataatacgataaacacaa

SEQ ID NO: 3190 - DNA, 685 bp, Diabrotica virgifera
agtagctttaaagtaatcaagaaagatatatttcacaatgaaaggtctagttatctttgccttttgcattgccgtggttgtatcccttccattggatgtcattgaagatgagagtggacaggagtatcttgtagttccagtacatagagaaaggagagacttaacctggggcgccaaccaaaatggatacactcttggtcaaaaaggaaatatctgggaaaatggtgcacacaaatttgacggtgcttacactggttcgaaagcttgggattcccatggactgaaaccagattcttttggaggtcgtgtagaatacactaataagccaacaaaaactactgcttttgtaggcgcagacagaacgcctgggtatggtactgatctcaatgctggagttaaatacaactttgttcaagataaaaaacttaacatagatttaacaggacaagtaagtcagcaccaaggcggacctttggaaatacaaaacctgaagcaggagtatatttaaattttgaggctagaccctaattcacaacaaagataaaaaagactgtacctactaaatatttaaaataaattattattttttaaaattgatttataaattctataaatcctcagagttttatctcaaatttttttcatgaaatgtatagtttacaaatacataatacgataaacacaa

SEQ ID NO: 3191 - DNA, 689 bp, Diabrotica virgifera
  SmartBlast Evalue=4E-13; Info=Apolipoprotein D n=1 Tax= Camponotus floridanus RepID=E2ABN0_9HYME
ggtctataaaaggagattttagtttaacattgaattacattcgtgtgagtttataaaacacgaaaatgtttggttttgtagtaactatttgtttgcttgtaatatctgcacagggacaaattcctgttgaaagatgtccagatgtaaaaggagtggaaaatttcgatggagaagcctatttgggtgattggatcgaacaagcaagatacccaactttactggaagaccacggagaatgcgttgttaccaatattgcactagaccttaatggagttgtaaaaagtcgtaccacatatactaatagcgaaacacgcgaagtacatgttctcgaaggagaaggagtatcaaattcaaccacaggagaagccaaatttttagtacatttccttaatccagatgtaactgtacctttttgggttcttggtacagactatacaacatactctgtgggattctcttgttttgaacgagatggtgttttcctagagagtctcttcctcacaacaagacaccaatatgttacagaagacgatatagataatcttgtcaaagttctaatagacaacaatctctctgtagatgatttagtagtagatagccaagattactgctattataaataaaataaatatattagaaatatgattttcttatgtaaaaattgtaataaattttaatgttaatgaaaa

SEQ ID NO: 3192 - DNA, 690 bp, Diabrotica virgifera
  SmartBlast Evalue=1E-13; Info=Apolipoprotein D n=1 Tax= Camponotus floridanus RepID=E2ABN0_9HYME
ggtctataaaaggagattttagtttaacattgaattacattcgtgtgagtttacaaaacacgaaaatgattgttttagcagttactttatgtttgcttgtaatatctatacagggacaaattcctgtcgaaagatgtcccgatgtaaaaggagttgcaaatttcgatggacaagcatatttgggtgattggatcgaacaagcaagatacccaactttactggaagatcatggagaatgtgttattaccaatattgcagtaggcgctgatggagttataagaagtcgtaccaaatatactaatacaaaaacaaacgaagaccatgttctagaaggagaaggagtatcaaattcaaccacaggagaagccaaattcttagtacatttccttaatccagatgtaactgtacctttttggattcttggtacagactataaaagatggtctgtaggattctcctgttttgaacgaaatggtgtttttctagagagtcttttcctcacgacaagatatcaagaggcttcaccagatgatatagataatattgtccaagttctggaagacaacaatctctctgtagatgcattagtaaacgatgaccaagataactgctattatgattaaaattaaacttattagaaatatgattttcttatgtacaaattgtaataaatattaatgttgctgaaaa

SEQ ID NO: 3193 - DNA, 690 bp, Diabrotica virgifera
  SmartBlast Evalue=5E-14; Info=Apolipoprotein D n=1 Tax= Camponotus floridanus RepID=E2ABN0_9HYME
ggtctataaaaggagattttagtttaacattgaattacattcgtgtgagtttacaaaacacgaaaatgattgttttagcagttactttatgtttgcttgtaatatctgcacagggacaaattcctgtcgaaagatgtcccgatgtaaaaggagttgcaaatttcgatggacaagcatatttgggtgattggatcgaacaagcaagatacccaactttactggaagatcatggagaatgtgttattaccaatattgcagtaggcgctgatggagttataagaagtcgtaccaaatatactaatacaaaaacaaacgaagaccatgttctcgaaggagaaggaatatcaaattcaaccacaggagaagccaaatttttagtacatttccttaatccagatgtcactgtacctttttggattcttggtacagactataaaagatggtctgtaggattctcctgttttgaacgaaatggtgtttttctagagagtcttttcctcacgacaagatatcaagaggcttcaccagatgatatagataatattgtccaagttctggaagacaacaatctctctgtagatgcattagtaaacgatgaccaagataactgctattatgattaaaattaaacttattagaaatatgattttcttatgtacaaattgtaataaatattaatgttgctgaaaa

SEQ ID NO: 3194 - DNA, 895 bp, Diabrotica virgifera
  SmartBlast Evalue=1E-61; Info=Angiopoietin-like 1 n=1 Tax= Tribolium castaneum RepID=D6WEJ6_TRICA
caattgttaaacacaaattttaaaatgtcggtatccacgaactatctgaaattagccctgatagtgagtttaattctctctatatgtggaaattatttagataatgatcagcaaaaccgtagtgttcaagaagaaataaaggagtcatcaccaatatttaaaagatcagcatattatggtaaggcagatggtacaccctttaagaattgtaaggagatattagaatctggtgtaaatatttctggcatttacgaaatacaaccaattggttccaataaattaataaatgtaacatgtgatatggaaacaagaggtggtggatggactgtaatacagagaagaattgacgggtctgttgagttctacagaggttggagagagtataaatttgggttcggagatctaaatggagaactatggctaggattggagagtatttaccatttgacagcatttgaagctaatgagctgcttgtggagttagtagataaggatggaattagtgcttacgctttgtatgactcttttgcaatcggctcagaagtcgagggatactatttaagtactttaaagggatattctggtgatgccggtgattcgttatctaatcatttaggacaaaaatttactactctagatctggatcaagaccaaaagcctgatggaaactgcgcagaaatattcataggggcgtggtggtacaacaactgttacgagagccatttaaatggtaaattcagaaacatacgttggccagcggcgtataagtataaaggaattgtctggtttggttttaaaaacaacgaatatttcttatctcaagcaagaatgttaataagaccgaaatattagaaaaaagaaagattttaataaatattattttgtaaattaaaaa

SEQ ID NO: 3195 - DNA, 842 bp, Diabrotica virgifera
  SmartBlast Evalue=3E-45; Info=Angiopoietin-like 1 n=1 Tax= Tribolium castaneum RepID=D6WEJ6_TRICA
caattgttaaacacaaattttaaaatgtcggtatccacgaactatctgaaattagccctgatagtgagtttaattctctctatatgtggaaattatttagataatgatcagcaaaaccgtagtgttcaagaagaaataaaggagtcatcaccaatatttaaaagatcagcatattatggtaaggcagatggtacaccctttaagaattgtaaggagatattagaatctggtgtaaatatttctggcatttacgaaatacaaccaattggttccaataaattaataaatgtaacatgtgatatggaaacaagaggtggtggatggactgtaatacagagaagaattgacgggtctgttgagttctacagaggttggagagagtataaatttgggttcggagatctaaatggagaactatggctaggattggagagtatttaccatttgacagcatttgaagctaatgagctgcttgtggagttagtagataaggatggaattagtgcttacgctttgtatgactcttttgcaatcggctcagaagtcgagggatactatttaagtactttaaagggatattctggtgatgccggtgattcgttatctaatcatttaggacaaaaatttactactctagatctggatcaagaccaaaagcctgatggaaactgcgcagaaatattcagtatgtagtaataattaatagtaataattatttaaaacattaaaacatttataatatacctatatacaacagaagtgtttacttcattctacgttgtaataattatttatttattaatagaatattaataatattttttataaaataattaatagaa

SEQ ID NO: 3196 - DNA, 1282 bp, Diabrotica virgifera
  SmartBlast Evalue=9E-74; Info=Brain chitinase and chia n=1 Tax= Aedes aegypti RepID=Q16JB8_AEDAE
ttttaatagttttactttttattttaatataaatcaaaaaatataaatatttcttattttctcttatttattttttactactggaagatttgtaatttgcgatagcatctgttatagcatgtaataacggatatttatcaccataatctccattaaaatcgtctagttcaagggcccaaaacataattcctccaagttgttgatccattgcatagttaactttcgtcgtgacggtctcaggtgtatcaaatgtaaaccagtactgagcaaagctaaaatagtttgtatcatcaacagttgtagccacctcactgggatcattcatcaaagattttacctcgtaatatgccaacaatcctgcttcctgagtaaactctcctggatctccttgtcctgtgactttagcacctatatccgcattactttcatttgctaatataaaagtctttgcataggctggaattccaaggtaaagcttttttgatggtagtcctgctttcagccaatgggaaatcgtatcttttatttttgacaagggagaagagagtccagtcacgtttgactctgatgtcacatagtcgtaagccattacattgacgttatcaactaaatcagctaattttggtactacatacgctgtgttaatcaagtctacatctatggaaacagcaatggagagttttagttcgtacttttcaaacctactctttagtgcctgtaaaagggaaataaaattttctccatcttctttaataccacctctggtagtgggatattcccaatctatgtcgacaccgtcaaatccatagtaggctagaaatgctataacactgtctgcaaaatcttcacgtagttgtttggaatttgccatcacagaatattttcgagaaccttcattccagccaccaatagctaacattgttgtcaaacaagggttgtcttgtttaagggctgtaaaatttgcaaagccctttaagtctaaatctttatacgtgtccagtgatgttgtcttttgatctaaattaatacctgcaaatgcatatataactgtggtacaactttttacatcaatgtctttagttgcaaatttgccgttttcttttctgtatacagaccagcttccccagtagcaaactacttcaacatctggtttttcatcacattgggagtaagcagaaaccaaaacacaagccaaaactagtagtaccgccttcattattactaaaaaatccaagtcaattattgcacctattaccagttaaaataactactaaataaatcg

SEQ ID NO: 3197 - DNA, 570 bp, Diabrotica virgifera
tatccatacacatcagataattaaaattaccatccatattgttcgtgttgttgttatgtgtaaaatataaacaagtggtactttagcaattgatctaagaactcatttagtatataaagtaatttagtgtttatttttcttatttacgatcagtctctattaaaatattgtacaaaaaatgaaatcaattttcattattacattctttgcttgcattggtcttgcagtaacagttgcaattccaatgaacataaaaggtccagctccagatttagatgatccaaactgtgtagtctgcttttccgctggaaattttattcaaggatttaagaactcaggtgattccaaggaagaagcaaaacaacaaagaaattttatctgtaacctgtttaacactgacgagctaatgcaaatctgtatgagcacttatgaagaggacgtcgaatatatttatggagtaactgacctcagaacagtaactgaaatgtgcatagacatgaacaaatgtaaagctaaaccaaatatctaattgtgtttttaaataaaaacatgtttttattgttttattta

SEQ ID NO: 3198 - DNA, 570 bp, Diabrotica virgifera
tatccatacacatcagataattaaaattaccatccatattgttcgtgttgttgttatgtgtaaaatataaacaagtggtactttagcaattgacctaagaactcatttagtatataaagtaatttagtgtttatttttcttatttacgatcagtctctattaaaatattgtacaaaaaatgaaatcaattttcattattacattcttcgcttgtattggtcttgcagtatcagttgcaattccaatgaacataaaaggtccagctccagatttagatgatccaaactgtgtagtctgcttttccgctggaaattttattcaaggatttaagaactcaggtgattccaaggaagaagcaaaacaacaaagaaattttatctgtaacctgtttaacactgacgagctaatgcaaatctgtatgagcacttatgaagaggacgtcgaatatatttatggagtaactgacctcagaacagtaactgaaatgtgcatagacatgaacaaatgtaaagctaaaccaaatatctaattgtgtttttaaataaaaacatgtttttattgttttattta

SEQ ID NO: 3199 - DNA, 1872 bp, Diabrotica virgifera
  SmartBlast Evalue=1E-142; Info=Annexin IX-A n=6 Tax=Bombycoidea RepID=Q9NL61_BOMMO
gaaaaccagcaggaaagtagaatttctttagcaagcagttgtcgtatagaagagaaccagtgggtgtgactaaaattcaattcctctcaaatcacaagtaactgaagcaaacatgtctaaccagcagtattatcctttcaaatgtacacccactgtctaccccgccgatcccttcgaccccgtggcagatgccgccaccttgaagaaggccatgaaaggtttcggcaccgacgagaaagccatcatcgacgtcctggcccgtagaggcatcgtccaacgtctcgagatcgccgaaaccttcaagacctcctacggcaaagacctcgtctcagagttgaagagcgaattggggggtaagttcgaggatgtgatggtagccctcatgactccactgccacaattgtatgccaaagaactgcacgatgccgtagccggaatgggtaccgatgaggaagctatcatcgagatcttgtgcacattgtccaactacggaatccgtaccatcgcacaattttatgaacaaatgtacggcaaacctttagaaaaagatttgaaaggagatacttcaggacatttcaaaaggctctgtgtttctttagtgcaagctaacagagacgaaaaccaaggcgtcaatgaacaacaagccctcgccgacgccgaagctttgatcgaagctggcgaaggaaaatggggcaccgaagaatccatcttcaacaccgtcctcatcaccaggagttaccaacaattaagagccacattctctgaatacgagaggctaacgggcaaagacatcgaacaatccatcaagaaagaattcagcggagatatcgaaaagggattgttaggaatcgtcaagtgcgtgaagagcaaagttggatacttcgcggaacgtcttcactggtccatgtccggtttgggcaccaacgacaagactttaatccgtatcatcgtctcgagatctgaaatcgatttggccgatatcaaacaagctttcttggacaaatatggcaagactttggaaagctgggtgcagggcgatacatctggagattacaagagagtccttttggccatactcgactaattccacaattaaaccaaaaagcactgtaatcttagataaatctgtacgcctttacactaaaacaaacaaattactagctttcgtcatactgccattagaataaactcaatttttgatgtttgctgtcgaaagtcacctacatacactgagacgctacttgtttttcttttgagtgtagcctaacttatgtttctttcgcggttacattactatacagaacctgttgccttcggaaactctcaaaggtttcgaaaagagtacaaattaacatgtagaagaggatctgatcacaccaaatataagttagattatgttcaaagttgatcttcgttagtttgaaatttttctcagtgtacacgtatttttgtaattttgcaggataatgctaccagcgagttaaagtatgttttggtacagcttacgtgttacggttaaaaaagtccatgtcactcaggttgtcgacgtttcagaatatattgataagagatctttttattataacaaaaaaaaaccattgtttattatattatacctatttaatttagtttagaggccttaattgttataaatatatatcacagagctttaaacaatgttgtttgatgtacgaattttaattttttgtctttatataattgtaagtttatagagagaggggtgtagggcatgttattctacatatactacttttgaatctttttatataaatatacgttttcttcatcttttataaatgtttgtaaatgtgctttatttggtgcttaacagtaaaatatgttgagaaaact

SEQ ID NO: 3200 - DNA, 1866 bp, Diabrotica virgifera
  SmartBlast Evalue=1E-142; Info=Annexin IX-A n=6 Tax=Bombycoidea RepID=Q9NL61_BOMMO
gaaaaccagcaggaaagtagaatttctttagcaagcagttgtcgtatagaagagaaccagtgggtgtgactaaaattcaattcctctcaaatcacaagtaactgaagcaaacatgtctaaccagcagtattatcctttcaaatgtacacccactgtctaccccgccgatcccttcgaccccgtggcagatgccgccaccttgaagaaggccatgaaaggtttcggcaccgacgagaaagccatcatcgacgtcctggcccgtagaggcatcgtccaacgtctcgagatcgccgaaaccttcaagacctcctacggcaaagacctcgtctcagagttgaagagcgaattggggggtaagttcgaggatgtgatggtagccctcatgactccactgccacaattgtatgccaaagaactgcacgatgccgtagccggaatgggtaccgatgaggaagctatcatcgagatcttgtgcacattgtccaactacggaatccgtaccatcgcacaattttatgaacaaatgtacggcaaacctttagaaaaagatttgaaaggagatacttcaggacatttcaaaaggctctgtgtttctttagtgcaagctaacagagacgaaaaccaaggcgtcaatgaacaacaagccctcgccgacgccgaagctttgatcgaagctggcgaaggaaaatggggcaccgaagaatccatcttcaacaccgtcctcatcaccaggagttaccaacaattaagagccacattctctgaatacgagaggctaacgggcaaagacatcgaacaatccatcaagaaagaattcagcggagatatcgaaaagggattgttaggaatcgtcaagtgcgtgaagagcaaagttggatacttcgcggaacgtcttcactggtccatgtccggtttgggcaccaacgacaagactttaatccgtatcatcgtctcgagatctgaaatcgatttggccgatatcaaacaagctttcttggacaaatatggcaagactttggaaagctgggtgcagggcgatacatctggagattacaagagagtccttttggccatactcgactaattccacaattaaaccaaaaagcactgtaatcttagataaatctgtacgcctttacactaaaacaaacaaattactagctttcgtcatactgccattagaataaactcaatttttgatgtttgctgtcgaaagtcacctacatacactgagacgctacttgtttttcttttgagtgtagcctaacttatgtttctttcgcggttacattactatacagaacctgttgccttcggaaactctcaaaggtttcgaaaagagtacaaattaacatgtagaagaggatctgatcacaccaaatataagttagattatgttcaaagttgatcttcgttagtttgaaatttttctcagtgtacacgtatttttgtaattttgcaggataatgctaccagcgagttaaagtatgttttggtacagcttacgtgttacggttaaaaaagtccatgtcactcaggttgtcgacgtttcagaatatattgataagagatctttttattataacaaaaaaaaaccattgtttattatattatacctatttaatttagtttagaggccttaattgttataaatatatatcacagagctttaaacaatgttgtttgatgtacgaattttaattttttgtctttatataattgtaagtttatagagagaggggtgtagggcatgttattctacatatactacttttgaatctttttatataaatatacgttttcttcatcttttataaatgtttgtaaatgtgctttatttggtgcttaacagtaaaatatgttgag

SEQ ID NO: 3201 - DNA, 1840 bp, Diabrotica virgifera
  SmartBlast Evalue=1E-142; Info=Annexin IX-A n=6 Tax=Bombycoidea RepID=Q9NL61_BOMMO
aagcagttgtcgtatagaagagaaccagtgggtgtgactaaaattcaattcctctcaaatcacaagtaactgaagcaaacatgtctaaccagcagtattatcctttcaaatgtacacccactgtctaccccgccgatcccttcgaccccgtggcagatgccgccaccttgaagaaggccatgaaaggtttcggcaccgacgagaaagccatcatcgacgtcctggcccgtagaggcatcgtccaacgtctcgagatcgccgaaaccttcaagacctcctacggcaaagacctcgtctcagagttgaagagcgaattggggggtaagttcgaggatgtgatggtagccctcatgactccactgccacaattgtatgccaaagaactgcacgatgccgtagccggaatgggtaccgatgaggaagctatcatcgagatcttgtgcacattgtccaactacggaatccgtaccatcgcacaattttatgaacaaatgtacggcaaacctttagaaaaagatttgaaaggagatacttcaggacatttcaaaaggctctgtgtttctttagtgcaagctaacagagacgaaaaccaaggcgtcaatgaacaacaagccctcgccgacgccgaagctttgatcgaagctggcgaaggaaaatggggcaccgaagaatccatcttcaacaccgtcctcatcaccaggagttaccaacaattaagagccacattctctgaatacgagaggctaacgggcaaagacatcgaacaatccatcaagaaagaattcagcggagatatcgaaaagggattgttaggaatcgtcaagtgcgtgaagagcaaagttggatacttcgcggaacgtcttcactggtccatgtccggtttgggcaccaacgacaagactttaatccgtatcatcgtctcgagatctgaaatcgatttggccgatatcaaacaagctttcttggacaaatatggcaagactttggaaagctgggtgcagggcgatacatctggagattacaagagagtccttttggccatactcgactaattccacaattaaaccaaaaagcactgtaatcttagataaatctgtacgcctttacactaaaacaaacaaattactagctttcgtcatactgccattagaataaactcaatttttgatgtttgctgtcgaaagtcacctacatacactgagacgctacttgtttttcttttgagtgtagcctaacttatgtttctttcgcggttacattactatacagaacctgttgccttcggaaactctcaaaggtttcgaaaagagtacaaattaacatgtagaagaggatctgatcacaccaaatataagttagattatgttcaaagttgatcttcgttagtttgaaatttttctcagtgtacacgtatttttgtaattttgcaggataatgctaccagcgagttaaagtatgttttggtacagcttacgtgttacggttaaaaaagtccatgtcactcaggttgtcgacgtttcagaatatattgataagagatctttttattataacaaaaaaaaaccattgtttattatattatacctatttaatttagtttagaggccttaattgttataaatatatatcacagagctttaaacaatgttgtttgatgtacgaattttaattttttgtctttatataattgtaagtttatagagagaggggtgtagggcatgttattctacatatactacttttgaatctttttatataaatatacgttttcttcatcttttataaatgtttgtaaatgtgctttatttggtgcttaacagtaaaatatgttgagaaaact

SEQ ID NO: 3202 - DNA, 1443 bp, Diabrotica virgifera
  SmartBlast Evalue=1E-137; Info=Annexin IX-A n=6 Tax=Bombycoidea RepID=Q9NL61_BOMMO
gaaaaccagcaggaaagtagaatttctttagcaagcagttgtcgtatagaagagaaccagtgggtgtgactaaaattcaattcctctcaaatcacaagtaactgaagcaaacatgtctaaccagcagtattatcctttcaaatgtacacccactgtctaccccgccgatcccttcgaccccgtggcagatgccgccaccttgaagaaggccatgaaaggtttcggcaccgacgagaaagccatcatcgacgtcctggcccgtagaggcatcgtccaacgtctcgagatcgccgaaaccttcaagacctcctacggcaaagacctcgtctcagagttgaagagcgaattggggggtaagttcgaggatgtgatggtagccctcatgactccactgccacaattgtatgccaaagaactgcacgatgccgtagccggaatgggtaccgatgaggaagctatcatcgagatcttgtgcacattgtccaactacggaatccgtaccatcgcacaattttatgaacaaatgtacggcaaacctttagaaaaagatttgaaaggagatacttcaggacatttcaaaaggctctgtgtttctttagtgcaagctaacagagacgaaaaccaaggcgtcaatgaacaacaagccctcgccgacgccgaagctttgatcgaagctggcgaaggaaaatggggcaccgaagaatccatcttcaacaccgtcctcatcaccaggagttaccaacaattaagagccacattctctgaatacgagaggctaacgggcaaagacatcgaacaatccatcaagaaagaattcagcggagatatcgaaaagggattgttaggaatcgtcaagtgcgtgaagagcaaagttggatacttcgcggaacgtcttcactggtccatgtccggtttgggcaccaacgacaagactttaatccgtatcatcgtctcgagatctgaaatcgatttggccgatatcaaacaagctttcttggacaaatatggcaagactttggaaagctgggtgcaggataatgctaccagcgagttaaagtatgttttggtacagcttacgtgttacggttaaaaaagtccatgtcactcaggttgtcgacgtttcagaatatattgataagagatctttttattataacaaaaaaaaaccattgtttattatattatacctatttaatttagtttagaggccttaattgttataaatatatatcacagagctttaaacaatgttgtttgatgtacgaattttaattttttgtctttatataattgtaagtttatagagagaggggtgtagggcatgttattctacatatactacttttgaatctttttatataaatatacgttttcttcatcttttataaatgtttgtaaatgtgctttatttggtgcttaacagtaaaatatgttgagaaaact

SEQ ID NO: 3203 - DNA, 1437 bp, Diabrotica virgifera
  SmartBlast Evalue=1E-137; Info=Annexin IX-A n=6 Tax=Bombycoidea RepID=Q9NL61_BOMMO
gaaaaccagcaggaaagtagaatttctttagcaagcagttgtcgtatagaagagaaccagtgggtgtgactaaaattcaattcctctcaaatcacaagtaactgaagcaaacatgtctaaccagcagtattatcctttcaaatgtacacccactgtctaccccgccgatcccttcgaccccgtggcagatgccgccaccttgaagaaggccatgaaaggtttcggcaccgacgagaaagccatcatcgacgtcctggcccgtagaggcatcgtccaacgtctcgagatcgccgaaaccttcaagacctcctacggcaaagacctcgtctcagagttgaagagcgaattggggggtaagttcgaggatgtgatggtagccctcatgactccactgccacaattgtatgccaaagaactgcacgatgccgtagccggaatgggtaccgatgaggaagctatcatcgagatcttgtgcacattgtccaactacggaatccgtaccatcgcacaattttatgaacaaatgtacggcaaacctttagaaaaagatttgaaaggagatacttcaggacatttcaaaaggctctgtgtttctttagtgcaagctaacagagacgaaaaccaaggcgtcaatgaacaacaagccctcgccgacgccgaagctttgatcgaagctggcgaaggaaaatggggcaccgaagaatccatcttcaacaccgtcctcatcaccaggagttaccaacaattaagagccacattctctgaatacgagaggctaacgggcaaagacatcgaacaatccatcaagaaagaattcagcggagatatcgaaaagggattgttaggaatcgtcaagtgcgtgaagagcaaagttggatacttcgcggaacgtcttcactggtccatgtccggtttgggcaccaacgacaagactttaatccgtatcatcgtctcgagatctgaaatcgatttggccgatatcaaacaagctttcttggacaaatatggcaagactttggaaagctgggtgcaggataatgctaccagcgagttaaagtatgttttggtacagcttacgtgttacggttaaaaaagtccatgtcactcaggttgtcgacgtttcagaatatattgataagagatctttttattataacaaaaaaaaaccattgtttattatattatacctatttaatttagtttagaggccttaattgttataaatatatatcacagagctttaaacaatgttgtttgatgtacgaattttaattttttgtctttatataattgtaagtttatagagagaggggtgtagggcatgttattctacatatactacttttgaatctttttatataaatatacgttttcttcatcttttataaatgtttgtaaatgtgctttatttggtgcttaacagtaaaatatgttgag

SEQ ID NO: 3204 - DNA, 1411 bp, Diabrotica virgifera
  SmartBlast Evalue=1E-137; Info=Annexin IX-A n=6 Tax=Bombycoidea RepID=Q9NL61_BOMMO
aagcagttgtcgtatagaagagaaccagtgggtgtgactaaaattcaattcctctcaaatcacaagtaactgaagcaaacatgtctaaccagcagtattatcctttcaaatgtacacccactgtctaccccgccgatcccttcgaccccgtggcagatgccgccaccttgaagaaggccatgaaaggtttcggcaccgacgagaaagccatcatcgacgtcctggcccgtagaggcatcgtccaacgtctcgagatcgccgaaaccttcaagacctcctacggcaaagacctcgtctcagagttgaagagcgaattggggggtaagttcgaggatgtgatggtagccctcatgactccactgccacaattgtatgccaaagaactgcacgatgccgtagccggaatgggtaccgatgaggaagctatcatcgagatcttgtgcacattgtccaactacggaatccgtaccatcgcacaattttatgaacaaatgtacggcaaacctttagaaaaagatttgaaaggagatacttcaggacatttcaaaaggctctgtgtttctttagtgcaagctaacagagacgaaaaccaaggcgtcaatgaacaacaagccctcgccgacgccgaagctttgatcgaagctggcgaaggaaaatggggcaccgaagaatccatcttcaacaccgtcctcatcaccaggagttaccaacaattaagagccacattctctgaatacgagaggctaacgggcaaagacatcgaacaatccatcaagaaagaattcagcggagatatcgaaaagggattgttaggaatcgtcaagtgcgtgaagagcaaagttggatacttcgcggaacgtcttcactggtccatgtccggtttgggcaccaacgacaagactttaatccgtatcatcgtctcgagatctgaaatcgatttggccgatatcaaacaagctttcttggacaaatatggcaagactttggaaagctgggtgcaggataatgctaccagcgagttaaagtatgttttggtacagcttacgtgttacggttaaaaaagtccatgtcactcaggttgtcgacgtttcagaatatattgataagagatctttttattataacaaaaaaaaaccattgtttattatattatacctatttaatttagtttagaggccttaattgttataaatatatatcacagagctttaaacaatgttgtttgatgtacgaattttaattttttgtctttatataattgtaagtttatagagagaggggtgtagggcatgttattctacatatactacttttgaatctttttatataaatatacgttttcttcatcttttataaatgtttgtaaatgtgctttatttggtgcttaacagtaaaatatgttgagaaaact

SEQ ID NO: 3205 - DNA, 1486 bp, Diabrotica virgifera
gggatttaaaatcattctttattttcatcagtttggtcacatttttctttgatgtgggcactctacaatattttgttccatcgattaaaaaacaccaatatgttttatacaaattatttattatcctagttttaaattgtatttcaagacacttattattcaagttcttgttcagattgaagccgctacactagtcattctttcaacaacacaataaaatatgtatgtaattaaattaaattactcctaatataaaaagaattgtccatatacactaaacacattttgggagcttttttataaataatactaatggtactttggaagaattttagtatcgccttggcggggctgaacacaagtaaaagatgctgaaagttagtatttagtttcctacatagccaaaatgtgttttcattgtacttgggtttgtcattggtagttgtatgaatcatttctcccataaccaccttgctgtgcatatcctccactcatatcatcataaccttgactattgtaaccaccctgtgcacctgtgttgtaaccaccaccaccatattgatcagctccttgttgtgagtatccagaataatcaccacccccactaccatagttggaagatggattggaatattgtgtcgagtaaccaccactttcataaccaccttgtcctcctccatactgattgtatcctccatactgaccaccaccaccaccatactgatttgagtatgattgctgaccaccttggaatccgttagctccctgtccattttcaaacctaggtctcttaattccacctggtggtcctccttgaccaccaaactgtcctggtgctcttttttgtcctggtccacctggtccgcctggaccacctggtcctcccctgccacctcctgggcctccacgtcctctgaaaccacctggacctcctctacccattccacgacctcctggaccaccaggtcctcccctgccacctcctgggcctccacgtcccctaaaaccacctggaccacctcttcctcccattccgcggccacctcctctacctcccataccaccttctcctgggccacctcctgggaatcgtcctcttggagctccccttggacctccacgtcctctcatcattggaccaccacgtcctcctggtcctccaggtccacctcgtcccctgaatcctcctcggccacctggaccccctggacctcctggtccacctctacctggtccaccgggaccacctcttcctctacccatacccatccctctacctccacccatacctcctctgtttgggggccctgatggagctgctgctgcttctggagctgctggttcagctgtggtatcagccatttttgtgattatactttatactatttaaaaattacaattatttctcatacaacacacagcagcgtttaacttttgttgagattcaagatggacgtcgacgcaaagaaagcaagcaaaagcaaac

SEQ ID NO: 3206 - DNA, 1459 bp, Diabrotica virgifera
gggatttaaaatcattctttattttcatcagtttggtcacatttttctttgatgtgggcactctacaatattttgttccatcgattaaaaaacaccaatatgttttatacaaattatttattatcctagttttaaattgtatttcaagacacttattattcaagttcttgttcagattgaagccgctacactagtcattctttcaacaacacaataaaatatgtatgtaattaaattaaattactcctaatataaaaagaattgtccatatacactaaacacattttgggagcttttttataaataatactaatggtactttggaagaattttagtatcgccttggcggggctgaacacaagtaaaagatgctgaaagttagtatttagtttcctacatagccaaaatgtgttttcattgtacttgggtttgtcattggtagttgtatgaatcatttctcccataaccaccttgctgtgcatatcctccactcatatcatcataaccttgactattgtaaccaccctgtgcacctgtgttgtaaccaccaccaccatattgatcagctccttgttgtgagtatccagaataatcaccacccccactaccatagttggaagatggattggaatattgtgtcgagtaaccaccactttcataaccaccttgtcctcctccatactgattgtatcctccatactgaccaccaccaccaccatactgatttgagtatgattgctgaccaccttggaatccgttagctccctgtccattttcaaacctaggtctcttaattccacctggtggtcctccttgaccaccaaactgtcctggtgctcttttttgtcctggtccacctggtccgcctggaccacctggtcctcccctgccacctcctgggcctccacgtcctctgaaaccacctggacctcctctacccattccacgacctcctggaccaccaggtcctcccctgccacctcctgggcctccacgtcccctaaaaccacctggaccacctcttcctcccattccgcggccacctcctctacctcccataccaccttctcctgggccacctcctgggaatcgtcctcttggagctccccttggacctccacgtcctctcatcattggaccaccacgtcctcctggtcctccaggtccacctcgtcccctgaatcctcctcggccacctggaccccctggacctcctggtccacctctacctggtccaccgggaccacctcttcctctacccatacccatccctctacctccacccatacctcctctgtttgggggccctgatggagctgctgctgcttctggagctgctggttcagctgtggtatcagccatttttgtgattatactttatactatttaaaaattacaattatttctcatacaacacacagcagcgtttaacttttgttgagattcaagatggacgtcg

SEQ ID NO: 3207 - DNA, 1382 bp, Diabrotica virgifera
gggatttaaaatcattctttattttcatcagtttggtcacatttttctttgatgtgggcactctacaatattttgttccatcgattaaaaaacaccaatatgttttatacaaattatttattatcctagttttaaattgtatttcaagacacttattattcaagttcttgttcagattgaagccgctacactagtcattctttcaacaacacaataaaatatgtatgtaattaaattaaattactcctaatataaaaagaattgtccatatacactaaacacattttgggagcttttttataaataatactaatggtactttggaagaattttagtatcgccttggcggggctgaaccataaccaccttgctgtgcatatcctccactcatatcatcataaccttgactattgtaaccaccctgtgcacctgtgttgtaaccaccaccaccatattgatcagctccttgttgtgagtatccagaataatcaccacccccactaccatagttggaagatggattggaatattgtgtcgagtaaccaccactttcataaccaccttgtcctcctccatactgattgtatcctccatactgaccaccaccaccaccatactgatttgagtatgattgctgaccaccttggaatccgttagctccctgtccattttcaaacctaggtctcttaattccacctggtggtcctccttgaccaccaaactgtcctggtgctcttttttgtcctggtccacctggtccgcctggaccacctggtcctcccctgccacctcctgggcctccacgtcctctgaaaccacctggacctcctctacccattccacgacctcctggaccaccaggtcctcccctgccacctcctgggcctccacgtcccctaaaaccacctggaccacctcttcctcccattccgcggccacctcctctacctcccataccaccttctcctgggccacctcctgggaatcgtcctcttggagctccccttggacctccacgtcctctcatcattggaccaccacgtcctcctggtcctccaggtccacctcgtcccctgaatcctcctcggccacctggaccccctggacctcctggtccacctctacctggtccaccgggaccacctcttcctctacccatacccatccctctacctccacccatacctcctctgtttgggggccctgatggagctgctgctgcttctggagctgctggttcagctgtggtatcagccatttttgtgattatactttatactatttaaaaattacaattatttctcatacaacacacagcagcgtttaacttttgttgagattcaagatggacgtcgacgcaaagaaagcaagcaaaagcaaac

SEQ ID NO: 3208 - DNA, 1355 bp, Diabrotica virgifera
gggatttaaaatcattctttattttcatcagtttggtcacatttttctttgatgtgggcactctacaatattttgttccatcgattaaaaaacaccaatatgttttatacaaattatttattatcctagttttaaattgtatttcaagacacttattattcaagttcttgttcagattgaagccgctacactagtcattctttcaacaacacaataaaatatgtatgtaattaaattaaattactcctaatataaaaagaattgtccatatacactaaacacattttgggagcttttttataaataatactaatggtactttggaagaattttagtatcgccttggcggggctgaaccataaccaccttgctgtgcatatcctccactcatatcatcataaccttgactattgtaaccaccctgtgcacctgtgttgtaaccaccaccaccatattgatcagctccttgttgtgagtatccagaataatcaccacccccactaccatagttggaagatggattggaatattgtgtcgagtaaccaccactttcataaccaccttgtcctcctccatactgattgtatcctccatactgaccaccaccaccaccatactgatttgagtatgattgctgaccaccttggaatccgttagctccctgtccattttcaaacctaggtctcttaattccacctggtggtcctccttgaccaccaaactgtcctggtgctcttttttgtcctggtccacctggtccgcctggaccacctggtcctcccctgccacctcctgggcctccacgtcctctgaaaccacctggacctcctctacccattccacgacctcctggaccaccaggtcctcccctgccacctcctgggcctccacgtcccctaaaaccacctggaccacctcttcctcccattccgcggccacctcctctacctcccataccaccttctcctgggccacctcctgggaatcgtcctcttggagctccccttggacctccacgtcctctcatcattggaccaccacgtcctcctggtcctccaggtccacctcgtcccctgaatcctcctcggccacctggaccccctggacctcctggtccacctctacctggtccaccgggaccacctcttcctctacccatacccatccctctacctccacccatacctcctctgtttgggggccctgatggagctgctgctgcttctggagctgctggttcagctgtggtatcagccatttttgtgattatactttatactatttaaaaattacaattatttctcatacaacacacagcagcgtttaacttttgttgagattcaagatggacgtcg

SEQ ID NO: 3209 - DNA, 1258 bp, Diabrotica virgifera
atgacaacattccagtcttgatagaaagtaataatgtcataacttctgaaactggtaccccataaacccagctaataaagatgagtcaatagatgacgagaaataaagacaattttaagctacacttacacaagtaaaagatgctgaaagttagtatttagtttcctacatagccaaaatgtgttttcattgtacttgggtttgtcattggtagttgtatgaatcatttctcccataaccaccttgctgtgcatatcctccactcatatcatcataaccttgactattgtaaccaccctgtgcacctgtgttgtaaccaccaccaccatattgatcagctccttgttgtgagtatccagaataatcaccacccccactaccatagttggaagatggattggaatattgtgtcgagtaaccaccactttcataaccaccttgtcctcctccatactgattgtatcctccatactgaccaccaccaccaccatactgatttgagtatgattgctgaccaccttggaatccgttagctccctgtccattttcaaacctaggtctcttaattccacctggtggtcctccttgaccaccaaactgtcctggtgctcttttttgtcctggtccacctggtccgcctggaccacctggtcctcccctgccacctcctgggcctccacgtcctctgaaaccacctggacctcctctacccattccacgacctcctggaccaccaggtcctcccctgccacctcctgggcctccacgtcccctaaaaccacctggaccacctcttcctcccattccgcggccacctcctctacctcccataccaccttctcctgggccacctcctgggaatcgtcctcttggagctccccttggacctccacgtcctctcatcattggaccaccacgtcctcctggtcctccaggtccacctcgtcccctgaatcctcctcggccacctggaccccctggacctcctggtccacctctacctggtccaccgggaccacctcttcctctacccatacccatccctctacctccacccatacctcctctgtttgggggccctgatggagctgctgctgcttctggagctgctggttcagctgtggtatcagccatttttgtgattatactttatactatttaaaaattacaattatttctcatacaacacacagcagcgtttaacttttgttgagattcaagatggacgtcgacgcaaagaaagcaagcaaaagcaaac

SEQ ID NO: 3210 - DNA, 1231 bp, Diabrotica virgifera
atgacaacattccagtcttgatagaaagtaataatgtcataacttctgaaactggtaccccataaacccagctaataaagatgagtcaatagatgacgagaaataaagacaattttaagctacacttacacaagtaaaagatgctgaaagttagtatttagtttcctacatagccaaaatgtgttttcattgtacttgggtttgtcattggtagttgtatgaatcatttctcccataaccaccttgctgtgcatatcctccactcatatcatcataaccttgactattgtaaccaccctgtgcacctgtgttgtaaccaccaccaccatattgatcagctccttgttgtgagtatccagaataatcaccacccccactaccatagttggaagatggattggaatattgtgtcgagtaaccaccactttcataaccaccttgtcctcctccatactgattgtatcctccatactgaccaccaccaccaccatactgatttgagtatgattgctgaccaccttggaatccgttagctccctgtccattttcaaacctaggtctcttaattccacctggtggtcctccttgaccaccaaactgtcctggtgctcttttttgtcctggtccacctggtccgcctggaccacctggtcctcccctgccacctcctgggcctccacgtcctctgaaaccacctggacctcctctacccattccacgacctcctggaccaccaggtcctcccctgccacctcctgggcctccacgtcccctaaaaccacctggaccacctcttcctcccattccgcggccacctcctctacctcccataccaccttctcctgggccacctcctgggaatcgtcctcttggagctccccttggacctccacgtcctctcatcattggaccaccacgtcctcctggtcctccaggtccacctcgtcccctgaatcctcctcggccacctggaccccctggacctcctggtccacctctacctggtccaccgggaccacctcttcctctacccatacccatccctctacctccacccatacctcctctgtttgggggccctgatggagctgctgctgcttctggagctgctggttcagctgtggtatcagccatttttgtgattatactttatactatttaaaaattacaattatttctcatacaacacacagcagcgtttaacttttgttgagattcaagatggacgtcg

SEQ ID NO: 3211 - DNA, 464 bp, Diabrotica virgifera
cgagccacgcccaggtgctccgaaagcggccaccacggaggataacgtgataaaaatccacgatctcgtattggcaaactgatgaatgaaggtgcgcgagatagctgagacagagacagtaggcatctcaaaagaccgcgtgcacgatatgagaaagctgtcgacgcgtgcgtccaatagggcttttcattcacagtcatttgtttcgagcttctgtcatgtgtcacataatattaatatatctacgtcatacgttattggtatttacaatgatacaaaccaaagacgtatgacgtagattattaatattgtgtgacacatgacaggggctcgaaacaaatgacaatcgatgaaaagccctatgcaggatatgagaaagctgtcaacagcaatgagtggcgcgtttgtttactccgaacaagcgcaatcgtgagaccacttcagatcagtgtttgccgctattt

SEQ ID NO: 3212 - DNA, 414 bp, Diabrotica virgifera
atgaatacatgaccacttgtcttgtggtcgtaatacacagcacgtcaaactgcttgacagttgcattgcttgacttgcactgtcaaaacttgtcttcttccttgattgacctttaccgttataagcatagggcttttcattcacagtcatttgtttcgagcttctgtcatgtgtcacataatattaatatatctacgtcatacgttattggtatttacaatgatacaaaccaaagacgtatgacgtagattattaatattgtgtgacacatgacaggggctcgaaacaaatgacaatcgatgaaaagccctatgcaggatatgagaaagctgtcaacagcaatgagtggcgcgtttgtttactccgaacaagcgcaatcgtgagaccacttcagatcagtgtttgccgctattt

SEQ ID NO: 3213 - DNA, 397 bp, Diabrotica virgifera
ttatgtttaatttcaaatatctctttcagaaaaatttttgtttattctaaggaactttcggccctcgcaaataatgtaactttatgcttagcgagagggaatctatagaatagggcttttcattcacagtcatttgtttcgagcttctgtcatgtgtcacataatattaatatatctacgtcatacgttattggtatttacaatgatacaaaccaaagacgtatgacgtagattattaatattgtgtgacacatgacaggggctcgaaacaaatgacaatcgatgaaaagccctatgcaggatatgagaaagctgtcaacagcaatgagtggcgcgtttgtttactccgaacaagcgcaatcgtgagaccacttcagatcagtgtttgccgctattt

SEQ ID NO: 3214 - DNA, 225 bp, Diabrotica virgifera
cgagccacgcccaggtgctccgaaagcggccaccacggaggataacgtgataaaaatccacgatctcgtattggcaaactgatgaatgaaggtgcgcgagatagctgagacagagacagtaggcatctcaaaagaccgcgtgcacgatatgagaaagctgtcgacgcgtgcgtccaatagggcttttcattcacagtcatttgtttcgagcttctgtcatgtgtc

SEQ ID NO: 3215 - DNA, 175 bp, Diabrotica virgifera
atgaatacatgaccacttgtcttgtggtcgtaatacacagcacgtcaaactgcttgacagttgcattgcttgacttgcactgtcaaaacttgtcttcttccttgattgacctttaccgttataagcatagggcttttcattcacagtcatttgtttcgagcttctgtcatgtgtc

SEQ ID NO: 3216 - DNA, 158 bp, Diabrotica virgifera
ttatgtttaatttcaaatatctctttcagaaaaatttttgtttattctaaggaactttcggccctcgcaaataatgtaactttatgcttagcgagagggaatctatagaatagggcttttcattcacagtcatttgtttcgagcttctgtcatgtgtc

SEQ ID NO: 3217 - DNA, 1482 bp, Diabrotica virgifera
  SmartBlast Evalue=6E-78; Info=NADH dehydrogenase subunit 4 n=1 Tax=Psacothea hilaris RepID=C7ACV8_PSAHI
cttatttttgatttacaagaccaatattttatttaaattattaaaactttaatgataatatattttttattattagtaatatttttatctgggattattagttttattttaaatcgtaagcatttattgttaatattattaagtttagaatttattgtaattgctttatatattcaattttttttttatttaagaaatataaattatgaatattttttttctataatttttttaacaataagagtttgtgaaggttctttaggtttagcaattttaattataatagttcgtgtttatggtaatgattatattttaactttttcttctttatgataagatttttatttagattaatttttttgattcctttatgttttaaaaaaaatttttgattaattcaatgattaatatttttttttacatttttatttttttttaattatggtagaggtttaaattatttctctatttcaaatattttaggtattgatttttgatcttatagtttaattttactaagattttgagtttgtactttaataattttagctagaggaaaattatataaatatggaatttattcaaatttatttttattagtattaatttttttaatattaagtttatatttagtattttcttcattaaatattttcattttttatttattttttgaaattagattagtaccagttttattattaattattggttgaggttatcaaccagaacgtttagaggctggaatttatttattattttatactttattaatatcattacctataataattattattttttatttaaatgaaaaattttattgtatttcttttttattaatagatttaagtttaaatagaatatttatatatttatgtataaatatagttttttttgttaaaattcctatattttttttacatttatggttacctaaggctcatgttgaagctccggtttctggctcgataattttagctggtattatattaaaattagggggttatggtttattacgttttatagtattttttaaatattttttatcattaaatatattttttatatcattatctttattagggggatttattgtttcaatgatttgcattcgtcaaagagatataaaatcattaattgcttactcttcagtttctcatataaggttagtattagggggtattttagctataaatatatgaggattttatggtgctttatttataatattagctcatggtttatgttcttcgggtttattttgtttagcaaatattttttatgaacgtattcatagtcgaagaatttatttaaataagggtttattaaatattatacctaatttaagattatgaatatttttattattatcttctaatatagctgctcctccatctttaaatttaatgagagaaattattttaattaattcaatagttggttttaattttttaacaatattattcttatcattaatat

SEQ ID NO: 3218 - DNA, 2746 bp, Diabrotica virgifera
  SmartBlast Evalue=1E-119; Info=NADH dehydrogenase subunit 5 n=1 Tax=Closteromerus claviger RepID=E3VSZ9_9CUCU
atttatataatataaaaattatatttgacttccaatcaaaaaatctaaaaaaaattagtataaataataaaaattctattaattattgtatgtataatttatttaattaatataattttagtaattatattaaacttaatttcaaaaaaaacattttatgatcgagaaaagaatagaccatttgaatgtggatttgatccaaaaacatttgctcgtttaccattttcattacatttttttttaattgctattatttttttaatttttgatgtagaaattacattacttttaccatttattataattttaaaaattagaaatattataaactatagaattattattatttttttattataattttattattaggagtttatcatgaatgaaatcaaggagctttaaattgaagagattaggataatagttaattataacatttaatttgcatttaaaaagtattgtaaaacaatttatcttaagtaagaagcaaaatattgcagttagtttcgacctaaaaatttgattatataatccttacttaatttaattgaaaccaaaatttagaggtatatcactgttaatgatatcaatgaaatatattccaattaaagaagtaagttattcaagaataagcttctaacttaattcttaagcaatgaaactttgtttttacttctatttatatagtttaaataaaacattatattttcattataaaattagaatttttcttataaatacttaaaagtttaaaacttccctaacatcttcaatattatactctaactataagctatttaagtaataaatatttaatagtaaaaaaattaatcaaaaaattaataataataaataaatttttaaatgattaagagaaaataactgtaaaaatattctattatttaattgttttattacacctgaacttccataatattcaaatcatcctatatcaaaaaattttttataaaatataccaaaataaattggataataattaattcctaaagtagataaaaaaggtatatttcatattattctaaaaaataatactctagaaatattatttaaccttaataaattataagaaattttaaatttagctaactcataacctaatcaaactccaactataataaaaatcaaagttataatttttattaaaaaaggaagacaaataaaaataggagtagaaaatactaatcaagaaaataatcttccactaaaaactacaaataaaattaatcctcttatacccttaagtattaaataaccagtttcagataatatatttaaagctagataattaaatctacccgttaaagaataataagttaaacgaaatctataagcaactgtcaaaccaatagaaatataaaaaattatataaatataaatatttaaataactaaaagataaaatttcaacaattaaatctttagaataaaatccagacataaaaggaaaaccacataaagaaagattacaaatatttaaataagtacaagtcaatggtaaatgtttaattaaacctcctatataacgaatatcctgacaattatttaaattatgaataatattaccagcacacataaataataatgctttaaataaagcatgaattaaaagatgaaaaaaagctaatttatattctcctaaagataaaattcttattattaaacctaattgacttaaagtagataaagcaataatttttttttaaatcaaattcaaaattagcccctaaaccagacataaatattgttatagaagaaataaataataatattattattatctcatctctaaatgaaaaattaaaacgaattaataaataaacacctgctgttactaaagtagaagaatgtactaaagaagaaacaggggtaggagcagctattgctgcaggtaaccaagaagaaaaaggaatttgagcacttttagttatagcagctaaaataactaatcaagtaattaattgtataataaaatcattttttattacatctaaataaaaaataaaatttcaactaccaaaatttaatattcaagcaatagctatcaataatgctacatcaccaattcgattagataaagcagttaatataccagcattaaatcttttaatattttgataataaattactaaacaataagaaactaaacctaacccatctcaacctaataaaattgaaattaaattaggactaataattaatattattattgaaaaaacaaatattacaactagtaaaataaatcgatttttaaataaatcacctcttatatattcttcactataataaattactattgaagaaataaataaaacaaatcttataaatattaaagatattcaatctagtaaaataacaaatatgaaatttcttgaatttaatattaataataaatattcaattacataaactaaatcaaaaattaaaaaataagatgataatattaatataataatacttaaaaataaaaaaaaaataaaaaaataaaacaaataatctaaaataaattattatatctttgataccacaaatcaatattttaattaaactatttagatatataaaaatttctatttttaaaaatataatatttaaaggtaatcaatgtaataataataatatatactcacgaattaatccattataaaaagaataagcaccagaaaaaaatatgccatgttgagaatatctatataaaaataaagaataaacagctctgaaaaatg

SEQ ID NO: 3219 - DNA, 1218 bp, Diabrotica virgifera
  SmartBlast Evalue=6E-85; Info=Cytochrome c oxidase subunit III n=1 Tax=Psacothea hilaris RepID=C7ACV5_PSAHI
tttaataattttcttggattattcccgtatatttttactagaacaagacatataactttaacattaagattagctttaccattatgattgagatttataatttatggatgaataaataatactattcatatattagctcatttagttcctcaaggaactcctccgattttaataccatttatagtttgtattgaaacaattagaaatgtaattcgacctggaacattagcagtacgtttaactgctaatataatcgcaggacacttattaataactcttttaggaaatactggaccaataatatcaatctatatattaaatattttaattattgtccaacttttactattaattttagaaacagcagtatctataattcaatcttatgtatttgctgttttaagaacactatattctagagaagtaaattaatgtcaaatcataaaaatcatccttatcatttagtagatattagaccatgacctttattaggagcttttagagcaatattaacaatattaggaataattaaatgatttcatttatataataataatttactaataattggattattaattacaagattaattatatatcaatgatgacgagatattgtacgagaaggaacttatcaaggccttcatactttagtagttactaaaggtttacgttgaggaataattttatttattacttcagaagtattattttttatatcatttttttgaggattttttcatagatcattagcaccaactattgaattaggaatactttgacctcctaaaggaattcaagcctttaacccattagaaatccctttattaaatactttaattcttttaacttcgggattaactgtaacttgagcccatcatagcctaatagaaaataatttttctcaaggacttcaaggattaatttttacagtaacattaggaatttattttactattttacaaggatatgaatatattgaatcaccttttgcaatttctgattcaatttatggatcttcattttttatagcaacaggttttcatggattacatgtaattattggaacaaccttcttattaatttgtttaattcgccattatttaaatcatttttcatcgacacatcactttggttttgaagcagcagcttgatactgacattttgtagatgtagtatgattattcttatatatttcaatttactgatgaggtagat

SEQ ID NO: 3220 - DNA, 1912 bp, Diabrotica virgifera
  SmartBlast Evalue=1E-142; Info=ATP-dependent clp protease atp- binding subunit clpx n=2 Tax=Culicini RepID=Q16HN4_AEDAE
aaaaatcaggcggtattcgtgcatttcgcatgctttttttgattaaatacattatataagaatcaaggacttggtttcaccgttggttaaggtactagcgacttggttgtaaaaataaaagagtttcatagtaataaaaaatgatacttatgttctcatataaagggatcaaggacaagaaaaaagcattataagacgacacagtgtgattgaggaaagtatcaaaccgatatattgataccaaagtggtaccaagggtaccaaacgaggtcggaaaccttccaaaccttgaatattgccgcccaatatcagttaagaagtcttcgattttggaaaaaaataattcaaaaattaaaagactaatttaaaaatttttaatcaaaagttaattttcgataaaaaatttttcaaccgattttgaatcggttttaaatagaatctaaattgactaaactatgcaaattaaaaatttgcatatttaggcatttaaacattttagacccactttgcttttaaaaatatattctattgtttattgaataacaattcttctaatcttaaaaacaaacattactagctaatctacgaaagatacaggaggaaactatagttgccgatgtcgtcaaaaattattttcctcggctgttaatctataattttttcataattcaactaaagatacggtcaaaaccattgaatatacaaataaaacaagatactataaataccgaactttcgtagaccatttctagtgcgacaattacccaatcagttaattacagcaaagtcaatctcattgttttactctgatagacgtattgaactcgccttcttcggtttgtacttgatttttaatgtaggacggtttgccctttcccttcacgtagtcttctgtgatgtggacttctgagatgttagaaccaggtatttcgaacatcggctccaaaagaagagattccattattgccctcaatcccctagctcccgtttttctttccatagccaaatgggcgatggcgttcaaagcttctggtgtaaatatcaaatcgcaattgtccatccctagcaatcgtttgtactgtagaagcagagcattctttggctcagtcaatatccttaccaatagagtctggtctaaggagtggaaaggaactaagacaggaaatcttcctacaaattcaggtatcattccaaagtccatgagatctcttgcttgtacttgtcttaaggctacatctttttcgttattttcttctgcagctgactgcgaagattgatgcattgtcgcttcttgagctacagctctcctacctttactggaagaaattggtgctccaaatcctaagtaattctcattatttctcctttggattactctttccaaaccgttgtaggcaccactggctacaaatagtatattggttgtgtcaacttgaatagtttctcctcttaatttcctgggtgaattacgttcgggaacattaactatggtaccttcgagcattttcagcataccttgttgaactccttcacctcctacatccctcagttggtgaatgccaggtactgctccgatcttatcaacttcgtctaggaacacaatgccgacttgtgccctttcgacgctgtatccggcatcttgcagcaacttcccgatgacgctttcgatgtcttcgcctacgtatccggcttgtgttaaggtagtacaatcacatatggcaaaaggcacatctaggcactgagctatggtttgagcaagaagtgttttacctgatcctgttggtcccaacaagagtatattgcttttctctaacttcagttcatgtgtcgtcctttccagaatatccgagccctgtcccgttttagttcctgccggtggagttgattcaaaggttcctcccaagttcagacc

SEQ ID NO: 3221 - DNA, 451 bp, Diabrotica virgifera
attgggtaccaaatacaatcacttccattgtacatctttagacagtcacaaaatgttgaaacaagtggttcttctctgcgcaattgttgcagtaatctgtcaagaggatacaacactagaacctgttgaaccaaccactgcagcaccaactcatagaccttcagtgacctgcccaccttttgacccatcggcacctccagtctacgaacctgacccatactactgtgatatattttacgaatgctctggaagtactcccttccaattccactgtgctcctggaacaaacttcgacatcaagacgaatctatgtgaattcaatgttgactgtggagaccgttcaacaactgtaggaacaacgaccgaaggaacacaacccccaaaattttaatcaaataatgataataaagatatgcccaaactttaataaaacttgaaccattaaacaaat

SEQ ID NO: 3222 - DNA, 443 bp, Diabrotica virgifera
attgggtaccaaatacaatcacttccattgtacatctttagacagtcacaaaatgttgaaacaagtggttcttctctgcgcaattgttgcagtaatctgtcaagaggatacaacactagaacctgttgaaccaaccactgcagcaccaactcatagaccttcagtgacctgcccaccttttgacccatcggcacctccagtctacgaacctgacccatactactgtgatatattttacgaatgctctggaagtactcccttccaattccactgtgctcctggaacaaacttcgacatcaagacgaatctatgtgaattcaatgttgactgtggagaccgttcaacaactgtaggaacaacgaccgaaggaacacaacccccaaaattttaatcaaataatgataataaagatatgcccaaactttaataaaacttgaaccatt

SEQ ID NO: 3223 - DNA, 404 bp, Diabrotica virgifera
ataacattatgttagacttttgatctgttactcaattgaacaatatgttcaagttactagttttcgtttttgctattacaacagtgatcgcttatgaaacagcttttcaatacccagtgacctgcccaccttttgacccatcggcacctccagtctacgaacctgacccatactactgtgatatattttacgaatgctctggaagtactcccttccaattccactgtgctcctggaacaaacttcgacatcaagacgaatctatgtgaattcaatgttgactgtggagaccgttcaacaactgtaggaacaacgaccgaaggaacacaacccccaaaattttaatcaaataatgataataaagatatgcccaaactttaataaaacttgaaccattaaacaaat

SEQ ID NO: 3224 - DNA, 396 bp, Diabrotica virgifera
ataacattatgttagacttttgatctgttactcaattgaacaatatgttcaagttactagttttcgtttttgctattacaacagtgatcgcttatgaaacagcttttcaatacccagtgacctgcccaccttttgacccatcggcacctccagtctacgaacctgacccatactactgtgatatattttacgaatgctctggaagtactcccttccaattccactgtgctcctggaacaaacttcgacatcaagacgaatctatgtgaattcaatgttgactgtggagaccgttcaacaactgtaggaacaacgaccgaaggaacacaacccccaaaattttaatcaaataatgataataaagatatgcccaaactttaataaaacttgaaccatt

SEQ ID NO: 3225 - DNA, 382 bp, Diabrotica virgifera
atctgttactcaattgaacaatatgttcaagttactagttttcgtttttgctattacaacagtgatcgcttatgaaacagcttttcaatacccagtgacctgcccaccttttgacccatcggcacctccagtctacgaacctgacccatactactgtgatatattttacgaatgctctggaagtactcccttccaattccactgtgctcctggaacaaacttcgacatcaagacgaatctatgtgaattcaatgttgactgtggagaccgttcaacaactgtaggaacaacgaccgaaggaacacaacccccaaaattttaatcaaataatgataataaagatatgcccaaactttaataaaacttgaaccattaaacaaat

SEQ ID NO: 3226 - DNA, 631 bp, Diabrotica virgifera
  SmartBlast Evalue=4E-20; Info=Uracil-DNA glycosylase n=3 Tax= Neisseria RepID=C0EMC8_NEIFL
acgactaatgcagcagatttaatatacggtaatgcatataactatcgtacacaaaaataaataaaacattcaataagcataaagatacaattccacttaaattattcacccttattttattcacttatgctcaacttgctcaatttgttttgaaccaaattttcaattttacttgaatcaacacttaagtgcgcacatgtatttggaacgggacatgtttttttaacagggcaccaatctatttcatcaagatcatgatcttttagccatttattagcttgtgaaaaatgcttacatccgaaaaaatttttctttgggtttctagatggatgtcctgtagttaggacgttgcataagttaattacgtttttggcgctctgtccccaaaacatacataccaatttctcgttattgacgtgtaattgcttaatcaattccccagtaatatctttccaacctattttgagatgggaattgttgccaatatgttttgtgagagctgaatttagaagaagcactccttgcctagcccagtattctagatttccataatcttctttaaattttctgagatttatttcacctatatcgcttttaacttcttttaatatatttcttgtagaattataaa

SEQ ID NO: 3227 - DNA, 665 bp, Diabrotica virgifera
  SmartBlast Evalue=2E-24; Info=uracil-DNA glycosylase n=1 Tax= Ruminococcus flavefaciens FD-1 RepID=UPI0001C37B11
ttttacgaacttttgttgtcctcaatgtattaaagttattatagtcggtcaagatccaacttctgagcccactggtttggcattcagtagtagaggtaaaatttataattctacaataaatatattaaaagaagttaaagccgatatcggtatacaaaaccttagaccagaatttcaaggagattatggaaatctagaatactgggctaagcaaggagtacttcttctaaattcaactctcacaaaacgtattggtgacgactcccatttcaaaataggttggaaagggattactggggaattgattaagcaactacacttcaataacgaaaaattggtatgtatgttttggggacagcgcgccaaagacgtaattaacttatgcaacgtcctaactacaggacatccatctagaaacccaaagaaaaattttttcggatgtaaacatttttcacaagctaataaatggctaaaagatcatgatattgctgaaatagattggtgccctgttcccaaaacatgtcctattccaactacatgtgtgcacttaagtggtgattcaagtgaattggataattcaagaaattacatggctaataataatcataagtttgaatattttgttaaagaatatcctattttgtttgaaaagagtaaggtaccag

SEQ ID NO: 3228 - DNA, 4590 bp, Diabrotica virgifera
  SmartBlast Evalue=0; Info=Par-1 n=1 Tax=Tribolium castaneum RepID=D6WFV8_TRICA
gtagaaatctaaaagtatgcttttttgaggtgtgtgttgattttaaaggattttttaagtgaccaggattattttatgggtaatgtaaagtggccagcgcgatagtgtgagtggggacgatgtcggccgctatgcgttccacccttcagaccgtgccggaaagtctggaggtaacgaaaaacgccgaccccactatcggtacttcaggcccacaaacaaccaagacacccgttaaaaccatctcggaagacaaatctaccaggtctcgcaattatcacacatcttcgtccacgaataagaattgaataatgagcgaaggcgttagtccctggaagaccaaccaccatgacatcggcatgctaatgttgaaagacagaagagaaaagataacgaacgccggcaaatactccgatcgttacaaagacattttttcgcatgaagtgcccgacgaagaaaaattccccttaagtgctaagtgtcgcgataccatggaacactaccgtaaagtgtcaaaaggggggaagcccgaagactcccctaccgcggtgtcaaaactgaccacggagaaaatgaagcttacagtaggtaagaaaagtagcaacgctaccaatgacctaaataaacaagagaatgctttaataggattcaagcacgtaccggagggtacccacaagccgaaccaacccccattgccactaagttcaccgaacaccaccaagtggcagaagaggaacgtcaacgtttacagcgtcaacacaaacgttccaccttctagtcctaatcaaatcagagcacctccaggattccctcccaagaaacctccacctgtagctctaagcgcgatactcaacggaaacaacaacaacaatataatcactaataacaacaaccacttcgataatactttatcgcatctagaaaacgttgagagtatcattagcaaattagacgaacacgaaaagaaggaacaaaacttgaaaaaattcgaagaactagtcaaaaaattcggccccaagcctgccgaaaaggccaagaaagccgcggctcctttcgaacagtcccctaagaaacaaacgaaaccattggatgcgtcggaagaccaactcaaatctcaagagcacatcctcaacccgatcaaacacgccagtgaagtcgaagatttgcccgctaaaggactcaaagaagaagaggagaacgagaagcatcatcagcattttaacagaggtgccaaggaaaggaagagtacggatacgaacgagaaagcgaaacctgtgcagcagcctttaagcaggacggcttccgatgctcaaaacaaaagtttgaccaacgcgaaaaagtcgtcgacaaggacctctagggatcgtacctcacgaaaaaccaatgacagcacagtggaatcaacgcgcagcagttccgcgtcgatgcggaacaggtcgcgagtgggagaagaaccgaccatcggcaaatacaagctactcaaaaccatcggaaaaggaaactttgccaaagtcaaactggccaaacacgttcccacgggcaaggaggtggccattaagatcatcgacaaaactcagttgacacctggttcactccaaaaactatttagagaagtaagaataatgaaaatgttagaccatccgaatatagtgaaactctttcaagtgatcgaaacggagaaaactttgtacctggttatggaatacgcgtccggcggagaagtcttcgattacctcgttctgcacggtaggatgaaggaaaaggaggcgcgagcgaagtttaggcaaatcgtctctgcagtacaatactgccatcaaaaaagaattatacacagagatttaaaggctgaaaacttactgttggatagtgaaatgaatattaaaattgccgatttcggcttctcaaacgaatttaccccaggaaataaactagatactttttgcgggagtccaccttatgcagctcctgaactttttcaaggtaaaaagtatgacggtccagaagtagatgtctggtcgttaggcgtaatcctctataccctcgtctcgggtagtctccccttcgacggttcgacgctcagggagctgagagagcgagtacttagaggcaaataccggatccccttctacatgagtaccgactgcgagaatctactcaagaagttcctcgtactcaatcccgccaaaagagctagcctggagactatcatgaaggacaagtggatgaaccaggggtacgaaaacgacgaactgaagccgtacgtcgagcctgagcaggatatgagcgaccccaaacggatagaggctctagtttgtttaggatttaacagatacgacgtggaaaactcattagattcacagaaatacgacgacgcgtttgcgacgtatctattattaggaaggaaaagcaccgatccggaaagtgacggtagtcggagcggcagcagtttatccctgcgtaacatgacagggcaacaacaggccacgcctcaacctgctatacagagccctcaacacagaggcgtgcatcgttcgatttcggcgacgcacgctaaacctaacaggagagcatctagtggaggtggaaccataggtgaaactctaaggacgggagcccaacctcaagtacctgcctcgcaaataaacaaccaacaatcttcaggtttcaaacggcaaaataccgtcgatagtgctacgatcaaagaaaatagtgccaggcttaacgccagacctgccagtgctcaacccaagacgactacggagaatagaactaccgtgggacggaggtctaccattagctatgacggcaaatcagatagtacagagaaaactaattcgactacagaaactccaggacctgaagctattggtaccggagacactttaaggcctggaaaaggtcacgtaaaatcggcctcggttagtagcagcggccctgagcctgctactgatcccttacgcactagccgcacaagcgcttcgccagccgccaccaggcaacaggccttccccaggaacacatcctcgaggagcaccttccattcgggccagaccaggccaagggcaacgtacgcccaaggggctccgggagactctccacacacaagaccttcgttttttctaaattcagcctgaagggcttcacaaaaaggaggagagagattacgggggacgcaccgccgcgccaggagactcctcctccagaataagcgtcatgactggctaccgaagtcttccatggaaccgtaggtgaactaactaaagtagtacgaatactcaaccggagtaaaagaaggtttggatcaagacgacagaagagcttcgacaagtgatattagattagtcattttaattcttctcagtttagtcaaatattagctatttttctgaaagaaaagaaacgcattcaaaataagtaagttttatttactggaaacaaacattttaacatttatatggaacttacgaaactttatcatcgaagtaagtaaacttctgttataattggtataaatatttaattaaaaattaaattaaccctttcgttcaccaagtcctctattgaggacaacgtactctataattttttgtatgtagctccatgtgtttttacccttgtaacacattgtccccgattataggtaaaaaagaattttgtaagataccgttaccatacattacttattaaataaaatgctttaattttgttttttgtcggtatttaaaaaaatatatctaatatttttactccattggctcacaatatcctcaaatgaggacatcttgtagtgaccaaactgtgcattttgaaaatgtaaaattaatatcaaaaattcgcaaaaaaataaattctcgctatgttgcaaatttcagatttttagcttaaaaaaatgtaattcgtgaacgaaagggttaaaacttcatatggattataatagttctccagaatgaacgttttcggacttattagtccatcttcagtgaactttgaagttacttacgctaataaccacaaaactaaacagtggttgggtttaaattgttgattacatacttaaaagtattaaattagccgacttaaaggcgatgaaaaatagatacaactatccgggaactgcatgtgtccctactagaaatagcctattggaccgcaattgcctgccaacaactggcagttttatgtattttcatcgacttcattgtcgtttaatttaatacttttaggtatcttcttcttcttcttccttcttatatgtaggctttaaagcctttcttcttcaatatttgcctcctaaattgtttacgttatcccaacatctttttattggtctgccaatacttcttcgtccatttggtgacttatcttgtgctattcttactatcctatcctctgtcattctactaatgtgttcgttccactcctgtttttattttctcatccatccattcatgtcttccacatgcatggctcttcttatgttttcgcttctctccctatccaacacacttttccctgatattcgtcgaagtattttcatctctgttgtttctagtagtcgtctcgttttagatgtgtcaggtcttgtctccgccg

SEQ ID NO: 3229 - DNA, 4405 bp, Diabrotica virgifera
  SmartBlast Evalue=0; Info=Par-1 n=1 Tax=Tribolium castaneum RepID=D6WFV8_TRICA
aatcattgcgcaatcggatcaattgtaatctttttcaaggaaaattattacatgtttcgaaaatgaacagtttcgtggtcgatgtggacgggatcgctggtcggctgacggcagaattgaataatgagcgaaggcgttagtccctggaagaccaaccaccatgacatcggcatgctaatgttgaaagacagaagagaaaagataacgaacgccggcaaatactccgatcgttacaaagacattttttcgcatgaagtgcccgacgaagaaaaattccccttaagtgctaagtgtcgcgataccatggaacactaccgtaaagtgtcaaaaggggggaagcccgaagactcccctaccgcggtgtcaaaactgaccacggagaaaatgaagcttacagtaggtaagaaaagtagcaacgctaccaatgacctaaataaacaagagaatgctttaataggattcaagcacgtaccggagggtacccacaagccgaaccaacccccattgccactaagttcaccgaacaccaccaagtggcagaagaggaacgtcaacgtttacagcgtcaacacaaacgttccaccttctagtcctaatcaaatcagagcacctccaggattccctcccaagaaacctccacctgtagctctaagcgcgatactcaacggaaacaacaacaacaatataatcactaataacaacaaccacttcgataatactttatcgcatctagaaaacgttgagagtatcattagcaaattagacgaacacgaaaagaaggaacaaaacttgaaaaaattcgaagaactagtcaaaaaattcggccccaagcctgccgaaaaggccaagaaagccgcggctcctttcgaacagtcccctaagaaacaaacgaaaccattggatgcgtcggaagaccaactcaaatctcaagagcacatcctcaacccgatcaaacacgccagtgaagtcgaagatttgcccgctaaaggactcaaagaagaagaggagaacgagaagcatcatcagcattttaacagaggtgccaaggaaaggaagagtacggatacgaacgagaaagcgaaacctgtgcagcagcctttaagcaggacggcttccgatgctcaaaacaaaagtttgaccaacgcgaaaaagtcgtcgacaaggacctctagggatcgtacctcacgaaaaaccaatgacagcacagtggaatcaacgcgcagcagttccgcgtcgatgcggaacaggtcgcgagtgggagaagaaccgaccatcggcaaatacaagctactcaaaaccatcggaaaaggaaactttgccaaagtcaaactggccaaacacgttcccacgggcaaggaggtggccattaagatcatcgacaaaactcagttgacacctggttcactccaaaaactatttagagaagtaagaataatgaaaatgttagaccatccgaatatagtgaaactctttcaagtgatcgaaacggagaaaactttgtacctggttatggaatacgcgtccggcggagaagtcttcgattacctcgttctgcacggtaggatgaaggaaaaggaggcgcgagcgaagtttaggcaaatcgtctctgcagtacaatactgccatcaaaaaagaattatacacagagatttaaaggctgaaaacttactgttggatagtgaaatgaatattaaaattgccgatttcggcttctcaaacgaatttaccccaggaaataaactagatactttttgcgggagtccaccttatgcagctcctgaactttttcaaggtaaaaagtatgacggtccagaagtagatgtctggtcgttaggcgtaatcctctataccctcgtctcgggtagtctccccttcgacggttcgacgctcagggagctgagagagcgagtacttagaggcaaataccggatccccttctacatgagtaccgactgcgagaatctactcaagaagttcctcgtactcaatcccgccaaaagagctagcctggagactatcatgaaggacaagtggatgaaccaggggtacgaaaacgacgaactgaagccgtacgtcgagcctgagcaggatatgagcgaccccaaacggatagaggctctagtttgtttaggatttaacagatacgacgtggaaaactcattagattcacagaaatacgacgacgcgtttgcgacgtatctattattaggaaggaaaagcaccgatccggaaagtgacggtagtcggagcggcagcagtttatccctgcgtaacatgacagggcaacaacaggccacgcctcaacctgctatacagagccctcaacacagaggcgtgcatcgttcgatttcggcgacgcacgctaaacctaacaggagagcatctagtggaggtggaaccataggtgaaactctaaggacgggagcccaacctcaagtacctgcctcgcaaataaacaaccaacaatcttcaggtttcaaacggcaaaataccgtcgatagtgctacgatcaaagaaaatagtgccaggcttaacgccagacctgccagtgctcaacccaagacgactacggagaatagaactaccgtgggacggaggtctaccattagctatgacggcaaatcagatagtacagagaaaactaattcgactacagaaactccaggacctgaagctattggtaccggagacactttaaggcctggaaaaggtcacgtaaaatcggcctcggttagtagcagcggccctgagcctgctactgatcccttacgcactagccgcacaagcgcttcgccagccgccaccaggcaacaggccttccccaggaacacatcctcgaggagcaccttccattcgggccagaccaggccaagggcaacgtacgcccaaggggctccgggagactctccacacacaagaccttcgttttttctaaattcagcctgaagggcttcacaaaaaggaggagagagattacgggggacgcaccgccgcgccaggagactcctcctccagaataagcgtcatgactggctaccgaagtcttccatggaaccgtaggtgaactaactaaagtagtacgaatactcaaccggagtaaaagaaggtttggatcaagacgacagaagagcttcgacaagtgatattagattagtcattttaattcttctcagtttagtcaaatattagctatttttctgaaagaaaagaaacgcattcaaaataagtaagttttatttactggaaacaaacattttaacatttatatggaacttacgaaactttatcatcgaagtaagtaaacttctgttataattggtataaatatttaattaaaaattaaattaaccctttcgttcaccaagtcctctattgaggacaacgtactctataattttttgtatgtagctccatgtgtttttacccttgtaacacattgtccccgattataggtaaaaaagaattttgtaagataccgttaccatacattacttattaaataaaatgctttaattttgttttttgtcggtatttaaaaaaatatatctaatatttttactccattggctcacaatatcctcaaatgaggacatcttgtagtgaccaaactgtgcattttgaaaatgtaaaattaatatcaaaaattcgcaaaaaaataaattctcgctatgttgcaaatttcagatttttagcttaaaaaaatgtaattcgtgaacgaaagggttaaaacttcatatggattataatagttctccagaatgaacgttttcggacttattagtccatcttcagtgaactttgaagttacttacgctaataaccacaaaactaaacagtggttgggtttaaattgttgattacatacttaaaagtattaaattagccgacttaaaggcgatgaaaaatagatacaactatccgggaactgcatgtgtccctactagaaatagcctattggaccgcaattgcctgccaacaactggcagttttatgtattttcatcgacttcattgtcgtttaatttaatacttttaggtatcttcttcttcttcttccttcttatatgtaggctttaaagcctttcttcttcaatatttgcctcctaaattgtttacgttatcccaacatctttttattggtctgccaatacttcttcgtccatttggtgacttatcttgtgctattcttactatcctatcctctgtcattctactaatgtgttcgttccactcctgtttttattttctcatccatccattcatgtcttccacatgcatggctcttcttatgttttcgcttctctccctatccaacacacttttccctgatattcgtcgaagtattttcatctctgttgtttctagtagtcgtctcgttttagatgtgtcaggtcttgtctccgccg

SEQ ID NO: 3230 - DNA, 3987 bp, Diabrotica virgifera
  SmartBlast Evalue=0; Info=Par-1 n=1 Tax=Tribolium castaneum RepID=D6WFV8_TRICA
gtagaaatctaaaagtatgcttttttgaggtgtgtgttgattttaaaggattttttaagtgaccaggattattttatgggtaatgtaaagtggccagcgcgatagtgtgagtggggacgatgtcggccgctatgcgttccacccttcagaccgtgccggaaagtctggaggtaacgaaaaacgccgaccccactatcggtacttcaggcccacaaacaaccaagacacccgttaaaaccatctcggaagacaaatctaccaggtctcgcaattatcacacatcttcgtccacgaataagaattgaataatgagcgaaggcgttagtccctggaagaccaaccaccatgacatcggcatgctaatgttgaaagacagaagagaaaagataacgaacgccggcaaatactccgatcgttacaaagacattttttcgcatgaagtgcccgacgaagaaaaattccccttaagtgctaagtgtcgcgataccatggaacactaccgtaaagtgtcaaaaggggggaagcccgaagactcccctaccgcggtgtcaaaactgaccacggagaaaatgaagcttacagtaggtaagaaaagtagcaacgctaccaatgacctaaataaacaagagaatgctttaataggattcaagcacgtaccggagggtacccacaagccgaaccaacccccattgccactaagttcaccgaacaccaccaagtggcagaagaggaacgtcaacgtttacagcgtcaacacaaacgttccaccttctagtcctaatcaaatcagagcacctccaggattccctcccaagaaacctccacctgtagctctaagcgcgatactcaacggaaacaacaacaacaatataatcactaataacaacaaccacttcgataatactttatcgcatctagaaaacgttgagagtatcattagcaaattagacgaacacgaaaagaaggaacaaaacttgaaaaaattcgaagaactagtcaaaaaattcggccccaagcctgccgaaaaggccaagaaagccgcggctcctttcgaacagtcccctaagaaacaaacgaaaccattggatgcgtcggaagaccaactcaaatctcaagagcacatcctcaacccgatcaaacacgccagtgaagtcgaagatttgcccgctaaaggactcaaagaagaagaggagaacgagaagcatcatcagcattttaacagaggtgccaaggaaaggaagagtacggatacgaacgagaaagcgaaacctgtgcagcagcctttaagcaggacggcttccgatgctcaaaacaaaagtttgaccaacgcgaaaaagtcgtcgacaaggacctctagggatcgtacctcacgaaaaaccaatgacagcacagtggaatcaacgcgcagcagttccgcgtcgatgcggaacaggtcgcgagtgggagaagaaccgaccatcggcaaatacaagctactcaaaaccatcggaaaaggaaactttgccaaagtcaaactggccaaacacgttcccacgggcaaggaggtggccattaagatcatcgacaaaactcagttgacacctggttcactccaaaaactatttagagaagtaagaataatgaaaatgttagaccatccgaatatagtgaaactctttcaagtgatcgaaacggagaaaactttgtacctggttatggaatacgcgtccggcggagaagtcttcgattacctcgttctgcacggtaggatgaaggaaaaggaggcgcgagcgaagtttaggcaaatcgtctctgcagtacaatactgccatcaaaaaagaattatacacagagatttaaaggctgaaaacttactgttggatagtgaaatgaatattaaaattgccgatttcggcttctcaaacgaatttaccccaggaaataaactagatactttttgcgggagtccaccttatgcagctcctgaactttttcaaggtaaaaagtatgacggtccagaagtagatgtctggtcgttaggcgtaatcctctataccctcgtctcgggtagtctccccttcgacggttcgacgctcagggagctgagagagcgagtacttagaggcaaataccggatccccttctacatgagtaccgactgcgagaatctactcaagaagttcctcgtactcaatcccgccaaaagagctagcctggagactatcatgaaggacaagtggatgaaccaggggtacgaaaacgacgaactgaagccgtacgtcgagcctgagcaggatatgagcgaccccaaacggatagaggctctagtttgtttaggatttaacagatacgacgtggaaaactcattagattcacagaaatacgacgacgcgtttgcgacgtatctattattaggaaggaaaagcaccgatccggaaagtgacggtagtcggagcggcagcagtttatccctgcgtaacatgacagggcaacaacaggccacgcctcaacctgctatacagagccctcaacacagaggcgtgcatcgttcgatttcggcgacgcacgctaaacctaacaggagagcatctagtggaggtggaaccataggtgaaactctaaggacgggagcccaacctcaagtacctgcctcgcaaataaacaaccaacaatcttcaggtttcaaacggcaaaataccgtcgatagtgctacgatcaaagaaaatagtgccaggcttaacgccagacctgccagtgctcaacccaagacgactacggagaatagaactaccgtgggacggaggtctaccattagctatgacggcaaatcagatagtacagagaaaactaattcgactacagaaactccaggacctgaagctattggtaccggagacactttaaggcctggaaaaggtcacgtaaaatcggcctcggttagtagcagcggccctgagcctgctactgatcccttacgcactagccgcacaagcgcttcgccagccgccaccaggcaacaggccttccccaggaacacatcctcgaggagcaccttccattcgggccagaccaggccaagggcaacgtacgcccaaggggctccgggagactctccacacacaagaccttcgtttttttctaaattcagcctgaagggcttcacaaaaagtgacagaagtcatcttgaatctaaccaaaccggtcatcaaaacagagctttagcattagaaccaggtcaacaagttaaacatggcaactcacctttacctgcagtgggagttcagggaaccccaaacgaagaccacgtgaagccccgctctctgaggttcacatggtcgatgaagacgacctcgagcagagaccccgccgagataatggccgagattcgcaaagtgttggacgccaataattgcgattacgaacaacgcgagcggttcctgttgctctgcgtgcacggggatcctaataccgacagtttggtgcaatgggaaatcgaagtgtgcaagcttccgcgtttgtctttgaatggagtgaggtttaagagaatttcgggtaccagtattggttttaagaatattgctagcaaaatagcaaacgaactgaagctgtgactgcttgttaaggagccagagatagcaaacagtgagccaacgtagaaaaaatttcgagcagtgtgcgtgtgtagcgacttccatctcaatttccttagtgttcgaaacaaacaaatgtaccagctgatgactacctgataagtttcggcctttttatgtttcaaaaatgataaagcttgtgcttgtcccgttggaaaatatttcactttgatgatttttagttggatttgaatattactcatactgttaagtaaaaaaatgtattgcctttggccagtgttagaactttgagaaaaaccatcatctaccatgccctgcagagttcttgtattaatatcaattactgtttattttggtttatacccagtattggaagttttttttcggaacataggac

SEQ ID NO: 3231 - DNA, 3802 bp, Diabrotica virgifera
  SmartBlast Evalue=0; Info=Par-1 n=1 Tax=Tribolium castaneum RepID=D6WFV8_TRICA
aatcattgcgcaatcggatcaattgtaatctttttcaaggaaaattattacatgtttcgaaaatgaacagtttcgtggtcgatgtggacgggatcgctggtcggctgacggcagaattgaataatgagcgaaggcgttagtccctggaagaccaaccaccatgacatcggcatgctaatgttgaaagacagaagagaaaagataacgaacgccggcaaatactccgatcgttacaaagacattttttcgcatgaagtgcccgacgaagaaaaattccccttaagtgctaagtgtcgcgataccatggaacactaccgtaaagtgtcaaaaggggggaagcccgaagactcccctaccgcggtgtcaaaactgaccacggagaaaatgaagcttacagtaggtaagaaaagtagcaacgctaccaatgacctaaataaacaagagaatgctttaataggattcaagcacgtaccggagggtacccacaagccgaaccaacccccattgccactaagttcaccgaacaccaccaagtggcagaagaggaacgtcaacgtttacagcgtcaacacaaacgttccaccttctagtcctaatcaaatcagagcacctccaggattccctcccaagaaacctccacctgtagctctaagcgcgatactcaacggaaacaacaacaacaatataatcactaataacaacaaccacttcgataatactttatcgcatctagaaaacgttgagagtatcattagcaaattagacgaacacgaaaagaaggaacaaaacttgaaaaaattcgaagaactagtcaaaaaattcggccccaagcctgccgaaaaggccaagaaagccgcggctcctttcgaacagtcccctaagaaacaaacgaaaccattggatgcgtcggaagaccaactcaaatctcaagagcacatcctcaacccgatcaaacacgccagtgaagtcgaagatttgcccgctaaaggactcaaagaagaagaggagaacgagaagcatcatcagcattttaacagaggtgccaaggaaaggaagagtacggatacgaacgagaaagcgaaacctgtgcagcagcctttaagcaggacggcttccgatgctcaaaacaaaagtttgaccaacgcgaaaaagtcgtcgacaaggacctctagggatcgtacctcacgaaaaaccaatgacagcacagtggaatcaacgcgcagcagttccgcgtcgatgcggaacaggtcgcgagtgggagaagaaccgaccatcggcaaatacaagctactcaaaaccatcggaaaaggaaactttgccaaagtcaaactggccaaacacgttcccacgggcaaggaggtggccattaagatcatcgacaaaactcagttgacacctggttcactccaaaaactatttagagaagtaagaataatgaaaatgttagaccatccgaatatagtgaaactctttcaagtgatcgaaacggagaaaactttgtacctggttatggaatacgcgtccggcggagaagtcttcgattacctcgttctgcacggtaggatgaaggaaaaggaggcgcgagcgaagtttaggcaaatcgtctctgcagtacaatactgccatcaaaaaagaattatacacagagatttaaaggctgaaaacttactgttggatagtgaaatgaatattaaaattgccgatttcggcttctcaaacgaatttaccccaggaaataaactagatactttttgcgggagtccaccttatgcagctcctgaactttttcaaggtaaaaagtatgacggtccagaagtagatgtctggtcgttaggcgtaatcctctataccctcgtctcgggtagtctccccttcgacggttcgacgctcagggagctgagagagcgagtacttagaggcaaataccggatccccttctacatgagtaccgactgcgagaatctactcaagaagttcctcgtactcaatcccgccaaaagagctagcctggagactatcatgaaggacaagtggatgaaccaggggtacgaaaacgacgaactgaagccgtacgtcgagcctgagcaggatatgagcgaccccaaacggatagaggctctagtttgtttaggatttaacagatacgacgtggaaaactcattagattcacagaaatacgacgacgcgtttgcgacgtatctattattaggaaggaaaagcaccgatccggaaagtgacggtagtcggagcggcagcagtttatccctgcgtaacatgacagggcaacaacaggccacgcctcaacctgctatacagagccctcaacacagaggcgtgcatcgttcgatttcggcgacgcacgctaaacctaacaggagagcatctagtggaggtggaaccataggtgaaactctaaggacgggagcccaacctcaagtacctgcctcgcaaataaacaaccaacaatcttcaggtttcaaacggcaaaataccgtcgatagtgctacgatcaaagaaaatagtgccaggcttaacgccagacctgccagtgctcaacccaagacgactacggagaatagaactaccgtgggacggaggtctaccattagctatgacggcaaatcagatagtacagagaaaactaattcgactacagaaactccaggacctgaagctattggtaccggagacactttaaggcctggaaaaggtcacgtaaaatcggcctcggttagtagcagcggccctgagcctgctactgatcccttacgcactagccgcacaagcgcttcgccagccgccaccaggcaacaggccttccccaggaacacatcctcgaggagcaccttccattcgggccagaccaggccaagggcaacgtacgcccaaggggctccgggagactctccacacacaagaccttcgtttttttctaaattcagcctgaagggcttcacaaaaagtgacagaagtcatcttgaatctaaccaaaccggtcatcaaaacagagctttagcattagaaccaggtcaacaagttaaacatggcaactcacctttacctgcagtgggagttcagggaaccccaaacgaagaccacgtgaagccccgctctctgaggttcacatggtcgatgaagacgacctcgagcagagaccccgccgagataatggccgagattcgcaaagtgttggacgccaataattgcgattacgaacaacgcgagcggttcctgttgctctgcgtgcacggggatcctaataccgacagtttggtgcaatgggaaatcgaagtgtgcaagcttccgcgtttgtctttgaatggagtgaggtttaagagaatttcgggtaccagtattggttttaagaatattgctagcaaaatagcaaacgaactgaagctgtgactgcttgttaaggagccagagatagcaaacagtgagccaacgtagaaaaaatttcgagcagtgtgcgtgtgtagcgacttccatctcaatttccttagtgttcgaaacaaacaaatgtaccagctgatgactacctgataagtttcggcctttttatgtttcaaaaatgataaagcttgtgcttgtcccgttggaaaatatttcactttgatgatttttagttggatttgaatattactcatactgttaagtaaaaaaatgtattgcctttggccagtgttagaactttgagaaaaaccatcatctaccatgccctgcagagttcttgtattaatatcaattactgtttattttggtttatacccagtattggaagttttttttcggaacataggac

SEQ ID NO: 3232 - DNA, 3853 bp, Diabrotica virgifera
  SmartBlast Evalue=1E-129; Info=Tetratricopeptide repeat protein 14 n=2 Tax=Aculeata RepID=E1ZW92_9HYME
ataatttcctggtaaatagcttgtcagtgattattaatttatcgtttttattaaaagtatctattttaatctagaatttctcattattaatacaatattttctaaataattgtcacttaaattacaatttttacagaaataaagtattgccgttgaaaaatatctacaaaaccactttggggggtgttcaaaatggacgtcattcttcatattcgctaattgccggtgaaaaatattgtctagagttaaaatggaaacagtaaattcacagttgttgaccaaagccataaactttcatggtcaacagctgcagaagttgtgggaaggagaatttggagaaaatgatttgacaagaaaaaatgtcaaagatttgaattacaatgtgtatagtcaacgccagaagaacctatcttttcaagatagaggtaaacggttgaaactccaacagtttttgataaagaaggctaattttatctatagtttggaacccacgaagcaaaagaacaatgagaaagcgattactgaagatatgtatgctgttatgcctccttttgaaacttacaccagtgtagacaaacaaaaaagagtggcattcttcatggagaatgtgaaagtaggtaatctaatcctgggcaccattgtgagcagacaacaatcaggaatgatgttgaaagtgttgtgtactactggaaatggtaacacttgtttatatgctgctgatatcaacgtcaaggcattctgtccagttgcaaatgtcattaatgcagtggacaaaaagggggtatcacgcaactacatgatgaatgactatgtgtgttgtgaagtgctggaaatcatgcctgatacagataagctaatatgtggtatgatgggtgtgactaggaaatcatcagatccagaacatcgaccacctctagggcttattagtactgaagattttcctcttatatacaaaaaagcgttggatcacaagagtgagagttacgacagtgttttagagaagagcaccgggttcaataaccccaataacattcaatacctctcagaacagatggatgttggtaaacatctcagcttcatcacaggcttaaagtacaggttcccggaaaacgaatatgccaccgagttgagacaagtccaggccagtaaatgggcttaccgcaatgtagcagacggcatagatcattttaaggcgggaaaacacgtggaagcgttccaatgtctcaacaaagccctcaatatagatcccaagaatgtcgaaggtctcgtagcgagaggtgcgctctatgctaacagtggaaatttccagaaggccatcgaagatttcgaaactgctttgaagctgaatcctaatcatggaaacgctcgaaaatatatgggagaaactctcgtcgcattaggaaggagctacgaggaagaaaataaattagaggaagctagaaaagcgtaccagagctgcttgactatcattccttaccacgaagaagctcagaactctttggatttcttaaaatccaaagttcaaccaaaaaatcttattgaacccactgaacttctactgccaagtttgaacgttccctctaagcaaactgacatgaatgacgcgcttaaacaacttctaaagaccgaggaagaagacaaaaaagataagaagaagaaaaagaagagcaagaagcgcaagagtcgaaaacgctccagttctagctcaagttcgagctcgtcggcaagtggagaatcctcctcgagctcgtctagcagctccagcgactcaagctctagctcgggcgattccgattttaaaaagcgcaagaagcacaggtcgaggtctcaccggcgtaaagaacgcgagaattcgctcagtcctttgagcaagaggatggctttgatggatcagagccatgacactcccaataccagttacaatttcaacaaaccagcaagttccagctttgagtttagctttgaacatccagagccttctaaaccacctgagaacgaatacgaaaataaattgagggccttcctggatcaaaccaagggcgactccgactatgaggacaaactgagaaaattcctggaagagacaaaatggaagaaaggcaaaggcgaggacaaaaagaagaagaaaaagaaagagaagaaggccaagaaagagagcaagaaaaagaagaagaaggaaaagatcaagagaaaacagagcttcgatttgagcgaattggacgaccacaagaagctaagggacgccattaagaaggaattgagcaaagaaaagaaatcgaagaggcacagtttggcgtctgaagacgacgagtacatcctgcagaagtcgggttatagtaagaaatttattgatagtttaccggatttagaagagttagaatcaaaattaaatgcgtattatgcattcgagaaggacaataaacgcattaaagaacgaagcgcgagccctcccaagcgcattatagactccccgtctcccacaagggagcagaaggcgcgacaggcagtagccgaagctacggcctctgcgggggcccagaagtggaaaatgcaaattgccggcagttcgggcaattccaggttcaaaaagaagcccgaaagagcgcctcctgcttctgattggcagtctgatagagacaaacgagagcgggagcgagaacgcgatagagagagggaaagagagagagaacgtgctaagagctcttctgcctctgacgattctccaccaccgaaaaaaatgtctttgcctccacttcctccagctgagaaggccgttagtgtgcgcaaggccatggcattgaaagaaccgccactcaaaaagcctgagtctcccaaaaagttaaaactgactccagctccacccttgccgaaaataccgcagggacaagttgtgcttgataaatttggaaacttcaggctgatttctccgcctgaattgaaaaagggagaaggaacgagttcaggtcgccgcccaccggagcccccaggtcgcccgcgcagcgacagccgctcgccgaaacgccgcagtcgcagccgttccagatcgtcgagcggatcgcgatctcgctcgcggtctcgctctcgaagctaccgctcgcgatcgcgcagctactacagcaggtcgcgatcgcgcagcggctcctactactcacgcagtcgcagccgctcgcgcagttactccggagaccggcgcaggtacaaccgcagaggcggcttcagaggcaggcatctcaacgacaggggcacgtactacaaaccgaggttccaaacgccaaggcataacggtcaaagaggtagaggttattataataataatcgggattccaggtatggcgatagagactatcgaggcagaggcagaccgtacgggttccaaaatagaggtaatcgaagacaacagcgcggtagatatggttctagaggagggggaggatacagagattatagggatcgcagatattcaagaagcagatcccgcgaccgcgatcacagcaggtcatacagtcagagcaactcagacgcctctcctccatcgaaacgagacaggtcttctcctccatccgagaaagaaaagatcaacaagtattctgacggagacgcgcccatccagcatgaaggaccgctttctgagggcgaggacagggacgattacatcagcaccgataccagcaagttgatcgatagggaaatcggtggtaaatgggctgataaagaagctgacactagtaaggaggaagccaaagagagtgggcaagggatactgtggaagtaaaggagtaaagaggtttgtccatttccattacggtttatcatcgactgtcttattcataaaattgtagttacaattcttatt

SEQ ID NO: 3233 - DNA, 3786 bp, Diabrotica virgifera
  SmartBlast Evalue=1E-129; Info=Tetratricopeptide repeat protein 14 n=2 Tax=Aculeata RepID=E1ZW92_9HYME
ataatttcctggtaaatagcttgtcagtgattattaatttatcgtttttattaaaagtatctattttaatctagaatttctcattattaatacaatattttctaaataattgtcacttaaattacaatttttacagaaataaagtattgccgttgaaaaatatctacaaaaccactttggggggtgttcaaaatggacgtcattcttcatattcgctaattgccggtgaaaaatattgtctagagttaaaatggaaacagtaaattcacagttgttgaccaaagccataaactttcatggtcaacagctgcagaagttgtgggaaggagaatttggagaaaatgatttgacaagaaaaaatgtcaaagatttgaattacaatgtgtatagtcaacgccagaagaacctatcttttcaagatagaggtaaacggttgaaactccaacagtttttgataaagaaggctaattttatctatagtttggaacccacgaagcaaaagaacaatgagaaagcgattactgaagatatgtatgctgttatgcctccttttgaaacttacaccagtgtagacaaacaaaaaagagtggcattcttcatggagaatgtgaaagtaggtaatctaatcctgggcaccattgtgagcagacaacaatcaggaatgatgttgaaagtgttgtgtactactggaaatggtaacacttgtttatatgctgctgatatcaacgtcaaggcattctgtccagttgcaaatgtcattaatgcagtggacaaaaagggggtatcacgcaactacatgatgaatgactatgtgtgttgtgaagtgctggaaatcatgcctgatacagataagctaatatgtggtatgatgggtgtgactaggaaatcatcagatccagaacatcgaccacctctagggcttattagtactgaagattttcctcttatatacaaaaaagcgttggatcacaagagtgagagttacgacagtgttttagagaagagcaccgggttcaataaccccaataacattcaatacctctcagaacagatggatgttggtaaacatctcagcttcatcacaggcttaaagtacaggttcccggaaaacgaatatgccaccgagttgagacaagtccaggccagtaaatgggcttaccgcaatgtagcagacggcatagatcattttaaggcgggaaaacacgtggaagcgttccaatgtctcaacaaagccctcaatatagatcccaagaatgtcgaaggtctcgtagcgagaggtgcgctctatgctaacagtggaaatttccagaaggccatcgaagatttcgaaactgctttgaagctgaatcctaatcatggaaacgctcgaaaatatatgggagaaactctcgtcgcattaggaaggagctacgaggaagaaaataaattagaggaagctagaaaagcgtaccagagctgcttgactatcattccttaccacgaagaagctcagaactctttggatttcttaaaatccaaagttcaaccaaaaaatcttattgaacccactgaacttctactgccaagtttgaacgttccctctaagcaaactgacatgaatgacgcgcttaaacaacttctaaagaccgaggaagaagacaaaaaagataagaagaagaaaaagaagagcaagaagcgcaagagtcgaaaacgctccagttctagctcaagttcgagctcgtcggcaagtggagaatcctcctcgagctcgtctagcagctccagcgactcaagctctagctcgggcgattccgattttaaaaagcgcaagaagcacaggtcgaggtctcaccggcgtaaagaacgcgagaattcgctcagtcctttgagcaagaggatggctttgatggatcagagccatgacactcccaataccagttacaatttcaacaaaccagcaagttccagctttgagtttagctttgaacatccagagccttctaaaccacctgagaacgaatacgaaaataaattgagggccttcctggatcaaaccaagggcgactccgactatgaggacaaactgagaaaattcctggaagagacaaaatggaagaaaggcaaaggcgaggacaaaaagaagaagaaaaagaaagagaagaaggccaagaaagagagcaagaaaaagaagaagaaggaaaagatcaagagaaaacagagcttcgatttgagcgaattggacgaccacaagaagctaagggacgccattaagaaggaattgagcaaagaaaagaaatcgaagaggcacagtttggcgtctgaagacgacgagtacatcctgcagaagtcgggttatagtaagaaatttattgatagtttaccggatttagaagagttagaatcaaaattaaatgcgtattatgcattcgagaaggacaataaacgcattaaagaacgaagcgcgagccctcccaagcgcattatagactccccgtctcccacaagggagcagaaggcgcgacaggcagtagccgaagctacggcctctgcgggggcccagaagtggaaaatgcaaattgccggcagttcgggcaattccaggttcaaaaagaagcccgaaagagcgcctcctgcttctgattggcagtctgatagagacaaacgagagcgggagcgagaacgcgatagagagagggaaagagagagagaacgtgctaagagctcttctgcctctgacgattctccaccaccgaaaaaaatgtctttgcctccacttcctccagctgagaaggccgttagtgtgcgcaaggccatggcattgaaagaaccgccactcaaaaagcctgagtctcccaaaaagttaaaactgactccagctccacccttgccgaaaataccgcagggacaagttgtgcttgataaatttggaaacttcaggctgatttctccgcctgaattgaaaaagggagaaggaacgagttcaggtcgccgcccaccggagcccccaggtcgcccgcgcagcgacagccgctcgccgaaacgccgcagtcgcagccgttccagatcgtcgagcggatcgcgatctcgctcgcggtctcgctctcgaagctaccgctcgcgatcgcgcagctactacagcaggtcgcgatcgcgcagcggctcctactactcacgcagtcgcagccgctcgcgcagttactccggagaccggcgcaggtacaaccgcagaggcggcttcagaggcaggcatctcaacgacaggggcacgtactacaaaccgaggttccaaacgccaaggcataacggtcaaagaggtagaggttattataataataatcgggattccaggtatggcgatagagactatcgaggcagaggcagaccgtacgggttccaaaatagaggtaatcgaagacaacagcgcggtagatatggttctagaggagggggaggatacagagattatagggatcgcagatattcaagaagcagatcccgcgaccgcgatcacagcaggtcatacagtcagagcaactcagacgcctctcctccatcgaaacgagacaggtcttctcctccatccgagaaagaaaagatcaacaagtattctgacggagacgcgcccatccagcatgaaggaccgctttctgagggcgaggacagggacgattacatcagcaccgataccagcaagttgatcgatagggaaatcggtggtaaatgggctgataaagaagctgacactagtaaggaggaagccaaagagagtgggcaagggatactgtggaagtaaaggagtaaagaggt

SEQ ID NO: 3234 - DNA, 3772 bp, Diabrotica virgifera
  SmartBlast Evalue=1E-129; Info=Tetratricopeptide repeat protein 14 n=2 Tax=Aculeata RepID=E1ZW92_9HYME
ataatttcctggtaaatagcttgtcagtgattattaatttatcgtttttattaaaagtatctattttaatctagaatttctcattattaatacaatattttctaaataattgtcacttaaattacaatttttacagaaataaagtattgccgttgaaaaatatctacaaaaccactttggggggtgttcaaaatggacgtcattcttcatattcgctaattgccggtgaaaaatattgtctagagttaaaatggaaacagtaaattcacagttgttgaccaaagccataaactttcatggtcaacagctgcagaagttgtgggaaggagaatttggagaaaatgatttgacaagaaaaaatgtcaaagatttgaattacaatgtgtatagtcaacgccagaagaacctatcttttcaagatagaggtaaacggttgaaactccaacagtttttgataaagaaggctaattttatctatagtttggaacccacgaagcaaaagaacaatgagaaagcgattactgaagatatgtatgctgttatgcctccttttgaaacttacaccagtgtagacaaacaaaaaagagtggcattcttcatggagaatgtgaaagtaggtaatctaatcctgggcaccattgtgagcagacaacaatcaggaatgatgttgaaagtgttgtgtactactggaaatggtaacacttgtttatatgctgctgatatcaacgtcaaggcattctgtccagttgcaaatgtcattaatgcagtggacaaaaagggggtatcacgcaactacatgatgaatgactatgtgtgttgtgaagtgctggaaatcatgcctgatacagataagctaatatgtggtatgatgggtgtgactaggaaatcatcagatccagaacatcgaccacctctagggcttattagtactgaagattttcctcttatatacaaaaaagcgttggatcacaagagtgagagttacgacagtgttttagagaagagcaccgggttcaataaccccaataacattcaatacctctcagaacagatggatgttggtaaacatctcagcttcatcacaggcttaaagtacaggttcccggaaaacgaatatgccaccgagttgagacaagtccaggccagtaaatgggcttaccgcaatgtagcagacggcatagatcattttaaggcgggaaaacacgtggaagcgttccaatgtctcaacaaagccctcaatatagatcccaagaatgtcgaaggtctcgtagcgagaggtgcgctctatgctaacagtggaaatttccagaaggccatcgaagatttcgaaactgctttgaagctgaatcctaatcatggaaacgctcgaaaatatatgggagaaactctcgtcgcattaggaaggagctacgaggaagaaaataaattagaggaagctagaaaagcgtaccagagctgcttgactatcattccttaccacgaagaagctcagaactctttggatttcttaaaatccaaagttcaaccaaaaaatcttattgaacccactgaacttctactgccaagtttgaacgttccctctaagcaaactgacatgaatgacgcgcttaaacaacttctaaagaccgaggaagaagacaaaaaagataagaagaagaaaaagaagagcaagaagcgcaagagtcgaaaacgctccagttctagctcaagttcgagctcgtcggcaagtggagaatcctcctcgagctcgtctagcagctccagcgactcaagctctagctcgggcgattccgattttaaaaagcgcaagaagcacaggtcgaggtctcaccggcgtaaagaacgcgagaattcgctcagtcctttgagcaagaggatggctttgatggatcagagccatgacactcccaataccagttacaatttcaacaaaccagcaagttccagctttgagtttagctttgaacatccagagccttctaaaccacctgagaacgaatacgaaaataaattgagggccttcctggatcaaaccaagggcgactccgactatgaggacaaactgagaaaattcctggaagagacaaaatggaagaaaggcaaaggcgaggacaaaaagaagaagaaaaagaaagagaagaaggccaagaaagagagcaagaaaaagaagaagaaggaaaagatcaagagaaaacagagcttcgatttgagcgaattggacgaccacaagaagctaagggacgccattaagaaggaattgagcaaagaaaagaaatcgaagaggcacagtttggcgtctgaagacgacgagtacatcctgcagaagtcgggttatagtaagaacattaaagaacgaagcgcgagccctcccaagcgcattatagactccccgtctcccacaagggagcagaaggcgcgacaggcagtagccgaagctacggcctctgcgggggcccagaagtggaaaatgcaaattgccggcagttcgggcaattccaggttcaaaaagaagcccgaaagagcgcctcctgcttctgattggcagtctgatagagacaaacgagagcgggagcgagaacgcgatagagagagggaaagagagagagaacgtgctaagagctcttctgcctctgacgattctccaccaccgaaaaaaatgtctttgcctccacttcctccagctgagaaggccgttagtgtgcgcaaggccatggcattgaaagaaccgccactcaaaaagcctgagtctcccaaaaagttaaaactgactccagctccacccttgccgaaaataccgcagggacaagttgtgcttgataaatttggaaacttcaggctgatttctccgcctgaattgaaaaagggagaaggaacgagttcaggtcgccgcccaccggagcccccaggtcgcccgcgcagcgacagccgctcgccgaaacgccgcagtcgcagccgttccagatcgtcgagcggatcgcgatctcgctcgcggtctcgctctcgaagctaccgctcgcgatcgcgcagctactacagcaggtcgcgatcgcgcagcggctcctactactcacgcagtcgcagccgctcgcgcagttactccggagaccggcgcaggtacaaccgcagaggcggcttcagaggcaggcatctcaacgacaggggcacgtactacaaaccgaggttccaaacgccaaggcataacggtcaaagaggtagaggttattataataataatcgggattccaggtatggcgatagagactatcgaggcagaggcagaccgtacgggttccaaaatagaggtaatcgaagacaacagcgcggtagatatggttctagaggagggggaggatacagagattatagggatcgcagatattcaagaagcagatcccgcgaccgcgatcacagcaggtcatacagtcagagcaactcagacgcctctcctccatcgaaacgagacaggtcttctcctccatccgagaaagaaaagatcaacaagtattctgacggagacgcgcccatccagcatgaaggaccgctttctgagggcgaggacagggacgattacatcagcaccgataccagcaagttgatcgatagggaaatcggtggtaaatgggctgataaagaagctgacactagtaaggaggaagccaaagagagtgggcaagggatactgtggaagtaaaggagtaaagaggtttgtccatttccattacggtttatcatcgactgtcttattcataaaattgtagttacaattcttatt

SEQ ID NO: 3235 - DNA, 3705 bp, Diabrotica virgifera
  SmartBlast Evalue=1E-129; Info=Tetratricopeptide repeat protein 14 n=2 Tax=Aculeata RepID=E1ZW92_9HYME
ataatttcctggtaaatagcttgtcagtgattattaatttatcgtttttattaaaagtatctattttaatctagaatttctcattattaatacaatattttctaaataattgtcacttaaattacaatttttacagaaataaagtattgccgttgaaaaatatctacaaaaccactttggggggtgttcaaaatggacgtcattcttcatattcgctaattgccggtgaaaaatattgtctagagttaaaatggaaacagtaaattcacagttgttgaccaaagccataaactttcatggtcaacagctgcagaagttgtgggaaggagaatttggagaaaatgatttgacaagaaaaaatgtcaaagatttgaattacaatgtgtatagtcaacgccagaagaacctatcttttcaagatagaggtaaacggttgaaactccaacagtttttgataaagaaggctaattttatctatagtttggaacccacgaagcaaaagaacaatgagaaagcgattactgaagatatgtatgctgttatgcctccttttgaaacttacaccagtgtagacaaacaaaaaagagtggcattcttcatggagaatgtgaaagtaggtaatctaatcctgggcaccattgtgagcagacaacaatcaggaatgatgttgaaagtgttgtgtactactggaaatggtaacacttgtttatatgctgctgatatcaacgtcaaggcattctgtccagttgcaaatgtcattaatgcagtggacaaaaagggggtatcacgcaactacatgatgaatgactatgtgtgttgtgaagtgctggaaatcatgcctgatacagataagctaatatgtggtatgatgggtgtgactaggaaatcatcagatccagaacatcgaccacctctagggcttattagtactgaagattttcctcttatatacaaaaaagcgttggatcacaagagtgagagttacgacagtgttttagagaagagcaccgggttcaataaccccaataacattcaatacctctcagaacagatggatgttggtaaacatctcagcttcatcacaggcttaaagtacaggttcccggaaaacgaatatgccaccgagttgagacaagtccaggccagtaaatgggcttaccgcaatgtagcagacggcatagatcattttaaggcgggaaaacacgtggaagcgttccaatgtctcaacaaagccctcaatatagatcccaagaatgtcgaaggtctcgtagcgagaggtgcgctctatgctaacagtggaaatttccagaaggccatcgaagatttcgaaactgctttgaagctgaatcctaatcatggaaacgctcgaaaatatatgggagaaactctcgtcgcattaggaaggagctacgaggaagaaaataaattagaggaagctagaaaagcgtaccagagctgcttgactatcattccttaccacgaagaagctcagaactctttggatttcttaaaatccaaagttcaaccaaaaaatcttattgaacccactgaacttctactgccaagtttgaacgttccctctaagcaaactgacatgaatgacgcgcttaaacaacttctaaagaccgaggaagaagacaaaaaagataagaagaagaaaaagaagagcaagaagcgcaagagtcgaaaacgctccagttctagctcaagttcgagctcgtcggcaagtggagaatcctcctcgagctcgtctagcagctccagcgactcaagctctagctcgggcgattccgattttaaaaagcgcaagaagcacaggtcgaggtctcaccggcgtaaagaacgcgagaattcgctcagtcctttgagcaagaggatggctttgatggatcagagccatgacactcccaataccagttacaatttcaacaaaccagcaagttccagctttgagtttagctttgaacatccagagccttctaaaccacctgagaacgaatacgaaaataaattgagggccttcctggatcaaaccaagggcgactccgactatgaggacaaactgagaaaattcctggaagagacaaaatggaagaaaggcaaaggcgaggacaaaaagaagaagaaaaagaaagagaagaaggccaagaaagagagcaagaaaaagaagaagaaggaaaagatcaagagaaaacagagcttcgatttgagcgaattggacgaccacaagaagctaagggacgccattaagaaggaattgagcaaagaaaagaaatcgaagaggcacagtttggcgtctgaagacgacgagtacatcctgcagaagtcgggttatagtaagaacattaaagaacgaagcgcgagccctcccaagcgcattatagactccccgtctcccacaagggagcagaaggcgcgacaggcagtagccgaagctacggcctctgcgggggcccagaagtggaaaatgcaaattgccggcagttcgggcaattccaggttcaaaaagaagcccgaaagagcgcctcctgcttctgattggcagtctgatagagacaaacgagagcgggagcgagaacgcgatagagagagggaaagagagagagaacgtgctaagagctcttctgcctctgacgattctccaccaccgaaaaaaatgtctttgcctccacttcctccagctgagaaggccgttagtgtgcgcaaggccatggcattgaaagaaccgccactcaaaaagcctgagtctcccaaaaagttaaaactgactccagctccacccttgccgaaaataccgcagggacaagttgtgcttgataaatttggaaacttcaggctgatttctccgcctgaattgaaaaagggagaaggaacgagttcaggtcgccgcccaccggagcccccaggtcgcccgcgcagcgacagccgctcgccgaaacgccgcagtcgcagccgttccagatcgtcgagcggatcgcgatctcgctcgcggtctcgctctcgaagctaccgctcgcgatcgcgcagctactacagcaggtcgcgatcgcgcagcggctcctactactcacgcagtcgcagccgctcgcgcagttactccggagaccggcgcaggtacaaccgcagaggcggcttcagaggcaggcatctcaacgacaggggcacgtactacaaaccgaggttccaaacgccaaggcataacggtcaaagaggtagaggttattataataataatcgggattccaggtatggcgatagagactatcgaggcagaggcagaccgtacgggttccaaaatagaggtaatcgaagacaacagcgcggtagatatggttctagaggagggggaggatacagagattatagggatcgcagatattcaagaagcagatcccgcgaccgcgatcacagcaggtcatacagtcagagcaactcagacgcctctcctccatcgaaacgagacaggtcttctcctccatccgagaaagaaaagatcaacaagtattctgacggagacgcgcccatccagcatgaaggaccgctttctgagggcgaggacagggacgattacatcagcaccgataccagcaagttgatcgatagggaaatcggtggtaaatgggctgataaagaagctgacactagtaaggaggaagccaaagagagtgggcaagggatactgtggaagtaaaggagtaaagaggt

SEQ ID NO: 3236 - DNA, 4046 bp, Diabrotica virgifera
aagaatagaatattttattaaagtcatgagtatcaaatatacccgcaatttacaaacacatttttttatagaagataataaataacaacacataataaaaaatataacaatttgcgtaaataagtaccatatttcctttataattctaataatgtataagcagagtctattatataagtagcctgtaggtttatatacggtttatatacagagcgtttactttttaattagatagaccacattgaaggaagcgctagaaaaaggcaacattgcttattattccactatcactatagtgtcgatgcgtaatcgtccaatggcagattcaaacaaatacctactttaagttctgaaattactaatttacaatgagtaggtaacataatacgattgttaaattaccggcaagtggttatctataaagcggcttctcaaattccttaaacatttattaccaaacatttaaaattgtattttaactgttaaagatgttcaaatattatctactcgttccgacagtaacagtatgttattaaaatcacttcatcaatttttctcttttctcgattattagtttttattgcatagtatataaattattgtaatgactgaatagatagttagttcaatataatcctattaatttaataaatgaatatttaaagcaattaacaagtaaggatttttaaaagaatattaaaaaactaaagaaatagtcacctctattttgaagatgaaattgagactctatgacttgatgccgtctactctcttaatgtttataaagacatgtctataaattataataatattacataccttattgaatgtgggaagccggcagtgttgccattctaagtgcgtatatctaattgaaaactaaacgcagtgtatcttaattaacatttctaccgtaaaaaagatttgaatcatcattaaaatcatctgaaacaattaagtgtcctagctagatgatgcagtttactacgattttcccaaaataaataaagttttcgtcatttaatatctattttaacggttttctgtgaaaaagactgacaactaccatttgacgtttgctttatagacataggtccacacatgcttcgtttccgagatacgggatgttgaattttttcttacaaactggcgatttatttattgctctaaaacctgtcgagatgtgcaaatgaaatttgataggttttaagagatagttatcgtgcattttttgacaggcaattaagaattttatatgctccattggcgcgtatacgggtaatagtttaatcaacaatattaatctagatactaaatgatgattgtttgagtatgtcgaacgttaaaaaatattattctcgttaaattagttattatcataaccataaaaacaactaaaatttttgtgtctggttagccctaagtttttacataaccaacccctttttcatttcacaataaattaactgaaatgtctccaaacgcattccgaaataagttttctctcttgttttctttttatctcacggttaatgtccactttgcaactgaaaatataaaactgcgctaatgtccacactggatgaaatatttaccagatttcacaagaaattatcaataagcataatgcgaaacattgcaacatgatttatacaagccagtattattgcacatcaattattgtgctatatattaattaacattaactatgtattgtgaaatatattgatgataatattgattcagttgaggttccattaaatcaaaccagtacaaagacgtagaatagaatattatctttagttttactctatatatttgcgatctaactattaaaggaattattgccagtaagtcatcattattgcacaatatattggtgagaacattgatccttaatattcctttccctccgtgcctcggagagcacgttaagccgtcggtccccctgggctagtgtacatcgataccagttacttcaaacagggttaaagatgtaaatggcgccggaacaatccgaaaggatctccccggcaaaaatgccataagatattatgattattattattcttttccctataattgattcctgctgatgatagggcaaatgtccgtggtatttttgatatgatcgttagcgtctaaagcactaagtaataaattaataatggaaagtagaaaaaaaagcaaacattctttagtttatacacagaatttagagcttgacgcaatttttgtgcttcatggatacactataacgtttcaatcgaccgattgatcgttacaccaagctctgcctgttactttggctccatattatgatattaaccactaaatttccttcttgagccactagactaacatcggtgtaattgtttccgatcttatatactttttagtaccctggtcatactacgactgtcttacaaagtggcgcccaacctggagcatttctgttgaacatccttccaaagaattcctcgcctcattcccctcaggagcatgatattgcttaacaaccatagtcgtaccacgacttgaacgttacaataccagacaataaaaatttcggtacggtatatgaaagagaagaatctaagtactgtgataatatatcaacataaatttaatcacatttaacccttagtaggccaatgttaactaccaattatactatattggcagcaaatacagtaaccgccaccctactagatacataggaacattgagctattacagtcctgaacctttcacttgttgcaatgttatttttatggctagtgacgtttagaacgtcaaaaaatgtatagcaactgaatattaacaaacaatagatcagctgtatttgacgtttaaagttgccattttgttaaaattgtaaaagttttaaagtattgtaatagtcttggtgtttaaatagagttattttaaagcagagtaacaatactattcattaatgtatttcttgtatgcaaaaacaattttgaatagtttcttgacagtaacatgacaaggatgaaagtcacatctgagaacggatcggattagcccataagcatatcaattaggtacctacccatgtatctagtagtgttgcgcttactgtatatgaaaaattccaatattttaaagtttagtgaacaaaaaataattggttatgggaatataaaacagttgtattaattacactattatgtattaataaaaaatttaaacagtagcaaattgaacatcaataaattaaaataaattttaaaagtgtaaattaatgaataaatattgatgaatatgaatatgaataaaataaattttaaaagtgattttccgtcacatacttaaaatgaatttgtcgaacggaaaacagattgtataaagataattgaaaaaacgtttaacacagttgctgtaagtttatgccgatctaatctttacaaatataacatccaacatttataactaatctcattttgggaactattattatagacctggatcccgcgtaccaaaaaaatgttgattaatagcaagccgaaaacttgttaatagatcaacggtgtctagtcggacaaactttaatgtatgggaacactggaagttttaattgtggaacgggttagaaatttggaacgtcagaccacgaaaacgtcccattcattttgtcggacagaacttccaattgacctgctacgccttcatcaaactctcatgtaaaaatcagaccgctatttatcacctgtcataattgctgtcatttgacatgttctacgtgtcggacttattaaaatgcccagttggtgataaataccagtctaatttttgcatgagagttcaatgaaagggcaacacatcaattggaagctctgtccgacaaaatacacaggacgctttcgcagtctgacgttccaactttttaacccgtttcacaattaaaacttcccctgttcaagtgttcccatacatcaaacctgtccgaccagacaccgtcaagctattaacaaatttccagccttggtaccaatcaaccttctttctgtacgcgggttgca

SEQ ID NO: 3237 - DNA, 3917 bp, Diabrotica virgifera
caaacacattttttatagaagataataaataacaacacataataaaaatataacaatttgcgtaaataagtaccatatttcctttataattcttataatgtataagcagagtttattatataagtagcctgtaggtttatatacggtttatatacagagcgtttactttttaattagatagaccacattgaaggaagcgctagaaaaaggcaacattgctttactttaagttctgaaattactaatttacaatgagtaggtaacataatacgattgttaaattaccggcaagtggttatctataaagcggcttctcaaattccttacaacatttattaccaaacatttaaaattgtatgttaactgttaaagatgttcaaatattatcaataacagtatgttattaaaatcacttcatcaatttttctcttttctcgattattagtttttattgcatagtatataaattattgtaatgactgaatagatagttagttcaatataatcctattaatttaataaatgaatatttaaagcaattaacaagtaaggatttttaaaagaatattaaaaaactaaagaaatagtcacctctattttgaagatgaaattgagactctatgacttgatgccgtctactctcttaatgtttataaagacatgtctataaattataataatattacataccttattgaatgtgggaagccggcagtgttgccattctaagtgcgtatatctaattgaaaactaaacgcagtgtatcttaattaacatttctaccgtaaaaaagatttgaatcatcattaaaatcatctgaaacaattaagtgtcctagctagatgatgcagtttactacgattttcccaaaataaataaagttttcgtcatttaatatctattttaacggttttctgtgaaaaagactgacaactaccatttgacgtttgctttatagacataggtccacacatgcttcgtttccgagatacgggatgttgaattttttcttacaaactggcgatttatttattgctctaaaacctgtcgagatgtgcaaatgaaatttgataggttttaagagatagttatcgtgcattttttgacaggcaattaagaattttatatgctccattggcgcgtatacgggtaatagtttaatcaacaatattaatctagatactaaatgatgattgtttgagtatgtcgaacgttaaaaaatattattctcgttaaattagttattatcataaccataaaaacaactaaaatttttgtgtctggttagccctaagtttttacataaccaacccctttttcatttcacaataaattaactgaaatgtctccaaacgcattccgaaataagttttctctcttgttttctttttatctcacggttaatgtccactttgcaactgaaaatataaaactgcgctaatgtccacactggatgaaatatttaccagatttcacaagaaattatcaataagcataatgcgaaacattgcaacatgatttatacaagccagtattattgcacatcaattattgtgctatatattaattaacattaactatgtattgtgaaatatattgatgataatattgattcagttgaggttccattaaatcaaaccagtacaaagacgtagaatagaatattatctttagttttactctatatatttgcgatctaactattaaaggaattattgccagtaagtcatcattattgcacaatatattggtgagaacattgatccttaatattcctttccctccgtgcctcggagagcacgttaagccgtcggtccccctgggctagtgtacatcgataccagttacttcaaacagggttaaagatgtaaatggcgccggaacaatccgaaaggatctccccggcaaaaatgccataagatattatgattattattattcttttccctataattgattcctgctgatgatagggcaaatgtccgtggtatttttgatatgatcgttagcgtctaaagcactaagtaataaattaataatggaaagtagaaaaaaaagcaaacattctttagtttatacacagaatttagagcttgacgcaatttttgtgcttcatggatacactataacgtttcaatcgaccgattgatcgttacaccaagctctgcctgttactttggctccatattatgatattaaccactaaatttccttcttgagccactagactaacatcggtgtaattgtttccgatcttatatactttttagtaccctggtcatactacgactgtcttacaaagtggcgcccaacctggagcatttctgttgaacatccttccaaagaattcctcgcctcattcccctcaggagcatgatattgcttaacaaccatagtcgtaccacgacttgaacgttacaataccagacaataaaaatttcggtacggtatatgaaagagaagaatctaagtactgtgataatatatcaacataaatttaatcacatttaacccttagtaggccaatgttaactaccaattatactatattggcagcaaatacagtaaccgccaccctactagatacataggaacattgagctattacagtcctgaacctttcacttgttgcaatgttatttttatggctagtgacgtttagaacgtcaaaaaatgtatagcaactgaatattaacaaacaatagatcagctgtatttgacgtttaaagttgccattttgttaaaattgtaaaagttttaaagtattgtaatagtcttggtgtttaaatagagttattttaaagcagagtaacaatactattcattaatgtatttcttgtatgcaaaaacaattttgaatagtttcttgacagtaacatgacaaggatgaaagtcacatctgagaacggatcggattagcccataagcatatcaattaggtacctacccatgtatctagtagtgttgcgcttactgtatatgaaaaattccaatattttaaagtttagtgaacaaaaaataattggttatgggaatataaaacagttgtattaattacactattatgtattaataaaaaatttaaacagtagcaaattgaacatcaataaattaaaataaattttaaaagtgtaaattaatgaataaatattgatgaatatgaatatgaataaaataaattttaaaagtgattttccgtcacatacttaaaatgaatttgtcgaacggaaaacagattgtataaagataattgaaaaaacgtttaacacagttgctgtaagtttatgccgatctaatctttacaaatataacatccaacatttataactaatctcattttgggaactattattatagacctggatcccgcgtaccaaaaaaatgttgattaatagcaagccgaaaacttgttaatagatcaacggtgtctagtcggacaaactttaatgtatgggaacactggaagttttaattgtggaacgggttagaaatttggaacgtcagaccacgaaaacgtcccattcattttgtcggacagaacttccaattgacctgctacgccttcatcaaactctcatgtaaaaatcagaccgctatttatcacctgtcataattgctgtcatttgacatgttctacgtgtcggacttattaaaatgcccagttggtgataaataccagtctaatttttgcatgagagttcaatgaaagggcaacacatcaattggaagctctgtccgacaaaatacacaggacgctttcgcagtctgacgttccaactttttaacccgtttcacaattaaaacttcccctgttcaagtgttcccatacatcaaacctgtccgaccagacaccgtcaagctattaacaaatttccagccttggtaccaatcaaccttctttctgtacgcgggttgca

SEQ ID NO: 3238 - DNA, 3770 bp, Diabrotica virgifera
aagaatagaatattttattaaagtcatgagtatcaaatatacccgcaatttacaaacacatttttttatagaagataataaataacaacacataataaaaaatataacaatttgcgtaaataagtaccatatttcctttataattctaataatgtataagcagagtctattatataagtagcctgtaggtttatatacggtttatatacagagcgtttactttttaattagatagaccacattgaaggaagcgctagaaaaaggcaacattgcttattattccactatcactatagtgtcgatgcgtaatcgtccaatggcagattcaaacaaatacctactttaagttctgaaattactaatttacaatgagtaggtaacataatacgattgttaaattaccggcaagtggttatctataaagcggcttctcaaattccttaaacatttattaccaaacatttaaaattgtattttaactgttaaagatgttcaaatattatctactcgttccgacagtaacagtatgttattaaaatcacttcatcaatttttctcttttctcgattattagtttttattgcatagtatataaattattgtaatgactgaatagatagttagttcaatataatcctattaatttaataaatgaatatttaaagcaattaacaagtaaggatttttaaaagaatattaaaaaactaaagaaatagtcacctctattttgaagatgaaattgagactctatgacttgatgccgtctactctcttaatgtttataaagacatgtctataaattataataatattacataccttattgaatgtgggaagccggcagtgttgccattctaagtgcgtatatctaattgaaaactaaacgcagtgtatcttaattaacatttctaccgtaaaaaagatttgaatcatcattaaaatcatctgaaacaattaagtgtcctagctagatgatgcagtttactacgattttcccaaaataaataaagttttcgtcatttaatatctattttaacggttttctgtgaaaaagactgacaactaccatttgacgtttgctttatagacataggtccacacatgcttcgtttccgagatacgggatgttgaattttttcttacaaactggcgatttatttattgctctaaaacctgtcgagatgtgcaaatgaaatttgataggttttaagagatagttatcgtgcattttttgacaggcaattaagaattttatatgctccattggcgcgtatacgggtaatagtttaatcaacaatattaatctagatactaaatgatgattgtttgagtatgtcgaacgttaaaaaatattattctcgttaaattagttattatcataaccataaaaacaactaaaatttttgtgtctggttagccctaagtttttacataaccaacccctttttcatttcacaataaattaactgaaatgtctccaaacgcattccgaaataagttttctctcttgttttctttttatctcacggttaatgtccactttgcaactgaaaatataaaactgcgctaatgtccacactggatgaaatatttaccagatttcacaagaaattatcaataagcataatgcgaaacattgcaacatgatttatacaagccagtattattgcacatcaattattgtgctatatattaattaacattaactatgtattgtgaaatatattgatgataatattgattcagttgaggttccattaaatcaaaccagtacaaagacgtagaatagaatattatctttagttttactctatatatttgcgatctaactattaaaggaattattgccagtaagtcatcattattgcacaatatattggtgagaacattgatccttaatattcctttccctccgtgcctcggagagcacgttaagccgtcggtccccctgggctagtgtacatcgataccagttacttcaaacagggttaaagatgtaaatggcgccggaacaatccgaaaggatctccccggcaaaaatgccataagatattatgattattattattcttttccctataattgattcctgctgatgatagggcaaatgtccgtggtatttttgatatgatcgttagcgtctaaagcactaagtaataaattaataatggaaagtagaaaaaaaagcaaacattctttagtttatacacagaatttagagcttgacgcaatttttgtgcttcatggatacactataacgtttcaatcgaccgattgatcgttacaccaagctctgcctgttactttggctccatattatgatattaaccactaaatttccttcttgagccactagactaacatcggtgtaattgtttccgatcttatatactttttagtaccctggtcatactacgactgtcttacaaagtggcgcccaacctggagcatttctgttgaacatccttccaaagaattcctcgcctcattcccctcaggagcatgatattgcttaacaaccatagtcgtaccacgacttgaacgttacaataccagacaataaaaatttcggtacggtatatgaaagagaagaatctaagtactgtgataatatatcaacataaatttaatcacatttaacccttagtaggccaatgttaactaccaattatactatattggcagcaaatacagtaaccgccaccctactagatacataggaacattgagctattacagtcctgaacctttcacttgttgcaatgttatttttatggctagtgacgtttagaacgtcaaaaaatgtatagcaactgaatattaacaaacaatagatcagctgtatttgacgtttaaagttgccattttgttaaaattgtaaaagttttaaagtattgtaatagtcttggtgtttaaatagagttattttaaagcagagtaacaatactattcattaatgtatttcttgtatgcaaaaacaattttgaatagtttcttgacagtaacatgacaaggatgaaagtcacatctgagaacggatcggattagcccataagcatatcaattaggtacctacccatgtatctagtagtgttgcgcttactgtatatgaaaaattccaatattttaaagtttagtgaacaaaaaataattggttatgggaatataaaacagttgtattaattacactattatgtattaataaaaaatttaaacagtagcaaattgaacatcaataaattaaaataaattttaaaagtgtaaattaatgaataaatattgatgaatatgaatatgaataaaataaattttaaaagtgattttccgtcacatacttaaaatgaatttgtcgaacggaaaacagattgtataaagataattgaaaaaacgtttaacacagttgctgtaagtttatgccgatctaatctttacaaatataacatccaacatttataactaatctcattttgggaactattattatagacctggatcccgcgtaccaaaaaaatgttgattaatagcaagccgaaaacttgttaatagatcaacggtgtctagtcggacaaactttaatgtatgggaacactggaagttttaattgtggaacgggttagaaatttggaacgtcagactacgaaaacttcccctgttcaagtgttcccatacatcaaacctgtccgaccagacaccgtcaagccattaacaaacttccagcctggtaccaatcaacctttttctgtacgcgggttgcaggcctattataaaaa

SEQ ID NO: 3239 - DNA, 3641 bp, Diabrotica virgifera
caaacacattttttatagaagataataaataacaacacataataaaaatataacaatttgcgtaaataagtaccatatttcctttataattcttataatgtataagcagagtttattatataagtagcctgtaggtttatatacggtttatatacagagcgtttactttttaattagatagaccacattgaaggaagcgctagaaaaaggcaacattgctttactttaagttctgaaattactaatttacaatgagtaggtaacataatacgattgttaaattaccggcaagtggttatctataaagcggcttctcaaattccttacaacatttattaccaaacatttaaaattgtatgttaactgttaaagatgttcaaatattatcaataacagtatgttattaaaatcacttcatcaatttttctcttttctcgattattagtttttattgcatagtatataaattattgtaatgactgaatagatagttagttcaatataatcctattaatttaataaatgaatatttaaagcaattaacaagtaaggatttttaaaagaatattaaaaaactaaagaaatagtcacctctattttgaagatgaaattgagactctatgacttgatgccgtctactctcttaatgtttataaagacatgtctataaattataataatattacataccttattgaatgtgggaagccggcagtgttgccattctaagtgcgtatatctaattgaaaactaaacgcagtgtatcttaattaacatttctaccgtaaaaaagatttgaatcatcattaaaatcatctgaaacaattaagtgtcctagctagatgatgcagtttactacgattttcccaaaataaataaagttttcgtcatttaatatctattttaacggttttctgtgaaaaagactgacaactaccatttgacgtttgctttatagacataggtccacacatgcttcgtttccgagatacgggatgttgaattttttcttacaaactggcgatttatttattgctctaaaacctgtcgagatgtgcaaatgaaatttgataggttttaagagatagttatcgtgcattttttgacaggcaattaagaattttatatgctccattggcgcgtatacgggtaatagtttaatcaacaatattaatctagatactaaatgatgattgtttgagtatgtcgaacgttaaaaaatattattctcgttaaattagttattatcataaccataaaaacaactaaaatttttgtgtctggttagccctaagtttttacataaccaacccctttttcatttcacaataaattaactgaaatgtctccaaacgcattccgaaataagttttctctcttgttttctttttatctcacggttaatgtccactttgcaactgaaaatataaaactgcgctaatgtccacactggatgaaatatttaccagatttcacaagaaattatcaataagcataatgcgaaacattgcaacatgatttatacaagccagtattattgcacatcaattattgtgctatatattaattaacattaactatgtattgtgaaatatattgatgataatattgattcagttgaggttccattaaatcaaaccagtacaaagacgtagaatagaatattatctttagttttactctatatatttgcgatctaactattaaaggaattattgccagtaagtcatcattattgcacaatatattggtgagaacattgatccttaatattcctttccctccgtgcctcggagagcacgttaagccgtcggtccccctgggctagtgtacatcgataccagttacttcaaacagggttaaagatgtaaatggcgccggaacaatccgaaaggatctccccggcaaaaatgccataagatattatgattattattattcttttccctataattgattcctgctgatgatagggcaaatgtccgtggtatttttgatatgatcgttagcgtctaaagcactaagtaataaattaataatggaaagtagaaaaaaaagcaaacattctttagtttatacacagaatttagagcttgacgcaatttttgtgcttcatggatacactataacgtttcaatcgaccgattgatcgttacaccaagctctgcctgttactttggctccatattatgatattaaccactaaatttccttcttgagccactagactaacatcggtgtaattgtttccgatcttatatactttttagtaccctggtcatactacgactgtcttacaaagtggcgcccaacctggagcatttctgttgaacatccttccaaagaattcctcgcctcattcccctcaggagcatgatattgcttaacaaccatagtcgtaccacgacttgaacgttacaataccagacaataaaaatttcggtacggtatatgaaagagaagaatctaagtactgtgataatatatcaacataaatttaatcacatttaacccttagtaggccaatgttaactaccaattatactatattggcagcaaatacagtaaccgccaccctactagatacataggaacattgagctattacagtcctgaacctttcacttgttgcaatgttatttttatggctagtgacgtttagaacgtcaaaaaatgtatagcaactgaatattaacaaacaatagatcagctgtatttgacgtttaaagttgccattttgttaaaattgtaaaagttttaaagtattgtaatagtcttggtgtttaaatagagttattttaaagcagagtaacaatactattcattaatgtatttcttgtatgcaaaaacaattttgaatagtttcttgacagtaacatgacaaggatgaaagtcacatctgagaacggatcggattagcccataagcatatcaattaggtacctacccatgtatctagtagtgttgcgcttactgtatatgaaaaattccaatattttaaagtttagtgaacaaaaaataattggttatgggaatataaaacagttgtattaattacactattatgtattaataaaaaatttaaacagtagcaaattgaacatcaataaattaaaataaattttaaaagtgtaaattaatgaataaatattgatgaatatgaatatgaataaaataaattttaaaagtgattttccgtcacatacttaaaatgaatttgtcgaacggaaaacagattgtataaagataattgaaaaaacgtttaacacagttgctgtaagtttatgccgatctaatctttacaaatataacatccaacatttataactaatctcattttgggaactattattatagacctggatcccgcgtaccaaaaaaatgttgattaatagcaagccgaaaacttgttaatagatcaacggtgtctagtcggacaaactttaatgtatgggaacactggaagttttaattgtggaacgggttagaaatttggaacgtcagactacgaaaacttcccctgttcaagtgttcccatacatcaaacctgtccgaccagacaccgtcaagccattaacaaacttccagcctggtaccaatcaacctttttctgtacgcgggttgcaggcctattataaaaa

SEQ ID NO: 3240 - DNA, 4727 bp, Diabrotica virgifera
  SmartBlast Evalue=1E-114; Info=Ets DNA-binding protein pokkuri n=1 Tax=Harpegnathos saltator RepID=E2C7L7_9HYME
gggtagtgggacgaataggaaaagaagaaactactgaatactattaaatatagacaactataatacatgagacatgtcatgagagacgaaggctttaaattggtttaaataataatgtatggacaaattcagggaagcagaagtaacttttaaacaatgtgaagacctggtatgaacatatttttttacattctagtttacattatttaatatctatttaaactgaaatataatctcagtgtagtatttttttaatagatgtcttaatatgatcgacaaattactgaactagaaattaaaaaaatgatttttacttcaacaaaaaaaattgcatgccattgttttagcttatcctatttatccttttttctgtgctttaaatcatttcttagaattctgagacattcgatttgaatgattgtaggtagaaagtatgttcagaaatattttaaacaccacattcttatataacatgttagtatgtagtccatttagcaatcctgaataatgaatcacaaaagcggttacatttagaatagtcatcaattaagtcatagattaataaatacaatatttatctacactgtgataattacatattaacaaaaggaaagataaaacataaaatacattgtcgttaacacaaatctttgtctaaatattgcacattcaaaggtaaaaaaggttaacaataaaattaagtgagtttgttcaaagattattcaaattgtcacatggcatttgattatgtaacgaaatacgtattagaaacattgcctggttataagatagtattcaattctactcagtcaccaaaataattgtaataaaataaaaaaaatgtagacatatttctcagcgtaaaacataagttttcgattaataaaaatatccatctatcaacaaagtaaaatttcttgtgtccaaagaaaataaattatacttttggcacatatgtcgctgtaattaacacgaggactcttaaccaagggatcagcttcctgatcctcgttgcgaaatctccgctgaggtgtaagagatcctccaaacaatacgaattgcactgctctacaaacttaagctaagatctatttacagagtagagttccaaagatgaggtaagaagttcaaagttgatctatttagccctaaacaattgcattttgaggttaagttacgttaggttgcgtctgaaaaggcgccaaaattcaaaagtacgtatagaagaaggaatctgataggacagactcccccttaaagatataaataacttaaataaaagaaaaataattgtttattctactattatcactaaatttgcaaattatattcaacaatttgctaaaaaattagggtatgtcgttctaagatatgttttatccacattacttgttaaaatcccgatttcaacgaagtagaagattacagtttataagataaataattgaggacagttttcctcatggaaatctgttttttttttgtatattcacaacatgcttcactacatcgtggcttcgtcataggatgagacactaactaaaccctaagatctgagaaagcttgtgctaaagcatgttatgaatactcggagaaagagcttttattagtgagagatggggaaaaataaaactacctattctgttagattgttccgtccaaagaaaataaaactaagaataattccgaacaattaggccaggaaaaaatgagctaaaaaacaaacaatcacaagtcccgcaatctacatatatctatagtgcgcgcgtagagtacgaaaacataaagatgactattacatcctgtacctgtatgatatagtaacaaaatgttgggtatttatattagatggactagtgactagtgatttaaaatgttattttttctggtcaaaagataatccgcattggatggtggaaaacaaatctataatttcgattttaagatatttcttattttctcatagtttcagccttcaaaaaacaccgctcggattagaaactctagattttatactcgccgaaactctaaaagccgaccgaacaaccaaaaggttttatttactctagaatttaattaagacacgcaaaaaagtttaaaatattgtaaaatattcgggtagtcccatttaaaaattctcatattatccgtatatctcggaattgtaaatttggcaatgtccaataacaaatattcagaatccatatccgatattgaacagaatatttatatcttacgtttatgttatacttgtaaactttgaacactgacacttgggacagagttgccggcgggcagtatgtccaataacaaatattcagaattcatatccgatattgaacagaataattatatcacccagtagatcgcacgaatttatttgttgttatattcacacatgtggattattagtttagatacaaattggtcaattatcaacaatataatttggaaatgatacgaaagtgctgacgaaagtagaattatttaccttgattagatatacaaatcacgcgggcatcgtgtcaccgatgacccaatttaagcttctataaaactaacaaatctcgcctagagagagagtcttcatcagtcttcaacaaaacgcgttccggtaacgagtcagtgttcaacagttctcccggggtacaaataccctagtgttggttctatcaataaatacctttatcgctatttggttttacattagacagcaacgtcgaaaatatataattttaaattgctggtccacctaatatacataaccaacactttgttactgcatcatacggggtgtcacagatatctttctgtttcgatactttacgtgcgcactgtataagcaaactcaaaaatgcaattaataaaggccacatttcaagatccttgcgttttccactttgagactcgttacgccatctgtttaacataacttaaacagtatttgcacataattattgtaagtcttttgttattggcaccagatatttagctacgtaatgcacagttctattaaaaattaagttagtcgctagtgatgaggtcccgagaggggagggtctggcgaacacactatattgatatgtctcgtattactactgaggtctgtgggaccgtccatactgagatccgtcggtttctcgtcgtattccaccggtctcgattggggtagctcctgttcggagatgtccacgggctctgatttgattatcgatgcagagaagtctttcgtggtcgttagttgcgggatttgtgtggcttgaggtggtttggctggagcgttcgttggagacatttgctgtctaagcagggatatgtttttgatgtttttcagttcggttgggttcctaagaaattggtaacaatgcctttctccctggactttccttaaaatattgactctataataatatcttaatgctctcgacatcttgtcgtagttcattgaaaggtggttcttctggattccccacaattttgcgagtcccgaaggatccacgattttaaacactcccgtttcccggttcttccacgagatataactggtgtatctttgagctggatcgtttaatagttgttggaggaaatcccagagaagccttccatttgtgtttggttcagaaggatcattagggaaaaactcccttccagtgttcttgaaggctgccggactggagacaggttcctttggactcctaggaggaaaatatggcatctgcgtcatgaaagaataagcgttaggtgtattaggcgggctaccactaccactgtaaccctttttatctacaccatcttcgtcggagtctgaaggattcgaaccgcttccgttactcccgtttacattaaatattgagtgactgaatacttggttatccgcgtgctgaggactactggcctgactatctactgaaggagctggactaagagttactgagttgctttgtgccatgagatgggcagccaaagctgcgtgagatgagtgcattgattcgttgttctgtgataaaatgttccagttgggcgttggaggatgtgaatgcggagataagggataagggtgtctggacgtaggtgttactggactgctgggaaggatcctttgaagattgttggcttctctaactaatatttgtagtacgttgtgtaggacatcgccggatccaggtgctctttctgataggtcggtccttgttagaagacacatagctttaccattcatttggaacatatcgtgatctataggttggatgtcgaattctctctcggcccactgcaggaaagtggtgacgtcatctctgttccacactctcggatctgatggtaaagacgatggtaactgacttttgtagtccaacaagggggaagaaggggggttttggtgtgagatagatgggaagcccagtggatatctccatagaagatctgcgttgaaaggcaagggtagtgggagacgctccatcgtcgtacttgttggaatggggggaaggtgtccaggtactagcttcattgtttgttcttatttgtaaactgataattcctataaatccaggtcactgcaacatcaacacttcaaacactatataaaccggttacgtaatttgataagtcataaacgtaaactatacacacttgccgaaatattgctatcaaaaaaacaaattctttatccaaaagatattcctacgcggggtaactgtggctgcctattgagacagtcaccttaccac

SEQ ID NO: 3241 - DNA, 4692 bp, Diabrotica virgifera
  SmartBlast Evalue=1E-114; Info=Ets DNA-binding protein pokkuri n=1 Tax=Harpegnathos saltator RepID=E2C7L7_9HYME
gggtagtgggacgaataggaaaagaagaaactactgaatactattaaatatagacaactataatacatgagacatgtcatgagagacgaaggctttaaattggtttaaataataatgtatggacaaattcagggaagcagaagtaacttttaaacaatgtgaagacctggtatgaacatatttttttacattctagtttacattatttaatatctatttaaactgaaatataatctcagtgtagtatttttttaatagatgtcttaatatgatcgacaaattactgaactagaaattaaaaaaatgatttttacttcaacaaaaaaaattgcatgccattgttttagcttatcctatttatccttttttctgtgctttaaatcatttcttagaattctgagacattcgatttgaatgattgtaggtagaaagtatgttcagaaatattttaaacaccacattcttatataacatgttagtatgtagtccatttagcaatcctgaataatgaatcacaaaagcggttacatttagaatagtcatcaattaagtcatagattaataaatacaatatttatctacactgtgataattacatattaacaaaaggaaagataaaacataaaatacattgtcgttaacacaaatctttgtctaaatattgcacattcaaaggtaaaaaaggttaacaataaaattaagtgagtttgttcaaagattattcaaattgtcacatggcatttgattatgtaacgaaatacgtattagaaacattgcctggttataagatagtattcaattctactcagtcaccaaaataattgtaataaaataaaaaaaatgtagacatatttctcagcgtaaaacataagttttcgattaataaaaatatccatctatcaacaaagtaaaatttcttgtgtccaaagaaaataaattatacttttggcacatatgtcgctgtaattaacacgaggactcttaaccaagggatcagcttcctgatcctcgttgcgaaatctccgctgaggtgtaagagatcctccaaacaatacgaattgcactgctctacaaacttaagctaagatctatttacagagtagagttccaaagatgaggtaagaagttcaaagttgatctatttagccctaaacaattgcattttgaggttaagttacgttaggttgcgtctgaaaaggcgccaaaattcaaaagtacgtatagaagaaggaatctgataggacagactcccccttaaagatataaataacttaaataaaagaaaaataattgtttattctactattatcactaaatttgcaaattatattcaacaatttgctaaaaaattagggtatgtcgttctaagatatgttttatccacattacttgttaaaatcccgatttcaacgaagtagaagattacagtttataagataaataattgaggacagttttcctcatggaaatctgttttttttttgtatattcacaacatgcttcactacatcgtggcttcgtcataggatgagacactaactaaaccctaagatctgagaaagcttgtgctaaagcatgttatgaatactcggagaaagagcttttattagtgagagatggggaaaaataaaactacctattctgttagattgttccgtccaaagaaaataaaactaagaataattccgaacaattaggccaggaaaaaatgagctaaaaaacaaacaatcacaagtcccgcaatctacatatatctatagtgcgcgcgtagagtacgaaaacataaagatgactattacatcctgtacctgtatgatatagtaacaaaatgttgggtatttatattagatggactagtgactagtgatttaaaatgttattttttctggtcaaaagataatccgcattggatggtggaaaacaaatctataatttcgattttaagatatttcttattttctcatagtttcagccttcaaaaaacaccgctcggattagaaactctagattttatactcgccgaaactctaaaagccgaccgaacaaccaaaaggttttatttactctagaatttaattaagacacgcaaaaaagtttaaaatattgtaaaatattcgggtagtcccatttaaaaattctcatattatccgtatatctcggaattgtaaatttggcaatgtccaataacaaatattcagaatccatatccgatattgaacagaatatttatatcttacgtttatgttatacttgtaaactttgaacactgacacttgggacagagttgccggcgggcagtatgtccaataacaaatattcagaattcatatccgatattgaacagaataattatatcacccagtagatcgcacgaatttatttgttgttatattcacacatgtggattattagtttagatacaaattggtcaattatcaacaatataatttggaaatgatacgaaagtgctgacgaaagtagaattatttaccttgattagatatacaaatcacgcgggcatcgtgtcaccgatgacccaatttaagcttctataaaactaacaaatctcgcctagagagagagtcttcatcagtcttcaacaaaacgcgttccggtaacgagtcagtgttcaacagttctcccggggtacaaataccctagtgttggttctatcaataaatacctttatcgctatttggttttacattagacagcaacgtcgaaaatatataattttaaattgctggtccacctaatatacataaccaacactttgttactgcatcatacggggtgtcacagatatctttctgtttcgatactttacgtgcgcactgtataagcaaactcaaaaatgcaattaataaaggccacatttcaagatccttgcgttttccactttgagactcgttacgccatctgtttaacataacttaaacagtatttgcacataattattgtaagtcttttgttattggcaccagatatttagctacgtaatgcacagttctattaaaaattaagttagtcgctagtgatgaggtcccgagaggggagggtctggcgaacacactatattgatatgtctcgtattactactgaggtctgtgggaccgtccatactgagatccgtcggtttctcgtcgtattccaccggtctcgattggggtagctcctgttcggagatgtccacgggctctgatttgattatcgatgcagagaagtctttcgtggtcgttagttgcgggatttgtgtggcttgaggtggtttggctggagcgttcgttggagacatttgctgtctaagcagggatatgtttttgatgtttttcagttcggttgggttcctaagaaattggtaacaatgcctttctccctggactttccttaaaatattgactctataataatatcttaatgctctcgacatcttgtcgtagttcattgaaaggtggttcttctggattccccacaattttgcgagtcccgaaggatccacgattttaaacactcccgtttcccggttcttccacgagatataactggtgtatctttgagctggatcgtttaatagttgttggaggaaatcccagagaagccttccatttgtgtttggttcagaaggatcattagggaaaaactcccttccagtgttcttgaaggctgccggactggagacaggttcctttggactcctaggaggaaaatatggcatctgcgtcatgaaagaataagcgttaggtgtattaggcgggctaccactaccactgtaaccctttttatctacaccatcttcgtcggagtctgaaggattcgaaccgcttccgttactcccgtttacattaaatattgagtgactgaatacttggttatccgcgtgctgaggactactggcctgactatctactgaaggagctggactaagagttactgagttgctttgtgccatgagatgggcagccaaagctgcgtgagatgagtgcattgattcgttgttctgtgataaaatgttccagttgggcgttggaggatgtgaatgcggagataagggataagggtgtctggacgtaggtgttactggactgctgggaaggatcctttgaagattgttggcttctctaactaatatttgtagtacgttgtgtaggacatcgccggatccaggtgctctttctgataggtcggtccttgttagaagacacatagctttaccattcatttggaacatatcgtgatctataggttggatgtcgaattctctctcggcccactgcaggaaagtggtgacgtcatctctgttccacactctcggatctgatggtaaagacgatggtaactgacttttgtagtccaacaagggggaagaaggggggttttggtgtgagatagatgggaagcccagtggatatctccatagaagatctgcgttgaaaggcaagggtagtgggagacgctccatcgtcgtacttgttggaatggggggaaggtgtccaggtactagcttcattgtttgtttgtatgcgtttaagtaatccataaaactcaaaaccttcatcttgttttcttctatatcaatatcactgagtacagtcctgagtacaaagtataaacctcggtattagtaataacaaagttacttccggtattactgggaattaatgacaaacgaagctgacacctccgtcgcggttt

SEQ ID NO: 3242 - DNA, 2167 bp, Diabrotica virgifera
  SmartBlast Evalue=1E-114; Info=Ets DNA-binding protein pokkuri n=1 Tax=Harpegnathos saltator RepID=E2C7L7_9HYME
ggattagaaattctagattttatactccccgaaactctaaaagccgaccgaacaaccaaaaggttttatttactctacccacaaaagtttaaaatattgtaaaatattcgggtagtcccatttaaaaatgctcatattatccgtatatctcggaattgtaaatttggcaacgtcgaaaatatatcattttaaattgctggcctacctaatatacataaccaacattgtattactgcatcatacggggtgtcacagatatctttttcgttccatactttacgtgcacactgtataagcaatttactcaaaaatgcaattaataaaggccacattttccactttgagactcgttacgccatctgtttaacataacttaaacagtatttgcacataattattgtaagtcttttgttattggcaccagatatttagctacgtaatgcacagttctattaaaaattaagttagtcgctagtgatgaggtcccgagaggggagggtctggcgaacacactatattgatatgtctcgtattactactgaggtctgtgggaccgtccatactgagatccgtcggtttctcgtcgtattccaccggtctcgattggggtagctcctgttcggagatgtccacgggctctgatttgattatcgatgcagagaagtctttcgtggtcgttagttgcgggatttgtgtggcttgaggtggtttggctggagcgttcgttggagacatttgctgtctaagcagggatatgtttttgatgtttttcagttcggttgggttcctaagaaattggtaacaatgcctttctccctggactttccttaaaatattgactctataataatatcttaatgctctcgacatcttgtcgtagttcattgaaaggtggttcttctggattccccacaattttgcgagtcccgaaggatccacgattttaaacactcccgtttcccggttcttccacgagatataactggtgtatctttgagctggatcgtttaatagttgttggaggaaatcccagagaagccttccatttgtgtttggttcagaaggatcattagggaaaaactcccttccagtgttcttgaaggctgccggactggagacaggttcctttggactcctaggaggaaaatatggcatctgcgtcatgaaagaataagcgttaggtgtattaggcgggctaccactaccactgtaaccctttttatctacaccatcttcgtcggagtctgaaggattcgaaccgcttccgttactcccgtttacattaaatattgagtgactgaatacttggttatccgcgtgctgaggactactggcctgactatctactgaaggagctggactaagagttactgagttgctttgtgccatgagatgggcagccaaagctgcgtgagatgagtgcattgattcgttgttctgtgataaaatgttccagttgggcgttggaggatgtgaatgcggagataagggataagggtgtctggacgtaggtgttactggactgctgggaaggatcctttgaagattgttggcttctctaactaatatttgtagtacgttgtgtaggacatcgccggatccaggtgctctttctgataggtcggtccttgttagaagacacatagctttaccattcatttggaacatatcgtgatctataggttggatgtcgaattctctctcggcccactgcaggaaagtggtgacgtcatctctgttccacactctcggatctgatggtaaagacgatggtaactgacttttgtagtccaacaagggggaagaaggggggttttggtgtgagatagatgggaagcccagtggatatctccatagaagatctgcgttgaaaggcaagggtagtgggagacgctccatcgtcgtacttgttggaatggggggaaggtgtccaggtactagcttcattgtttgttcttatttgtaaactgataattcctataaatccaggtcactgcaacatcaacacttcaaacactatataaaccggttacgtaatttgataagtcataaacgtaaactatacacacttgccgaaatattgctatcaaaaaaacaaattctttatccaaaagatattcctacgcggggtaactgtggctgcctattgagacagtcaccttaccac

SEQ ID NO: 3243 - DNA, 2132 bp, Diabrotica virgifera
  SmartBlast Evalue=1E-114; Info=Ets DNA-binding protein pokkuri n=1 Tax=Harpegnathos saltator RepID=E2C7L7_9HYME
ggattagaaattctagattttatactccccgaaactctaaaagccgaccgaacaaccaaaaggttttatttactctacccacaaaagtttaaaatattgtaaaatattcgggtagtcccatttaaaaatgctcatattatccgtatatctcggaattgtaaatttggcaacgtcgaaaatatatcattttaaattgctggcctacctaatatacataaccaacattgtattactgcatcatacggggtgtcacagatatctttttcgttccatactttacgtgcacactgtataagcaatttactcaaaaatgcaattaataaaggccacattttccactttgagactcgttacgccatctgtttaacataacttaaacagtatttgcacataattattgtaagtcttttgttattggcaccagatatttagctacgtaatgcacagttctattaaaaattaagttagtcgctagtgatgaggtcccgagaggggagggtctggcgaacacactatattgatatgtctcgtattactactgaggtctgtgggaccgtccatactgagatccgtcggtttctcgtcgtattccaccggtctcgattggggtagctcctgttcggagatgtccacgggctctgatttgattatcgatgcagagaagtctttcgtggtcgttagttgcgggatttgtgtggcttgaggtggtttggctggagcgttcgttggagacatttgctgtctaagcagggatatgtttttgatgtttttcagttcggttgggttcctaagaaattggtaacaatgcctttctccctggactttccttaaaatattgactctataataatatcttaatgctctcgacatcttgtcgtagttcattgaaaggtggttcttctggattccccacaattttgcgagtcccgaaggatccacgattttaaacactcccgtttcccggttcttccacgagatataactggtgtatctttgagctggatcgtttaatagttgttggaggaaatcccagagaagccttccatttgtgtttggttcagaaggatcattagggaaaaactcccttccagtgttcttgaaggctgccggactggagacaggttcctttggactcctaggaggaaaatatggcatctgcgtcatgaaagaataagcgttaggtgtattaggcgggctaccactaccactgtaaccctttttatctacaccatcttcgtcggagtctgaaggattcgaaccgcttccgttactcccgtttacattaaatattgagtgactgaatacttggttatccgcgtgctgaggactactggcctgactatctactgaaggagctggactaagagttactgagttgctttgtgccatgagatgggcagccaaagctgcgtgagatgagtgcattgattcgttgttctgtgataaaatgttccagttgggcgttggaggatgtgaatgcggagataagggataagggtgtctggacgtaggtgttactggactgctgggaaggatcctttgaagattgttggcttctctaactaatatttgtagtacgttgtgtaggacatcgccggatccaggtgctctttctgataggtcggtccttgttagaagacacatagctttaccattcatttggaacatatcgtgatctataggttggatgtcgaattctctctcggcccactgcaggaaagtggtgacgtcatctctgttccacactctcggatctgatggtaaagacgatggtaactgacttttgtagtccaacaagggggaagaaggggggttttggtgtgagatagatgggaagcccagtggatatctccatagaagatctgcgttgaaaggcaagggtagtgggagacgctccatcgtcgtacttgttggaatggggggaaggtgtccaggtactagcttcattgtttgtttgtatgcgtttaagtaatccataaaactcaaaaccttcatcttgttttcttctatatcaatatcactgagtacagtcctgagtacaaagtataaacctcggtattagtaataacaaagttacttccggtattactgggaattaatgacaaacgaagctgacacctccgtcgcggttt

SEQ ID NO: 3244 - DNA, 4096 bp, Diabrotica virgifera
taagaccggtccgaaacaaccctaccagacatcctactggaaccaaccttaaggatatgggtacacactataaaaatgcctgctcactaatcatcccaccccccgcctcctctcacatacaagaaatctataggtggttcagattcgttactacagttattagccgtaaatgtatctacttttaatgagaaaatgtgaacagtccttaattatttatttttagtcttaaaaggcttttcttataatttgactcgatgtgactttttataaaataaatagaagcctgtatgatacttcttaaatattttaaacaatttttattattttttgatgacttttttgtatctagggtaatttaaacaaagaatgaatttaggttattaaatttggtaagcgtcgtatcgcaatgttgtgcaatttatttttgtttttgaggtttctgttatgatacaactttgaccaattagcaacttgttttttattagtaagaatggtcaagaggagttatttttaattttaaagagaggtagggcttataggattcaactgagcagacggaagtcaattcggagtaattcttttttatgttttggcagaataaggtggatttcttcaagttaacgaatattctgcttatgaaactcaatgtttgtctgtatcgttattttgttacctagtattaaaaaaaattgtaaatacatttagatcattttatacaataaatgttgcttgacgattgcgtatacaaataaaataataaataaataaatatgaatgttaagtcagatgtaagctgtataggagaaattgttataagaattcgagagacagtcgtatttgataaacttttttaagttcatgtttagtattttcgattgagtacacattcatagtcaagagtatcaatcatcactaaaggaattctttgggaaagtatacagtacttttttaatccggctcgaaagaccaaataagtgctgcatacttttccaaacaggaattataacttttatataagtatttgaatagaaaggtttcttaacacagctattagtatatgttacactgcagttcaaataaatggatgagatatttttacttttagttattactggagacatgtcctgtacatccgaacgaacattgtgctcaataatcagatactgtgggaatgataactacagcgcatcctatgcaaaagagaaatatttaggagttagatagatttaaagatgttgcctttggcctattcctgagacattttcagacctattgtggtcttctagtcctagattacattctctagcctgaccctttttaaaaggtctagtagtatcgagactgaaccttccatatagccatttgccagtggattttcttctactaatgtaaagaacctgtcagactgacatagaatgtgctttgctgattctttgcttctgtcttccaggtgacagaatctgcacgggtcatcatctgacaatcccatcagttgacatttaggagtttagttgtaatacccatagcttattatagattggatcaaacgatagattagtttggaaactagagcggctttcggcctgacatactgataccttacagatctattgagctcccctttgtcacaaagcttcttatccaacgctgttcttttaatgaggttcaacaaccttaaaggagatttttcatatagattggtgcttctgttttttttatctttgatgctagatatcgcagtcttgtcagaccttcacactgaaatttgtcacaaattgacttcacagtcagttgtgaatttggccaaatgtcccttgatgtaccctttagctttttttttgtcttggtgcatttctccacagttccagagacttatcacccatgtatcattggctgctcttttgtatgtattagcagttccaaagtaattatattgtaatttatcagccttctcattgtcctgttagccttgatgacgtggaaaccaagctagtgtcaatctattccgactcaacctgggagagggcatccaaatagtctcacatatcccttgaatcaacctacgtagaagtgagtgcttttggagctgcttggctatcagagtagatcacaatcgagttgctctgcacttgccgatctattagttccaaagcatttgtatagaggtgacttcagcctgaaatacagtggcagtattttccctcaacttaactggatttacacctcctgtgcctgtatcggtttggagcagtttgtataccaactggagtttgtcattactggcgaactggtttctcaatcctctctatgtggtgctatggtgttaaaatgttcgtcaaagctataatcttcgaatcattcattctacagaaatgcccagaacggagttcgcctttaactcctgatttaaacctgtttgataggcctgatatgaaggatggtgggtttaataacacttgtgatagctcccgtaacactcaagcaagcacccacagtataacacaactactgagctaatgtaaacaagtgtaaactctgcagaatgtaactccagaatgacaaaaagggaaataccaagctttactaaacttaaaaatgcgtgtacttaaaaaactacacagaaaactgtagtaaaaaatatcacactgttatttatgtatgcgattagttcattaatagatccaccaaaatcgagattctatcctttgggtccaaaggtaccactgagtcacgaatgggtgtactcgagcatttaatagtgttgtggagtctaggcatacatctgtttgctgtctgacttctcccattgaatttttctgtgatatctttttatgtgttgatttcatattttctttattgtggagcatataaaatgctccactcttacgaagttatatgggtctattattacattttgccatattctgtcgctttacttaaaagaataatatttttcaatcaatttttgctatgatttgtacatctgtaagttatatttttattactctttattattttagtactctttgttactatttttatttaactaaaggtaggtacgtcattatgctcatgatatccatttctttgcagatgaacaagtctgtatttttaggaaggtagttccaccagtaaagatgtaactgattttggtatctttaacctattcatactcgttgatccaatttttcaataagactcgtattctccatgactatgaaaaagttatgtgatttccagatccttgagacccatccacatcatatttatttcgttggtgcaatgatatattcgttcacatggttatctaatttttacatattgatatgagattgcaaactgaatcttcgtcatctgtctaaagctaaaacaataattgtagaagatataattcctaaatattgaatattagcgaaagtaataatgagtttgttgatggctctgacatgactgtactcgatctgtcatattgtcttagatttgtgataaaaagaaattctatagtttgacaatcactttgtgagttatctttatttgtagtttttatatatagcactacaataatttgagtttttcaagcagaataaatctatgacctatatttagatcctttgtggtgcgaacttttttggtaactacgaaacggtgtaggaaaatttgtaaattaaaaaacttttgtactgacccgaccccccctacgcaaattgtgaagttttgtctgtgcatacacatttagggttagatcaagcaaacagttggtaaaaattggcttaccgattatgcacagttgcatgactgatcttgtgtcggccatattgtcccgtcaaagaactgtcagacggtacgttaaggcatcgcgtgttcccttgtacgggactttgttggcacgaaataagtttttaaatacatagttagatttattaattattaaatttaaattatctgtacctattgctatttgtataaaatattcacttttattatgtaagcacctgtatatgtgtagttttgatttttgtatttgccaataacctattgagatatgaagaaaatacacatacatacattttcagtttgatgtgtattgtttattgta

SEQ ID NO: 3245 - DNA, 4049 bp, Diabrotica virgifera
taagaccggtccgaaacaaccctaccagacatcctactggaaccaaccttaaggatatgggtacacactataaaaatgcctgctcactaatcatcccaccccccgcctcctctcacatacaagaaatctataggtggttcagattcgttactacagttattagccgtaaatgtatctacttttaatgagaaaatgtgaacagtccttaattatttatttttagtcttaaaaggcttttcttataatttgactcgatgtgactttttataaaataaatagaagcctgtatgatacttcttaaatattttaaacaatttttattattttttgatgacttttttgtatctagggtaatttaaacaaagaatgaatttaggttattaaatttggtaagcgtcgtatcgcaatgttgtgcaatttatttttgtttttgaggtttctgttatgatacaactttgaccaattagcaacttgttttttattagtaagaatggtcaagaggagttatttttaattttaaagagaggtagggcttataggattcaactgagcagacggaagtcaattcggagtaattcttttttatgttttggcagaataaggtggatttcttcaagttaacgaatattctgcttatgaaactcaatgtttgtctgtatcgttattttgttacctagtattaaaaaaaattgtaaatacatttagatcattttatacaataaatgttgcttgacgattgcgtatacaaataaaataataaataaataaatatgaatgttaagtcagatgtaagctgtataggagaaattgttataagaattcgagagacagtcgtatttgataaacttttttaagttcatgtttagtattttcgattgagtacacattcatagtcaagagtatcaatcatcactaaaggaattctttgggaaagtatacagtacttttttaatccggctcgaaagaccaaataagtgctgcatacttttccaaacaggaattataacttttatataagtatttgaatagaaaggtttcttaacacagctattagtatatgttacactgcagttcaaataaatggatgagatatttttacttttagttattactggagacatgtcctgtacatccgaacgaacattgtgctcaataatcagatactgtgggaatgataactacagcgcatcctatgcaaaagagaaatatttaggagttagatagatttaaagatgttgcctttggcctattcctgagacattttcagacctattgtggtcttctagtcctagattacattctctagcctgaccctttttaaaaggtctagtagtatcgagactgaaccttccatatagccatttgccagtggattttcttctactaatgtaaagaacctgtcagactgacatagaatgtgctttgctgattctttgcttctgtcttccaggtgacagaatctgcacgggtcatcatctgacaatcccatcagttgacatttaggagtttagttgtaatacccatagcttattatagattggatcaaacgatagattagtttggaaactagagcggctttcggcctgacatactgataccttacagatctattgagctcccctttgtcacaaagcttcttatccaacgctgttcttttaatgaggttcaacaaccttaaaggagatttttcatatagattggtgcttctgttttttttatctttgatgctagatatcgcagtcttgtcagaccttcacactgaaatttgtcacaaattgacttcacagtcagttgtgaatttggccaaatgtcccttgatgtaccctttagctttttttttgtcttggtgcatttctccacagttccagagacttatcacccatgtatcattggctgctcttttgtatgtattagcagttccaaagtaattatattgtaatttatcagccttctcattgtcctgttagccttgatgacgtggaaaccaagctagtgtcaatctattccgactcaacctgggagagggcatccaaatagtctcacatatcccttgaatcaacctacgtagaagtgagtgcttttggagctgcttggctatcagagtagatcactatagaggtgacttcagcctgaaatacagtggcagtattttccctcaacttaactggatttacacctcctgtgcctgtatcggtttggagcagtttgtataccaactggagtttgtcattactggcgaactggtttctcaatcctctctatgtggtgctatggtgttaaaatgttcgtcaaagctataatcttcgaatcattcattctacagaaatgcccagaacggagttcgcctttaactcctgatttaaacctgtttgataggcctgatatgaaggatggtgggtttaataacacttgtgatagctcccgtaacactcaagcaagcacccacagtataacacaactactgagctaatgtaaacaagtgtaaactctgcagaatgtaactccagaatgacaaaaagggaaataccaagctttactaaacttaaaaatgcgtgtacttaaaaaactacacagaaaactgtagtaaaaaatatcacactgttatttatgtatgcgattagttcattaatagatccaccaaaatcgagattctatcctttgggtccaaaggtaccactgagtcacgaatgggtgtactcgagcatttaatagtgttgtggagtctaggcatacatctgtttgctgtctgacttctcccattgaatttttctgtgatatctttttatgtgttgatttcatattttctttattgtggagcatataaaatgctccactcttacgaagttatatgggtctattattacattttgccatattctgtcgctttacttaaaagaataatatttttcaatcaatttttgctatgatttgtacatctgtaagttatatttttattactctttattattttagtactctttgttactatttttatttaactaaaggtaggtacgtcattatgctcatgatatccatttctttgcagatgaacaagtctgtatttttaggaaggtagttccaccagtaaagatgtaactgattttggtatctttaacctattcatactcgttgatccaatttttcaataagactcgtattctccatgactatgaaaaagttatgtgatttccagatccttgagacccatccacatcatatttatttcgttggtgcaatgatatattcgttcacatggttatctaatttttacatattgatatgagattgcaaactgaatcttcgtcatctgtctaaagctaaaacaataattgtagaagatataattcctaaatattgaatattagcgaaagtaataatgagtttgttgatggctctgacatgactgtactcgatctgtcatattgtcttagatttgtgataaaaagaaattctatagtttgacaatcactttgtgagttatctttatttgtagtttttatatatagcactacaataatttgagtttttcaagcagaataaatctatgacctatatttagatcctttgtggtgcgaacttttttggtaactacgaaacggtgtaggaaaatttgtaaattaaaaaacttttgtactgacccgaccccccctacgcaaattgtgaagttttgtctgtgcatacacatttagggttagatcaagcaaacagttggtaaaaattggcttaccgattatgcacagttgcatgactgatcttgtgtcggccatattgtcccgtcaaagaactgtcagacggtacgttaaggcatcgcgtgttcccttgtacgggactttgttggcacgaaataagtttttaaatacatagttagatttattaattattaaatttaaattatctgtacctattgctatttgtataaaatattcacttttattatgtaagcacctgtatatgtgtagttttgatttttgtatttgccaataacctattgagatatgaagaaaatacacatacatacattttcagtttgatgtgtattgtttattgta

SEQ ID NO: 3246 - DNA, 2446 bp, Diabrotica virgifera
tttaatgaggttcaacaaccttaaaggagatttttcatatagattggtgcttctgttttttttttatctttgagtgctagatatcgcagtcttgtcagaccttcacactgaaattctttcgattgtgggtcaatgagtcagttgtgaatttggccaaatgtcccttgatgtaccctttagctttttttttgtcttggtgcatttctccacagttccagagacttatcacccatgtatcattggctgctcttttgtatgtattagcagttccaaagtaattatattgtaatttatcagccttctcattgtcctgttagccttgatgacgtggaaaccaagctagtgtcaatctattccgactcaacctgggagagggcatccaaatagtctcacatatcccttgaatcaacctacgtagaagtgagtgcttttggagctgcttggctatcagagtagatcacaatcgagttgctctgcacttgccgatctattagttccaaagcatttgtatagaggtgacttcagcctgaaatacagtggcagtattttccctcaacttaactggatttacacctcctgtgcctgtatcggtttggagcagtttgtataccaactggagtttgtcattactggcgaactggtttctcaatcctctctatgtggtgctatggtgttaaaatgttcgtcaaagctataatcttcgaatcattcattctacagaaatgcccagaacggagttcgcctttaactcctgatttaaacctgtttgataggcctgatatgaaggatggtgggtttaataacacttgtgatagctcccgtaacactcaagcaagcacccacagtataacacaactactgagctaatgtaaacaagtgtaaactctgcagaatgtaactccagaatgacaaaaagggaaataccaagctttactaaacttaaaaatgcgtgtacttaaaaaactacacagaaaactgtagtaaaaaatatcacactgttatttatgtatgcgattagttcattaatagatccaccaaaatcgagattctatcctttgggtccaaaggtaccactgagtcacgaatgggtgtactcgagcatttaatagtgttgtggagtctaggcatacatctgtttgctgtctgacttctcccattgaatttttctgtgatatctttttatgtgttgatttcatattttctttattgtggagcatataaaatgctccactcttacgaagttatatgggtctattattacattttgccatattctgtcgctttacttaaaagaataatatttttcaatcaatttttgctatgatttgtacatctgtaagttatatttttattactctttattattttagtactctttgttactatttttatttaactaaaggtaggtacgtcattatgctcatgatatccatttctttgcagatgaacaagtctgtatttttaggaaggtagttccaccagtaaagatgtaactgattttggtatctttaacctattcatactcgttgatccaatttttcaataagactcgtattctccatgactatgaaaaagttatgtgatttccagatccttgagacccatccacatcatatttatttcgttggtgcaatgatatattcgttcacatggttatctaatttttacatattgatatgagattgcaaactgaatcttcgtcatctgtctaaagctaaaacaataattgtagaagatataattcctaaatattgaatattagcgaaagtaataatgagtttgttgatggctctgacatgactgtactcgatctgtcatattgtcttagatttgtgataaaaagaaattctatagtttgacaatcactttgtgagttatctttatttgtagtttttatatatagcactacaataatttgagtttttcaagcagaataaatctatgacctatatttagatcctttgtggtgcgaacttttttggtaactacgaaacggtgtaggaaaatttgtaaattaaaaaacttttgtactgacccgaccccccctacgcaaattgtgaagttttgtctgtgcatacacatttagggttagatcaagcaaacagttggtaaaaattggcttaccgattatgcacagttgcatgactgatcttgtgtcggccatattgtcccgtcaaagaactgtcagacggtacgttaaggcatcgcgtgttcccttgtacgggactttgttggcacgaaataagtttttaaatacatagttagatttattaattattaaatttaaattatctgtacctattgctatttgtataaaatattcacttttattatgtaagcacctgtatatgtgtagttttgatttttgtatttgccaataacctattgagatatgaagaaaatacacatacatacattttcagtttgatgtgtattgtttattgta

SEQ ID NO: 3247 - DNA, 2399 bp, Diabrotica virgifera
tttaatgaggttcaacaaccttaaaggagatttttcatatagattggtgcttctgttttttttttatctttgagtgctagatatcgcagtcttgtcagaccttcacactgaaattctttcgattgtgggtcaatgagtcagttgtgaatttggccaaatgtcccttgatgtaccctttagctttttttttgtcttggtgcatttctccacagttccagagacttatcacccatgtatcattggctgctcttttgtatgtattagcagttccaaagtaattatattgtaatttatcagccttctcattgtcctgttagccttgatgacgtggaaaccaagctagtgtcaatctattccgactcaacctgggagagggcatccaaatagtctcacatatcccttgaatcaacctacgtagaagtgagtgcttttggagctgcttggctatcagagtagatcactatagaggtgacttcagcctgaaatacagtggcagtattttccctcaacttaactggatttacacctcctgtgcctgtatcggtttggagcagtttgtataccaactggagtttgtcattactggcgaactggtttctcaatcctctctatgtggtgctatggtgttaaaatgttcgtcaaagctataatcttcgaatcattcattctacagaaatgcccagaacggagttcgcctttaactcctgatttaaacctgtttgataggcctgatatgaaggatggtgggtttaataacacttgtgatagctcccgtaacactcaagcaagcacccacagtataacacaactactgagctaatgtaaacaagtgtaaactctgcagaatgtaactccagaatgacaaaaagggaaataccaagctttactaaacttaaaaatgcgtgtacttaaaaaactacacagaaaactgtagtaaaaaatatcacactgttatttatgtatgcgattagttcattaatagatccaccaaaatcgagattctatcctttgggtccaaaggtaccactgagtcacgaatgggtgtactcgagcatttaatagtgttgtggagtctaggcatacatctgtttgctgtctgacttctcccattgaatttttctgtgatatctttttatgtgttgatttcatattttctttattgtggagcatataaaatgctccactcttacgaagttatatgggtctattattacattttgccatattctgtcgctttacttaaaagaataatatttttcaatcaatttttgctatgatttgtacatctgtaagttatatttttattactctttattattttagtactctttgttactatttttatttaactaaaggtaggtacgtcattatgctcatgatatccatttctttgcagatgaacaagtctgtatttttaggaaggtagttccaccagtaaagatgtaactgattttggtatctttaacctattcatactcgttgatccaatttttcaataagactcgtattctccatgactatgaaaaagttatgtgatttccagatccttgagacccatccacatcatatttatttcgttggtgcaatgatatattcgttcacatggttatctaatttttacatattgatatgagattgcaaactgaatcttcgtcatctgtctaaagctaaaacaataattgtagaagatataattcctaaatattgaatattagcgaaagtaataatgagtttgttgatggctctgacatgactgtactcgatctgtcatattgtcttagatttgtgataaaaagaaattctatagtttgacaatcactttgtgagttatctttatttgtagtttttatatatagcactacaataatttgagtttttcaagcagaataaatctatgacctatatttagatcctttgtggtgcgaacttttttggtaactacgaaacggtgtaggaaaatttgtaaattaaaaaacttttgtactgacccgaccccccctacgcaaattgtgaagttttgtctgtgcatacacatttagggttagatcaagcaaacagttggtaaaaattggcttaccgattatgcacagttgcatgactgatcttgtgtcggccatattgtcccgtcaaagaactgtcagacggtacgttaaggcatcgcgtgttcccttgtacgggactttgttggcacgaaataagtttttaaatacatagttagatttattaattattaaatttaaattatctgtacctattgctatttgtataaaatattcacttttattatgtaagcacctgtatatgtgtagttttgatttttgtatttgccaataacctattgagatatgaagaaaatacacatacatacattttcagtttgatgtgtattgtttattgta

SEQ ID NO: 3248 - DNA, 3423 bp, Diabrotica virgifera
  SmartBlast Evalue=1E-137; Info=Uridine phosphorylase 1 n=1 Tax= Harpegnathos saltator RepID=E2BQK2_9HYME
cattttaagacttttgtaatcatcttacaaaaaggacgatgtactgtggactattatctttttgtaacaaacacgacatttgcaaagcatgcgtacatccacaagtttgtccaactctaaatagtttttgtccatctatccgttcagtcgtaagatatacggcataaagggaaaaatacacacactattctgctttgcacatcttcctcattttctctttatattatcaaggttacagcaaaccaattcgctactcaactccttgtgaatggaagaactaataacctatataaagagccaaacactagaagaagactgaatcatgagacacaccaccttcttcttcacgtgccatatcagaattatccgacggtggcgatcaccattgcgaaggcttctcgattttctgcaatatggaataattgtcctgcatttgatatctgattctattcatgaatgttttttaaccaagaaacttgttttcttcctacacctctacggccctctgttttgcctttaagaatcagttgtaatattttatatcgacttcccctcactatatgttccaggtaagacatttctcgatgtttaaacagtctttagcaggtctctatctttgttgaccctccttagtacttcttcattagttttccttgctgtccaaagtatcctcagcatccgtctatgaatccacatttccaatgtttcaattctgttcataatcgatacttttagcgtccacacttctgcactatacaaaagtacggaccaaacatagcacttaaccattctttttcttagttcttaactgagatgattattgtaaacttcattatcataaaagtagttttagtcattgctattctacgttttatttttatttctatttctaggaaacacaccacctaggaactccatttatactaaaaacattccacgaaggtatgaactgattaaaaaacggaaacgatgcaggtgtgaatgacagtcaacaaaaatacagaatctatgccaaggagcaaaaaatggatcttgggatccaaaaaggactcggaaaatcccagtagctacataccgatttccctattgtgtcactttttccaattaggtatacgagagactcaacctggccagaaaagaaaaaaatgtggaaaagcacctcataccacaaaaaggaggattcagacccggcaaatcttgcaccggtcaagtcttcccattaattagggatgttcgatacgtatcgatactttgaggtatcgatactttatatttcgatactcgatattttgtatcgatacattagttggtatcgatactgtgtatcgatacactgaatcataatatcgtatcgaaaattcaactccttattttatgcaatacgttttgcaacaccggtttggagaattctttgtcctttattttccttccaaagtttgtcctttattttctttgaatattataggtgggtgggccaggtggtctgcattttattacaggacaaaaataagggacggacaccatactgcgcatgcgtacatgtcagaataaagatgtcgatattttgtatcgatacttgcaatatcgatacttttgattacgatatcatagggtatcgatacagaacctaacaatacgtatcgatactttggtgaatatcgaacatccctaccattaatagaacatattgaagagggcttcaaagaaaaacataacaggggctgctttcgtcgatctgacagcagcctatcacacagtagaagagaaactcgtaactgacttaaaaacaatgtctgcgtactacctgcataattccaggagacctattctttctaagtgccattgtgacgagacctcaaactgcacttagcatacacttccacgcatcttttgttgtctatagttatcagttaatcgtttaaaggtttggaagaacaatgtgtaacagtatcagaaaatctttaacagtatctccgcgttttccgttaattagtacaaatcctgaatgatttaaaatcttagaatccaagttccataactcaagaagaaaaattaacataccggacgtcccatattcaatcacttttaaaatataataactacattcctgcaagcacaatgtacacatgataataaatattaagattatcaccttaaaagacttttataaagtcagtattataatattttctatattatgagacgtccggtattagcatcttatgcccacaaacatctaaatgcaaataaattagtttattcaaacgtttgggattcttgttgaacaagtttgaaacgtcttggactcttcacagccatagatccatgtccgtcgaatgatattcggcctttggtttgtaaatacctcttgatgtatcgggctactagtatctgaggtctgagttgccattcggtaagtacctcctttggagttgccacctgatctccttttaatctatccagaagagtgacgcaaacaattgcggcgctgattccagcgtggtgagtaagagcagcaaatgtagtagcttccatttcaatgtttttgattccgttgcttactaaccgttccaagtattccattttttcagcttcggtatattcacagaatgctccatctaatcttccttggccttcatagaaatcatcagcacacatggtggtacccgtcacggtgtcataaggatcttcagaatttgctaaggctttgagttcccgaactagttttttgtccaattttgcaggtcttttagtaatttttccaagaattggcacttgataatatttattcatcattccatcagctgcatcgtcagaaatgactacggtacctccttcaagaccaatgcctccacacgttccaatcctaaagaaaattggatccctacatttcgcgtggtacattagttttatcacttcgtgaagaaggataccaatggatggggcacccatgccgtgactaatagataatacaggccccactttgtacatactgtagcgataagaatactgacttatatccattaactgagttccagttggtaatttatggccaatctctttcatgatatattcggcaaaattttccattctctttggtgttcctcccatacacacgaatttgatatcaccgaacatttcaataagatcgtgagactcgcttcccagagctagatgatataaaatgtcttggtccataagttcgatgtgggggtttcgtaatcgtacggatccatctgggtattcgtctctttcctcctctgatatcgacatcttgagagaaatcctgaaaaacaaacacttacaaggatgatcactagaaagggaactaagaaagtccgtttagaagggtaattttaacaaaatctaatagacatttttttatttaactaaagataaactagaagggtgcgtctccttcca

SEQ ID NO: 3249 - DNA, 3404 bp, Diabrotica virgifera
  SmartBlast Evalue=1E-137; Info=Uridine phosphorylase 1 n=1 Tax= Harpegnathos saltator RepID=E2BQK2_9HYME
cattttaagacttttgtaatcatcttacaaaaaggacgatgtactgtggactattatctttttgtaacaaacacgacatttgcaaagcatgcgtacatccacaagtttgtccaactctaaatagtttttgtccatctatccgttcagtcgtaagatatacggcataaagggaaaaatacacacactattctgctttgcacatcttcctcattttctctttatattatcaaggttacagcaaaccaattcgctactcaactccttgtgaatggaagaactaataacctatataaagagccaaacactagaagaagactgaatcatgagacacaccaccttcttcttcacgtgccatatcagaattatccgacggtggcgatcaccattgcgaaggcttctcgattttctgcaatatggaataattgtcctgcatttgatatctgattctattcatgaatgttttttaaccaagaaacttgttttcttcctacacctctacggccctctgttttgcctttaagaatcagttgtaatattttatatcgacttcccctcactatatgttccaggtaagacatttctcgatgtttaaacagtctttagcaggtctctatctttgttgaccctccttagtacttcttcattagttttccttgctgtccaaagtatcctcagcatccgtctatgaatccacatttccaatgtttcaattctgttcataatcgatacttttagcgtccacacttctgcactatacaaaagtacggaccaaacatagcacttaaccattctttttcttagttcttaactgagatgattattgtaaacttcattatcataaaagtagttttagtcattgctattctacgttttatttttatttctatttctaggaaacacaccacctaggaactccatttatactaaaaacattccacgaaggtatgaactgattaaaaaacggaaacgatgcaggtgtgaatgacagtcaacaaaaatacagaatctatgccaaggagcaaaaaatggatcttgggatccaaaaaggactcggaaaatcccagtagctacataccgatttccctattgtgtcactttttccaattaggtatacgagagactcaacctggccagaaaagaaaaaaatgtggaaaagcacctcataccacaaaaaggaggattcagacccggcaaatcttgcaccggtcaagtcttcccattaattagggatgttcgatacgtatcgatactttgaggtatcgatactttatatttcgatactcgatattttgtatcgatacattagttggtatcgatactgtgtatcgatacactgaatcataatatcgtatcgaaaattcaactccttattttatgcaatacgttttgcaacaccggtttggagaattctttgtcctttattttccttccaaagtttgtcctttattttctttgaatattataggtgggtgggccaggtggtctgcattttattacaggacaaaaataagggacggacaccatactgcgcatgcgtacatgtcagaataaagatgtcgatattttgtatcgatacttgcaatatcgatacttttgattacgatatcatagggtatcgatacagaacctaacaatacgtatcgatactttggtgaatatcgaacatccctaccattaatagaacatattgaagagggcttcaaagaaaaacataacaggggctgctttcgtcgatctgacagcagcctatcacacagtagaagagaaactcgtaactgacttaaaaacaatgtctgcgtactacctgcataattccaggagacctattctttctaagtgccattgtgacgagacctcaaactgcacttagcatacacttccacgcatcttttgttgtctatagttatcagttaatcgtttaaaggtttggaagaacaatgtgtaacagtatcagaaaatctttaacagtatctccgcgttttccgttaattagtacaaatcctgaatgatttaaaatcttagaatccaagttccataactcaagaagaaaaattaacataccggacgtcccatattcaatcacttttaaaatataataactacattcctgcaagcacaatgtacacatgataataaatattaagattatcaccttaaaagacttttataaagtcagtattataatattttctatattatgagacgtccggtattagcatcttatgcccacaaacatctaaatgcaaataaattagtttattcaaacgtttgggattcttgttgaacaagtttgaaacgtcttggactcttcacagccatagatccatgtccgtcgaatgatattcggcctttggtttgtaaatacctcttgatgtatcgggctactagtatctgaggtctgagttgccattcggtaagtacctcctttggagttgccacctgatctccttttaatctatccagaagagtgacgcaaacaattgcggcgctgattccagcgtggtgagtaagagcagcaaatgtagtagcttccatttcaatgtttttgattccgttgcttactaaccgttccaagtattccattttttcagcttcggtatattcacagaatgctccatctaatcttccttggccttcatagaaatcatcagcacacatggtggtacccgtcacggtgtcataaggatcttcagaatttgctaaggctttgagttcccgaactagttttttgtccaattttgcaggtcttttagtaatttttccaagaattggcacttgataatatttattcatcattccatcagctgcatcgtcagaaatgactacggtacctccttcaagaccaatgcctccacacgttccaatcctaaagaaaattggatccctacatttcgcgtggtacattagttttatcacttcgtgaagaaggataccaatggatggggcacccatgccgtgactaatagataatacaggccccactttgtacatactgtagcgataagaatactgacttatatccattaactgagttccagttggtaatttatggccaatctctttcatgatatattcggcaaaattttccattctctttggtgttcctcccatacacacgaatttgatatcaccgaacatttcaataagatcgtgagactcgcttcccagagctagatgatataaaatgtcttggtccataagttcgatgtgggggtttcgtaatcgtacggatccatctgggtattgcacttccttttcgttagtttcaccatttgttgtggcaggaataacttcaagagtggtcatttttgaactaagtttgaagaggattcgacgacacaatgcagaacacgaaaaattttttactcttgacctatactacacaacgttatcacgattatcgt

SEQ ID NO: 3250 - DNA, 2968 bp, Diabrotica virgifera
  SmartBlast Evalue=1E-137; Info=Uridine phosphorylase 1 n=1 Tax= Harpegnathos saltator RepID=E2BQK2_9HYME
cattttaagacttttgtaatcatcttacaaaaaggacgatgtactgtggactattatctttttgtaacaaacacgacatttgcaaagcatgcgtacatccacaagtttgtccaactctaaatagtttttgtccatctatccgttcagtcgtaagatatacggcataaagggaaaaatacacacactattctgctttgcacatcttcctcattttctctttatattatcaaggttacagcaaaccaattcgctactcaactccttgtgaatggaagaactaataacctatataaagagccaaacactagaagaagactgaatcatgagacacaccaccttcttcttcacgtgccatatcagaattatccgacggtggcgatcaccattgcgaaggcttctcgattttctgcaatatggaataattgtcctgcatttgatatctgattctattcatgaatgttttttaaccaagaaacttgttttcttcctacacctctacggccctctgttttgcctttaagaatcagttgtaatattttatatcgacttcccctcactatatgttccaggtaagacatttctcgatgtttaaacagtctttagcaggtctctatctttgttgaccctccttagtacttcttcattagttttccttgctgtccaaagtatcctcagcatccgtctatgaatccacatttccaatgtttcaattctgttcataatcgatacttttagcgtccacacttctgcactatacaaaagtacggaccaaacatagcacttaaccattctttttcttagttcttaactgagatgattattgtaaacttcattatcataaaagtagttttagtcattgctattctacgttttatttttatttctatttctaggaaacacaccacctaggaactccatttatactaaaaacattccacgaaggtatgaactgattaaaaaacggaaacgatgcaggtgtgaatgacagtcaacaaaaatacagaatctatgccaaggagcaaaaaatggatcttgggatccaaaaaggactcggaaaatcccagtagctacataccgatttccctattgtgtcactttttccaattaggtatacgagagactcaacctggccagaaaagaaaaaaatgtggaaaagcacctcataccacaaaaaggaggattcagacccggcaaatcttgcaccggtcaagtcttcccattaatagaacatattgaagagggcttcaaagaaaaacataacaggggctgctttcgtcgatctgacagcagcctatcacacagtagaagagaaactcgtaactgacttaaaaacaatgtctgcgtactacctgcataattccaggagacctattctttctaagtgccattgtgacgagacctcaaactgcacttagcatacacttccacgcatcttttgttgtctatagttatcagttaatcgtttaaaggtttggaagaacaatgtgtaacagtatcagaaaatctttaacagtatctccgcgttttccgttaattagtacaaatcctgaatgatttaaaatcttagaatccaagttccataactcaagaagaaaaattaacataccggacgtcccatattcaatcacttttaaaatataataactacattcctgcaagcacaatgtacacatgataataaatattaagattatcaccttaaaagacttttataaagtcagtattataatattttctatattatgagacgtccggtattagcatcttatgcccacaaacatctaaatgcaaataaattagtttattcaaacgtttgggattcttgttgaacaagtttgaaacgtcttggactcttcacagccatagatccatgtccgtcgaatgatattcggcctttggtttgtaaatacctcttgatgtatcgggctactagtatctgaggtctgagttgccattcggtaagtacctcctttggagttgccacctgatctccttttaatctatccagaagagtgacgcaaacaattgcggcgctgattccagcgtggtgagtaagagcagcaaatgtagtagcttccatttcaatgtttttgattccgttgcttactaaccgttccaagtattccattttttcagcttcggtatattcacagaatgctccatctaatcttccttggccttcatagaaatcatcagcacacatggtggtacccgtcacggtgtcataaggatcttcagaatttgctaaggctttgagttcccgaactagttttttgtccaattttgcaggtcttttagtaatttttccaagaattggcacttgataatatttattcatcattccatcagctgcatcgtcagaaatgactacggtacctccttcaagaccaatgcctccacacgttccaatcctaaagaaaattggatccctacatttcgcgtggtacattagttttatcacttcgtgaagaaggataccaatggatggggcacccatgccgtgactaatagataatacaggccccactttgtacatactgtagcgataagaatactgacttatatccattaactgagttccagttggtaatttatggccaatctctttcatgatatattcggcaaaattttccattctctttggtgttcctcccatacacacgaatttgatatcaccgaacatttcaataagatcgtgagactcgcttcccagagctagatgatataaaatgtcttggtccataagttcgatgtgggggtttcgtaatcgtacggatccatctgggtattcgtctctttcctcctctgatatcgacatcttgagagaaatcctgaaaaacaaacacttacaaggatgatcactagaaagggaactaagaaagtccgtttagaagggtaattttaacaaaatctaatagacatttttttatttaactaaagataaactagaagggtgcgtctccttcca

SEQ ID NO: 3251 - DNA, 2949 bp, Diabrotica virgifera
  SmartBlast Evalue=1E-137; Info=Uridine phosphorylase 1 n=1 Tax= Harpegnathos saltator RepID=E2BQK2_9HYME
cattttaagacttttgtaatcatcttacaaaaaggacgatgtactgtggactattatctttttgtaacaaacacgacatttgcaaagcatgcgtacatccacaagtttgtccaactctaaatagtttttgtccatctatccgttcagtcgtaagatatacggcataaagggaaaaatacacacactattctgctttgcacatcttcctcattttctctttatattatcaaggttacagcaaaccaattcgctactcaactccttgtgaatggaagaactaataacctatataaagagccaaacactagaagaagactgaatcatgagacacaccaccttcttcttcacgtgccatatcagaattatccgacggtggcgatcaccattgcgaaggcttctcgattttctgcaatatggaataattgtcctgcatttgatatctgattctattcatgaatgttttttaaccaagaaacttgttttcttcctacacctctacggccctctgttttgcctttaagaatcagttgtaatattttatatcgacttcccctcactatatgttccaggtaagacatttctcgatgtttaaacagtctttagcaggtctctatctttgttgaccctccttagtacttcttcattagttttccttgctgtccaaagtatcctcagcatccgtctatgaatccacatttccaatgtttcaattctgttcataatcgatacttttagcgtccacacttctgcactatacaaaagtacggaccaaacatagcacttaaccattctttttcttagttcttaactgagatgattattgtaaacttcattatcataaaagtagttttagtcattgctattctacgttttatttttatttctatttctaggaaacacaccacctaggaactccatttatactaaaaacattccacgaaggtatgaactgattaaaaaacggaaacgatgcaggtgtgaatgacagtcaacaaaaatacagaatctatgccaaggagcaaaaaatggatcttgggatccaaaaaggactcggaaaatcccagtagctacataccgatttccctattgtgtcactttttccaattaggtatacgagagactcaacctggccagaaaagaaaaaaatgtggaaaagcacctcataccacaaaaaggaggattcagacccggcaaatcttgcaccggtcaagtcttcccattaatagaacatattgaagagggcttcaaagaaaaacataacaggggctgctttcgtcgatctgacagcagcctatcacacagtagaagagaaactcgtaactgacttaaaaacaatgtctgcgtactacctgcataattccaggagacctattctttctaagtgccattgtgacgagacctcaaactgcacttagcatacacttccacgcatcttttgttgtctatagttatcagttaatcgtttaaaggtttggaagaacaatgtgtaacagtatcagaaaatctttaacagtatctccgcgttttccgttaattagtacaaatcctgaatgatttaaaatcttagaatccaagttccataactcaagaagaaaaattaacataccggacgtcccatattcaatcacttttaaaatataataactacattcctgcaagcacaatgtacacatgataataaatattaagattatcaccttaaaagacttttataaagtcagtattataatattttctatattatgagacgtccggtattagcatcttatgcccacaaacatctaaatgcaaataaattagtttattcaaacgtttgggattcttgttgaacaagtttgaaacgtcttggactcttcacagccatagatccatgtccgtcgaatgatattcggcctttggtttgtaaatacctcttgatgtatcgggctactagtatctgaggtctgagttgccattcggtaagtacctcctttggagttgccacctgatctccttttaatctatccagaagagtgacgcaaacaattgcggcgctgattccagcgtggtgagtaagagcagcaaatgtagtagcttccatttcaatgtttttgattccgttgcttactaaccgttccaagtattccattttttcagcttcggtatattcacagaatgctccatctaatcttccttggccttcatagaaatcatcagcacacatggtggtacccgtcacggtgtcataaggatcttcagaatttgctaaggctttgagttcccgaactagttttttgtccaattttgcaggtcttttagtaatttttccaagaattggcacttgataatatttattcatcattccatcagctgcatcgtcagaaatgactacggtacctccttcaagaccaatgcctccacacgttccaatcctaaagaaaattggatccctacatttcgcgtggtacattagttttatcacttcgtgaagaaggataccaatggatggggcacccatgccgtgactaatagataatacaggccccactttgtacatactgtagcgataagaatactgacttatatccattaactgagttccagttggtaatttatggccaatctctttcatgatatattcggcaaaattttccattctctttggtgttcctcccatacacacgaatttgatatcaccgaacatttcaataagatcgtgagactcgcttcccagagctagatgatataaaatgtcttggtccataagttcgatgtgggggtttcgtaatcgtacggatccatctgggtattgcacttccttttcgttagtttcaccatttgttgtggcaggaataacttcaagagtggtcatttttgaactaagtttgaagaggattcgacgacacaatgcagaacacgaaaaattttttactcttgacctatactacacaacgttatcacgattatcgt

SEQ ID NO: 3252 - DNA, 3178 bp, Diabrotica virgifera
aaatccagtgattaaagtcgtcaaaactgtcactgcagtcacagcaggggggatgtggccaatttcatcttataaagcttggagttgactgctccgtgtccaaagaggcacctaatgtatttggtgttaatttttctattgggatggcttcttttagcaagctttgtagaaggaagtgttggaaaaagcgtgcagtactgaaatgcattgttagatctaattgttgtccatttgtctgcccatttagttcttaagttttgcttacatatagataatgcgtcttgtagcgttaattcggggacttgtttaccatcagtgatagctctttttgccagtttgtcagctgtttcgtttcccgttatggaggaatgccctttggcccatatgaagaatgtatttatctgtttataatctaaggctcttaaggttgtcaaaatttccacgattattgagttattgtatatggaggtaaccgggtacaccagagctgataaaacagatttcgaatccgatattatagccaagtttgacaagggtagcagtgaattgtttgcccaatccaaagccttaaatatagcaagtgcctctgctgcaaagattgtagagtttttgtttagtttaaacaacaaactttcgtttgtgttttccctgtacactgcacatcctgttccagtaggggatttggatccgtctgtaaaataaatcgccaaatctgtagctaatatggcatcttctaataccctgataactctagaatgctgttctggtgttagatttgaaagaagctggagcgaatttagaatcattagacattggtcgaaatggtggtgttccattgtagaagtggaatatagttgggctataggtgaatgtatcttcatttggaaggaattatttgttcccctgtggtctaaatcatgacagagacaagctatcatcaacgcgagacattcaatggatcccaaatattcccaccaccttgttgcgtgcaatattgaatacatcatctgacctacgttgaaggcgtgcctccagttatgataagtaacatctcggtaattcttcttaactgataatagccatctacataatacatcaaaatctatgtggaacgtttctactaaactaagatccaagaacatccgtaaacaggcagtcaaagtttcatcatcactcatacgaatgtcatcaaaggcgaagtccagaagtctaaacttaacattagacggtacccgtaaatcccttaatctttgggcctcctcaatactagcagtggcgtgataagacagcacatccaaaatgactttctgtttcgcgacggctgttgtagctgcttcgtacatcctcgtattgtggatgcccattccgcagaaaatagcgaacgcttcgacgaaattttcgtcattttgtgtgaaagggagatcattgaacttgtttattaactgtataacgccgatgattttgtttttggagtttttgatcggcatgcataggacggttttgtgcttgaagtttgtaccttcgtctgcctctgggtcgaagcgggcgtcgtcgtagacattcgtgaggtttacggtttcccctgtagtcgcgacatggcctgttattcccaagttgatcggaaatctgccttccagtggacttgttctgctctctcctgcctctataatgttaatgtcattttcttcgaaatcaaaaactctcgaaaagctagctgatgaatcttggtgcgttagaaggatctgtactctctgacattgaataagactttgtgcgtgaagtaaaatcctatacacgacgtgctctaacgtagattgctcttgaaatatcattctagccaaatccaaaagcacttggttccgttttatctctaattgtgacttttcgtaaaggtgtgcgtttctgaggccgataccacaaaactgcagatacttggaaaatacttcttcgtcggtttttgtgaagggttgttcaccgactttatttataacttgtgctactcctatcacatcaccattggtgtctttaatgggcatacacaataaagatttcgttctgtaccccgttcggttatcaacttcctggttaaaccttttgtcctggtaggcatctggaatatttacaggttctccactctccgccacgtaccctacaatacccgtaccaaggggaattttaatttcctcctttttttctatatctacaagggtacttttggagcagacatcaaacagtttggaaactagacaacgatctcggtgacccgaatctacttcacaaccactggttttgtcgccttcgaccagaaagagagaaccacggtcggcgttcagaagcatgcaaacattttgaaggatcttgtggcacaaggatctgatctccagttcgttgcatatatcttttaccaactcaaaaattaaatctttctcgtccatctgccttaattcatgccgcgacctcctctgccgccgtccaggcgtaggactacctgttcctgctggtgtttggttttcgctggttaaaaacgtgggttggccatcaatggtatttatcataggcttcagcagaccgctgcgctcgaactcgtgcgcagatattttgcgcaccggagttgtagcacccgaacttgctcttgaagggttgttgtgcgttggtgaggctaactccacgttggatgaggtaggggtggcgtgcgacacttgccattgttccactatttgtcgtgtggcttttctcaggaaataatcattaacaaaatctggatgctcatccagccaagattccatttgagcatactccggatcgtaagggtggccataaatgttgtgatggtgcctcggaagcctgctagctgaatccgaccctgtagtggagccatctaccggcattcgagtgttgtcgccagtgttgcgcaattgtaaacctttcttatgcctgcagttgaatttgcacatactgaaggattgtcccatcgatcgtagagacccccttctgatgatagatctgtgcctggtgggattcgtgcctagcgtaggggaaggggccgcccgggggcagagccccacatcgcgccaccacccctttaatgttaccgccacccctgatgctttaccaattatgcttttatcttcttccttgaaagagaaatgatgtcactggtgaaccaccgccaatgtac

SEQ ID NO: 3253 - DNA, 3056 bp, Diabrotica virgifera
aaatccagtgattaaagtcgtcaaaactgtcactgcagtcacagcaggggggatgtggccaatttcatcttataaagcttggagttgactgctccgtgtccaaagaggcacctaatgtatttggtgttaatttttctattgggatggcttcttttagcaagctttgtagaaggaagtgttggaaaaagcgtgcagtactgaaatgcattgttagatctaattgttgtccatttgtctgcccatttagttcttaagttttgcttacatatagataatgcgtcttgtagcgttaattcggggacttgtttaccatcagtgatagctctttttgccagtttgtcagctgtttcgtttcccgttatggaggaatgccctttggcccatatgaagaatgtatttatctgtttataatctaaggctcttaaggttgtcaaaatttccacgattattgagttattgtatatggaggtaaccgggtacaccagagctgataaaacagatttcgaatccgatattatagccaagtttgacaagggtagcagtgaattgtttgcccaatccaaagccttaaatatagcaagtgcctctgctgcaaagattgtagagtttttgtttagtttaaacaacaaactttcgtttgtgttttccctgtacactgcacatcctgttccagtaggggatttggatccgtctgtaaaataaatcgccaaatctgtagctaatatggcatcttctaataccctgataactctagaatgctgttctggtgttagatttgaaagaagctggagcgaatttagaatcattagacattggtcgaaatggtggtgttccattgtagaagtggaatatagttgggctataggtgaatgtatcttcatttggaaggaattatttgttcccctgtggtctaaatcatgacagagacaagctatcatcaacgcgagacattcaatggatcccaaatattcccaccaccttgttgcgtgcaatattgaatacatcatctgacctacgttgaaggcgtgcctccagttatgataagtaacatctcggtaattcttcttaactgataatagccatctacataatacatcaaaatctatgtggaacgtttctactaaactaagatccaagaacatccgtaaacaggcagtcaaagtttcatcatcactcatacgaatgtcatcaaaggcgaagtccagaagtctaaacttaacattagacggtacccgtaaatcccttaatctttgggcctcctcaatactagcagtggcgtgataagacagcacatccaaaatgactttctgtttcgcgacggctgttgtagctgcttcgtacatcctcgtattgtggatgcccattccgcagaaaatagcgaacgcttcgacgaaattttcgtcattttgtgtgaaagggagatcattgaacttgtttattaactgtataacgccgatgattttgtttttggagtttttgatcggcatgcataggacggttttgtgcttgaagtttgtaccttcgtctgcctctgggtcgaagcgggcgtcgtcgtagacattcgtgaggtttacggtttcccctgtagtcgcgacatggcctgttattcccaagttgatcggaaatctgccttccagtggacttgttctgctctctcctgcctctataatgttaatgtcattttcttcgaaatcaaaaactctcgaaaagctagctgatgaatcttggtgcgttagaaggatctgtactctctgacattgaataagactttgtgcgtgaagtaaaatcctatacacgacgtgctctaacgtagattgctcttgaaatatcattctagccaaatccaaaagcacttggttccgttttatctctaattgtgacttttcgtaaaggtgtgcgtttctgaggccgataccacaaaactgcagatacttggaaaatacttcttcgtcggtttttgtgaagggttgttcaccgactttatttataacttgtgctactcctatcacatcaccattggtgtctttaatgggcatacacaataaagatttcgttctgtaccccgttcggttatcaacttcctggttaaaccttttgtcctggtaggcatctggaatatttacaggttctccactctccgccacgtaccctacaatacccgtaccaaggggaattttaatttcctcctttttttctatatctacaagggtacttttggagcagacatcaaacagtttggaaactagacaacgatctcggtgacccgaatctacttcacaaccactggttttgtcgccttcgaccagaaagagagaaccacggtcggcgttcagaagcatgcaaacattttgaaggatcttgtggcacaaggatctgatctccagttcgttgcatatatcttttaccaactcaaaaattaaatctttctcgtccatctgccttaattcatgccgcgacctcctctgccgccgtccaggcgtaggactacctgttcctgctggtgtttggttttcgctggttaaaaacgtgggttggccatcaatggtatttatcataggcttcagcagaccgctgcgctcgaactcgtgcgcagatattttgcgcaccggagttgtagcacccgaacttgctcttgaagggttgttgtgcgttggtgaggctaactccacgttggatgaggtaggggtggcgtgcgacacttgccattgttccactatttgtcgtgtggcttttctcaggaaataatcattaacaaaatctggatgctcatccagccaagattccatttgagcatactccggatcgtaagggtggccataaatgttgtgatggtgcctcggaagcctgctagctgaatccgaccctgtagtggagccatctaccggcattcgagtgttgtcgccagtgttgcgcaattgtaaacctaatggacaaattcctacatcttagaagccacacacacaattccacagcacatacatcattaacaaaacaaatttatatctaatcacaactttttttcatgtaaatattccgtttacaaaaattgttcggaa

SEQ ID NO: 3254 - DNA, 3019 bp, Diabrotica virgifera
aacttttaaactctttatactaattggtaatttttttgaaagttcttctctcgcggactttgcttttgatcggaactgctactggactttgacaaattgtcattgtcatctttctcttggcgttcgtttatctcaggaaccaaatgagctcgttgtgcctcttcgagccaatgcgttctgttttgtctcacgccatcgagcaagggattcaggctatctgaaagatcagcaaaggcctcatatattggcagacatattgaatcaataaagttgatctgcatcataggtaattgttcagcttttgtcctatccattatgtccattggcgtaacgttcaacttctccctctcgagatcaccttgttcaaaaaattcggcgctcactaactccgctatcctcttttctacttcccacggtttggttatggccgctaaatcacagactgtcattaacatacccctcacggagtccttatgatcctctctcttccagttcagaccatcactagctatcttaaaaaagtcaacacgtttcttaaaataaatcgccaaatctgtagctaatatggcatcttctaataccctgataactctagaatgctgttctggtgttagatttgaaagaagctggagcgaatttagaatcattagacattggtcgaaatggtggtgttccattgtagaagtggaatatagttgggctataggtgaatgtatcttcatttggaaggaattatttgttcccctgtggtctaaatcatgacagagacaagctatcatcaacgcgagacattcaatggatcccaaatattcccaccaccttgttgcgtgcaatattgaatacatcatctgacctacgttgaaggcgtgcctccagttatgataagtaacatctcggtaattcttcttaactgataatagccatctacataatacatcaaaatctatgtggaacgtttctactaaactaagatccaagaacatccgtaaacaggcagtcaaagtttcatcatcactcatacgaatgtcatcaaaggcgaagtccagaagtctaaacttaacattagacggtacccgtaaatcccttaatctttgggcctcctcaatactagcagtggcgtgataagacagcacatccaaaatgactttctgtttcgcgacggctgttgtagctgcttcgtacatcctcgtattgtggatgcccattccgcagaaaatagcgaacgcttcgacgaaattttcgtcattttgtgtgaaagggagatcattgaacttgtttattaactgtataacgccgatgattttgtttttggagtttttgatcggcatgcataggacggttttgtgcttgaagtttgtaccttcgtctgcctctgggtcgaagcgggcgtcgtcgtagacattcgtgaggtttacggtttcccctgtagtcgcgacatggcctgttattcccaagttgatcggaaatctgccttccagtggacttgttctgctctctcctgcctctataatgttaatgtcattttcttcgaaatcaaaaactctcgaaaagctagctgatgaatcttggtgcgttagaaggatctgtactctctgacattgaataagactttgtgcgtgaagtaaaatcctatacacgacgtgctctaacgtagattgctcttgaaatatcattctagccaaatccaaaagcacttggttccgttttatctctaattgtgacttttcgtaaaggtgtgcgtttctgaggccgataccacaaaactgcagatacttggaaaatacttcttcgtcggtttttgtgaagggttgttcaccgactttatttataacttgtgctactcctatcacatcaccattggtgtctttaatgggcatacacaataaagatttcgttctgtaccccgttcggttatcaacttcctggttaaaccttttgtcctggtaggcatctggaatatttacaggttctccactctccgccacgtaccctacaatacccgtaccaaggggaattttaatttcctcctttttttctatatctacaagggtacttttggagcagacatcaaacagtttggaaactagacaacgatctcggtgacccgaatctacttcacaaccactggttttgtcgccttcgaccagaaagagagaaccacggtcggcgttcagaagcatgcaaacattttgaaggatcttgtggcacaaggatctgatctccagttcgttgcatatatcttttaccaactcaaaaattaaatctttctcgtccatctgccttaattcatgccgcgacctcctctgccgccgtccaggcgtaggactacctgttcctgctggtgtttggttttcgctggttaaaaacgtgggttggccatcaatggtatttatcataggcttcagcagaccgctgcgctcgaactcgtgcgcagatattttgcgcaccggagttgtagcacccgaacttgctcttgaagggttgttgtgcgttggtgaggctaactccacgttggatgaggtaggggtggcgtgcgacacttgccattgttccactatttgtcgtgtggcttttctcaggaaataatcattaacaaaatctggatgctcatccagccaagattccatttgagcatactccggatcgtaagggtggccataaatgttgtgatggtgcctcggaagcctgctagctgaatccgaccctgtagtggagccatctaccggcattcgagtgttgtcgccagtgttgcgcaattgtaaacctttcttatgcctgcagttgaatttgcacatactgaaggattgtcccatcgatcgtagagacccccttctgatgatagatctgtgcctggtgggattcgtgcctagcgtaggggaaggggccgcccgggggcagagccccacatcgcgccaccacccctttaatgttaccgccacccctgatgctttaccaattatgcttttatcttcttccttgaaagagaaatgatgtcactggtgaaccaccgccaatgtac

SEQ ID NO: 3255 - DNA, 2897 bp, Diabrotica virgifera
aacttttaaactctttatactaattggtaatttttttgaaagttcttctctcgcggactttgcttttgatcggaactgctactggactttgacaaattgtcattgtcatctttctcttggcgttcgtttatctcaggaaccaaatgagctcgttgtgcctcttcgagccaatgcgttctgttttgtctcacgccatcgagcaagggattcaggctatctgaaagatcagcaaaggcctcatatattggcagacatattgaatcaataaagttgatctgcatcataggtaattgttcagcttttgtcctatccattatgtccattggcgtaacgttcaacttctccctctcgagatcaccttgttcaaaaaattcggcgctcactaactccgctatcctcttttctacttcccacggtttggttatggccgctaaatcacagactgtcattaacatacccctcacggagtccttatgatcctctctcttccagttcagaccatcactagctatcttaaaaaagtcaacacgtttcttaaaataaatcgccaaatctgtagctaatatggcatcttctaataccctgataactctagaatgctgttctggtgttagatttgaaagaagctggagcgaatttagaatcattagacattggtcgaaatggtggtgttccattgtagaagtggaatatagttgggctataggtgaatgtatcttcatttggaaggaattatttgttcccctgtggtctaaatcatgacagagacaagctatcatcaacgcgagacattcaatggatcccaaatattcccaccaccttgttgcgtgcaatattgaatacatcatctgacctacgttgaaggcgtgcctccagttatgataagtaacatctcggtaattcttcttaactgataatagccatctacataatacatcaaaatctatgtggaacgtttctactaaactaagatccaagaacatccgtaaacaggcagtcaaagtttcatcatcactcatacgaatgtcatcaaaggcgaagtccagaagtctaaacttaacattagacggtacccgtaaatcccttaatctttgggcctcctcaatactagcagtggcgtgataagacagcacatccaaaatgactttctgtttcgcgacggctgttgtagctgcttcgtacatcctcgtattgtggatgcccattccgcagaaaatagcgaacgcttcgacgaaattttcgtcattttgtgtgaaagggagatcattgaacttgtttattaactgtataacgccgatgattttgtttttggagtttttgatcggcatgcataggacggttttgtgcttgaagtttgtaccttcgtctgcctctgggtcgaagcgggcgtcgtcgtagacattcgtgaggtttacggtttcccctgtagtcgcgacatggcctgttattcccaagttgatcggaaatctgccttccagtggacttgttctgctctctcctgcctctataatgttaatgtcattttcttcgaaatcaaaaactctcgaaaagctagctgatgaatcttggtgcgttagaaggatctgtactctctgacattgaataagactttgtgcgtgaagtaaaatcctatacacgacgtgctctaacgtagattgctcttgaaatatcattctagccaaatccaaaagcacttggttccgttttatctctaattgtgacttttcgtaaaggtgtgcgtttctgaggccgataccacaaaactgcagatacttggaaaatacttcttcgtcggtttttgtgaagggttgttcaccgactttatttataacttgtgctactcctatcacatcaccattggtgtctttaatgggcatacacaataaagatttcgttctgtaccccgttcggttatcaacttcctggttaaaccttttgtcctggtaggcatctggaatatttacaggttctccactctccgccacgtaccctacaatacccgtaccaaggggaattttaatttcctcctttttttctatatctacaagggtacttttggagcagacatcaaacagtttggaaactagacaacgatctcggtgacccgaatctacttcacaaccactggttttgtcgccttcgaccagaaagagagaaccacggtcggcgttcagaagcatgcaaacattttgaaggatcttgtggcacaaggatctgatctccagttcgttgcatatatcttttaccaactcaaaaattaaatctttctcgtccatctgccttaattcatgccgcgacctcctctgccgccgtccaggcgtaggactacctgttcctgctggtgtttggttttcgctggttaaaaacgtgggttggccatcaatggtatttatcataggcttcagcagaccgctgcgctcgaactcgtgcgcagatattttgcgcaccggagttgtagcacccgaacttgctcttgaagggttgttgtgcgttggtgaggctaactccacgttggatgaggtaggggtggcgtgcgacacttgccattgttccactatttgtcgtgtggcttttctcaggaaataatcattaacaaaatctggatgctcatccagccaagattccatttgagcatactccggatcgtaagggtggccataaatgttgtgatggtgcctcggaagcctgctagctgaatccgaccctgtagtggagccatctaccggcattcgagtgttgtcgccagtgttgcgcaattgtaaacctaatggacaaattcctacatcttagaagccacacacacaattccacagcacatacatcattaacaaaacaaatttatatctaatcacaactttttttcatgtaaatattccgtttacaaaaattgttcggaa

SEQ ID NO: 3256 - DNA, 5082 bp, Diabrotica virgifera
  SmartBlast Evalue=7E-40; Info=Lipid phosphate phosphohydrolase 1 n=1 Tax=Camponotus floridanus RepID=E2AJW7_9HYME
gacatactatagtacaaattagtttagggtagttggaagcatttactaaaatccgcttttttatctacgaaatattaatatcctcatatttttgtataggtatagttacattatgtctttagtgtgcaccactgtttttgctgttgttctactgatatcagtatgatctttgctctattcaggactgttttctccaataattaatgcgttcgattgcatggttttttggtcaggtccagttatattttctgtctagatacgcttcacataagtactttctgtttaaaagcagtgattatttctatatatctcatttagttatcccaaaaaaagtacgatttataattttcacccacaccacttttagtgccatggtcaattattttggaatatctgaataggtgtctggatttttatatctccaagtaaatgaaaaattgtatcttgggacaattttccggttaaaaatcgagagtcaaatagaaaatagttttgatgataattgtcgttctcataaaatatagcagttaagtgtacacggtcatacagtagtatataaagtttgacatcgattctaaactaatgtggctgcagagaactacgttttcttcagaagactacttcatttataacgcaaaataactgtatttgcctcgagctatccgctctaactctaaaactctagctcatttcttatgccggatttatactcagcctttgccactgctgctgccggaaatattgcctgaaatacaatatcgacgcgagtgatgtgttcacatcagtcttcaccaatgtcctcacaactcatttaccgaacgactctcatggatggaatgtgacgacagcatcgtcttgttcacttactcaccggcttctttgccagcggcaagtgagagagagtggctgaatgtgaacacgcactcgcgctcgccctgccagtcctttgacttccgccacgaaaaaccgactttttggggagcgccgtgcaatggcaggtgcatgaggggcagggcagccagtgagctatttacacaatcacgctgcccactttcctgtccaacaggactgagtgtaaatccggtattaccggcgaaacgatcagatgtttggaattcattcagtgccgtatctataaagtgttatctgctattcagataacatgcatccgctttggttttattggcaagttttagtttatcttaatcgctaaaacgggtctttttaaaatacgaggaaagacaaaatataagcaatactttttttattttttgtttattgagggactggaggaaacccacatcatttacaccataggcggatataatcgcttgtgagcgaatgaagttaagttgaatttgaatgaagcgaatgaaatgatgtagaaaatagaaggacatatatgaggactctatttagtggttatccataaaatataaattacctacacaagtgaattgaaatatttaatttacatacacactactagttcaattctaggtttaatagttaaacaaccattaatgttcacgcatggtatgcgtttctcagtcaagaacttattgcgcaataacttacactttatacgcctttctgcaacaaccattgtagtttaggggccatagcttggtcaccgtggtcttttcaactttaatgggtcaaaccaagtttttatgtagatatttttgggtgccgattacgaatttcgatccgaatagtcaagatacattttcccaagttccaaatattccctttgagttctatcaatattgttaattcaagtttaaatgcttattgctcaaatttgcttataacccttatgattaatttacaatatttttaagaaaattataacttcaaagtgacctatatcttttacgcctaaagatacctaaagtaatttaacatattttatttgaaaatttataaattaagctttaacccttctccgggcaatacattttacttacgtaaccgggcaactcgggtccgttgggcccaccactgtggtgaatgtactattcatatttactcatatatttttaatattcttttttcattttttactctatatttaaattgtctagaataataaaaggtgctactacagtatgcagtctaccttgagggcgcgatctacctgaaggatttgccatattttcatgccatacttgtctggctttgaaggcatatactgcttgaaaggacacctacgtcgatacgtcacaagttgctcatctaccgttatgttttttcctggtaaatagtatttctgaaagttttgtttgacttgattccacacatcgcctattgctgctaatttgtcattccttcttcgttcagacctcgtgtctttatggttaaatcgaacaaatcttagcatgtttttgaatcgttttaaccccatggtagctttaaatatagtaggtccataaaattactgcaaaattccaaagtatatctacattatggatgttgtcactcagttaccctgcagttagtagtagtccaataaaggcatctagctctgtagagtcgcaatatttccagttctctatccccaggactttttcggcttcttcatttgtacacttcactatttcgttcaccattttttcgtccacaaacaaacaaaaggaatcaacaggatcatctacactttgaccaggggttaacattactttgtgcgttttgcattttattatgtcgtaagatcgcatacgtcctgtcggttatggttgacttttccagttaattccatccttagtttcaaaaattacacactctgaaatctgggaacttgtagctacacattcttcttcattatcactcaatactacttgatgatcatcctcttcacttgcttccgaaaatgatcttgaatttcagagtcactttcaatgccacctacttcaggagattcttcatcatcgaaatcctataaattattagcaatatcttgcagttctgcaggtgataatggtttttgggacattttattcgcactatctactttcactgtataattttaggagcttagttttcgacactaacatcgatatcaaacgattgatagcagatgcattatttatttcaaaatacgtataagtacctacctaacaatattattgcattccaacaatgattatcagtttttcaaattcatttgaaatagatataacacctattgtaagcatctctttgatgttcacaccaaagagatgtttacatgttacatatttagactttattattagatttccggagttataaaaaacgttaagataatccacgaaaacattacctgactgccagattaacttctgtaacaaagatttagacttaaggtataaatacaaatagggtccgacgggcccgtgttgcccctttacgtgaccaaattcctttcgacgcaataatttcaaaaatggtaatgaatattttgaatagctcatgactaagttgaaggaaacatacttctaaacaaattcagtgatgcataaaattcaatattttttttttatcagtttatgataaaagaattggtgtctcgggactgttgaacccaccttgcccggataagggttaaagaggactttgatttaaacctcattttgaaaaacctattttgaaacatgcttattttgcaactatgttgcactaatattacaatatctcgaggtcaaaatattgaattaaaattcagtaaactaaaatatgtttttttttataaagaacaaataattttatttggaaacaattttttatctcttttagtttaagaactaatgccttataaacaattaccaatccaccctcgaaatttgtaatcagcattcaaaaatacataaaaaaacttaggtgggcccataagaattgaaaaggccacgctgacccagctgtggcccctagactatcgtgccaatttttccattaaaatattattttcaataaaagcgtttaataatcacagaccgaaggcaaatttcttacacaattacgtcataatttttcaaaaaccactaatttaatgcatcccacattacttatgtaagcagaatcatagccacgacaaatcagtacaagcattatattataacactagtggcgtctttgttcttaacatctaagagtgtagtcgtcgaggcagaaacttttgtaatctcttcagttccaaaaattttcttgtgcactattttcacggtgtataatgctcctagaagtcccaggacgcatccggctaggacgtcccaccagtggtgtcgtctgtcagttattcttgtgagagagcataaaatggaccagaaaaggcacactgagatgaggaagggcttcagtaatcggccggtgtacatggtagacagtcttgtttgaatgacatatgcagaaaatgctcctataaaccacgagacggaagaatggccggatggaaaagattttgaactatctatcaggaagtatttgctatatttgggatttgtgcaaatatacgtatctacatactcgttcgcacgacagctagtcgccgtgtcaggtgcgcaaacatctaaaaagtgtggtctatgttcaccaaccaagatcttagcaaattctgtcaacagaagtaccaatatgcatccagtggcgcattctctgtagtagtaccatacttctcttacgttaatcttcttaaaactttgtttcgataatacttcagtcactaacaaagctattagaggtactagaagagatcctagtcccagaaccatcggcgaaatcacttcaccggtgtatttgtgagatatttgaggatcctggcagtagtagcccagcttgttgcccggaatgaatccatattccaataggactagtaaggcgagaactgagattgcaataacagcgttgagtataaatggaattgttattcgacgtcgcagccttatcttcgtcgattgcttggccggttgtgatttgtcggaaactgtcggcggtggaatattgactcgcactgttggcgagttcgtccgctcagatgtcgctggattcaccattcccttgttatcctgttgttttaacgagagaaaaaactttgctttgccgctg

SEQ ID NO: 3257 - DNA, 3512 bp, Diabrotica virgifera
  SmartBlast Evalue=4E-24; Info=Transposase n=1 Tax=Pectinophora gossypiella RepID=D2XZW7_PECGO
gacatactatagtacaaattagtttagggtagttggaagcatttactaaaatccgcttttttatctacgaaatattaatatcctcatatttttgtataggtatagttacattatgtctttagtgtgcaccactgtttttgctgttgttctactgatatcagtatgatctttgctctattcaggactgttttctccaataattaatgcgttcgattgcatggttttttggtcaggtccagttatattttctgtctagatacgcttcacataagtactttctgtttaaaagcagtgattatttctatatatctcatttagttatcccaaaaaaagtacgatttataattttcacccacaccacttttagtgccatggtcaattattttggaatatctgaataggtgtctggatttttatatctccaagtaaatgaaaaattgtatcttgggacaattttccggttaaaaatcgagagtcaaatagaaaatagttttgatgataattgtcgttctcataaaatatagcagttaagtgtacacggtcatacagtagtatataaagtttgacatcgattctaaactaatgtggctgcagagaactacgttttcttcagaagactacttcatttataacgcaaaataactgtatttgcctcgagctatccgctctaactctaaaactctagctcatttcttatgccggatttatactcagcctttgccactgctgctgccggaaatattgcctgaaatacaatatcgacgcgagtgatgtgttcacatcagtcttcaccaatgtcctcacaactcatttaccgaacgactctcatggatggaatgtgacgacagcatcgtcttgttcacttactcaccggcttctttgccagcggcaagtgagagagagtggctgaatgtgaacacgcactcgcgctcgccctgccagtcctttgacttccgccacgaaaaaccgactttttggggagcgccgtgcaatggcaggtgcatgaggggcagggcagccagtgagctatttacacaatcacgctgcccactttcctgtccaacaggactgagtgtaaatccggtattaccggcgaaacgatcagatgtttggaattcattcagtgccgtatctataaagtgttatctgctattcagataacatgcatccgctttggttttattggcaagttttagtttatcttaatcgctaaaacgggtctttttaaaatacgaggaaagacaaaatataagcaatactttttttattttttgtttattgagggactggaggaaacccacatcatttacaccataggcggatataatcgcttgtgagcgaatgaagttaagttgaatttgaatgaagcgaatgaaatgatgtagaaaatagaaggacatatatgaggactctatttagtggttatccataaaatataaattacctacacaagtgaattgaaatatttaatttacatacacactactagttcaattctaggtttaatagttaaacaaccattaatgttcacgcatggtatgcgtttctcagtcaagaacttattgcgcaataacttacactttatacgcctttctgcaacaaccattgtagtttaggggccatagcttggtcaccgtggtcttttcaactttaatgggtcaaaccaagtttttatgtagatatttttgggtgccgattacgaatttcgatccgaatagtcaagatacattttcccaagttccaaatattccctttgagttctatcaatattgttaattcaagtttaaatgcttattgctcaaatttgcttataacccttatgattaatttacaatatttttaagaaaattataacttcaaagtgacctatatcttttacgcctaaagatacctaaagtaatttaacatattttatttgaaaatttataaattaagctttaacccttctccgggcaatacattttacttacgtaaccgggcaactcgggtccgttgggcccaccactgtggtgaatgtactattcatatttactcatatatttttaatattcttttttcattttttactctatatttaaattgtctagaataataaaaggtgctactacagtatgcagtctaccttgagggcgcgatctacctgaaggatttgccatattttcatgccatacttgtctggctttgaaggcatatactgcttgaaaggacacctacgtcgatacgtcacaagttgctcatctaccgttatgttttttcctggtaaatagtatttctgaaagttttgtttgacttgattccacacatcgcctattgctgctaatttgtcattccttcttcgttcagacctcgtgtctttatggttaaatcgaacaaatcttagcatgtttttgaatcgttttaaccccatggtagctttaaatatagtaggtccataaaattactgcaaaattccaaagtatatctacattatggatgttgtcactcagttaccctgcagttagtagtagtccaataaaggcatctagctctgtagagtcgcaatatttccagttctctatccccaggactttttcggcttcttcatttgtacacttcactatttcgttcaccattttttcgtccacaaacaaacaaaaggaatcaacaggatcatctacactttgaccaggggttaacattactttgtgcgttttgcattttattatgtcgtaagatcgcatacgtcctgtcggttatggttgacttttccagttaattccatccttagtttcaaaaattacacactctgaaatctgggaacttgtagctacacattcttcttcattatcactcaatactacttgatgatcatcctcttcacttgcttccgaaaatgatcttgaatttcagagtcactttcaatgccacctacttcaggagattcttcatcatcgaaatcctataaattattagcaatatcttgcagttctgcaggtgataatggtttttgggacattttattcgcactatctactttcactgtataattttaggagcttagttttcgacactaacatcgatatcaaacgattgatagcagatgcattatttatttcaaaatatgtataggtacctacctaacaatatgcattccaacaatgattattatcagtttttaaaattcatttagaatagacacaacacctattgtaagcatctctttgatgttcacatcaaagagattttacattgtttgttacacgtttagactttattattggatttacggaatcataaaagtcgttaagatgatccacaaaaacattacctaactgccagattaactcctgtaacaaagattaagactttaggtataaatacaaatagggtccgacgggcccgtgttgcccctttacgtgacaaaattttttcgacgcaataatttcaaaaattataatgaatattttgaatagcccatgactatgttgaaggaagcatacttctaaacaaattcagtgatgcataaaattcaa

SEQ ID NO: 3258 - DNA, 2543 bp, Diabrotica virgifera
  SmartBlast Evalue=3E-40; Info=Lipid phosphate phosphohydrolase 1 n=1 Tax=Camponotus floridanus RepID=E2AJW7_9HYME
catatagctctgtagagtcgcaatatttccagttttctatccccaggactttttcggcttctttatttgtacactttactatttagttcacaattttttcgtccacaaacaaacaaaaggaatcaacaggatcatctacactttactttgtgcactttgctttttattatgtcgcaggatcgcatacgtcctgtcggttgtggttgacacttccagttaattccatccttagtgtcaaaaaatccatactctgaagggaacttgtagctacacattcttcttcatcatcactcaatactacttgatgatcatcctcttcacttgcttccgaaaatgatcttgaatttcagagtcactttcaatgccacctacttcaggagattcttcatcatcgaaatcctataaattattagcaatatcttgcagttctgcaggtgataatggtttttgggacattttattcgcactatctactttcactgtataattttaggagcttagttttcgacactaacatcgatatcaaacgattgatagcagatgcattatttatttcaaaatacgtataagtacctacctaacaatattattgcattccaacaatgattatcagtttttcaaattcatttgaaatagatataacacctattgtaagcatctctttgatgttcacaccaaagagatgtttacatgttacatatttagactttattattagatttccggagttataaaaaacgttaagataatccacgaaaacattacctgactgccagattaacttctgtaacaaagatttagacttaaggtataaatacaaatagggtccgacgggcccgtgttgcccctttacgtgaccaaattcctttcgacgcaataatttcaaaaatggtaatgaatattttgaatagctcatgactaagttgaaggaaacatacttctaaacaaattcagtgatgcataaaattcaatattttttttttatcagtttatgataaaagaattggtgtctcgggactgttgaacccaccttgcccggataagggttaaagaggactttgatttaaacctcattttgaaaaacctattttgaaacatgcttattttgcaactatgttgcactaatattacaatatctcgaggtcaaaatattgaattaaaattcagtaaactaaaatatgtttttttttataaagaacaaataattttatttggaaacaattttttatctcttttagtttaagaactaatgccttataaacaattaccaatccaccctcgaaatttgtaatcagcattcaaaaatacataaaaaaacttaggtgggcccataagaattgaaaaggccacgctgacccagctgtggcccctagactatcgtgccaatttttccattaaaatattattttcaataaaagcgtttaataatcacagaccgaaggcaaatttcttacacaattacgtcataatttttcaaaaaccactaatttaatgcatcccacattacttatgtaagcagaatcatagccacgacaaatcagtacaagcattatattataacactagtggcgtctttgttcttaacatctaagagtgtagtcgtcgaggcagaaacttttgtaatctcttcagttccaaaaattttcttgtgcactattttcacggtgtataatgctcctagaagtcccaggacgcatccggctaggacgtcccaccagtggtgtcgtctgtcagttattcttgtgagagagcataaaatggaccagaaaaggcacactgagatgaggaagggcttcagtaatcggccggtgtacatggtagacagtcttgtttgaatgacatatgcagaaaatgctcctataaaccacgagacggaagaatggccggatggaaaagattttgaactatctatcaggaagtatttgctatatttgggatttgtgcaaatatacgtatctacatactcgttcgcacgacagctagtcgccgtgtcaggtgcgcaaacatctaaaaagtgtggtctatgttcaccaaccaagatcttagcaaattctgtcaacagaagtaccaatatgcatccagtggcgcattctctgtagtagtaccatacttctcttacgttaatcttcttaaaactttgtttcgataatacttcagtcactaacaaagctattagaggtactagaagagatcctagtcccagaaccatcggcgaaatcacttcaccggtgtatttgtgagatatttgaggatcctggcagtagtagcccagcttgttgcccggaatgaatccatattccaataggactagtaaggcgagaactgagattgcaataacagcgttgagtataaatggaattgttattcgacgtcgcagccttatcttcgtcgattgcttggccggttgtgatttgtcggaaactgtcggcggtggaatattgactcgcactgttggcgagttcgtccgctcagatgtcgctggattcaccattcccttgttatcctgttgttttaacgagagaaaaaactttgctttgccgctg

SEQ ID NO: 3259 - DNA, 973 bp, Diabrotica virgifera
catatagctctgtagagtcgcaatatttccagttttctatccccaggactttttcggcttctttatttgtacactttactatttagttcacaattttttcgtccacaaacaaacaaaaggaatcaacaggatcatctacactttactttgtgcactttgctttttattatgtcgcaggatcgcatacgtcctgtcggttgtggttgacacttccagttaattccatccttagtgtcaaaaaatccatactctgaagggaacttgtagctacacattcttcttcatcatcactcaatactacttgatgatcatcctcttcacttgcttccgaaaatgatcttgaatttcagagtcactttcaatgccacctacttcaggagattcttcatcatcgaaatcctataaattattagcaatatcttgcagttctgcaggtgataatggtttttgggacattttattcgcactatctactttcactgtataattttaggagcttagttttcgacactaacatcgatatcaaacgattgatagcagatgcattatttatttcaaaatatgtataggtacctacctaacaatatgcattccaacaatgattattatcagtttttaaaattcatttagaatagacacaacacctattgtaagcatctctttgatgttcacatcaaagagattttacattgtttgttacacgtttagactttattattggatttacggaatcataaaagtcgttaagatgatccacaaaaacattacctaactgccagattaactcctgtaacaaagattaagactttaggtataaatacaaatagggtccgacgggcccgtgttgcccctttacgtgacaaaattttttcgacgcaataatttcaaaaattataatgaatattttgaatagcccatgactatgttgaaggaagcatacttctaaacaaattcagtgatgcataaaattcaa

SEQ ID NO: 3260 - DNA, 3158 bp, Diabrotica virgifera
  SmartBlast Evalue=1E-79; Info=Ubiquitin-conjugating enzyme E2 J1 n=2 Tax=Formicidae RepID=E2BDY0_9HYME
tgacatggttactactgacgtgtgacaaatgtttgtttttagtttgtttagattaaaggaataattttggagaaattgacattatcaaattagataaggtctatcagtatatttagatatatcctggtgttttgtaaatttcagtgtataagcagcaaaatgtctttagaaagtaaatataaccttaaaagtcctggtgtaaaacgtttaatgagagaggcaatagaattagctaatcccacagaagagtattttgcatgtcctttagaagataatctgtttgagtggcattttacagtgaggggtcctccagggacagaatttgagggtggattctatcatggaagaattttacttccctcacaataccctatgcaacctcccaacattattttgttgacaccaaatggaagatttgaggttaacaagaaaatatgtttatcaatatcaggacaccatcctgaaagttggcaaccttcttggtcaatacgtactgctcttctggcactaatagcgtttatgcccactccagcatccggaacaattggttctttagattacacagcagaagagagacaagtattagcaaaaaagacaaaaaattgggaatgttcaacctgcggtaagatatcagaaaagttgtctacaggagggcatgtacttagtccaaaattgacacaagaagaaagtaccttaataaagcagatagcgttgaaggcagaagaggacgcgaataagaaagaaccccatagcgaaagtaaaagaagagaagaaagtacatcgggagagagagatgatagtgaactcaggcaaagaatttctacgcaagtaaatgaatctgttgatgaaagtattttagcacctgcggccgatcctttattagaagattcaattcaaagaagtaatacggataaattatggacagcagcaatctggatattaataaccataatagctctcctgctaatacgacggatttttttcctataagccaatagcagtataaaacattgtatctctttaaatagaaacttttataccaacatgaaagcagtgtaattaggacacagtgcactgtattttataagtaaagactaaagacaaacatttgtatattgtatgtcgtcagatctcggaatttgacattatgctgagtattaggatttcagttaactgtatagtctttaaattctttaataagtaaaaagttcatttttattctcaataatgtttatataggaaggtatttggatggacaggattagaaaggaatcatcatcatcatcattggctctacaactctgctgggtcttgggctgttttccaatttcgtactcttaacaggaagggaaaggaatagttctcaataattattttgcaacataaaacggtttaacctacgtatatcttgctaatatcttgtgaattcttgcaagtgaacattttgttgtcatgatttctaaaatactgacaatacagagtattttcgaggtatgtctctaagatgaagttctttaaggaattctctttaataataatctttttctcattctgtatatgcttcatttctgattggtttttgatgacatagataatatacgtgggcagtccgataagtacttagcctacaaaagaaaaaggaacattttggaaaagtggcaatttatttctctacatagtctccttttagctcgatacacttgacccagcgatgctccaacttctttaacccgtctgaaaaataccttttctcgaggtctgcaaaataggcttcggtggcggcgatgacctcctcattcgacttaaatttctgcccagcgagtgtcttttttaagtttggaaacaaatagtagtcgcacgaggccaaatctggagaatacggtggatggggcaacatttcgtagcccaattcgaccaatttggtcatggcgacggcagaggtgtgagccggtgcgttgtcatggtgggagagcacttttcctttgccaaatggggtcgttttttcttcaattcggcgtcgaatcggcccagtaattcggcataatagggccctgtgatcgttttgcccttccccaagtagtcgatgtagatcacaccttgtgaatcacagaaaatgctggccatcacctttccggccgattggacagtcttcgccttcttcggagcacggtcgccgggtgctgtccactctctcgactgtttcttggtttctggtgtataccagtgaatccatgtttcgtcgacggttatgaaacgacgttaaagctcctttgtatcacacttaaatagtgtcaaacactgctctgaagtggtctatcggttacgcttattgtctaaagtgggcaaacgcggcacccatcgcgccgacagctttctcatgcccaaaagttcatgcaggatatgacctacgcggtcttttgagatgcctactgtgtcagctatctcgcgcaccttcagtcggcggtctgccaatacaagatcgtggatttttgtcacgttattctcgtggtagccattttcggggcacctacgcgtggctcatcaaaaaccgacgttcgtccacgttgaaactcattaaaccaatttttgacagttgccctcgaaggagagagtcaccgtacacagcatccaagcgctctttgatttcgctgcgtgatttccctttcaaaaacaagaatcgaatcaccgacgatattgctctttttccattttattaaaatccgcacacacgctgactttcacacgcaatcacaacaatactataatttcgatttggctgaaattttgacattagccatctacgagaacgcattaaatgacagtacacttcatttgcgatagtggcgccatcgggcggagaggctaagtacttatcggactgccctagtagtttcaatagtttcccgccaagtttgttgaccgtgagccgtcagctgtcttctgtaatctcttgttgataaagttgcttatgacttcatcttgtgggatgtatattcttctagtatgtttatactgaaaagcagataactgaaacggccatggttatttgcactgtcaatcgaagagttgatagtttccataaatgttcgcgtttgtcattcctcaagttgatgtaagctgacatttgttacttcagctataccatttttctttcgata

SEQ ID NO: 3261 - DNA, 2991 bp, Diabrotica virgifera
  SmartBlast Evalue=1E-79; Info=Ubiquitin-conjugating enzyme E2 J1 n=2 Tax=Formicidae RepID=E2BDY0_9HYME
tgacatggttactactgacgtgtgacaaatgtttgtttttagtttgtttagattaaaggaataattttggagaaattgacattatcaaattagataaggtctatcagtatatttagatatatcctggtgttttgtaaatttcagtgtataagcagcaaaatgtctttagaaagtaaatataaccttaaaagtcctggtgtaaaacgtttaatgagagaggcaatagaattagctaatcccacagaagagtattttgcatgtcctttagaagataatctgtttgagtggcattttacagtgaggggtcctccagggacagaatttgagggtggattctatcatggaagaattttacttccctcacaataccctatgcaacctcccaacattattttgttgacaccaaatggaagatttgaggttaacaagaaaatatgtttatcaatatcaggacaccatcctgaaagttggcaaccttcttggtcaatacgtactgctcttctggcactaatagcgtttatgcccactccagcatccggaacaattggttctttagattacacagcagaagagagacaagtattagcaaaaaagacaaaaaattgggaatgttcaacctgcggtaagatatcagaaaagttgtctacaggagggcatgtacttagtccaaaattgacacaagaagaaagtaccttaataaagcagatagcgttgaaggcagaagaggacgcgaataagaaagaaccccatagcgaaagtaaaagaagagaagaaagtacatcgggagagagagatgatagtgaactcaggcaaagaatttctacgcaagtaaatgaatctgttgatgaaagtattttagcacctgcggccgatcctttattagaagattcaattcaaagaagtaatacggataaattatggacagcagcaatctggatattaataaccataatagctctcctgctaatacgacggatttttttcctataagccaatagcagtataaaacattgtatctctttaaatagaaacttttataccaacatgaaagcagtgtaattaggacacagtgcactgtattttataagtaaagactaaagacaaacatttgtatattgtatgtcgtcagatctcggaatttgacattatgctgagtattaggatttcagttaactgtatagtctttaaattctttaataagtaaaaagttcatttttattctcaataatgtttatataggaaggtatttggatggacaggattagaaaggaatcatcatcatcatcattggctctacaactctgctgggtcttgggctgttttccaatttcgtactcttaacaggaagggaaaggaatagttctcaataattattttgcaacataaaacggtttaacctacgtatatcttgctaatatcttgtgaattcttgcaagtgaacattttgttgtcatgatttctaaaatactgacaatacagagtattttcgaggtatgtctctaagatgaagttctttaaggaattctctttaataataatctttttctcattctgtatatgcttcatttctgattggtttttgatgacatagataatatacgtgggcagtccgataagtacttagcctacaaaagaaaaaggaacattttggaaaagtggcaatttatttctctacatagtctccttttagctcgatacacttgacccagcgatgctccaacttctttaacccgtctgaaaaataccttttctcgaggtctgcaaaataggcttcggtggcggcgatgacctcctcattcgacttaaatttctgcccagcgagtgtcttttttaagtttggaaacaaatagtagtcgcacgaggccaaatctggagaatacggtggatggggcaacatttcgtagcccaattcgaccaatttggtcatggcgacggcagaggtgtgagccggtgcgttgtcatggtgggagagcacttttcctttgccaaatggggtcgttttttcttcaattcggcgtcgaatcggcccagtaattcggcataatagggccctgtgatcgttttgcccttccccaagtagtcgatgtagatcacaccttgtgaatcacagaaaatgctggccatcacctttccggccgattggacagtcttcgccttcttcggagcacggtcgccgggtgctgtccactctctcgactgtttcttggtttctggtgtataccagtgaatccatgtttcgtcgacggttatgaaacgacgttaaagctcctttgtatcacacttaaatagtgtcaaacactgctctgaagtggtctatcggttacgcttattgtctaaagtgggcaaacgcggcacccatcgcgccgacagctttctcatgcccaaaagttcatgcaggatatgacctacgcggtcttttgagatgcctactgtgtcagctatctcgcgcaccttcagtcggcggtctgccaatacaagatcgtggatttttgtcacgttattctcgtggtagccattttcggggcacctacgcgtggctcatcaaaaaccgacgttcgtccacgttgaaactcattaaaccaatttttgacagttgccctcgaaggagagagtcaccgtacacagcatccaagcgctctttgatttcgctgcgtgatttccctttcaaaaacaagaatcgaatcaccgacgatattgctctttttccattttattaaaatccgcacacacgctgactttcacacgcaatcacaacaatactataatttcgatttggctgaaattttgacattagccatctacgagaacgcattaaatgacagtacacttcatttgcgatagtggcgccatcgggcggagaggctaagtacttatcggactgccctagtagtattaaacatgagtaacagccggcttcagaatttttaaaatcttattaaaataacgttatatctcaacaaacatggaaaataaggccttgaaagttgccct

SEQ ID NO: 3262 - DNA, 2921 bp, Diabrotica virgifera
  SmartBlast Evalue=5E-61; Info=Transposase n=5 Tax=Heterotremata RepID=B3CK12_9EUCA
gctgttgtagtggatatctttaactaaaagaagttaggaatagcaataaaagtataattagcagaagtatatctctgactaattttgtatgaaataatttttaatatattttttcataaaagtgactgcaagtcttaggcaacacttaaaactgggacctccttcccaaatggaagatttgaggttaacaagaaaatatgtttatcaatatcaggacaccatcctgaaagttggcaaccttcttggtcaatacgtactgctcttctggcactaatagcgtttatgcccactccagcatccggaacaattggttctttagattacacagcagaagagagacaagtattagcaaaaaagacaaaaaattgggaatgttcaacctgcggtaagatatcagaaaagttgtctacaggagggcatgtacttagtccaaaattgacacaagaagaaagtaccttaataaagcagatagcgttgaaggcagaagaggacgcgaataagaaagaaccccatagcgaaagtaaaagaagagaagaaagtacatcgggagagagagatgatagtgaactcaggcaaagaatttctacgcaagtaaatgaatctgttgatgaaagtattttagcacctgcggccgatcctttattagaagattcaattcaaagaagtaatacggataaattatggacagcagcaatctggatattaataaccataatagctctcctgctaatacgacggatttttttcctataagccaatagcagtataaaacattgtatctctttaaatagaaacttttataccaacatgaaagcagtgtaattaggacacagtgcactgtattttataagtaaagactaaagacaaacatttgtatattgtatgtcgtcagatctcggaatttgacattatgctgagtattaggatttcagttaactgtatagtctttaaattctttaataagtaaaaagttcatttttattctcaataatgtttatataggaaggtatttggatggacaggattagaaaggaatcatcatcatcatcattggctctacaactctgctgggtcttgggctgttttccaatttcgtactcttaacaggaagggaaaggaatagttctcaataattattttgcaacataaaacggtttaacctacgtatatcttgctaatatcttgtgaattcttgcaagtgaacattttgttgtcatgatttctaaaatactgacaatacagagtattttcgaggtatgtctctaagatgaagttctttaaggaattctctttaataataatctttttctcattctgtatatgcttcatttctgattggtttttgatgacatagataatatacgtgggcagtccgataagtacttagcctacaaaagaaaaaggaacattttggaaaagtggcaatttatttctctacatagtctccttttagctcgatacacttgacccagcgatgctccaacttctttaacccgtctgaaaaataccttttctcgaggtctgcaaaataggcttcggtggcggcgatgacctcctcattcgacttaaatttctgcccagcgagtgtcttttttaagtttggaaacaaatagtagtcgcacgaggccaaatctggagaatacggtggatggggcaacatttcgtagcccaattcgaccaatttggtcatggcgacggcagaggtgtgagccggtgcgttgtcatggtgggagagcacttttcctttgccaaatggggtcgttttttcttcaattcggcgtcgaatcggcccagtaattcggcataatagggccctgtgatcgttttgcccttccccaagtagtcgatgtagatcacaccttgtgaatcacagaaaatgctggccatcacctttccggccgattggacagtcttcgccttcttcggagcacggtcgccgggtgctgtccactctctcgactgtttcttggtttctggtgtataccagtgaatccatgtttcgtcgacggttatgaaacgacgttaaagctcctttgtatcacacttaaatagtgtcaaacactgctctgaagtggtctatcggttacgcttattgtctaaagtgggcaaacgcggcacccatcgcgccgacagctttctcatgcccaaaagttcatgcaggatatgacctacgcggtcttttgagatgcctactgtgtcagctatctcgcgcaccttcagtcggcggtctgccaatacaagatcgtggatttttgtcacgttattctcgtggtagccattttcggggcacctacgcgtggctcatcaaaaaccgacgttcgtccacgttgaaactcattaaaccaatttttgacagttgccctcgaaggagagagtcaccgtacacagcatccaagcgctctttgatttcgctgcgtgatttccctttcaaaaacaagaatcgaatcaccgacgatattgctctttttccattttattaaaatccgcacacacgctgactttcacacgcaatcacaacaatactataatttcgatttggctgaaattttgacattagccatctacgagaacgcattaaatgacagtacacttcatttgcgatagtggcgccatcgggcggagaggctaagtacttatcggactgccctagtagtttcaatagtttcccgccaagtttgttgaccgtgagccgtcagctgtcttctgtaatctcttgttgataaagttgcttatgacttcatcttgtgggatgtatattcttctagtatgtttatactgaaaagcagataactgaaacggccatggttatttgcactgtcaatcgaagagttgatagtttccataaatgttcgcgtttgtcattcctcaagttgatgtaagctgacatttgttacttcagctataccatttttctttcgata

SEQ ID NO: 3263 - DNA, 2754 bp, Diabrotica virgifera
  SmartBlast Evalue=5E-61; Info=Transposase n=5 Tax=Heterotremata RepID=B3CK12_9EUCA
gctgttgtagtggatatctttaactaaaagaagttaggaatagcaataaaagtataattagcagaagtatatctctgactaattttgtatgaaataatttttaatatattttttcataaaagtgactgcaagtcttaggcaacacttaaaactgggacctccttcccaaatggaagatttgaggttaacaagaaaatatgtttatcaatatcaggacaccatcctgaaagttggcaaccttcttggtcaatacgtactgctcttctggcactaatagcgtttatgcccactccagcatccggaacaattggttctttagattacacagcagaagagagacaagtattagcaaaaaagacaaaaaattgggaatgttcaacctgcggtaagatatcagaaaagttgtctacaggagggcatgtacttagtccaaaattgacacaagaagaaagtaccttaataaagcagatagcgttgaaggcagaagaggacgcgaataagaaagaaccccatagcgaaagtaaaagaagagaagaaagtacatcgggagagagagatgatagtgaactcaggcaaagaatttctacgcaagtaaatgaatctgttgatgaaagtattttagcacctgcggccgatcctttattagaagattcaattcaaagaagtaatacggataaattatggacagcagcaatctggatattaataaccataatagctctcctgctaatacgacggatttttttcctataagccaatagcagtataaaacattgtatctctttaaatagaaacttttataccaacatgaaagcagtgtaattaggacacagtgcactgtattttataagtaaagactaaagacaaacatttgtatattgtatgtcgtcagatctcggaatttgacattatgctgagtattaggatttcagttaactgtatagtctttaaattctttaataagtaaaaagttcatttttattctcaataatgtttatataggaaggtatttggatggacaggattagaaaggaatcatcatcatcatcattggctctacaactctgctgggtcttgggctgttttccaatttcgtactcttaacaggaagggaaaggaatagttctcaataattattttgcaacataaaacggtttaacctacgtatatcttgctaatatcttgtgaattcttgcaagtgaacattttgttgtcatgatttctaaaatactgacaatacagagtattttcgaggtatgtctctaagatgaagttctttaaggaattctctttaataataatctttttctcattctgtatatgcttcatttctgattggtttttgatgacatagataatatacgtgggcagtccgataagtacttagcctacaaaagaaaaaggaacattttggaaaagtggcaatttatttctctacatagtctccttttagctcgatacacttgacccagcgatgctccaacttctttaacccgtctgaaaaataccttttctcgaggtctgcaaaataggcttcggtggcggcgatgacctcctcattcgacttaaatttctgcccagcgagtgtcttttttaagtttggaaacaaatagtagtcgcacgaggccaaatctggagaatacggtggatggggcaacatttcgtagcccaattcgaccaatttggtcatggcgacggcagaggtgtgagccggtgcgttgtcatggtgggagagcacttttcctttgccaaatggggtcgttttttcttcaattcggcgtcgaatcggcccagtaattcggcataatagggccctgtgatcgttttgcccttccccaagtagtcgatgtagatcacaccttgtgaatcacagaaaatgctggccatcacctttccggccgattggacagtcttcgccttcttcggagcacggtcgccgggtgctgtccactctctcgactgtttcttggtttctggtgtataccagtgaatccatgtttcgtcgacggttatgaaacgacgttaaagctcctttgtatcacacttaaatagtgtcaaacactgctctgaagtggtctatcggttacgcttattgtctaaagtgggcaaacgcggcacccatcgcgccgacagctttctcatgcccaaaagttcatgcaggatatgacctacgcggtcttttgagatgcctactgtgtcagctatctcgcgcaccttcagtcggcggtctgccaatacaagatcgtggatttttgtcacgttattctcgtggtagccattttcggggcacctacgcgtggctcatcaaaaaccgacgttcgtccacgttgaaactcattaaaccaatttttgacagttgccctcgaaggagagagtcaccgtacacagcatccaagcgctctttgatttcgctgcgtgatttccctttcaaaaacaagaatcgaatcaccgacgatattgctctttttccattttattaaaatccgcacacacgctgactttcacacgcaatcacaacaatactataatttcgatttggctgaaattttgacattagccatctacgagaacgcattaaatgacagtacacttcatttgcgatagtggcgccatcgggcggagaggctaagtacttatcggactgccctagtagtattaaacatgagtaacagccggcttcagaatttttaaaatcttattaaaataacgttatatctcaacaaacatggaaaataaggccttgaaagttgccct

SEQ ID NO: 3264 - DNA, 4086 bp, Diabrotica virgifera
  SmartBlast Evalue=1E-172; Info=Cytochrome P450 9Z4 n=1 Tax= Tribolium castaneum RepID=D6WWU4_TRICA
cttctctgccactcattcaaggtaacagataattaaatagaagcaaactaatattcattaatttactattattatttaactatcagtgtaatttgttattcattctgtgtttgtgaaatatattatgagtgcctaaccaaaagaaaggataagctacaaccaacatgttgcaattaatattagtggctgtggtgataggagttctattttattactatggcgttaagccccttagctattggaaggaaagaggtgtaaaacagacaaatccgtggtggttatgtggagataactggggggtggttcttcaaagacaatctttcccagatttggttcttaagggatacaagacagcacctgaagctaggtatagtggaatgtatcaatttactttaccaacacttgtgataacagacatagacttaatcaaacaattaggggtaaaagattttgattactttatggaccaccgttcttttatcccggagaaagctgatcctctatggggtaaaaacttgttcgcccttacgggacaaagatggaaggaaatgaggccaatacttagcccatcgttcacaagcagcaaaatgaaatcgatgtttatgctgatgtcagaatgtggcgaaaagttggtcaaattttttatggaaaaagaccagaatgctatagaaattgaaatgaaagacacattaacgcgttatactaatgatgttattgcctctgcagcttttggagtacagattgattctttaaacaacactgaaaatgaattctatctcatgggaaaaaatgcaaccaatttccgtggtttctggaggactatgaagttgtttggatatatgattataccaaaaatatttgagttctttaaagtgacattgtttgatatgaacgttcgacgattttttactgaattgattagtggaacaataaagatcagggaagagaaaggcattattcgtcccgatatgattcacctactcatgcaagcaagaaaaggaatccatcaaaaagaagaaaaggttgttgatgctggatttgctgtagtacaagaatcgaatttagaatcaaaagtagttgcgacagaaatgaccgacttagacatctgcgctcaagcattgattttcttctttgctggatttgagacggtctcgtcaaccatgtgctttgtggctcatgaattggcctgtaatcctgatgtccaatcgagattaagagatgaaatacgtgaaacactcgatcaatgtaatggaaaagtaacctacgaagctatgttgaaaatgaaatatctggatatggtaatatcagaatccatgaggaaatggccagcagttatagctgttgatcgaatttgcaccaaaccatacacactcgaaccagcaacactcgatgagaagcccctccacttagacaaaggcaccataatctggttccccatttacggtctccaccgcgatcctaaacactacccagacccagaacggtttgatcctgaaagattcagcgatgaaaacaaaggaaacatcaatccatacgcttaccttccatttggagtcggccctagaaactgcatcggttccagatttgctttattagagatgaaagtattgtttttccatttgttagccaattttgagattgtgccaggtccaaagacggaaattcctttgcggatttgtaagaaacaattcggtttgactgcagaaaatggtttttggttcaacttgaagaaactgaagaattagtctttgatatgtttgataaaagtcttgataaaatattgtttaaccatatctacttatttggtgtaatgtattttctagtcataattcttttaaactttttcttaacgtttcagcgggcgcaccctataatttcacatgagaagacgcgtgtcgtagattatacgtctttgcgtaaataatgtcttcttcaaataaatgtttggaaattgttacaatgatattttcttcttcttcctgcttccttataggctcgcatctgttctatcttcggatgcctcttcatcagatatccgcaggttgtccctccatcttttccttggccttcctacactccttcggccgtttggtgatctatcttgtgcaatctttactagtcttccttctcccattctgctcatatggctatatcattctttttttaaactacaggttggctgtctagcatatagttaaaaaactctaatatgaagtgacaccacttctatgtaataggtatatttattgaaatttttgaaaaatcacaatggattgaataaaatatgtccaattcagaacgttttcggacctatcagtccatcatcagtgaattcaaatacttgctaaataatggaaaacgttctgaattggacataatttattcaatgcattggagttttttaagattttaataaattacctattacatggaggtggtttttgcttcatgttagagttttttctttttttcttttcagtatccagtcattgatattctatatattacagctttgcgtgaggtctgtgctacgttgtctatcccataatggttttcctgtgatatcttggactattttcttttcacacgtttccatcagtctttttgtccttgtagtgtcaggtcttgtttccgcagtgtaagtcataattggcctaactactgtcctatagatattggcctttgtttctgtccgtagatgtgtgtcgcgccagatagtgtgtttaagacatcctgctattctgttagctttgtcacagaataactaaccatacagaagcgaaactgactgtcgtttccattgattgtgtgggaaccgaaatatttgaccttgagccctagttacagaatggaacttgatgttctaaggaatagaccaattcaaatgatgtgatattttgacaagtagttattaattaattttgaaatataaaatttaactataaaatataaataaactataaaataaaacatatataaatataaaatttaactaaaaacaactgtcactgtcagtctaaaagtgaggttataccagttacattgacacatgagcatgaaaattatgttaccattttgggcctgagtttcgcttctgtatggttagttattctgtggctttgttaacttgttgggcaacttccgcttctgtgtctccataactcccaggtaactgatacttctttcttgctggattattttgctgtctacttccagcttgcaccttattggatctttagagattaccatacatgttgttttatttggtgatattatcatgctgaactttcttgctgttatattaaactgatatgaagtctctgaaggtcatcttcactctctgcaataaatatgacatcatctgcatagcatactatagagataatttcttcacccattctgtaccctatactcaggtttttgactttatgaataatttcatccatgatgaggttaaacagcaacgggctcaatgagtctccatgtcgtatgcctttttccactggtatcggctgtgttagtttgttattaacacaaggatataacaaattatattttacgatattttaaactaatattattttactttttctgaactttctgtaaatttcccgacaattatgatttataatgaactgttttaaatgggaagtgagccacaattttgccagaaagaatgaatttattaacgtttcgacgcccaagttaataaattcatttttttggtgaattgtggcttgtttcccatttaaaatagttcattataaaaatgccacaaggaaatagcttcagaacaaaattatgatttaacaccttgactgcgttatgagacaaatagacctcggtattagattaacggttggctgtggcgactttgtcgtaatacacggtggcaaatgtgttatacgggacataacgcactcaacgtaagtttatagatatcgctaaacgcagtcaaggtgttaattagtatattatattaataggcacgtaagtaatattttctgatgtaaggtctagtattaagtagagcattgtataaagttcattttgatttaaagaagaataaaaacgttaatagtgtta

SEQ ID NO: 3265 - DNA, 3717 bp, Diabrotica virgifera
  SmartBlast Evalue=1E-172; Info=Cytochrome P450 9Z4 n=1 Tax= Tribolium castaneum RepID=D6WWU4_TRICA
cttctctgccactcattcaaggtaacagataattaaatagaagcaaactaatattcattaatttactattattatttaactatcagtgtaatttgttattcattctgtgtttgtgaaatatattatgagtgcctaaccaaaagaaaggataagctacaaccaacatgttgcaattaatattagtggctgtggtgataggagttctattttattactatggcgttaagccccttagctattggaaggaaagaggtgtaaaacagacaaatccgtggtggttatgtggagataactggggggtggttcttcaaagacaatctttcccagatttggttcttaagggatacaagacagcacctgaagctaggtatagtggaatgtatcaatttactttaccaacacttgtgataacagacatagacttaatcaaacaattaggggtaaaagattttgattactttatggaccaccgttcttttatcccggagaaagctgatcctctatggggtaaaaacttgttcgcccttacgggacaaagatggaaggaaatgaggccaatacttagcccatcgttcacaagcagcaaaatgaaatcgatgtttatgctgatgtcagaatgtggcgaaaagttggtcaaattttttatggaaaaagaccagaatgctatagaaattgaaatgaaagacacattaacgcgttatactaatgatgttattgcctctgcagcttttggagtacagattgattctttaaacaacactgaaaatgaattctatctcatgggaaaaaatgcaaccaatttccgtggtttctggaggactatgaagttgtttggatatatgattataccaaaaatatttgagttctttaaagtgacattgtttgatatgaacgttcgacgattttttactgaattgattagtggaacaataaagatcagggaagagaaaggcattattcgtcccgatatgattcacctactcatgcaagcaagaaaaggaatccatcaaaaagaagaaaaggttgttgatgctggatttgctgtagtacaagaatcgaatttagaatcaaaagtagttgcgacagaaatgaccgacttagacatctgcgctcaagcattgattttcttctttgctggatttgagacggtctcgtcaaccatgtgctttgtggctcatgaattggcctgtaatcctgatgtccaatcgagattaagagatgaaatacgtgaaacactcgatcaatgtaatggaaaagtaacctacgaagctatgttgaaaatgaaatatctggatatggtaatatcagaatccatgaggaaatggccagcagttatagctgttgatcgaatttgcaccaaaccatacacactcgaaccagcaacactcgatgagaagcccctccacttagacaaaggcaccataatctggttccccatttacggtctccaccgcgatcctaaacactacccagacccagaacggtttgatcctgaaagattcagcgatgaaaacaaaggaaacatcaatccatacgcttaccttccatttggagtcggccctagaaactgcatcggttccagatttgctttattagagatgaaagtattgtttttccatttgttagccaattttgagattgtgccaggtccaaagacggaaattcctttgcggatttgtaagaaacaattcggtttgactgcagaaaatggtttttggttcaacttgaagaaactgaagaattagtctttgatatgtttgataaaagtcttgataaaatattgtttaaccatatctacttatttggtgtaatgtattttctagtcataattcttttaaactttttcttaacgtttcagcgggcgcaccctataatttcacatgagaagacgcgtgtcgtagattatacgtctttgcgtaaataatgtcttcttcaaataaatgtttggaaattgttacaatgatattttcttcttcttcctgcttccttataggctcgcatctgttctatcttcggatgcctcttcatcagatatccgcaggttgtccctccatcttttccttggccttcctacactccttcggccgtttggtgatctatcttgtgcaatctttactagtcttccttctcccattctgctcatatggctatatcattctttttttaaactacaggttggctgtctagcatatagttaaaaaactctaatatgaagtgacaccacttctatgtaataggtatatttattgaaatttttgaaaaatcacaatggattgaataaaatatgtccaattcagaacgttttcggacctatcagtccatcatcagtgaattcaaatacttgctaaataatggaaaacgttctgaattggacataatttattcaatgcattggagttttttaagattttaataaattacctattacatggaggtggtttttgcttcatgttagagttttttctttttttcttttcagtatccagtcattgatattctatatattacagctttgcgtgaggtctgtgctacgttgtctatcccataatggttttcctgtgatatcttggactattttcttttcacacgtttccatcagtctttttgtccttgtagtgtcaggtcttgtttccgcagtgtaagtcataattggcctaactactgtcctatagatattggcctttgtttctgtccgtagatgtgtgtcgcgccagatagtgtgtttaagacatcctgctattctgttagctttgttaacttgttgggcaacttccgcttctgtgtctccataactcccaggtaactgatacttctttcttgctggattattttgctgtctacttccagcttgcaccttattggatctttagagattaccatacatgttgttttatttggtgatattatcatgctgaactttcttgctgttatattaaactgatatgaagtctctgaaggtcatcttcactctctgcaataaatatgacatcatctgcatagcatactatagagataatttcttcacccattctgtaccctatactcaggtttttgactttatgaataatttcatccatgatgaggttaaacagcaacgggctcaatgagtctccatgtcgtatgcctttttccactggtatcggctgtgttagtttgttattaacacaaggatataacaaattatattttacgatattttaaactaatattattttactttttctgaactttctgtaaatttcccgacaattatgatttataatgaactgttttaaatgggaagtgagccacaattttgccagaaagaatgaatttattaacgtttcgacgcccaagttaataaattcatttttttggtgaattgtggcttgtttcccatttaaaatagttcattataaaaatgccacaaggaaatagcttcagaacaaaattatgatttaacaccttgactgcgttatgagacaaatagacctcggtattagattaacggttggctgtggcgactttgtcgtaatacacggtggcaaatgtgttatacgggacataacgcactcaacgtaagtttatagatatcgctaaacgcagtcaaggtgttaattagtatattatattaataggcacgtaagtaatattttctgatgtaaggtctagtattaagtagagcattgtataaagttcattttgatttaaagaagaataaaaacgttaatagtgtta

SEQ ID NO: 3266 - DNA, 1733 bp, Diabrotica virgifera
  SmartBlast Evalue=0.000000007; Info=Reverse transcriptase n=2 Tax=Bombyx mori RepID=Q5K671_BOMMO
tcgtataccctccaagtacttgcacaccgcgaatactccttcgaccgtttggtgatctgtctcgtactatctttatcagtcttccttttctcattctatttatatggctataccattctttttttatgtccagtcatttatattctctatattacagctttacctgaggtctgtgctacgttctctctcccataatgattttcctgtgatatctcggactattttcatttcacacgtttccatcagtctttttgtccttgtagtgtcaggtcttgtttccgcagtgtaagtcataattggcctaactactgtcctatagatattggcctttgtttctgtccgtagatgtgtgtcgcgccagatagtgtgtttaagacatcctgctattctgttagctttgtcacagaataactaaccatacagaagcgaaactgactgtcgtttccattgattgtgtgggaaccgaaatatttgaccttgagccctagttacagaatggaacttgatgttctaaggaatagaccaattcaaatgatgtgatattttgacaagtagttattaattaattttgaaatataaaatttaactataaaatataaataaactataaaataaaacatatataaatataaaatttaactaaaaacaactgtcactgtcagtctaaaagtgaggttataccagttacattgacacatgagcatgaaaattatgttaccattttgggcctgagtttcgcttctgtatggttagttattctgtggctttgttaacttgttgggcaacttccgcttctgtgtctccataactcccaggtaactgatacttctttcttgctggattattttgctgtctacttccagcttgcaccttattggatctttagagattaccatacatgttgttttatttggtgatattatcatgctgaactttcttgctgttatattaaactgatatgaagtctctgaaggtcatcttcactctctgcaataaatatgacatcatctgcatagcatactatagagataatttcttcacccattctgtaccctatactcaggtttttgactttatgaataatttcatccatgatgaggttaaacagcaacgggctcaatgagtctccatgtcgtatgcctttttccactggtatcggctgtgttagtttgttattaacacaaggatataacaaattatattttacgatattttaaactaatattattttactttttctgaactttctgtaaatttcccgacaattatgatttataatgaactgttttaaatgggaagtgagccacaattttgccagaaagaatgaatttattaacgtttcgacgcccaagttaataaattcatttttttggtgaattgtggcttgtttcccatttaaaatagttcattataaaaatgccacaaggaaatagcttcagaacaaaattatgatttaacaccttgactgcgttatgagacaaatagacctcggtattagattaacggttggctgtggcgactttgtcgtaatacacggtggcaaatgtgttatacgggacataacgcactcaacgtaagtttatagatatcgctaaacgcagtcaaggtgttaattagtatattatattaataggcacgtaagtaatattttctgatgtaaggtctagtattaagtagagcattgtataaagttcattttgatttaaagaagaataaaaacgttaatagtgtta

SEQ ID NO: 3267 - DNA, 1364 bp, Diabrotica virgifera
  SmartBlast Evalue=7E-10; Info=Endonuclease-reverse transcriptase n=1 Tax=Schistosoma japonicum RepID=C7C208_SCHJA
tcgtataccctccaagtacttgcacaccgcgaatactccttcgaccgtttggtgatctgtctcgtactatctttatcagtcttccttttctcattctatttatatggctataccattctttttttatgtccagtcatttatattctctatattacagctttacctgaggtctgtgctacgttctctctcccataatgattttcctgtgatatctcggactattttcatttcacacgtttccatcagtctttttgtccttgtagtgtcaggtcttgtttccgcagtgtaagtcataattggcctaactactgtcctatagatattggcctttgtttctgtccgtagatgtgtgtcgcgccagatagtgtgtttaagacatcctgctattctgttagctttgttaacttgttgggcaacttccgcttctgtgtctccataactcccaggtaactgatacttctttcttgctggattattttgctgtctacttccagcttgcaccttattggatctttagagattaccatacatgttgttttatttggtgatattatcatgctgaactttcttgctgttatattaaactgatatgaagtctctgaaggtcatcttcactctctgcaataaatatgacatcatctgcatagcatactatagagataatttcttcacccattctgtaccctatactcaggtttttgactttatgaataatttcatccatgatgaggttaaacagcaacgggctcaatgagtctccatgtcgtatgcctttttccactggtatcggctgtgttagtttgttattaacacaaggatataacaaattatattttacgatattttaaactaatattattttactttttctgaactttctgtaaatttcccgacaattatgatttataatgaactgttttaaatgggaagtgagccacaattttgccagaaagaatgaatttattaacgtttcgacgcccaagttaataaattcatttttttggtgaattgtggcttgtttcccatttaaaatagttcattataaaaatgccacaaggaaatagcttcagaacaaaattatgatttaacaccttgactgcgttatgagacaaatagacctcggtattagattaacggttggctgtggcgactttgtcgtaatacacggtggcaaatgtgttatacgggacataacgcactcaacgtaagtttatagatatcgctaaacgcagtcaaggtgttaattagtatattatattaataggcacgtaagtaatattttctgatgtaaggtctagtattaagtagagcattgtataaagttcattttgatttaaagaagaataaaaacgttaatagtgtta

SEQ ID NO: 3268 - DNA, 4484 bp, Diabrotica virgifera
  SmartBlast Evalue=1E-118; Info=CG3973 n=4 Tax=melanogaster subgroup RepID=Q9W3Y4_DROME
tatatttaacatcagtatggtttccaaccaataaaaaatctaaacctatctaaatttctacctacctaacaaaaaatagcaccataggaattttttgcatgtaacatgtaggtatttatataaaaattaatgcctctaaaaggaggtacacgtaggcaacttaaataaagcgaatatatcggaatgtacagaagtgcaacaaaaaagttacctcgtcgtttaattttgtcgaattcgactaactgacaaaaatttggaacgtgtgcattcaacaagtcgttacaattttaatagagagagtggcctgtgtgttgcagtaggtactgcagaattgatatcatcgacgattttttcgaacgacaccgcagtaccgtgagtgactggctttattgacccaagaaacgtaacacgtgcaatacgtttgttatttgatataacagacaattacttagaatgtattaggccggccactcactatcaggtacacctgaacagttagacctgtcaggtttaactgatagtgtgtggcattagtaagctcctcagttcgcctgagaggttagttattcccttcacacactatcaggtacacctaacaagtgtcttactgttcaggtatatctgatagtgagtggctgaccttagatagtccatgtggtggtggtaagactatttttctggtcacataaaggattcagacactcctttatggtgataagaacatacgccaacgcagatattaactcaaatatgttattactcttctatgttacgtggttgcagatcgatgttgcacgtttttggtcgaaccaaacattacgattctcttttgttgcattttcatacacacctcttgtttaacaatttgtatctaacatttaaacatagtaacaaaaagtttctcataaattaggttttagcaggatgtggagtacaataataggtgcagaattgtgacggttttggttgaatcaacttttaatacgcatgttattacaaacaatgcaaaaagtgaatatatacgcaaaatagagtttgaaaacattttcctgcagcctagatttatcttcttttcctacaaattaagttacatatcaacagtggccaatatatctaactaatgttatacagacacggcaatttttcaactatcctataggccattcagtatggggaacaaagataacacttaattgtttgaatacgagtgagacacaatacacgcatgttggaatagcgagtctgacatttaaacaatgtcgctatattttgttacatcgttccttctcaaatattagtaggataaatgattgtaaaataatatttagatctactacgatagaatgaaaattaatattgccccaataaaacttaaacaaagcagtaggtaactgttgctttttaaactattccatcaattactgtattaattaacaaataacactgaattgaggaattgatgtgtaacaagagcgtgagctaaacacagtttgctgagctaacgctcttgccagacgttcgtttagcatttatattttgacaatttcttactatttcgactattttgaatcaacattgtaaagctttaagcatataaacttatcagctgatagatgacgtgcaacgagatttgtaggaaaaacgaaataatgataacattttaagtcgattagcacattaataagttattattttgacctagtcacttgggtgactttattaactcatactaatgtagtcaaatacaaagtcccagtcttattaagagccaccagaaatgataaattattaaagagattcaatatatactcgtatatacttctttttaactttctttctagcactaatagaacaatgtatgtgttctacctatgtttacagaaaaatattttcatacacatttatctaaaatgcaggtaatccttttgattctgttttttatttttaattttcatttttgatttaggacttagccattgacacgggagcaggtatcctagtcatgtgattatcagtcctagaatcctttctggggctcctgaacgacattctctctgtcgacgttctcgttggtaaaatgggtaggcttagaggttcgtcgtcatttaacgtgcttaagctaccgaacttcttgagcaacatttggacctgcagggcgacagcttcgtctgagtcggctttattcacggcttggagaagttcctgccttagtttgcttttggtgggggatgtatttgttgaagaagacctcctttctagccccgatacactccttcgcactgttgagtttctggcgaaaggttgaaaagtatcttgactaatgctagctctagaagccttaggtcttccactccaggtactaattttagaatcaactttcttgggttgagaaggagttctctttgggctcttttggacgtcgatattcgcttccgagctattgcttctaatgtatgactttcttcgggcttgcacgccctccttcgttgaggagaaagatcgttctttctttttaggactaagggtttcgttagttgtggtttctggagatgaactggacgattctgacaatttatctattgcgtggcgagtcttttctaggatggttttggtatcgttttcgtaaatccgttgagaaaattgggttcttctgaggccaaactcgttgaggtcgtcgtctacataaacttgatgctcgttttcttcagcatcctctgtagagttttgactgtacacagacgacctttgtttggttctatcatgagttaaacctaagcttcgataaccttcgtctgacacttcagatgtagtatcactctgatctgtatcgtttacgtgtaaactgacttctgatttaagaaccttagtatctactggaatttgcatgctactgacgatattcttcgatttgtgattagtcataatcggcaacgactgtggaccataatgtttatgctgtggactcctattgctggacagcttggtattaaggtttgaagtgtaattcggcgtaggactcctagatcttgtcggtggtggaaccagagatcgtcttgtagaaagattgggactgagggaccgtttaggcgagcgagatcttgaacggttcagagagttcattggaggacctagagaatgtggaccactggatccgtaagaatttccacctgcgtctgcaactgaagcagctgatctttcatagtaaacgtgagaaccatgtagatcggcagctccaggtttattgaccaatttcgccccttgtgtcgtcctgtgttgtgttcgacacctacatggatcgtgcttgtctaagtaatgagatagagtgtcccatccacctcctactcgaaccattacgtgattacgcaggatcctgacaaaaataagaactttggtatcgcctatcctgtattttccttcagaaacccttatcatcggaaattgagttggacaggtacatttttcgactaaatctctaaccatctcgtctaaactcttgaggtcgttggtaataatttggggcatagggccgtacattaaaacagtctcttcgtcttctaaatcgctatcgctgtcgtcatctacaccgttctggttatttgagccttcgttgaagttgacgcccatttttttctgatccgccgcgatttccctgtcgatttggcgttccatttggactatgatcggtgccagcatgccgaattttgctcctctcctggctacttccaacagacatagaatgacgtgtttctcgttttttcgcataattaaatcatcggtttcgaataataggcattctattatttttaacgaattgcggcaccagttgataaaattgctaacgttgtctctggagaaaaacgtgcctggtttggccgtattgaagtacttgaaatcggcgatctggacaagcgcctgggcgactgccaacgagctggttacagacctcgtcattattttcttggcttgttttctctccgcatattcttgagcttgggccttacggcattagcgtgctcgcatagggccacccctgtttccaacttttccataaaattttccacggagatattcaaatgaggatacatggtctgcagccattccgccaagtcttctttcatagcatagaggtactcctcacttgacttgaaaggtctgaacggcctagcctctaataacgccatattgataatgagctcttacgaaaaccgaaactaagatcgacgccggaacgggattatttaatacgacattgtttggtgtggttgtgtttcgtcaaccaactcaatgacactgttttataggattgaaaaatcactttttcaaaagaataaccacatacacagaaccaaaataactaaaaaaccacttctgaggccgcggattcgtcagagaaaaaaccgtctcgatacatacacgcgtgtcgcgcgtttgacagcaaaacaacctcgcgttgcgacagtctgttactttatgtttcctaattc

SEQ ID NO: 3269 - DNA, 4092 bp, Diabrotica virgifera
  SmartBlast Evalue=1E-118; Info=CG3973 n=4 Tax=melanogaster subgroup RepID=Q9W3Y4_DROME
tttaaacaatttctgcccaaaaactccgcccggcatccttcagatttcagatttatttaaaggggacactttgaataagaatccacaaagaaaccgaatcaaggcccagagcacgccaaatagaattctattttgctgacgtcgcaaagtagaatttcataatgggagaatcgacggttgctaggcaacgtgacgtcactaaaatagaattctatttggcgtgctcccacaacagacattttttcagacgggagcggtctcaccacatggactaagactatttttctggtcacataaaggattcagacactcctttatggtgataagaacatacgccaacgcagatattaactcaaatatgttattactcttctatgttacgtggttgcagatcgatgttgcacgtttttggtcgaaccaaacattacgattctcttttgttgcattttcatacacacctcttgtttaacaatttgtatctaacatttaaacatagtaacaaaaagtttctcataaattaggttttagcaggatgtggagtacaataataggtgcagaattgtgacggttttggttgaatcaacttttaatacgcatgttattacaaacaatgcaaaaagtgaatatatacgcaaaatagagtttgaaaacattttcctgcagcctagatttatcttcttttcctacaaattaagttacatatcaacagtggccaatatatctaactaatgttatacagacacggcaatttttcaactatcctataggccattcagtatggggaacaaagataacacttaattgtttgaatacgagtgagacacaatacacgcatgttggaatagcgagtctgacatttaaacaatgtcgctatattttgttacatcgttccttctcaaatattagtaggataaatgattgtaaaataatatttagatctactacgatagaatgaaaattaatattgccccaataaaacttaaacaaagcagtaggtaactgttgctttttaaactattccatcaattactgtattaattaacaaataacactgaattgaggaattgatgtgtaacaagagcgtgagctaaacacagtttgctgagctaacgctcttgccagacgttcgtttagcatttatattttgacaatttcttactatttcgactattttgaatcaacattgtaaagctttaagcatataaacttatcagctgatagatgacgtgcaacgagatttgtaggaaaaacgaaataatgataacattttaagtcgattagcacattaataagttattattttgacctagtcacttgggtgactttattaactcatactaatgtagtcaaatacaaagtcccagtcttattaagagccaccagaaatgataaattattaaagagattcaatatatactcgtatatacttctttttaactttctttctagcactaatagaacaatgtatgtgttctacctatgtttacagaaaaatattttcatacacatttatctaaaatgcaggtaatccttttgattctgttttttatttttaattttcatttttgatttaggacttagccattgacacgggagcaggtatcctagtcatgtgattatcagtcctagaatcctttctggggctcctgaacgacattctctctgtcgacgttctcgttggtaaaatgggtaggcttagaggttcgtcgtcatttaacgtgcttaagctaccgaacttcttgagcaacatttggacctgcagggcgacagcttcgtctgagtcggctttattcacggcttggagaagttcctgccttagtttgcttttggtgggggatgtatttgttgaagaagacctcctttctagccccgatacactccttcgcactgttgagtttctggcgaaaggttgaaaagtatcttgactaatgctagctctagaagccttaggtcttccactccaggtactaattttagaatcaactttcttgggttgagaaggagttctctttgggctcttttggacgtcgatattcgcttccgagctattgcttctaatgtatgactttcttcgggcttgcacgccctccttcgttgaggagaaagatcgttctttctttttaggactaagggtttcgttagttgtggtttctggagatgaactggacgattctgacaatttatctattgcgtggcgagtcttttctaggatggttttggtatcgttttcgtaaatccgttgagaaaattgggttcttctgaggccaaactcgttgaggtcgtcgtctacataaacttgatgctcgttttcttcagcatcctctgtagagttttgactgtacacagacgacctttgtttggttctatcatgagttaaacctaagcttcgataaccttcgtctgacacttcagatgtagtatcactctgatctgtatcgtttacgtgtaaactgacttctgatttaagaaccttagtatctactggaatttgcatgctactgacgatattcttcgatttgtgattagtcataatcggcaacgactgtggaccataatgtttatgctgtggactcctattgctggacagcttggtattaaggtttgaagtgtaattcggcgtaggactcctagatcttgtcggtggtggaaccagagatcgtcttgtagaaagattgggactgagggaccgtttaggcgagcgagatcttgaacggttcagagagttcattggaggacctagagaatgtggaccactggatccgtaagaatttccacctgcgtctgcaactgaagcagctgatctttcatagtaaacgtgagaaccatgtagatcggcagctccaggtttattgaccaatttcgccccttgtgtcgtcctgtgttgtgttcgacacctacatggatcgtgcttgtctaagtaatgagatagagtgtcccatccacctcctactcgaaccattacgtgattacgcaggatcctgacaaaaataagaactttggtatcgcctatcctgtattttccttcagaaacccttatcatcggaaattgagttggacaggtacatttttcgactaaatctctaaccatctcgtctaaactcttgaggtcgttggtaataatttggggcatagggccgtacattaaaacagtctcttcgtcttctaaatcgctatcgctgtcgtcatctacaccgttctggttatttgagccttcgttgaagttgacgcccatttttttctgatccgccgcgatttccctgtcgatttggcgttccatttggactatgatcggtgccagcatgccgaattttgctcctctcctggctacttccaacagacatagaatgacgtgtttctcgttttttcgcataattaaatcatcggtttcgaataataggcattctattatttttaacgaattgcggcaccagttgataaaattgctaacgttgtctctggagaaaaacgtgcctggtttggccgtattgaagtacttgaaatcggcgatctggacaagcgcctgggcgactgccaacgagctggttacagacctcgtcattattttcttggcttgttttctctccgcatattcttgagcttgggccttacggcattagcgtgctcgcatagggccacccctgtttccaacttttccataaaattttccacggagatattcaaatgaggatacatggtctgcagccattccgccaagtcttctttcatagcatagaggtactcctcacttgacttgaaaggtctgaacggcctagcctctaataacgccatattgataatgagctcttacgaaaaccgaaactaagatcgacgccggaacgggattatttaatacgacattgtttggtgtggttgtgtttcgtcaaccaactcaatgacactgttttataggattgaaaaatcactttttcaaaagaataaccacatacacagaaccaaaataactaaaaaaccacttctgaggccgcggattcgtcagagaaaaaaccgtctcgatacatacacgcgtgtcgcgcgtttgacagcaaaacaacctcgcgttgcgacagtctgttactttatgtttcctaattc

SEQ ID NO: 3270 - DNA, 1326 bp, Diabrotica virgifera
tatatttaacatcagtatggtttccaaccaataaaaaatctaaacctatctaaatttctacctacctaacaaaaaatagcaccataggaattttttgcatgtaacatgtaggtatttatataaaaattaatgcctctaaaaggaggtacacgtaggcaacttaaataaagcgaatatatcggaatgtacagaagtgcaacaaaaaagttacctcgtcgtttaattttgtcgaattcgactaactgacaaaaatttggaacgtgtgcattcaacaagtcgttacaattttaatagagagagtggcctgtgtgttgcagtaggtactgcagaattgatatcatcgacgattttttcgaacgacaccgcagtaccgtgagtgactggctttattgacccaagaaacgtaacacgtgcaatacgtttgttatttgatataacagacaattacttagaatgtattaggccggccactcactatcaggtacacctgaacagttagacctgtcaggtttaactgatagtgtgtggcattagtaagctcctcagttcgcctgagaggttagttattcccttcacacactatcaggtacacctaacaagtgtcttactgttcaggtatatctgatagtgagtggctgaccttagatagtccatgtggtggtggtaagactatttttctggtcacataaaggattcagacactcctttatggtgataagaacatacgccaacgcagatattaactcaaatatgttattactcttctatgttacgtggttgcagatcgatgttgcacgtttttggtcgaaccaaacattacgattctcttttgttgcattttcatacacacctcttgtttaacaatttgtatctaacatttaaacatagtaacaaaaagtttctcataaattaggttttagcaggatgtggagtacaataataggtgcagaattgtgacggttttggttgaatcaacttttaatacgcatgttattacaaacaatgcaaaaagtgaatatatacgcaaaatagagtttgaaaacattttcctgcagcctagatttatcttcttttcctacaaattaagttacatatcaacagtggccaatatatctaactaatgttatacagacacggcaatttttcaactatcctataggccaggcctgtccaacataattttgtggagggccggatttgtaattttgtaactgtagcgggccgactgactattggatgtgcgatgtgcgtgagctctgtggctctgcgtgggtgtgggttcggtgagaagggactcgcgggcaggatgaagggcctacgcgggcc

SEQ ID NO: 3271 - DNA, 934 bp, Diabrotica virgifera
tttaaacaatttctgcccaaaaactccgcccggcatccttcagatttcagatttatttaaaggggacactttgaataagaatccacaaagaaaccgaatcaaggcccagagcacgccaaatagaattctattttgctgacgtcgcaaagtagaatttcataatgggagaatcgacggttgctaggcaacgtgacgtcactaaaatagaattctatttggcgtgctcccacaacagacattttttcagacgggagcggtctcaccacatggactaagactatttttctggtcacataaaggattcagacactcctttatggtgataagaacatacgccaacgcagatattaactcaaatatgttattactcttctatgttacgtggttgcagatcgatgttgcacgtttttggtcgaaccaaacattacgattctcttttgttgcattttcatacacacctcttgtttaacaatttgtatctaacatttaaacatagtaacaaaaagtttctcataaattaggttttagcaggatgtggagtacaataataggtgcagaattgtgacggttttggttgaatcaacttttaatacgcatgttattacaaacaatgcaaaaagtgaatatatacgcaaaatagagtttgaaaacattttcctgcagcctagatttatcttcttttcctacaaattaagttacatatcaacagtggccaatatatctaactaatgttatacagacacggcaatttttcaactatcctataggccaggcctgtccaacataattttgtggagggccggatttgtaattttgtaactgtagcgggccgactgactattggatgtgcgatgtgcgtgagctctgtggctctgcgtgggtgtgggttcggtgagaagggactcgcgggcaggatgaagggcctacgcgggcc

SEQ ID NO: 3272 - DNA, 2622 bp, Diabrotica virgifera
  SmartBlast Evalue=9E-96; Info=Inter-alpha-trypsin inhibitor heavy chain H4 n=3 Tax=Bos taurus RepID=ITIH4_BOVIN
attaaaaatagtatagaacagtcaaaatgaatggtatattgtttgccttggtggcgagtgtgtgcctgggaggggcattttgcatccctggtttagttgtaaggggtattcgtagtgcaaaagagggtctcgatggccaggaagcacaaaaccaagatccaattatctcggaattcaacatacattccaacatctcgaacagatttgccaagactttggtcactagtaaagttaaaaatgcagaaaagaatccaaaagaagccacgtttaccgtggttttaccagaaaaagcatttatttccaaatttgtaatggaaataggtggcaagagctacgaggcttatgttaaagaaaaagaagaagctaaaaatatctacgattcggctgttcggcaaggaataagtgctggtcacgtctcagttagtgctcgagactccaacagattcacagtatctatcaacgttgaaccagaaagtaaagcaactttccatcttacctatgaagaacttttggaaagaaaaaataaccagtacgagctggtactgaatattcaccctggccaagtagttaaagatatgaatattgaggtctttgtgaatgaaagtcgtcctttgaaatttgtaaaaactccttcgctgaggtcgggaaacgaaattagcaaaaacgatgccaaccttgacccagctgcagacatccaaataatcaactctaccagtgctgtcgttaaattcaaaccaaactccgacaaacagagggagtttgcaaaagaactggggcagaaagaaaatgagggtatagctggacaatttgttgtacagtatgatgtagatagagattctcaaaaaggagagattcttctcaaagatggatacttcgtacatttctttgctcctgaagacgtcgaaccacttccaaaacatgtagttttcatcttggacaccagcggaagtatgtatggaagaaaactcaggcaaatgaaggaagccatgggtagtattttagatcagctcaaagatacagatgccttccatatagtggaatttaatagtgatatcttagtttggaatatagattcagaatcaaaaaccagtttgagggttcacaatgaaagagagccttttgaagaactttctaaacttgaattgccaaacgccttagcagctaccaaagaagctatttctaaaggaaaagcagtaatagagaagcttcaagacactggattgacgaacatgttaggtagtatcgaaactggtctgcatttagtccacaaagaactgaaaagtgggtcaaaacgtcaaccactcattatctttttgacagacggagacccgaccatgggaatttcaaatactgaagagattaccaagattgtaaccaaaatcaacggcgatagagaccacgtaccaatcttttctctatcatttggagacggagcagacaaaaagttcttaagaaaactatcattgaagaacctaggatttgccagacacatttatgaaggagctgacgctgctattcaactccaggagttttacaagcaaatctcttctccacttttatcaaacatcgaatttgagtacactgacgacgtcactgaagtatccaaaaagacgttccctatttactttaagggatcagagttggtagttaccggaaagtatccaatcgacgaaggatttgacatctccaattggagagtaaagagttggagcaaacacggtctcatctcactaccaccagtaagggaagctccagttaccgaattggaacgtttgtgggcctatttaaccatcaagcaaaaactggaacaacgagagttagcagaaaataaaacacagctaaccaaggaagctctggatctggcgctgaaatattcctttgttactgatgttagttccttggtagttgtcaaaccgaatcaaaccagtgctgttaatactgaagatgcttcaaaaccaagatctgaaacgcttccattaagaacgtacagtagtgggtcagtttcatatggtatgccaggcttgccaggaccaccagcacaagcttttggtgcacgttcatattttgatcctcagccaagatcgggtggaggtggagcatatcaacctctttcgctatcaggtcaacgaagttacagcacattttctcaatcatcagcttttgctgatcttgatgatgacttagattccagattcttagttcaacctcatgccacatggagagctacatggagacctacacatataatatccactacatttgcacctacaagcactacgtcaaaacctgcaataaaagatctgcttccctggttaaaaaatatcgttcaccaaaatggaactttaagtattttaggaggagcatatgatttgggcgagggtcaagttgtcctttctaatggggaatgtacgaggacacccaataagaatgtccctaagggaacttgcagtctactgtcaaactgtccacatgttcattcatatctgacagatttcctgacctacgaacagtttgcctgcatccttgataacaaatatgctggagtttgctgcccagaggtagcgccagtgccataattatcgatttatagtgtttatagaatattaaataaagtgtttttta

SEQ ID NO: 3273 - DNA, 2618 bp, Diabrotica virgifera
  SmartBlast Evalue=9E-96; Info=Inter-alpha-trypsin inhibitor heavy chain H4 n=3 Tax=Bos taurus RepID=ITIH4_BOVIN
aaaatagtatagaacagtcaaaatgaatggtatattgtttgccttggtggcgagtgtgtgcctgggaggggcattttgcatccctggtttagttgtaaggggtattcgtagtgcaaaagagggtctcgatggccaggaagcacaaaaccaagatccaattatctcggaattcaacatacattccaacatctcgaacagatttgccaagactttggtcactagtaaagttaaaaatgcagaaaagaatccaaaagaagccacgtttaccgtggttttaccagaaaaagcatttatttccaaatttgtaatggaaataggtggcaagagctacgaggcttatgttaaagaaaaagaagaagctaaaaatatctacgattcggctgttcggcaaggaataagtgctggtcacgtctcagttagtgctcgagactccaacagattcacagtatctatcaacgttgaaccagaaagtaaagcaactttccatcttacctatgaagaacttttggaaagaaaaaataaccagtacgagctggtactgaatattcaccctggccaagtagttaaagatatgaatattgaggtctttgtgaatgaaagtcgtcctttgaaatttgtaaaaactccttcgctgaggtcgggaaacgaaattagcaaaaacgatgccaaccttgacccagctgcagacatccaaataatcaactctaccagtgctgtcgttaaattcaaaccaaactccgacaaacagagggagtttgcaaaagaactggggcagaaagaaaatgagggtatagctggacaatttgttgtacagtatgatgtagatagagattctcaaaaaggagagattcttctcaaagatggatacttcgtacatttctttgctcctgaagacgtcgaaccacttccaaaacatgtagttttcatcttggacaccagcggaagtatgtatggaagaaaactcaggcaaatgaaggaagccatgggtagtattttagatcagctcaaagatacagatgccttccatatagtggaatttaatagtgatatcttagtttggaatatagattcagaatcaaaaaccagtttgagggttcacaatgaaagagagccttttgaagaactttctaaacttgaattgccaaacgccttagcagctaccaaagaagctatttctaaaggaaaagcagtaatagagaagcttcaagacactggattgacgaacatgttaggtagtatcgaaactggtctgcatttagtccacaaagaactgaaaagtgggtcaaaacgtcaaccactcattatctttttgacagacggagacccgaccatgggaatttcaaatactgaagagattaccaagattgtaaccaaaatcaacggcgatagagaccacgtaccaatcttttctctatcatttggagacggagcagacaaaaagttcttaagaaaactatcattgaagaacctaggatttgccagacacatttatgaaggagctgacgctgctattcaactccaggagttttacaagcaaatctcttctccacttttatcaaacatcgaatttgagtacactgacgacgtcactgaagtatccaaaaagacgttccctatttactttaagggatcagagttggtagttaccggaaagtatccaatcgacgaaggatttgacatctccaattggagagtaaagagttggagcaaacacggtctcatctcactaccaccagtaagggaagctccagttaccgaattggaacgtttgtgggcctatttaaccatcaagcaaaaactggaacaacgagagttagcagaaaataaaacacagctaaccaaggaagctctggatctggcgctgaaatattcctttgttactgatgttagttccttggtagttgtcaaaccgaatcaaaccagtgctgttaatactgaagatgcttcaaaaccaagatctgaaacgcttccattaagaacgtacagtagtgggtcagtttcatatggtatgccaggcttgccaggaccaccagcacaagcttttggtgcacgttcatattttgatcctcagccaagatcgggtggaggtggagcatatcaacctctttcgctatcaggtcaacgaagttacagcacattttctcaatcatcagcttttgctgatcttgatgatgacttagattccagattcttagttcaacctcatgccacatggagagctacatggagacctacacatataatatccactacatttgcacctacaagcactacgtcaaaacctgcaataaaagatctgcttccctggttaaaaaatatcgttcaccaaaatggaactttaagtattttaggaggagcatatgatttgggcgagggtcaagttgtcctttctaatggggaatgtacgaggacacccaataagaatgtccctaagggaacttgcagtctactgtcaaactgtccacatgttcattcatatctgacagatttcctgacctacgaacagtttgcctgcatccttgataacaaatatgctggagtttgctgcccagaggtagcgccagtgccataattatcgatttatagtgtttatagaatattaaataaagtgtttttta

SEQ ID NO: 3274 - DNA, 2592 bp, Diabrotica virgifera
  SmartBlast Evalue=9E-96; Info=Inter-alpha-trypsin inhibitor heavy chain H4 n=3 Tax=Bos taurus RepID=ITIH4_BOVIN
attaaaaatagtatagaacagtcaaaatgaatggtatattgtttgccttggtggcgagtgtgtgcctgggaggggcattttgcatccctggtttagttgtaaggggtattcgtagtgcaaaagagggtctcgatggccaggaagcacaaaaccaagatccaattatctcggaattcaacatacattccaacatctcgaacagatttgccaagactttggtcactagtaaagttaaaaatgcagaaaagaatccaaaagaagccacgtttaccgtggttttaccagaaaaagcatttatttccaaatttgtaatggaaataggtggcaagagctacgaggcttatgttaaagaaaaagaagaagctaaaaatatctacgattcggctgttcggcaaggaataagtgctggtcacgtctcagttagtgctcgagactccaacagattcacagtatctatcaacgttgaaccagaaagtaaagcaactttccatcttacctatgaagaacttttggaaagaaaaaataaccagtacgagctggtactgaatattcaccctggccaagtagttaaagatatgaatattgaggtctttgtgaatgaaagtcgtcctttgaaatttgtaaaaactccttcgctgaggtcgggaaacgaaattagcaaaaacgatgccaaccttgacccagctgcagacatccaaataatcaactctaccagtgctgtcgttaaattcaaaccaaactccgacaaacagagggagtttgcaaaagaactggggcagaaagaaaatgagggtatagctggacaatttgttgtacagtatgatgtagatagagattctcaaaaaggagagattcttctcaaagatggatacttcgtacatttctttgctcctgaagacgtcgaaccacttccaaaacatgtagttttcatcttggacaccagcggaagtatgtatggaagaaaactcaggcaaatgaaggaagccatgggtagtattttagatcagctcaaagatacagatgccttccatatagtggaatttaatagtgatatcttagtttggaatatagattcagaatcaaaaaccagtttgagggttcacaatgaaagagagccttttgaagaactttctaaacttgaattgccaaacgccttagcagctaccaaagaagctatttctaaaggaaaagcagtaatagagaagcttcaagacactggattgacgaacatgttaggtagtatcgaaactggtctgcatttagtccacaaagaactgaaaagtgggtcaaaacgtcaaccactcattatctttttgacagacggagacccgaccatgggaatttcaaatactgaagagattaccaagattgtaaccaaaatcaacggcgatagagaccacgtaccaatcttttctctatcatttggagacggagcagacaaaaagttcttaagaaaactatcattgaagaacctaggatttgccagacacatttatgaaggagctgacgctgctattcaactccaggagttttacaagcaaatctcttctccacttttatcaaacatcgaatttgagtacactgacgacgtcactgaagtatccaaaaagacgttccctatttactttaagggatcagagttggtagttaccggaaagtatccaatcgacgaaggatttgacatctccaattggagagtaaagagttggagcaaacacggtctcatctcactaccaccagtaagggaagctccagttaccgaattggaacgtttgtgggcctatttaaccatcaagcaaaaactggaacaacgagagttagcagaaaataaaacacagctaaccaaggaagctctggatctggcgctgaaatattcctttgttactgatgttagttccttggtagttgtcaaaccgaatcaaaccagtgctgttaatactgaagatgcttcaaaaccaagatctgaaacgcttccattaagaacgtacagtagtgggtcagtttcatatggtatgccaggcttgccaggaccaccagcacaagcttttggtgcacgttcatattttgatcctcagccaagatcgggtggaggtggagcatatcaacctctttcgctatcaggtcacagacttgctgatcttgatgatgacttagattccagattcttagttcaacctcatgtcacatggagagctacatggagacctacacatataatatccactacatttgcacctacaagcactacgtcaaaacctgcaataaaagatctgcttccctggttaaaaaatatcgttcaccaaaatggaactttaagtattttaggaggagcatatgatttgggcgagggtcaagttgtcctttctaatggggaatgtacgaggacacccaataagaatgtccctaagggaacttgcagtctactgtcaaactgtccacatgttcattcatatctgacagatttcctgacctacgaacagtttgcctgcatccttgataacaaatatgctggagtttgctgcccagaggtagcgccagtgccataattatcgatttatagtgtttatagaatattaaataaagtgtttttta

SEQ ID NO: 3275 - DNA, 2588 bp, Diabrotica virgifera
  SmartBlast Evalue=9E-96; Info=Inter-alpha-trypsin inhibitor heavy chain H4 n=3 Tax=Bos taurus RepID=ITIH4_BOVIN
aaaatagtatagaacagtcaaaatgaatggtatattgtttgccttggtggcgagtgtgtgcctgggaggggcattttgcatccctggtttagttgtaaggggtattcgtagtgcaaaagagggtctcgatggccaggaagcacaaaaccaagatccaattatctcggaattcaacatacattccaacatctcgaacagatttgccaagactttggtcactagtaaagttaaaaatgcagaaaagaatccaaaagaagccacgtttaccgtggttttaccagaaaaagcatttatttccaaatttgtaatggaaataggtggcaagagctacgaggcttatgttaaagaaaaagaagaagctaaaaatatctacgattcggctgttcggcaaggaataagtgctggtcacgtctcagttagtgctcgagactccaacagattcacagtatctatcaacgttgaaccagaaagtaaagcaactttccatcttacctatgaagaacttttggaaagaaaaaataaccagtacgagctggtactgaatattcaccctggccaagtagttaaagatatgaatattgaggtctttgtgaatgaaagtcgtcctttgaaatttgtaaaaactccttcgctgaggtcgggaaacgaaattagcaaaaacgatgccaaccttgacccagctgcagacatccaaataatcaactctaccagtgctgtcgttaaattcaaaccaaactccgacaaacagagggagtttgcaaaagaactggggcagaaagaaaatgagggtatagctggacaatttgttgtacagtatgatgtagatagagattctcaaaaaggagagattcttctcaaagatggatacttcgtacatttctttgctcctgaagacgtcgaaccacttccaaaacatgtagttttcatcttggacaccagcggaagtatgtatggaagaaaactcaggcaaatgaaggaagccatgggtagtattttagatcagctcaaagatacagatgccttccatatagtggaatttaatagtgatatcttagtttggaatatagattcagaatcaaaaaccagtttgagggttcacaatgaaagagagccttttgaagaactttctaaacttgaattgccaaacgccttagcagctaccaaagaagctatttctaaaggaaaagcagtaatagagaagcttcaagacactggattgacgaacatgttaggtagtatcgaaactggtctgcatttagtccacaaagaactgaaaagtgggtcaaaacgtcaaccactcattatctttttgacagacggagacccgaccatgggaatttcaaatactgaagagattaccaagattgtaaccaaaatcaacggcgatagagaccacgtaccaatcttttctctatcatttggagacggagcagacaaaaagttcttaagaaaactatcattgaagaacctaggatttgccagacacatttatgaaggagctgacgctgctattcaactccaggagttttacaagcaaatctcttctccacttttatcaaacatcgaatttgagtacactgacgacgtcactgaagtatccaaaaagacgttccctatttactttaagggatcagagttggtagttaccggaaagtatccaatcgacgaaggatttgacatctccaattggagagtaaagagttggagcaaacacggtctcatctcactaccaccagtaagggaagctccagttaccgaattggaacgtttgtgggcctatttaaccatcaagcaaaaactggaacaacgagagttagcagaaaataaaacacagctaaccaaggaagctctggatctggcgctgaaatattcctttgttactgatgttagttccttggtagttgtcaaaccgaatcaaaccagtgctgttaatactgaagatgcttcaaaaccaagatctgaaacgcttccattaagaacgtacagtagtgggtcagtttcatatggtatgccaggcttgccaggaccaccagcacaagcttttggtgcacgttcatattttgatcctcagccaagatcgggtggaggtggagcatatcaacctctttcgctatcaggtcacagacttgctgatcttgatgatgacttagattccagattcttagttcaacctcatgtcacatggagagctacatggagacctacacatataatatccactacatttgcacctacaagcactacgtcaaaacctgcaataaaagatctgcttccctggttaaaaaatatcgttcaccaaaatggaactttaagtattttaggaggagcatatgatttgggcgagggtcaagttgtcctttctaatggggaatgtacgaggacacccaataagaatgtccctaagggaacttgcagtctactgtcaaactgtccacatgttcattcatatctgacagatttcctgacctacgaacagtttgcctgcatccttgataacaaatatgctggagtttgctgcccagaggtagcgccagtgccataattatcgatttatagtgtttatagaatattaaataaagtgtttttta

SEQ ID NO: 3276 - DNA, 2817 bp, Diabrotica virgifera
  SmartBlast Evalue=4E-73; Info=CG8420 n=4 Tax=melanogaster subgroup RepID=Q9VHH1_DROME
catcttggattaaccgatactagtataaaggcccggtttcaggtaaaatttaaatatgttttctggtaaaatttcttttgctttattatgggagtaccgtctagtcagtgttaattgtcaaaagaccaactctgtctacctcgattgcttatcgctccgggtgggtcttaacaatgggccaggtcagataaatttaataatatttacgaccgcactaattgcactcaaccatttactgttgaacaaaccataaattaaatgtggcatttcacaagagcgacagtggctggccacggtcgccgatcttcgccactgtggcgtccattacaaaatgattggggctacagaaatcacccgtttcatccactttgtggatccacagcgtaacgctgcagggtggtccgtctgtttaaagactaattcatgttagtgattggaactgcagcttttaatatttgtgtagaattacgtttttattgcacatgattcattattgaaattgtgattgagcaaaataaataattttatagacaatcttcttgttaacgatactataattcgttgtgaacatattcagtcgttacttttagctcttcaatatggaaaccatcacattctgctgaataaagtttcttacaatccttgctatccgtaatatccgcatataaagtccagaaagacgtaccagtgttggaacttaaaaaccaacctccaactaaacttgcgcctttgtacaagagtttctttagacctggtaaagtttcagcatcgtttttactttcttcgtttactagacataacacatatctatcacatttgggatttgctttggcaaacctaatagcccgattaactcttgctaaaggttcgataatctccaagttaatggtatctgctagtttacttgaaagctcgtttgaattactaaactttttgagcgttccactcttttcggtcatcttaagaatatcctttatgtataaaacagctggtttaacatattccttagaatcaatgttaacctggaagtccctttttcctacataattaacaaatgctgaaattgtttcaacaggtcgttttggatcaaactgggtgctcttcggaaaaccttctttttgtaggtaactgttgaagaaaacttgagcggtcacgaagtacgatttatagacttttggatcagaagcatactgcaaaaactctgctattctatcggttaaaattcgaatccactgccttctgtaagagtgattctccatcaactccccaaacttcttatagctgaaccgtcctttgtcatccaaaaacactttaaacgacttctctgcaccaagagccgctatagtgttctttcccatttccgaatggataaagtgatcaaacataagatgtaatttttccaagaatggaggcattaaggatgagtgcccagcgtgacttttttctctgcttctcgcttcaggtcctacgaaggcgttcatggtctgaagaattgttggaagtagagataagaaattgcttccgcctttctttccatcttgaccagattggcctaggaaactaccagctagtgataatatgtcatttaggttaaagtcagattctgctttagggtctccttttcgtacttttttagaacctactgatttcttcttaggtttctcttcgtcctcagaagcaaaaaagttaagcatcgatccaagatccagcttttgtccacctgcacctccttggtttaagagtgaccccaaaccgtttagtatagctgcagcaccatctccaccttgagctcgaccttcaccttggtcgttggcttggccaagcagagatcctaggccttgcagaagagctgcagcgccttctccaccttgaccttgaccttggccttgctcgttggcttggccaagtagtgaccctaggccttgtaaaagagctgcagcaccttctccaccttgaccacgagcttgaccttgttcgttggcttgaccgagaagtgatcccagtccttggagaagagctccagcacctcccttgttaccttggccttgagctaagagggatcctatggctcctaagctcttaagcacatcgggagaaccgtcttgattttcttttcctttaccgccatccttaagtccgtctaaggcacccacaaggcttgcaatgctaccaaggctttccaagacgtttggactatccgaatctgtatcactctttgtaaacttgtttagaagagttccaattttggcaagattactaataccttttaaaacattctgagtttcggaatctgacttcttccctccttgtttgtctcccgtcagcatagaacccaatccctctagaatatctcctccaccttctttcccaatctccgacatgatagaccccaacagatcactgcctccattgtccatgatattcttcattaaacccccaatgttgacttgattttgttccctttttatatccgaagcagcttctttatacaaatttggctcgtctacatctatttcgttattatgtacatcttgtagcgattggctgaaaagactgacgatgactagaagaattagtgtgttgctggtcattttgacacctaatgataatacaagtacctaaatattctaaagtttttcctactattcactgaaaaaagtcgcgtctttcattcacaatatcacataatcacctcataagtgtggtactctttttaaaagtacagacaactggaggatcttgaatattttgttgacgatgacgtacacggcggaaagtcaagcaactcgtgctaacggtactccgaaacggtgctgg

SEQ ID NO: 3277 - DNA, 2763 bp, Diabrotica virgifera
  SmartBlast Evalue=4E-73; Info=CG8420 n=4 Tax=melanogaster subgroup RepID=Q9VHH1_DROME
catatatgacacacaatataataatatataaaaataacaaacgcaacatatctattgagcaaaaatgccagtgtttccaaaatttacttccaaatccttttggtaaggcttaaaacagacgaaccactctgcaccgctactctgtggagccacaaagtagcttcatataattggccgtaaattcttatgtaaattaaacgtgccacgtgccatttcacaagagcgacagtggctggccacggtcgccgatcttcgccactgtggcgtccattacaaaatgattggggctacagaaatcacccgtttcatccactttgtggatccacagcgtaacgctgcagggtggtccgtctgtttaaagactaattcatgttagtgattggaactgcagcttttaatatttgtgtagaattacgtttttattgcacatgattcattattgaaattgtgattgagcaaaataaataattttatagacaatcttcttgttaacgatactataattcgttgtgaacatattcagtcgttacttttagctcttcaatatggaaaccatcacattctgctgaataaagtttcttacaatccttgctatccgtaatatccgcatataaagtccagaaagacgtaccagtgttggaacttaaaaaccaacctccaactaaacttgcgcctttgtacaagagtttctttagacctggtaaagtttcagcatcgtttttactttcttcgtttactagacataacacatatctatcacatttgggatttgctttggcaaacctaatagcccgattaactcttgctaaaggttcgataatctccaagttaatggtatctgctagtttacttgaaagctcgtttgaattactaaactttttgagcgttccactcttttcggtcatcttaagaatatcctttatgtataaaacagctggtttaacatattccttagaatcaatgttaacctggaagtccctttttcctacataattaacaaatgctgaaattgtttcaacaggtcgttttggatcaaactgggtgctcttcggaaaaccttctttttgtaggtaactgttgaagaaaacttgagcggtcacgaagtacgatttatagacttttggatcagaagcatactgcaaaaactctgctattctatcggttaaaattcgaatccactgccttctgtaagagtgattctccatcaactccccaaacttcttatagctgaaccgtcctttgtcatccaaaaacactttaaacgacttctctgcaccaagagccgctatagtgttctttcccatttccgaatggataaagtgatcaaacataagatgtaatttttccaagaatggaggcattaaggatgagtgcccagcgtgacttttttctctgcttctcgcttcaggtcctacgaaggcgttcatggtctgaagaattgttggaagtagagataagaaattgcttccgcctttctttccatcttgaccagattggcctaggaaactaccagctagtgataatatgtcatttaggttaaagtcagattctgctttagggtctccttttcgtacttttttagaacctactgatttcttcttaggtttctcttcgtcctcagaagcaaaaaagttaagcatcgatccaagatccagcttttgtccacctgcacctccttggtttaagagtgaccccaaaccgtttagtatagctgcagcaccatctccaccttgagctcgaccttcaccttggtcgttggcttggccaagcagagatcctaggccttgcagaagagctgcagcgccttctccaccttgaccttgaccttggccttgctcgttggcttggccaagtagtgaccctaggccttgtaaaagagctgcagcaccttctccaccttgaccacgagcttgaccttgttcgttggcttgaccgagaagtgatcccagtccttggagaagagctccagcacctcccttgttaccttggccttgagctaagagggatcctatggctcctaagctcttaagcacatcgggagaaccgtcttgattttcttttcctttaccgccatccttaagtccgtctaaggcacccacaaggcttgcaatgctaccaaggctttccaagacgtttggactatccgaatctgtatcactctttgtaaacttgtttagaagagttccaattttggcaagattactaataccttttaaaacattctgagtttcggaatctgacttcttccctccttgtttgtctcccgtcagcatagaacccaatccctctagaatatctcctccaccttctttcccaatctccgacatgatagaccccaacagatcactgcctccattgtccatgatattcttcattaaacccccaatgttgacttgattttgttccctttttatatccgaagcagcttctttatacaaatttggctcgtctacatctatttcgttattatgtacatcttgtagcgattggctgaaaagactgacgatgactagaagaattagtgtgttgctggtcattttgacacctaatgataatacaagtacctaaatattctaaagtttttcctactattcactgaaaaaagtcgcgtctttcattcacaatatcacataatcacctcataagtgtggtactctttttaaaagtacagacaactggaggatcttgaatattttgttgacgatgacgtacacggcggaaagtcaagcaactcgtgctaacggtactccgaaacggtgctgg

SEQ ID NO: 3278 - DNA, 2406 bp, Diabrotica virgifera
  SmartBlast Evalue=7E-77; Info=CG8420 n=4 Tax=melanogaster subgroup RepID=Q9VHH1_DROME
catcttggattaaccgatactagtataaaggcccggtttcaggtaaaatttaaatatgttttctggtaaaatttcttttgctttattatgggagtaccgtctagtcagtgttaattgtcaaaagaccaactctgtctacctcgattgcttatcgctccgggtgggtcttaacaatgggccaggtcagataaatttaataatatttacgaccgcactaattgcactcaaccatttactgttgaacaaaccataaattaaatgtggcatttcacaagagcgacagtggctggccacggtcgccgatcttcgccactgtggcgtccattacaaaatgattggggctacagaaatcacccgtttcatccactttgtggatccacagcgtaacgctgcagggtggtccgtctgtttaaagactaattcatgttagtgattggaactgcagcttttaatatttgtgtagaattacgtttttattgcacatgattcattattgaaattgtgattgagcaaaataaataattttatagacaatcttcttgttaacgatactataattcgttgtgaacatattcagtcgttacttttagctcttcaatatggaaaccatcacattctgctgaataaagtttcttacaatccttgctatccgtaatatccgcatataaagtccagaaagacgtaccagtgttggaacttaaaaaccaacctccaactaaacttgcgcctttgtacaagagtttctttagacctggtaaagtttcagcatcgtttttactttcttcgtttactagacataacacatatctatcacatttgggatttgctttggcaaacctaatagcccgattaactcttgctaaaggttcgataatctccaagttaatggtatctgctagtttacttgaaagctcgtttgaattactaaactttttgagcgttccactcttttcggtcatcttaagaatatcctttatgtataaaacagctggtttaacatattccttagaatcaatgttaacctggaagtccctttttcctacataattaacaaatgctgaaattgtttcaacaggtcgttttggatcaaactgggtgctcttcggaaaaccttctttttgtaggtaactgttgaagaaaacttgagcggtcacgaagtacgatttatagacttttggatcagaagcatactgcaaaaactctgctattctatcggttaaaattcgaatccactgccttctgtaagagtgattctccatcaactccccaaacttcttatagctgaaccgtcctttgtcatccaaaaacactttaaacgacttctctgcaccaagagccgctatagtgttctttcccatttccgaatggataaagtgatcaaacataagatgtaatttttccaagaatggaggcattaaggatgagtgcccagcgtgacttttttctctgcttctcgcttcaggtcctacgaaggcgttcatggtctgaagaattgttggaagtagagataagaaattgcttccgcctttctttccatcttgaccagattggcctaggaaactaccagctagtgataatatgtcatttaggttaaagtcagattctgctttagggtctccttttcgtacttttttagaacctaagagggatcctatggctcctaagctcttaagcacatcgggagaaccgtcttgattttcttttcctttaccgccatccttaagtccgtctaaggcacccacaaggcttgcaatgctaccaaggctttccaagacgtttggactatccgaatctgtatcactctttgtaaacttgtttagaagagttccaattttggcaagattactaataccttttaaaacattctgagtttcggaatctgacttcttccctccttgtttgtctcccgtcagcatagaacccaatccctctagaatatctcctccaccttctttcccaatctccgacatgatagaccccaacagatcactgcctccattgtccatgatattcttcattaaacccccaatgttgacttgattttgttccctttttatatccgaagcagcttctttatacaaatttggctcgtctacatctatttcgttattatgtacatcttgtagcgattggctgaaaagactgacgatgactagaagaattagtgtgttgctggtcattttgacacctaatgataatacaagtacctaaatattctaaagtttttcctactattcactgaaaaaagtcgcgtctttcattcacaatatcacataatcacctcataagtgtggtactctttttaaaagtacagacaactggaggatcttgaatattttgttgacgatgacgtacacggcggaaagtcaagcaactcgtgctaacggtactccgaaacggtgctgg

SEQ ID NO: 3279 - DNA, 2352 bp, Diabrotica virgifera
  SmartBlast Evalue=6E-77; Info=CG8420 n=4 Tax=melanogaster subgroup RepID=Q9VHH1_DROME
catatatgacacacaatataataatatataaaaataacaaacgcaacatatctattgagcaaaaatgccagtgtttccaaaatttacttccaaatccttttggtaaggcttaaaacagacgaaccactctgcaccgctactctgtggagccacaaagtagcttcatataattggccgtaaattcttatgtaaattaaacgtgccacgtgccatttcacaagagcgacagtggctggccacggtcgccgatcttcgccactgtggcgtccattacaaaatgattggggctacagaaatcacccgtttcatccactttgtggatccacagcgtaacgctgcagggtggtccgtctgtttaaagactaattcatgttagtgattggaactgcagcttttaatatttgtgtagaattacgtttttattgcacatgattcattattgaaattgtgattgagcaaaataaataattttatagacaatcttcttgttaacgatactataattcgttgtgaacatattcagtcgttacttttagctcttcaatatggaaaccatcacattctgctgaataaagtttcttacaatccttgctatccgtaatatccgcatataaagtccagaaagacgtaccagtgttggaacttaaaaaccaacctccaactaaacttgcgcctttgtacaagagtttctttagacctggtaaagtttcagcatcgtttttactttcttcgtttactagacataacacatatctatcacatttgggatttgctttggcaaacctaatagcccgattaactcttgctaaaggttcgataatctccaagttaatggtatctgctagtttacttgaaagctcgtttgaattactaaactttttgagcgttccactcttttcggtcatcttaagaatatcctttatgtataaaacagctggtttaacatattccttagaatcaatgttaacctggaagtccctttttcctacataattaacaaatgctgaaattgtttcaacaggtcgttttggatcaaactgggtgctcttcggaaaaccttctttttgtaggtaactgttgaagaaaacttgagcggtcacgaagtacgatttatagacttttggatcagaagcatactgcaaaaactctgctattctatcggttaaaattcgaatccactgccttctgtaagagtgattctccatcaactccccaaacttcttatagctgaaccgtcctttgtcatccaaaaacactttaaacgacttctctgcaccaagagccgctatagtgttctttcccatttccgaatggataaagtgatcaaacataagatgtaatttttccaagaatggaggcattaaggatgagtgcccagcgtgacttttttctctgcttctcgcttcaggtcctacgaaggcgttcatggtctgaagaattgttggaagtagagataagaaattgcttccgcctttctttccatcttgaccagattggcctaggaaactaccagctagtgataatatgtcatttaggttaaagtcagattctgctttagggtctccttttcgtacttttttagaacctaagagggatcctatggctcctaagctcttaagcacatcgggagaaccgtcttgattttcttttcctttaccgccatccttaagtccgtctaaggcacccacaaggcttgcaatgctaccaaggctttccaagacgtttggactatccgaatctgtatcactctttgtaaacttgtttagaagagttccaattttggcaagattactaataccttttaaaacattctgagtttcggaatctgacttcttccctccttgtttgtctcccgtcagcatagaacccaatccctctagaatatctcctccaccttctttcccaatctccgacatgatagaccccaacagatcactgcctccattgtccatgatattcttcattaaacccccaatgttgacttgattttgttccctttttatatccgaagcagcttctttatacaaatttggctcgtctacatctatttcgttattatgtacatcttgtagcgattggctgaaaagactgacgatgactagaagaattagtgtgttgctggtcattttgacacctaatgataatacaagtacctaaatattctaaagtttttcctactattcactgaaaaaagtcgcgtctttcattcacaatatcacataatcacctcataagtgtggtactctttttaaaagtacagacaactggaggatcttgaatattttgttgacgatgacgtacacggcggaaagtcaagcaactcgtgctaacggtactccgaaacggtgctgg

SEQ ID NO: 3280 - DNA, 3890 bp, Diabrotica virgifera
  SmartBlast Evalue=2E-88; Info=Golgi reassembly-stacking protein 2 n=1 Tax=Camponotus floridanus RepID=E1ZWY5_9HYME
gatatgtgttgtgttgttgatacctggtaaattttgggttatggtgccacgtaatttagaagtaatttattaaaaaaatatgggaaactctgaaagtgtagatgttcccggtggcggaacagatggatatcacgttcttaaagtccaagaaaattctcctgccagtcttgcaggacttcaaccattctttgattttattatatctattaacggcacccggctagatcgagaaaatgatacacttaggacgatactaaaaaacggcgtaggaaagcaacttccactaaccatctacagttataaaactcaaagtgtgaggactgtgacagtagtaccaagtgacacatggggaggccaaggctatttaggagtaagcataaaattctgttcctttgatgttgccaaagaaatcgtatggcacattctggaagtacatccaaactcaccagcatctctagcaaatcttagaccattttcagattacatcataggtgcagattctatattacatgagagtgaagatttatataatttaatagagaatcacgatggtgttcctttgaagttttatgtgtataattctgatgatgatacttgcagagatgtaactataacaccaaattcgaagtggggtggtgatggcatgttaggctgtggtataggttatggatatttacatcgaattcctgtaagaggcagtgcgatccaacctcctcccactacaactatatttaatcaagttccaacaatatcaccatctaatgaccaatctgttagtccagctaccactcaacccattacaactttaattcaaaaaacagaaaatttgaatttagagccaactggacaagcagtccaagaaactaatgttagcaatgttttatctacagctgccagcactgtgcaacaggacccatcagtttatacttcaaatgtaccagctccttcatcaattccgaatttcaacatgaatttccaaaaccctccagcgactagtgatattccatcatttgatgtgaataaattttctaatcctcagaatcccgtaacttcagaggcaatggtacatcctcaagtctcactacaatctccccaacctattattactccaactatgtataatcctgctgattacccggcttttagtccatcccagccccccttaacacagaccacagttcctgtgtactcatatccccaaatgcaatctagtggggctccaacaaatgtattacataccacaactaattcttcactgcctccaccacctctgtcaggctttctgaaccaacctattatttttgatcctcatatagcagcacaatcagctcaacagttgttaagtggaactgtaactacatcttctagttaaaatgtgcaatggaagaattatttagtaatacatttttacatgatatcttatattttattggacactgaggggaacttttaacagaaatgcagagctgatgattcttttcaatgtattgaaagctcttggtgggaaacattttcaaaagatatctgtcaaatcacaaaactgcaaataatgggcatttattggatatggaattgatttttgattataacattcatattatggaaataaaagatcatgaattgacacagtgtttgtattgtcaacacggaatcaatttttttgtgtttttattgctaaaatttctcaatacctgttaaaagctttattcttagcccttttcttattctggtgatatttttctgagattcatacatttacagatattgcatgtaaaaaaacatgtcaaagtataaattaataacaaattcagcaatgtacctgcatgagcaaatttcataagctttttcatggcagataccataaatatatagttaaacttttagtttaagtaagagatcatctgcttctttttatatgttgtatatattatgactgagtagtctcttagaactttctgctgcataaattttttttctagtgtactgaggtttctcagatgcttctagtcttttcgacgctgagttaagtaagtacttctaagaacaaaaataaggagtagagtgttacaacaaacaaacgtaaaaacaaatataaactgctagccatagcagtggtggatctaggggtggcttccaatgaaacactaaccaaaagacataaagaagataaaccccaactaaagttcgattaatttttctaactagcgggtatattgggttgaatttatctgtatatgatttaagtttgatgccagctaatatatttttctgtttcaacaattttttctttaattttggaccttgttaggtttgccactgagtcacaattagttagaattgaaaaaatttcaaatcaattctaaaaagtctgtcaaatcttgagaatgagacaaacaaactgctttttttacggaaataaaaggcagatatcgagcaccgagtttattaaatattgcccaagtatactttccatgtatatgcccctgaagatgctcctagagcatcttcagaggcatttcgtcaaaacaggaaagcattcttgaatgccataaacatttttgtctgaaagatgaagttttcgatcctaatagcattattaataatatttaaaaaatattaaatattaaaatattactaaaagatttttaaaacgaaaacttattggtccatttccttggtaacacctccaaggcttctaaaatttgcaagccaaatggatgctgaagcgaagaagacaagaatgaattcaaaaaacttacaattcacgaccccgtctgttcagctggtaaattccaacagaaaatggacctagttactcgaaggagtaaagaccaatataaaaataaaataaaaattttatttttaattcagttgcaatgcgaaggcaaaacaatcttacttttcaattagaatacggagcgtagtccagtcctctgaatcgcgattttcggctcttattggagcctcatcggagagaacgtaggcttgttctccatactccaattgatcagcaccgagagcttctcccacccatcgcaactgaagtgaaaatattacgtgactagcgtcatctggcaattaaaagttcctatttaaactgcattttgcccactggcatgatattttaagagatttataatgccattagttatatgtacacatacatttacttttcgattagagataggcgactgaaggaagcgctaaaatcggcaacattgcttatgagaagaatgaattgcattgccactgtagtatcgacgaatgactgaatatattggcgtgactcgggtgtgggaagcggggaagcagtgttgccatgtattgggtatactcctatatctaatttaaaagtaaacatacaaattgagaggttgttaacactaagatgatgtttggttacgaaaagcagatgtttgtttgccaagatcaagagatagtacaggacataactaaatgtcaccaaagtggcagcttataggcagcaaggataattgaaaagagaaaaaaaaataagcttaagaattaaagttacagtattaactgaaggacacacgacttatagctgatttcatttgtttataaacaagaagggttgtcttgttccttaattatttaaatatatatgtctttctatgtgcacgatactcaacagacaaatatccaagagaatgtgctatctctcctgttgttcttggttcgaatcttgatgttgtgaaataggcacagttacaatatacacaacatttcaagcgcatattcgccccattgttactactatcatcatgctctaatttactagactcttacatcactgttgtcaaaatataaaactgaaataaactgaaagtgtgtatattatattttgttattttatataattatacata

SEQ ID NO: 3281 - DNA, 3178 bp, Diabrotica virgifera
  SmartBlast Evalue=1E-88; Info=Golgi reassembly-stacking protein 2 n=1 Tax=Camponotus floridanus RepID=E1ZWY5_9HYME
gatatgtgttgtgttgttgatacctggtaaattttgggttatggtgccacgtaatttagaagtaatttattaaaaaaatatgggaaactctgaaagtgtagatgttcccggtggcggaacagatggatatcacgttcttaaagtccaagaaaattctcctgccagtcttgcaggacttcaaccattctttgattttattatatctattaacggcacccggctagatcgagaaaatgatacacttaggacgatactaaaaaacggcgtaggaaagcaacttccactaaccatctacagttataaaactcaaagtgtgaggactgtgacagtagtaccaagtgacacatggggaggccaaggctatttaggagtaagcataaaattctgttcctttgatgttgccaaagaaatcgtatggcacattctggaagtacatccaaactcaccagcatctctagcaaatcttagaccattttcagattacatcataggtgcagattctatattacatgagagtgaagatttatataatttaatagagaatcacgatggtgttcctttgaagttttatgtgtataattctgatgatgatacttgcagagatgtaactataacaccaaattcgaagtggggtggtgatggcatgttaggctgtggtataggttatggatatttacatcgaattcctgtaagaggcagtgcgatccaacctcctcccactacaactatatttaatcaagttccaacaatatcaccatctaatgaccaatctgttagtccagctaccactcaacccattacaactttaattcaaaaaacagaaaatttgaatttagagccaactggacaagcagtccaagaaactaatgttagcaatgttttatctacagctgccagcactgtgcaacaggacccatcagtttatacttcaaatgtaccagctccttcatcaattccgaatttcaacatgaatttccaaaaccctccagcgactagtgatattccatcatttgatgtgaataaattttctaatcctcagaatcccgtaacttcagaggcaatggtacatcctcaagtctcactacaatctccccaacctattattactccaactatgtataatcctgctgattacccggcttttagtccatcccagccccccttaacacagaccacagttcctgtgtactcatatccccaaatgcaatctagtggggctccaacaaatgtattacataccacaactaattcttcactgcctccaccacctctgtcaggctttctgaaccaacctattatttttgatcctcatatagcagcacaatcagctcaacagttgttaagtggaactgtaactacatcttctagttaaaatgtgcaatggaagaattatttagtaatacatttttacatgatatcttatattttattggacactgaggggaacttttaacagaaatgcagagctgatgattcttttcaatgtattgaaagctcttggtgggaaacattttcaaaagatatctgtcaaatcacaaaactgcaaataatgggcatttattggatatggaattgatttttgattataacattcatattatggaaataaaagatcatgaattgacacagtgtttgtattgtcaacacggaatcaatttttttgtgtttttattgctaaaatttctcaatacctgttaaaagctttattcttagcccttttcttattctggtgatatttttctgagattcatacatttacagatattgcatgtaaaaaaacatgtcaaagtataaattaataacaaattcagcaatgtacctgcatgagcaaatttcataagctttttcatggcagataccataaatatatagttaaacttttagtttaagtaagagatcatctgcttctttttatatgttgtatatattatgactgagtagtctcttagaactttctgctgcataaattttttttctagtgtactgaggtttctcagatgcttctagtcttttcgacgctgagttaagtaagtacttctaagaacaaaaataaggagtagagtgttacaacaaacaaacgtaaaaacaaatataaactgctagccatagcagtggtggatctaggggtggcttccaatgaaacactaaccaaaagacataaagaagataaaccccaactaaagttcgattaatttttctaactagcgggtatattgggttgaatttatctgtatatgatttaagtttgatgccagctaatatatttttctgtttcaacaattttttctttaattttggaccttgttaggtttgccactgagtcacaattagttagaattgaaaaaatttcaaatcaattctaaaaagtctgtcaaatcttgagaatgagacaaacaaactgctttttttacggaaataaaaggcagatatcgagcaccgagtttattaaatattgcccaagtatactttccatgtatatgcccctgaagatgctcctagagcatcttcagaggcatttcgtcaaaacaggaaagcattcttgaatgccataaacatttttgtctgaaagatgaagttttcgatcctaatagcattattaataatatttaaaaaatattaaatattaaaatattactaaaagatttttaaaacgaaaacttattggtccatttccttggtaacacctccaaggcttctaaaatttgcaagccaaatggatgctgaagcgaagaagacaagaatgaattcaaaaaacttacaattcacgaccccgtctgttcagctggtaaattccaacagaaaatggacctagttactcgaaggagtaaagaccaatataaaaataaaataaaaattttatttttaattcagttgcaatgcgaaggcaaaacaatcttacttttcaattagaatacggagcgtagtccagtcctctgaatcgcgattttcggctcttattggagcctcatcggagagaacgtaggcttgttctccatactccaattgatcagcaccgagagcttctcccacccattgcaactgaaacaaatagggtaggtgactagcgtcatctggcagttgaaagatgaagtttttcaatcctaatagtaacattaataatattgaaaatattaaaaatattactaaaagatttttatattgaaaagttattggtaca

SEQ ID NO: 3282 - DNA, 1919 bp, Diabrotica virgifera
ttgttgttggtatatgccaatgatacaaaccaaagacgtatgccgtagatatattaatattatgtgacacatgacagaagctcgaaacaaatgacaatcaatgaaaaaccctattgccgattactgaaatgatcatcacgaaaccgtcactaaaagatcacaattcttgttggaacagtgggaaggacgatccgatgacgatcatatttttgttggaacggattttgtttactgcgcaggagcgttaccgtttcgtgacggttctcggtcgtgttggaacaaagtcgtcccgaggcaaacgggcttttacttttatagtagtatgagctatctaagagacacattaatattcggctcagcgttgtgctattgttcgatatgtggaattccataataccttgtttatgtaatttcacacctcgaacaggtctgatattattctacattacgataataaaattattaccaagtcttgtgatattgctaattcgtttgcctcatattttgctacaataacagaatacaaccttcaagctcattttggcacatcgttgccttcttcttgtactacctcaaaaatgtgtaatcaaacatttttctgagatgaagtagttttcaatcctaatagcaatataaataatatttaaaaatattacaatattactaaaagatttttaaattgataacttattggtccatttccttggtaacacctccaaggcttctaaaatttgcaagccaaatggatgctgaagcgaagaagacaagagggaattcaaaaaacttacaattcacgaccccgtctgttcagctggtaaattccaacagaaaatggacctagttactcgaaggagtaaagaccaatataaaaataaaataaaaattttatttttaattcagttgcaatgcgaaggcaaaacaatcttacttttcaattagaatacggagcgtagtccagtcctctgaatcgcgattttcggctcttattggagcctcatcggagagaacgtaggcttgttctccatactccaattgatcagcaccgagagcttctcccacccatcgcaactgaagtgaaaatattacgtgactagcgtcatctggcaattaaaagttcctatttaaactgcattttgcccactggcatgatattttaagagatttataatgccattagttatatgtacacatacatttacttttcgattagagataggcgactgaaggaagcgctaaaatcggcaacattgcttatgagaagaatgaattgcattgccactgtagtatcgacgaatgactgaatatattggcgtgactcgggtgtgggaagcggggaagcagtgttgccatgtattgggtatactcctatatctaatttaaaagtaaacatacaaattgagaggttgttaacactaagatgatgtttggttacgaaaagcagatgtttgtttgccaagatcaagagatagtacaggacataactaaatgtcaccaaagtggcagcttataggcagcaaggataattgaaaagagaaaaaaaaataagcttaagaattaaagttacagtattaactgaaggacacacgacttatagctgatttcatttgtttataaacaagaagggttgtcttgttccttaattatttaaatatatatgtctttctatgtgcacgatactcaacagacaaatatccaagagaatgtgctatctctcctgttgttcttggttcgaatcttgatgttgtgaaataggcacagttacaatatacacaacatttcaagcgcatattcgccccattgttactactatcatcatgctctaatttactagactcttacatcactgttgtcaaaatataaaactgaaataaactgaaagtgtgtatattatattttgttattttatataattatacata

SEQ ID NO: 3283 - DNA, 1207 bp, Diabrotica virgifera
ttgttgttggtatatgccaatgatacaaaccaaagacgtatgccgtagatatattaatattatgtgacacatgacagaagctcgaaacaaatgacaatcaatgaaaaaccctattgccgattactgaaatgatcatcacgaaaccgtcactaaaagatcacaattcttgttggaacagtgggaaggacgatccgatgacgatcatatttttgttggaacggattttgtttactgcgcaggagcgttaccgtttcgtgacggttctcggtcgtgttggaacaaagtcgtcccgaggcaaacgggcttttacttttatagtagtatgagctatctaagagacacattaatattcggctcagcgttgtgctattgttcgatatgtggaattccataataccttgtttatgtaatttcacacctcgaacaggtctgatattattctacattacgataataaaattattaccaagtcttgtgatattgctaattcgtttgcctcatattttgctacaataacagaatacaaccttcaagctcattttggcacatcgttgccttcttcttgtactacctcaaaaatgtgtaatcaaacatttttctgagatgaagtagttttcaatcctaatagcaatataaataatatttaaaaatattacaatattactaaaagatttttaaattgataacttattggtccatttccttggtaacacctccaaggcttctaaaatttgcaagccaaatggatgctgaagcgaagaagacaagagggaattcaaaaaacttacaattcacgaccccgtctgttcagctggtaaattccaacagaaaatggacctagttactcgaaggagtaaagaccaatataaaaataaaataaaaattttatttttaattcagttgcaatgcgaaggcaaaacaatcttacttttcaattagaatacggagcgtagtccagtcctctgaatcgcgattttcggctcttattggagcctcatcggagagaacgtaggcttgttctccatactccaattgatcagcaccgagagcttctcccacccattgcaactgaaacaaatagggtaggtgactagcgtcatctggcagttgaaagatgaagtttttcaatcctaatagtaacattaataatattgaaaatattaaaaatattactaaaagatttttatattgaaaagttattggtaca

SEQ ID NO: 3284 - DNA, 2616 bp, Diabrotica virgifera
  SmartBlast Evalue=4E-43; Info=Arginine/serine-rich splicing factor 7 n=1 Tax=Bombyx mori RepID=Q1HPK8_BOMMO
aagtgtttctgacattggcaccacttggcaataatattgagatttttccatcagagcttactttatccattttccaatgcaatcaaaatttcccttttttacaattcacagatactcaacaaccttgaaattaagatcacttatgaatttttagactgctcataattgttgacgtattatcctatcaaatcattatcaaaaatggccaattttgaagatttttaacaatacttgagaaaaacgttacatttctcatgtttaaactagtgttaagatatgtgagatgttattacaagtacaaaaactagccaacagatggcggctttggcgtgacatgatttgtaggataaaaagcttcaattcataaaaattcaaacctatacttgaactaaatactggacaacgcaacgtgagaaacggctttttgccgtgagaaacggcaacgtgagcacattttaacggttataacacaaaaaccacaaaacagaatattactacatgcgttgacatttgctttacactttagatgacttttactacagtaatacaagtgacaaaactatttttcccatttccaatatttagctgatgtagatctaatatgttacggtgttacgaatttgtttgaagtcaccacaagtatgtgagtcaatttgagaatatctacagataaaattcatcatcgttacttcatagagtaagttattttgagattccatcaagagtattcaaattgtactgaaaacaacaatatacgatctaccgtattcttttactgcgtattaggtgaatcaaagtcataatgtcaatgtctgatgcctttcatggtgagtcaaatatataaaaactggacatcaataacaaattgccacaaaatagaagaaattgagttaaaaagtatgctgaatcgaaactgaactcagcgcgatgtcatgttattttcatagaacattaaaaatatgttgaacctgttgacgaacattctatttagacaagctaggaatacctggaaccgacatccactagattaagaagcgtgatcgtcctattatataaggattaacaaaaacacacaaatagtcatctagagacacacaaaacaatcatattttgttgctggaaggaccaacaatacttcgaaatagatttggtgctagtgcaaaacattgtgacgtcagtttaatagatataatcagcaattaaaaataggttacaatgtagtaaccacaaattgatattcacattggaaataaatacaaagaatataatatactctcctagaagaaaagtttgaatggaacagatggtcacatttagttgtctcttgaaaatactgtagtcgttgtcaggccacatgcacctactcagtaggaacacaaaatcctatgctgaaacgttacagggcagtagccttctattaacgtctatattctttggtaaatatatcagcgaagaagaatcagtttaaggtttttatgtcaatatttcatgtcaaaacactggctatctgggaagatgggactttaaagtgaatttaaattgaataaattaaaatttttctccaaaataaaagtttgactctgtgccacttggcttgttattgatgtccagtctatcaagaatttaggaacactgaggacgatttttgttacatataacatccaacaacaggtgcgcaaaacgtatattaacaaccatatctgttaatcaaacagaagtggaacaaatccaaacaccgtcctcatcgaaatcttgcggaggatgtctacgacattgagaaacattcagtagaatttcggggatgttcgaaatccccttttgttacactaatctttcgcgttgccgttttctttgacagatctgctatgcgatctagatctagagcgagctgatctagatcttgagcgtttttcgttgctgcgcgagcgactgtggcttctcttcctagaatcggatctggaacggttcctggagcggctcctggaacgggtgttgctcctgcttctcgaacgacggtctctggaacggcttctagaacgagatctggatctatgcctcctcgacgatctgtatctgttgcagtctctagcatagtgtcctctatctccgcaatcatagcacctgtcatccgggtgaaatggttttccacgagatcggggaggggggccgcggtaacgtccattaccgctcttcccattggacatctcgactctagctcttcgcccacatatcgtccggccatatttttctactcgcactctgtgactgccgattctatgaccatctaatcctcgaatagcatcttctgcgtctctggcgtcttcgaactctacaaaagcaaagccgggtggattcctggctacccaaacgtttcgtagcggtccataatatttaaaagcatcttcgatttcctgtttagaggcactatttcctaaatctccaacatatactttacagtctgaatatcgagacatcttgatgaggtacctctttagcactacaataaaattaagccccgcgaagaggctgaaaacctttcacaaaatattagaagttatttaaatttattatacaatttaaaaacaatatggacgctctttctagttctttatcccg

SEQ ID NO: 3285 - DNA, 2574 bp, Diabrotica virgifera
  SmartBlast Evalue=5E-46; Info=Arginine/serine-rich splicing factor 7 n=1 Tax=Bombyx mori RepID=Q1HPK8_BOMMO
aagtgtttctgacattggcaccacttggcaataatattgagatttttccatcagagcttactttatccattttccaatgcaatcaaaatttcccttttttacaattcacagatactcaacaaccttgaaattaagatcacttatgaatttttagactgctcataattgttgacgtattatcctatcaaatcattatcaaaaatggccaattttgaagatttttaacaatacttgagaaaaacgttacatttctcatgtttaaactagtgttaagatatgtgagatgttattacaagtacaaaaactagccaacagatggcggctttggcgtgacatgatttgtaggataaaaagcttcaattcataaaaattcaaacctatacttgaactaaatactggacaacgcaacgtgagaaacggctttttgccgtgagaaacggcaacgtgagcacattttaacggttataacacaaaaaccacaaaacagaatattactacatgcgttgacatttgctttacactttagatgacttttactacagtaatacaagtgacaaaactatttttcccatttccaatatttagctgatgtagatctaatatgttacggtgttacgaatttgtttgaagtcaccacaagtatgtgagtcaatttgagaatatctacagataaaattcatcatcgttacttcatagagtaagttattttgagattccatcaagagtattcaaattgtactgaaaacaacaatatacgatctaccgtattcttttactgcgtattaggtgaatcaaagtcataatgtcaatgtctgatgcctttcatggtgagtcaaatatataaaaactggacatcaataacaaattgccacaaaatagaagaaattgagttaaaaagtatgctgaatcgaaactgaactcagcgcgatgtcatgttattttcatagaacattaaaaatatgttgaacctgttgacgaacattctatttagacaagctaggaatacctggaaccgacatccactagattaagaagcgtgatcgtcctattatataaggattaacaaaaacacacaaatagtcatctagagacacacaaaacaatcatattttgttgctggaaggaccaacaatacttcgaaatagatttggtgctagtgcaaaacattgtgacgtcagtttaatagatataatcagcaattaaaaataggttacaatgtagtaaccacaaattgatattcacattggaaataaatacaaagaatataatatactctcctagaagaaaagtttgaatggaacagatggtcacatttagttgtctcttgaaaatactgtagtcgttgtcaggccacatgcacctactcagtaggaacacaaaatcctatgctgaaacgttacagggcagtagccttctattaacgtctatattctttggtaaatatatcagcgaagaagaatcagtttaaggtttttatgtcaatatttcatgtcaaaacactggctatctgggaagatgggactttaaagtgaatttaaattgaataaattaaaatttttctccaaaataaaagtttgactctgtgccacttggcttgttattgatgtccagtctatcaagaatttaggaacactgaggacgatttttgttacatataacatccaacaacaggtgcgcaaaacgtatattaacaaccatatctgttaatcaaacagaagtggaacaaatccaaacaccgtcctcatcgaaatcttgcggaggatgtctacgacattgagaaacattcagtagaatttcggggatgttcgaaatccccttttgttacactaatctttcgcgttgccgttttctttgacagatctgctatgcgatctagatctagagcgagctgatctagatcttgagcgtttttcgttgctgcgcgagcgactgtggcttctcttcctagaatcggatctggaacggttcctggagcggctcctggaacgggtgttgctcctgcttctcgaacgacggtctctggaacggcttctagaacgagatctggatctatgcctcctcgacgatctgtatctgttgcagtctctagcatagtgtcctctatctccgcaatcatagcacctgtcatccgggtgaaatggttttccacgagatcggggaggggggccgcggtaacgtccattaccgctcttcccattggacatctcgactctagctcttcgcccacatatcgtccggccatctaatcctcgaatagcatcttctgcgtctctggcgtcttcgaactctacaaaagcaaagccgggtggattcctggctacccaaacgtttcgtagcggtccataatatttaaaagcatcttcgatttcctgtttagaggcactatttcctaaatctccaacatatactttacagtctgaatatcgagacatcttgatgaggtacctctttagcactacaataaaattaagccccgcgaagaggctgaaaacctttcacaaaatattagaagttatttaaatttattatacaatttaaaaacaatatggacgctctttctagttctttatcccg

SEQ ID NO: 3286 - DNA, 2232 bp, Diabrotica virgifera
  SmartBlast Evalue=3E-43; Info=Arginine/serine-rich splicing factor 7 n=1 Tax=Bombyx mori RepID=Q1HPK8_BOMMO
aattcataaaaattcaaacctatacttgaagtaaatattggacaaggtgagaaacggcttttcatgtgcatagctacaataaaagtcatcggaaacacaattagccagaactacatgcgttgacacttgctttagactttagatgacttttactacagtaatacaagtggcaaaactattttgttcccatttccaatatttagttcatgtagatacgttacggtgctacgaatttgtttgaaagtcaccacaagtatgtgagagtcaatttgagaatatctacagataaaattcatcatcgttacttcatagagtaagttattttgagattccatcaagagtattcaaattgtactgaaaacaacaatatacgatctaccgtattcttttactgcgtattaggtgaatcaaagtcataatgtcaatgtctgatgcctttcatggtgagtcaaatatataaaaactggacatcaataacaaattgccacaaaatagaagaaattgagttaaaaagtatgctgaatcgaaactgaactcagcgcgatgtcatgttattttcatagaacattaaaaatatgttgaacctgttgacgaacattctatttagacaagctaggaatacctggaaccgacatccactagattaagaagcgtgatcgtcctattatataaggattaacaaaaacacacaaatagtcatctagagacacacaaaacaatcatattttgttgctggaaggaccaacaatacttcgaaatagatttggtgctagtgcaaaacattgtgacgtcagtttaatagatataatcagcaattaaaaataggttacaatgtagtaaccacaaattgatattcacattggaaataaatacaaagaatataatatactctcctagaagaaaagtttgaatggaacagatggtcacatttagttgtctcttgaaaatactgtagtcgttgtcaggccacatgcacctactcagtaggaacacaaaatcctatgctgaaacgttacagggcagtagccttctattaacgtctatattctttggtaaatatatcagcgaagaagaatcagtttaaggtttttatgtcaatatttcatgtcaaaacactggctatctgggaagatgggactttaaagtgaatttaaattgaataaattaaaatttttctccaaaataaaagtttgactctgtgccacttggcttgttattgatgtccagtctatcaagaatttaggaacactgaggacgatttttgttacatataacatccaacaacaggtgcgcaaaacgtatattaacaaccatatctgttaatcaaacagaagtggaacaaatccaaacaccgtcctcatcgaaatcttgcggaggatgtctacgacattgagaaacattcagtagaatttcggggatgttcgaaatccccttttgttacactaatctttcgcgttgccgttttctttgacagatctgctatgcgatctagatctagagcgagctgatctagatcttgagcgtttttcgttgctgcgcgagcgactgtggcttctcttcctagaatcggatctggaacggttcctggagcggctcctggaacgggtgttgctcctgcttctcgaacgacggtctctggaacggcttctagaacgagatctggatctatgcctcctcgacgatctgtatctgttgcagtctctagcatagtgtcctctatctccgcaatcatagcacctgtcatccgggtgaaatggttttccacgagatcggggaggggggccgcggtaacgtccattaccgctcttcccattggacatctcgactctagctcttcgcccacatatcgtccggccatatttttctactcgcactctgtgactgccgattctatgaccatctaatcctcgaatagcatcttctgcgtctctggcgtcttcgaactctacaaaagcaaagccgggtggattcctggctacccaaacgtttcgtagcggtccataatatttaaaagcatcttcgatttcctgtttagaggcactatttcctaaatctccaacatatactttacagtctgaatatcgagacatcttgatgaggtacctctttagcactacaataaaattaagccccgcgaagaggctgaaaacctttcacaaaatattagaagttatttaaatttattatacaatttaaaaacaatatggacgctctttctagttctttatcccg

SEQ ID NO: 3287 - DNA, 2190 bp, Diabrotica virgifera
  SmartBlast Evalue=4E-46; Info=Arginine/serine-rich splicing factor 7 n=1 Tax=Bombyx mori RepID=Q1HPK8_BOMMO
aattcataaaaattcaaacctatacttgaagtaaatattggacaaggtgagaaacggcttttcatgtgcatagctacaataaaagtcatcggaaacacaattagccagaactacatgcgttgacacttgctttagactttagatgacttttactacagtaatacaagtggcaaaactattttgttcccatttccaatatttagttcatgtagatacgttacggtgctacgaatttgtttgaaagtcaccacaagtatgtgagagtcaatttgagaatatctacagataaaattcatcatcgttacttcatagagtaagttattttgagattccatcaagagtattcaaattgtactgaaaacaacaatatacgatctaccgtattcttttactgcgtattaggtgaatcaaagtcataatgtcaatgtctgatgcctttcatggtgagtcaaatatataaaaactggacatcaataacaaattgccacaaaatagaagaaattgagttaaaaagtatgctgaatcgaaactgaactcagcgcgatgtcatgttattttcatagaacattaaaaatatgttgaacctgttgacgaacattctatttagacaagctaggaatacctggaaccgacatccactagattaagaagcgtgatcgtcctattatataaggattaacaaaaacacacaaatagtcatctagagacacacaaaacaatcatattttgttgctggaaggaccaacaatacttcgaaatagatttggtgctagtgcaaaacattgtgacgtcagtttaatagatataatcagcaattaaaaataggttacaatgtagtaaccacaaattgatattcacattggaaataaatacaaagaatataatatactctcctagaagaaaagtttgaatggaacagatggtcacatttagttgtctcttgaaaatactgtagtcgttgtcaggccacatgcacctactcagtaggaacacaaaatcctatgctgaaacgttacagggcagtagccttctattaacgtctatattctttggtaaatatatcagcgaagaagaatcagtttaaggtttttatgtcaatatttcatgtcaaaacactggctatctgggaagatgggactttaaagtgaatttaaattgaataaattaaaatttttctccaaaataaaagtttgactctgtgccacttggcttgttattgatgtccagtctatcaagaatttaggaacactgaggacgatttttgttacatataacatccaacaacaggtgcgcaaaacgtatattaacaaccatatctgttaatcaaacagaagtggaacaaatccaaacaccgtcctcatcgaaatcttgcggaggatgtctacgacattgagaaacattcagtagaatttcggggatgttcgaaatccccttttgttacactaatctttcgcgttgccgttttctttgacagatctgctatgcgatctagatctagagcgagctgatctagatcttgagcgtttttcgttgctgcgcgagcgactgtggcttctcttcctagaatcggatctggaacggttcctggagcggctcctggaacgggtgttgctcctgcttctcgaacgacggtctctggaacggcttctagaacgagatctggatctatgcctcctcgacgatctgtatctgttgcagtctctagcatagtgtcctctatctccgcaatcatagcacctgtcatccgggtgaaatggttttccacgagatcggggaggggggccgcggtaacgtccattaccgctcttcccattggacatctcgactctagctcttcgcccacatatcgtccggccatctaatcctcgaatagcatcttctgcgtctctggcgtcttcgaactctacaaaagcaaagccgggtggattcctggctacccaaacgtttcgtagcggtccataatatttaaaagcatcttcgatttcctgtttagaggcactatttcctaaatctccaacatatactttacagtctgaatatcgagacatcttgatgaggtacctctttagcactacaataaaattaagccccgcgaagaggctgaaaacctttcacaaaatattagaagttatttaaatttattatacaatttaaaaacaatatggacgctctttctagttctttatcccg

SEQ ID NO: 3288 - DNA, 2252 bp, Diabrotica virgifera
  SmartBlast Evalue=0; Info=ATP-binding cassette sub-family F member 2 n=4 Tax=Apocrita RepID=E2BI03_9HYME
caatctaattattagtatagatcaatgaaatacttggatttgaatatcacttttgtattcgtaacatgatttaatgaaacaacttatatatgaaacacgtttattaaataaataaaaccaaggccggccaatcatttaatttcgacataccatacaatatgcttaaataattttatgttaaaaatgaatctaacgtgataaaagaattacagtttcttcaatagctcctaataatctgaagtattgctttaaatgtttatcattatttccgttttgccgcatccttcaaaattttagttttcaagtgatctttgtatgaaagaatgtcgccttgccacttcgttactgttcctttttcgcatacccaaatttcttccgcaacctgactgattaatctaaaatcgtgactaacaagcaccattcctccttcaaattcattaatagcatctgcaagagcatcgatcgtttccatatccaagtgattcgtaggttcatcaagaagaagcatatgaggtacttgccatgctagccaagcgaatactaccctgcaccgttgaccgtcagataattgtctaatagggcatacctgttgacgccctgtaagaccataccttcctatgatttttctcatttcttctttttctttaatatcagggaattctttcatcatatattcaagcggcgagaggtccaagtctagcagttcgtgtagatgctgatggtaccgggcaatacgtaaatgagagtttttcctaatcataccttctgttggagtaagatcaccatataataatttcaagagagtactttttcctgctccattgggtcccaccaacgctaacctagtgtccagatctataccgaattccaaatttttataaatcaaaggtgtagaatcgttatatctaaaactgacattttgtaccataattactggtggaggtatagtaccacaactggggaaataaaaagtgacaattttgtcactagtcactttttctgttagaccctgagctaccattttggctagcgttttttctttggactgcgcttgtctcgcaagctttgctgatccgtgaccaaatcgtgcaatatagttcttcatatggttgatttgatcttgttcccaattatactgtttcatttgattttccaaaagttccattctagtcttaacaaaggcgtcataattgccggtataatatttgagcctttttttatttatgtgtattatgtttgtgcatactccgtttaagaaatcttgcgaatgtgatatcaacactaatattctcttataatttcttagttcctcttctaaccatacacaggcatccaaatccaaatggttggtaggttcatctaataagagaagatgtggcttgacataaagagctctagctagtgcaatacgcattctccaacctccactgaaatctttagtcttcttattctgcatttctctggtaaaaccaagaccatgtagaatattagcagctcttgcttcagctgtatcagctgccatatcatccaatctctcgtagatatccattagttgttcctgagattcgtcatcttcacatgcaactagctctctgccaacttttccaaccttactctttcttcatctacctccataacacattcaagagctgttttatcagaagcaggcatctccctagttaaatggaaaatatctatatgatctggaatgggcacttctctgttaccaagtactgccaaaattgtggattttccacttccatttaaacctagaagaccatatcgtctaccacagttcaattccaataaagcatcttgtaacatttcacaaccatggaaagtaatggaaaaagtatctattttcacatctctagattttggatgcactgctaaagaaccggtacatgcacgagcctctgcattcaaacgggcatccgcttcaagttttgcacataaggcttcttcagcacttaattcactcgagccatttgttgcaccattactgagaccatttgttttaagagtgtcattttgctcttctcctttttgtttttcattcttttttcctgcttgtctggcttttgctgcatcttttttacgttgttgttcacgtttcttagcgtcggagggcattgttattaattaatttgaatactttatgctcgataatacctaaaaataaaatcggctcaaaattacatgtgtcctctaattgaatggacacaaaagaggtctatcgtctatggctggcg

SEQ ID NO: 3289 - DNA, 2252 bp, Diabrotica virgifera
  SmartBlast Evalue=0; Info=ATP-binding cassette sub-family F member 2 n=4 Tax=Apocrita RepID=E2BI03_9HYME
caatctaattattagtatagatcaatgaaatacttggatttgaatatcacttttgtattcgtaacatgatttaatgaaacaacttatatatgaaacacgtttattaaataaataaaaccaaggccggccaatcatttaatttcgacataccatacaatatgcttaaataattttatgttaaaaatgaatctaacgtgataaaagaattacagtttcttcaatagctcctaataatctgaagtattgctttaaatgtttatcattatttccgttttgccgcatccttcaaaattttagttttcaagtgatctttgtatgaaagaatgtcgccttgccacttcgtaactgttcctttttcgcatacccaaatttcttccgcaacctgactgattaatctaaaatcgtgactaacaagcaccattcctccttcaaattcattaatagcatctgcaagagcatcgatcgtttccatgtccaagtgattcgtaggttcatcaagaagaagcatatgaggtacttgccatgctagccaagcgaatactaccctgcaccgttgaccgtcagataattgtctaatagggcatacctgttgtcgccctgtaagaccataccttcctatgatttttctcatctcttctttttctttaatatcagggaattctttcatcatatattcaagcggcgagaggtctagatctagcagttcgtgtagatgctgatggtaccgggcaatacgtaaatgagagtttttcctaatcataccttctgttggagtaagatcaccatataataatttcaagagagtactttttcctgctccattgggtcccaccaacgctaacctagtgtccagatctataccgaattccaaatttttataaatcaaaggtgtagaatcgttatatctaaaactgacattttgtaccataattactggtggaggtatagtaccacaactggggaaataaaaagtgacaattttgtcactagtcactttttcggttagaccctgagctaccattttggctagcgttttttctttggactgcgcttgtctcgcaagctttgctgatccgtgaccaaatcgtgcaatatagttcttcatatggttgatttgatcttgttcccaattatactgtttcatttgattttccaaaagttccattctagtcttaacaaaggcgtcataattgccggtataatatttgagcctttttttatttatgtgtattatgtttgtgcatactccgtttaagaaatcttgcgaatgtgatatcaacactaatattctcttataatttcttagttcctcttctaaccatacacaggcatccaaatccaaatggttggtaggttcatctaataagagaagatgtggcttgacataaagagctctagctagtgcaatacgcattctccaacctccactgaaatctttagtcttcttattctgcatttctctggtaaaaccaagaccatgtagaatattagcagctcttgcttcagctgtatcagctgccatatcatccaatctctcgtagatatccattagttgttcctgagattcgtcatcttcacatgcaactagctctctgccaacttttccaaccttactctttcttcatctacctccataacacattcaagagctgttttatcagaagcaggcatctccctagttaaatggaaaatatctatatgatctggaatgggcacttctctgttaccaagtactgccaaaattgtggattttccacttccatttaaacctagaagaccatatcgtctaccacagttcaattccaataaagcatcttgtaacatttcacaaccatggaaagtaatggaaaaagtatctattttcacatctctagattttggatgcactgctaaagaaccggtacatgcacgagcctctgcattcaaacgggcatccgcttcaagttttgcacataaggcttcttcagcacttaattcactcgagccatttgttgcaccattactgagaccatttgttttaagagtgtcattttgctcttctcctttttgtttttcattcttttttcctgcttgtctggcttttgctgcatcttttttacgttgttgttcacgtttcttagcgtcggagggcattgttattaattaatttgaatactttatgctcgataatacctaaaaataaaatcggctcaaaattacatgtgtcctctaattgaatggacacaaaagaggtctatcgtctatggctggcg

SEQ ID NO: 3290 - DNA, 2131 bp, Diabrotica virgifera
  SmartBlast Evalue=0; Info=ATP-binding cassette sub-family F member 2 n=4 Tax=Apocrita RepID=E2BI03_9HYME
ggccggccaatcatttaatttcgacataccatacaatatgcttaaataattttatgttaaaaatgaatctaacgtgataaaagaattacagtttcttcaatagctcctaataatctgaagtattgctttaaatgtttatcattatttccgttttgccgcatccttcaaaattttagttttcaagtgatctttgtatgaaagaatgtcgccttgccacttcgttactgttcctttttcgcatacccaaatttcttccgcaacctgactgattaatctaaaatcgtgactaacaagcaccattcctccttcaaattcattaatagcatctgcaagagcatcgatcgtttccatatccaagtgattcgtaggttcatcaagaagaagcatatgaggtacttgccatgctagccaagcgaatactaccctgcaccgttgaccgtcagataattgtctaatagggcatacctgttgacgccctgtaagaccataccttcctatgatttttctcatttcttctttttctttaatatcagggaattctttcatcatatattcaagcggcgagaggtccaagtctagcagttcgtgtagatgctgatggtaccgggcaatacgtaaatgagagtttttcctaatcataccttctgttggagtaagatcaccatataataatttcaagagagtactttttcctgctccattgggtcccaccaacgctaacctagtgtccagatctataccgaattccaaatttttataaatcaaaggtgtagaatcgttatatctaaaactgacattttgtaccataattactggtggaggtatagtaccacaactggggaaataaaaagtgacaattttgtcactagtcactttttctgttagaccctgagctaccattttggctagcgttttttctttggactgcgcttgtctcgcaagctttgctgatccgtgaccaaatcgtgcaatatagttcttcatatggttgatttgatcttgttcccaattatactgtttcatttgattttccaaaagttccattctagtcttaacaaaggcgtcataattgccggtataatatttgagcctttttttatttatgtgtattatgtttgtgcatactccgtttaagaaatcttgcgaatgtgatatcaacactaatattctcttataatttcttagttcctcttctaaccatacacaggcatccaaatccaaatggttggtaggttcatctaataagagaagatgtggcttgacataaagagctctagctagtgcaatacgcattctccaacctccactgaaatctttagtcttcttattctgcatttctctggtaaaaccaagaccatgtagaatattagcagctcttgcttcagctgtatcagctgccatatcatccaatctctcgtagatatccattagttgttcctgagattcgtcatcttcacatgcaactagctctctgccaacttttccaaccttactctttcttcatctacctccataacacattcaagagctgttttatcagaagcaggcatctccctagttaaatggaaaatatctatatgatctggaatgggcacttctctgttaccaagtactgccaaaattgtggattttccacttccatttaaacctagaagaccatatcgtctaccacagttcaattccaataaagcatcttgtaacatttcacaaccatggaaagtaatggaaaaagtatctattttcacatctctagattttggatgcactgctaaagaaccggtacatgcacgagcctctgcattcaaacgggcatccgcttcaagttttgcacataaggcttcttcagcacttaattcactcgagccatttgttgcaccattactgagaccatttgttttaagagtgtcattttgctcttctcctttttgtttttcattcttttttcctgcttgtctggcttttgctgcatcttttttacgttgttgttcacgtttcttagcgtcggagggcattgttattaattaatttgaatactttatgctcgataatacctaaaaataaaatcggctcaaaattacatgtgtcctctaattgaatggacacaaaagaggtctatcgtctatggctggcg

SEQ ID NO: 3291 - DNA, 2131 bp, Diabrotica virgifera
  SmartBlast Evalue=0; Info=ATP-binding cassette sub-family F member 2 n=4 Tax=Apocrita RepID=E2BI03_9HYME
ggccggccaatcatttaatttcgacataccatacaatatgcttaaataattttatgttaaaaatgaatctaacgtgataaaagaattacagtttcttcaatagctcctaataatctgaagtattgctttaaatgtttatcattatttccgttttgccgcatccttcaaaattttagttttcaagtgatctttgtatgaaagaatgtcgccttgccacttcgtaactgttcctttttcgcatacccaaatttcttccgcaacctgactgattaatctaaaatcgtgactaacaagcaccattcctccttcaaattcattaatagcatctgcaagagcatcgatcgtttccatgtccaagtgattcgtaggttcatcaagaagaagcatatgaggtacttgccatgctagccaagcgaatactaccctgcaccgttgaccgtcagataattgtctaatagggcatacctgttgtcgccctgtaagaccataccttcctatgatttttctcatctcttctttttctttaatatcagggaattctttcatcatatattcaagcggcgagaggtctagatctagcagttcgtgtagatgctgatggtaccgggcaatacgtaaatgagagtttttcctaatcataccttctgttggagtaagatcaccatataataatttcaagagagtactttttcctgctccattgggtcccaccaacgctaacctagtgtccagatctataccgaattccaaatttttataaatcaaaggtgtagaatcgttatatctaaaactgacattttgtaccataattactggtggaggtatagtaccacaactggggaaataaaaagtgacaattttgtcactagtcactttttcggttagaccctgagctaccattttggctagcgttttttctttggactgcgcttgtctcgcaagctttgctgatccgtgaccaaatcgtgcaatatagttcttcatatggttgatttgatcttgttcccaattatactgtttcatttgattttccaaaagttccattctagtcttaacaaaggcgtcataattgccggtataatatttgagcctttttttatttatgtgtattatgtttgtgcatactccgtttaagaaatcttgcgaatgtgatatcaacactaatattctcttataatttcttagttcctcttctaaccatacacaggcatccaaatccaaatggttggtaggttcatctaataagagaagatgtggcttgacataaagagctctagctagtgcaatacgcattctccaacctccactgaaatctttagtcttcttattctgcatttctctggtaaaaccaagaccatgtagaatattagcagctcttgcttcagctgtatcagctgccatatcatccaatctctcgtagatatccattagttgttcctgagattcgtcatcttcacatgcaactagctctctgccaacttttccaaccttactctttcttcatctacctccataacacattcaagagctgttttatcagaagcaggcatctccctagttaaatggaaaatatctatatgatctggaatgggcacttctctgttaccaagtactgccaaaattgtggattttccacttccatttaaacctagaagaccatatcgtctaccacagttcaattccaataaagcatcttgtaacatttcacaaccatggaaagtaatggaaaaagtatctattttcacatctctagattttggatgcactgctaaagaaccggtacatgcacgagcctctgcattcaaacgggcatccgcttcaagttttgcacataaggcttcttcagcacttaattcactcgagccatttgttgcaccattactgagaccatttgttttaagagtgtcattttgctcttctcctttttgtttttcattcttttttcctgcttgtctggcttttgctgcatcttttttacgttgttgttcacgtttcttagcgtcggagggcattgttattaattaatttgaatactttatgctcgataatacctaaaaataaaatcggctcaaaattacatgtgtcctctaattgaatggacacaaaagaggtctatcgtctatggctggcg

SEQ ID NO: 3292 - DNA, 2707 bp, Diabrotica virgifera
  SmartBlast Evalue=1E-100; Info=D-amino acid oxidase n=2 Tax= Aedes aegypti RepID=Q16LE7_AEDAE
gtgagtgttgagttgtgaaagtgtgttcgtgtgttggcattagcacgatgagcgatttaaaaatagctgttgtcggttctggtataataggcctgacgaccggaattgagttattgaagagtgtcaataatgcagaaattacgattgtagcagagggcttcaatactgatacatgcagttgggcagcggcaggaatatttcgaccgggtcacggtttcacagggcccaatagggaaattactcaaaagtggatagatgattcatattattattggaaaaatatcagagacagtgtggaagctgcagaagcaggtgtaacagaaatttctgggtatacattttcaaatagagagaaaagtatcgtcaggaatgctttcattgagaagctggtacccatttacagaaaagctacagaaaaagaattaacaactttgtgcccagattcttacaaatatggatccttttataaaacacttgttacagattctaccgttcatttgccatgggcaactaataagtttaaatctttaggtggaaaaatattaaaacggcatgttaataatttggtatctttaggagatcagtatgacattgtggtgaactgtgctggtttgggggcaaaaaaattatgcaatgatccacaccttactcccataaggggacaagttatcaaggtcaacgcaccatgggtaaaaatgttcttctacgctgaaagcgatacttacataattccaggctttaaccacgttactcttggtggaacgcgccagtacgattcttataattcggaagtagataaatacgatggaatgtcaataagggagagatgcgaaagactagtaccgagtttaaaaccagccacagaagttcgacaggttgtaggtttgcggccacatcgaacgattgtgagggtggaaaaagaaattttactaactgcaggtggtaaaaaggtgaaggttgtacataattatggtcatggtggttacggagtaactactgctccaggaacatcgctatatgcttgtgatttagtaaaagagatatgggcaggaaccagtaagctataagttaaattttcctatactcatcatcatcatcagggcttttcattccaggtggaatgtttgccgctcttacttagagctctcagattcgcttattgcggtgaatcactccgcattccacttgtatgttgtcaaagtttgttgtatgacttggctttcgttactattttcttccactcatttcgatatgtgcatagttccctccagtttctcacttcagaatttgatatctctcatgacctggtcctcccatctctctctgggtcttccccttggtctttcagttctggtttccatctggtgatcttcttaatcagtcggtcgtttttccttctctctatgtgtcccagccatctcagcctctgtgactttaataaatctaactatatcttctcccttcattatgtctcttagttcatggttcattcttcttctcatttctccgttgtccattcttatcgggcccataatccgtctgaagattttcctttcgaatattctcaatttttcttcatctttttccgcgatgcacattgtctcagctgcgtaagtaatactggtctgattgcaactctgtatattctcagttttgtatttctggataagttcttgtccttcataagcctgtgatatctccagtatgttttgttgcctgctagtattcgttccgttacttcttcacttcacttgttttaccattcactattactcccaaatatttaaattgttggactctttgaaaagtgtagttttatattttgatttctcttatccagttatcttctcttctagagcagagtacatatttggtttttccttcgttaatttctacacctcttttccgtgcgtcttttgccaggattgttactgcttcttttaatctttccttgtctcttcccataaaaactaaatcatctgcatatgcaactatttgtgttgaggagtgggctatagttcctttaattttgctggccttgactgttccttctactgctatgttgaataatgtggttgacagggaatcgccttgtcgcactcctgtttctattgcaattgattttgcgctaccttcttctgttatttagctcaagatatttcatttttagctcgagatccatccatggtcatttttgttaatctgattaattttactggaacatcttgatttttcatttcaataaatttatttagttttatacataaaatacgtattatactgagtttttcgattatatgtaatatattatatattttaagagcaaaattatggaataaattaattgttttcagaatgaaaggttttggagagaaattccgagacaggtcgatttttatttctgactttttggcatatatgccatactagtgacgtcatccatctgggcgcgatgacgtaatcgataattattttaataataatagaggtcctgtgctatatcgtacaaaagttattaattttctattcagtagtaaaaccatgatcaaaattatttataccgggtgattaaaaaaataatttttgaattaaattaattcacacaaaaagtagaatgtatttcttggcggtttgaacatttaatttaagcgaaaagtaatgtatatttatgaaataaacattttttctattttctgataccagtaaa

SEQ ID NO: 3293 - DNA, 2315 bp, Diabrotica virgifera
  SmartBlast Evalue=1E-100; Info=D-amino acid oxidase n=2 Tax= Aedes aegypti RepID=Q16LE7_AEDAE
gtgagtgttgagttgtgaaagtgtgttcgtgtgttggcattagcacgatgagcgatttaaaaatagctgttgtcggttctggtataataggcctgacgaccggaattgagttattgaagagtgtcaataatgcagaaattacgattgtagcagagggcttcaatactgatacatgcagttgggcagcggcaggaatatttcgaccgggtcacggtttcacagggcccaatagggaaattactcaaaagtggatagatgattcatattattattggaaaaatatcagagacagtgtggaagctgcagaagcaggtgtaacagaaatttctgggtatacattttcaaatagagagaaaagtatcgtcaggaatgctttcattgagaagctggtacccatttacagaaaagctacagaaaaagaattaacaactttgtgcccagattcttacaaatatggatccttttataaaacacttgttacagattctaccgttcatttgccatgggcaactaataagtttaaatctttaggtggaaaaatattaaaacggcatgttaataatttggtatctttaggagatcagtatgacattgtggtgaactgtgctggtttgggggcaaaaaaattatgcaatgatccacaccttactcccataaggggacaagttatcaaggtcaacgcaccatgggtaaaaatgttcttctacgctgaaagcgatacttacataattccaggctttaaccacgttactcttggtggaacgcgccagtacgattcttataattcggaagtagataaatacgatggaatgtcaataagggagagatgcgaaagactagtaccgagtttaaaaccagccacagaagttcgacaggttgtaggtttgcggccacatcgaacgattgtgagggtggaaaaagaaattttactaactgcaggtggtaaaaaggtgaaggttgtacataattatggtcatggtggttacggagtaactactgctccaggaacatcgctatatgcttgtgatttagtaaaagagatatgggcaggaaccagtaagctataagttaaattttcctatactcatcatcatcatcagggcttttcattccaggtggaatgtttgccgctcttacttagagctctcagattcgcttattgcggtgaatcactccgcattccacttgtatgttgtcaaagtttgttgtatgacttggctttcgttactattttcttccactcatttcgatatgtgcatagttccctccagtttctcacttcagaatttgatatctctcatgacctggtcctcccatctctctctgggtcttccccttggtctttcagttctggtttccatctggtgatcttcttaatcagtcggtcgtttttccttctctctatgtgtcccagccatctcagcctctgtgactttaataaatctaactatatcttctcccttcattatgtctcttagttcatggttcattcttcttctcatttctccgttgtccattcttatcgggcccataatccgtctgaagattttcctttcgaatattctcaatttttcttcatctttttccgcgatgcacattgtctcagctgcgtaagtaatactggtctgattgcaactctgtatattctcagttttgtatttctggataagttcttgtccttcataagcctgtgatatctccagtatgttttgttgcctgctagtattcgttccgttacttcttcacttcacttgttttaccattcactattactcccaaatatttaaattgttggactctttgaaaagtgtagttttatattttgatttctcttatccagttatcttctcttctagagcagagtacatatttggtttttccttcgttaatttctacacctcttttccgtgcgtcttttgccaggattgttactgcttcttttaatctttccttgtctcttcccataaaaactaaatcatctgcatatgcaactatttgtgttgaggagtgggctatagttcctttaattttgctggccttgactgttccttctactgctatgttgaataatgtggttgacagggaatcgcctttagtctaggtgccaaatagaggtcaccgtgtcatcttcaattctgatggacaaactcaacggtttcctatggatccctggctgatgattacgaacttcgagggaggacttcgatccgagctggtcaaacaattgtcataaacaattcaactgtttataaattgtttatcaggctccggctcataaactaaaaaacatacaaaaaaatgtttcaaacaaaatc

SEQ ID NO: 3294 - DNA, 2096 bp, Diabrotica virgifera
  SmartBlast Evalue=2E-14; Info=Endonuclease-reverse transcriptase n=1 Tax=Bombyx mori RepID=D7F179_BOMMO
ttcattggaagggcatctctcacccataatcgtaaatagtatggaagaaataatttttatagaagcaaatacaaccgatattagatgtaagaagaaagtatgtagatgcgaaatatactctgtgtttgttccagtttaattatgaaaagaaacaaattgctacaagaacttgtgggatgttcatcaattcatcccatataaaaataaaaccgtttatagccctaatacgtacttatgtcaaacagtatttacactatagtcggagagcgaaatagttgtcagtgattcatttcgaagttcgtcgattattacggaatttgaggagaaaaaggagtaatttcagtgtcgtgtaaaattatactataattttatgtgtataattgtataattttataattatagatactattattttagtaagcaataagtaacatttcgtgcaacaatttcctgccaactatttcgttctttgggtatcatcatcatcagggcttttcattctggatggaatgcttgccactcttacttagagctctcagattcgcttattgcggtgaatcactccgcattccacttgtatgttgtcaaagtttgttgtatgacttggctttcgttactattttcttccactcatttcgatatgtgcatagttccctccagtttctcacttcagaatttgatatctctcatgacctggtcctcccatctctctctgggtcttccccttggtctttcagttctggtttccatctggtgatcttcttaatcagtcggtcgtttttccttctctctatgtgtcccagccatctcagcctctgtgactttaataaatctaactatatcttctcccttcattatgtctcttagttcatggttcattcttcttctcatttctccgttgtccattcttatcgggcccataatccgtctgaagattttcctttcgaatattctcaatttttcttcatctttttccgcgatgcacattgtctcagctgcgtaagtaatactggtctgattgcaactctgtatattctcagttttgtatttctggataagttcttgtccttcataagcctgtgatatctccagtatgttttgttgcctgctagtattcgttccgttacttcttcacttcacttgttttaccattcactattactcccaaatatttaaattgttggactctttgaaaagtgtagttttatattttgatttctcttatccagttatcttctcttctagagcagagtacatatttggtttttccttcgttaatttctacacctcttttccgtgcgtcttttgccaggattgttactgcttcttttaatctttccttgtctcttcccataaaaactaaatcatctgcatatgcaactatttgtgttgaggagtgggctatagttcctttaattttgctggccttgactgttccttctactgctatgttgaataatgtggttgacagggaatcgccttgtcgcactcctgtttctattgcaattgattttgcgctaccttcttctgttatttagctcaagatatttcatttttagctcgagatccatccatggtcatttttgttaatctgattaattttactggaacatcttgatttttcatttcaataaatttatttagttttatacataaaatacgtattatactgagtttttcgattatatgtaatatattatatattttaagagcaaaattatggaataaattaattgttttcagaatgaaaggttttggagagaaattccgagacaggtcgatttttatttctgactttttggcatatatgccatactagtgacgtcatccatctgggcgcgatgacgtaatcgataattattttaataataatagaggtcctgtgctatatcgtacaaaagttattaattttctattcagtagtaaaaccatgatcaaaattatttataccgggtgattaaaaaaataatttttgaattaaattaattcacacaaaaagtagaatgtatttcttggcggtttgaacatttaatttaagcgaaaagtaatgtatatttatgaaataaacattttttctattttctgataccagtaaa

SEQ ID NO: 3295 - DNA, 1704 bp, Diabrotica virgifera
  SmartBlast Evalue=3E-10; Info=Endonuclease-reverse transcriptase n=1 Tax=Bombyx mori RepID=D7F170_BOMMO
ttcattggaagggcatctctcacccataatcgtaaatagtatggaagaaataatttttatagaagcaaatacaaccgatattagatgtaagaagaaagtatgtagatgcgaaatatactctgtgtttgttccagtttaattatgaaaagaaacaaattgctacaagaacttgtgggatgttcatcaattcatcccatataaaaataaaaccgtttatagccctaatacgtacttatgtcaaacagtatttacactatagtcggagagcgaaatagttgtcagtgattcatttcgaagttcgtcgattattacggaatttgaggagaaaaaggagtaatttcagtgtcgtgtaaaattatactataattttatgtgtataattgtataattttataattatagatactattattttagtaagcaataagtaacatttcgtgcaacaatttcctgccaactatttcgttctttgggtatcatcatcatcagggcttttcattctggatggaatgcttgccactcttacttagagctctcagattcgcttattgcggtgaatcactccgcattccacttgtatgttgtcaaagtttgttgtatgacttggctttcgttactattttcttccactcatttcgatatgtgcatagttccctccagtttctcacttcagaatttgatatctctcatgacctggtcctcccatctctctctgggtcttccccttggtctttcagttctggtttccatctggtgatcttcttaatcagtcggtcgtttttccttctctctatgtgtcccagccatctcagcctctgtgactttaataaatctaactatatcttctcccttcattatgtctcttagttcatggttcattcttcttctcatttctccgttgtccattcttatcgggcccataatccgtctgaagattttcctttcgaatattctcaatttttcttcatctttttccgcgatgcacattgtctcagctgcgtaagtaatactggtctgattgcaactctgtatattctcagttttgtatttctggataagttcttgtccttcataagcctgtgatatctccagtatgttttgttgcctgctagtattcgttccgttacttcttcacttcacttgttttaccattcactattactcccaaatatttaaattgttggactctttgaaaagtgtagttttatattttgatttctcttatccagttatcttctcttctagagcagagtacatatttggtttttccttcgttaatttctacacctcttttccgtgcgtcttttgccaggattgttactgcttcttttaatctttccttgtctcttcccataaaaactaaatcatctgcatatgcaactatttgtgttgaggagtgggctatagttcctttaattttgctggccttgactgttccttctactgctatgttgaataatgtggttgacagggaatcgcctttagtctaggtgccaaatagaggtcaccgtgtcatcttcaattctgatggacaaactcaacggtttcctatggatccctggctgatgattacgaacttcgagggaggacttcgatccgagctggtcaaacaattgtcataaacaattcaactgtttataaattgtttatcaggctccggctcataaactaaaaaacatacaaaaaaatgtttcaaacaaaatc

SEQ ID NO: 3296 - DNA, 3614 bp, Diabrotica virgifera
  SmartBlast Evalue=0; Info="Pre-mRNA-splicing factor clf-1, putative n=1 Tax=Pediculus humanus corporis RepID=E0VIE7_PEDHC"
tgattatatccaccatagccaccttgtggtggatattgccaattttgatattggtattgatctccttgaccgtactggggaggataatagttgggtccttgttgattaccagaatacgggggatatgatggttggtttgatggtggtccatatggagcgttataatttccataatttccttgggatgatggaggcggttgtttggcttctttcgattttgacgatggccccgttgtctcactcttaatttccttcttttttagtccatctttatgttgcttgaccaatttttgatattgttcatgagcttcttgtactaactgaaggttactaccaaaatcttcgagatattctaattttctttgagcaaacaacatcttttgctcagcatctacaccatctttgtccaaaaacatatttaggatttcagtgatatttttttcagttggatctcccttctgtaaagtgacatcaacaagctgcaaatacagtctaggattatttggatctttagcaatagcggtttttaaaattgtttgtgctttttcaacgtccttcatcataaagcaagcaaatctggaatattttattgatatgctgctggcaatgattttgttttttgtactatttatatagtgttcgaaaagttggcaacatttttcgtgatcgccccgtcgtctttctaaatttatccgccgataagcaatctgtaaaacatttggaacagacttttccaaatttactaatatctctgctgctctagacatattgtcaacaccctcctcaaaaatggcccattgcaaatggagatttggtttttttagatggtgaatagtacaagctcgctcatacacatctcttattttaggctgtagctcatggtctctaagattttcaagataatgcacaaactttaaccagaactcttcgtatagagcacatgctatgagacacctttcaaacaatactattatcctcactctgtctccctgctcagtctcataatctaagtaatcttgccagtttttaagctgacatcgttctaaaggttttacatgaaaatatggacgttttatcgcttcttcataattccatctagcagtcactgcggtcaccgtatttttatggagttttcttcgaattgaaattattctttctctaagaatttttgtttcttcgtcggaactaatcactttggtctgatcctcatcaccaggtggcgcgtcattgtctgctggtggggtatcagttatttcgtgcttgagttgctgcctaacctccttccgcaaagcaaaaaattcatctacgtctactaccttgtttggtgcgttattagatatatgttcttggaaattttcaaaatgggttgtgtatccttgcgttggagtacccaacaacctgtcatatatcgccgtcactttttgcaatcgttttgcttcactttcccatttgatatatgaatcccacaatctatcagatctaaattccaagccacatgatgttacagccctttcaaattgagatcgaataaattcttcatcgtcggttcgggttactttaacgtacgtcaaataatgaatccacaagtcaacagataacggtatcgccttcaaacctcgttcaaatacctcttcgcatttctttttatttccctttcttttttcgtaatcagcgtattttcgccaataaccgtagcaatacggataatgagataggaaagcgtcataagcctctctggcagcttccatgtcattttcttgatcaacgtattgtaataaatatgtccatccagtaaaatcagtcggatcatcattaacggctttccagtatttatcaagttctggtaatttcttcggtttaggtttttcttctttgtccttttcagccgaactatcaagagatggttttttagaaggtgcctcattttcggatgttggggatccaggatcgtaatcagtggcaagctttctcttgttactttcttttttggaatcatttttaacggtggggagctcatcttcggagacgacttcagtatctgcaggaagctcagctcttttgggccctggaagttcttcatctgaaacttcctcagcttctggtacttttacagcttgaacaacaggaagctcatcttcggatatattttcagtatctggatcagctttctgcttatcaaaagtttccttttctgtatcttgttttccttctgtatttatagcttctttttgttcaacttttgtcaaatcacctttactttctgcatctccaactaatgattcttcatcgccttttttgttttggttttctgatttttcatcttccttttcgcttttatcttcagttgttacctctttgatctctttttcttcaactttattttctttttctttaacttcttttgattcttcacactccatttcacttttttctgttgtgttctcttttactttctcttcttcttttatttcctctttgtttactttttcttctactttggcatctgtattttcttctacttttgcatctgtattttcttctacttttgcatctgtattttctaattttgcatctgtattttcttctacttttgaatctgtattttctacatttgcatcttctacttttgcatctgtattttcttctacttttgaatctgtattttctacttttgcatctgtattttctttcacttttgtatctgtttcttctacttttgccacatcttgttttttctctgtttcttcctccgttttttccttaacttctttactttctttctcatttttttcgctttcagttttcaactcttcttctgaacatcccttattagttttgatggcatcattttctgattctttctcaacctcttttttattgctgtcagtatcagctggtttttcttcaagttttattttcttttcggctggctcttctacttctggttcagaaacattgggtttagtgtccaatttttctgatgattttaccttactttcgtcagtttgttgggaacttacattatcttctgttttcttgatttcaagatctccatcaacctccattttttctgtatcttccgttttattattttctgtctgcatctcacagaaaactgtcacatcatttaatatcacttgatcatctattgatttaggtttgttttctttgccgttaactttttcagcgtcaatctgattttcgctctgcttgctttcttcagtagtttccattgtttctgttacaggctcttgaacagtttcatctacttcttcatcagaaacttctacttccataagcacaaccttcttacgtgtttttcttgatagtggtcccggtttttcttttttggtaacagcaggcgttgtttttgctgcactagagcgagttttcctgccagtacttgcttctgtctcctccattttttaaaaaccggtgaactaataatccagtatcaaatatttaaatgtagaaacgaagtttagagaacgaattgtgaaaataataaatgttttatattggcaatccaatatttatttaataattactaatttatatttaaaccgctaagcgctgaggctaaatcaatttgtattaaagatggcggttcacac

SEQ ID NO: 3297 - DNA, 2833 bp, Diabrotica virgifera
  SmartBlast Evalue=0; Info="Pre-mRNA-splicing factor clf-1, putative n=1 Tax=Pediculus humanus corporis RepID=E0VIE7_PEDHC"
tgattatatccaccatagccaccttgtggtggatattgccaattttgatattggtattgatctccttgaccgtactggggaggataatagttgggtccttgttgattaccagaatacgggggatatgatggttggtttgatggtggtccatatggagcgttataatttccataatttccttgggatgatggaggcggttgtttggcttctttcgattttgacgatggccccgttgtctcactcttaatttccttcttttttagtccatctttatgttgcttgaccaatttttgatattgttcatgagcttcttgtactaactgaaggttactaccaaaatcttcgagatattctaattttctttgagcaaacaacatcttttgctcagcatctacaccatctttgtccaaaaacatatttaggatttcagtgatatttttttcagttggatctcccttctgtaaagtgacatcaacaagctgcaaatacagtctaggattatttggatctttagcaatagcggtttttaaaattgtttgtgctttttcaacgtccttcatcataaagcaagcaaatctggaatattttattgatatgctgctggcaatgattttgttttttgtactatttatatagtgttcgaaaagttggcaacatttttcgtgatcgccccgtcgtctttctaaatttatccgccgataagcaatctgtaaaacatttggaacagacttttccaaatttactaatatctctgctgctctagacatattgtcaacaccctcctcaaaaatggcccattgcaaatggagatttggtttttttagatggtgaatagtacaagctcgctcatacacatctcttattttaggctgtagctcatggtctctaagattttcaagataatgcacaaactttaaccagaactcttcgtatagagcacatgctatgagacacctttcaaacaatactattatcctcactctgtctccctgctcagtctcataatctaagtaatcttgccagtttttaagctgacatcgttctaaaggttttacatgaaaatatggacgttttatcgcttcttcataattccatctagcagtcactgcggtcaccgtatttttatggagttttcttcgaattgaaattattctttctctaagaatttttgtttcttcgtcggaactaatcactttggtctgatcctcatcaccaggtggcgcgtcattgtctgctggtggggtatcagttatttcgtgcttgagttgctgcctaacctccttccgcaaagcaaaaaattcatctacgtctactaccttgtttggtgcgttattagatatatgttcttggaaattttcaaaatgggttgtgtatccttgcgttggagtacccaacaacctgtcatatatcgccgtcactttttgcaatcgttttgcttcactttcccatttgatatatgaatcccacaatctatcagatctaaattccaagccacatgatgttacagccctttcaaattgagatcgaataaattcttcatcgtcggttcgggttactttaacgtacgtcaaataatgaatccacaagtcaacagataacggtatcgccttcaaacctcgttcaaatacctcttcgcatttctttttatttccctttcttttttcgtaatcagcgtattttcgccaataaccgtagcaatacggataatgagataggaaagcgtcataagcctctctggcagcttccatgtcattttcttgatcaacgtattgtaataaatatgtccatccagtaaaatcagtcggatcatcattaacggctttccagtatttatcaagttctggtaatttcttcggtttaggtttttcttctttgtccttttcagccgaactatcaagagatggttttttagaaggtgcctcattttcggatgttggggatccaggatcgtaatcagtggcaagctttctcttgttactttcttttttggaatcatttttaacggtggggagctcatcttcggagacgacttcagtatctgcaggaagctcagctcttttgggccctggaagttcttcatctgaaacttcctcagcttctggtacttttacagcttgaacaacaggaagctcatcttcggatatattttcagtatctggatcagctttctgcttatcaaaagtttccttttctgtatcttgttttccttctgtatttatagcttctttttgttcaacttttgtcaaatcacctttactttctgcatctccaactaatgattcttcatcgccttttttgttttggttttctgatttttcatcttccttttcgcttttatcttcagttgttacctctttgatctctttttcttcaactttattttctttttctttaacttcttttgattcttcacactccatttcacttttttctgttgtgttctcttttactttctcttcttcttttatttcctctttgtttactttttcttctactttggcatctgtattttcttctacttttgcatctgtattttcttctacttttgcatctgtattttctaattttgcatctgtattttcttctacttttgaatctgtattttctacatttgcatcttctacttttgcatctgtattttcttctacttttgaatctgtattttctacttttgcatcttttacttttgcatctgtattttctttcacttttgcatctgtttcttctacttttgccacatcttgttttttctctgtttcttcctccgttttttccttaacgtctttactttctttctcatttttttcgctttcagttttcaactcttcttctg

SEQ ID NO: 3298 - DNA, 1455 bp, Diabrotica virgifera
ttcacttttgtatctgtttcttctacttttgccacatcttgttttttctctgtttcttcctccgttttttccttaacttctttactttctttctcatttttttttgttttggttttctgattcttcatcgccttttttgttttggttttctgatttttcatcttccttttcgcttttatcttcagttgttacctctttgatctctttttcttcaactttattttctttttctttaacttcttttgattcttcacactccatttcacttttttctgttgtgttctcttttactttctcttcttcttttatttcctctttgtttactttttcttctactttggcatctgtattttcttctacttttgcatctgtattttcttctacttttgcatctgtattttctaattttgcatctgtattttcttctacttttgaatctgtattttctacatttgcatcttctacttttgcatctgtattttcttctacttttgaatctgtattttctacttttgcatctgtattttctttcacttttgtatctgtttcttctacttttgccacatcttgttttttctctgtttcttcctccgttttttccttaacttctttactttctttctcatttttttcgctttcagttttcaactcttcttctgaacatcccttattagttttgatggcatcattttctgattctttctcaacctcttttttattgctgtcagtatcagctggtttttcttcaagttttattttcttttcggctggctcttctacttctggttcagaaacattgggtttagtgtccaatttttctgatgattttaccttactttcgtcagtttgttgggaacttacattatcttctgttttcttgatttcaagatctccatcaacctccattttttctgtatcttccgttttattattttctgtctgcatctcacagaaaactgtcacatcatttaatatcacttgatcatctattgatttaggtttgttttctttgccgttaactttttcagcgtcaatctgattttcgctctgcttgctttcttcagtagtttccattgtttctgttacaggctcttgaacagtttcatctacttcttcatcagaaacttctacttccataagcacaaccttcttacgtgtttttcttgatagtggtcccggtttttcttttttggtaacagcaggcgttgtttttgctgcactagagcgagttttcctgccagtacttgcttctgtctcctccattttttaaaaaccggtgaactaataatccagtatcaaatatttaaatgtagaaacgaagtttagagaacgaattgtgaaaataataaatgttttatattggcaatccaatatttatttaataattactaatttatatttaaaccgctaagcgctgaggctaaatcaatttgtattaaagatggcggttcacac

SEQ ID NO: 3299 - DNA, 674 bp, Diabrotica virgifera
ttcacttttgtatctgtttcttctacttttgccacatcttgttttttctctgtttcttcctccgttttttccttaacttctttactttctttctcatttttttttgttttggttttctgattcttcatcgccttttttgttttggttttctgatttttcatcttccttttcgcttttatcttcagttgttacctctttgatctctttttcttcaactttattttctttttctttaacttcttttgattcttcacactccatttcacttttttctgttgtgttctcttttactttctcttcttcttttatttcctctttgtttactttttcttctactttggcatctgtattttcttctacttttgcatctgtattttcttctacttttgcatctgtattttctaattttgcatctgtattttcttctacttttgaatctgtattttctacatttgcatcttctacttttgcatctgtattttcttctacttttgaatctgtattttctacttttgcatcttttacttttgcatctgtattttctttcacttttgcatctgtttcttctacttttgccacatcttgttttttctctgtttcttcctccgttttttccttaacgtctttactttctttctcatttttttcgctttcagttttcaactcttcttctg

SEQ ID NO: 3300 - DNA, 2368 bp, Diabrotica virgifera
  SmartBlast Evalue=0; Info=Rab GTPase-activating protein 1 n=2 Tax=Formicidae RepID=E2B8J0_9HYME
ggtcagattttattatataaaaaataaagcacaaggttggcgcatatcgtgattattgatacaagggacattctgaagtaattccagcaattcatatggcaaatgtccattatggtctgtttttcgacaaatccggtctggactaattaccatttccaattatttgagtaacattgaacagtgttagatttattttgaattacttagtgccattaaaacctgattacgacattcagcttcaacgtgagccaatttcgtctgggctaattctaattctaactctcgtatcctttcttcttcattggcgttttcgttactactagtcgtcttatctatactcgctttttctaaatgctgtgaacaactttcacaattcgataccttagtctttaggctatcaagttctgcttttacttcgtgcaactgggtatccagccgttgccttaccaacttgtaatcgttaataatggccgcgttgctgcttttatcgctctccgcctgattcacctccctcttcaacatctctttcagctgacttatctcgtccatcatcatcttgcgttcgtcttcgtatcgcacgacggccaatcggagctgttcgacctcgctcgcctctttctccgcttgatccgcagcctctgaatccaaattgataatttcccagctgtctttgagagctatgaaatcggcttcgtatctcttaagtttcttcactttaatactgcaagctagtttgataagttgtttggcagcttcttcagatctgcactttttcggtagagagactctgaagtactttaatataccttcaaaatctaactgtaggaggtcttttttgcacgtcattaaaagggctatggcaacttgaaacaaggtatcaataccttgcaaaagaaaaatgtctataacgtggaacatgaagtacaagggaaatctggcagtgaacacagtcaggaaccactgcgaggcgaacatgtgtgtctcgatgtggtgctcggtaaaatgtaaagacagcgacgacaggtgctcttccattagtctatttaattggtataaacgtaaatatagattgtcaaaaccgtgtttgtacaagtctctcaaatggtagtcgtacatgagtttcaccaatatacaaaaggcttgttcttctggcatgtgtaggattagagtcgcagccagataacttagtccttggcaatatcccacttctgagtcatagatggcatatgctttgctcaccctatacaaagaatcttgtcccaatccaccggcctctttgaagaactcgtgagctggcaaagttcgagctatgtctcgctggatcacattttcacaactggattcctttgttataagcaatcgatagttctccatcatggtcgagttttcatcgattccagcaagtctctgccatacctctccccttagagcctcgggaacacctaattttactagcgccgacaactgttttggtctttgtttgaaatttgtcgatttccatttttgtagaatgtccgcccaggattctaatacgtcgacagaacaatccttggacacagaaccagttccgcttaatagaggctcatcaccatctgaaaaatactcttctttgggcgtaagagtatctatcgacgttatacttggagaatgtatcaaactggagaggttcaagttcagattcagaagatttcgatccaattcacccgaagtttccatgtttagcacttcgtaatagacgtcattgagttcggagacaacctcttttaagtttaagaaaaactgctggatcagacttttcctttggaaataccaaaaagtcctctcactttgggaatacacgcggacaggagtctcgattaaaaatctcaccggttcctgtatgcctctgatgaccaaatctacagccacggtcatgaactgcttgaaatctttcggggtttcggtattcagtagttcaaaattgtcttccgttgggtcccagtcggcagatattaacgtacagttacgttcgtgagaggcagctgctccggaagcagtctgttcttgcatttctaacaatctcatgtcagaatgtttgacgtgtctcccggcagccactaagactccaaagcaacgttcgatgaacaaatggggaccattatccgatacctgtcggatgcttagactcaactgttttcctacgttcgctttcagcctaaatccgttcttatctttgcctactgtcgaataagaacccttgccatcatcttcttttatctctaggttaacctcgaaaacatacaacaatatcctagcttcggaattggtggtcatcgagccggtcataacgtctccgccagacgttatggactactcattgtactcacgg

SEQ ID NO: 3301 - DNA, 2338 bp, Diabrotica virgifera
  SmartBlast Evalue=0; Info=Rab GTPase-activating protein 1 n=2 Tax=Formicidae RepID=E2B8J0_9HYME
ggtcagattttattatataaaaaataaagcacaaggttggcgcatatcgtgattattgatacaagggacattctgaagtaattccagcaattcatatggcaaatgtccattatggtctgtttttcgacaaatccggtctggactaattaccatttccaattatttgagtaacattgaacagtgttagatttattttgaattacttagtgccattaaaacctgattacgacattcagcttcaacgtgagccaatttcgtctgggctaattctaattctaactctcgtatcctttcttcttcattggcgttttcgttactactagtcgtcttatctatactcgctttttctaaatgctgtgaacaactttcacaattcgataccttagtctttaggctatcaagttctgcttttacttcgtgcaactgggtatccagccgttgccttaccaacttgtaatcgttaataatggccgcgttgctgcttttatcgctctccgcctgattcacctccctcttcaacatctctttcagctgacttatctcgtccatcatcatcttgcgttcgtcttcgtatcgcacgacggccaatcggagctgttcgacctcgctcgcctctttctccgcttgatccgcagcctctttgagagctatgaaatcggcttcgtatctcttaagtttcttcactttaatactgcaagctagtttgataagttgtttggcagcttcttcagatctgcactttttcggtagagagactctgaagtactttaatataccttcaaaatctaactgtaggaggtcttttttgcacgtcattaaaagggctatggcaacttgaaacaaggtatcaataccttgcaaaagaaaaatgtctataacgtggaacatgaagtacaagggaaatctggcagtgaacacagtcaggaaccactgcgaggcgaacatgtgtgtctcgatgtggtgctcggtaaaatgtaaagacagcgacgacaggtgctcttccattagtctatttaattggtataaacgtaaatatagattgtcaaaaccgtgtttgtacaagtctctcaaatggtagtcgtacatgagtttcaccaatatacaaaaggcttgttcttctggcatgtgtaggattagagtcgcagccagataacttagtccttggcaatatcccacttctgagtcatagatggcatatgctttgctcaccctatacaaagaatcttgtcccaatccaccggcctctttgaagaactcgtgagctggcaaagttcgagctatgtctcgctggatcacattttcacaactggattcctttgttataagcaatcgatagttctccatcatggtcgagttttcatcgattccagcaagtctctgccatacctctccccttagagcctcgggaacacctaattttactagcgccgacaactgttttggtctttgtttgaaatttgtcgatttccatttttgtagaatgtccgcccaggattctaatacgtcgacagaacaatccttggacacagaaccagttccgcttaatagaggctcatcaccatctgaaaaatactcttctttgggcgtaagagtatctatcgacgttatacttggagaatgtatcaaactggagaggttcaagttcagattcagaagatttcgatccaattcacccgaagtttccatgtttagcacttcgtaatagacgtcattgagttcggagacaacctcttttaagtttaagaaaaactgctggatcagacttttcctttggaaataccaaaaagtcctctcactttgggaatacacgcggacaggagtctcgattaaaaatctcaccggttcctgtatgcctctgatgaccaaatctacagccacggtcatgaactgcttgaaatctttcggggtttcggtattcagtagttcaaaattgtcttccgttgggtcccagtcggcagatattaacgtacagttacgttcgtgagaggcagctgctccggaagcagtctgttcttgcatttctaacaatctcatgtcagaatgtttgacgtgtctcccggcagccactaagactccaaagcaacgttcgatgaacaaatggggaccattatccgatacctgtcggatgcttagactcaactgttttcctacgttcgctttcagcctaaatccgttcttatctttgcctactgtcgaataagaacccttgccatcatcttcttttatctctaggttaacctcgaaaacatacaacaatatcctagcttcggaattggtggtcatcgagccggtcataacgtctccgccagacgttatggactactcattgtactcacgg

SEQ ID NO: 3302 - DNA, 1872 bp, Diabrotica virgifera
  SmartBlast Evalue=1E-155; Info=Rab GTPase-activating protein 1 n=2 Tax=Formicidae RepID=E2B8J0_9HYME
ggtcagattttattatataaaaaataaagcacaaggttggcgcatatcgtgattattgatacaagggacattctgaagtaattccagcaattcatatggcaaatgtccattatggtctgtttttcgacaaatccggtctggactaattaccatttccaattatttgagtaacattgaacagtgttagatttattttgaattacttagtgccattaaaacctgattacgacattcagcttcaacgtgagccaatttcgtctgggctaattctaattctaactctcgtatcctttcttcttcattggcgttttcgttactactagtcgtcttatctatactcgctttttctaaatgctgtgaacaactttcacaattcgataccttagtctttaggctatcaagttctgcttttacttcgtgcaactgggtatccagccgttgccttaccaacttgtaatcgttaataatggccgcgttgctgcttttatcgctctccgcctgattcacctccctcttcaacatctctttcagctgacttatctcgtccatcatcatcttgcgttcgtcttcgtatcgcacgacggccaatcggagctgttcgacctcgctcgcctctttctccgcttgatccgcagcctctgaatccaaattgataatttcccagctgtctttgagagctatgaaatcggcttcgtatctcttaagtttcttcactttaatactgcaagctagtttgataagttgtttggcagcttcttcagatctgcactttttcggtagagagactctgaagtactttaatataccttcaaaatctaactgtaggaggtcttttttgcacgtcattaaaagggctatggcaacttgaaacaaggtatcaataccttgcaaaagaaaaatgtctataacgtggaacatgaagtacaagggaaatctggcagtgaacacagtcaggaaccactgcgaggcgaacatgtgtgtctcgatgtggtgctcggtaaaatgtaaagacagcgacgacaggtgctcttccattagtctatttaattggtataaacgtaaatatagattgtcaaaaccgtgtttgtacaagtctctcaaatggtagtcgtacatgagtttcaccaatatacaaaaggcttgttcttctggcatgtgtaggattagagtcgcagccagataacttagtccttggcaatatcccacttctgagtcatagatggcatatgctttgctcaccctatacaaagaatcttgtcccaatccaccggcctctttgaagaactcgtgagctggcaaagttcgagctatgtctcgctggatcacattttcacaactggattcctttgttataagcaatcgatagttctccatcatggtcgagttttcatcgattccagcaagtctctgccatacctctccccttagagcctcgggaacacctaattttactagcgccgacaactgttttggtctttgtttgaaatttgtcgatttccatttttgtagaatgtccgcccaggattctaatacgtcgacagaacaatccttggacacagaaccagttccgcttaatagaggctcatcaccatctgaaaaatactcttctttgggcgtaagagtatctatcgacgttatacttggagaatgtatcaaactggagaggttcaagttcagattcagaagatttcgatccaattcacccgaagtttccatgtttagcacttcgtaatagacgtcattgagttcggagacaacctgtcacatactatatactatatagtccaattggaaagttcgaaatattttcacctattctccgttgcgaaacgataattttgaaaaaacaaaaccatttacacaactgtcaag

SEQ ID NO: 3303 - DNA, 1842 bp, Diabrotica virgifera
  SmartBlast Evalue=1E-158; Info=Rab GTPase-activating protein 1 n=2 Tax=Formicidae RepID=E2B8J0_9HYME
ggtcagattttattatataaaaaataaagcacaaggttggcgcatatcgtgattattgatacaagggacattctgaagtaattccagcaattcatatggcaaatgtccattatggtctgtttttcgacaaatccggtctggactaattaccatttccaattatttgagtaacattgaacagtgttagatttattttgaattacttagtgccattaaaacctgattacgacattcagcttcaacgtgagccaatttcgtctgggctaattctaattctaactctcgtatcctttcttcttcattggcgttttcgttactactagtcgtcttatctatactcgctttttctaaatgctgtgaacaactttcacaattcgataccttagtctttaggctatcaagttctgcttttacttcgtgcaactgggtatccagccgttgccttaccaacttgtaatcgttaataatggccgcgttgctgcttttatcgctctccgcctgattcacctccctcttcaacatctctttcagctgacttatctcgtccatcatcatcttgcgttcgtcttcgtatcgcacgacggccaatcggagctgttcgacctcgctcgcctctttctccgcttgatccgcagcctctttgagagctatgaaatcggcttcgtatctcttaagtttcttcactttaatactgcaagctagtttgataagttgtttggcagcttcttcagatctgcactttttcggtagagagactctgaagtactttaatataccttcaaaatctaactgtaggaggtcttttttgcacgtcattaaaagggctatggcaacttgaaacaaggtatcaataccttgcaaaagaaaaatgtctataacgtggaacatgaagtacaagggaaatctggcagtgaacacagtcaggaaccactgcgaggcgaacatgtgtgtctcgatgtggtgctcggtaaaatgtaaagacagcgacgacaggtgctcttccattagtctatttaattggtataaacgtaaatatagattgtcaaaaccgtgtttgtacaagtctctcaaatggtagtcgtacatgagtttcaccaatatacaaaaggcttgttcttctggcatgtgtaggattagagtcgcagccagataacttagtccttggcaatatcccacttctgagtcatagatggcatatgctttgctcaccctatacaaagaatcttgtcccaatccaccggcctctttgaagaactcgtgagctggcaaagttcgagctatgtctcgctggatcacattttcacaactggattcctttgttataagcaatcgatagttctccatcatggtcgagttttcatcgattccagcaagtctctgccatacctctccccttagagcctcgggaacacctaattttactagcgccgacaactgttttggtctttgtttgaaatttgtcgatttccatttttgtagaatgtccgcccaggattctaatacgtcgacagaacaatccttggacacagaaccagttccgcttaatagaggctcatcaccatctgaaaaatactcttctttgggcgtaagagtatctatcgacgttatacttggagaatgtatcaaactggagaggttcaagttcagattcagaagatttcgatccaattcacccgaagtttccatgtttagcacttcgtaatagacgtcattgagttcggagacaacctgtcacatactatatactatatagtccaattggaaagttcgaaatattttcacctattctccgttgcgaaacgataattttgaaaaaacaaaaccatttacacaactgtcaag

SEQ ID NO: 3304 - DNA, 2294 bp, Diabrotica virgifera
aacatatatttactaaatatgcacttacatcttaatagtattatactacgttagtatttacatgtaaaccgacaaaagtcagcgaatgccaaattaaaaataaatgaaacaagtgcgtacctaataaaaatgcatacgaaaatccgaatttggcaaaaaactaagatttatatatacaaaaaaatgctgaatctgaataaaatatgcatgacatataaactacattaaaagatataatagtaataatagtaataataaagaaatatataatggcatcttgacaaaactgatcaatacacagaaaaaatataaacaaaaccacagcttgtcacctttttcactaggtacttacaaggtcgtatttttgatagatcactatgtaatttaaaataactagcatcatagttgtaataataaacctagtccatcagtcaatatttataatcagtcaacattgactaagcctactgccctgtaatctagaactcacagaaaacagccagacgatattaactgactgtgtaacagaaaaaacaagtccagagttatgattttcaatgttgtacataaagactgttttcgagtatactatttgttgttaacagaaaatgatataacaaaaatttacatgaaattattgtgtacaatattaagacaagaagttttgtgtattacattatcactttttcctattagaatatgttatgtgattctacgcattacatgctaaaaaagtactttttatatttttgtgatggtacatgtactgttaacctcaatttccttcttattttcttttaagaatattttaacctcattttcctcaacatttaacctagttagttttatctttgatattttatattacaaagatatgttatatgatggataagaaaactctattattatcagctgcttccattgcaacatttcttaaaagaaaagttaaccttaaaagaaccaatgtgacagtataacgaaaataacctaactgcgcatgcctgtgtactaaaaattgttatcaaataggacatgttctaatttgtataacattttctgttaacagattttgtttcctgttttacattgtgacaaaacttagtataccattttcttatatcattttatgttatagtctaaaacagacttaagattgaagagctctttttgatcagtatatggaggacagtgtggagttggtattgttaaatcagtactcttgggcatcaaccaagtgttaaggtactagtacacttttggtttaaaaaaatcgagttttctacattgttcgactcctcacactcattctaaaagaactttgttgtcaatatctataccgtacaacacataattcagataactacagtatagccttttactacaaaaacacgcttacgtcattaaagatttctgacgtcagagcattgccaaaacatcagaatatgacttttcatcatggtcatgtttattgtataagctaggcatcatttgttttgctttgttcttgtttactgtacaaataatatctgtaactctttattctaattaatgatgtcaatcggttttcattacctacttgtcgaaatacaaagaataatattatataatatctgacaagtaatgatgcctagcttctcgcgaaacaaaaaacatgagacatgatgaaaagtcatattccaatgttgtggcaatgcatgtcagaaatcttgaatgacgcaagcgtgcttttgtagtaaaaatactatatgctagtataatggatacatataaattaagcaaagtatgctaaaaattacactaataaccatcaaaaatcgaccagctgtatgtatttatcaattatttattacttggtgttttcttatggactatgtttgctcttcaaagctactttttcgttgactattattacaagaaattaaaaagcagactatgaacttagatacaagaaactactgcaatttgttcaattttcgataaattttatgtttgtgtgcgcttggaggaatactgaaattaaaaaaatattcctatagagtcaataaaagttagtcaaaacttttgagcgacataaatataacatatttttgacataattaataatagggcaacatgaagatagcttcaaatgaagctgcacagaacgaaaaattggtgattaacaaaagtgttgccctgtccttataatgtctatgttgtatgcttcaaatataaagtaagtaatcaagcttttaaaaagtacatttttattatattattttatgaattctgcaatttttcaatttatatacagc

SEQ ID NO: 3305 - DNA, 2271 bp, Diabrotica virgifera
atccatttctaggtcagtaaaagaacgtcgaatacgaggataccatgtaattttccgtgtcactaccgaattacatgaaaatttgaatttaggttcgtcttaacctctacttcacttttggactcactccagagttccttttacttaggggacgaaagtcactcctcggagatgaaaaatcatacgttcaaaataagtccggaaatggataaactgactagttctaagcaatctttgttttatagagtttttcactaagtcaatactttttgcgtcatttgcgagtaaaaatgttcatttttcaacaaataaataacacattttaaacggttcttcgcaaataactcaaacataagcattttatcgaaaaaaaaatagtctagcgaaaacgtagctcataaaatgcgaaaaaaaagatgtctacagactcagtggaagtagagttgtagctcttgaaaagtaggttcttattcgtcaaattccaaatcgaacatttcaacgtgaaatatagtgatgtaaaaaaaagtacctatgcgttacaaagtaatgtctgttttagactatacctttttttgttaacagaacatggtataacaaaaacttacatgaaatgattgtgtacaatattcacacaagaagttttgtgtattacattatcactttttcctattagaatatgttatgtgattctacgcattacatgctaaaaaagtactttttatatttttgtgatggtacatgtactgttaacctcaatttccttcttattttcttttaagaatattttaacctcattttcctcaacatttaacctagttagttttatctttgatattttatattacaaagatatgttatatgatggataagaaaactctattattatcagctgcttccattgcaacatttcttaaaagaaaagttaaccttaaaagaaccaatgtgacagtataacgaaaataacctaactgcgcatgcctgtgtactaaaaattgttatcaaataggacatgttctaatttgtataacattttctgttaacagattttgtttcctgttttacattgtgacaaaacttagtataccattttcttatatcattttatgttatagtctaaaacagacttaagattgaagagctctttttgatcagtatatggaggacagtgtggagttggtattgttaaatcagtactcttgggcatcaaccaagtgttaaggtactagtacacttttggtttaaaaaaatcgagttttctacattgttcgactcctcacactcattctaaaagaactttgttgtcaatatctataccgtacaacacataattcagataactacagtatagccttttactacaaaaacacgcttacgtcattaaagatttctgacgtcagagcattgccaaaacatcagaatatgacttttcatcatggtcatgtttattgtataagctaggcatcatttgttttgctttgttcttgtttactgtacaaataatatctgtaactctttattctaattaatgatgtcaatcggttttcattacctacttgtcgaaatacaaagaataatattatataatatctgacaagtaatgatgcctagcttctcgcgaaacaaaaaacatgagacatgatgaaaagtcatattccaatgttgtggcaatgcatgtcagaaatcttgaatgacgcaagcgtgcttttgtagtaaaaatactatatgctagtataatggatacatataaattaagcaaagtatgctaaaaattacactaataaccatcaaaaatcgaccagctgtatgtatttatcaattatttattacttggtgttttcttatggactatgtttgctcttcaaagctactttttcgttgactattattacaagaaattaaaaagcagactatgaacttagatacaagaaactactgcaatttgttcaattttcgataaattttatgtttgtgtgcgcttggaggaatactgaaattaaaaaaatattcctatagagtcaataaaagttagtcaaaacttttgagcgacataaatataacatatttttgacataattaataatagggcaacatgaagatagcttcaaatgaagctgcacagaacgaaaaattggtgattaacaaaagtgttgccctgtccttataatgtctatgttgtatgcttcaaatataaagtaagtaatcaagcttttaaaaagtacatttttattatattattttatgaattctgcaatttttcaatttatatacagc

SEQ ID NO: 3306 - DNA, 1778 bp, Diabrotica virgifera
aacatatatttactaaatatgcacttacatcttaatagtattatactacgttagtatttacatgtaaaccgacaaaagtcagcgaatgccaaattaaaaataaatgaaacaagtgcgtacctaataaaaatgcatacgaaaatccgaatttggcaaaaaactaagatttatatatacaaaaaaatgctgaatctgaataaaatatgcatgacatataaactacattaaaagatataatagtaataatagtaataataaagaaatatataatggcatcttgacaaaactgatcaatacacagaaaaaatataaacaaaaccacagcttgtcacctttttcactaggtacttacaaggtcgtatttttgatagatcactatgtaatttaaaataactagcatcatagttgtaataataaacctagtccatcagtcaatatttataatcagtcaacattgactaagcctactgccctgtaatctagaactcacagaaaacagccagacgatattaactgactgtgtaacagaaaaaacaagtccagagttatgattttcaatgttgtacataaagactgttttcgagtatactatttgttgttaacagaaaatgatataacaaaaatttacatgaaattattgtgtacaatattaagacaagaagttttgtgtattacattatcactttttcctattagaatatgttatgtgattctacgcattacatgctaaaaaagtactttttatatttttgtgatggtacatgtactgttaacctcaatttccttcttattttcttttaagaatattttaacctcattttcctcaacatttaacctagttagttttatctttgatattttatattacaaagatatgttatatgatggataagaaaactctattattatcagctgcttccattgcaacatttcttaaaagaaaagttaaccttaaaagaaccaatgtgacagtataacgaaaataacctaactgcgcatgcctgtgtactaaaaattgttatcaaataggacatgttctaatttgtataacattttctgttaacagattttgtttcctgttttacattgtgacaaaacttagtataccattttcttatatcattttatgttatagtctaaaacagacttaagattgaagagctctttttgatcagtatatggaggacagtgtggagttggtattgttaaatcagtactcttgggcatcaaccaagtgttaaggtactagtacacttttggtttaaaaaaatcgagttttctacattgttcgactcctcacactcattctaaaagaactttgttgtcaatatctataccgtacaacacataattcagataactacagtatagccttttactacaaaaacacgcttacgtcattaaagatttctgacgtcagagcattgccaaaacatcagaatatgacttttcatcatcaccatgtttcttgtacagtgagaagctaggcgttattgtttagcttctccctgtacacgaaacatggcgatgatgaaaagtcattccaatgctttggcaaggctctgacgtcaaaaatcctgaatgacgcatgcgcgctttttgtggcaaaaatactattgaatattcgtggatggctatcgaccgtttactgttcgacttttgtgtgtttcgctcgttttcctaaacctaacaaaaatacataagactatcctacgaaatggtactgaagctacttttttttactgtaaagcgccatatatttttatgtacacattaaa

SEQ ID NO: 3307 - DNA, 1755 bp, Diabrotica virgifera
atccatttctaggtcagtaaaagaacgtcgaatacgaggataccatgtaattttccgtgtcactaccgaattacatgaaaatttgaatttaggttcgtcttaacctctacttcacttttggactcactccagagttccttttacttaggggacgaaagtcactcctcggagatgaaaaatcatacgttcaaaataagtccggaaatggataaactgactagttctaagcaatctttgttttatagagtttttcactaagtcaatactttttgcgtcatttgcgagtaaaaatgttcatttttcaacaaataaataacacattttaaacggttcttcgcaaataactcaaacataagcattttatcgaaaaaaaaatagtctagcgaaaacgtagctcataaaatgcgaaaaaaaagatgtctacagactcagtggaagtagagttgtagctcttgaaaagtaggttcttattcgtcaaattccaaatcgaacatttcaacgtgaaatatagtgatgtaaaaaaaagtacctatgcgttacaaagtaatgtctgttttagactatacctttttttgttaacagaacatggtataacaaaaacttacatgaaatgattgtgtacaatattcacacaagaagttttgtgtattacattatcactttttcctattagaatatgttatgtgattctacgcattacatgctaaaaaagtactttttatatttttgtgatggtacatgtactgttaacctcaatttccttcttattttcttttaagaatattttaacctcattttcctcaacatttaacctagttagttttatctttgatattttatattacaaagatatgttatatgatggataagaaaactctattattatcagctgcttccattgcaacatttcttaaaagaaaagttaaccttaaaagaaccaatgtgacagtataacgaaaataacctaactgcgcatgcctgtgtactaaaaattgttatcaaataggacatgttctaatttgtataacattttctgttaacagattttgtttcctgttttacattgtgacaaaacttagtataccattttcttatatcattttatgttatagtctaaaacagacttaagattgaagagctctttttgatcagtatatggaggacagtgtggagttggtattgttaaatcagtactcttgggcatcaaccaagtgttaaggtactagtacacttttggtttaaaaaaatcgagttttctacattgttcgactcctcacactcattctaaaagaactttgttgtcaatatctataccgtacaacacataattcagataactacagtatagccttttactacaaaaacacgcttacgtcattaaagatttctgacgtcagagcattgccaaaacatcagaatatgacttttcatcatcaccatgtttcttgtacagtgagaagctaggcgttattgtttagcttctccctgtacacgaaacatggcgatgatgaaaagtcattccaatgctttggcaaggctctgacgtcaaaaatcctgaatgacgcatgcgcgctttttgtggcaaaaatactattgaatattcgtggatggctatcgaccgtttactgttcgacttttgtgtgtttcgctcgttttcctaaacctaacaaaaatacataagactatcctacgaaatggtactgaagctacttttttttactgtaaagcgccatatatttttatgtacacattaaa

SEQ ID NO: 3308 - DNA, 2146 bp, Diabrotica virgifera
  SmartBlast Evalue=5E-67; Info=Leucine-rich transmembrane protein n=1 Tax=Aedes aegypti RepID=Q17IL4_AEDAE
gtgcttagacgaatatacccatcttatctcgtttgtttgttttcacctgcaatataggtatagttttatcttttgatacaggtctgaataacacatatttacccaacattaaaacagataagataagatttttgctacggaaaaacggatccaatatagatttttgtatttagaacaaaatagtaactaatgttaatcgtgtacgagtttttattgatgtagtgctgttataaacaaaaaggattacagtgaagtaactgagtttgtaatttattggtatagtgaaaatgaaaaacctcggaatttttgcagtgtttaccattctattagtttatacacgtgctgataatttggacgattttccattatgtaaagcatgtggctgtagcttcaactccaacaacactgaagctaatgtaacctgcacaaaacaaaatccgagccaactcctacaggattacttctggatcaaaaagggaaccaacaactcgataccgtataatcgtgttatgataaacaacgagaaatttattaacttcacttacgttttcccaagttctccattagtgtatttgaatttggcgtacaataatatatttaatatttccgatagtattttcaagaacttgcaaaacatgcaggtgctcattcttagttataacgacttggaagtaatccatccggatacctttaagggtttatatttaccagagagactaatgcccttaaaaagtctcatagaattaagactggaccacaacaaactccatacactcaaccaagatacttttgatcatacaacggatattcaaatattggacttgagctataatccgcttgaagtaattgatcaccatactcttatagctatcaacgaattattatatctaagagaactgtatcttcaaaacaccgaaatcaaaacgctgcctgacaatatgttgcatacaccacaatatttaagggttttagatttatcaggaaaccacggcattgaaaaaataccagaaactttgtatcaaggaagaaacctagaaaagctgtacctaaataacactggatttgtcaacttaacagagaaaaacggatttccacctctgccatctcttcaagtactccatctgtgtagaaacgagcatctacaccgtattgcaagattcgcttttgcaggtttaacaaatttgacagatctgagactatgcgataatattgatttaactaccatagatgattttgctttcgccaaatcgactaatgttagcggcggggttatctggccacctcttaaaaagctttatattggaaacaacaaattgtcttacgtagacagcgacatcgtagcccgttgggactctttgaccgaattagacattagagataatccatggacttgtgactgtgaaaaccaatggctaatagacgaattaatgcctatttacattaaaatcgatgaaaattctgccaagcaggttatgtgtgctgctcctattgagatggaaaagacttccttccatcagcttctagttcgccaaagtcagatgagatgtttagacacttatggacatagaccagaaaaggacggactactacttgtaggagtcttaacagataagaatgtggacgagaccaacaaaccaccagacgcattaccagaatcagatgagtcactgaaatttattttataccatgagcaagaaagtgatgacgattatgttgaaatgaatgatctttacgttgaacgcacgaatgcctacttcaacttactctgtggatttactgtaggtattttagtcgctattcctgcagttcttctaatgatacttgcttaccagaaaagatggtttagctttaaaggcttttttgacaagtctcctgcttcatattcaagaagattctatgctgacaccgccgcagatgatttttgagaatagtattaaaagtgtgctttttgttatgcagattttaaagttgtttttaagttaattaaatttattagggcgtaatacatacataatacgagtagaaaacatttttaagaaaagatgtatataaaatatgtttttgtttattagtatactttatttacattctgattatgataatgtgattataaaatatttttaataaaacaatttctaaaaataaa

SEQ ID NO: 3309 - DNA, 2009 bp, Diabrotica virgifera
  SmartBlast Evalue=5E-67; Info=Leucine-rich transmembrane protein n=1 Tax=Aedes aegypti RepID=Q17IL4_AEDAE
gaaaaacggatccaatatagatttttgtaattagaacaaaaatagtaaccaatgttagtagtgtatcggtttttatttatgtagtactgttataaacaaaaaaggattacagtgaagtaacttattttttaattcattgatatagtaaaaatgaaaaacctcggaatttttgcagtgtttaccattctattagtttatacacgtgctgataatttggacgattttccattatgtaaagcatgtggctgtagcttcaactccaacaacactgaagctaatgtaacctgcacaaaacaaaatccgagccaactcctacaggattacttctggatcaaaaagggaaccaacaactcgataccgtataatcgtgttatgataaacaacgagaaatttattaacttcacttacgttttcccaagttctccattagtgtatttgaatttggcgtacaataatatatttaatatttccgatagtattttcaagaacttgcaaaacatgcaggtgctcattcttagttataacgacttggaagtaatccatccggatacctttaagggtttatatttaccagagagactaatgcccttaaaaagtctcatagaattaagactggaccacaacaaactccatacactcaaccaagatacttttgatcatacaacggatattcaaatattggacttgagctataatccgcttgaagtaattgatcaccatactcttatagctatcaacgaattattatatctaagagaactgtatcttcaaaacaccgaaatcaaaacgctgcctgacaatatgttgcatacaccacaatatttaagggttttagatttatcaggaaaccacggcattgaaaaaataccagaaactttgtatcaaggaagaaacctagaaaagctgtacctaaataacactggatttgtcaacttaacagagaaaaacggatttccacctctgccatctcttcaagtactccatctgtgtagaaacgagcatctacaccgtattgcaagattcgcttttgcaggtttaacaaatttgacagatctgagactatgcgataatattgatttaactaccatagatgattttgctttcgccaaatcgactaatgttagcggcggggttatctggccacctcttaaaaagctttatattggaaacaacaaattgtcttacgtagacagcgacatcgtagcccgttgggactctttgaccgaattagacattagagataatccatggacttgtgactgtgaaaaccaatggctaatagacgaattaatgcctatttacattaaaatcgatgaaaattctgccaagcaggttatgtgtgctgctcctattgagatggaaaagacttccttccatcagcttctagttcgccaaagtcagatgagatgtttagacacttatggacatagaccagaaaaggacggactactacttgtaggagtcttaacagataagaatgtggacgagaccaacaaaccaccagacgcattaccagaatcagatgagtcactgaaatttattttataccatgagcaagaaagtgatgacgattatgttgaaatgaatgatctttacgttgaacgcacgaatgcctacttcaacttactctgtggatttactgtaggtattttagtcgctattcctgcagttcttctaatgatacttgcttaccagaaaagatggtttagctttaaaggcttttttgacaagtctcctgcttcatattcaagaagattctatgctgacaccgccgcagatgatttttgagaatagtattaaaagtgtgctttttgttatgcagattttaaagttgtttttaagttaattaaatttattagggcgtaatacatacataatacgagtagaaaacatttttaagaaaagatgtatataaaatatgtttttgtttattagtatactttatttacattctgattatgataatgtgattataaaatatttttaataaaacaatttctaaaaataaa

SEQ ID NO: 3310 - DNA, 1972 bp, Diabrotica virgifera
  SmartBlast Evalue=7E-69; Info=Leucine-rich transmembrane protein n=1 Tax=Aedes aegypti RepID=Q17IL4_AEDAE
gtgcttagacgaatatacccatcttatctcgtttgtttgttttcacctgcaatataggtatagttttatcttttgatacaggtctgaataacacatatttacccaacattaaaacagataagataagatttttgctacggaaaaacggatccaatatagatttttgtatttagaacaaaatagtaactaatgttaatcgtgtacgagtttttattgatgtagtgctgttataaacaaaaaggattacagtgaagtaactgagtttgtaatttattggtatagtgaaaatgaaaaacctcggaatttttgcagtgtttaccattctattagtttatacacgtgctgataatttggacgattttccattatgtaaagcatgtggctgtagcttcaactccaacaacactgaagctaatgtaacctgcacaaaacaaaatccgagccaactcctacaggattacttctggatcaaaaagggaaccaacaactcgataccgtataatcgtgttatgataaacaacgagaaatttattaacttcacttacgttttcccaagttctccattagtgtatttgaatttggcgtacaataatatatttaatatttccgatagtattttcaagaacttgcaaaacatgcaggtgctcattcttagttataacgacttggaagtaatccatccggatacctttaagggtttatatttaccagagagactaatgcccttaaaaagtctcatagaattaagactggaccacaacaaactccatacactcaaccaagatacttttgatcatacaacggatattcaaatattggacttgagctataatccgcttgaagtaattgatcaccatactcttatagctatcaacgaattattatatctaagagaactgtatcttcaaaacaccgaaatcaaaacgctgcctgacaatatgttgcatacaccacaatatttaagggttttagatttatcaggaaaccacggcattgaaaaaataccagaaactttgtatcaaggaagaaacctagaaaagctgtacctaaataacactggatttgtcaacttaacagagaaaaacggatttccacctctgccatctcttcaagtactccatctgtgtagaaacgagcatctacaccgtattgcaagattcgcttttgcaggtttaacaaatttgacagatctgagactatgcgataatattgatttaactaccatagatgattttgctttcgccaaatcgactaatgttagcggcggggttatctggccacctcttaaaaagctttatattggaaacaacaaattgtcttacgtagacagcgacatcgtagcccgttgggactctttgaccgaattagacattagagataatccatggacttgtgactgtgaaaaccaatggctaatagacgaattaatgcctatttacattaaaatcgatgaaaattctgccaagcaggttatgtgtgctgctcctattgagatggaaaagacttccttccatcagcttctagttcgccaaagtcagatgagatgtttagacacttatggacatagaccagaaaaggacggactactacttgtaggagtcttaacaggtattttagtcgctattcctgcagttcttctaatgatacttgcttaccagaaaagatggtttagctttaaaggcttttttgacaagtctcctgcttcatattcaagaagattctatgctgacaccgccgcagatgatttttgagaatagtattaaaagtgtgctttttgttatgcagattttaaagttgtttttaagttaattaaatttattagggcgtaatacatacataatacgagtagaaaacatttttaagaaaagatgtatataaaatatgtttttgtttattagtatactttatttacattctgattatgataatgtgattataaaatatttttaataaaacaatttctaaaaataaa

SEQ ID NO: 3311 - DNA, 1835 bp, Diabrotica virgifera
  SmartBlast Evalue=6E-69; Info=Leucine-rich transmembrane protein n=1 Tax=Aedes aegypti RepID=Q17IL4_AEDAE
gaaaaacggatccaatatagatttttgtaattagaacaaaaatagtaaccaatgttagtagtgtatcggtttttatttatgtagtactgttataaacaaaaaaggattacagtgaagtaacttattttttaattcattgatatagtaaaaatgaaaaacctcggaatttttgcagtgtttaccattctattagtttatacacgtgctgataatttggacgattttccattatgtaaagcatgtggctgtagcttcaactccaacaacactgaagctaatgtaacctgcacaaaacaaaatccgagccaactcctacaggattacttctggatcaaaaagggaaccaacaactcgataccgtataatcgtgttatgataaacaacgagaaatttattaacttcacttacgttttcccaagttctccattagtgtatttgaatttggcgtacaataatatatttaatatttccgatagtattttcaagaacttgcaaaacatgcaggtgctcattcttagttataacgacttggaagtaatccatccggatacctttaagggtttatatttaccagagagactaatgcccttaaaaagtctcatagaattaagactggaccacaacaaactccatacactcaaccaagatacttttgatcatacaacggatattcaaatattggacttgagctataatccgcttgaagtaattgatcaccatactcttatagctatcaacgaattattatatctaagagaactgtatcttcaaaacaccgaaatcaaaacgctgcctgacaatatgttgcatacaccacaatatttaagggttttagatttatcaggaaaccacggcattgaaaaaataccagaaactttgtatcaaggaagaaacctagaaaagctgtacctaaataacactggatttgtcaacttaacagagaaaaacggatttccacctctgccatctcttcaagtactccatctgtgtagaaacgagcatctacaccgtattgcaagattcgcttttgcaggtttaacaaatttgacagatctgagactatgcgataatattgatttaactaccatagatgattttgctttcgccaaatcgactaatgttagcggcggggttatctggccacctcttaaaaagctttatattggaaacaacaaattgtcttacgtagacagcgacatcgtagcccgttgggactctttgaccgaattagacattagagataatccatggacttgtgactgtgaaaaccaatggctaatagacgaattaatgcctatttacattaaaatcgatgaaaattctgccaagcaggttatgtgtgctgctcctattgagatggaaaagacttccttccatcagcttctagttcgccaaagtcagatgagatgtttagacacttatggacatagaccagaaaaggacggactactacttgtaggagtcttaacaggtattttagtcgctattcctgcagttcttctaatgatacttgcttaccagaaaagatggtttagctttaaaggcttttttgacaagtctcctgcttcatattcaagaagattctatgctgacaccgccgcagatgatttttgagaatagtattaaaagtgtgctttttgttatgcagattttaaagttgtttttaagttaattaaatttattagggcgtaatacatacataatacgagtagaaaacatttttaagaaaagatgtatataaaatatgtttttgtttattagtatactttatttacattctgattatgataatgtgattataaaatatttttaataaaacaatttctaaaaataaa

SEQ ID NO: 3312 - DNA, 2981 bp, Diabrotica virgifera
  SmartBlast Evalue=2E-13; Info=Endonuclease-reverse transcriptase n=1 Tax=Bombyx mori RepID=D7F170_BOMMO
ctcacctttacacgtatcagaggagtatgtcaactagaactgtcactgtgacagtgatagttgccaaactcgtgcgatacatctaaaggtgggacacaatcaatataatgtaaatttttaggttttttttgcatagacttgggtgtcaattagccagtcacaacttttttgttttctattcatacataaagaaggcaatgaggtccttagagttccatagcaaactcttccacagctctctactcagttcaaaagctgcaggtggccgctatggactatccaagttgctcaccacatttttccattatacatcttcttcttctttttccatatgtacataatatatcaaattatcaggattaataaatttagaggttattttagtttcacagataaatttcattaaacaatcatatatatttttgctgttcagagacaatagataggatacattgaaaggtggaaaaacattacattttattaaatcttcgattaaattataggtgtatggaatgtattttgtgtactcaaagaaagtgtgattcaaatcacccaccttctgacattcagtacaaagatttgaatcaaaaactttaattcttgctagatgtagagggaaacatgcatgtccaaacttcattctgattaatgttgttatatatcttcgaggtactacataattttaaagacgttaaatagatattttattctataacataaaaaataatatgtatcaagaaaacagtatgaatcaaaatatatttattcttagttaaaaaaatatatgctgttgctagaacggctcttttcagtgtacaccagaattttatttaataaaaataatatattattgattattaaaaccaaatctattataactatctgactactgtaatatgtatgttgatcgcagtttcactaataggctgttttgaaaacatgaaaattagttggaatctaccttatacttgttgctgttttacttgacaacggggataatatcataagggaaaacaactctctgttttccttatgtatctcgaatgatatttaaaggtgtcttactttgtttctaatgttcgtcccaccttgactttacagtgtagggagcatgggcggtgcagtccttatgagagtttttggcgcggtgatgccgattttatcaggataatttgtaatcgaacattagaggtattgaattaaaactgttttagaaagacaatatacaattttaagattcgtatgcgtttaaggttatttgatatactacagttattacacatatgaatcctaaaattgtagattgcctttctaaaacagttttaatttaatctatctaatgttcgattacaaattgtttttataaagtcggcatcaccgggctggggactctcataaggattgcattgcctatgttccctatactctaaggtcaaggtgggacggacatagaatcgtgtataaaaatcggtactagaaacctttcaaaaagagttcttaaaaacaggtttccaaaaacacggttttttggaagcaaggtataaatttggaaaatgtgaagaaacaaggtaaaaatttcccaaaataaaatcactaaatatttcactttggacatagaatcagatccatcataccaatggtactacagcccaaatcaggccttggcctaattcagcaagcttctccaatcatttcgatttactgctgttcttttccatgaacgcctttttagtaggtgtttggcatcctcatctacttctattttcacctcttttttagtcttccaacaggtctttttccttgcattattgcatttagcaatttgatggggattcctttctcatgcatgccgaccgcgttccctgcccaccataatctctgcagtttaatgtattgtgctagtgttggttcgctatattgttcgtacatttctttattatacctaattcgccagttattttcacttcttgggtatcctacgtaatatttttctttcaaaaacgtctaatgcgttggcagatttctgtgtcacatcccatctttcacacccataactaataacttacgataggcctgattattgtattctagacccggagttttgttttccggtgtacgtctggcgatttgaatatgtggcccatcccgaaataggctttgtttgcctgccagcataagtcttctatttatttccggttcttcttcattgtttacgacccattcccaagtatatatgtatgtacgtgaatatattcatgtgttctatatcgtctcctagaatcagaggttacattaaaaatttaaggcttacctacctgataggcgacatgtgatcaaaaagaggttaggtttcgagcagatctaataaatatgcaggaactataaatacttgacgagcaagatattatcagaacatcatccgctttcaatattgcacatccgacggctactaaaaggcaactgtctatgtctatgtcatatttccgtgtcgtttgtcacatacatatgtactttggaagcttcctattctgaaatgaaaacgttaataataaaggaaaattaatgatattaacaatttactttattacttgtgttttactccacaaagttaggtaaaaaaaacaaataaaactattttgaacaatggagtaacataggttactccgaatgtgtacattatttgccaattcgattaaaaatcaatggttaaaaactcaatacattacgattttcgaacaaatagttcaaaatttgttttgtataattgcataaacaaaatacaaacaacgatgcagtcaacgtgttaaaattgtaagaacttgaagctctatgtagtgaatattgggaaacgttgttaacgagaaagttatttgattttcgcttaccaggagtaatctgataaactgttgctttagtatggggtgtttcatttgttaaaatattagcaacaaatgaagctagtttcgttattttccgtaagg

SEQ ID NO: 3313 - DNA, 2982 bp, Diabrotica virgifera
  SmartBlast Evalue=2E-13; Info=Endonuclease-reverse transcriptase n=1 Tax=Bombyx mori RepID=D7F170_BOMMO
ctgtcaatctaaacggatctgagatcttaaaattcagctgcctaggttttcgacagtgaactttttaataaaaatatttgtgagcaggtattgtttccggttatatctttttttctttttttttgttttatggcatagacttgggtgtcaattagccagtcacaactttttgttttctattcatacataaagaaggcaatgaggtccttagagttccatagcaaactcttccacagctctctactcagttcaaaagctgcaggtggccgctatggactatccaagttgctcaccacatttttccattatacatcttcttcttctttttccatatgtacataatatatcaaattatcaggattaataaatttagaggttattttagtttcacagataaatttcattaaacaatcatatatatttttgctgttcagagacaatagataggatacattgaaaggtggaaaaacattacattttattaaatcttcgattaaattataggtgtatggaatgtattttgtgtactcaaagaaagtgtgattcaaatcacccaccttctgacattcagtacaaagatttgaatcaaaaactttaattcttgctagatgtagagggaaacatgcatgtccaaacttcattctgattaatgttgttatatatcttcgaggtactacataattttaaagacgttaaatagatattttattctataacataaaaaataatatgtatcaagaaaacagtatgaatcaaaatatatttattcttagttaaaaaaatatatgctgttgctagaacggctcttttcagtgtacaccagaattttatttaataaaaataatatattattgattattaaaaccaaatctattataactatctgactactgtaatatgtatgttgatcgcagtttcactaataggctgttttgaaaacatgaaaattagttggaatctaccttatacttgttgctgttttacttgacaacggggataatatcataagggaaaacaactctctgttttccttatgtatctcgaatgatatttaaaggtgtcttactttgtttctaatgttcgtcccaccttgactttacagtgtagggagcatgggcggtgcagtccttatgagagtttttggcgcggtgatgccgattttatcaggataatttgtaatcgaacattagaggtattgaattaaaactgttttagaaagacaatatacaattttaagattcgtatgcgtttaaggttatttgatatactacagttattacacatatgaatcctaaaattgtagattgcctttctaaaacagttttaatttaatctatctaatgttcgattacaaattgtttttataaagtcggcatcaccgggctggggactctcataaggattgcattgcctatgttccctatactctaaggtcaaggtgggacggacatagaatcgtgtataaaaatcggtactagaaacctttcaaaaagagttcttaaaaacaggtttccaaaaacacggttttttggaagcaaggtataaatttggaaaatgtgaagaaacaaggtaaaaatttcccaaaataaaatcactaaatatttcactttggacatagaatcagatccatcataccaatggtactacagcccaaatcaggccttggcctaattcagcaagcttctccaatcatttcgatttactgctgttcttttccatgaacgcctttttagtaggtgtttggcatcctcatctacttctattttcacctcttttttagtcttccaacaggtctttttccttgcattattgcatttagcaatttgatggggattcctttctcatgcatgccgaccgcgttccctgcccaccataatctctgcagtttaatgtattgtgctagtgttggttcgctatattgttcgtacatttctttattatacctaattcgccagttattttcacttcttgggtatcctacgtaatatttttctttcaaaaacgtctaatgcgttggcagatttctgtgtcacatcccatctttcacacccataactaataacttacgataggcctgattattgtattctagacccggagttttgttttccggtgtacgtctggcgatttgaatatgtggcccatcccgaaataggctttgtttgcctgccagcataagtcttctatttatttccggttcttcttcattgtttacgacccattcccaagtatatatgtatgtacgtgaatatattcatgtgttctatatcgtctcctagaatcagaggttacattaaaaatttaaggcttacctacctgataggcgacatgtgatcaaaaagaggttaggtttcgagcagatctaataaatatgcaggaactataaatacttgacgagcaagatattatcagaacatcatccgctttcaatattgcacatccgacggctactaaaaggcaactgtctatgtctatgtcatatttccgtgtcgtttgtcacatacatatgtactttggaagcttcctattctgaaatgaaaacgttaataataaaggaaaattaatgatattaacaatttactttattacttgtgttttactccacaaagttaggtaaaaaaaacaaataaaactattttgaacaatggagtaacataggttactccgaatgtgtacattatttgccaattcgattaaaaatcaatggttaaaaactcaatacattacgattttcgaacaaatagttcaaaatttgttttgtataattgcataaacaaaatacaaacaacgatgcagtcaacgtgttaaaattgtaagaacttgaagctctatgtagtgaatattgggaaacgttgttaacgagaaagttatttgattttcgcttaccaggagtaatctgataaactgttgctttagtatggggtgtttcatttgttaaaatattagcaacaaatgaagctagtttcgttattttccgtaagg

SEQ ID NO: 3314 - DNA, 958 bp, Diabrotica virgifera
ctcacctttacacgtatcagaggagtatgtcaactagaactgtcactgtgacagtgatagttgccaaactcgtgcgatacatctaaaggtgggacacaatcaatataatgtaaatttttaggttttttttgcatagacttgggtgtcaattagccagtcacaacttttttgttttctattcatacataaagaaggcaatgaggtccttagagttccatagcaaactcttccacagctctctactcagttcaaaagctgcaggtggccgctatggactatccaagttgctcaccacatttttccattatacatcttcttcttctttttccatatgtacataatatatcaaattatcaggattaataaatttagaggttattttagtttcacagataaatttcattaaacaatcatatatatttttgctgttcagagacaatagataggatacattgaaaggtggaaaaacattacattttattaaatcttcgattaaattataggtgtatggaatgtattttgtgtactcaaagaaagtgtgattcaaatcacccaccttctgacattcagtacaaagatttgaatcaaaaactttaattcttgctagatgtagagggaaacatgcatgtccaaacttcattctgattaatgttgttatatatcttcgaggtactacataatttttaaaccaatatatattgggaacagaaggttgaatcagtgaatactgagatttggattgtttacaaagatctcgccatgattgactccactgatttttaactcgatgcttaatagtgttaactaaatcagatatgcaaacttacgattatgtgaagtaccatattcaatggcttttttagccaaactatcaacatattatatttataatatgtattttgtacaacttactaggtatttgcaaaaaacggtaatttttggcaaacttacacttctt

SEQ ID NO: 3315 - DNA, 959 bp, Diabrotica virgifera
ctgtcaatctaaacggatctgagatcttaaaattcagctgcctaggttttcgacagtgaactttttaataaaaatatttgtgagcaggtattgtttccggttatatctttttttctttttttttgttttatggcatagacttgggtgtcaattagccagtcacaactttttgttttctattcatacataaagaaggcaatgaggtccttagagttccatagcaaactcttccacagctctctactcagttcaaaagctgcaggtggccgctatggactatccaagttgctcaccacatttttccattatacatcttcttcttctttttccatatgtacataatatatcaaattatcaggattaataaatttagaggttattttagtttcacagataaatttcattaaacaatcatatatatttttgctgttcagagacaatagataggatacattgaaaggtggaaaaacattacattttattaaatcttcgattaaattataggtgtatggaatgtattttgtgtactcaaagaaagtgtgattcaaatcacccaccttctgacattcagtacaaagatttgaatcaaaaactttaattcttgctagatgtagagggaaacatgcatgtccaaacttcattctgattaatgttgttatatatcttcgaggtactacataatttttaaaccaatatatattgggaacagaaggttgaatcagtgaatactgagatttggattgtttacaaagatctcgccatgattgactccactgatttttaactcgatgcttaatagtgttaactaaatcagatatgcaaacttacgattatgtgaagtaccatattcaatggcttttttagccaaactatcaacatattatatttataatatgtattttgtacaacttactaggtatttgcaaaaaacggtaatttttggcaaacttacacttctt

SEQ ID NO: 3316 - DNA, 2366 bp, Diabrotica virgifera
atattatacagctcaattatatacccttctctaaaacattgaatttactaggtggctctaataatttgatcacccactgtatgatctgacagaattaaaaaaattgtccatttaaattaaagatatgagtattttggggggccttcttggactggcctcctttaaatatagcgtataatctgaaattaacgacataagtgcatgtaacatgtgattaaaattagcaacgattacaaatgtgattttttgtcattttttgatagaaaaatgattaattgtaaaaaaacatccgtgaagatttgtgtaaaagacgtgaatctaatctaacagtagtgaaattacagaaagtatgtacaaaaagacaaaaatatatgatgaatgacataaatgtttatggttgtaaatataagaaccattactttacacaacttggaaagtttctgatcatcttcgtagggccactgttatatttaaagaacgacgagtttttgcctaccctacgcaagggagtaaggttctaagtcaagaaaacgcgtggggaatagttgaactctcggttagcagccttattgaagtaatccaaaatattagcaagtgttttgataagtttaaactatacgattcggggttaaaatcaattatgtttaacacacacacatgtgattctcaatttgaagcgtttataaaatatgaagagagtgccaattttaaagaagataataaacaatgaaatatgtacgtaattaaataacttcatattttaaacataaaaaataaaatatttaagtgaacaaaatacttttccaagtactcatctattgcattattaaagaactaaagtcgagggccagagtagctcatgcggtaggatgtctgatttccatgcaggtaggcccaggttcgaatcccagcgccggcgagaatagctagacatttttaaaatgtctataggccccaggtagactcggcctgaataaaatgagtaccttgggtaaaaccaggggtaataataggcggttgaagcgtaacactggccctgttaccttgcttgtataccaaagtaggccctgctataatcacaaagccgcgttggcagtataaaacgggagacaactattaaaagaactaaagtcaaatggagtcccggttgtgaaattattttaatttttgggatactatctactgctcgtttcttatatactacatattgaaatgtaaatggttctacctcaagttattacttcgcttctacaaaaaaattgttaaaagtgctacaaaatcattcggtgaaagaataacctttaaagctcaagtatcaatatcccaaatgccatacaatggcttttactagttgagtgtatcctgttttttaataaaagctatagtgtgacggtaatcaatcgtatcaaattcgggaaattgactcatttagatgcgcttttcagatcaataaatcaaatttgtgttaacatcaattttttttctatggtatgactaaaaagacacttattaaaaatgtttttgtagtctattagccaaactatctgtatttagtaaacaagcagtgatttgaatctcatacaatgctcattgatcttgtttccgcaataatatctaaataaaataaacagttttgatgtatgtgtacgtcatgataaaagacacacacacacacacattgattccatgctgcaagtctaaattggtttgaagaaaacttgatgaaatacataagccactatctctaaaggaccatgttcaacatcgttatacagacagaacattttctcttgcaaaaaccgtctaaattctttacgattgctgttattaaatgggttttatttcatcaaatcgattttaacatgtttaaaaagctataaatacttttatattgcaaatgaataaacattttcaatttcgttgcaatccgaaaccgcagtcgcattatatttctagttcaatcagagagcgcagcaagaatctctaccggtttcggggcttcttagcccttcatcaggagaaacataatatgctcttctctctgaatgaactaggataatactccgcgtgccgtcacgtattgcaatgaacagaatggcagcgatgccataacgacatctgctagaaaaaaatttatgttgatttggtagcactttcttgtttcgttatgtgatatgtttcataaatctgtcatacagcatttacacatctgtgatttaatgatgctgttagatcttaacctaaaaaaatatgttgttactctttgtcacctaaattgtatgttgttttctctgttccttaggtttaagtttacacttttgtcatagttaatataaagacattgtttttttttgtattttgcagcc

SEQ ID NO: 3317 - DNA, 2347 bp, Diabrotica virgifera
atattatacagctcaattatatacccttctctaaaacattgaatttactaggtggctctaataatttgatcacccactgtatgatctgacagaattaaaaaaattgtccatttaaattaaagatatgagtattttggggggccttcttggactggcctcctttaaatatagcgtataatctgaaattaacgacataagtgcatgtaacatgtgattaaaattagcaacgattacaaatgtgattttttgtcattttttgatagaaaaatgattaattgtaaaaaaacatccgtgaagatttgtgtaaaagacgtgaatctaatctaacagtagtgaaattacagaaagtatgtacaaaaagacaaaaatatatgatgaatgacataaatgtttatggttgtaaatataagaaccattactttacacaacttggaaagtttctgatcatcttcgtagggccactgttatatttaaagaacgacgagtttttgcctaccctacgcaagggagtaaggttctaagtcaagaaaacgcgtggggaatagttgaactctcggttagcagccttattgaagtaatccaaaatattagcaagtgttttgataagtttaaactatacgattcggggttaaaatcaattatgtttaacacacacacatgtgattctcaatttgaagcgtttataaaatatgaagagagtgccaattttaaagaagataataaacaatgaaatatgtacgtaattaaataacttcatattttaaacataaaacaaaatacttttccaagtactcatctattgcattattaaagaactaaagtcgagggccagagtagctcatgcggtaggatgtctgatttccatgcaggtaggcccaggttcgaatcccagcgccggcgagaatagctagacatttttaaaatgtctataggccccaggtagactcagcctgaataaaatgagtaccttgggtaaaaccaggggtaataataggcggttgaagcgtaacactggccctgttaccttgcttgtataccaaagtaggccctgctataatcacaaagccgcgttggcagtataaaacgggagacaactattaaaagaactaaagtcaaatggagtcccggttgtgaaattattttaatttttgggatactatctactgctcgtttcttatatactacatattgaaatgtaaatggttctacctcaagttattacttcgcttctacaaaaaaattgttaaaagtgctacaaaatcattcggtgaaagaataacctttaaagctcaagtatcaatatcccaaatgccatacaatggcttttactagttgagtgtatcctgttttttaataaaagctatagtgtgacggtaatcaatcgtatcaaattcgggaaattgactcatttagatgcgcttttcagatcaataaatcaaatttgtgttaacatcaattttttttctatggtatgactaaaaagacacttattaaaaatgtttttgtagtctattagccaaactatctgtatttagtaaacaagcagtgatttgaatctcatacaatgctcattgatcttgtttccgcaataatatctaaataaaataaacagttttgatgtatgtgtacgtcatgataaaagacacacacacacacacattgattccatgctgcaagtctaaattggtttgaagaaaacttgatgaaatacataagccactatctctaaaggaccatgttcaacatcgttatacagacagaacattttctcttgcaaaaaccgtctaaattctttacgattgctgttattaaatgggttttatttcatcaaatcgattttaacatgtttaaaaagctataaatacttttatattgcaaatgaataaacattttcaatttcgttgcaatccgaaaccgcagtcgcattatatttctagttcaatcagagagcgcagcaagaatctctaccggtttcggggcttcttagcccttcatcaggagaaacataatatgctcttctctctgaatgaactaggataatactccgcgtgccgtcacgtattgcaatgaacagaatggcagcgatgccataacgacatctgctagaaaaaaatttatgttgatttggtagcactttcttgtttcgttatgtgatatgtttcataaatctgtcatacagcatttacacatctgtgatttaatgatgctgttagatcttaacctaaaaaaatatgttgttactctttgtcacctaaattgtatgttgttttctctgttccttaggtttaagtttacacttttgtcatagttaatataaagacattgtttttttttgtattttgcagcc

SEQ ID NO: 3318 - DNA, 1512 bp, Diabrotica virgifera
atattatacagctcaattatatacccttctctaaaacattgaatttactaggtggctctaataatttgatcacccactgtatgatctgacagaattaaaaaaattgtccatttaaattaaagatatgagtattttggggggccttcttggactggcctcctttaaatatagcgtataatctgaaattaacgacataagtgcatgtaacatgtgattaaaattagcaacgattacaaatgtgattttttgtcattttttgatagaaaaatgattaattgtaaaaaaacatccgtgaagatttgtgtaaaagacgtgaatctaatctaacagtagtgaaattacagaaagtatgtacaaaaagacaaaaatatatgatgaatgacataaatgtttatggttgtaaatataagaaccattactttacacaacttggaaagtttctgatcatcttcgtagggccactgttatatttaaagaacgacgagtttttgcctaccctacgcaagggagtaaggttctaagtcaagaaaacgcgtggggaatagttgaactctcggttagcagccttattgaagtaatccaaaatattagcaagtgttttgataagtttaaactatacgattcggggttaaaatcaattatgtttaacacacacacatgtgattctcaatttgaagcgtttataaaatatgaagagagtgccaattttaaagaagataataaacaatgaaatatgtacgtaattaaataacttcatattttaaacataaaaaataaaatatttaagtgaacaaaatacttttccaagtactcatctattgcattattaaagaactaaagtcgagggccagagtagctcatgcggtaggatgtctgatttccatgcaggtaggcccaggttcgaatcccagcgccggcgagaatagctagacatttttaaaatgtctataggccccaggtagactcggcctgaataaaatgagtaccttgggtaaaaccaggggtaataataggcggttgaagcgtaacactggccctgttaccttgcttgtataccaaagtaggccctgctataatcacaaagccgcgttggcagtataaaacgggagacaactattaaaagaactaaagtcaaatggagtcccggttgtgaaattattttaatttttgggatactatctactgctcgtttcttatatactacatattgaaatgtaaatggttctacctcaagttattacttcgcttctacaaaaaaattgttaagttaaaagtgctaccaaatcgttcggcgaaaaaaacctttatactactaatttcttgctggaagtctgtattaatgtgtagaaaacatggtaaatggcatgaagccaccatcttgaaatgggcgagcctaaattctttattaagatacagcattttctcacggtaaccttgctgcaaaatacctcacactttacaacagtttctatttcattaagtcagtgtttggtctatattatcccttaaaaa

SEQ ID NO: 3319 - DNA, 1493 bp, Diabrotica virgifera
atattatacagctcaattatatacccttctctaaaacattgaatttactaggtggctctaataatttgatcacccactgtatgatctgacagaattaaaaaaattgtccatttaaattaaagatatgagtattttggggggccttcttggactggcctcctttaaatatagcgtataatctgaaattaacgacataagtgcatgtaacatgtgattaaaattagcaacgattacaaatgtgattttttgtcattttttgatagaaaaatgattaattgtaaaaaaacatccgtgaagatttgtgtaaaagacgtgaatctaatctaacagtagtgaaattacagaaagtatgtacaaaaagacaaaaatatatgatgaatgacataaatgtttatggttgtaaatataagaaccattactttacacaacttggaaagtttctgatcatcttcgtagggccactgttatatttaaagaacgacgagtttttgcctaccctacgcaagggagtaaggttctaagtcaagaaaacgcgtggggaatagttgaactctcggttagcagccttattgaagtaatccaaaatattagcaagtgttttgataagtttaaactatacgattcggggttaaaatcaattatgtttaacacacacacatgtgattctcaatttgaagcgtttataaaatatgaagagagtgccaattttaaagaagataataaacaatgaaatatgtacgtaattaaataacttcatattttaaacataaaacaaaatacttttccaagtactcatctattgcattattaaagaactaaagtcgagggccagagtagctcatgcggtaggatgtctgatttccatgcaggtaggcccaggttcgaatcccagcgccggcgagaatagctagacatttttaaaatgtctataggccccaggtagactcagcctgaataaaatgagtaccttgggtaaaaccaggggtaataataggcggttgaagcgtaacactggccctgttaccttgcttgtataccaaagtaggccctgctataatcacaaagccgcgttggcagtataaaacgggagacaactattaaaagaactaaagtcaaatggagtcccggttgtgaaattattttaatttttgggatactatctactgctcgtttcttatatactacatattgaaatgtaaatggttctacctcaagttattacttcgcttctacaaaaaaattgttaagttaaaagtgctaccaaatcgttcggcgaaaaaaacctttatactactaatttcttgctggaagtctgtattaatgtgtagaaaacatggtaaatggcatgaagccaccatcttgaaatgggcgagcctaaattctttattaagatacagcattttctcacggtaaccttgctgcaaaatacctcacactttacaacagtttctatttcattaagtcagtgtttggtctatattatcccttaaaaa

SEQ ID NO: 3320 - DNA, 3006 bp, Diabrotica virgifera
  SmartBlast Evalue=0; Info="GTP-binding protein, putative n=1 Tax=Pediculus humanus corporis RepID=E0VSH9_PEDHC"
gattatttatacgctgattgtatggtctgttaataatattattgtgcaaccttccgaaatgacaagtgtttaaaacaaccttatttatttttgaaaacatagcgtcaacgaaatgcattaaagtttgtgtacagttctgtttctgttataatgtttattctagtttgaccctgaattttacaccaaaataacaaagaatatggaatcgttcttcagtctctttgagcctacttacaatgactgtcctcacagtgaggagtttggattggataatatgaataacaggacttcgctaccccctgagcctcagctggggaatgtggagtataagttaaagattgtcaatcccactaaacagagatttgagcacttggtcacacagttaaaatggaggttgcgcgaaggaaacggagaggccatctatgagatcggtgtggaagacagcggtatcttggcaggtctgtcaacgcgagacatgaacgccagtcttcaaacccttaagcaaatggccatcaaactgggagcaacaacgacaatattacgcgagcgagtgctagacaacggacgaagcgttgctgaagtactagtccgaaaagtacctgatgatcaaaataacatcgagataaggatagctgtgttaggaaacgccgacgctggaaaatcaactttactaggagtactgacccaaggaagtttggacaatggacgtggacgagctcgtttgaatatgtttaggcacctgcacgagattcaaagtggaagaacctcatcaatatcacacgaaatccttggatttaattcacagggtcaaccaataaactacagttacagcgagttgataactgccgaagaaatttgcgatacttcgactaaattagtcacgttcatggaccttgcggggcacaagaaatatctaaggacaacgatagcggggttaactggttattctccacaccatgctatgctactgatttccagtactgcaggagctgtaggcatggcccacgagcatctagccatcgccattgccttaaacgtcccattttttatagtaataacgaagattgatctagcatcaccgaccacgacgttgcaaaacctagaatcatttctgaaacaagtcggaacacgaaggataccgcttgtaataaaaactgttgatgacgtcattacggctggggctaaccaattggcggaaaacgtggtcccgatcttcctagtttcaagtgtaagcggggcaggactggatctgctgttgaagttcctacatgtcttaccgcctggaataagcgctaaggaaaaggaacgactggagcaggaatctcccgaatttcaaattgacgagaacttcaagactggagatgtaggtcaaatcataggtggactgttaactaaaggagtcataacagaaggtacaaagatgcagataggtccattgaaggacggttcctttcagaaagtcgcagtcaaaactattcaccgtaatagggtaccatgcaggatggtacgagctggacaaagcgcgtcgttagggctgaacacctatattcccggattaaggaatggtatggttctgttaagcgaagacgaggacgccaaagcatgcctgttcttccaagctagcgtttctgtgctgttccacgctactgccatctatccaggattccagacgacggtttatataggaaacattcggcagactgccgtcattatgggcatatgttcttccagatgcatccacactaacgaacgtgattcggtgttgttcagatttaaactacacgcagagtatgttgctgttggacaacgtcttctcttcaaagaaggatcttctaaaggtataggggaaatcacgcagatttttccattaacaccaccactacttgaatcttgagttgatcttaggacctagtgagtgttttgataaaaatctaggtattgtacactgcgcgtcattaaaaagaggccacttaaaatttttggtatttttaatttttatgaatcctcaaaattaattgtttaaatgcctgcccgaaacattaccgaacctcctccaaaagcaacacgtgctcgcacaaaagcagtatatcgttccccacgtcttctgtatgttttgatgcgaccatctgagccataaagaaccatcctggattcatcactaaacaaaacatttttccaatcttctatggtccaatgctcgtggtctctagcaaactgaagtcggcgttgtcatgtgttgctgttcacaaaggtcctgttgctggacagcgggcccttagaccaaattccctcaaccttctctgtcggtagaagtgcaatgtccatccgtgagcattttgaaaacggttttggattgctctagccgtaaagaacccattttgcaaagaagtgcgttgtaaagaacggtcttctctggccgtcgtgattcttctcgggcctgatcctgtctctacgaatcgttggtatgttttttggacaattgtctggccgcttctctttgacttattccattatcaatgaaagtaacaatttgaacagatctagcaaatctctaagccatagttatgaatttaaaaattgcaccagttcactctttcaacaacaaccagtttcataaacaccaatgaaagatttttgaaaaagcagaacagtcatattgcaagaaaaataagttgcaaatacgtgcataattcgaagtcgtaaaactgataccaattctgcactaacttattatcttcaattgacctgtcggcaccgtttgtcggtgtctaaaagtttttctccattttgtgagttacaataggataacttttataaacttaaaattattgaaaaactaataaaattctaggtggcctctttctaattacgcgcagtgcatatttgaattttgaaattttagttttgaataaactatttttggtcggaactaccaacaaattaaatcaagatatctattttatcaacgggcataacaatgacaaaaattataatatactagtctcc

SEQ ID NO: 3321 - DNA, 2666 bp, Diabrotica virgifera
  SmartBlast Evalue=0; Info="GTP-binding protein, putative n=1 Tax=Pediculus humanus corporis RepID=E0VSH9_PEDHC"
gattatttatacgctgattgtatggtctgttaataatattattgtgcaaccttccgaaatgacaagtgtttaaaacaaccttatttatttttgaaaacatagcgtcaacgaaatgcattaaagtttgtgtacagttctgtttctgttataatgtttattctagtttgaccctgaattttacaccaaaataacaaagaatatggaatcgttcttcagtctctttgagcctacttacaatgactgtcctcacagtgaggagtttggattggataatatgaataacaggacttcgctaccccctgagcctcagctggggaatgtggagtataagttaaagattgtcaatcccactaaacagagatttgagcacttggtcacacagttaaaatggaggttgcgcgaaggaaacggagaggccatctatgagatcggtgtggaagacagcggtatcttggcaggtctgtcaacgcgagacatgaacgccagtcttcaaacccttaagcaaatggccatcaaactgggagcaacaacgacaatattacgcgagcgagtgctagacaacggacgaagcgttgctgaagtactagtccgaaaagtacctgatgatcaaaataacatcgagataaggatagctgtgttaggaaacgccgacgctggaaaatcaactttactaggagtactgacccaaggaagtttggacaatggacgtggacgagctcgtttgaatatgtttaggcacctgcacgagattcaaagtggaagaacctcatcaatatcacacgaaatccttggatttaattcacagggtcaaccaataaactacagttacagcgagttgataactgccgaagaaatttgcgatacttcgactaaattagtcacgttcatggaccttgcggggcacaagaaatatctaaggacaacgatagcggggttaactggttattctccacaccatgctatgctactgatttccagtactgcaggagctgtaggcatggcccacgagcatctagccatcgccattgccttaaacgtcccattttttatagtaataacgaagattgatctagcatcaccgaccacgacgttgcaaaacctagaatcatttctgaaacaagtcggaacacgaaggataccgcttgtaataaaaactgttgatgacgtcattacggctggggctaaccaattggcggaaaacgtggtcccgatcttcctagtttcaagtgtaagcggggcaggactggatctgctgttgaagttcctacatgtcttaccgcctggaataagcgctaaggaaaaggaacgactggagcaggaatctcccgaatttcaaattgacgagaacttcaagactggagatgtaggtcaaatcataggtggactgttaactaaaggagtcataacagaaggtacaaagatgcagataggtccattgaaggacggttcctttcagaaagtcgcagtcaaaactattcaccgtaatagggtaccatgcaggatggtacgagctggacaaagcgcgtcgttagggctgaacacctatattcccggattaaggaatggtatggttctgttaagcgaagacgaggacgccaaagcatgcctgttcttccaagctagcgtttctgtgctgttccacgctactgccatctatccaggattccagacgacggtttatataggaaacattcggcagactgccgtcattatgggcatatgttcttccagatgcatccacactaacgaacgtgattcggtgttgttcagatttaaactacacgcagagtatgttgctgttggacaacgtcttctcttcaaagaaggatcttctaaaggtataggggaaatcacgcagatttttccattaacaccaccactacttgaatcttgagttgatcttaggacctagtgagtgttttgataaaaatctaggtattgtacactgcgcgtcattaaaaagaggccacttaaaatttttggtatttttaatttttatgaatcctcaaaattaattgtttaaatgcctgcccgaaacattaccgaacctcctccaaaagcaacacgtgctcgcacaaaagcagtatatcgttccccacgtcttctgtatgttttgatgcgaccatctgagccataaagaaccatcctggattcatcactaaacaaaacatttttccaatcttctatggtccaatgctcgtggtctctagcaaactgaagtcggcgttgtcatgtgttgctgttcacaaaggtcctgttgctggacagcgggcccttagaccaaattccctcaaccttctctgtcggtagaagtgcaatgtccacccgtgagcattttgaaaacggttttggattgctctagccgtaaagaaccgattttgcaaagaagtgcgttgtaaagaacggtcttctctggccgtcgtgattcttctcgggtctgatcctggtcgtcgttcgtgagatccagtctctacgaatcgttggcaagttttttggaccatacaacgactgactcaaagctgtctgaccacttctctttgactcatttcattaccaatcaaagtaacaatttgaacagatctagcaaatctctcagtcatagttttaaatttaaaaattgcacaagttcactgtaagttttactaatagcaggtactgtacgggac

SEQ ID NO: 3322 - DNA, 1000 bp, Diabrotica virgifera
cgctcaattaatttttggcatacatctaggctaaattaaagaagacactttcgatgtttaaagattaaaatttttttatattagaatggtgtcttcatcttagcttatgaagtttaaagcaaagatgaagccaccattttgtttatcacgcactaaacaaaacatttttccaatcttctatggtccaatgctcgtggtctctagcaaactgaagtcggcgttgtcatgtgttgctgttcacaaaggtcctgttgctggacagcgggcccttagaccaaattccctcaaccttctctgtcggtagaagtgcaatgtccatccgtgagcattttgaaaacggttttggattgctctagccgtaaagaacccattttgcaaagaagtgcgttgtaaagaacggtcttctctggccgtcgtgattcttctcgggcctgatcctgtctctacgaatcgttggtatgttttttggacaattgtctggccgcttctctttgacttattccattatcaatgaaagtaacaatttgaacagatctagcaaatctctaagccatagttatgaatttaaaaattgcaccagttcactctttcaacaacaaccagtttcataaacaccaatgaaagatttttgaaaaagcagaacagtcatattgcaagaaaaataagttgcaaatacgtgcataattcgaagtcgtaaaactgataccaattctgcactaacttattatcttcaattgacctgtcggcaccgtttgtcggtgtctaaaagtttttctccattttgtgagttacaataggataacttttataaacttaaaattattgaaaaactaataaaattctaggtggcctctttctaattacgcgcagtgcatatttgaattttgaaattttagttttgaataaactatttttggtcggaactaccaacaaattaaatcaagatatctattttatcaacgggcataacaatgacaaaaattataatatactagtctcc

SEQ ID NO: 3323 - DNA, 660 bp, Diabrotica virgifera
  SmartBlast Evalue=2E-12; Info=Transposase n=1 Tax=Salmo salar RepID=A8C5I4_SALSA
cgctcaattaatttttggcatacatctaggctaaattaaagaagacactttcgatgtttaaagattaaaatttttttatattagaatggtgtcttcatcttagcttatgaagtttaaagcaaagatgaagccaccattttgtttatcacgcactaaacaaaacatttttccaatcttctatggtccaatgctcgtggtctctagcaaactgaagtcggcgttgtcatgtgttgctgttcacaaaggtcctgttgctggacagcgggcccttagaccaaattccctcaaccttctctgtcggtagaagtgcaatgtccacccgtgagcattttgaaaacggttttggattgctctagccgtaaagaaccgattttgcaaagaagtgcgttgtaaagaacggtcttctctggccgtcgtgattcttctcgggtctgatcctggtcgtcgttcgtgagatccagtctctacgaatcgttggcaagttttttggaccatacaacgactgactcaaagctgtctgaccacttctctttgactcatttcattaccaatcaaagtaacaatttgaacagatctagcaaatctctcagtcatagttttaaatttaaaaattgcacaagttcactgtaagttttactaatagcaggtactgtacgggac

SEQ ID NO: 3324 - DNA, 2018 bp, Diabrotica virgifera
  SmartBlast Evalue=1E-176; Info=Paxillin n=2 Tax=Formicidae RepID=E2C8K4_9HYME
aggacaaattcaaaaaatatgccagatatgtaacagcgacaacgacgatttctgaaatttgactaagaagtgttgtttgtgtaaatgtgtcacgtgattgccgatattcgcattgattcgttgttgatgtgaaactgattagtttgacgccgatttgaatttgccgcgccggcttttttgtgtttttggtgttttttcgagtattgtggacatggatcgttctatgtacggaaaagttgttcctggtactttaaacccgtaccagtgttcgattaaaaaaggaacatcacctggatatgctctgcttgccgatctccaaaatacagtttcaggatcatcaggaataggatcaaattattctggatatggccagagaaacgtccggtattctcccgatagcgatggacattattcaaaaacagacagctattcagtgaaatctggaagttacgggaaggtgccgccaaattccggtaaccggagtccgagctacggcctaaacgcaactgctggtcacagtgcttcgtctacgatggagaaacgccctttcaacaacaatttagacgaattagattccttgcttcaggatttgagcaatagtcgacaacatgcttcagaaaatatgaacggtagtcactataatggtgccattgccgattatggaggtcgtagttcagctaattattctagaccatccagcgcacaaagtactctaaataggccatctgtagacagcttacttgatgagttaaattcaggagacgtcatttatactgggcctaaaaaagtagtgataaccgtgaaagaaactaaaacggagactggatatcctggcgagacggaattaatatcgtctcatgtcactcataccgcagcttcatccgcaactagggaacttgatgatctaatggctagtttgtcgaatattaaggtgaatcaagggcctcagcatcacacagtttccgattcgcaatacgcccgccccataaaggccactcaaacgcagagtgcccctcctccacccaagcagaatttggattctatgctaggaaacctccaagcagacatgagccgccaaggagtcaacaccagccaaaagggatgctgcagcgcctgtgacaaacctatcgtaggtcaagttatcaccgctttgggcaagacctggcatccagaacacttcacctgcgcccattgcagccaggaattgggtaccaggaacttcttcgaaagagaaggaaagccctattgtgaaccagactatcacaatctcttcagcccaagatgtgcctactgcaacggacctatcttagacaaatgcgtaacagctttggagaagacatggcacatggaccacttcttttgcgcccagtgtggtaaacagtttggagaagaaggattccatgaacgtgaaggaaagccatactgtcgtgacgactactttgacatgttcgccccaaaatgcggaggttgcaaccgtgccatcatggaaaattatatttcagcgcttaacgcccaatggcaccctgattgcttcgtatgcagggattgcagacaaccatttattggaggatctttcttcgaccatgaaggtcaaccttactgcgaaactcactaccatcttaaaagaggttctctttgtgcaggatgccataaacccatttctggtcgctgcgttacagctatgtttaggaagttccatcctgaacacttcgtgtgtgctttctgtttaaagcaactgaacaaaggcacattcaaagagcagaacgataagccttattgccatacttgctttgaaaagttgttcggctaaagatgtgatttgcaaaggtgtactaagagaaatggtatcaatatttggcagtatactagtttcaatattgtctaagtttaaaagtggaataagggtgcaataagattattattggtatctagtatacataacagaatgctttctatatatatttatacgtttaaagttactaatttcgtaaataagtgtaataaaagttactaaaaca

SEQ ID NO: 3325 - DNA, 1864 bp, Diabrotica virgifera
  SmartBlast Evalue=1E-169; Info="Paxillin, putative n=1 Tax= Pediculus humanus corporis RepID=E0VTT4_PEDHC"
cagaatttgacaattgctaattgattgcgaaaaaatactaataaaaaatagattgtagtctactgtaaatagttttaattacatcgtgatctaaagtagtgtacgaacttttaactgattataaccatggatgaccacttagatgctctgcttgccgatctccaaaatacagtttcaggatcatcaggaataggatcaaattattctggatatggccagagaaacgtccggtattctcccgatagcgatggacattattcaaaaacagacagctattcagtgaaatctggaagttacgggaaggtgccgccaaattccggtaaccggagtccgagctacggcctaaacgcaactgctggtcacagtgcttcgtctacgatggagaaacgccctttcaacaacaatttagacgaattagattccttgcttcaggatttgagcaatagtcgacaacatgcttcagaaaatatgaacggtagtcactataatggtgccattgccgattatggaggtcgtagttcagctaattattctagaccatccagcgcacaaagtactctaaataggccatctgtagacagcttacttgatgagttaaattcaggagacgtcatttatactgggcctaaaaaagtagtgataaccgtgaaagaaactaaaacggagactggatatcctggcgagacggaattaatatcgtctcatgtcactcataccgcagcttcatccgcaactagggaacttgatgatctaatggctagtttgtcgaatattaaggtgaatcaagggcctcagcatcacacagtttccgattcgcaatacgcccgccccataaaggccactcaaacgcagagtgcccctcctccacccaagcagaatttggattctatgctaggaaacctccaagcagacatgagccgccaaggagtcaacaccagccaaaagggatgctgcagcgcctgtgacaaacctatcgtaggtcaagttatcaccgctttgggcaagacctggcatccagaacacttcacctgcgcccattgcagccaggaattgggtaccaggaacttcttcgaaagagaaggaaagccctattgtgaaccagactatcacaatctcttcagcccaagatgtgcctactgcaacggacctatcttagacaaatgcgtaacagctttggagaagacatggcacatggaccacttcttttgcgcccagtgtggtaaacagtttggagaagaaggattccatgaacgtgaaggaaagccatactgtcgtgacgactactttgacatgttcgccccaaaatgcggaggttgcaaccgtgccatcatggaaaattatatttcagcgcttaacgcccaatggcaccctgattgcttcgtatgcagggattgcagacaaccatttattggaggatctttcttcgaccatgaaggtcaaccttactgcgaaactcactaccatcttaaaagaggttctctttgtgcaggatgccataaacccatttctggtcgctgcgttacagctatgtttaggaagttccatcctgaacacttcgtgtgtgctttctgtttaaagcaactgaacaaaggcacattcaaagagcagaacgataagccttattgccatacttgctttgaaaagttgttcggctaaagatgtgatttgcaaaggtgtactaagagaaatggtatcaatatttggcagtatactagtttcaatattgtctaagtttaaaagtggaataagggtgcaataagattattattggtatctagtatacataacagaatgctttctatatatatttatacgtttaaagttactaatttcgtaaataagtgtaataaaagttactaaaaca

SEQ ID NO: 3326 - DNA, 1783 bp, Diabrotica virgifera
  SmartBlast Evalue=1E-142; Info=Paxillin n=2 Tax=Formicidae RepID=E2C8K4_9HYME
aggacaaattcaaaaaatatgccagatatgtaacagcgacaacgacgatttctgaaatttgactaagaagtgttgtttgtgtaaatgtgtcacgtgattgccgatattcgcattgattcgttgttgatgtgaaactgattagtttgacgccgatttgaatttgccgcgccggcttttttgtgtttttggtgttttttcgagtattgtggacatggatcgttctatgtacggaaaagttgttcctggtactttaaacccgtaccagtgttcgattaaaaaaggaacatcacctggatatgctctgcttgccgatctccaaaatacagtttcaggatcatcaggaataggatcaaattattctggatatggccagagaaacgtccggtattctcccgatagcgatggacattattcaaaaacagacagctattcagtgaaatctggaagttacgggaaggtgccgccaaattccggtaaccggagtccgagctacggcctaaacgcaactgctggtcacagtgcttcgtctacgatggagaaacgccctttcaacaacaatttagacgaattagattccttgcttcaggatttgagcaatagtcgacaacatgcttcagaaaatatgaacggtagtcactataatggtgccattgccgattatggaggtcgtagttcagctaattattctagaccatccagcgcacaaagtactctaaataggccatctgtagacagcttacttgatgagttaaattcaggagacgtcatttatactgggcctaaaaaagtagtgataaccgtgaaagaaactaaaacggagactggatatcctggcgagacggaattaatatcgtctcatgtcactcataccgcagcttcatccgcaactagggaacttgatgatctaatggctagtttgtcgaatattaaggtgaatcaagggcctcagcatcacacagtttccgattcgcaatacgcccgccccataaaggccactcaaacgcagagtgcccctcctccacccaagcagaatttggattctatgctaggaaacctccaagcagacatgagccgccaaggagtcaacaccagccaaaagggatgctgcagcgcctgtgacaaacctatcgtaggtcaagttatcaccgctttgggcaagacctggcatccagaacacttcacctgcgcccattgcagccaggaattgggtaccaggaacttcttcgaaagagaaggaaagccctattgtgaaccagactatcacaatctcttcagcccaagatgtgcctactgcaacggacctatcttagacaaatgcgtaacagctttggagaagacatggcacatggaccacttcttttgcgcccagtgtggtaaacagtttggagaagaaggattccatgaacgtgaaggaaagccatactgtcgtgacgactactttgacatgttcgccccaaaatgcggaggttgcaaccgtgccatcatggaaaattatatttcagcgcttaacgcccaatggcaccctgattgcttcgtatgcagggactgcaagttgccagtacaagggaagtcgttttacgcagtggaaggcaaaccagtttgtcctggttgcattggagctgatgaagacgaagacgagtaaatgcgccgcccccaaaatatgccctctatctatacgccccctccccgaaatgatgccctctaccccttgaattttattgtataaagtatatcgtttgtattttattttattaaataaaacaaataaaaaataaaacacaat

SEQ ID NO: 3327 - DNA, 1629 bp, Diabrotica virgifera
  SmartBlast Evalue=1E-129; Info=Paxillin n=2 Tax=Formicidae RepID=E2C8K4_9HYME
cagaatttgacaattgctaattgattgcgaaaaaatactaataaaaaatagattgtagtctactgtaaatagttttaattacatcgtgatctaaagtagtgtacgaacttttaactgattataaccatggatgaccacttagatgctctgcttgccgatctccaaaatacagtttcaggatcatcaggaataggatcaaattattctggatatggccagagaaacgtccggtattctcccgatagcgatggacattattcaaaaacagacagctattcagtgaaatctggaagttacgggaaggtgccgccaaattccggtaaccggagtccgagctacggcctaaacgcaactgctggtcacagtgcttcgtctacgatggagaaacgccctttcaacaacaatttagacgaattagattccttgcttcaggatttgagcaatagtcgacaacatgcttcagaaaatatgaacggtagtcactataatggtgccattgccgattatggaggtcgtagttcagctaattattctagaccatccagcgcacaaagtactctaaataggccatctgtagacagcttacttgatgagttaaattcaggagacgtcatttatactgggcctaaaaaagtagtgataaccgtgaaagaaactaaaacggagactggatatcctggcgagacggaattaatatcgtctcatgtcactcataccgcagcttcatccgcaactagggaacttgatgatctaatggctagtttgtcgaatattaaggtgaatcaagggcctcagcatcacacagtttccgattcgcaatacgcccgccccataaaggccactcaaacgcagagtgcccctcctccacccaagcagaatttggattctatgctaggaaacctccaagcagacatgagccgccaaggagtcaacaccagccaaaagggatgctgcagcgcctgtgacaaacctatcgtaggtcaagttatcaccgctttgggcaagacctggcatccagaacacttcacctgcgcccattgcagccaggaattgggtaccaggaacttcttcgaaagagaaggaaagccctattgtgaaccagactatcacaatctcttcagcccaagatgtgcctactgcaacggacctatcttagacaaatgcgtaacagctttggagaagacatggcacatggaccacttcttttgcgcccagtgtggtaaacagtttggagaagaaggattccatgaacgtgaaggaaagccatactgtcgtgacgactactttgacatgttcgccccaaaatgcggaggttgcaaccgtgccatcatggaaaattatatttcagcgcttaacgcccaatggcaccctgattgcttcgtatgcagggactgcaagttgccagtacaagggaagtcgttttacgcagtggaaggcaaaccagtttgtcctggttgcattggagctgatgaagacgaagacgagtaaatgcgccgcccccaaaatatgccctctatctatacgccccctccccgaaatgatgccctctaccccttgaattttattgtataaagtatatcgtttgtattttattttattaaataaaacaaataaaaaataaaacacaat

SEQ ID NO: 3328 - DNA, 2104 bp, Diabrotica virgifera
  SmartBlast Evalue=1E-110; Info=Endonuclease-reverse transcriptase n=1 Tax=Bombyx mori RepID=D7F170_BOMMO
tgaataaacatcttaaatctcaaatagtcctctcaacgtccatctcaaaacagatgcggcctggactattaaaagaaacttgtgttcagattctataatataacggataatgattaaatggtttgttttatatcttctatgtctttataatcagtatattctaaggattaaaaatatatactttgaattcttcggttataaataattatcataatgtatattttaaatttatgagaagagaagaagaaaatgaattaactagacccccaacgctagaggaggtccaaacggcaatccacatacaaaaaagccataaagcaccgggaatagataaaataccggcagaactactcaagcaaggaggaaggaatttgacacaacagatgtaccagctaatacgagagatatggatagaagaagaaattccccaacaatggaagaaaagtataatctgccctattataaaaaaggagacaaactgttgtgtcagaattatagaggcatctctttactttgttcgggatacaaaatattcacaaacatccttaatcgaagacttcaacctctcacggaaaaaatcatcggggaatatcaagcagggtttaggcaaaatagatctaccattgaccaactatttacagttaaacaaatactagccaaagcatgggaatatgacatggacgtttacaatctctttgtagattttaaacaagcctatgattcaatagatagaacaattctacctaatatattggaagaatttggcataccatcaaaattaatacgactagtgcaaatgacaatgacagaaacagaagcacaagtatgtattcaaggacagatcactgatgcgtttacgataacgcaaggactgaaacaaggcgacggactggctccaacgctttttaatcttgttcttgaatatgtaattagacggttgacggtgagcggaaataacatacttacaaacaaatctacccaattagcagcatacgcggatgatataaacataatgagcagaacaatgaatgcagcggaagaaacctacgttgagttgaaacagagtgcagaagcagtagggctagcaataaacacaaataaaacaaaactactcatacaaaccagatcaaatagaccggcgcaacaacactttattgacgatatagaacatgtgaatagattcacgtacctaggaatggatctggttgcaagcaatgaagaagaaccggaaataaatagaaggcttgtgctggcaaataaagcctatttcgcgatgggccacatattcaaatcgcgagacgtacaccggaaaacaaaactccgggtatataaaacaataatcaggcccatagtaagttatggctgcgaaacatgggtggtgacacagaaatctgccaatgcattagatgtgtttgaaagaaaagtattacgtaggatactgggcccaataagtgaaaataacaactggcgaattaggtataatagagaaatatacgagcaatatagcgaaccaactctagcacaacacactaaactgcagagattacggtgggcagggcacgtggtccgcatgcatgagaatagaatccccagaaaattgctgaatgcaagaatgcagggaagaagacctgttggaagacctaaaaagagatgggaagacgaagtcgatgaggatgccaggaacttcctgggaacgcgttcatggaaaagaacagcggtaaatcgaaatgattggagaagcttattgaaggaggccaaggctcgatttgggctgtagtgccattggatggatggaaatctacaaacaacgcattttccaatttttgtgggttacgagttattagaacgacacagacaatatattcagacacgtgagagccatccgtcatcatcaaatgattacatgaaagtccataaatttgactaattactgttttatttactccttccagtttcagatgaattttataaaaatggatttaggattgtgaattaagaagttaattaagtgttatcaaaactatttgtcgatcaaatagtattttttatatactacagtagttatagagattagcaaaaatgtattagtatcacttatgtaacc

SEQ ID NO: 3329 - DNA, 1986 bp, Diabrotica virgifera
  SmartBlast Evalue=1E-110; Info=Endonuclease-reverse transcriptase n=1 Tax=Bombyx mori RepID=D7F170_BOMMO
tgaataaacatcttaaatctcaaatagtcctctcaacgtccatctcaaaacagatgcggcctggactattaaaagaaacttgtgttcagattctataatataacggataatgattaaatggtttgttttatatcttctatgtctttataatcagtatattctaaggattaaaaatatatactttgaattcttcggttataaataattatcataatgtatattttaaatttatgagaagagaagaagaaaatgaattaactagacccccaacgctagaggaggtccaaacggcaatccacatacaaaaaagccataaagcaccgggaatagataaaataccggcagaactactcaagcaaggaggaaggaatttgacacaacagatgtaccagctaatacgagagatatggatagaagaagaaattccccaacaatggaagaaaagtataatctgccctattataaaaaaggagacaaactgttgtgtcagaattatagaggcatctctttactttgttcgggatacaaaatattcacaaacatccttaatcgaagacttcaacctctcacggaaaaaatcatcggggaatatcaagcagggtttaggcaaaatagatctaccattgaccaactatttacagttaaacaaatactagccaaagcatgggaatatgacatggacgtttacaatctctttgtagattttaaacaagcctatgattcaatagatagaacaattctacctaatatattggaagaatttggcataccatcaaaattaatacgactagtgcaaatgacaatgacagaaacagaagcacaagtatgtattcaaggacagatcactgatgcgtttacgataacgcaaggactgaaacaaggcgacggactggctccaacgctttttaatcttgttcttgaatatgtaattagacggttgacggtgagcggaaataacatacttacaaacaaatctacccaattagcagcatacgcggatgatataaacataatgagcagaacaatgaatgcagcggaagaaacctacgttgagttgaaacagagtgcagaagcagtagggctagcaataaacacaaataaaacaaaactactcatacaaaccagatcaaatagaccggcgcaacaacactttattgacgatatagaacatgtgaatagattcacgtacctaggaatggatctggttgcaagcaatgaagaagaaccggaaataaatagaaggcttgtgctggcaaataaagcctatttcgcgatgggccacatattcaaatcgcgagacgtacaccggaaaacaaaactccgggtatataaaacaataatcaggcccatagtaagttatggctgcgaaacatgggtggtgacacagaaatctgccaatgcattagatgtgtttgaaagaaaagtattacgtaggatactgggcccaataagtgaaaataacaactggcgaattaggtataatagagaaatatacgagcaatatagcgaaccaactctagcacaacacactaaactgcagagattacggtgggcagggcacgtggtccgcatgcatgagaatagaatccccagaaaattgctgaatgcaagaatgcagggaagaagacctgttggaagacctaaaaagagatgggaagacgaagtcgatgaggatgccaggaacttcctgggaacgcgttcatggaaaagaacagcggtaaatcgaaatgattggagaagcttattgaaggaggccaaggctcgatttgggctgtagtgccattggatggatggatatgttatgactattttaaagatatgaaggttggtgtggcgaaagaggacaagggtggaagggtgatggttcaaaaattgtgatcgtattgtttatatctttgccgtgggtgccggtcgtctttggcaggttgtatctcaggagccactcatcacaactaaacgtgttttcttttaaaagaagcgtcctgc

SEQ ID NO: 3330 - DNA, 1588 bp, Diabrotica virgifera
  SmartBlast Evalue=1E-85; Info=Endonuclease-reverse transcriptase n=1 Tax=Bombyx mori RepID=D7F170_BOMMO
cgcgattgagagtaaaatattataatactgcgcgcatgcgcacacagacagtaaggcgtttagttgctaaatatttctagttatgtataaatatatcagtgcaagaaaaggtgtgaagaaaacagttaaacaaatactagccaaagcatgggaatatgacatggacgtttacaatctctttgtagattttaaacaagcctatgattcaatagatagaacaattctacctaatatattggaagaatttggcataccatcaaaattaatacgactagtgcaaatgacaatgacagaaacagaagcacaagtatgtattcaaggacagatcactgatgcgtttacgataacgcaaggactgaaacaaggcgacggactggctccaacgctttttaatcttgttcttgaatatgtaattagacggttgacggtgagcggaaataacatacttacaaacaaatctacccaattagcagcatacgcggatgatataaacataatgagcagaacaatgaatgcagcggaagaaacctacgttgagttgaaacagagtgcagaagcagtagggctagcaataaacacaaataaaacaaaactactcatacaaaccagatcaaatagaccggcgcaacaacactttattgacgatatagaacatgtgaatagattcacgtacctaggaatggatctggttgcaagcaatgaagaagaaccggaaataaatagaaggcttgtgctggcaaataaagcctatttcgcgatgggccacatattcaaatcgcgagacgtacaccggaaaacaaaactccgggtatataaaacaataatcaggcccatagtaagttatggctgcgaaacatgggtggtgacacagaaatctgccaatgcattagatgtgtttgaaagaaaagtattacgtaggatactgggcccaataagtgaaaataacaactggcgaattaggtataatagagaaatatacgagcaatatagcgaaccaactctagcacaacacactaaactgcagagattacggtgggcagggcacgtggtccgcatgcatgagaatagaatccccagaaaattgctgaatgcaagaatgcagggaagaagacctgttggaagacctaaaaagagatgggaagacgaagtcgatgaggatgccaggaacttcctgggaacgcgttcatggaaaagaacagcggtaaatcgaaatgattggagaagcttattgaaggaggccaaggctcgatttgggctgtagtgccattggatggatggaaatctacaaacaacgcattttccaatttttgtgggttacgagttattagaacgacacagacaatatattcagacacgtgagagccatccgtcatcatcaaatgattacatgaaagtccataaatttgactaattactgttttatttactccttccagtttcagatgaattttataaaaatggatttaggattgtgaattaagaagttaattaagtgttatcaaaactatttgtcgatcaaatagtattttttatatactacagtagttatagagattagcaaaaatgtattagtatcacttatgtaacc

SEQ ID NO: 3331 - DNA, 1470 bp, Diabrotica virgifera
  SmartBlast Evalue=9E-86; Info=Endonuclease-reverse transcriptase n=1 Tax=Bombyx mori RepID=D7F170_BOMMO
cgcgattgagagtaaaatattataatactgcgcgcatgcgcacacagacagtaaggcgtttagttgctaaatatttctagttatgtataaatatatcagtgcaagaaaaggtgtgaagaaaacagttaaacaaatactagccaaagcatgggaatatgacatggacgtttacaatctctttgtagattttaaacaagcctatgattcaatagatagaacaattctacctaatatattggaagaatttggcataccatcaaaattaatacgactagtgcaaatgacaatgacagaaacagaagcacaagtatgtattcaaggacagatcactgatgcgtttacgataacgcaaggactgaaacaaggcgacggactggctccaacgctttttaatcttgttcttgaatatgtaattagacggttgacggtgagcggaaataacatacttacaaacaaatctacccaattagcagcatacgcggatgatataaacataatgagcagaacaatgaatgcagcggaagaaacctacgttgagttgaaacagagtgcagaagcagtagggctagcaataaacacaaataaaacaaaactactcatacaaaccagatcaaatagaccggcgcaacaacactttattgacgatatagaacatgtgaatagattcacgtacctaggaatggatctggttgcaagcaatgaagaagaaccggaaataaatagaaggcttgtgctggcaaataaagcctatttcgcgatgggccacatattcaaatcgcgagacgtacaccggaaaacaaaactccgggtatataaaacaataatcaggcccatagtaagttatggctgcgaaacatgggtggtgacacagaaatctgccaatgcattagatgtgtttgaaagaaaagtattacgtaggatactgggcccaataagtgaaaataacaactggcgaattaggtataatagagaaatatacgagcaatatagcgaaccaactctagcacaacacactaaactgcagagattacggtgggcagggcacgtggtccgcatgcatgagaatagaatccccagaaaattgctgaatgcaagaatgcagggaagaagacctgttggaagacctaaaaagagatgggaagacgaagtcgatgaggatgccaggaacttcctgggaacgcgttcatggaaaagaacagcggtaaatcgaaatgattggagaagcttattgaaggaggccaaggctcgatttgggctgtagtgccattggatggatggatatgttatgactattttaaagatatgaaggttggtgtggcgaaagaggacaagggtggaagggtgatggttcaaaaattgtgatcgtattgtttatatctttgccgtgggtgccggtcgtctttggcaggttgtatctcaggagccactcatcacaactaaacgtgttttcttttaaaagaagcgtcctgc

SEQ ID NO: 3332 - DNA, 2287 bp, Diabrotica virgifera
  SmartBlast Evalue=9E-63; Info=Endonuclease-reverse transcriptase HmRTE-e01 n=1 Tax=Heliconius melpomene RepID= C6Y4D5_9NEOP
tcagatcactcagtccagtaagcttcctcttatttgtaaaggctaccagtttagttttagaagggttcacggagaggttctctttcagacaccagttctctatgtagtaaagggaatatcgcatctgatacgcaacagtgctgggaaattttcccctggttactattacaatatctatctatctatcaatcggttttaaaacgtcttgcgacgttgtccgatgcctaatttccatgacactctatcatcccattggccctctctaagatctcttgcgctcatcgccttcgttactccctctctccaagatttcttgggtcttcctctctttctgcggtttggtggtacccattgcataattattttagggagtcttgagttattcatcctctggacgtgtccgtaccatatcagctgttttctttctatgtctgttgttagagagccgtcaacccccattcgctgtcttatctcatcattacgtattctctctctgcgtgacactcctactgatcttctaaaagcgtccatttctactgcctccagttttcttctgttgttttcggttatccgccaagtttctgctccgtacaatagactgcttttaataagagattcgtagatattgtgttttcttctttttcctatttcatgattccacagtacgctgtttagacaacctattgtttttctggattgtgttattcttctctttatttcttcatcatctttccccgttgtgtcaaaaacgattcctagatatgtgtaatggtcgcagggcatgatgatttcattattttctaatgtgatgttcgatagttcggtacctattggcaggtattttgttttttctgtattaatttctagtccccactttctatattcttcttgtaatttccttgccatgtactctaaatcatctttatcgtttgctataacaacctggtcatcagcaaactgcaatgtatataagcaaatctctccaaggtctacgcccatgcctctgcattttcgtttccactctttcaatgcttttgcaacatatattttaaataaggtcggtgatacacaacacccctgacgtagacctttattaaccaggaagctttgcgataatctgtttccagtttttatttgtgatgttgacccttcatacaaatttcttaaggcttttattaaggtgacactaatattcgtctgtcgtaacacgttccagagtttgtttacaggaactgtatcgtacgccttctgcaagtcaataaacatgaggtgagtttcttgatttgtgcttaattttttttctattagttgtttgaggcagaagatattatcagtacagcttcttcctgttcgaaaaccggattgttcttcttcctcttggtctttgtactccttctcaatgcggtctctaattattcgtccatacaaacggctgaatgtactagtcactgatatccctctatagttttcacatttaagcttatctcctttcttatggatcgacgaaatataagcaattttccactcgtcgggtacgggagaaccatttataaattgatttatgcaccaagtgacggtttcaaacaatttttgtgatccacattttattagttcggctgtgatatcccctggccctggagacctaccgtttttcagttcttttatagcttttctaatttctgtcacttgtattgttatatcttctccttcaatgttaacctctgttggtgattgagttaagtattcgtccctattttctgtcagtagttccccatagtacttttcccatttttgtgtggatattaattgaatgtttgtgctcttcctttcgttagttcttattttattgaggaacttccatgtttctgtacattttctgcctcccaggtaggtattaatttcctggcacttcttatcccacatttctctttttgcttttactgttgttcttcttgttattcttttgagttccaggtattcatctctatctttttgttgtttactgctcagccatctgatatacgcttgctttttctcttctacgagtgcttctatttctttgttccaccatagtttttcactttgtctttgagtgttaaagccgagtgcttcttctgcagcttttttaacgctaacgactacgtttctatatacctcctctactgttgatgtttcagttatagtcattagtttgccatccagtctttgttgatatagtattcttgtactctcttgggtcaaactatccaaattataacttctttttccaaagtttcttcttgttggg

SEQ ID NO: 3333 - DNA, 2258 bp, Diabrotica virgifera
  SmartBlast Evalue=9E-63; Info=Endonuclease-reverse transcriptase HmRTE-e01 n=1 Tax=Heliconius melpomene RepID= C6Y4D5_9NEOP
aattataattccggaagccgatggaaatttgatgagcagtttggcaacaattgttaattgaaaggtttgcggtcgctgtaatgaccacaataattatggtacatcagaggagctatgattttgtatgtaaagacactgtacctatctatctatctatcaatcggttttaaaacgtcttgcgacgttgtccgatgcctaatttccatgacactctatcatcccattggccctctctaagatctcttgcgctcatcgccttcgttactccctctctccaagatttcttgggtcttcctctctttctgcggtttggtggtacccattgcataattattttagggagtcttgagttattcatcctctggacgtgtccgtaccatatcagctgttttctttctatgtctgttgttagagagccgtcaacccccattcgctgtcttatctcatcattacgtattctctctctgcgtgacactcctactgatcttctaaaagcgtccatttctactgcctccagttttcttctgttgttttcggttatccgccaagtttctgctccgtacaatagactgcttttaataagagattcgtagatattgtgttttcttctttttcctatttcatgattccacagtacgctgtttagacaacctattgtttttctggattgtgttattcttctctttatttcttcatcatctttccccgttgtgtcaaaaacgattcctagatatgtgtaatggtcgcagggcatgatgatttcattattttctaatgtgatgttcgatagttcggtacctattggcaggtattttgttttttctgtattaatttctagtccccactttctatattcttcttgtaatttccttgccatgtactctaaatcatctttatcgtttgctataacaacctggtcatcagcaaactgcaatgtatataagcaaatctctccaaggtctacgcccatgcctctgcattttcgtttccactctttcaatgcttttgcaacatatattttaaataaggtcggtgatacacaacacccctgacgtagacctttattaaccaggaagctttgcgataatctgtttccagtttttatttgtgatgttgacccttcatacaaatttcttaaggcttttattaaggtgacactaatattcgtctgtcgtaacacgttccagagtttgtttacaggaactgtatcgtacgccttctgcaagtcaataaacatgaggtgagtttcttgatttgtgcttaattttttttctattagttgtttgaggcagaagatattatcagtacagcttcttcctgttcgaaaaccggattgttcttcttcctcttggtctttgtactccttctcaatgcggtctctaattattcgtccatacaaacggctgaatgtactagtcactgatatccctctatagttttcacatttaagcttatctcctttcttatggatcgacgaaatataagcaattttccactcgtcgggtacgggagaaccatttataaattgatttatgcaccaagtgacggtttcaaacaatttttgtgatccacattttattagttcggctgtgatatcccctggccctggagacctaccgtttttcagttcttttatagcttttctaatttctgtcacttgtattgttatatcttctccttcaatgttaacctctgttggtgattgagttaagtattcgtccctattttctgtcagtagttccccatagtacttttcccatttttgtgtggatattaattgaatgtttgtgctcttcctttcgttagttcttattttattgaggaacttccatgtttctgtacattttctgcctcccaggtaggtattaatttcctggcacttcttatcccacatttctctttttgcttttactgttgttcttcttgttattcttttgagttccaggtattcatctctatctttttgttgtttactgctcagccatctgatatacgcttgctttttctcttctacgagtgcttctatttctttgttccaccatagtttttcactttgtctttgagtgttaaagccgagtgcttcttctgcagcttttttaacgctaacgactacgtttctatatacctcctctactgttgatgtttcagttatagtcattagtttgccatccagtctttgttgatatagtattcttgtactctcttgggtcaaactatccaaattataacttctttttccaaagtttcttcttgttggg

SEQ ID NO: 3334 - DNA, 1216 bp, Diabrotica virgifera
  SmartBlast Evalue=4E-23; Info=Endonuclease-reverse transcriptase n=1 Tax=Bombyx mori RepID=D7F172_BOMMO
tcagatcactcagtccagtaagcttcctcttatttgtaaaggctaccagtttagttttagaagggttcacggagaggttctctttcagacaccagttctctatgtagtaaagggaatatcgcatctgatacgcaacagtgctgggaaattttcccctggttactattacaatatctatctatctatcaatcggttttaaaacgtcttgcgacgttgtccgatgcctaatttccatgacactctatcatcccattggccctctctaagatctcttgcgctcatcgccttcgttactccctctctccaagatttcttgggtcttcctctctttctgcggtttggtggtacccattgcataattattttagggagtcttgagttattcatcctctggacgtgtccgtaccatatcagctgttttctttctatgtctgttgttagagagccgtcaacccccattcgctgtcttatctcatcattacgtattctctctctgcgtgacactcctactgatcttctaaaagcgtccatttctactgcctccagttttcttctgttgttttcggttatccgccaagtttctgctccgtacaatagactgcttttaataagagattcgtagatattgtgttttcttctttttcctatttcatgattccacagtacgctgtttagacaacctattgtttttctggattgtgttattcttctctttatttcttcatcatctttccccgttgtgtcaaaaacgattcctagatatgtgtaatggtcgcagggcatgatgatttcattattttctaatgtgatgttcgatagttcggtacctattggcaggtattttgttttttctgtattaatttctagtccccactttctatattcttcttgtaatttccttgccatgtactctaaatcatctttatcgtttgctataacaacctggtcatcagcaaactgcaatgtatataagcaaatctctccaaggtctacgccccaaggtatacgtctgagctacgataccaccatttatttatatttaagctcttacttagtcgttttctaactattttccattcaagattcctttaatttcgggtaggtacacatgagaatcggatggtgcaaagtcggggctggtagggggactgctcgaaaatttcccattgtagacgttcttgtcgatgcatggggcagagcattgtcgctctcaaaa

SEQ ID NO: 3335 - DNA, 1187 bp, Diabrotica virgifera
  SmartBlast Evalue=4E-23; Info=Endonuclease-reverse transcriptase n=1 Tax=Bombyx mori RepID=D7F172_BOMMO
aattataattccggaagccgatggaaatttgatgagcagtttggcaacaattgttaattgaaaggtttgcggtcgctgtaatgaccacaataattatggtacatcagaggagctatgattttgtatgtaaagacactgtacctatctatctatctatcaatcggttttaaaacgtcttgcgacgttgtccgatgcctaatttccatgacactctatcatcccattggccctctctaagatctcttgcgctcatcgccttcgttactccctctctccaagatttcttgggtcttcctctctttctgcggtttggtggtacccattgcataattattttagggagtcttgagttattcatcctctggacgtgtccgtaccatatcagctgttttctttctatgtctgttgttagagagccgtcaacccccattcgctgtcttatctcatcattacgtattctctctctgcgtgacactcctactgatcttctaaaagcgtccatttctactgcctccagttttcttctgttgttttcggttatccgccaagtttctgctccgtacaatagactgcttttaataagagattcgtagatattgtgttttcttctttttcctatttcatgattccacagtacgctgtttagacaacctattgtttttctggattgtgttattcttctctttatttcttcatcatctttccccgttgtgtcaaaaacgattcctagatatgtgtaatggtcgcagggcatgatgatttcattattttctaatgtgatgttcgatagttcggtacctattggcaggtattttgttttttctgtattaatttctagtccccactttctatattcttcttgtaatttccttgccatgtactctaaatcatctttatcgtttgctataacaacctggtcatcagcaaactgcaatgtatataagcaaatctctccaaggtctacgccccaaggtatacgtctgagctacgataccaccatttatttatatttaagctcttacttagtcgttttctaactattttccattcaagattcctttaatttcgggtaggtacacatgagaatcggatggtgcaaagtcggggctggtagggggactgctcgaaaatttcccattgtagacgttcttgtcgatgcatggggcagagcattgtcgctctcaaaa

SEQ ID NO: 3336 - DNA, 2669 bp, Diabrotica virgifera
  SmartBlast Evalue=0; Info="4-Hydroxybutyrate CoA-transferase, putative n=2 Tax=Culicini RepID=Q0IG02_AEDAE"
tcagtcgtttgacgcacagtacatgacagtcctgtcctttactgtggtttgacgtttgtcgttttaattttttagttgttacgaggtgaagttgagtgttgagtgtcagttgtattttgtatctccttacttttgccgatcaagacccagattccaagtcttcttgggttttaatatttcttcaataaataaaaatctatttagaagatggcagtttcagttagaggtttctctcatcggattggacatttaagtagcgttttagctactgttaaatcatcccctagaacttattttacatatacgaacgaaccctcgcaacccattaaaggaaaagagccaaaatggtgtactccagaggaagctttccaagatttacaatcaggtcaaaccgtattctctcagggagccgcagctacaccgatcgactgtctaaatgcaatgacaaaagtaggaaagagcaaaaatcttaaagatattacagtatgccatatgcacacagaaggtcctgcggcgtatacggatccttcttgtgagggaatttttaggtcatgttcattcttcatgggcggtaatgtacgaaaagccgttgccgatggtaggggagacgccattccgatatttttatcagaaattccactactttttactagacaaatagttaaaccagatattgcagttattcaggtctctcctcctgatcaacatggatactgcagtctgggtaccagtgtggactgtgtaagagcaggaatgagccattccaaaattatagttgcccagataaatcctagaatgccaagaacatttggcgatggtataatccacatcagtcacatcgactacgccgtaaaagtagacactccattaccttgccacggtggaaaaccgccatctgacgtcgaaacacagattggtaaaaatattgccgaaaatctggtggaagatggtgctacacttcaaatgggtattggcagcattcccgacgcagtattggcttgcctgactaaccacaaggacctcggcatccattccgaaatgttcgctggtggagttatagacctagtcaatagaggctgtgttactaacaataagaaatccattcataggggtagaatcgtaggatcattcttaatcggaactcaagatctgtacgatttcgtagataataatccgttcatcgagatgttagttgtagattatgtaaatagtacaagtattattgcaagacaaccaaagatgactgccatcaattcctgtattgaagtcgacttgacgggacaaatctgttctgactcgatcggtacccgaatgtattccggtttcggaggtcaagtggacttcatccgaggagctgctgaaggattggacggaaaaggaaaaccaatcattgcacttccatccactaccaacaagggagagagtaaaatcgttcctctgctcaagtcaggtgccggtgtagtaacaaccaaagcccacgctcactacgtcgtaaccgaacacggcattgcgttcctcttcggcaaaacccttcgacagagggcacacgccttgatcaacatcgcccatcccaaccacagagaagccttagagaaagccgcgttcgagcgccttaaagtcatgccagccccttaaacataagttcccataaattttgtattcgcttacatgattttatttgtttgtacaatgtactgtatacattataggcggtagggcccaggtcacggacactgtaaaggaatcatctcaagacaacaacttaataattacattctaagatacaattgtatattctagtaaaagcaaaaaaactatcgttgtacgtcatcagtgacgtcataagaaaattatactaatccctaataacaccaaacattccatgtatgttcctagaatgtacacacaggacattgaaaacattcctggaatgtcctcaaaagcacaagaacgtcccctaaatgctaaatgtcccagggaagtcctgtgacagcattttaaacattccttgaatgtcttgttggaaaattccatgaatgtctacgaatgttctttggacattcacagtatattttttaggacattccctggatatagtcgctgatgtgacataatgtctccgatttgttttttcacgagttttgtaagagagacaaaatactttttttacagtcacctcctgtcttcatatgatattttttgacatgttttgtagtaaattcaactatctatttactacaaaacgtgtcaaaatttacatgtgagaacaggagataaccctaagaatggtttttcgtctcctacaaaattcgtgaaaaagcagataggaggtattgtcacatcaccgacgatataccagaaggatatgtggccataccaaataatacatccttgataaatataaacatttttattgcaaaaaatcttgtcatatattttttccataatcatcactacgatgatgattcattgtattgaattgtacattacaattacaatctggtcataactgaccaatgaacaattttaatttaacctaaattactactgttcttaaaatgaagagcttaccccatagcgtctattatctaatctaacaagatcgtgcactattttaacatacacaggcacacaagcactatgctctgcttttcactatcacctatcac

SEQ ID NO: 3337 - DNA, 2655 bp, Diabrotica virgifera
  SmartBlast Evalue=0; Info="4-Hydroxybutyrate CoA-transferase, putative n=2 Tax=Culicini RepID=Q0IG02_AEDAE"
tcagtcgtttgacgcacagtacatgacagtcctgtcctttactgtggtttgacgtttgtcgttttaattttttagttgttacgaggtgaagttgagtgttgagtgtcagttgtattttgtatctccttacttttgccgatcaagacccagattccaagtcttcttgggttttaatatttcttcaataaataaaaatctatttagaagatggcagtttcagttagaggtttctctcatcggattggacatttaagtagcgttttagctactgttaaatcatcccctagaacttattttacatatacgaacgaaccctcgcaacccattaaaggaaaagagccaaaatggtgtactccagaggaagctttccaagatttacaatcaggtcaaaccgtattctctcagggagccgcagctacaccgatcgactgtctaaatgcaatgacaaaagtaggaaagagcaaaaatcttaaagatattacagtatgccatatgcacacagaaggtcctgcggcgtatacggatccttcttgtgagggaatttttaggtcatgttcattcttcatgggcggtaatgtacgaaaagccgttgccgatggtaggggagacgccattccgatatttttatcagaaattccactactttttactagacaaatagttaaaccagatattgcagttattcaggtctctcctcctgatcaacatggatactgcagtctgggtaccagtgtggactgtgtaagagcaggaatgagccattccaaaattatagttgcccagataaatcctagaatgccaagaacatttggcgatggtataatccacatcagtcacatcgactacgccgtaaaagtagacactccattaccttgccacggtggaaaaccgccatctgacgtcgaaacacagattggtaaaaatattgccgaaaatctggtggaagatggtgctacacttcaaatgggtattggcagcattcccgacgcagtattggcttgcctgactaaccacaaggacctcggcatccattccgaaatgttcgctggtggagttatagacctagtcaatagaggctgtgttactaacaataagaaatccattcataggggtagaatcgtaggatcattcttaatcggaactcaagatctgtacgatttcgtagataataatccgttcatcgagatgttagttgtagattatgtaaatagtacaagtattattgcaagacaaccaaagatgactgccatcaattcctgtattgaagtcgacttgacgggacaaatctgttctgactcgatcggtacccgaatgtattccggtttcggaggtcaagtggacttcatccgaggagctgctgaaggattggacggaaaaggaaaaccaatcattgcacttccatccactaccaacaagggagagagtaaaatcgttcctctgctcaagtcaggtgccggtgtagtaacaaccaaagcccacgctcactacgtcgtaaccgaacacggcattgcgttcctcttcggcaaaacccttcgacagagggcacacgccttgatcaacatcgcccatcccaaccacagagaagccttagagaaagccgcgttcgagcgccttaaagtcatgccagccccttaaacataagttcccataaattttgtattcgcttacatgattttatttgtttgtacaatgtactgtatacattataggcggtagggcccaggtcacggacactgtaaaggaatcatctcaagacaacaacttaataattacattctaagatacaattgtatattctagtaaaagcaaaaaaactatcgttgtacgtcatcagtgacgtcataagaaaattatactaatccctaataacaccaaacattccatgtatgttcctagaatgtacacacaggacattgaaaacattcctggaatgtcctcaaaagcacaagaacgtcccctaaatgctaaatgtcccagggaagtcctgtgacagcattttaaacattccttgaatgtcttgttggaaaattccatgaatgtctacgaatgttctttggacattcacagtatattttttaggacattccctggatatagtcgctgatgtgacataatgtctccgatttgttttttcacgagttttgtaagagagacaaaatactttttttacagtcacctcctgtcttcatatgatattttttgacatgttttgtagtaaattcaactatctatttactacaaaacgtgtcaaaatttacatgtgagaacaggagataaccctaagaatggtttttcgtctcctacaaaattcgtgaaaaagcagataggaggtattgtctcatcaccgacgatataccagaagtatatgtggccataccaaaatttggtttggccatattggtggttatttaataatatctaaatccttaataaatataaacatttttattgcacaaaatattgtcatatatttttttccataatcatcactacgatgatgattcgttgtattgaattttacattacaattacaatctggtcataactgaccaatgagcaattttaatttaacgtaaattactagatacttttccttaaaatgaagagctcttatctaatctaacaagatcgtgcaatattttaacatacaccggc

SEQ ID NO: 3338 - DNA, 775 bp, Diabrotica virgifera
tgttccgagaatgtacacacaggacattgaaaacattcctggaatgtcctcaaaagcacaagaacgtccctggaaatgtcccaggaaagtctgtgtcagcattttaaacattccttgaatgtcttgttggaaaattccatgaatgtctacgaatgttctttggacattcacagtatattttttaggacattccctggatatagtcgctgatgtgacataatgtctccgatttgttttttcatgagttttgtaagagagacaaaatactttttttacagtcacctcctgtcttcatatgatattttttgacatgttttgtagtaaattcaactatctatttactacaaaacgtgtcaaaatttacatgtgagaacaggagataaccctaagaatggtttttcgtctcctacaaaattcgtgaaaaagcagataggaggtattgtcacatcaccgacgatataccagaaggatatgtggccataccaaataatacatccttgataaatataaacatttttattgcaaaaaatcttgtcatatattttttccataatcatcactacgatgatgattcattgtattgaattgtacattacaattacaatctggtcataactgaccaatgaacaattttaatttaacctaaattactactgttcttaaaatgaagagcttaccccatagcgtctattatctaatctaacaagatcgtgcactattttaacatacacaggcacacaagcactatgctctgcttttcactatcacctatcac

SEQ ID NO: 3339 - DNA, 761 bp, Diabrotica virgifera
tgttccgagaatgtacacacaggacattgaaaacattcctggaatgtcctcaaaagcacaagaacgtccctggaaatgtcccaggaaagtctgtgtcagcattttaaacattccttgaatgtcttgttggaaaattccatgaatgtctacgaatgttctttggacattcacagtatattttttaggacattccctggatatagtcgctgatgtgacataatgtctccgatttgttttttcatgagttttgtaagagagacaaaatactttttttacagtcacctcctgtcttcatatgatattttttgacatgttttgtagtaaattcaactatctatttactacaaaacgtgtcaaaatttacatgtgagaacaggagataaccctaagaatggtttttcgtctcctacaaaattcgtgaaaaagcagataggaggtattgtctcatcaccgacgatataccagaagtatatgtggccataccaaaatttggtttggccatattggtggttatttaataatatctaaatccttaataaatataaacatttttattgcacaaaatattgtcatatatttttttccataatcatcactacgatgatgattcgttgtattgaattttacattacaattacaatctggtcataactgaccaatgagcaattttaatttaacgtaaattactagatacttttccttaaaatgaagagctcttatctaatctaacaagatcgtgcaatattttaacatacaccggc

SEQ ID NO: 3340 - DNA, 1570 bp, Diabrotica virgifera
  SmartBlast Evalue=2E-52; Info=Putative gut cathepsin D-like aspartic protease n=1 Tax=Callosobruchus maculatus RepID=C7AAS7_ CALMS
aatgtttttaaatttattcacactacaaaaatgtctcttacagttacagattatcgattactattaaacatacttgtaattatcagcttatatgatttctattatttaaactatatattttaaatataagtacatttattgtaaaaaaaaagtaataatagacgtaaagcttcagattatgctgctctgacaaaacctatggttttatcctctatgttgtaaatactgtaatatagagacaaaaatgcgcctccaaatatccatgtatttttccccatagtatcgtcaggaacaaaggctgaaatgcatgttgtgctggttttattagattccttcattatatattgctttcctccaagtctaaatggttgtccacgcaaatatatatccaatttaggcatttggttaatagcatcacaatttacaatgtatctaccgttttgtagtttagcattaataatctcatgaatttgattaacttcttttgatggaccatttatttcatttgtacttgtgtcagcaatagctttacaaccactttggcaaaacgtagaaacgtgtttgggatctttcgtgtaaatcattttatctacattgaactgccaatattctgcagtatcggcgtttaaatacactatagtatcctgaatgattgatccattcggataactagttttatgaacatgttttggatcaaagaatcccaacataatattacctcctctgttagaattacggtccctgtttaaataaattgaaaatataggattcttaatcttcttttctctatacaaagtgtagaaaaatggttcatagtcgccacttttaggtcctaatcctagtacaccatcagccttatcaaactgcattgaatccggtacaatagacatttcaacaaacaaaaatgatgtaacatttgagtgggcgatatgaatatcatcgtatgaataaactccagtgaaattaaaagctccatcttgtataaaatattgggtaccattctttttaaaagttgaagatttgtaacgatcgtacaagttatggccacggcatcctggagttaggctcgtatcacatcttgacgacaataaccatgaaaggccccatgcggtatcaaaagagacatcaaatgtttttcctggatggccaatgactattgtgccataaaactcgttgtccaaatatctgtataaagcgatagaatcgtttgttcggggttctttaattcttctgtttttaagaaattccagtctgtatccatattttctaagggtaggttcgttttccagtaactcttgtctagggcttttctttcgtctaagttcgatactcatagttccatcatttttacttgcataaaccatagataatttaaatacaataattgtacttagaattaataataactttaaatgattcattttgaaaaatgaacacgttattctcagtttacaaatcaagtaattacagtttaatacttcgagtacttcctgaatacttcacgcacaatgacataaatgtcaagtcaaatagaaaatatagaatatagaataggaaatatctcttttat

SEQ ID NO: 3341 - DNA, 1531 bp, Diabrotica virgifera
  SmartBlast Evalue=2E-52; Info=Putative gut cathepsin D-like aspartic protease n=1 Tax=Callosobruchus maculatus RepID=C7AAS7_ CALMS
aatgtttttaaatttattcacactacaaaaatgtctcttacagttacagattatcgattactattaaacatacttgtaattatcagcttatatgatttctattatttaaactatatattttaaatataagtacatttattgtaaaaaaaaagtaataatagacgtaaagcttcagattatgctgctctgacaaaacctatggttttatcctctatgttgtaaatactgtaatatagagacaaaaatgcgcctccaaatatccatgtatttttccccatagtatcgtcaggaacaaaggctgaaatgcatgttgtgctggttttattagattccttcattatatattgctttcctccaagtctaaatggttgtccacgcaaatatatatccaatttaggcatttggttaatagcatcacaatttacaatgtatctaccgttttgtagtttagcattaataatctcatgaatttgattaacttcttttgatggaccatttatttcatttgtacttgtgtcagcaatagctttacaaccactttggcaaaacgtagaaacgtgtttgggatctttcgtgtaaatcattttatctacattgaactgccaatattctgcagtatcggcgtttaaatacactatagtatcctgaatgattgatccattcggataactagttttatgaacatgttttggatcaaagaatcccaacataatattacctcctctgttagaattacggtccctgtttaaataaattgaaaatataggattcttaatcttcttttctctatacaaagtgtagaaaaatggttcatagtcgccacttttaggtcctaatcctagtacaccatcagccttatcaaactgcattgaatccggtacaatagacatttcaacaaacaaaaatgatgtaacatttgagtgggcgatatgaatatcatcgtatgaataaactccagtgaaattaaaagctccatcttgtataaaatattgggtaccattctttttaaaagttgaagatttgtaacgatcgtacaagttatggccacggcatcctggagttaggctcgtatcacatcttgacgacaataaccatgaaaggccccatgcggtatcaaaagagacatcaaatgtttttcctggatggccaatgactattgtgccataaaactcgttgtccaaatatctgtataaagcgatagaatcgtttgttcggggttctttaattcttctgtttttaagaaattccagtctgtatccatattttctaagggtaggttcgttttccagtaactcttgtctagggcttttctttcgtctaagttcgatactcatagttccatcatttttacttgcataaaccatagataatttaaatacaataattgtacttagaattaataataactttaaatgattcattttgaaaaatgaacacgttattctcagtttacaaatcaagtaattacagtttaatacttcgagtacttcctgaatacttcacgcacaatgacataaatgtcaagtcaaat

SEQ ID NO: 3342 - DNA, 1570 bp, Diabrotica virgifera
  SmartBlast Evalue=7E-52; Info=Putative gut cathepsin D-like aspartic protease n=1 Tax=Callosobruchus maculatus RepID=C7AAS7_ CALMS
aatgtttttaaatttattcacactacaaaaatgtctcttacagttacagattatcgattactattaaacatacttgtaattatcagcttatatgatttctattatttaaactatatattttaaatataagtacatttattgtaaaaaaaaagtaataatagacgtaaagcttcagattatgctgctctgacaaaacctatggttttatcctctatgttgtaaatactgtaatatagagacaaaaatgcgcctccaaatatccatgtatttttccccatagtatcgtcaggaacaaaggctgaaatgcatgttgtgctggttttattagattccttcattatatattgctttcctccaagtctaaatggttgtccacgcaaatatatatccaatttaggcatttggttaatagcatcacaatttacaatgtatctaccgttttgtagtttagcattaataatctcatgaatttgattaacttcttttgatggaccatttatttcatttgtacttgtgtcagcaatagctttacaaccactttggcaaaacgtagaaacgtgtttgggatctttcgtgtaaatcattttctctacattgaactgccaatattctgcagtatcagcgtttaaatagactatagtatcctgaatgattgatccattcggataactagttttatgcacatgttttgggtcaaagaatcccaacataacattacctcctctgttagaattacggtccctgtttaaataaattgaaaatataggattcttaatcttcttttctctatacaaagtgtagaaaaatggttcataatcgccacttttaggtcctaatcctagtacaccatcagccttgtcaaactgcattgaatccggtacaatagacatttcaacaaacaaaaatgatgtaacgtttgagtgggcgatatgaatatcatcgtatgaataaactccagtgaaattaaaagctccatcttgtataaaatattgggtaccattctttttaaaagttgaagatttgtaacgatcgtacaagttatggccacggcatcctggagttaggctcgtatcacatcttgacgacaataaccatgaaaggccccatgcggtatcaaaagagacatcaaatgtttttcctggatggccaatgactattgtgccataaaactcgttgtccaaatatctgtacaaagcgatagaatcgtttgttcggggttctttaattcttctgtttttaagaaattccagtctgtatccatattttctaagggtaggttcgttttccagtaactcttgtctagggcttttctttcgtctaagttcgatactcatagttccatcatttttacttgcataaaccatagataatttaaatacaataattgtacttagaattaataataactttaaatgattcattttgaaaaatgaacacgttattctcagtttacaaatcaagtaattacagtttaatacttcgagtacttcctgaatacttcacgcacaatgacataaatgtcaagtcaaatagaaaatatagaatatagaataggaaatatctcttttat

SEQ ID NO: 3343 - DNA, 1531 bp, Diabrotica virgifera
  SmartBlast Evalue=7E-52; Info=Putative gut cathepsin D-like aspartic protease n=1 Tax=Callosobruchus maculatus RepID=C7AAS7_ CALMS
aatgtttttaaatttattcacactacaaaaatgtctcttacagttacagattatcgattactattaaacatacttgtaattatcagcttatatgatttctattatttaaactatatattttaaatataagtacatttattgtaaaaaaaaagtaataatagacgtaaagcttcagattatgctgctctgacaaaacctatggttttatcctctatgttgtaaatactgtaatatagagacaaaaatgcgcctccaaatatccatgtatttttccccatagtatcgtcaggaacaaaggctgaaatgcatgttgtgctggttttattagattccttcattatatattgctttcctccaagtctaaatggttgtccacgcaaatatatatccaatttaggcatttggttaatagcatcacaatttacaatgtatctaccgttttgtagtttagcattaataatctcatgaatttgattaacttcttttgatggaccatttatttcatttgtacttgtgtcagcaatagctttacaaccactttggcaaaacgtagaaacgtgtttgggatctttcgtgtaaatcattttctctacattgaactgccaatattctgcagtatcagcgtttaaatagactatagtatcctgaatgattgatccattcggataactagttttatgcacatgttttgggtcaaagaatcccaacataacattacctcctctgttagaattacggtccctgtttaaataaattgaaaatataggattcttaatcttcttttctctatacaaagtgtagaaaaatggttcataatcgccacttttaggtcctaatcctagtacaccatcagccttgtcaaactgcattgaatccggtacaatagacatttcaacaaacaaaaatgatgtaacgtttgagtgggcgatatgaatatcatcgtatgaataaactccagtgaaattaaaagctccatcttgtataaaatattgggtaccattctttttaaaagttgaagatttgtaacgatcgtacaagttatggccacggcatcctggagttaggctcgtatcacatcttgacgacaataaccatgaaaggccccatgcggtatcaaaagagacatcaaatgtttttcctggatggccaatgactattgtgccataaaactcgttgtccaaatatctgtacaaagcgatagaatcgtttgttcggggttctttaattcttctgtttttaagaaattccagtctgtatccatattttctaagggtaggttcgttttccagtaactcttgtctagggcttttctttcgtctaagttcgatactcatagttccatcatttttacttgcataaaccatagataatttaaatacaataattgtacttagaattaataataactttaaatgattcattttgaaaaatgaacacgttattctcagtttacaaatcaagtaattacagtttaatacttcgagtacttcctgaatacttcacgcacaatgacataaatgtcaagtcaaat

SEQ ID NO: 3344 - DNA, 2129 bp, Diabrotica virgifera
  SmartBlast Evalue=1E-38; Info=Endonuclease-reverse transcriptase n=1 Tax=Bombyx mori RepID=D5LB38_BOMMO
taaatttgtggatgttttcaagtatttatttcgtactgtttctttccatgagatcggaagggaagttttaaatgatatatcctgggtatataaaatctcttgcgctggtttggcctttcaaagaccagttaaaaaagaggttttttacttttttgactttttctcaagcttttaccagggcggtccgataagtacttagcctaccaaaggaaaacaaaatttttggaaaagcggtgatttacttctgaacgtaatcttgatacacttgactcagcaatgctccaacctctttaacccgtctgaaaagtatgttgttcgaggtccgcaaagtaggcttccgtggtggcgatgaactcctcattcgacttaaatgtctgcccggtgggtgacttcttcaagtttggaaacaaaaagaagtcgtgtagggccaaatctggagaatacggtggatggaacagcaattcgtagtccaattcgactgaaattttgacataggccgtctacaagaagaatgatttttttgaaaaggttacaccactttctttgaatagctctagtatgcctctcgcatataaaaagtatatagaagtaccatttggatggtgatcgattgacattttcgacgaaacgaacatttctagtttctcataaaagtatatcttccaaagtagactaacgagttatgattattttcacttatatctctttaagttgttagtaatattttaattatgagataaaaatctgaagagtttaatagacgttaaaaaataatttcgctgcaaaagtataaaatcagtattgtaaattatttttcttgtttaactttttttaattttagtttgagatgtacctgcttgaaaataaaatcttaatattgtcaacattacaccatagtggagtaagttatattttttggaacgtttagatgattggaggtctttgtcggcggaagaactggtttacggctgctactacctcttcttctggttcctatcggtttcggttcttggaaatcatattggcaatcaaaaccgtgctggctgcggctcgaaacagttccattgaggttttcttaaaccatgttctcaaattccgcagccatgatattctccttctaccgggtcctcgcttacctttgactttaccttgcaatatggactgcagcaggaagtaacggtgctgatttctcataacgtgtcccatatactgcagtttgatgcgtttgatggtaaacacaatctccgattcctacttcattctttctagaacttccttgttcgtgatccttgctgtccaggatattctcagcattcttctatagagccacaactcaaacgcttcaaattttttaatagtggcctctataggcgtccatgcctccgctctctacaacaatatagagaaaacataacatctcaaatatctcatttgtgtatctagggatatgttgtggcttttgaatatggcgcccattttgttaaaaaccgttcttgcctttcctatgcggcactttatttcccgttcgttgctccactgctcatttataatagttcccaggtagcaatactgttttacgcgctccatctgcgttccattaatgtacagatgagcccagtttatattctccttgctgataatcatttttttgatttttttccagttgattctacaaggcaaaattgagggcaaaagataccttgggcgtagacgtatatcctggctggacaatcttaggaagtggactggtctaacgtcaagtggttgatttcgagctgctgtgaatagaagatgcatctctggaagggaggcacctttagaagaagtcataacgctgtcaatttggtactatcataggagagttgaactgttaggaaatattcaagaatatataaaataaaattttacctttgacaccctgtatttcggttattataaacttttgtactaaggtaagttagcttaaatcgacctattttaacctcaggaatctaagggtaagctatggcccattctttaccaaacaccctgtataaactaatacagatcttacttaaaatctctattgtagctgcatcagggataaagacaattttaaagaaaggtgttgttccctctcaacgccttcc

SEQ ID NO: 3345 - DNA, 1910 bp, Diabrotica virgifera
  SmartBlast Evalue=1E-20; Info=Histone-lysine N- methyltransferase SETMAR (Fragment) n=12 Tax=Harpegnathos saltator RepID=E2C6C7_9HYME
taaatttgtggatgttttcaagtatttatttcgtactgtttctttccatgagatcggaagggaagttttaaatgatatatcctgggtatataaaatctcttgcgctggtttggcctttcaaagaccagttaaaaaagaggttttttacttttttgactttttctcaagcttttaccagggcggtccgataagtacttagcctaccaaaggaaaacaaaatttttggaaaagcggtgatttacttctgaacgtaatcttgatacacttgactcagcaatgctccaacctctttaacccgtctgaaaagtatgttgttcgaggtccgcaaagtaggcttccgtggtggcgatgaactcctcattcgacttaaatgtctgcccggtgggtgacttcttcaagtttggaaacaaaaagaagtcgtgtagggccaaatctggagaatacggtggatggaacagcaattcgtagtccaattcgactgaaattttgacataggccgtctacaagaagaatgatttttttgaaaaggttacaccactttctttgaatagctctagtatgcctctcgcatataaaaagtatatagaagtaccatttggatggtgatcgattgacattttcgacgaaacgaacatttctagtttctcataaaagtatatcttccaaagtagactaacgagttatgattattttcacttatatctctttaagttgttagtaatattttaattatgagataaaaatctgaagagtttaatagacgttaaaaaataatttcgctgcaaaagtataaaatcagtattgtaaattatttttcttgtttaactttttttaattttagtttgagatgtacctgcttgaaaataaaatcttaatattgtcaacattacaccatagtggagtaagttatattttttggaacgtttagatgattggaggtctttgtcggcggaagaactggtttacggctgctactacctcttcttctggttcctatcggtttcggttcttggaaatcatattggcaatcaaaaccgtgctggctgcggctcgaaacagttccattgaggttttcttaaaccatgttctcaaattccgcagccatgatattctccttctaccgggtcctcgcttacctttgactttaccttgcaatatggactgcagcagtgagtaacggtgctgatttctcataaatacaatctccggttccttcttcactcttcctaggacttccttgttcgtgatccttgctgtccatgatattcttagcatttttctataaagccacatctcaaatgctttaagtttcacggctgctacatgacgaaaaattgactcaaaaaagtgttagtatcgatatatcgaatgacgtacatggtatatcgatgttaatcgattaatatatcaatcgaccatttcattatatcaatcaagaattttctttgcctgttaatttcggttttgtatttcatgttattttaaattacatgcatacactactaaatgcatattttttaacttttctgctttctttctgatgtgaagaactatttttctcatcgtaataacacagagaggagagttttatggtggaaataggttcttccatacaatattggccttttcggtgacttactttgcagtcaagaatcggaaacgtcaaataatcaatttattgtataactgtggtgtacttccaaagagatatttgatattatagctgaaattttagtccaaaatacttccgcattcttctgtgtgcgtatcatccactaaaatttaataaaatcattacaaactatagtctgtttttaattggttgtttgtaaaagcttgtttgtaattggtccaactccaggcaagtttactccactgttatcaaattttgacactaatgacatttataa

SEQ ID NO: 3346 - DNA, 1345 bp, Diabrotica virgifera
  SmartBlast Evalue=6E-39; Info=Endonuclease-reverse transcriptase n=1 Tax=Bombyx mori RepID=D5LB38_BOMMO
tgaacgacttgactggtcaactgcagtttgattatatctacacatgggcgcagtcatttttttatttgaaggggttcttatctaaatcaaataattttaaattttaggtgtttgtatagcctcagaagcctaaacgacataatttcatgattctttataaaagttcattaccagtagcaaaaaaatcaatattcttcttcttctggttcctatcggtttcggttcttggaaatcatattggcaatcaaaaccgtgctggctgcggctcgaaacagttccattgaggttttcttaaaccatgttctcaaattccgcagccatgatattctccttctaccgggtcctcgcttacctttgactttaccttgcaatatggactgcagcaggaagtaacggtgctgatttctcataacgtgtcccatatactgcagtttgatgcgtttgatggtaaacacaatctccgattcctacttcattctttctagaacttccttgttcgtgatccttgctgtccaggatattctcagcattcttctatagagccacaactcaaacgcttcaaattttttaatagtggcctctataggcgtccatgcctccgctctctacaacaatatagagaaaacataacatctcaaatatctcatttgtgtatctagggatatgttgtggcttttgaatatggcgcccattttgttaaaaaccgttcttgcctttcctatgcggcactttatttcccgttcgttgctccactgctcatttataatagttcccaggtagcaatactgttttacgcgctccatctgcgttccattaatgtacagatgagcccagtttatattctccttgctgataatcatttttttgatttttttccagttgattctacaaggcaaaattgagggcaaaagataccttgggcgtagacgtatatcctggctggacaatcttaggaagtggactggtctaacgtcaagtggttgatttcgagctgctgtgaatagaagatgcatctctggaagggaggcacctttagaagaagtcataacgctgtcaatttggtactatcataggagagttgaactgttaggaaatattcaagaatatataaaataaaattttacctttgacaccctgtatttcggttattataaacttttgtactaaggtaagttagcttaaatcgacctattttaacctcaggaatctaagggtaagctatggcccattctttaccaaacaccctgtataaactaatacagatcttacttaaaatctctattgtagctgcatcagggataaagacaattttaaagaaaggtgttgttccctctcaacgccttcc

SEQ ID NO: 3347 - DNA, 1126 bp, Diabrotica virgifera
  SmartBlast Evalue=0.000000006; Info=Endonuclease-reverse transcriptase n=1 Tax=Bombyx mori RepID=D5LB38_BOMMO
tgaacgacttgactggtcaactgcagtttgattatatctacacatgggcgcagtcatttttttatttgaaggggttcttatctaaatcaaataattttaaattttaggtgtttgtatagcctcagaagcctaaacgacataatttcatgattctttataaaagttcattaccagtagcaaaaaaatcaatattcttcttcttctggttcctatcggtttcggttcttggaaatcatattggcaatcaaaaccgtgctggctgcggctcgaaacagttccattgaggttttcttaaaccatgttctcaaattccgcagccatgatattctccttctaccgggtcctcgcttacctttgactttaccttgcaatatggactgcagcagtgagtaacggtgctgatttctcataaatacaatctccggttccttcttcactcttcctaggacttccttgttcgtgatccttgctgtccatgatattcttagcatttttctataaagccacatctcaaatgctttaagtttcacggctgctacatgacgaaaaattgactcaaaaaagtgttagtatcgatatatcgaatgacgtacatggtatatcgatgttaatcgattaatatatcaatcgaccatttcattatatcaatcaagaattttctttgcctgttaatttcggttttgtatttcatgttattttaaattacatgcatacactactaaatgcatattttttaacttttctgctttctttctgatgtgaagaactatttttctcatcgtaataacacagagaggagagttttatggtggaaataggttcttccatacaatattggccttttcggtgacttactttgcagtcaagaatcggaaacgtcaaataatcaatttattgtataactgtggtgtacttccaaagagatatttgatattatagctgaaattttagtccaaaatacttccgcattcttctgtgtgcgtatcatccactaaaatttaataaaatcattacaaactatagtctgtttttaattggttgtttgtaaaagcttgtttgtaattggtccaactccaggcaagtttactccactgttatcaaattttgacactaatgacatttataa

SEQ ID NO: 3348 - DNA, 2152 bp, Diabrotica virgifera
aaatgtaacgtaacaaatgtaacaaacgattcctcagccgtcagttggatactgacttctgacttcatttcactctttcactgcgtccaggatgcagcgaccctccaccatccacctttaaaatccaccctccaagccaccatctagcatcctgcagtgcggcatcggctttacatctatgataaataagagtttcctgtttgctctatcttgtgttatttgagtcatcttatatcattatatgagtgtcttattcaaatattttaagtaactgggatctccaatgtattcaaaatgtacctttagtttttttttaaagcctagttcatctggtggtgccaaaaattccagactattgtcagaaattgaaacattgaatgtaacgtattttcaattaagttgtggtttattcctattaaatgcgttactgaattcttctgtagctatattttccgtcactaacatatcatctgcatacctcaatgacaaagcttttctccatttacattgatacttttgttcgtaagataaaagctaccatatctggtattctccagacatactgcatgctacgctgataattcttgttgtcgctctcttactccaaaactaggtgtggtgttttgatgtgggtttatttatatttttgtactgatcatcaattcagcattctgtcaaactttctaatattttttgttggtttattgtgtcgaagatcttttcataatccacaaataaattacatgcctatttttctacatacatgcaatacacaaccaaccacagaaatggcactggagtaccaatggagttgaaaaaaggaggtatcaattattctaaggaggtgtcctgagaccaggaagggtcttgataccatcacaatagttatacccatatctgcttcgtatcaaggaggtatcacaataatacatcatacaaattaatgttttgaggtaaaaccagcttagtatcattcaaatgatactgatttgaaactatacctttgttccgtggtggttgtgcggaaacaattaaatgaaattaaaataaatgtaaacacaacaaactgtcaataatatatttatttgtgtcggtaaaatagcgtgaatatttttcgaaagagggtttgttattctttgcgagtgtggtggtgtgactgcacagggtgcccgctgtgactatactgaactaactaactacaaacatgagtccgtcattatgtggtttcaagaagttgacggctagaacccatttaaaaagtgatttattgacataaggtctgataaggtaatttcccatacattaactgaacaggccattaacatctggtgttttaaaagctgaaaaggcattttacctgaatacacactgatatatttcgtttcttaacttaacaggcccttctatgcatatggtttgtatattaaatgtgaattataaatgggacgtattatttcattttgaaaaagttattaaaaattaaaattagcaaaatagtaattgaagcgtgtcgccacaccttgtaacatctcatacccttccttgtaatgatttgtatattcattttattccgaagacaaattatctaccctgtatacgagttgaaatttttggactactttctagatatacatattttttattttgcagtattttttacttttgtacattcgatcttttatcgtaacttaatcattgttataattaggcattggctctggaagttatatttatattctacaacaaaaatttgtgtacttgactactctctggacattacaaaaattttggagagtgtgttttaaatattcatatttttaccattggctaatcatttcatttgactcattgccacatacaaagtcatgtaaagtaaaatatatacatattttgtgaaaataaaacggaagcataaaactttttgtttatgtttccttagtataaaaacttttttttatttttatattatgatatgccaaccacagtgaattttcctgcagggatttcttatatattttttattgatgctgtcattatattataaattatcgtaattatcaaccagtactgccaagtttctattttcatttaacttttactgcatttccagagttatacaaattgcactgcaaagatcatgtttagattagat

SEQ ID NO: 3349 - DNA, 2117 bp, Diabrotica virgifera
ttaaatgacttggtggcaacatttttataataatttttttactaaatttggtagattttgtcttcggtaaatattttgacatatataatttgttacgaggtattataacagtgtttgtatcatttgaagaaacccttacatctatgataaataagagtttcctgtttgctctatcttgtgttatttgagtcatcttatatcattatatgagtgtcttattcaaatattttaagtaactgggatctccaatgtattcaaaatgtacctttagtttttttttaaagcctagttcatctggtggtgccaaaaattccagactattgtcagaaattgaaacattgaatgtaacgtattttcaattaagttgtggtttattcctattaaatgcgttactgaattcttctgtagctatattttccgtcactaacatatcatctgcatacctcaatgacaaagcttttctccatttacattgatacttttgttcgtaagataaaagctaccatatctggtattctccagacatactgcatgctacgctgataattcttgttgtcgctctcttactccaaaactaggtgtggtgttttgatgtgggtttatttatatttttgtactgatcatcaattcagcattctgtcaaactttctaatattttttgttggtttattgtgtcgaagatcttttcataatccacaaataaattacatgcctatttttctacatacatgcaatacacaaccaaccacagaaatggcactggagtaccaatggagttgaaaaaaggaggtatcaattattctaaggaggtgtcctgagaccaggaagggtcttgataccatcacaatagttatacccatatctgcttcgtatcaaggaggtatcacaataatacatcatacaaattaatgttttgaggtaaaaccagcttagtatcattcaaatgatactgatttgaaactatacctttgttccgtggtggttgtgcggaaacaattaaatgaaattaaaataaatgtaaacacaacaaactgtcaataatatatttatttgtgtcggtaaaatagcgtgaatatttttcgaaagagggtttgttattctttgcgagtgtggtggtgtgactgcacagggtgcccgctgtgactatactgaactaactaactacaaacatgagtccgtcattatgtggtttcaagaagttgacggctagaacccatttaaaaagtgatttattgacataaggtctgataaggtaatttcccatacattaactgaacaggccattaacatctggtgttttaaaagctgaaaaggcattttacctgaatacacactgatatatttcgtttcttaacttaacaggcccttctatgcatatggtttgtatattaaatgtgaattataaatgggacgtattatttcattttgaaaaagttattaaaaattaaaattagcaaaatagtaattgaagcgtgtcgccacaccttgtaacatctcatacccttccttgtaatgatttgtatattcattttattccgaagacaaattatctaccctgtatacgagttgaaatttttggactactttctagatatacatattttttattttgcagtattttttacttttgtacattcgatcttttatcgtaacttaatcattgttataattaggcattggctctggaagttatatttatattctacaacaaaaatttgtgtacttgactactctctggacattacaaaaattttggagagtgtgttttaaatattcatatttttaccattggctaatcatttcatttgactcattgccacatacaaagtcatgtaaagtaaaatatatacatattttgtgaaaataaaacggaagcataaaactttttgtttatgtttccttagtataaaaacttttttttatttttatattatgatatgccaaccacagtgaattttcctgcagggatttcttatatattttttattgatgctgtcattatattataaattatcgtaattatcaaccagtactgccaagtttctattttcatttaacttttactgcatttccagagttatacaaattgcactgcaaagatcatgtttagattagat

SEQ ID NO: 3350 - DNA, 1010 bp, Diabrotica virgifera
ttaaatgacttggtggcaacatttttataataatttttttactaaatttggtagattttgtcttcggtaaatattttgacatatataatttgttacgaggtattataacagtgtttgtatcatttgaagaaacccttaaggccgatgccgcagtgaaggaagtttgctaggatggtggatggtagatacccgcctggcgactattcagccacttagaccacgaataatacaacgacggcagccgcagtggccttccactaccatctacccacccggtggtccgccaggcgtctatccacccatatcagtcgtgtttgataatccatccgggtagcctcgctatggatgaaagcgtaataagtgctgtgtataaaagaagggcaatttgggacccagcagacccactatgtgacgaaacatggcttaaaatatctgttttatttattctttgcagttgcataaaaaaatccaatattcaagtcaggtgaatttaaaaaacaatttttgcctttaaatcgatttttctccactttctgaaaagtttagttagtgagttttacctctaatatgacgatatgctaaaaaacaaaccaaatgtaacgtaacaaatgaaacaaacgattccttagcagtcagttggatactgactttggatccacctttaaaatccaccctccaagccaccatctagcatcctgcagtgcggcatcggcttcacagacaatgctgttttagtataatcttatccctactctttacctaaccgttttagtataactttgttgtttgtttaaattcgtgtaaaactgtcaactttttaaatatgaaagaaataaaaatatagtataattttatctataactttttgcgacagctattttaaagcttgttttattttaacagataaagttttggtaattttaactcaaatcttaagcttttaacaatcaacactttttttcattgttaaaagttatttgaactttaaaaaactagcttcacaaacaatc

SEQ ID NO: 3351 - DNA, 609 bp, Diabrotica virgifera
aaatgtaacgtaacaaatgtaacaaacgattcctcagccgtcagttggatactgacttctgacttcatttcactctttcactgcgtccaggatgcagcgaccctccaccatccacctttaaaatccaccctccaagccaccatctagcatcctgcagtgcggcatcggcttaaggggtaattctgcatgaaaaagaaatgacagtttgctttataaacgtctgtccgcaattgcttcgtttccgagatacgggaaaacatgctattacaaactaggcacttgttgtcactggtacagcatattcccatgttggattgtgctgaagtcactgttaattgcagtaaagggaaagtctgtgaaatcaagagttaatgtttagagatgtatcccaaatggaagttatgaacagtttgtgacagacattctaacaactctttgaacatactaatcgcagccgtatcaagttttattttcaatttcacgtttcaacgaaaaaaatttaaaattctgaatatatttatttctgatacatgaaacctaatgttttgtgtttcaaccgcttaaaattatcgaataaaaattaataattaatatgattttcatttatgt

SEQ ID NO: 3352 - DNA, 1485 bp, Diabrotica virgifera
  SmartBlast Evalue=1E-130; Info=longitudinals lacking isoform 6 n=1 Tax=Tribolium castaneum RepID=UPI0001B1D859
cagatttgagatggacttttaagcggccgacatgttgtaaaattttgggtggcaataaaatatcgacgttttttccattagtgtcttgtgactgagccgttgtttttattttgcagaaatggatgacgaccaacaattttgtttacggtggaacaaccatcaatcgacattggtagccgtttttgacacgttattggagaacggcacattagtagactgtactttggcagcagaaggaaaatgcctaaacgcacacaaagtagttttgtctgcatgtagtccatacttcgaggcgctgctgtcaaagcactttgacaagcatcccattcttattcttaaggacgttaagttccaagaactaaaagccatgatggactatatgtacaggggggaagtgaacatatctcaagatcaattaggcgcgcttttaaaagccgctgaatctttgcaaattaagggtttatcagacaataggaaaggggaaactgaacgaaaacccactcctgctcctccaccaaagagcccacagccaacgaccctgccgaaggtccagggtttgacaattgagcaaagagctcgggaggattccagggagggaagcatgtcaccagggcctcgaaaaaagaaaaggttaaggcggaaaagtgaggaattagacaaccacgatgcctctaattcttcagaatctcacagtctacccgcccaaagcattcctacgttacctgctatttcaaaaatgaacatgaacgccgatgtgcctgaacaaatagaaactaaatcagagatactcacaaggcataaacagacagatgacatgccccaagttcctattataaaagaaaagattgaaacccacacagaactgatgttggaaccaaagtctgaatatgtagaagaaatgaatgaagatagtattgaggatttgacactggatgatgacgatttaagtaatatggaacaggtagatgatcaagcaggacctagtcatggagcaggagaaggatcaagtcaaggttttggaggttggcatatgggtaaccaaagtcaagatgaagtatttctggccgcgcaagaggccgtaggtgcacatcgagactcacaagttggaaccacctcagacattggcccaatcacaattgcatttaccaatatccgtaaaaataaatgatggtgcatccaccagttggcaagaaggggtatgttcatctcctacctctgtctctacatctagtgttcccatcaacccaatatctacaaaacctagagttgaaaagagacaaatttcaacacatgaacatagttatgtgaaacaaaggaaagtgagtgttgaagatacatatgtggaaacaattgacatactgaaaaacatggacacaaaactggagtcaatcaaccaaaagctaggttctatagcggattcgttaaaaattattgcagagaaaatgtagtatactttgtttgttcataaaataaatatttgtttac

SEQ ID NO: 3353 - DNA, 1480 bp, Diabrotica virgifera
  SmartBlast Evalue=1E-130; Info=longitudinals lacking isoform 6 n=1 Tax=Tribolium castaneum RepID=UPI0001B1D859
ttagttcaaagccaccctgcgaagaataaacacatggatttcgtcgtctcgtcataagttgaaatacaagtgaaaatatttgtgatatttagttttagtgtgccaaaataaaaatggatgacgaccaacaattttgtttacggtggaacaaccatcaatcgacattggtagccgtttttgacacgttattggagaacggcacattagtagactgtactttggcagcagaaggaaaatgcctaaacgcacacaaagtagttttgtctgcatgtagtccatacttcgaggcgctgctgtcaaagcactttgacaagcatcccattcttattcttaaggacgttaagttccaagaactaaaagccatgatggactatatgtacaggggggaagtgaacatatctcaagatcaattaggcgcgcttttaaaagccgctgaatctttgcaaattaagggtttatcagacaataggaaaggggaaactgaacgaaaacccactcctgctcctccaccaaagagcccacagccaacgaccctgccgaaggtccagggtttgacaattgagcaaagagctcgggaggattccagggagggaagcatgtcaccagggcctcgaaaaaagaaaaggttaaggcggaaaagtgaggaattagacaaccacgatgcctctaattcttcagaatctcacagtctacccgcccaaagcattcctacgttacctgctatttcaaaaatgaacatgaacgccgatgtgcctgaacaaatagaaactaaatcagagatactcacaaggcataaacagacagatgacatgccccaagttcctattataaaagaaaagattgaaacccacacagaactgatgttggaaccaaagtctgaatatgtagaagaaatgaatgaagatagtattgaggatttgacactggatgatgacgatttaagtaatatggaacaggtagatgatcaagcaggacctagtcatggagcaggagaaggatcaagtcaaggttttggaggttggcatatgggtaaccaaagtcaagatgaagtatttctggccgcgcaagaggccgtaggtgcacatcgagactcacaagttggaaccacctcagacattggcccaatcacaattgcatttaccaatatccgtaaaaataaatgatggtgcatccaccagttggcaagaaggggtatgttcatctcctacctctgtctctacatctagtgttcccatcaacccaatatctacaaaacctagagttgaaaagagacaaatttcaacacatgaacatagttatgtgaaacaaaggaaagtgagtgttgaagatacatatgtggaaacaattgacatactgaaaaacatggacacaaaactggagtcaatcaaccaaaagctaggttctatagcggattcgttaaaaattattgcagagaaaatgtagtatactttgtttgttcataaaataaatatttgtttac

SEQ ID NO: 3354 - DNA, 1465 bp, Diabrotica virgifera
  SmartBlast Evalue=1E-146; Info=longitudinals lacking isoform 6 n=1 Tax=Tribolium castaneum RepID=UPI0001B1D859
cagatttgagatggacttttaagcggccgacatgttgtaaaattttgggtggcaataaaatatcgacgttttttccattagtgtcttgtgactgagccgttgtttttattttgcagaaatggatgacgaccaacaattttgtttacggtggaacaaccatcaatcgacattggtagccgtttttgacacgttattggagaacggcacattagtagactgtactttggcagcagaaggaaaatgcctaaacgcacacaaagtagttttgtctgcatgtagtccatacttcgaggcgctgctgtcaaagcactttgacaagcatcccattcttattcttaaggacgttaagttccaagaactaaaagccatgatggactatatgtacaggggggaagtgaacatatctcaagatcaattaggcgcgcttttaaaagccgctgaatctttgcaaattaagggtttatcagacaataggaaaggggaaactgaacgaaaacccactcctgctcctccaccaaagagcccacagccaacgaccctgccgaaggtccagggtttgacaattgagcaaagagctcgggaggattccagggagggaagcatgtcaccagggcctcgaaaaaagaaaaggttaaggcggaaaagtgaggaattagacaaccacgatgcctctaattcttcagaatctcacagtctacccgcccaaagcattcctacgttacctgctatttcaaaaatgaacatgaacgccgatgtgcctgaacaaatagaaactaaatcagagatactcacaaggcataaacagacagatgacatgccccaagttcctattataaaagaaaagattgaaacccacacagaactgatgttggaaccaaagtctgaatatgtagaagaaatgaatgaagatagtattgaggatttgacactggatgatgacgatttaagtaatatggaacaggtagatgatcaagcaggacctagtcatggagcaggagaaggatcaagtcaaggttttggaggttggcatatgggtaaccaaagtcaagatgaagtatttctggccgcgcaagaggccgtaggtgcacatcgagactcacaaggcggaaattggatcctacagcatatcgatccagactctgctactggttttccctgccacaactgcgggaaaatatacaaacatcgtggaaatatgcgcagacatatggtctatgaatgtggaaaagatgcacgattccaatgttctttctgtgacagaaaatttcaccaacaatctaatttgaaaagacattttgaaaacaaacatacaatgctaccaaagttcagcaacagtattacagtatatagaaccagaacagtatcctgagatcactctcgtaaatgtatgcctctacttcccaaacttcctaaattgtaaatgtcacattttcactctatttggaattttggtgccagtattctt

SEQ ID NO: 3355 - DNA, 1460 bp, Diabrotica virgifera
  SmartBlast Evalue=1E-146; Info=longitudinals lacking isoform 6 n=1 Tax=Tribolium castaneum RepID=UPI0001B1D859
ttagttcaaagccaccctgcgaagaataaacacatggatttcgtcgtctcgtcataagttgaaatacaagtgaaaatatttgtgatatttagttttagtgtgccaaaataaaaatggatgacgaccaacaattttgtttacggtggaacaaccatcaatcgacattggtagccgtttttgacacgttattggagaacggcacattagtagactgtactttggcagcagaaggaaaatgcctaaacgcacacaaagtagttttgtctgcatgtagtccatacttcgaggcgctgctgtcaaagcactttgacaagcatcccattcttattcttaaggacgttaagttccaagaactaaaagccatgatggactatatgtacaggggggaagtgaacatatctcaagatcaattaggcgcgcttttaaaagccgctgaatctttgcaaattaagggtttatcagacaataggaaaggggaaactgaacgaaaacccactcctgctcctccaccaaagagcccacagccaacgaccctgccgaaggtccagggtttgacaattgagcaaagagctcgggaggattccagggagggaagcatgtcaccagggcctcgaaaaaagaaaaggttaaggcggaaaagtgaggaattagacaaccacgatgcctctaattcttcagaatctcacagtctacccgcccaaagcattcctacgttacctgctatttcaaaaatgaacatgaacgccgatgtgcctgaacaaatagaaactaaatcagagatactcacaaggcataaacagacagatgacatgccccaagttcctattataaaagaaaagattgaaacccacacagaactgatgttggaaccaaagtctgaatatgtagaagaaatgaatgaagatagtattgaggatttgacactggatgatgacgatttaagtaatatggaacaggtagatgatcaagcaggacctagtcatggagcaggagaaggatcaagtcaaggttttggaggttggcatatgggtaaccaaagtcaagatgaagtatttctggccgcgcaagaggccgtaggtgcacatcgagactcacaaggcggaaattggatcctacagcatatcgatccagactctgctactggttttccctgccacaactgcgggaaaatatacaaacatcgtggaaatatgcgcagacatatggtctatgaatgtggaaaagatgcacgattccaatgttctttctgtgacagaaaatttcaccaacaatctaatttgaaaagacattttgaaaacaaacatacaatgctaccaaagttcagcaacagtattacagtatatagaaccagaacagtatcctgagatcactctcgtaaatgtatgcctctacttcccaaacttcctaaattgtaaatgtcacattttcactctatttggaattttggtgccagtattctt

SEQ ID NO: 3356 - DNA, 2330 bp, Diabrotica virgifera
aattttgttgtgtgtgtgtgtgtcgagagaaagagatggctttagaaaaataatctttttgccacagaattttgttataaagatgtttaaattgatcccttttataacaaagaactttttataataaaacgtttttattatttataggacccaatataaaattattttgttgtttcaatttctatgtcataaaagaattttgtaatcgactttaaactaatataaatcaaagaaaactccgattcactatcttataaaatcacagagcacgcatatttaacgctctgttcaaatacatttgtgctggtgattttcatctgggaggttcttgatattgcggttgatcaataattacttctggttcgtttacaaaggttacgttctttttaggtaccatggttttacgaatttggtcaatgtgacgttttagacaatatccatatcaagttggacttggtaatgtaataatccatacttttgaacaattgtgccaaatgtccaaagttcctggtttccttggtaataccttacttgtactctctcccccacatttaactgtcttgcaccaggaggttgattttctgatctggtaagttttggtggacgtagtgcgtcgagtttgattcttagtccggattataattccaaaaaattacactagtataaaaaagtactttttataataccacggttgtttaaaatagcatatataataattaacttataaaatatgaattttaagaaacttttaattatgacataataattgtaatacattgtattaaaaaaattaaaaaaggtaacaacagcctggtttcgaactcaggacctctcgatctccggtctaaccctctaccactgagctaccatctatcgatgtcttaacttacgttaaaatggaactcaaatgtcataccattagtcacatttttaaaatagtttgaaattaaaaaaaaactcgatttatccatattatagcagttaaatattgcattgttagccatctctgagctattctgaaaattacaggtgcctaggtagcctagaactatttttaaaatggattacaaaatttgcggaggccgtgacaccaagcaagccaggtatataaaaacgttttaaaatgaaaaaatgctttgttatttgaggaaggtggaaaaatcatatgtataacatgggagtaaagtgccttttcctccactgaatgattactgcagtaaacttcagtcttgggaggaaaagtagcactttactcccttgttatacaaatagttatttggatgccgattcttggttattttagtgttcaagtaagatttgttgtgtcaagaataataagttgctgctgaaatagataaataaacttcacaactcactactttggcgctcaaaaataaatactttggtattacaatgttggtgctcacctatgtgtcacctatatttggtgccaaaagacaaacgtttggagatcatatcgattttaaattagtgttcggttaaatacaagccatacaaaaacctaggtttaaaagaactgaattaagtggcaatactgtgtgggtgtttacactcatctgcgccagactggagttgtagtactgacgatagtttatcacaagaagtagaagtatgcacgatttaaatattccaaataataatttttatcgcaaaacagacaagttgtttagtgttaaaattactgtttgtcaaaaattatgttaaataaaatttattaaataaatatttaatattaaataaatattgactactggcattatttgaccggtaaaccccgtaacttcagtgcttaatgaatttcttgacagatgacatcagtgtcgggtgtttcggaaaatgatatataaatataatgaaaaaaatatagtaatataaatcgaatataagaaataaataaaaaattgataatatattaaaccttccttagaaacctcctattttctttttgattaaaaagtatatattagtaaataaaattaaataaaacgcaatttgagtagatctttcacctttctatcgacgtcaacatgtattatttattttgatacattttagaaggtcagagcaaatttctttcaatttatatgctatagagcgtttcacgttaagaacggaacgttgccgagatagggctgcgtatttcttatggacgatagaagcgcgccgatgccacgccgtctgattagaatgaattgtatatcgacagtctactagccacacgtgcctgagtgttttggcaacactgttctgcacaagtcaaacgttccgtgcttaacgtgaaataaagtatataaagatgattgtcgttt

SEQ ID NO: 3357 - DNA, 2186 bp, Diabrotica virgifera
aattcgttcagatcttcttaactgtggaagtgcattacgttcttcagcagcaggttcattaatgggtaccagttcattatcaggatgatcaggtcctatcactggatctacattttcgttaatagggtttggatgtaaatgaagaacgttggatagacggcagaagatacaggggggggggggtttgacattgtgactgatcaataattacttctggttcgtttacaaaggttacgttctttttaggtaccatggttttacgaatttggtcaatgtgacgttttagacaatatccatatcaagttggacttggtaatgtaataatccatacttttgaacaattgtgccaaatgtccaaagttcctggtttccttggtaataccttacttgtactctctcccccacatttaactgtcttgcaccaggaggttgattttctgatctggtaagttttggtggacgtagtgcgtcgagtttgattcttagtccggattataattccaaaaaattacactagtataaaaaagtactttttataataccacggttgtttaaaatagcatatataataattaacttataaaatatgaattttaagaaacttttaattatgacataataattgtaatacattgtattaaaaaaattaaaaaaggtaacaacagcctggtttcgaactcaggacctctcgatctccggtctaaccctctaccactgagctaccatctatcgatgtcttaacttacgttaaaatggaactcaaatgtcataccattagtcacatttttaaaatagtttgaaattaaaaaaaaactcgatttatccatattatagcagttaaatattgcattgttagccatctctgagctattctgaaaattacaggtgcctaggtagcctagaactatttttaaaatggattacaaaatttgcggaggccgtgacaccaagcaagccaggtatataaaaacgttttaaaatgaaaaaatgctttgttatttgaggaaggtggaaaaatcatatgtataacatgggagtaaagtgccttttcctccactgaatgattactgcagtaaacttcagtcttgggaggaaaagtagcactttactcccttgttatacaaatagttatttggatgccgattcttggttattttagtgttcaagtaagatttgttgtgtcaagaataataagttgctgctgaaatagataaataaacttcacaactcactactttggcgctcaaaaataaatactttggtattacaatgttggtgctcacctatgtgtcacctatatttggtgccaaaagacaaacgtttggagatcatatcgattttaaattagtgttcggttaaatacaagccatacaaaaacctaggtttaaaagaactgaattaagtggcaatactgtgtgggtgtttacactcatctgcgccagactggagttgtagtactgacgatagtttatcacaagaagtagaagtatgcacgatttaaatattccaaataataatttttatcgcaaaacagacaagttgtttagtgttaaaattactgtttgtcaaaaattatgttaaataaaatttattaaataaatatttaatattaaataaatattgactactggcattatttgaccggtaaaccccgtaacttcagtgcttaatgaatttcttgacagatgacatcagtgtcgggtgtttcggaaaatgatatataaatataatgaaaaaaatatagtaatataaatcgaatataagaaataaataaaaaattgataatatattaaaccttccttagaaacctcctattttctttttgattaaaaagtatatattagtaaataaaattaaataaaacgcaatttgagtagatctttcacctttctatcgacgtcaacatgtattatttattttgatacattttagaaggtcagagcaaatttctttcaatttatatgctatagagcgtttcacgttaagaacggaacgttgccgagatagggctgcgtatttcttatggacgatagaagcgcgccgatgccacgccgtctgattagaatgaattgtatatcgacagtctactagccacacgtgcctgagtgttttggcaacactgttctgcacaagtcaaacgttccgtgcttaacgtgaaataaagtatataaagatgattgtcgttt

SEQ ID NO: 3358 - DNA, 746 bp, Diabrotica virgifera
aattttgttgtgtgtgtgtgtgtcgagagaaagagatggctttagaaaaataatctttttgccacagaattttgttataaagatgtttaaattgatcccttttataacaaagaactttttataataaaacgtttttattatttataggacccaatataaaattattttgttgtttcaatttctatgtcataaaagaattttgtaatcgactttaaactaatataaatcaaagaaaactccgattcactatcttataaaatcacagagcacgcatatttaacgctctgttcaaatacatttgtgctggtgattttcatctgggaggttcttgatattgcggttgatcaataattacttctggttcgtttacaaaggttacgttctttttaggtaccatggttttacgaatttggtcaatgtgacgttttagacaatatccatatcaagttggacttggtaatgtaataatccatacttttgaacaattgtgccaaatgtccaaagttcctggtttccttggtaataccttacttgtactctctcccccacatttaactgtcttgcaccaggaggttgattttctgatctggtaagttttggtggacgtagtgcgtcgagtttgattcttaaacttctgtgcaaatacatttctgctggtgattttccacaggaaagtggtgtcgctctatattttaaaataatttctcgtactttcttacaatttttgtaatctacacaaagtctca

SEQ ID NO: 3359 - DNA, 602 bp, Diabrotica virgifera
aattcgttcagatcttcttaactgtggaagtgcattacgttcttcagcagcaggttcattaatgggtaccagttcattatcaggatgatcaggtcctatcactggatctacattttcgttaatagggtttggatgtaaatgaagaacgttggatagacggcagaagatacaggggggggggggtttgacattgtgactgatcaataattacttctggttcgtttacaaaggttacgttctttttaggtaccatggttttacgaatttggtcaatgtgacgttttagacaatatccatatcaagttggacttggtaatgtaataatccatacttttgaacaattgtgccaaatgtccaaagttcctggtttccttggtaataccttacttgtactctctcccccacatttaactgtcttgcaccaggaggttgattttctgatctggtaagttttggtggacgtagtgcgtcgagtttgattcttaaacttctgtgcaaatacatttctgctggtgattttccacaggaaagtggtgtcgctctatattttaaaataatttctcgtactttcttacaatttttgtaatctacacaaagtctca

SEQ ID NO: 3360 - DNA, 1633 bp, Diabrotica virgifera
taagtgtatatactgttttgttaattaaatgattacttgcattaaacgacttgtttctggtacataacacgagtcattttgatattattaaactacatcgaacacttttgagacaaaaacaaaataaaagcaacaagtgcaaaaaaactgaaaatctaacgaaaagaattaggtaatttacttggcaaacgattaagaatttgtggattgttcataatgagaagatatgaaaattttcacaatatattattagttttaacccattcgctgcctatcgaagaggatggaactcagctaggagcagtggcgtgcggtgactttttctaaaggggaagcgattcaataaggatataaaaatattttcttaagggtcgagggtcgagccacttcccacctgataacactctgatgcgcttaggggctctctatcagcaaagtgcttatgtgagacgtcctgggtacaaggagtcacacactaaatcataccccgatcaatgcgtgaggcactctattgccgctatttctagtgactatagtgacctatcattgatctgtattgcttgctcgggccttaagtcctcgctccgggcttcgtttcctaaagaagagatctatttcaatgttttttttttaattccgaggcattttccacaacagacaactttcaacaatatgacacttatttatacttgagctctattctcctatcaacttctgataattgttgaattcagtctttttcaatggacttgtaaagtctgtcttcgcttgttgaatttcttgtaaaacttttaatgcattttaatactgaaaaacttcgttcaactgatgcacttgtgactgggatagtttgtagtaattcacacaacttcacacagggacttttttaaaccagtagttataagaaatacccagatttctgagtatatctttatcactaatgtgagttgtttcataaacaacacttaacttataatgcaaagctggcatatcaaaatattttcattatttaatcgtagtgaaataaattcctctgtgggaaattttgatgaattataattaaaaatattaaataagaatatattatataattctacaaattttaattcgttaaaattttgaaagcgaaaattcattttttgtagaatgttatcaaaaggtctctctgttgtcgacatgatcaatcttcattctttttctttcatgttcaaaccccatattttcagttttatcccaaatatttttaaactgctctcgttttttaattatcgtattaataaagtcatcaatttgtcttatacaaaatgcaatgtcaattgacttcatctgtaaaatgtcaaataaaagatcagtaaaaggaaaaatctctgcaaaaaatttaaatcgaaatattctttaagcgaatgtatgtacctaagcaccccttagaagcagtaacagtcagagcatcccactcttggaaggcgatcgaacgatcgcttctgcagggtaccaaaattcgcgcgactagtgggtgccgtcattgaaccctgaccaatttttatacgggacaactgcatgacaagcggcgattttgagatgcgcttctgtcaggggtggaccgagtaattgaattgtgtgcatattgagttcc

SEQ ID NO: 3361 - DNA, 1518 bp, Diabrotica virgifera
taagtgtatatactgttttgttaattaaatgattacttgcattaaacgacttgtttctggtacataacacgagtcattttgatattattaaactacatcgaacacttttgagacaaaaacaaaataaaagcaacaagtgcaaaaaaactgaaaatctaacgaaaagaattaggtaatttacttggcaaacgattaagaatttgtggattgttcataatgagaagatatgaaaattttcacaatatattattagttttaacccattcgctgcctatcgaagaggatggaactcagctaggagcagtggcgtgcggtgactttttctaaaggggaagcgattcaataaggatataaaaatattttcttaagggtcgagggtcgagccacttcccacctgataacactctgatgcgcttaggggctctctatcagcaaagtgcttatgtgagacgtcctgggtacaaggactcacacactaaatccgtgacgcgtgaatgcgtgaggcactctattcccgctatttctagtgactagtgacctatcattgatctgtattctagctcgggccttgagtcctcgcgccgggcttggttttctaaagaagaattctatttaaaaaaatttatactccgaggcattttccacaacacacaactttcactaaaatgacacttatttatactcgaggtctattctcctatcaacttctgataattgttgaatgcagtatttttcaatggataatagggctaacgttcaaagtctgtcttcgcttgttgaatttcttttaaactcttaatttgaaacttttaatgcatcttaatactgcaaaacttcgttcaactgatgcacttgtggctgggatagttagtagtactaattcacacaacttgaccacttcacacagcgacttgtttaaaccagtagttataaagaaatcccagatttctgggtatttctttatcattcatgtcagttgtttcataaatgacacttaactgagaatgcaaagttgggatatcaaaaaaattttcattatttaatcgtaagtgaaataaattcctctgtgggaattttgatgaattataattagaaatattaagattatattatattataattctacaaattttaagtcgttaaaattttgaaagctagaattcatttgttgtagaatattatcaaaaggtatctctgtttcctctgttctctctgtctccgacattatcaatcttcattatttttcttttcttgttcaaaccccatattttcagttttatcccaaatatttttaaactgctctcgtttttttaattatcgtattaataaagtcatcaatttgtcttatacaaaatccaatgtcatttgacttctgtaaaatgttaaataaaagatcagtaaaaggaaaaatctctgcaaaaaatttaaatcgaaatattctttaagcgaatgtatgttgacctaagcaccccttaggagtcggaacatctcacttttggaaggcgataggacgatcgc

SEQ ID NO: 3362 - DNA, 1410 bp, Diabrotica virgifera
aatggcgagtatggaaccttctgtttcaggaaacatcttttctgatgtcaaccaatagttcggagctatattgtctaccagtggcgtgcggtgactttttcgaaaggggaagcgattcaataaggatataaaaatattttcttaagggtcgagggtcgagccacttcccacctgataacactctgatgcgcttaggggctctctatcagcaaagtgcttatgtgagacgtcctgggtacaaggagtcacacactaaatcataccccgatcaatgcgtgaggcactctattgccgctatttctagtgactatagtgacctatcattgatctgtattgcttgctcgggccttaagtcctcgctccgggcttcgtttcctaaagaagagatctatttcaatgttttttttttaattccgaggcattttccacaacagacaactttcaacaatatgacacttatttatacttgagctctattctcctatcaacttctgataattgttgaattcagtctttttcaatggacttgtaaagtctgtcttcgcttgttgaatttcttgtaaaacttttaatgcattttaatactgaaaaacttcgttcaactgatgcacttgtgactgggatagtttgtagtaattcacacaacttcacacagggacttttttaaaccagtagttataagaaatacccagatttctgagtatatctttatcactaatgtgagttgtttcataaacaacacttaacttataatgcaaagctggcatatcaaaatattttcattatttaatcgtagtgaaataaattcctctgtgggaaattttgatgaattataattaaaaatattaaataagaatatattatataattctacaaattttaattcgttaaaattttgaaagcgaaaattcattttttgtagaatgttatcaaaaggtctctctgttgtcgacatgatcaatcttcattctttttctttcatgttcaaaccccatattttcagttttatcccaaatatttttaaactgctctcgttttttaattatcgtattaataaagtcatcaatttgtcttatacaaaatgcaatgtcaattgacttcatctgtaaaatgtcaaataaaagatcagtaaaaggaaaaatctctgcaaaaaatttaaatcgaaatattctttaagcgaatgtatgtacctaagcaccccttagaagcagtaacagtcagagcatcccactcttggaaggcgatcgaacgatcgcttctgcagggtaccaaaattcgcgcgactagtgggtgccgtcattgaaccctgaccaatttttatacgggacaactgcatgacaagcggcgattttgagatgcgcttctgtcaggggtggaccgagtaattgaattgtgtgcatattgagttcc

SEQ ID NO: 3363 - DNA, 1295 bp, Diabrotica virgifera
aatggcgagtatggaaccttctgtttcaggaaacatcttttctgatgtcaaccaatagttcggagctatattgtctaccagtggcgtgcggtgactttttcgaaaggggaagcgattcaataaggatataaaaatattttcttaagggtcgagggtcgagccacttcccacctgataacactctgatgcgcttaggggctctctatcagcaaagtgcttatgtgagacgtcctgggtacaaggactcacacactaaatccgtgacgcgtgaatgcgtgaggcactctattcccgctatttctagtgactagtgacctatcattgatctgtattctagctcgggccttgagtcctcgcgccgggcttggttttctaaagaagaattctatttaaaaaaatttatactccgaggcattttccacaacacacaactttcactaaaatgacacttatttatactcgaggtctattctcctatcaacttctgataattgttgaatgcagtatttttcaatggataatagggctaacgttcaaagtctgtcttcgcttgttgaatttcttttaaactcttaatttgaaacttttaatgcatcttaatactgcaaaacttcgttcaactgatgcacttgtggctgggatagttagtagtactaattcacacaacttgaccacttcacacagcgacttgtttaaaccagtagttataaagaaatcccagatttctgggtatttctttatcattcatgtcagttgtttcataaatgacacttaactgagaatgcaaagttgggatatcaaaaaaattttcattatttaatcgtaagtgaaataaattcctctgtgggaattttgatgaattataattagaaatattaagattatattatattataattctacaaattttaagtcgttaaaattttgaaagctagaattcatttgttgtagaatattatcaaaaggtatctctgtttcctctgttctctctgtctccgacattatcaatcttcattatttttcttttcttgttcaaaccccatattttcagttttatcccaaatatttttaaactgctctcgtttttttaattatcgtattaataaagtcatcaatttgtcttatacaaaatccaatgtcatttgacttctgtaaaatgttaaataaaagatcagtaaaaggaaaaatctctgcaaaaaatttaaatcgaaatattctttaagcgaatgtatgttgacctaagcaccccttaggagtcggaacatctcacttttggaaggcgataggacgatcgc

SEQ ID NO: 3364 - DNA, 1370 bp, Diabrotica virgifera
caacgcgttaaccgactttatttcacgttatttttgtccactttgtctacccactagcgcagcgcaaagttaagatctagccgttctttctatttttgaatctgtgcttctgaattttttcttccattaaaaaaaccgcaaaaaatggcaaaattggtgattttgttggcatgtgttgctgtatttaatgccgtaagcgcacttgattgctacacttgcaccgacgatgcctgcaaaaaagatgtaaaagaaatgcaaaaagttacctgtggtaaacccgctgaccaaaatcaagaatccgtttgccaaaaagtaacatacaaaggcaaggatggcaaggaacacatcgaaagaaaatgtgcctatgctcccaagaacggagaggctcagtgtcccgcatccataaacaaagctgatgtaactgacctaaaatgcccatcctgtaaagctgatctttgcaactcagctaccaccatcaacttcagcctaacagcattcgctgcagtagtttttgccatcgtaggccaaaaattcttaatgtaaaacataatttttaaacattttttatataagtacatgtcgctcctccggaagaagtggcacaactcaaaaaacaacttttttgataaataatggaagaacatggatacgtgaatgttcctaactgtgtaagaacaaaaacaaaaacattttgagttatgccacttttcttttaaaatattggtaactttgttaaaatttttcgaaaaatacctaggacacttctcgaaatacaacggttttcgtgataaataacgatacgttcacgccaaacgtcagagcataatcaaaagtgtcagtgttccagagtaaaaatatacattttatcgccaaatgaataatgacattaccaccatcttacgaagttggaagtaaatgacattaccatcatcttacgaagttggaagtaaacatctatgtgacacttttcctggtaaaagtatagaattatttgggttgtgccacttttcttccgaacgagcgaatgtgttaaaatattattaattaaaatatgtgtttaagaactaaaaattgtaacgtttttgataaatgtgtatggtgtattaaaatgttgttttgctactatatttgtccgaaattattcataatgatatgaagtagctacttaaaaaaaccacatacgcatagaaattgctttacttgtaagacctattacgtgaattaagattttgtaagatgaaaaataagtatgtagaaggaatttgtattacctcaggtcatttttcaacgagatatttttctttgtaaataaagtttataatattacagctgatgaattcaataaatataattattattaattaaaaaaa

SEQ ID NO: 3365 - DNA, 1363 bp, Diabrotica virgifera
caacgcgttaaccgactttatttcacgttatttttgtccactttgtctacccactagcgcagcgcaaagttaagatctagccgttctttctatttttgaatctgtgcttctgaattttttcttccattaaaaaaaccgcaaaaaatggcaaaattggtgattttgttggcatgtgttgctgtatttaatgccgtaagcgcacttgattgctacacttgcaccgacgatgcctgcaaaaaagatgtaaaagaaatgcaaaaagttacctgtggtaaacccgctgaccaaaatcaagaatccgtttgccaaaaagtaacatacaaaggcaaggatggcaaggaacacatcgaaagaaaatgtgcctatgctcccaagaacggagaggctcagtgtcccgcatccataaacaaagctgatgtaactgacctaaaatgcccatcctgtaaagctgatctttgcaactcagctaccaccatcaacttcagcctaacagcattcgctgcagtagtttttgccatcgtaggccaaaaattcttaatgtaaaacataatttttaaacattttttatataagtacatgtcgctcctccggaagaagtggcacaactcaaaaaacaacttttttgataaataatggaagaacatggatacgtgaatgttcctaactgtgtaagaacaaaaacaaaaacattttgagttatgccacttttcttttaaaatattggtaactttgttaaaatttttcgaaaaatacctaggacacttctcgaaatacaacggttttcgtgataaataacgatacgttcacgccaaacgtcagagcataatcaaaagtgtcagtgttccagagtaaaaatatacattttatcgccaaatgaataatgacattaccaccatcttacgaagttggaagtaaatgacattaccatcatcttacgaagttggaagtaaacatctatgtgacacttttcctggtaaaagtatagaattatttgggttgtgccacttttcttccgaacgagcgaatgtgttaaaatattattaattaaaatatgtgtttaagaactaaaaattgtaacgtttttgataaatgtgtatggtgtattaaaatgttgttttgctactatatttgtccgaaattattcataatgatatgaagtagctacttaaaaaaaccacatacgcatagaaattgctttacttgtaagacctattacgtgaattaagattttgtaagatgaaaaataagtatgtagaaggaatttgtattacctcaggtcatttttcaacgagatatttttctttgtaaataaagtttataatattacagctgatgaattcaataaatataattattattaatt

SEQ ID NO: 3366 - DNA, 1335 bp, Diabrotica virgifera
caacgcgttaaccgactttatttcacgttatttttgtccactttgtctacccactagcgcagcgcaaagttaagatctagccgttctttctatttttgaatctgtgcttctgaattttttcttccattaaaaaaaccgcaaaaaatggcaaaattggtgattttgttggcatgtgttgctgtatttaatgccgtaagcgcacttgattgctacacttgcaccgacgatgcctgcaaaaaagatgtaaaagaaatgcaaaaagttacctgtggtaaacccgctgaccaaaatcaagaatccgtttgccaaaaagtaacatacaaaggcaaggatggcaaggaacacatcgaaagaaaatgtgcctatgctcccaagaacggagaggctcagtgtcccgcatccataaacaaagctgatgtaactgacctaaaatgcccatcctgtaaagctgatctttgcaactcagctaccaccatcaacttcagcctaacagcattcgctgcagtagtttttgccatcgtaggccaaaaattcttaatgtaaaacataatttttaaacattttttatataagtacatgtcgctcctccggaagaagtggcacaactcaaaaaacaacttttttgataaataatggaagaacatggatacgtgaatgttcataactgtgtaagaacaaaaacaaacacattttgagttatgccacttttcttttaaaatattggtaactttgttaaattttttcgaacaatacctaggacacttctcgaaatacaacggttttcatgataaataacgatacgttcacgccaaacgtcagagcataatcaaaagtgtcagtgttccagagtacaaatacacattttaccgccaaatgaataatgacactaccaccatcttacgaagttggaagtaaacatctatgtgacacttttcctggtaaaagtatagaattatttgggttgtgccacttttcttccgaacgagcgaatgtgttaaaatattattaattaaaatatgtgtttaagaactaaaaattgtaacgtttttgataaatgtgtatggtgtattaaaatgttgttttgctactatatttgtccgaaattattcataatgatatgaagtagctacttaaaaaaaccacatacgcatagaaattgctttacttgtaagacctattacgtgaattaagattttgtaagatgaaaaataagtatgtagaaggaatttgtattacctcaggtcatttttcaacgagatatttttctttgtaaataaagtttataatattacagctgatgaattcaataaatataattattattaattaaaaaaa

SEQ ID NO: 3367 - DNA, 1328 bp, Diabrotica virgifera
caacgcgttaaccgactttatttcacgttatttttgtccactttgtctacccactagcgcagcgcaaagttaagatctagccgttctttctatttttgaatctgtgcttctgaattttttcttccattaaaaaaaccgcaaaaaatggcaaaattggtgattttgttggcatgtgttgctgtatttaatgccgtaagcgcacttgattgctacacttgcaccgacgatgcctgcaaaaaagatgtaaaagaaatgcaaaaagttacctgtggtaaacccgctgaccaaaatcaagaatccgtttgccaaaaagtaacatacaaaggcaaggatggcaaggaacacatcgaaagaaaatgtgcctatgctcccaagaacggagaggctcagtgtcccgcatccataaacaaagctgatgtaactgacctaaaatgcccatcctgtaaagctgatctttgcaactcagctaccaccatcaacttcagcctaacagcattcgctgcagtagtttttgccatcgtaggccaaaaattcttaatgtaaaacataatttttaaacattttttatataagtacatgtcgctcctccggaagaagtggcacaactcaaaaaacaacttttttgataaataatggaagaacatggatacgtgaatgttcataactgtgtaagaacaaaaacaaacacattttgagttatgccacttttcttttaaaatattggtaactttgttaaattttttcgaacaatacctaggacacttctcgaaatacaacggttttcatgataaataacgatacgttcacgccaaacgtcagagcataatcaaaagtgtcagtgttccagagtacaaatacacattttaccgccaaatgaataatgacactaccaccatcttacgaagttggaagtaaacatctatgtgacacttttcctggtaaaagtatagaattatttgggttgtgccacttttcttccgaacgagcgaatgtgttaaaatattattaattaaaatatgtgtttaagaactaaaaattgtaacgtttttgataaatgtgtatggtgtattaaaatgttgttttgctactatatttgtccgaaattattcataatgatatgaagtagctacttaaaaaaaccacatacgcatagaaattgctttacttgtaagacctattacgtgaattaagattttgtaagatgaaaaataagtatgtagaaggaatttgtattacctcaggtcatttttcaacgagatatttttctttgtaaataaagtttataatattacagctgatgaattcaataaatataattattattaatt

SEQ ID NO: 3368 - DNA, 1993 bp, Diabrotica virgifera
  SmartBlast Evalue=2E-13; Info=Reverse transcriptase family member n=1 Tax=Glycine max RepID=Q1AKH8_SOYBN
ggcgcccgaaaatcgtgtttttttttcaatttttgctctataactccaaagattttgactctacaccaaaaagactcaaataaaaattgttttatgacttagtaataatagcagacaataaagagaaaatgcaaaaattaatcgatatctgggtggaggaaatagaaaatttgaaaatggaggtaaatgtaaagaaaacgaagaccatgatagtaacccaaaagaaaagggaagaaataaaccaaacgatatttaggtgcaaaaacgaaataatagaaacagtctcgacgtttgaatatctgggagtaataatatcagaggatggaaagctagatcaagaaatctcatacaggagcgaaaaaagcaaataagatctactatgcactaaataaaacaatatttggaaaggaagaaatagataaagaaataaaactgaaggtatacaacgcaatctctgtaccaactttaatatatgcaagtgagacatgggtaaacaatgcaaaaatagacagtacaataaacgcagcggagatgaagcagctaagaaaaatagcaggaaaaacgaaattggacagaataagaaatgaagatattagacaaaagactgaaacaggaatctataataaccaagatccaaaaaagaaaattaaaaatggtatggacacattaacagaatggaccaaggaagactaccaaagcaggtgatggaatcaaaaagatatggtaaaagaaggaaagaggccaaggaagagatggatcgatcaaattatagaagttggacaggaaaaaggaaaaacacttcaacaaatgaaagagttagcaacggaccgcaagaaatggaagatatgaatagaggaagaagaagtaatgcctgatttcatcgtttcgtgtgtagatagacatcaccaaatgagtgggtcagattcatgacattttgtaactagttaacattaacacctctaagatattggggaaacaatacccgtagctctatggagcacgtcatcataaaagacgttgaactgtatccgaaagactacagaaccataaaatatttgctgattctttcgatcgatttgtgattgtctcgttcctcttagatcttcctcgtttttatatcacctttttagttttttatatgagtttatttgtgaaacaatggaaaaaaatgatggtttgtttaatttttgaagtttcgcctgcatctgggcgtcttctcaaattgagtacttcgttcttcggtttctagactatttgtaaaatatttgttgctcaaaaaatattaattctgtattattttaactataagtaatcctataagtcttactggacaatgctctaatgaataaaaaaactgtatatttaatatatgagtgtgactcgtgtgcgtgtgctgaattgttttctaattcttaagtctgatagttaattgatgaaaaagtgttatttaataattaagtaaatgttaaacggcataacttgtccctccttttgacttctttatccatattctttttgatatattcctctaccactacataaatttttgagcttgatgaatttgtatgtatttcaccaatgcaagcaaactttagtagagctggctgtagacgatgtttaactcttcgtcattcaagtatttctgggttttacctccaatcaaaaacttaacagttaatcagggaatatagctgggtaaaaaaatatataagaattttgaagcattgtttggtaccgaaatttttgtgaatacgcatatgaatctagcaataaagtgagaacagacatgtacctactatacaaataaatgaatataaagtcttattgtatcgtctcataatagaaagaaaacaatagcaaaggaaagaatttggatgggaaaagtcttaagaaaatttatatgtatgtgtatcacagatagacaggcatgagctaacactaagaccaaatgtatgttatcataagggactgttttataaataatagtattatt

SEQ ID NO: 3369 - DNA, 1987 bp, Diabrotica virgifera
  SmartBlast Evalue=0.000000001; Info=Reverse transcriptase family member n=1 Tax=Glycine max RepID=Q1AKH8_SOYBN
aattaccatcgttaccttattttctgacacgttttactctgtgttgctgtgaaaacgcactgcaggcaattaaatgttttcagtacaaataaacggaaatagatcgccaataataaacctaaggaggggaataaatcaaggggacagtctcagcccagttttgtttatattagtaatggatagagtaacgaagagagctaaaagaaagtcaaggcaattaaagggaagaaataaaccaaacgatatttaggtgcaaaaacgaaataatagaaacagtctcgacgtttgaatatctgggagtaataatatcagaggatggaaagctagatcaagaaatctcatacaggagcgaaaaaagcaaataagatctactatgcactaaataaaacaatatttggaaaggaagaaatagataaagaaataaaactgaaggtatacaacgcaatctctgtaccaactttaatatatgcaagtgagacatgggtaaacaatgcaaaaatagacagtacaataaacgcagcggagatgaagcagctaagaaaaatagcaggaaaaacgaaattggacagaataagaaatgaagatattagacaaaagactgaaacaggaatctataataaccaagatccaaaaaagaaaattaaaaatggtatggacacattaacagaatggaccaaggaagactaccaaagcaggtgatggaatcaaaaagatatggtaaaagaaggaaagaggccaaggaagagatggatcgatcaaattatagaagttggacaggaaaaaggaaaaacacttcaacaaatgaaagagttagcaacggaccgcaagaaatggaagatatgaatagaggaagaagaagtaatgcctgatttcatcgtttcgtgtgtagatagacatcaccaaatgagtgggtcagattcatgacattttgtaactagttaacattaacacctctaagatattggggaaacaatacccgtagctctatggagcacgtcatcataaaagacgttgaactgtatccgaaagactacagaaccataaaatatttgctgattctttcgatcgatttgtgattgtctcgttcctcttagatcttcctcgtttttatatcacctttttagttttttatatgagtttatttgtgaaacaatggaaaaaaatgatggtttgtttaatttttgaagtttcgcctgcatctgggcgtcttctcaaattgagtacttcgttcttcggtttctagactatttgtaaaatatttgttgctcaaaaaatattaattctgtattattttaactataagtaatcctataagtcttactggacaatgctctaatgaataaaaaaactgtatatttaatatatgagtgtgactcgtgtgcgtgtgctgaattgttttctaattcttaagtctgatagttaattgatgaaaaagtgttatttaataattaagtaaatgttaaacggcataacttgtccctccttttgacttctttatccatattctttttgatatattcctctaccactacataaatttttgagcttgatgaatttgtatgtatttcaccaatgcaagcaaactttagtagagctggctgtagacgatgtttaactcttcgtcattcaagtatttctgggttttacctccaatcaaaaacttaacagttaatcagggaatatagctgggtaaaaaaatatataagaattttgaagcattgtttggtaccgaaatttttgtgaatacgcatatgaatctagcaataaagtgagaacagacatgtacctactatacaaataaatgaatataaagtcttattgtatcgtctcataatagaaagaaaacaatagcaaaggaaagaatttggatgggaaaagtcttaagaaaatttatatgtatgtgtatcacagatagacaggcatgagctaacactaagaccaaatgtatgttatcataagggactgttttataaataatagtattatt

SEQ ID NO: 3370 - DNA, 776 bp, Diabrotica virgifera
  SmartBlast Evalue=1E-17; Info=Reverse transcriptase family member n=1 Tax=Glycine max RepID=Q1AKH8_SOYBN
ggcgcccgaaaatcgtgtttttttttcaatttttgctctataactccaaagattttgactctacaccaaaaagactcaaataaaaattgttttatgacttagtaataatagcagacaataaagagaaaatgcaaaaattaatcgatatctgggtggaggaaatagaaaatttgaaaatggaggtaaatgtaaagaaaacgaagaccatgatagtaacccaaaagaaaagggaagaaataaaccaaacgatatttaggtgcaaaaacgaaataatagaaacagtctcgacgtttgaatatctgggagtaataatatcagaggatggaaagctagatcaagaaatctcatacaggagcgaaaaaagcaaataagatctactatgcactaaataaaacaatatttggaaaggaagaaatagataaagaaataaaactgaaggtatacaacgcaatctctgtaccaactttaatatatgcaagtgagacatgggtaaacaatgcaaaaatagacagtacaataaacgcagcggagatgaagcagctaagaaaaatagcaggaaaaacgaaattggacagaataagaaatgaagatattagacaaaagactgaaacaggaatcgataataaccaagtacaaaaaagaaaattaaaatggtacggacacattaacagaatggaccagggaagactaccaaagcaggtgatggaatcgaaaagatatggtaaaagaaggaaagggaggcccaggaagagatggatcgatcagattatagaaat

SEQ ID NO: 3371 - DNA, 770 bp, Diabrotica virgifera
  SmartBlast Evalue=1E-13; Info=Reverse transcriptase family member n=1 Tax=Glycine max RepID=Q1AKH8_SOYBN
aattaccatcgttaccttattttctgacacgttttactctgtgttgctgtgaaaacgcactgcaggcaattaaatgttttcagtacaaataaacggaaatagatcgccaataataaacctaaggaggggaataaatcaaggggacagtctcagcccagttttgtttatattagtaatggatagagtaacgaagagagctaaaagaaagtcaaggcaattaaagggaagaaataaaccaaacgatatttaggtgcaaaaacgaaataatagaaacagtctcgacgtttgaatatctgggagtaataatatcagaggatggaaagctagatcaagaaatctcatacaggagcgaaaaaagcaaataagatctactatgcactaaataaaacaatatttggaaaggaagaaatagataaagaaataaaactgaaggtatacaacgcaatctctgtaccaactttaatatatgcaagtgagacatgggtaaacaatgcaaaaatagacagtacaataaacgcagcggagatgaagcagctaagaaaaatagcaggaaaaacgaaattggacagaataagaaatgaagatattagacaaaagactgaaacaggaatcgataataaccaagtacaaaaaagaaaattaaaatggtacggacacattaacagaatggaccagggaagactaccaaagcaggtgatggaatcgaaaagatatggtaaaagaaggaaagggaggcccaggaagagatggatcgatcagattatagaaat

SEQ ID NO: 3372 - DNA, 1313 bp, Diabrotica virgifera
  SmartBlast Evalue=2E-82; Info=Fatty acid 2-hydroxylase n=1 Tax= Harpegnathos saltator RepID=E2C0E4_9HYME
aaagtaaaaataataaagtttgtttaattcttataaaccatttttcaaaaaataatagtatatcaaaggtttttctttgtattctaagaaaaatcacacagatgacgaacacttaaggcaatcaatactcaaaaatgtgcgctttaaaagatttcaccatttgatgccaatttttaaatttcttaattttatagctgttccaaagactttatcccagatcgtactactgatgccaaagccgttgtcatggtgggcgaaatgatgctgattgtgatatcgctttaggtgataaaaataactgttttcctttggtgctccgtgatgtaggtagaagtggatcatgtcgtatacaacataacctgatacaccgcctgccaatgttaaaaactgttttgactcgggaataacaacgcttagtatgctataaaaaatataaactataacagctgctgggactggcgggaaaactaatcgcctcgaatcaaatggaactttatgatgtaatccgtgaatggtaaaatgaaaataaatcatggctttcgaatgtccagacggttctatatgaaatacccatctgtgtaaactgtattcaattagggtccatagtataacaccattgacaaaagctaatactactggcacaaatggactagcatcttttgtaatttgtatgtaatggcgtgttccttctatcacaaaataaatacaaacaggtatccacaccataggtaccagataccaaggagttatcgtcatacactccaaaatgggatttccgaataatctaaggtttctgtcgactggtgatgtcacccattcgtaatatttggtacccaacttaccgacctggcccaacatgggcttgtcccaatttaccaaagactctaagtcttcctctgctctccgttttccttttgtatattcttctaataggtaataggcagctttggagtgttcatataagctcatcggcttcgtaacatctttttctttgtacggttgcacataatttaatcctcccggatggttatttaaaaattcatatatattgtaggattgtgcgttatactttacgtcaaatttgtcatcttctttcattttttctcactgtgccttagtataagaaagcacttttaatatttgtttaggattagattaggtacgtgtagaccataacaaatttaaatccctggagtcggcagagaataacaggtagcgggtatcagaaactacactttagattcacatgaaatatttatcaatttttttcttatataacaccaccaaacgcaacactacaccttatatttacc

SEQ ID NO: 3373 - DNA, 1312 bp, Diabrotica virgifera
  SmartBlast Evalue=2E-82; Info=Fatty acid 2-hydroxylase n=1 Tax= Harpegnathos saltator RepID=E2C0E4_9HYME
aaagtaaaaataataaagtttgtttaattcttataaaccatttttcaaaaaataatagtatatcaaaggtttttctttgtattctaagaaaaatcacacagatgacgaacacttaaggcaatcaatactcaaaaatgtgcgctttaaaagatttcaccatttgatgccaatttttaaatttcttaattttatagctgttccaaagactttatcccagatcgtactactgatgccaaagccgttgtcatggtgggcgaaatgatgctgattgtgatatcgctttaggtgataaaaataactgttttcctttggtgctccgtgatgtaggtagaagtggatcatgtcgtatacaacataacctgatacaccgcctgccaatgttaaaaactgttttgactcgggaataacaacgcttagtatgctataaaaaatataaactataacagctgctgggactggcgggaaaactaatcgcctcgaatcaaatggaactttatgatgtaatccgtgaatggtaaaatgaaaataaatcatggctttcgaatgtccagacggttctatatgaaatacccatctgtgtaaactgtattcaattagggtccatagtataacaccattgacaaaagctaatactactggcacaaatggactagcatcttttgtaatttgtatgtaatggcgtgttccttctatcacaaaataaatacaaacaggtatccacaccataggtaccagataccaaggagttatcgtcatacactccaaaatgggatttccgaataatctaaggtttctgtcgactggtgatgtcacccattcgtaatatttggtacccaacttaccgacctggcccaacatgggcttgtcccaatttaccaaagactctaagtcttcctctgctctccgttttccttttgtatattcttctaataggtaataggcagctttggagtgttcatataagctcatcggcttcgtaacatctttttctttatacggttgcacataatttaatcctcccggatggttatttaaaaattcatatatattgtaggattgtgcgttatactttacgtcaaatttgtcatcttctttcattttttctcactgtgccttagtataagaaagcacttttaaaatttgtttaggattagagtaggtacgtgtagaccataacaaatttaaatccctgaagtcggcagaggataacaggtagcggggatcagagactacactttagattcacatgaaatatttatcaattttttcttatataacaccaccaaacgcaacactacaccttatatttacc

SEQ ID NO: 3374 - DNA, 1306 bp, Diabrotica virgifera
  SmartBlast Evalue=2E-82; Info=Fatty acid 2-hydroxylase n=1 Tax= Harpegnathos saltator RepID=E2C0E4_9HYME
aaagtaaaaataataaagtttgtttaattcttataaaccatttttcaaaaaataatagtatatcaaaggtttttctttgtattctaagaaaaatcacacagatgacgaacacttaaggcaatcaatactcaaaaatgtgcgctttaaaagatttcaccatttgatgccaatttttaaatttcttaattttatagctgttccaaagactttatcccagatcgtactactgatgccaaagccgttgtcatggtgggcgaaatgatgctgattgtgatatcgctttaggtgataaaaataactgttttcctttggtgctccgtgatgtaggtagaagtggatcatgtcgtatacaacataacctgatacaccgcctgccaatgttaaaaactgttttgactcgggaataacaacgcttagtatgctataaaaaatataaactataacagctgctgggactggcgggaaaactaatcgcctcgaatcaaatggaactttatgatgtaatccgtgaatggtaaaatgaaaataaatcatggctttcgaatgtccagacggttctatatgaaatacccatctgtgtaaactgtattcaattagggtccatagtataacaccattgacaaaagctaatactactggcacaaatggactagcatcttttgtaatttgtatgtaatggcgtgttccttctatcacaaaataaatacaaacaggtatccacaccataggtaccagataccaaggagttatcgtcatacactccaaaatgggatttccgaataatctaaggtttctgtcgactggtgatgtcacccattcgtaatatttggtacccaacttaccgacctggcccaacatgggcttgtcccaatttaccaaagactctaagtcttcctctgctctccgttttccttttgtatattcttctaataggtaataggcagctttggagtgttcatataagctcatcggcttcgtaacatctttttctttgtacggttgcacataatttaatcctcccggatggttatttaaaaattcatatatattgtaggattgtgcgttatactttacgtcaaatttgtcatcttctttcattttttctcactgtgccttagtataagaaagcacttttaatatttgtttaggattagattaggtacgtgtagaccataacaaatttaaatccctggagtcggcagagaataacaggtagcgggtatcagaaactacactttagattcacatgaaatatttatcaatttttttcttatataacaccaccaaacgcaacactacaccttat

SEQ ID NO: 3375 - DNA, 1305 bp, Diabrotica virgifera
  SmartBlast Evalue=2E-82; Info=Fatty acid 2-hydroxylase n=1 Tax= Harpegnathos saltator RepID=E2C0E4_9HYME
aaagtaaaaataataaagtttgtttaattcttataaaccatttttcaaaaaataatagtatatcaaaggtttttctttgtattctaagaaaaatcacacagatgacgaacacttaaggcaatcaatactcaaaaatgtgcgctttaaaagatttcaccatttgatgccaatttttaaatttcttaattttatagctgttccaaagactttatcccagatcgtactactgatgccaaagccgttgtcatggtgggcgaaatgatgctgattgtgatatcgctttaggtgataaaaataactgttttcctttggtgctccgtgatgtaggtagaagtggatcatgtcgtatacaacataacctgatacaccgcctgccaatgttaaaaactgttttgactcgggaataacaacgcttagtatgctataaaaaatataaactataacagctgctgggactggcgggaaaactaatcgcctcgaatcaaatggaactttatgatgtaatccgtgaatggtaaaatgaaaataaatcatggctttcgaatgtccagacggttctatatgaaatacccatctgtgtaaactgtattcaattagggtccatagtataacaccattgacaaaagctaatactactggcacaaatggactagcatcttttgtaatttgtatgtaatggcgtgttccttctatcacaaaataaatacaaacaggtatccacaccataggtaccagataccaaggagttatcgtcatacactccaaaatgggatttccgaataatctaaggtttctgtcgactggtgatgtcacccattcgtaatatttggtacccaacttaccgacctggcccaacatgggcttgtcccaatttaccaaagactctaagtcttcctctgctctccgttttccttttgtatattcttctaataggtaataggcagctttggagtgttcatataagctcatcggcttcgtaacatctttttctttatacggttgcacataatttaatcctcccggatggttatttaaaaattcatatatattgtaggattgtgcgttatactttacgtcaaatttgtcatcttctttcattttttctcactgtgccttagtataagaaagcacttttaaaatttgtttaggattagagtaggtacgtgtagaccataacaaatttaaatccctgaagtcggcagaggataacaggtagcggggatcagagactacactttagattcacatgaaatatttatcaattttttcttatataacaccaccaaacgcaacactacaccttat

SEQ ID NO: 3376 - DNA, 1626 bp, Diabrotica virgifera
ctcaagagaatgctcgctggaaagaagaggtaatcgccgaaactgaggcttattttgaggctaaagacaaaattgtattataaaaaatggtattgaaaagttgtatgaccgctataatcgttgtattgccctcgaaggtaactatattgaataataaaatcaaattttatcaaaaaacaatttctttctatgtcctacgaactttttagcccaacgattacaactgcaacacacataaatgaaccaaactgctgacagtaattggaccaaactggagagtagaaaatgtatatttcaagaaaccttttttgggtagaactgactcgcacgtatactaagttacttccaaagttgctcacgacagagcagaaaacattcgcttacaggtcgcactgaacaacttagaaatggtcgctaatgatgaaaatatgcttaacaagtttatcaatcggtaagtaggtgtggatggttatgatcctaaaacaagtttttatgttgattgtttctttttcttaacattgttcattgaatctactcgaatcgttctgacgttcacgttttaaaaacagtgcgggacgcaatgaaaataaaatggacacatgtttagacgaagactcagtactaaaattagataacaaaatcttggaaagggtggaacactttagatatctgtgtagctggattgactgcagggttgaaagtgatgaggaaatttcaaccagaatagaacttgcacgaaaaagctttattagctggcgttcttattgtgcagtagaagtctgtcattgatcgcacgtttaagagtattgaagttcttgagaagagtaaaaggcgtcacaaaattagaccaactgcgaaatgaagacataagaagtgagttaaaaataccatccacattggagtatataaagcaaagacaattatgttggtggggacatctacaacgaatgaaagaaactagaccagttcgaagagtatgggaagcaaaagtatcaaaaaacagaaagaggggatgacccagacaaacatgggataaaacaataggaaccattctgcaaaagaaaagatcaaactggatagatgccaaagcgatagcacaagacagaaaagagtggaaaaaatttgtatatatgttaccgtcaaaccagatttcaggccaaactagtttgtccagaacgcgttaggataaactagtttagcctaggccaactagtttatcctaatattaatacaaacactgcaggataaaccagtaagaccccccaataatatacctacaaaacgtaccttaaagcaatgcaataattatacctcaattataaaaattactatttcttcttccatggagtgtcttgatgacacttagaattgcggaccatcattgactttctgcacttgcatctgtttgtgttatgcaacagtttttgttctagccgcatttgacaaaaccctatccgatccaactgaatctctcgcagctgccacccttaacgatattttagagataattcatcaaactttttggggtattaatgtctctgtctctttcagatcaaaattcgtcatctgctatcaaactttctagaggtagtagatatacactaaggctctgaaatatcgttaagg

SEQ ID NO: 3377 - DNA, 1397 bp, Diabrotica virgifera
ctcaagagaatgctcgctggaaagaagaggtaatcgccgaaactgaggcttattttgaggctaaagacaaaattgtattataaaaaatggtattgaaaagttgtatgaccgctataatcgttgtattgccctcgaaggtaactatattgaataataaaatcaaattttatcaaaaaacaatttctttctatgtcctacgaactttttagcccaacgattacaactgcaacacacataaatgaaccaaactgctgacagtaattggaccaaactggagagtagaaaatgtatatttcaagaaaccttttttgggtagaactgactcgcacgtatactaagttacttccaaagttgctcacgacagagcagaaaacattcgcttacaggtcgcactgaacaacttagaaatggtcgctaatgatgaaaatatgcttaacaagtttatcaatcggtaagtaggtgtggatggttatgatcctaaaacaagtttttatgttgattgtttctttttcttaacattgttcattgaatctactcgaatcgttctgacgttcacgttttaaaaacagtgcgggacgcaatgaaaataaaatggacacatgtttagacgaagactcagtactaaaattagataacaaaatcttggaaagggtggaacactttagatatctgtgtagctggattgactgcagggttgaaagtgatgaggaaatttcaaccagaatagaacttgcacgaaaaagctttattagctggcgttcttattgtgcagtagaagtctgtcattgatcgcacgtttaagagtattgaagttcttgagaagagtaaaaggcgtcacaaaattagaccaactgcgaaatgaagacataagaagtgagttaaaaataccatccacattggagtatataaagcaaagacaattatgttggtggggacatctacaacgaatgaaagaaactagaccagttcgaagagtatgggaagcaaaagtatcaaaaaacagaaagaggggatgacccagacaaacatgggataaaacaataggaaccattctgcaaaagaaaagatcaaactggatagatgccaaagcgatagcacaagacagaaaagagtggaaaaaatttgtatatatgttaccgtcaaaccagatttcaggccaaactagtttgtccagaacgcgttaggataaactagtttagcctaggccaactagtttatcctaatattaatacaaacactgcaggataaaccagtaagaccccccaataatatacctacaaaaccaaaacaaatagataaactgaataaaacactctgtaattggaaaataatcattattttattaaaagatattcgtcggcaaatttatggacaattggcaatacaaacaatcatga

SEQ ID NO: 3378 - DNA, 1224 bp, Diabrotica virgifera
taaagcgttatatattcgtcgcgaaggtgttaaaatcggtggtgaaattattaataaccatcataatcagagacgtagatgacaccgccataatggcaaagagtcagaagaccttcaaaccctgtttaacgctgtaaacaatgaatgtactgtaagggctgaacaatcaaagaaacaaaatggatggttatcggaaaaattaatatcgaagactcagtactaaaattagataccaaaatcctgaaaaaggtggaacactttagatatctgggtagctgaattaactgcagggttgaaagtgctgaggaaatttcggccagaatagaacttgcacgaaaaagctttattagctggcgttcttattgtgcagtagaagtctgtcattgatcgcacgtttaagagtattgaagttcttgagaagagtaaaaggcgtcacaaaattagaccaactgcgaaatgaagacataagaagtgagttaaaaataccatccacattggagtatataaagcaaagacaattatgttggtggggacatctacaacgaatgaaagaaactagaccagttcgaagagtatgggaagcaaaagtatcaaaaaacagaaagaggggatgacccagacaaacatgggataaaacaataggaaccattctgcaaaagaaaagatcaaactggatagatgccaaagcgatagcacaagacagaaaagagtggaaaaaatttgtatatatgttaccgtcaaaccagatttcaggccaaactagtttgtccagaacgcgttaggataaactagtttagcctaggccaactagtttatcctaatattaatacaaacactgcaggataaaccagtaagaccccccaataatatacctacaaaacgtaccttaaagcaatgcaataattatacctcaattataaaaattactatttcttcttccatggagtgtcttgatgacacttagaattgcggaccatcattgactttctgcacttgcatctgtttgtgttatgcaacagtttttgttctagccgcatttgacaaaaccctatccgatccaactgaatctctcgcagctgccacccttaacgatattttagagataattcatcaaactttttggggtattaatgtctctgtctctttcagatcaaaattcgtcatctgctatcaaactttctagaggtagtagatatacactaaggctctgaaatatcgttaagg

SEQ ID NO: 3379 - DNA, 995 bp, Diabrotica virgifera
taaagcgttatatattcgtcgcgaaggtgttaaaatcggtggtgaaattattaataaccatcataatcagagacgtagatgacaccgccataatggcaaagagtcagaagaccttcaaaccctgtttaacgctgtaaacaatgaatgtactgtaagggctgaacaatcaaagaaacaaaatggatggttatcggaaaaattaatatcgaagactcagtactaaaattagataccaaaatcctgaaaaaggtggaacactttagatatctgggtagctgaattaactgcagggttgaaagtgctgaggaaatttcggccagaatagaacttgcacgaaaaagctttattagctggcgttcttattgtgcagtagaagtctgtcattgatcgcacgtttaagagtattgaagttcttgagaagagtaaaaggcgtcacaaaattagaccaactgcgaaatgaagacataagaagtgagttaaaaataccatccacattggagtatataaagcaaagacaattatgttggtggggacatctacaacgaatgaaagaaactagaccagttcgaagagtatgggaagcaaaagtatcaaaaaacagaaagaggggatgacccagacaaacatgggataaaacaataggaaccattctgcaaaagaaaagatcaaactggatagatgccaaagcgatagcacaagacagaaaagagtggaaaaaatttgtatatatgttaccgtcaaaccagatttcaggccaaactagtttgtccagaacgcgttaggataaactagtttagcctaggccaactagtttatcctaatattaatacaaacactgcaggataaaccagtaagaccccccaataatatacctacaaaaccaaaacaaatagataaactgaataaaacactctgtaattggaaaataatcattattttattaaaagatattcgtcggcaaatttatggacaattggcaatacaaacaatcatga

SEQ ID NO: 3380 - DNA, 1360 bp, Diabrotica virgifera
  SmartBlast Evalue=2E-74; Info=Serpin n=1 Tax=Sphenophorus levis RepID=B6ZAZ6_9CUCU
atttaatacagtttattagaattgcaaactgctatacagtatctgataagtataataatatttctataatataaattttacaactgtaaaagttttctcttattttaactgttaaaccttcctgcgaaaagtgttgctccagaattttgatcttttatgtagaataggaacggatgatctgctttaaaactctgtgtaggctcgggttcaacaaaggcagattccaaaaatattccaactgctgtagcagctgcggcttcgacaccatcttcgttgacatcaatgaaagccttttgtaaaacaaagtcaactttaagtggagccttggcaattccggtaaggtcagcactgtcttcgaacatttgtgtaattcccaacttcttcaagatcggtttaaagtcaatttttgtgttgattttgaatttgggtagggtgatggcaactctagcagattccaatggttgtggagccaagtattctttcaagttctgttcagcagctgctaatccattgatttcgtccggtaatacaaaggtcatagtaacatttgcgccttgaaatccgagctccaaaaatttagctttaagtttgtcattgtaagcgtatttggcgaatgcttcagtgtacatggtggggattttcttggattcagtaggtgagctgtggaacaatctatcagcagagttgtatttttcgaatggatgatcccattttccagtgtagtataaagcattaactaataccaatactgtgctagcatccaacatttggggatcaatgagattttggattttgtggttagtttggtcttcaacccagccattgatagtgccagcggcttctgcaggtttgttatagtctagattttgtacgcctgaattataatcattcacagcaacatcttggaatgctttttcaattggaaaacctttcgctggataaattttgtttgctgataacaattttaaatcgggtgtgttgacctttaggcgagatgttatttcagtgaatgccttatttacatctgttatgttattgggtaagcccaaacctatcaacagctgtttttgcgtttctcctttggccccatttgcaagcaaagataagacgatttctgcagacagtccactaagaataatgttttccttgcctactgttttcacgagttccttgtaagtgttcgctgtaaattcatcattgccttgaacaacgctgttcaagttgtcagcattacatccaaaaatggatgcaattattaaaacgactaatacactgcaacgcatctttccaatttgacggtcaaaggataactacagaacggtttgaaaatcgctggcgttaaaagttcattcgaccgacc

SEQ ID NO: 3381 - DNA, 1293 bp, Diabrotica virgifera
  SmartBlast Evalue=5E-75; Info=Serpin n=1 Tax=Sphenophorus levis RepID=B6ZAZ6_9CUCU
tgacaattttttgaaaatattttgttttatctatttattgatgaaatctccctgcaaagagtgcaactccagaattattctcattgatgtaaaacaagaacgggcggtcagcattgaactcatactgaggtggtggaggtggaagactgggcctaatatgattgacgaatactgctgtagcagctgcggcttcgacaccatcttcgttgacatcaatgaaagccttttgtaaaacaaagtcaactttaagtggagccttggcaattccggtaaggtcagcactgtcttcgaacatttgtgtaattcccaacttcttcaagatcggtttaaagtcaatttttgtgttgattttgaatttgggtagggtgatggcaactctagcagattccaatggttgtggagccaagtattctttcaagttctgttcagcagctgctaatccattgatttcgtccggtaatacaaaggtcatagtaacatttgcgccttgaaatccgagctccaaaaatttagctttaagtttgtcattgtaagcgtatttggcgaatgcttcagtgtacatggtggggattttcttggattcagtaggtgagctgtggaacaatctatcagcagagttgtatttttcgaatggatgatcccattttccagtgtagtataaagcattaactaataccaatactgtgctagcatccaacatttggggatcaatgagattttggattttgtggttagtttggtcttcaacccagccattgatagtgccagcggcttctgcaggtttgttatagtctagattttgtacgcctgaattataatcattcacagcaacatcttggaatgctttttcaattggaaaacctttcgctggataaattttgtttgctgataacaattttaaatcgggtgtgttgacctttaggcgagatgttatttcagtgaatgccttatttacatctgttatgttattgggtaagcccaaacctatcaacagctgtttttgcgtttctcctttggccccatttgcaagcaaagataagacgatttctgcagacagtccactaagaataatgttttccttgcctactgttttcacgagttccttgtaagtgttcgctgtaaattcatcattgccttgaacaacgctgttcaagttgtcagcattacatccaaaaatggatgcaattattaaaacgactaatacactgcaacgcatctttccaatttgacggtcaaaggataactacagaacggtttgaaaatcgctggcgttaaaagttcattcgaccgacc

SEQ ID NO: 3382 - DNA, 1274 bp, Diabrotica virgifera
  SmartBlast Evalue=1E-69; Info=Serpin n=1 Tax=Sphenophorus levis RepID=B6ZAZ6_9CUCU
aaaaaaaaaggctaactatttcatgaaacgtccagaaaatagtgtcacaccggtactttggtccttaagatgaaaatagaatggatgatcggcagtaaatgtgtatcttactgaaggtatttcatcgatagaatcaatataggaaacgccaactgctgtagcagctgcggcttcgacaccatcttcgttgacatcaatgaaagccttttgtaaaacaaagtcaactttaagtggagccttggcaattccggtaaggtcagcactgtcttcgaacatttgtgtaattcccaacttcttcaagatcggtttaaagtcaatttttgtgttgattttgaatttgggtagggtgatggcaactctagcagattccaatggttgtggagccaagtattctttcaagttctgttcagcagctgctaatccattgatttcgtccggtaatacaaaggtcatagtaacatttgcgccttgaaatccgagctccaaaaatttagctttaagtttgtcattgtaagcgtatttggcgaatgcttcagtgtacatggtggggattttcttggattcagtaggtgagctgtggaacaatctatcagcagagttgtatttttcgaatggatgatcccattttccagtgtagtataaagcattaactaataccaatactgtgctagcatccaacatttggggatcaatgagattttggattttgtggttagtttggtcttcaacccagccattgatagtgccagcggcttctgcaggtttgttatagtctagattttgtacgcctgaattataatcattcacagcaacatcttggaatgctttttcaattggaaaacctttcgctggataaattttgtttgctgataacaattttaaatcgggtgtgttgacctttaggcgagatgttatttcagtgaatgccttatttacatctgttatgttattgggtaagcccaaacctatcaacagctgtttttgcgtttctcctttggccccatttgcaagcaaagataagacgatttctgcagacagtccactaagaataatgttttccttgcctactgttttcacgagttccttgtaagtgttcgctgtaaattcatcattgccttgaacaacgctgttcaagttgtcagcattacatccaaaaatggatgcaattattaaaacgactaatacactgcaacgcatctttccaatttgacggtcaaaggataactacagaacggtttgaaaatcgctggcgttaaaagttcattcgaccgacc

SEQ ID NO: 3383 - DNA, 1267 bp, Diabrotica virgifera
  SmartBlast Evalue=9E-68; Info=Serpin n=1 Tax=Sphenophorus levis RepID=B6ZAZ6_9CUCU
tcagtctaatttattttgtcctactgattaaatcttccagcaaaaagcatactgccatgagtattctctctaacatagaacaagaatgggtggtctgcttggaagtagtggttaattctatgtagtgacgtaggaatgatagcaactgctgtagcagctgcggcttcgacaccatcttcgttgacatcaatgaaagccttttgtaaaacaaagtcaactttaagtggagccttggcaattccggtaaggtcagcactgtcttcgaacatttgtgtaattcccaacttcttcaagatcggtttaaagtcaatttttgtgttgattttgaatttgggtagggtgatggcaactctagcagattccaatggttgtggagccaagtattctttcaagttctgttcagcagctgctaatccattgatttcgtccggtaatacaaaggtcatagtaacatttgcgccttgaaatccgagctccaaaaatttagctttaagtttgtcattgtaagcgtatttggcgaatgcttcagtgtacatggtggggattttcttggattcagtaggtgagctgtggaacaatctatcagcagagttgtatttttcgaatggatgatcccattttccagtgtagtataaagcattaactaataccaatactgtgctagcatccaacatttggggatcaatgagattttggattttgtggttagtttggtcttcaacccagccattgatagtgccagcggcttctgcaggtttgttatagtctagattttgtacgcctgaattataatcattcacagcaacatcttggaatgctttttcaattggaaaacctttcgctggataaattttgtttgctgataacaattttaaatcgggtgtgttgacctttaggcgagatgttatttcagtgaatgccttatttacatctgttatgttattgggtaagcccaaacctatcaacagctgtttttgcgtttctcctttggccccatttgcaagcaaagataagacgatttctgcagacagtccactaagaataatgttttccttgcctactgttttcacgagttccttgtaagtgttcgctgtaaattcatcattgccttgaacaacgctgttcaagttgtcagcattacatccaaaaatggatgcaattattaaaacgactaatacactgcaacgcatctttccaatttgacggtcaaaggataactacagaacggtttgaaaatcgctggcgttaaaagttcattcgaccgacc

SEQ ID NO: 3384 - DNA, 1884 bp, Diabrotica virgifera
ttgtcaacctcaacgtgaattacctacatttaggtgtgagtagaatgtccaatacaaatatgttagtgctgtttttaggcaaattgaatctatacacttgcatgctaataaaaaattagcaaagcttgtttcattgaacgggtgattggaaaaaggatgacattccacagatgtgatcaatcaaatgtaaatagtcgttgaattatgtaagtattctttgggaaacatataatgtctggtttcatttttaccgcccaacataattttttcactaatctttcgtataatgttatagacactttaggttaccctgtatatcgttataattttgtttatttaatgtgacttcaaagaactgcacacagcgcaattcttacaatcacattgatttcgaggtatgttaagttgcttttaaacgagcaatgtttttactacaatatgtggctccaacaccgagaacaatggccccgccatttatgacaacattaaatgcagcaaatggcaaatgcagggcaacaatggataatggcagcggtttatgttgtcttaaaaggaatttcaagaaaaaaaaaaggaaaagaaaaacaacaaaaagattatggattcgaccttactcaaacatgcgtgaaactttagataacataagccttgataatcacttttaaaggcttttcaggagtgtcaaataaaaaatattgcatcgaaaggaaaccactttactgctttaccactgacactaccacttttaatttttttttgctcatttttagcttacgtactcaaatttgaatttttcttaagttccattacttgaaatctcaaatttttcgaggacaacagccgtttattatggatttcgatctttatatattacgacatccacattgcacaacccaggtcgtatgtttttcgttaataaaatccataatcctcccatcgaccaactactagtcattttaatcctccagaatttttcaaaacagcaatcaccaaaacaaaattacaagtattttcgctcgtcaagcgatatccggcaattattgtaaaacgatacgagcgatactaaaaatgtgtaaatattaaggtgcgtactgactagaccactttcttccgaacgaaccaaacgaaccgagcgcgcaaaaataagtaaatgctcaagttattccaagtgcttgttctatttgctgcattcccatgttctgctcatttatttcagtattcgtccgagtagagaatctggagtacgcccgtacacactgagcgtcaagaaacaaatgctcgcttttgatttttcaacggttaccgacactcctccgaaaatgatcagctcattcggttcggcagaattttgctcgcgaacacgcactaactagagcaatttgttacagggcgctctgttcgttcggagaaaaatgatcaattcagtatgcacctttacatattctggcggttattgtttgcaatattgccagctactatattgccgagctgcggctgggcctgggatcccctctaggtgagcctggcgagctaatcgataaagctatagacagcaagtgagacttcgacctgatcattgcttttgtcacaaagaccataaagcataaagaagaaaaagagaggcgactgcaggcgggatgagcgtttacttattttataacggtgtcctgtgtcgtagaaggcagccagctgagggaggacactttacatccaaacttcgctgtctgcctataaattttttttatctggttttacttattttttgattaattttattgttctttatttatttatttattttaattatttattaatttaatcaatattatttctacaattttttatcgcttcttttttaacaaattgtattcatttatttatttg

SEQ ID NO: 3385 - DNA, 1234 bp, Diabrotica virgifera
ttgtcaacctcaacgtgaattacctacatttaggtgtgagtagaatgtccaatacaaatatgttagtgctgtttttaggcaaattgaatctatacacttgcatgctaataaaaaattagcaaagcttgtttcattgaacgggtgattggaaaaaggatgacattccacagatgtgatcaatcaaatgtaaatagtcgttgaattatgtaagtattctttgggaaacatataatgtctggtttcatttttaccgcccaacataattttttcactaatctttcgtataatgttatagacactttaggttaccctgtatatcgttataattttgtttatttaatgtgacttcaaagaactgcacacagcgcaattcttacaatcacattgatttcgaggtatgttaagttgcttttaaacgagcaatgtttttactacaatatgtggctccaacaccgagaacaatggccccgccatttatgacaacattaaatgcagcaaatggcaaatgcagggcaacaatggataatggcagcggtttatgttgtcttaaaaggaatttcaagaaaaaaaaaaggaaaagaaaaacaacaaaaagattatggattcgaccttactcaaacatgcgtgaaactttagataacataagccttgataatcacttttaaaggcttttcaggagtgtcaaataaaaaatattgcatcgaaaggaaaccactttactgctttaccactgacactaccacttttaatttttttttgctcatttttagcttacgtactcaaatttgaatttttcttaagttccattacttgaaatctcaaatttttcgaggacaacagccgtttattatggatttcgatctttatatattacgacatccacattgcacaacccaggtcgtatgtttttcgttaataaaatccataatcctcccatcgaccaactactagtcattttaatcctccagaatttttcaaaacagcaatcaccaaaacaaaattacaagtattttcgctcgtcaagcgatatccggcaaaacgatacaagcgattgcaaaacgatacgagcgataccaaaaatgtgtgaatattaaggcgcgtactgactagagcactttctccgaacgaaccaaatgaaccgaatgagccgagcgcgcaaaaataagtaaatgctcaagttattcgaagtgtttgttctatttgctgcattcccatgttctgctcatttatttca

SEQ ID NO: 3386 - DNA, 1221 bp, Diabrotica virgifera
caggagtgtgaaataaaaataaacgatattgcatcgaaagcaaaccacttcactgctttaacactggcaataccacttttaatattttttttcctcattttttacttagtactcaagttttaatttttcgtaagttccattaggtacttgaaatctcaaatttttcgaggacaacagccgtttattatggatttcgatctttatatattacgacatccacattgcacaacccaggtcgtatgtttttcgttaataaaatccataatcctcccatcgaccaactactagtcattttaatcctccagaatttttcaaaacagcaatcaccaaaacaaaattacaagtattttcgctcgtcaagcgatatccggcaattattgtaaaacgatacgagcgatactaaaaatgtgtaaatattaaggtgcgtactgactagaccactttcttccgaacgaaccaaacgaaccgagcgcgcaaaaataagtaaatgctcaagttattccaagtgcttgttctatttgctgcattcccatgttctgctcatttatttcagtattcgtccgagtagagaatctggagtacgcccgtacacactgagcgtcaagaaacaaatgctcgcttttgatttttcaacggttaccgacactcctccgaaaatgatcagctcattcggttcggcagaattttgctcgcgaacacgcactaactagagcaatttgttacagggcgctctgttcgttcggagaaaaatgatcaattcagtatgcacctttacatattctggcggttattgtttgcaatattgccagctactatattgccgagctgcggctgggcctgggatcccctctaggtgagcctggcgagctaatcgataaagctatagacagcaagtgagacttcgacctgatcattgcttttgtcacaaagaccataaagcataaagaagaaaaagagaggcgactgcaggcgggatgagcgtttacttattttataacggtgtcctgtgtcgtagaaggcagccagctgagggaggacactttacatccaaacttcgctgtctgcctataaattttttttatctggttttacttattttttgattaattttattgttctttatttatttatttattttaattatttattaatttaatcaatattatttctacaattttttatcgcttcttttttaacaaattgtattcatttatttatttg

SEQ ID NO: 3387 - DNA, 571 bp, Diabrotica virgifera
caggagtgtgaaataaaaataaacgatattgcatcgaaagcaaaccacttcactgctttaacactggcaataccacttttaatattttttttcctcattttttacttagtactcaagttttaatttttcgtaagttccattaggtacttgaaatctcaaatttttcgaggacaacagccgtttattatggatttcgatctttatatattacgacatccacattgcacaacccaggtcgtatgtttttcgttaataaaatccataatcctcccatcgaccaactactagtcattttaatcctccagaatttttcaaaacagcaatcaccaaaacaaaattacaagtattttcgctcgtcaagcgatatccggcaaaacgatacaagcgattgcaaaacgatacgagcgataccaaaaatgtgtgaatattaaggcgcgtactgactagagcactttctccgaacgaaccaaatgaaccgaatgagccgagcgcgcaaaaataagtaaatgctcaagttattcgaagtgtttgttctatttgctgcattcccatgttctgctcatttatttca

SEQ ID NO: 3388 - DNA, 1412 bp, Diabrotica virgifera
atttatttatttatttatttatttatttatttatttatttatttatttatttatttatttatttatttatttattttatttatttatttatttatttatttatttatttattttttattcatttatttatttatttgtgaaaactttgaaaactgtttgtaaaattagatacttcaacctttattataaaataactattacgctgtatctgtatcgaccagaaaagagtaacttaaagacattcgtttatatagaacattatacattaaatttgtatgaattttaattgaagttctagaagcgtaagattttaaaaaattgttcaatgttgagaatttatagcaattcctttgttgtatgcataactctacctctcaaaaagtacttgaattacagtcaaacccgcttattagaatacctcttaaaggaatatcccggtttaaggaataaaaatttgaggttccgaaacttttctaatagcgaccaatgataggttattagaatatcgctgttataggaatacttttgtttggcacgaaggctattccaataagcgggttcgactgtataaaaattataaataccaaatcttacaaagggtgtgtagtaaaatatcacaactaaacacagccaaaacgtgttataaagcaggtgctgcaaaatttgttttgtaaggctatttgtagtgggggtagtgctacgtgaccttacatacaagacatgacatcctggtttggagacaagaatcggttggaaatcctaggtttgaaattttcattttggccgctttatttgaggctatcagagcaacagtggcgtaaggcaaaaaacgaagttttgagataaatgcaatttttgaattcgtatatccattatgtttatgggatagccaaatatctgtacagttaggttgtgcaggcccctgttaatccgaagatttaatgttgctgcttttattgatattatttatctaatctaaaaatgatcaatttgtggtttaggccactgttgctttgagggccaccagtctatgtaatacctataaaatatatcattaatgcatattttacgttttaatccctctggactccagacttcactaataaccctgcatggttgatttggattttatgtttctaatcaaagaaaaaatcgatcacaattattttgtaaaagctcttttatattttaggaagtatgtattcagtttttcccgaattactagaattatagcacctagtttacactaagtatatcttccaatgatatacttggtactctattatgtttgtataatttaaagtcataagctgtatttttataataccgaggtctaagccacattatactttcactgatatgcttatcaaagacgtgttcaaacttaaacgataatatactgtaaaaataga

SEQ ID NO: 3389 - DNA, 1293 bp, Diabrotica virgifera
atttatttatttatttatttatttatttatttatttatttatttatttatttatttatttatttatttatttattttatttatttatttatttatttatttatttatttattttttattcatttatttatttatttgtgaaaactttgaaaactgtttgtaaaattagatacttcaacctttattataaaataactattacgctgtatctgtatcgaccagaaaagagtaacttaaagacattcgtttatatagaacattatacattaaatttgtatgaattttaattgaagttctagaagcgtaagattttaaaaaattgttcaatgttgagaatttatagcaattcctttgttgtatgcataactctacctctcaaaaagtacttgaattacagtcaaacccgcttattagaatacctcttaaaggaatatcccggtttaaggaataaaaatttgaggttccgaaacttttctaatagcgaccaatgataggttattagaatatcgctgttataggaatacttttgtttggcacgaaggctattccaataagcgggttcgactgtataaaaattataaataccaaatcttacaaagggtgtgtagtaaaatatcacaactaaacacagccaaaacgtgttataaagcaggtgctgcaaaatttgttttgtaaggctatttgtagtgggggtagtgctacgtgaccttacatacaagacatgacatcctggtttggagacaagaatcggttggaaatcctaggtttgaaattttcattttggccgctttatttgaggctatcagagcaacagtggcgtaaggcaaaaaacgaagttttgagataaatgcaatttttgaattcgtatatccattatgtttatgggatagccaaatatctgtacagttaggttgtgcaggcccctgttaatccgaagatttaatgttgctgcttttattgatattatttatctaatctaaaaatgatcaatttgtggtttaggccactgttgctttgagggccaccagtctatgtaatccctataaaatataccattagtacacattttaggttttaatccatctggactccagacttcactaataaccctgcgtggttgattagtgaagttgcgacttttatgtttctaaataaagaaaaaatcgatcacaattattttgtaaaagctcttttatgttttaggatgtatgtattaagttttttccgaattactagaattatagcacctagtttacaccatatctcacaatgatattcttggtactctattatg

SEQ ID NO: 3390 - DNA, 1104 bp, Diabrotica virgifera
atgaaaatatgtgaaaactttgaaaactgtaaaactagatacttcaacctttattatgaaataactcttacgctgtatcgaccagaaaagagtaacttaaagacattcgtttatatagaatattttacattaaatttgtatgaattttaattgaagttctagaagcgtaagattttcaaaaattgttcaatgttgagaatttatagcaattcctttattgtatgcataactctacctctcaaaaattacttgaattacatataaaaattagaaataccaaatcttacaaagaagtgtagtaaaatatcacaactaaacacagccaaaacgtgttataaagcaggtgctgcaaaatttgttttgtaaggctatttgtagtgggggtagtgctacgtgaccttacatacaagacatgacatcctggtttggagacaagaatcggttggaaatcctaggtttgaaattttcattttggccgctttatttgaggctatcagagcaacagtggcgtaaggcaaaaaacgaagttttgagataaatgcaatttttgaattcgtatatccattatgtttatgggatagccaaatatctgtacagttaggttgtgcaggcccctgttaatccgaagatttaatgttgctgcttttattgatattatttatctaatctaaaaatgatcaatttgtggtttaggccactgttgctttgagggccaccagtctatgtaatacctataaaatatatcattaatgcatattttacgttttaatccctctggactccagacttcactaataaccctgcatggttgatttggattttatgtttctaatcaaagaaaaaatcgatcacaattattttgtaaaagctcttttatattttaggaagtatgtattcagtttttcccgaattactagaattatagcacctagtttacactaagtatatcttccaatgatatacttggtactctattatgtttgtataatttaaagtcataagctgtatttttataataccgaggtctaagccacattatactttcactgatatgcttatcaaagacgtgttcaaacttaaacgataatatactgtaaaaataga

SEQ ID NO: 3391 - DNA, 985 bp, Diabrotica virgifera
atgaaaatatgtgaaaactttgaaaactgtaaaactagatacttcaacctttattatgaaataactcttacgctgtatcgaccagaaaagagtaacttaaagacattcgtttatatagaatattttacattaaatttgtatgaattttaattgaagttctagaagcgtaagattttcaaaaattgttcaatgttgagaatttatagcaattcctttattgtatgcataactctacctctcaaaaattacttgaattacatataaaaattagaaataccaaatcttacaaagaagtgtagtaaaatatcacaactaaacacagccaaaacgtgttataaagcaggtgctgcaaaatttgttttgtaaggctatttgtagtgggggtagtgctacgtgaccttacatacaagacatgacatcctggtttggagacaagaatcggttggaaatcctaggtttgaaattttcattttggccgctttatttgaggctatcagagcaacagtggcgtaaggcaaaaaacgaagttttgagataaatgcaatttttgaattcgtatatccattatgtttatgggatagccaaatatctgtacagttaggttgtgcaggcccctgttaatccgaagatttaatgttgctgcttttattgatattatttatctaatctaaaaatgatcaatttgtggtttaggccactgttgctttgagggccaccagtctatgtaatccctataaaatataccattagtacacattttaggttttaatccatctggactccagacttcactaataaccctgcgtggttgattagtgaagttgcgacttttatgtttctaaataaagaaaaaatcgatcacaattattttgtaaaagctcttttatgttttaggatgtatgtattaagttttttccgaattactagaattatagcacctagtttacaccatatctcacaatgatattcttggtactctattatg

SEQ ID NO: 3392 - DNA, 1257 bp, Diabrotica virgifera
ccaatatatctataaaatttgtcatgtaactatcttttgtctggttcaataccatttcattaaggtatataaaatgtatgtagatggctattactatcttaatctcatgttatttcagataagtcatattttatattcctatttcaaatgcaatgccattatttgttcatgttttcaaactcaaaatagttcaaggttacctgagattagtttttgttccatttttaatggttgtttttttatgttattgcttctaaaaagttttcctcgattatttcttcttctctttacttttgtttaccggtttatatgagaaatcaaacgaagtatatgtttttagccatttggaagaaaactaaccctcatgtgatgtcgtacccaccttgactacctagggaagccaccttgaccttattgcagctaccgccaagtcaaactgggagtatgttttgggaacaagctttttgggggacattccagctccttttcgtcctgccacctgggcctacgggggggcatggaggtgcatcatatgtggtgctcattttctaggatgcaaccgcaacctcgtttgggaacatttagtgaggtgttttagtaactattggttttttttatatttcagactatctgttaaatacactatgttttttttccagatttaggttacctctggtttttttttgacatatttgtatattagattatttggttcccaaactttgtatctacggtaacttcttgtgcacaggaataagcctagagaaaattaggtttttaatactttattattgctttgatattggtttatgtaattcgggtaaatttattttgtaatattactagcttgtttcccaaatattttactgttattcgctttattccatttgttcggttaatttaggtcatcgtcggtatttatctcaacttcatttctactttagtcaattgtatatttaactttatttattcattattgtattttcccttagtgaggcttgggcctatttatttgtagtattttcatctttgtcagtttcctttagttgtacgtagcaggcgtactataaccatttggtagaagacttatgtaattttgtaccctatatgttagtaagaggtacttatacctgtaattttgtaacagataacattattgttgttatcttagatataactttttgtataacttatgtcattttagagtcacatgatatgcactttgtgtaactcagagattgtcaaagatctagcagt

SEQ ID NO: 3393 - DNA, 1284 bp, Diabrotica virgifera
ccaatatatctataaaatttgtcatgtaactatcttttgtctggttcaataccatttcattaaggtatataaaatgtatgtagatggctattactatcttaatctcatgttatttcagataagtcatattttatattcctatttcaaatgcaatgccattatttgttcatgttttcaaactcaaaatagttcaaggttacctgagattagtttttgttccatttttaatggttgtttttttatgttattgcttctaaaaagttttcctcgattatttcttcttctctttacttttgtttaccggtttatatgagaaatcaaacgaagtatatgtttttagccatttggaagaaaactaaccctcatgtgatgtcgtacccaccttgactacctagggaagccaccttgaccttattgcagctaccgccaagtcaaactgggagtatgttttgggaacaagctttttgggggacattccagctccttttcgtcctgccacctgggcctacgggggggcatggaggtgcatcatatgtggtgctcattttctaggatgcaaccgcaacctcgtttgggaacatttagtgaggtgttttagtaactattggttttttttatatttcagactatctgttaaatacactatgttttttttccagatttaggttacctctggtttttttttgacatatttgtatattagattatttggttcccaaactttgtatctacggtaacttcttgtgcacaggaataagcctagagaaaattaggtttttaatactttattattgctttgatattggtttatgtaattcgggtaaatttattttgtaacattacttgcttgtttcccaaatattgtatttattcgctttatttcgtttgttcggttacttcgtcgttactttatttcattgcatttgctcggttaatttaggtcattttgtcggtatttttcttaacttcacttctataacgtttattcatttgtatatttaattttgctttattcagtattgtattttctcttagtgaggcttgggcctatttatttgtattattttcatcttcgtcggtttcctttagttgtacgtagcaggcgtactataaccatttggtagaagacttatgtaattttgtaccctatatgttagtaagaggtacttatatttaagtttgtaacagataacattattgttgttatctttaaaatatatatatcttcttgtataacttatgtcattttagagtcacagcataatatgaacttgcttaactcag

SEQ ID NO: 3394 - DNA, 1087 bp, Diabrotica virgifera
tgttggtggttagtaccgtaaatggcggttaatttcttcgaaattaatttttatttccaactaagtttggaagtatagtaaaaagttaccaccacttgtttcctggagtacgggtttcctggagtaaggatgggagtaccatcagtggaagaggaataaaaaattaaccgccatttggaagaaaactaaccctcatgtgatgtcgtacccaccttgactacctagggaagccaccttgaccttattgcagctaccgccaagtcaaactgggagtatgttttgggaacaagctttttgggggacattccagctccttttcgtcctgccacctgggcctacgggggggcatggaggtgcatcatatgtggtgctcattttctaggatgcaaccgcaacctcgtttgggaacatttagtgaggtgttttagtaactattggttttttttatatttcagactatctgttaaatacactatgttttttttccagatttaggttacctctggtttttttttgacatatttgtatattagattatttggttcccaaactttgtatctacggtaacttcttgtgcacaggaataagcctagagaaaattaggtttttaatactttattattgctttgatattggtttatgtaattcgggtaaatttattttgtaatattactagcttgtttcccaaatattttactgttattcgctttattccatttgttcggttaatttaggtcatcgtcggtatttatctcaacttcatttctactttagtcaattgtatatttaactttatttattcattattgtattttcccttagtgaggcttgggcctatttatttgtagtattttcatctttgtcagtttcctttagttgtacgtagcaggcgtactataaccatttggtagaagacttatgtaattttgtaccctatatgttagtaagaggtacttatacctgtaattttgtaacagataacattattgttgttatcttagatataactttttgtataacttatgtcattttagagtcacatgatatgcactttgtgtaactcagagattgtcaaagatctagcagt

SEQ ID NO: 3395 - DNA, 1114 bp, Diabrotica virgifera
tgttggtggttagtaccgtaaatggcggttaatttcttcgaaattaatttttatttccaactaagtttggaagtatagtaaaaagttaccaccacttgtttcctggagtacgggtttcctggagtaaggatgggagtaccatcagtggaagaggaataaaaaattaaccgccatttggaagaaaactaaccctcatgtgatgtcgtacccaccttgactacctagggaagccaccttgaccttattgcagctaccgccaagtcaaactgggagtatgttttgggaacaagctttttgggggacattccagctccttttcgtcctgccacctgggcctacgggggggcatggaggtgcatcatatgtggtgctcattttctaggatgcaaccgcaacctcgtttgggaacatttagtgaggtgttttagtaactattggttttttttatatttcagactatctgttaaatacactatgttttttttccagatttaggttacctctggtttttttttgacatatttgtatattagattatttggttcccaaactttgtatctacggtaacttcttgtgcacaggaataagcctagagaaaattaggtttttaatactttattattgctttgatattggtttatgtaattcgggtaaatttattttgtaacattacttgcttgtttcccaaatattgtatttattcgctttatttcgtttgttcggttacttcgtcgttactttatttcattgcatttgctcggttaatttaggtcattttgtcggtatttttcttaacttcacttctataacgtttattcatttgtatatttaattttgctttattcagtattgtattttctcttagtgaggcttgggcctatttatttgtattattttcatcttcgtcggtttcctttagttgtacgtagcaggcgtactataaccatttggtagaagacttatgtaattttgtaccctatatgttagtaagaggtacttatatttaagtttgtaacagataacattattgttgttatctttaaaatatatatatcttcttgtataacttatgtcattttagagtcacagcataatatgaacttgcttaactcag

SEQ ID NO: 3396 - DNA, 1578 bp, Diabrotica virgifera
agcatatacataagatcgtcccccggcgacgtcagagtgtgtgtaccacgtgacctataatcatagttaacgctcccagcggaatactgtttattttggcatattaccttatttgagttaaatatatgacagctggcttgtcaatatagactgagattgtctcaccaagctaattacagcaaaattatactaatcttaaggttaatttacacaatgtaaccagagaaagcatcttcttcattggttacgtttctctttagtagaaacatggttttactgtgattttgttaaactatttataccaattaagtatttttactgtttgtttttttgcattttagggtactatgttttttattaaatatttttaggtactttacaactctctccagagaatatcatgtatttctttcttatttattattattattgtaagtaaatcgaacactttggagagaggtgtaatacaaatttagtgataacttaaatccctttttgtaaaacagaactaatgtgaatagaatcatacaaataattgtgtagaccaagttaataatttttgtacgtctttcaacttttaaatggtacttaaactaatacttctacggtatgtcctaccgttaggtttttaaaataaacaaggtaatagtaaaaacttaatccacgcgtagagaaatcatttgccgattattggaattattggttcccgacatttcttctgtaatgcagaagatattgtcaaatgcgagaagggtagtttgtctttaactcgaacagtatatacaaacttttaataagggcagtgtatgtctttaactcgaacgaaaccccagcaagaaataatcccatgccatggccttataagagtcattagtcctcgtcaaaattggaaaaagtcatcgcacaaaaagatttgcgagtaaattcaatcttcggccatgataaatgagactagcattcgtgtgacaaattgttttgatcatctttctctttttatggctttgttttttgatcaatgtataacatgaaaagtctaatcttacgtcaagcttcacctttgtattcctgtgttgccaaattattatctctccactactattccttctagtaacagattgtgactgtccgatggcctatttgctttgttcgcagacatccatgccatgactggtttctgactgcggaactgcgcatgcgaatcagtcagaaaccagtcatgaactgtctctgcgaacaaagctatctgacatattttaatatttgacatgcttgtgtggtttttattccatattatattgtaatgccagttgtccgagattctaagaatatctacagcatcgaaggccttagacaacttcacaaagtaaatctatgcagacgcgttttgctgtagtgcttgtctttgatttgtttcataattaaactcacatctgtcacatatttgacccttgtaacaggttgatgcatgtgtgttagataattgtgcttccattttaaaactaaccgatgaaacgttcgatccgcccttttgtatattcagaataaccaatgtgatattagtatttaatctatcaatcc

SEQ ID NO: 3397 - DNA, 1265 bp, Diabrotica virgifera
agcatatacataagatcgtcccccggcgacgtcagagtgtgtgtaccacgtgacctataatcatagttaacgctcccagcggaatactgtttattttggcatattaccttatttgagttaaatatatgacagctggcttgtcaatatagactgagattgtctcaccaagctaattacagcaaaattatactaatcttaaggttaatttacacaatgtaaccagagaaagcatcttcttcattggttacgtttctctttagtagaaacatggttttactgtgattttgttaaactatttataccaattaagtatttttactgtttgtttttttgcattttagggtactatgttttttattaaatatttttaggtactttacaactctctccagagaatatcatgtatttctttcttatttattattattattgtaagtaaatcgaacactttggagagaggtgtaatacaaatttagtgataacttaaatccctttttgtaaaacagaactaatgtgaatagaatcatacaaataattgtgtagaccaagttaataatttttgtacgtctttcaacttttaaatggtacttaaactaatacttctacggtatgtcctaccgttaggtttttaaaataaacaaggtaatagtaaaaacttaatccacgcgtagagaaatcatttgccgattattggaattattggttcccgacatttcttctgtaatgcagaagatattgtcaaatgcgagaagggtagtttgtctttaactcgaacagtatatacaaacttttaataagggcagtgtatgtctttaactcgaacgaaaccccagcaagaaataatcccatgccatggccttataagagtcattagtcctcgtcaaaattggaaaaagtcatcgcacaaaaagatttgcgagtaaattcaatcttcggccatgataaatgagactagcattcgtgtgacaaattgttttgatcatctttctctttttatggctttgttttttgatcaatgtataacatgaaaagtctaatcttacgtcaagcttcacctttgtattcctgtgttgccaaattattatctctccactactattccttctagtaacagattgtgactgtccgatggcctatttgctttgttcgcagacatccatgactagtttctgactgattcgcatgcgcagttccgttttcaaacgtttgaaaatataactgcgcttgcgaatcagtcagtcatgaactgtctccgcgaacaaagc

SEQ ID NO: 3398 - DNA, 1048 bp, Diabrotica virgifera
tttaatgcccggttgcaccaacagatctttaaagctttaaaatcgagaaatatcataagaattaatataatataattataatatattacaataagagtaccataatataatagatataattgataataagataagaatctaaaattatggtgcaacgtaagtgatactcaaggaggccctatttataagtagagcttagctaagctggagcttaagatctgttggtgcaaccaggcataaaataaataaggtaataggtaatagtaaaaacttaatccgcgcatagagaagtcgtttgccgattattggaattatttgttcctgacatttcttctgtaatgcagaagatattgtcaaatgcgagaagggtagtttatgtctttaatttgaacagtataattatacaaactgataaatgagactagcattcgtgtgacaaattgttttgatcatctttctctttttatggctttgttttttgatcaatgtataacatgaaaagtctaatcttacgtcaagcttcacctttgtattcctgtgttgccaaattattatctctccactactattccttctagtaacagattgtgactgtccgatggcctatttgctttgttcgcagacatccatgccatgactggtttctgactgcggaactgcgcatgcgaatcagtcagaaaccagtcatgaactgtctctgcgaacaaagctatctgacatattttaatatttgacatgcttgtgtggtttttattccatattatattgtaatgccagttgtccgagattctaagaatatctacagcatcgaaggccttagacaacttcacaaagtaaatctatgcagacgcgttttgctgtagtgcttgtctttgatttgtttcataattaaactcacatctgtcacatatttgacccttgtaacaggttgatgcatgtgtgttagataattgtgcttccattttaaaactaaccgatgaaacgttcgatccgcccttttgtatattcagaataaccaatgtgatattagtatttaatctatcaatcc

SEQ ID NO: 3399 - DNA, 735 bp, Diabrotica virgifera
tttaatgcccggttgcaccaacagatctttaaagctttaaaatcgagaaatatcataagaattaatataatataattataatatattacaataagagtaccataatataatagatataattgataataagataagaatctaaaattatggtgcaacgtaagtgatactcaaggaggccctatttataagtagagcttagctaagctggagcttaagatctgttggtgcaaccaggcataaaataaataaggtaataggtaatagtaaaaacttaatccgcgcatagagaagtcgtttgccgattattggaattatttgttcctgacatttcttctgtaatgcagaagatattgtcaaatgcgagaagggtagtttatgtctttaatttgaacagtataattatacaaactgataaatgagactagcattcgtgtgacaaattgttttgatcatctttctctttttatggctttgttttttgatcaatgtataacatgaaaagtctaatcttacgtcaagcttcacctttgtattcctgtgttgccaaattattatctctccactactattccttctagtaacagattgtgactgtccgatggcctatttgctttgttcgcagacatccatgactagtttctgactgattcgcatgcgcagttccgttttcaaacgtttgaaaatataactgcgcttgcgaatcagtcagtcatgaactgtctccgcgaacaaagc

SEQ ID NO: 3400 - DNA, 1375 bp, Diabrotica virgifera
ttaaatatttcaaaccatacccccccttaagtaaaacaattgccataaaagatgttacaaatgttctatctagtttgctagatgaggtactagaatcgcagatctccaatttattccagacaaaaaagttctaaaataaattcaaacaatttttaatgaaacaaaacatttactattaaaacgaaatgatccaaactagaattaatggcgcaaaaaataatgaacccttatttattttaaacaggttgtggcaatgttccaaggcgaattgcagccaactacagatagggttaccataatttattaaggccaaatccggacagtggtagtccaaggggttgtagaaaatttaaaatgtgaatttgactgtgttgctatttctacattgtacatattatatgcgaaatgcatatggcacaattaaaagtacagctgtttcgctacaatatgtaactaacatcgaaaatctctgccagtttaaaatacatatacacctatgttttaacatactttagacctagaaaataatattattagtcattacactaactcaactaactgtcaaccgattattgtctgctcgtgctcgtgcgctgttgacaagcagtgcgaccaacttaactaggtgctgcgcagaatgaaatttcccatttttttccattttccaagttttttccatttttttttcgcaaaggaaaaaatccgcacatttgtcatatccggacatgtctttcaaatccggactgtccggacgtatgttaaccctatcgataggccaagagccggtgtaacagtattttgtatttgagttttgtgtaacaactaaaattttcgatgcctgtgttgtaatctcttgggtgaaaataataacagatggtcgaatattgaatggggttcaggtttttccctcccgattcctgagctttttgttttaagttcgatattgcggttttttaactaatgatttagtgtcgcttgtgacgtcaatgggctggccttgttgacgcaagctcttgcttaatgtttttacatccttttcatatatgttattatatatgtactattttacgcactagtttttaatagcattaagcaaatatgttgttttttcagtgtacacaagaaaaacaccagatttttaaaatagttcatacactacggggaagtgtgatataatatatttactaattcagagtaaatgattgaataggtttaacattgtagttactggtaaagaaaagaactagaccattttttaatttttttcatttttcaattaatcaaaaagtacatacttttatagatgaaattagacttccataatgttgtaccttatcttgtatatttttttcctaaaataaatgattgtgacgat

SEQ ID NO: 3401 - DNA, 1184 bp, Diabrotica virgifera
attttctgaaccggtccatgatccccgtagaaatttctcgattctgcttcgaggccgccattgaattatctatagttcgcagatgttcgatagatagggttaccataacttattaaggccaaatccggacaggagtagttccaaagggttgtaaaaatatcaaatgtgaatttgactgtgttgctatttctacattgtacatattatatgcgaaatgcatatggcacaattaaaagtacagctgtttcgctacaatatgtaactaacatcgaaaatctctgccagtttaaaatacatatacacctatgttttaacatactttagacctagaaaataatattattagtcattacactaactcaactaactgtcaaccgattattgtctgctcgtgctcgtgcgctgttgacaagcagtgcgaccaacttaactaggtgctgcgcagaatgaaatttcccatttttttccattttccaagttttttccatttttttttcgcaaaggaaaaaatccgcacatttgtcatatccggacatgtctttcaaatccggactgtccggacgtatgttaaccctatcgataggccaagagccggtgtaacagtattttgtatttgagttttgtgtaacaactaaaattttcgatgcctgtgttgtaatctcttgggtgaaaataataacagatggtcgaatattgaatggggttcaggtttttccctcccgattcctgagctttttgttttaagttcgatattgcggttttttaactaatgatttagtgtcgcttgtgacgtcaatgggctggccttgttgacgcaagctcttgcttaatgtttttacatccttttcatatatgttattatatatgtactattttacgcactagtttttaatagcattaagcaaatatgttgttttttcagtgtacacaagaaaaacaccagatttttaaaatagttcatacactacggggaagtgtgatataatatatttactaattcagagtaaatgattgaataggtttaacattgtagttactggtaaagaaaagaactagaccattttttaatttttttcatttttcaattaatcaaaaagtacatacttttatagatgaaattagacttccataatgttgtaccttatcttgtatatttttttcctaaaataaatgattgtgacgat

SEQ ID NO: 3402 - DNA, 974 bp, Diabrotica virgifera
  SmartBlast Evalue=7E-12; Info=Endonuclease-reverse transcriptase n=1 Tax=Bombyx mori RepID=D5LB38_BOMMO
ttaaatatttcaaaccatacccccccttaagtaaaacaattgccataaaagatgttacaaatgttctatctagtttgctagatgaggtactagaatcgcagatctccaatttattccagacaaaaaagttctaaaataaattcaaacaatttttaatgaaacaaaacatttactattaaaacgaaatgatccaaactagaattaatggcgcaaaaaataatgaacccttatttattttaaacaggttgtggcaatgttccaaggcgaattgcagccaactacagatagggttaccataatttattaaggccaaatccggacagtggtagtccaaggggttgtagaaaatttaaaatgtgaatttgactgtgttgctatttctacattgtacatattatatgcgaaatgcatatggcacaattaaaagtacagctgtttcgctacaatatgtaactaacatcgaaaatctctgccagtttaaaatacatatacacctatgttttaacatgacaagcagtgcgatcaatttaactaggtgctgcgcagaatgaaatttcccaccgtgcgttgggccaagtgttgtccatttttttagtaaagaaaaaatccggacatttctcatatccggacaccaatccggacatgtctttcaaatccggactgtctggacgaaatccggacgtatggtatccctaactatagatcaatatttgatattaaggatacttgggatcatagctacgaactaaaaactcgtattgaaaaagcctcttttaacagtcttacgaagattctctgcagcttatcttaagtatcaatattcacataagaattcttagatgttacatctttagtgtcctcctcgatggagtagaaagctagagtattacagaagatgtaataaaacgattagaggcatttgaaatgtggtgctaccgaagtatgttgaaggtctcatatatacaccacacaag

SEQ ID NO: 3403 - DNA, 783 bp, Diabrotica virgifera
  SmartBlast Evalue=5E-12; Info=Endonuclease-reverse transcriptase n=1 Tax=Bombyx mori RepID=D5LB38_BOMMO
attttctgaaccggtccatgatccccgtagaaatttctcgattctgcttcgaggccgccattgaattatctatagttcgcagatgttcgatagatagggttaccataacttattaaggccaaatccggacaggagtagttccaaagggttgtaaaaatatcaaatgtgaatttgactgtgttgctatttctacattgtacatattatatgcgaaatgcatatggcacaattaaaagtacagctgtttcgctacaatatgtaactaacatcgaaaatctctgccagtttaaaatacatatacacctatgttttaacatgacaagcagtgcgatcaatttaactaggtgctgcgcagaatgaaatttcccaccgtgcgttgggccaagtgttgtccatttttttagtaaagaaaaaatccggacatttctcatatccggacaccaatccggacatgtctttcaaatccggactgtctggacgaaatccggacgtatggtatccctaactatagatcaatatttgatattaaggatacttgggatcatagctacgaactaaaaactcgtattgaaaaagcctcttttaacagtcttacgaagattctctgcagcttatcttaagtatcaatattcacataagaattcttagatgttacatctttagtgtcctcctcgatggagtagaaagctagagtattacagaagatgtaataaaacgattagaggcatttgaaatgtggtgctaccgaagtatgttgaaggtctcatatatacaccacacaag

SEQ ID NO: 3404 - DNA, 1736 bp, Diabrotica virgifera
taataaaatagctgggatagatcacgtttactgacaaattagtgatgttagttgttacgttttgcatagtattctaaaaatgttttttgcttttatcttcaaaatacagcattcggacaaaatactgccttgtcaagtgtttcactggcatctaacattctttaatacgtactcaatttacgtttaaaaccactgtcatactgtcaatttcatttataaggttgctgtgttccaattttttaaaattatttaattaattaataaacttttgtatacgtggttgcctgaccaggcacttaatgtacgtatgacgtgtgtattacgttgttctagtgtattatgtctcgggatcttatagggatcaatgggcaagggcgcccatataaaaatttttagggggggccaaacgtgaagatgttgcacattacattttgtatatttcggatgacaatatatacagtagactctctctataacgaacacggatataacgaggtttcgcttataacgaggtacattaggtgtcccatgaaatccctattgaactataacgctctataacgaggcatatttggttataacgaggaaaatttaaatcgaagaatacttgtctttacctgtttttagcgttgtaatggtcataaataaataaatgccccaactacctgtacatagaaatgcccaacgtctgtcttattatcgaggccagtgctataataaactcggccacctgtaataaacatctgcctgtttatcgaccgatactgaatactataggaaatttacaatctatggcggcgaagtctcattgttcactgttcaggttgaccatcgacacataataaactacgtaagaggcatcaaaaaatttcattattattattgtttgatataacgagatccgcttataacgagataattaattcaccatttcagttctcgttatagagggagtctactgtagtttaaaccacctaaaaaacctagtttgaaccctgttgtgaggaattattcatacatttaaacactagaccaagtttttaaatggaaatgtcatgggtaccacaaaagttgggcctctctttaaaacccatttgaaaagaatacaatgcttgcaaagccttcccttcaactttggcgagcagactaaccatgagtatgtgtcgaaccaagtttttactgtaaaatcttaaaaaggagccccctttatttttgcagatatagaatccttatgaaaaataaggcacacatattcgaaacatttttagaattgttgatagatggcgcaaataaatcgcattttccgaatatagcgccatccgtctcaacaattctaaaaaagttcgaataaatgttacttattttttgaggaggaaactcaatctgcaagaaaaaacgggggttcctatttaagattttaaagttaactttcaccccacctccggagtgtggaatgaaaaatcctgtttggtgtcattctatagatttttgaaaaatattaaacacgtgtttttttgtttttcatttggaagtgtatttctcgagatttggaccgtttctataattttgctgtggtatcacgatataccgttttttccgattatagcgctatctatccacaattcgcaaaatggctcgaatgaaatgtgcttgatttttacaaggaaaatccaaatctgcaacaaaaattaggggttccatttaagattttaaagttaccccccgctccacaccca

SEQ ID NO: 3405 - DNA, 1699 bp, Diabrotica virgifera
taataaaatagctgggatagatcacgtttactgacaaattagtgatgttagttgttacgttttgcatagtattctaaaaatgttttttgcttttatcttcaaaatacagcattcggacaaaatactgccttgtcaagtgtttcactggcatctaacattctttaatacgtactcaatttacgtttaaaaccactgtcatactgtcaatttcatttataaggttgctgtgttccaattttttaaaattatttaattaattaataaacttttgtatacgtggttgcctgaccaggcacttaatgtacgtatgacgtgtgtattacgttgttctagtgtattatgtctcgggatcttatagggatcaatgggcaagggcgcccatataaaaatttttagggggggccaaacgtgaagatgttgcacattacattttgtatatttcggatgacaatatatacagtagactctctctataacgaacacggatataacgaggtttcgcttataacgaggtacattaggtgtcccatgaaatccctattgaactataacgctctataacgaggcatatttggttataacgaggaaaatttaaatcgaagaatacttgtctttacctgtttttagcgttgtaatggtcataaataaataaatgccccaactacctgtacatagaaatgcccaacgtctgtcttattatcgaggccagtgctataataaactcggccacctgtaataaacatctgcctgtttatcgaccgatactgaatactataggaaatttacaatctatggcggcgaagtctcattgttcactgttcaggttgaccatcgacacataataaactacgtaagaggcatcaaaaaatttcattattattattgtttgatataacgagatccgcttataacgagataattaattcaccatttcagttctcgttatagagggagtctactgtagtttaaaccacctaaaaaacctagtttgaaccctgttgtgaggaattattcatacatttaaacactagaccaagtttttaaatggaaatgtcatgggtaccacaaaagttgggcctctctttaaaacccatttgaaaagaatacaatgcttgcaaagccttcccttcaactttggcgagcagactaaccatgagtatgtgtcgaaccaagtttttactgtaaaatcttaaaaaggagccccctttatttttgcagatatagaatccttatgaaaaataaggcacacatattcgaaacatttttagaattgttgatagatggcgcaaataaatcgcattttccgaatatagcgccatccgtctcaacaattctaaaaaagttcgaataaatgttacttattttttgaggaggaaactcaatctgcaagaaaaaacgggggttcctatttaagattttaaagttaactttcaccccacctccggagtgtggaatgaaaaatcctgtttggtgtcattctatagatttttgaaaaatattaaacacgtgtttttttgtttttcatttggaagtgtatttctcgagatttggaccgtttctataattcacctatggcatcacaataagtcgtttttttttcgattatagcgccatctatccataattcgaaaaaacgattcgaataaaagttacttacttttacgataaggaatccaaatctgcaataaaaactaggggg

SEQ ID NO: 3406 - DNA, 400 bp, Diabrotica virgifera
gtagaagacaggaaaaaatttaacagaaaacgctagaagaaatgaaactattagcacaagacagaaaagaatgaaagagatgggtgaatatgtagctaagctaaacccaaatccgacacctgaaagggtataaggaaggggagaaagaaagaaagaaaaatattaaacacgtgtttttttgtttttcatttggaagtgtatttctcgagatttggaccgtttctataattttgctgtggtatcacgatataccgttttttccgattatagcgctatctatccacaattcgcaaaatggctcgaatgaaatgtgcttgatttttacaaggaaaatccaaatctgcaacaaaaattaggggttccatttaagattttaaagttaccccccgctccacaccca

SEQ ID NO: 3407 - DNA, 363 bp, Diabrotica virgifera
gtagaagacaggaaaaaatttaacagaaaacgctagaagaaatgaaactattagcacaagacagaaaagaatgaaagagatgggtgaatatgtagctaagctaaacccaaatccgacacctgaaagggtataaggaaggggagaaagaaagaaagaaaaatattaaacacgtgtttttttgtttttcatttggaagtgtatttctcgagatttggaccgtttctataattcacctatggcatcacaataagtcgtttttttttcgattatagcgccatctatccataattcgaaaaaacgattcgaataaaagttacttacttttacgataaggaatccaaatctgcaataaaaactaggggg

SEQ ID NO: 3408 - DNA, 969 bp, Diabrotica virgifera
  SmartBlast Evalue=1E-41; Info=Serine protease P44 n=1 Tax= Tribolium castaneum RepID=D6W6R5_TRICA
taaaaagagcagagtgataatgaagggtgtgaatgtcttgatcggtgtattatggttttatttaaacatcgtaaatggaaattcccaatactggggtccaggtgctattgccaatgaagtgtgtcgaagatataaagacgactccataattaatcacatttcgcctgacccgcttgatacccgcataactggagaaaaattagcaaaaaaaggagaatttcctcatatggtgcaacttggttatatcaaaagtaataaaactaagtatctttgtagtggtttcattattagtaaaaattacgttcttactgcagctcactgtgttaatggaggaagagggacaaataagccacattatctaagagctggagtaacagatgtcaacgatgtgtcaaatgagcaggtacgatctatcgactctattataattcatcctgaatttaagcgcccaccgatataccacgatatagcgcttattaaggttaccgaagattttaactttaataagtttgtaagtccaatatgtttatatactagcaatgagaacccagatggagaaggtgttcacccaggatggggtccaactgaggatgactttgcactagagaagcaaccgcatatgataagactttccctaaactttgatagtaatgaaagttgcaatagcactttctttcccatagcaaaaagtgtattaccagagggtatagcaaaaaataagatagtatgtgctggaggaaagacaggcgggtgccaggttgactctggcagtcctctgcagatataccgcaaagatggtaatgagaagccatgcatgtatgatgcgataggaatctcatccttcggatcaagagtttgtggcaagaaaacatttccaacagcttttaccaggatttcccattacataaaatggattcaagataacgtctggcctcaagtacaagcattatagattataagcacattata

SEQ ID NO: 3409 - DNA, 998 bp, Diabrotica virgifera
  SmartBlast Evalue=3E-30; Info=Serine protease P44 n=1 Tax= Tribolium castaneum RepID=D6W6R5_TRICA
taaaaagagcagagtgataatgaagggtgtgaatgtcttgatcggtgtattatggttttatttaaacatcgtaaatggaaattcccaatactggggtccaggtgctattgccaatgaagtgtgtcgaagatataaagacgactccataattaatcacatttcgcctgacccgcttgatacccgcataactggagaaaaattagcaaaaaaaggagaatttcctcatatggtgcaacttggttatatcaaaagtaataaaactaagtatctttgtagtggtttcattattagtaaaaagtacattattaccgcagctaattgtgttaatggagaaaatacagatcagccacaatttgtaagagctggagtaacagatgaacacgatgtgtcaaatgagcagatacgatcaatacacaatattttagcgctttcgtatataacgcttattagggtcgaagaagattttaattttaataagtttgtaagtccagtatgtatatacactagagataaggacccagatggaccaggtattttcacaggatggagtccagctgatattgtagacgaaaaacaaaggcacatgactaaacttaccttaaacattgacagtaatgaaagttgcaataacactttggctcctacagaaaaatatgaattatcagatatcttagtaaaaaataagatagtgtgtgctggaggaaagacaattattgatggatgtcagattgactctgggggtcttctgcaggtatacagcgaagatgataacatgtattatgcagtaggagtctcttctttcggatcaagagtttgcggcaagaaagaactaccaattgcttttaccaaattttattattattacaaatggattgaggatactgtctggcctcgagtagatataataagccgtttcttcgtgagacaagaagactacatagtatagttttaccagcagttaaatacaataaatgtacacacatttgttatatttttga

SEQ ID NO: 3410 - DNA, 894 bp, Diabrotica virgifera
  SmartBlast Evalue=6E-43; Info=Serine protease H17 n=1 Tax= Tribolium castaneum RepID=D6W8L3_TRICA
gggaatttccgaagactcaagttcagctgctgtcgccaatgaaatatgtaagagctacaccgaagatgccaaaaagaatcatatttgtcctgtccctcaagagacccgcctaattggaggaattttagcaaaaaaaggagaatttcctcatatggtgcaacttggttatatcaaaagtaataaaactaagtatctttgtagtggtttcattattagtaaaaattacgttcttactgcagctcactgtgttaatggaggaagagggacaaataagccacattatctaagagctggagtaacagatgtcaacgatgtgtcaaatgagcaggtacgatctatcgactctattataattcatcctgaatttaagcgcccaccgatataccacgatatagcgcttattaaggttaccgaagattttaactttaataagtttgtaagtccaatatgtttatatactagcaatgagaacccagatggagaaggtgttcacccaggatggggtccaactgaggatgactttgcactagagaagcaaccgcatatgataagactttccctaaactttgatagtaatgaaagttgcaatagcactttctttcccatagcaaaaagtgtattaccagagggtatagcaaaaaataagatagtatgtgctggaggaaagacaggcgggtgccaggttgactctggcagtcctctgcagatataccgcaaagatggtaatgagaagccatgcatgtatgatgcgataggaatctcatccttcggatcaagagtttgtggcaagaaaacatttccaacagcttttaccaggatttcccattacataaaatggattcaagataacgtctggcctcaagtacaagcattatagattataagcacattata

SEQ ID NO: 3411 - DNA, 923 bp, Diabrotica virgifera
  SmartBlast Evalue=1E-30; Info=Serine protease H17 n=1 Tax= Tribolium castaneum RepID=D6W8L3_TRICA
gggaatttccgaagactcaagttcagctgctgtcgccaatgaaatatgtaagagctacaccgaagatgccaaaaagaatcatatttgtcctgtccctcaagagacccgcctaattggaggaattttagcaaaaaaaggagaatttcctcatatggtgcaacttggttatatcaaaagtaataaaactaagtatctttgtagtggtttcattattagtaaaaagtacattattaccgcagctaattgtgttaatggagaaaatacagatcagccacaatttgtaagagctggagtaacagatgaacacgatgtgtcaaatgagcagatacgatcaatacacaatattttagcgctttcgtatataacgcttattagggtcgaagaagattttaattttaataagtttgtaagtccagtatgtatatacactagagataaggacccagatggaccaggtattttcacaggatggagtccagctgatattgtagacgaaaaacaaaggcacatgactaaacttaccttaaacattgacagtaatgaaagttgcaataacactttggctcctacagaaaaatatgaattatcagatatcttagtaaaaaataagatagtgtgtgctggaggaaagacaattattgatggatgtcagattgactctgggggtcttctgcaggtatacagcgaagatgataacatgtattatgcagtaggagtctcttctttcggatcaagagtttgcggcaagaaagaactaccaattgcttttaccaaattttattattattacaaatggattgaggatactgtctggcctcgagtagatataataagccgtttcttcgtgagacaagaagactacatagtatagttttaccagcagttaaatacaataaatgtacacacatttgttatatttttga

SEQ ID NO: 3412 - DNA, 1045 bp, Diabrotica virgifera
  SmartBlast Evalue=7E-28; Info=Endonuclease-reverse transcriptase n=1 Tax=Bombyx mori RepID=D5LB38_BOMMO
attttcgccacgtgtgttctggcattctttgtacatgcccgtatcactgcagggctctactttctaacttttttgtaattgagctttctacttccattctgttccatatttcatctgctcttattctatcctatctagtggtttgtagaaatcaagtcgaatttgacagtttttattttatttcgtatcgatgttgtcattggcgatattcctactccatggagtaatattactgaagagactcgaagcatttgagatgtggtgctatagacgcatgttgaggatttcctggatagacagagttaccaacgaagaagttctacatagaatgggtaaagagcgcgaactagtcgtaaccataaaacgtcgcaaactggaatacctgggccatataatgcgcaatgaacaacgatatgacctacttcggaccatacttcaaggtaaagtgcatgggaaaagaggtccaggacgaagaagaatatcctggctgcataacctgcgaaaatggtttaacttaaccactaccggacttttcagggcagcagtcaacaaagtcagaatagccatgttagtgtccaacatccgtaacggataggcaccataagaagaagttatcataaattacaattcaatacttaactaaactatactatcgaattatgtggagttgcccattcttctctactagatgcaaatgtcttctaatctctttcgtgaggtcctgggcggaattcagatcaatttcctttagttgttcgcaacttattcgtcttaattgttcctcatcttgtgattcccagccaccatgataaattttgtagacagtaaagcccaaaaatcctttattggccaagcctgcggcaagtttggaggattatcgtttttgggaacaagtatttggtgttgtagcggccagttttgggtatttcttgagtattataaggtctcaaggagtttagcttgagagtatttggggcattaacgtctctttcgatattttacaccactattcgttaattccaaggatacagtactcttagaagat

SEQ ID NO: 3413 - DNA, 995 bp, Diabrotica virgifera
  SmartBlast Evalue=7E-28; Info=Endonuclease-reverse transcriptase n=1 Tax=Bombyx mori RepID=D5LB38_BOMMO
attttcgccacgtgtgttctggcattctttgtacatgcccgtatcactgcagggctctactttctaacttttttgtaattgagctttctacttccattctgttccatatttcatctgctcttattctatcctatctagtggtttgtagaaatcaagtcgaatttgacagtttttattttatttcgtatcgatgttgtcattggcgatattcctactccatggagtaatattactgaagagactcgaagcatttgagatgtggtgctatagacgcatgttgaggatttcctggatagacagagttaccaacgaagaagttctacatagaatgggtaaagagcgcgaactagtcgtaaccataaaacgtcgcaaactggaatacctgggccatataatgcgcaatgaacaacgatatgacctacttcggaccatacttcaaggtaaagtgcatgggaaaagaggtccaggacgaagaagaatatcctggctgcataacctgcgaaaatggtttaacttaaccactaccggacttttcagggcagcagtcaacaaagtcagaatagccatgttagtgtccaacatccgtaacggataggcaccataagaagaagaatgtgtggataaccccgaattaacagactaataaataaaaaactcatatttatctgaaatattgaaactacactatgatatatttttattaaattaataacttaacatccattgtatttaacaaataattaacaaaattcgaatatgttgacaaacaacttttacaaaagggatgagggggcgggcccactttgagtgacagaacaaaattattcttccttatgattggccagacgtaagaaacgcactgtaaaagatgaaagttggtcatctcttccgttccgttacgtttttcttacgttccgtcaggcgcttgcgttcatttataaacacgagtacacaaaattcggtgttgatcttttccagtgcgtctccgttgcgtc

SEQ ID NO: 3414 - DNA, 887 bp, Diabrotica virgifera
  SmartBlast Evalue=6E-36; Info=Endonuclease-reverse transcriptase n=1 Tax=Bombyx mori RepID=D5LB38_BOMMO
ttcgtttactaaaatgctacgtattctccgttcttttatatggcgtggagtcatggaccttaactgaagcatcactgaagagactcgaagcatttgagatgtggtgctatatacgcatgttgaggatttcctggatagacagagttaccaacgaagaagttctacatagaatgggtaaagagcgcgaactagtcgtaaccataaaacgtcgcaaactggaatacctgggccatataatgcgcaatgaacaacgatatgacctacttcggaccatacttcaaggtaaagtgcatgggaaaagaggtccaggacgaagaagaatatcctggctgcataacctgcgaaaatggtttaacttaaccactaccggacttttcagggcagcagtcaacaaagtcagaatagccatgttagtgtccaacatccgtaacggataggcaccataagaagaagttatcataaattacaattcaatacttaactaaactatactatcgaattatgtggagttgcccattcttctctactagatgcaaatgtcttctaatctctttcgtgaggtcctgggcggaattcagatcaatttcctttagttgttcgcaacttattcgtcttaattgttcctcatcttgtgattcccagccaccatgataaattttgtagacagtaaagcccaaaaatcctttattggccaagcctgcggcaagtttggaggattatcgtttttgggaacaagtatttggtgttgtagcggccagttttgggtatttcttgagtattataaggtctcaaggagtttagcttgagagtatttggggcattaacgtctctttcgatattttacaccactattcgttaattccaaggatacagtactcttagaagat

SEQ ID NO: 3415 - DNA, 837 bp, Diabrotica virgifera
  SmartBlast Evalue=5E-36; Info=Endonuclease-reverse transcriptase n=1 Tax=Bombyx mori RepID=D5LB38_BOMMO
ttcgtttactaaaatgctacgtattctccgttcttttatatggcgtggagtcatggaccttaactgaagcatcactgaagagactcgaagcatttgagatgtggtgctatatacgcatgttgaggatttcctggatagacagagttaccaacgaagaagttctacatagaatgggtaaagagcgcgaactagtcgtaaccataaaacgtcgcaaactggaatacctgggccatataatgcgcaatgaacaacgatatgacctacttcggaccatacttcaaggtaaagtgcatgggaaaagaggtccaggacgaagaagaatatcctggctgcataacctgcgaaaatggtttaacttaaccactaccggacttttcagggcagcagtcaacaaagtcagaatagccatgttagtgtccaacatccgtaacggataggcaccataagaagaagaatgtgtggataaccccgaattaacagactaataaataaaaaactcatatttatctgaaatattgaaactacactatgatatatttttattaaattaataacttaacatccattgtatttaacaaataattaacaaaattcgaatatgttgacaaacaacttttacaaaagggatgagggggcgggcccactttgagtgacagaacaaaattattcttccttatgattggccagacgtaagaaacgcactgtaaaagatgaaagttggtcatctcttccgttccgttacgtttttcttacgttccgtcaggcgcttgcgttcatttataaacacgagtacacaaaattcggtgttgatcttttccagtgcgtctccgttgcgtc

SEQ ID NO: 3416 - DNA, 1292 bp, Diabrotica virgifera
  SmartBlast Evalue=6E-27; Info=Endonuclease-reverse transcriptase n=1 Tax=Bombyx mori RepID=D5LB38_BOMMO
cgaaaatagtcgcttagtagtaattatgaggaagtaaaatatttcgatggacattttcaaagttgttcctttaaacggacaccgcacacattttatgtaaaatataatatcactcatcctcctcctaggtgccttctctattgaggttggcgatcaatatggcaaatttctctctgttctgggcttgatgaattaagacattccctgttgtgtgggtccaatctctgatgtttcggagccacgattttttctttcttcttatacccctttaaccttcgattttgccttcttatattacctggagctgctcaaattctctatggcgcattatgtgtcctagatacgacgtctttctaattttgattgtattgaccagatgaggacgtgtcttcattctttccagtacttcttcattcgtaattcttctggtccagcttattcttagcattcggcggtacatccacatttcgaataaactcagtttgttgacgtcatactgttttaatgtgcaggtctcacaggtctatatagtaatagagacaacacgtattctcaatcttattgtgactgatagtttggggttgcagagcattttactcatgttcatgaaaccagaccatgctatttcagtgtgtcttctaatttcttttgaaaggtgtagctgactatttagctctctgcccaggtatttgaggctttgggaactcttaagggtgataccagtttatttgtatgttgggtgtaatttgttcatgggggttcttgtggaataccatgattttggttttggaaaggtcaatgtccaaacccagcctatgactttcttctgataataatatgttcatcaatatttttagttggtcttctgtttccgctaatactacggtgtcataggcatatcttatattgttaattatgattccattgtctctggcaccttcagggcgatcttcaagagaagctctgatgatatgttcttcatagacattaaataatagagggacagaatacacccttgacgcacttctcattctatgtttatgtaattggtgtttccgttgtctgttcgacgcatcgtgtggttccagtatgtattgcttatgtcgtatacaacaatatttttacataaattgtgctttgacttaccgaaaaaatcagatatatttatttggattttttatgataatttaatatttacgaaccctgtcaaaactaattgtaacgaaaaattgacaaaattaaatgatgcacactctttgaaactcaataaatcagatatgttcatgagatcc

SEQ ID NO: 3417 - DNA, 1079 bp, Diabrotica virgifera
  SmartBlast Evalue=5E-27; Info=Endonuclease-reverse transcriptase n=1 Tax=Bombyx mori RepID=D5LB38_BOMMO
cgaaaatagtcgcttagtagtaattatgaggaagtaaaatatttcgatggacattttcaaagttgttcctttaaacggacaccgcacacattttatgtaaaatataatatcactcatcctcctcctaggtgccttctctattgaggttggcgatcaatatggcaaatttctctctgttctgggcttgatgaattaagacattccctgttgtgtgggtccaatctctgatgtttcggagccacgattttttctttcttcttatacccctttaaccttcgattttgccttcttatattacctggagctgctcaaattctctatggcgcattatgtgtcctagatacgacgtctttctaattttgattgtattgaccagatgaggacgtgtcttcattctttccagtacttcttcattcgtaattcttctggtccagcttattcttagcattcggcggtacatccacatttcgaataaactcagtttgttgacgtcatactgttttaatgtgcaggtctcacaggtctatatagtaatagagacaacacgtattctcaatcttattgtgactgatagtttggggttgcagagcattttactcatgttcatgaaaccagaccatgctatttcagtgtgtcttctaatttcttttgaaaggtgtagctgactatttagctctctgcccaggtatttgaggctttgggaactcttaagggtgataccagtttatttgtatgttgggtgtaatttgttcatgggggttcttgtggaataccatgattttggttttggaaaggtcaatgtccaaacccagcctatgactttcttctgataataatatgttcatcaatatttttagttggtcttctgtttccgctaatactacggtgtcataggcatatcttatattgttaatgatgattgttaagataatatcactcagatgaaatagaatttacattgatggattgttgtcgcaaatgcaagcatttcatatgagtgcgccaactctgaattttgaataataacggcctaaattgatataaatgaatataaaatcaattgggaatttaaatgagtc

SEQ ID NO: 3418 - DNA, 781 bp, Diabrotica virgifera
  SmartBlast Evalue=3E-11; Info=Endonuclease-reverse transcriptase n=1 Tax=Bombyx mori RepID=D5LB38_BOMMO
gctctctgcacaggtatatgaagctttggaaactctgaagggcgataccatttatttgtataaaaaagacgactaaaatcctttataatttataaaaggtatgtttgaaacatttgggaattttaacaaatatacctttcataaaggattttagtcgttttttgtaatatatgatatacagccaactacaggaaaactttttctcatggataattatttgtatgttgggtgtaatttgttcatgggggttcttgtggaataccatgattttggttttggaaaggtcaatgtccaaacccagcctatgactttcttctgataataatatgttcatcaatatttttagttggtcttctgtttccgctaatactacggtgtcataggcatatcttatattgttaattatgattccattgtctctggcaccttcagggcgatcttcaagagaagctctgatgatatgttcttcatagacattaaataatagagggacagaatacacccttgacgcacttctcattctatgtttatgtaattggtgtttccgttgtctgttcgacgcatcgtgtggttccagtatgtattgcttatgtcgtatacaacaatatttttacataaattgtgctttgacttaccgaaaaaatcagatatatttatttggattttttatgataatttaatatttacgaaccctgtcaaaactaattgtaacgaaaaattgacaaaattaaatgatgcacactctttgaaactcaataaatcagatatgttcatgagatcc

SEQ ID NO: 3419 - DNA, 568 bp, Diabrotica virgifera
gctctctgcacaggtatatgaagctttggaaactctgaagggcgataccatttatttgtataaaaaagacgactaaaatcctttataatttataaaaggtatgtttgaaacatttgggaattttaacaaatatacctttcataaaggattttagtcgttttttgtaatatatgatatacagccaactacaggaaaactttttctcatggataattatttgtatgttgggtgtaatttgttcatgggggttcttgtggaataccatgattttggttttggaaaggtcaatgtccaaacccagcctatgactttcttctgataataatatgttcatcaatatttttagttggtcttctgtttccgctaatactacggtgtcataggcatatcttatattgttaatgatgattgttaagataatatcactcagatgaaatagaatttacattgatggattgttgtcgcaaatgcaagcatttcatatgagtgcgccaactctgaattttgaataataacggcctaaattgatataaatgaatataaaatcaattgggaatttaaatgagtc

SEQ ID NO: 3420 - DNA, 1218 bp, Diabrotica virgifera
gataatatagataatattaatgttgatgtaaatatcaactttctaaatccgtataaaattgtaaattaataacactaaaaaataacaaacagtttataactaaacaggtttctgctttttaaacaaaaggccaaaaattattttcaagaaaggttaattgttactaattacgtcgacgttatattcacagtgtaaaataataaaagtgtaaatttttgtgttaataaaatagaaaatgctattgttttcatcgcgaccgtttcatagttcggagcctggtctaaaaaagaccgaactgaaaagacagattgaagttattgaaatgcgattgttaatggtgtctgttgagaatagaatagggcttttcatcgattgtcatttgtttcgagctcccgtcatatgtcacataacattaatatatctacgtcatacgtctttggtttatatcattggtaatacgaataacgtatgacgtagatatattaatccttatgtgacacatgacagaagctcgaaacaaatgactgtgaatgaaaagccctatagagagataccgcaaaggttaacgttaataacgtggcaagatgtaaataaaggataacggtctatttcaacacaggcatcaagagagttatcgcaaatgttttggggcggggcttaacgttattatgacaaccgacgtttggaattaaatgtaacccagaaattaatgttgaggaatactgtaagtgtttttttattgaaaaatgaatttggatattgagcgggttgacatgcattttaattttaatgatttaaccaacaatacatataaataatcagtataaaaataatataaaatatctgaataactaatatcctaacacaaaaagtagtctattgtagacaaaataagaacacacgtgtttctcaacacagaaaacaagatgattcagtttttactttataaaatttgtattctataaattatttttatgtttcatcccaaatgttaaattagcgttaacgctattaccgtcccttatttcgacctaaatagagggacacgttatccggtattagcgtaacattcactctacgcttgcatgcttgtcaaaatagcgtattccgctattagcgcgcgataaaaatgcctttacgatatctctctaatatggggataccttatccgctaataaagtaatacgttatttctttgttaatgcgcaggagcagaat

SEQ ID NO: 3421 - DNA, 1079 bp, Diabrotica virgifera
gataatatagataatattaatgttgatgtaaatatcaactttctaaatccgtataaaattgtaaattaataacactaaaaaataacaaacagtttataactaaacaggtttctgctttttaaacaaaaggccaaaaattattttcaagaaaggttaattgttactaattacgtcgacgttatattcacagtgtaaaataataaaagtgtaaatttttgtgttaataaaatagaaaatgctattgttttcatcgcgaccgtttcatagttcggagcctggtctaaaaaagaccgaactgaaaagacagattgaagttattgaaatgcgattgttaatggtgtctgttgagaatagaatagggcttttcatcgattgtcatttgtttcgagctcccgtcatatgtcacataacattaatatatctacgtcatacgtctttggtttatatcattggtaatacgaataacgtatgacgtagatatattaatccttatgtgacacatgacagaagctcgaaacaaatgactgtgaatgaaaagccctatagagagataccgcaaaggttaacgttaataacgtggcaagatgtaaataaaggataacggtctatttcaacacaggcatcaagagagttatcgcaaatgttttggggcggggcttaacgttattatgacaaccgacgtttggaattaaatgtaacccagaaattaatgttgaggaatactgtaagtgtttttttattgaaaaatgaatttggatattgagcgggttgacatgcattttaattttaatgatttaaccaacaatacatataaataatcagtataaaaataatataaaatatctgaataactaatatcctaacacaaaaagtagtctattgtagacaaaataagaacacaagcatttctcaacacaggaaacaagatatttacaatttttagtttataaaatttgtattcaacaaattattatttttgtgtttcatcccaattgtcaaattagcgttaacgtttttaccgtcccttatttcgacctaagtagcgggacacgttatccggtattagcgtaacattcact

SEQ ID NO: 3422 - DNA, 726 bp, Diabrotica virgifera
aatcctatatcaaaatgttggatttatagagtcaaaatggtatactggtgcaagatatagtagagtaccaatgtcaaaattaattttattatagcaataccacaaaatacactgagatatgctttactgattatgttattagaaagattttaggccctctactttttgacgtacgttacgtaaaacgttatacttgtcatgcgcattgagtcataaataagggataaacgtgtttaattaaaatagtttatgaatcctttcagacacttcgcacacagattaacgttaatcagaataaaatcaacaaaataacgttaatcaaataatcagtataaaaataatataaaatatctgaataactaatatcctaacacaaaaagtagtctattgtagacaaaataagaacacacgtgtttctcaacacagaaaacaagatgattcagtttttactttataaaatttgtattctataaattatttttatgtttcatcccaaatgttaaattagcgttaacgctattaccgtcccttatttcgacctaaatagagggacacgttatccggtattagcgtaacattcactctacgcttgcatgcttgtcaaaatagcgtattccgctattagcgcgcgataaaaatgcctttacgatatctctctaatatggggataccttatccgctaataaagtaatacgttatttctttgttaatgcgcaggagcagaat

SEQ ID NO: 3423 - DNA, 587 bp, Diabrotica virgifera
aatcctatatcaaaatgttggatttatagagtcaaaatggtatactggtgcaagatatagtagagtaccaatgtcaaaattaattttattatagcaataccacaaaatacactgagatatgctttactgattatgttattagaaagattttaggccctctactttttgacgtacgttacgtaaaacgttatacttgtcatgcgcattgagtcataaataagggataaacgtgtttaattaaaatagtttatgaatcctttcagacacttcgcacacagattaacgttaatcagaataaaatcaacaaaataacgttaatcaaataatcagtataaaaataatataaaatatctgaataactaatatcctaacacaaaaagtagtctattgtagacaaaataagaacacaagcatttctcaacacaggaaacaagatatttacaatttttagtttataaaatttgtattcaacaaattattatttttgtgtttcatcccaattgtcaaattagcgttaacgtttttaccgtcccttatttcgacctaagtagcgggacacgttatccggtattagcgtaacattcact

SEQ ID NO: 3424 - DNA, 871 bp, Diabrotica virgifera
  SmartBlast Evalue=2E-64; Info=Cellulase II n=1 Tax=Apriona germari RepID=Q6SS52_APRGE
gttggaaagcaataataaatgttggtttgtgcatgtaaaagtgttataaatataatttaaataataatgtataccggtatagtgaatatttttttggtttccatagccatagtcacagcatcttccaaagaatcatcaccagacatcgtggcaatacctggaggtcttagaggcgatgccataactaccagatactgggattgttgtgttgtatcttgcagttgggatgctaacgttcataccaaaaatcgtcaaccagtgaaatcttgccaaaagaatggagcaacctatagtacaagggagaataatggaaattcggtctgttatcctgaccatcccggaaatgcatatgtttgtaacaataattcaccattcgtagttaattccactcttgcttatggatttgccggtgtatcttttcaaggtggagctgacgttgaacattgttgccattgttaccttttaagtttcaaaggtaaacttcaaggaaaacagatgttggttcaaaccattaacacaggagctgatgctgtggcccatcatttcgatttacaaattcctggtggaggagttggttacaatacacaaggttgtcggatccagtggaatgctcctgagaatggatggggtgaccgttatggtggagttcattcggagcaagaatgtaatcaattaccatggcaactacaggcaggttgtaaatttagattccaattcatgcaaggagtttcgaatccagacgtatctttccaggaagttaaatgtccatcacagttagtgtccatcacaggctgtggagatctttaaaataataattgtgtatttgatttttttgttggaatttattaaaaaatgttaactgctaaaaaaa

SEQ ID NO: 3425 - DNA, 870 bp, Diabrotica virgifera
  SmartBlast Evalue=2E-64; Info=Cellulase II n=1 Tax=Apriona germari RepID=Q6SS52_APRGE
gttggaaagcaataataaatgttggtttgtgcatgtaaaagtgttataaatataatttaaataataatgtataccggtatagtgaatatttttttggtttccatagccatagtcacagcatcttccaaagaatcatcaccagacatcgtggcaatacctggaggtcttagaggcgatgccataactaccagatactgggattgttgtgttgtatcttgcagttgggatgctaacgttcataccaaaaatcgtcaaccagtgaaatcttgccaaaagaatggagcaacctatagtacaagggagaataatggaaattcggtctgttatcctgaccatcccggaaatgcatatgtttgtaacaataattcaccattcgtagttaattccactcttgcttatggatttgccggtgtatcttttcaaggtggagctgacgttgaacattgttgccattgttaccttttaagtttcaaaggtaaacttcaaggaaaacagatgttggttcaaaccattaacacaggagctgatgctgtggcccatcatttcgatttacaaattcctggtggaggagttggttacaatacacaaggttgtcggatccagtggaatgctcctgagaatggatggggtgaccgttatggtggagttcattcggagcaagaatgtaatcaattaccatggcaactacaggcaggttgtaaatttagattccaattcatgcaaggagtttcgaatccagacgtatctttccaggaagttaaatgtccatcacagttggtgtctatcacaggctgtggagatctttaaaataataattgtaaacgtgatttgattttattgttagaacttattaaaaaatgttaactgctt

SEQ ID NO: 3426 - DNA, 875 bp, Diabrotica virgifera
  SmartBlast Evalue=1E-64; Info=Cellulase II n=1 Tax=Apriona germari RepID=Q6SS52_APRGE
ataagttggaaagcaataataaatgttggtttgtgcatgtaaaggtgttataaatataatttaaataataatgtataccggtatagtgaatatttttttggtttctatagccatagtcacagcatcttccaaagaatcatcaccagacatcgtggcaatacctgggggtcttagaggcgatgccataactaccagatactgggattgttgtgttgtatcttgcagttgggatgctaacgttcatacaaaaaatcgtcaaccagtgaaatcttgccaaaaggatggagcaacgtatagtacaaggcagaataatggaaattcggtctgttatcctgaccatcccggaaatgcatatgtttgtaacaataattcaccattcgtagttaattccactcttgcttatggatttgccggtgtatcttttcaaggtggagctgacgttgaacattgttgccattgttaccttttaagtttcaaaggtaaacttcaaggaaaacagatgttggttcaaaccattaacacaggagctgatgctgtggcccatcatttcgatttacaaattcctggtggaggagttggttacaatacacaaggttgtcggatccagtggaatgctcctgagaatggatggggtgaccgttatggtggagttcattcggagcaagaatgtaatcaattaccatggcaactacaggcaggttgtaaatttagattccaattcatgcaaggagtttcgaatccagacgtatctttccaggaagttaaatgtccatcacagttagtgtccatcacaggctgtggagatctttaaaataataattgtgtatttgatttttttgttggaatttattaaaaaatgttaactgctaaaaaaa

SEQ ID NO: 3427 - DNA, 874 bp, Diabrotica virgifera
  SmartBlast Evalue=1E-64; Info=Cellulase II n=1 Tax=Apriona germari RepID=Q6SS52_APRGE
ataagttggaaagcaataataaatgttggtttgtgcatgtaaaggtgttataaatataatttaaataataatgtataccggtatagtgaatatttttttggtttctatagccatagtcacagcatcttccaaagaatcatcaccagacatcgtggcaatacctgggggtcttagaggcgatgccataactaccagatactgggattgttgtgttgtatcttgcagttgggatgctaacgttcatacaaaaaatcgtcaaccagtgaaatcttgccaaaaggatggagcaacgtatagtacaaggcagaataatggaaattcggtctgttatcctgaccatcccggaaatgcatatgtttgtaacaataattcaccattcgtagttaattccactcttgcttatggatttgccggtgtatcttttcaaggtggagctgacgttgaacattgttgccattgttaccttttaagtttcaaaggtaaacttcaaggaaaacagatgttggttcaaaccattaacacaggagctgatgctgtggcccatcatttcgatttacaaattcctggtggaggagttggttacaatacacaaggttgtcggatccagtggaatgctcctgagaatggatggggtgaccgttatggtggagttcattcggagcaagaatgtaatcaattaccatggcaactacaggcaggttgtaaatttagattccaattcatgcaaggagtttcgaatccagacgtatctttccaggaagttaaatgtccatcacagttggtgtctatcacaggctgtggagatctttaaaataataattgtaaacgtgatttgattttattgttagaacttattaaaaaatgttaactgctt

SEQ ID NO: 3428 - DNA, 1120 bp, Diabrotica virgifera
ctattggacttatactcttactacttatcatcttagatatgtttgaatagaaagtattaaaagaaatgtaatttgtgttcatactctacagaagctattttcgtgtgaaaaagaaattattttcttgctgcagttgttagtttttctttcttgagtattatgtttttttatttaatatctttaacatcaccaattgtacatttttttcttagtctgctgggaattgttttataattataattcgctccgaaattacatagcatgtagggttagttcagaccaacagggcttttcatcgattgtcatttgtttcgagcttctgtcatgtgtcacaatattaatgtatctacgccatacgtttttggtttgtatcattgttatataccaataacgtatgacgtagatacattaatattatgtgacacatgacagaggctcgaaacaaatgactgtgaatgaaaagccttactgtcacggtacgatcagatcacaatcaaagcaccgtcaagagggcttttcattcacagtcatttgtttcgagcttctgtcatgtgtcacataatattaatatatctacgtcatacgttattgatataaccaatgatacaaaccaaagacgtatgacgtgatatattaatattatgtgacacatgacaggaggctcgaaacaaatgacagtcgatgaaaagccctattgatctttatgaacatagctaaatatttttcataaaaccatataaaatattttgcattgacagttgacagatgttattaaaagacatataacttgaccttcatgttctgcagctacctatattccataaaagcaaaatttttcataactgcataataagtttacttatcgagcttatcaattttagttaaattccattcagttctacttacctatataataatcaaaactatagtaggtttgttcattaacgagttaatacattttattatttttctcttcgagtttttcttcttttcgtcaactactatgtacttataattcaatcatattatctactgcaatagcttttttacattcaatatacaatacgcgttttttatttcgtagctatgatctcagatacctatccttatctaatattac

SEQ ID NO: 3429 - DNA, 970 bp, Diabrotica virgifera
ctattggacttatactcttactacttatcatcttagatatgtttgaatagaaagtattaaaagaaatgtaatttgtgttcatactctacagaagctattttcgtgtgaaaaagaaattattttcttgctgcagttgttagtttttctttcttgagtattatgtttttttatttaatatctttaacatcaccaattgtacatttttttcttagtctgctgggaattgttttataattataattcgctccgaaattacatagcatgtagggttagttcagaccaacagggcttttcatcgattgtcatttgtttcgagcttctgtcatgtgtcacaatattaatgtatctacgccatacgtttttggtttgtatcattgttatataccaataacgtatgacgtagatacattaatattatgtgacacatgacagaggctcgaaacaaatgactgtgaatgaaaagccttactgtcacggtacgatcagatcacaatcaaagcaccgtcaagagggcttttcattcacagtcatttgtttcgagcttctgtcatgtgtcacataatattaatatatctacgtcatacgttattgatataaccaatgatacaaaccaaagacgtatgacgtgatatattaatattatgtgacacatgacaggaggctcgaaacaaatgacaatcgatgaaaagccctattgtgcatatttttcacgttggcttcaattttataaattcatgttctgttctgtaattcaattattatattaacctcacattcatgggcgccgggcgccgggattactttcagtgaggtgcatctgcatccacacttactaattaaccaatatgaaatatagaactatacatacatgtatggctatgtactttttcctgagaggaattgcaatattttcaattaaaacgcaagcaattaacgttgaattttgatacttgagcttccaaaactccac

SEQ ID NO: 3430 - DNA, 749 bp, Diabrotica virgifera
taaccgtcgcgttacgagatgtcatggaactattcagtcaaaaatttagatttactttcttatcttgccttgtcgtttatataaatttcacgtcgtcattcaactctgttgactgttggtacccattagtctccctatagggcttttcattcacagtcatttgtttcgagcttctgtcatgtgtcacataatattaatatatctacgtcatacgttattgatataaccaatgatacaaaccaaagacgtatgacgtgatatattaatattatgtgacacatgacaggaggctcgaaacaaatgacagtcgatgaaaagccctattgatctttatgaacatagctaaatatttttcataaaaccatataaaatattttgcattgacagttgacagatgttattaaaagacatataacttgaccttcatgttctgcagctacctatattccataaaagcaaaatttttcataactgcataataagtttacttatcgagcttatcaattttagttaaattccattcagttctacttacctatataataatcaaaactatagtaggtttgttcattaacgagttaatacattttattatttttctcttcgagtttttcttcttttcgtcaactactatgtacttataattcaatcatattatctactgcaatagcttttttacattcaatatacaatacgcgttttttatttcgtagctatgatctcagatacctatccttatctaatattac

SEQ ID NO: 3431 - DNA, 599 bp, Diabrotica virgifera
taaccgtcgcgttacgagatgtcatggaactattcagtcaaaaatttagatttactttcttatcttgccttgtcgtttatataaatttcacgtcgtcattcaactctgttgactgttggtacccattagtctccctatagggcttttcattcacagtcatttgtttcgagcttctgtcatgtgtcacataatattaatatatctacgtcatacgttattgatataaccaatgatacaaaccaaagacgtatgacgtgatatattaatattatgtgacacatgacaggaggctcgaaacaaatgacaatcgatgaaaagccctattgtgcatatttttcacgttggcttcaattttataaattcatgttctgttctgtaattcaattattatattaacctcacattcatgggcgccgggcgccgggattactttcagtgaggtgcatctgcatccacacttactaattaaccaatatgaaatatagaactatacatacatgtatggctatgtactttttcctgagaggaattgcaatattttcaattaaaacgcaagcaattaacgttgaattttgatacttgagcttccaaaactccac

SEQ ID NO: 3432 - DNA, 1039 bp, Diabrotica virgifera
attagttttctatttcgcaaagtgtgccacgtcacgttctgttggagcctagcttaaaatgtacaagcttgcgtttgtacgatacacaggagttcgaattcaattctatatacactcacggacaaaaatattacatattttgaaattaacgtatgaaataaatttttccacctacctctaccgaaagtatacttttccggacctgattgtagggagcaaaattgtacttttcctccctaggaaggaaaatatttttactcacaatcggttagtaatttatggatttctaacctttgaagtaatcaagaagcgacttattacttactttactttcccagatagccgggaaagtactttcccggctagcatctgtcacttttctacctgcaaatgtcaatgtcatttttgattaaaagatggtttagaaagaatagaatccactcaacatttatttaattaagaaacaacaacaacaaaacaaaaagaaaactatttggaattataaatattaatagttacattggaattatgattactattaacggttaaagtaagaccgtgttgctcaaaattattaattataatagtgatcctgtcacaaaaacctactcttcccgtacatttgtaattactaatttgtaataatataaatgtcagattcaacaaacttgttttgttacctagcaacgatctcacaggttacttaaaataattcatcttatcacataatgaaaatggatacagataattggaacgaaattattattggtagattgtgagtattagaaatccataaactactaaccgattgtgtaaaatagtatacagacctcgcgggaactcattctagcctcggtgcttcgcacctcggtaaactaccttgccgctcggctgaaatagagtactttcccgctaggtatgaaatatactattcctccctagggagaaaaaggaaaagtgacgtcattcataaaatataacttattgacgccctatacaatatctattttctattacgtaagtatctatacattttaac

SEQ ID NO: 3433 - DNA, 1009 bp, Diabrotica virgifera
tgatgtctctggtgtttttttaaatgatctgaatttgttgtttcgaatgataaaatgagcatgctcaaatgataaccgataacccgagaacgtagtctcccacacttttgacaaataaaataatagcagataataataataaaagtatgtaatcattaatactataatcaataataacattccttcattagtaatattataattgattataagttaaacaattttacttacaatcggttagtaatttatggatttctaacctttgaagtaatcaggaagcgacttgattacttactttactttcccagatagccgggaaagtactttcccggctagcatctgtcacttttctacctgcaaatgtcaatgtcatttttgattaaaagatggtttagaaagaatagaatccactcaacatttatttaattaagaaacaacaacaacaaaacaaaaagaaaactatttggaattataaatattaatagttacattggaattatgattactattaacggttaaagtaagaccgtgttgctcaaaattattaattataatagtgatcctgtcacaaaaacctactcttcccgtacatttgtaattactaatttgtaataatataaatgtcagattcaacaaacttgttttgttacctagcaacgatctcacaggttacttaaaataattcatcttatcacataatgaaaatggatacagataattggaacgaaattattattggtagattgtgagtattagaaatccataaactactaaccgattgtgtaaaatagtatacagacctcgcgggaactcattctagcctcggtgcttcgcacctcggtaaactaccttgccgctcggctgaaatagagtactttcccgctaggtatgaaatatactattcctccctagggagaaaaaggaaaagtgacgtcattcataaaatataacttattgacgccctatacaatatctattttctattacgtaagtatctatacattttaac

SEQ ID NO: 3434 - DNA, 706 bp, Diabrotica virgifera
attagttttctatttcgcaaagtgtgccacgtcacgttctgttggagcctagcttaaaatgtacaagcttgcgtttgtacgatacacaggagttcgaattcaattctatatacactcacggacaaaaatattacatattttgaaattaacgtatgaaataaatttttccacctacctctaccgaaagtatacttttccggacctgattgtagggagcaaaattgtacttttcctccctaggaaggaaaatatttttactcacaatcggttagtaatttatggatttctaacctttgaagtaatcaagaagcgacttattacttactttactttcccagatagccgggaaagtactttcccggctagcatctgtcacttttctacctgcaaatgtcaatgtcatttttgattaaaagatggtttagaaagaatagaatccactcaacatttatttaattaagaaacaacaacaacaaaacaaaaagaaaactatttggaattataaatattaatagttacattggaattatgattactattaacggttaaagtaagaccgtgttgctcaaaattatgagtttcagaaatagatgatgacgccgacgtttctggattttctacatgagaccaacatattattattatttattattggtagattgtgagtattagaatccataaactactgactgattgtgagtaaaat

SEQ ID NO: 3435 - DNA, 676 bp, Diabrotica virgifera
tgatgtctctggtgtttttttaaatgatctgaatttgttgtttcgaatgataaaatgagcatgctcaaatgataaccgataacccgagaacgtagtctcccacacttttgacaaataaaataatagcagataataataataaaagtatgtaatcattaatactataatcaataataacattccttcattagtaatattataattgattataagttaaacaattttacttacaatcggttagtaatttatggatttctaacctttgaagtaatcaggaagcgacttgattacttactttactttcccagatagccgggaaagtactttcccggctagcatctgtcacttttctacctgcaaatgtcaatgtcatttttgattaaaagatggtttagaaagaatagaatccactcaacatttatttaattaagaaacaacaacaacaaaacaaaaagaaaactatttggaattataaatattaatagttacattggaattatgattactattaacggttaaagtaagaccgtgttgctcaaaattatgagtttcagaaatagatgatgacgccgacgtttctggattttctacatgagaccaacatattattattatttattattggtagattgtgagtattagaatccataaactactgactgattgtgagtaaaat

SEQ ID NO: 3436 - DNA, 902 bp, Diabrotica virgifera
gttcccgcgaatgcatatatacatatgcaaattttcatttatttgcattggagaaaaggcactcaaactaacgtctaaagatttgacgcaaactattgaactaaataaaagcgtttaataaatataatctaatagtaaagtaaagtgtattaattaattatagtaaatacattattattaaactgtttttatttatttcattatttttcaaacttagttttactacatactttgtaacgatatgatgccacggcaagcgatgagctgatctaccagagacgacctgaggagtgtccgtgttggcgcattccttcttcatagcaccgctgggggaaaccgaaggagagagcatcgagagcatatttaagacgagccggagaatgagaatagaaaatcagtcgttgctagcgtgttgaactagcaatggcttgattggcagaaatgcaccgtatcttgaggtggaactgtgcctaggtggatgccaccgtgatgaagtagagtccaccatagtagcgaggaacgagcgactgcgcgtcgctgttcagccgtgccgaattgaagtgaaatgcggtctctccgtatatggctagattgatttaacgtagcgagattgttattgtacatattgtgctgtttatcgtatcattttgaatgttgctattatgatcggatgactgtaataaagtttaatattggttttcctttgcagaagatggaattttattttatttgttttaaggggctatcccagtgcaaaagcacgaaattcacacactcccttgggaatttccaaaataaaaagtaccgttccaattgttttgaaaacttacatgggcactcattataaaaagaagtacatgtaagacaatattcataaaaaaatactgaaaattaaacggttt

SEQ ID NO: 3437 - DNA, 879 bp, Diabrotica virgifera
acgcacgactgtcgtcagtagtactgtgttactaaatgagcgatttacgtatgtggtaccagccaagtggagcttgttcaagatgggcaccgaacgtgttaaagcgatttgctcttctcttctatttttttcttatcagaaaagaaaaataacaatttcattagccgaagcaccttcaaattatttgcaccatgcatttaccaatacactgtaacgatatgatgcctcggcaagcgatgagctgatctaccagagacgacctgaggagtgtccgtgttggcgcattccttcttcatagcaccgctgggggaaaccgaaggagagagcatcgagagcatatttaagacgagccggagaatgagaatagaaaatcagtcgttgctagcgtgttgaactagcaatggcttgattggcagaaatgcaccgtatcttgaggtggaactgtgcctaggtggatgccaccgtgatgaagtagagtccaccatagtagcgaggaacgagcgactgcgcgtcgctgttcagccgtgccgaattgaagtgaaatgcggtctctccgtatatggctagattgatttaacgtagcgagattgttattgtacatattgtgctgtttatcgtatcattttgaatgttgctattatgatcggatgactgtaataaagtttaatattggttttcctttgcagaagatggaattttattttatttgttttaaggggctatcccagtgcaaaagcacgaaattcacacactcccttgggaatttccaaaataaaaagtaccgttccaattgttttgaaaacttacatgggcactcattataaaaagaagtacatgtaagacaatattcataaaaaaatactgaaaattaaacggttt

SEQ ID NO: 3438 - DNA, 803 bp, Diabrotica virgifera
gttcccgcgaatgcatatatacatatgcaaattttcatttatttgcattggagaaaaggcactcaaactaacgtctaaagatttgacgcaaactattgaactaaataaaagcgtttaataaatataatctaatagtaaagtaaagtgtattaattaattatagtaaatacattattattaaactgtttttatttatttcattatttttcaaacttagttttactacatactttgtaacgatatgatgccacggcaagcgatgagctgatctaccagagacgacctgaggagtgtccgtgttggcgcattccttcttcatagcaccgctgggggaaaccgaaggagagagcatcgagagcatatttaagacgagccggagaatgagaatagaaaatcagtcgttgctagcgtgttgaactagcaatggcttgattggcagaaatgcaccgtatcttgaggtggaactgtgcctaggtggatgccaccgtgatgaagtagagtccaccatagtagcgaggaacgagcgactgcgcgtcgctgttcagccgtgccgaattgaagtgaaatgcggtctctccgtatatggctagattgatttaacgtagcgagattgttattgtacatattgtgctgtttatcgtatcattttgaatgttgctattatgatcggatgactgtttaatattgtttttcctttgcagaagatggaattttattttgtttgttttaaactatatttaattatcttgaatatatttaccttatttttaacctgtgttttacttagtctatcgtcctgaaag

SEQ ID NO: 3439 - DNA, 780 bp, Diabrotica virgifera
acgcacgactgtcgtcagtagtactgtgttactaaatgagcgatttacgtatgtggtaccagccaagtggagcttgttcaagatgggcaccgaacgtgttaaagcgatttgctcttctcttctatttttttcttatcagaaaagaaaaataacaatttcattagccgaagcaccttcaaattatttgcaccatgcatttaccaatacactgtaacgatatgatgcctcggcaagcgatgagctgatctaccagagacgacctgaggagtgtccgtgttggcgcattccttcttcatagcaccgctgggggaaaccgaaggagagagcatcgagagcatatttaagacgagccggagaatgagaatagaaaatcagtcgttgctagcgtgttgaactagcaatggcttgattggcagaaatgcaccgtatcttgaggtggaactgtgcctaggtggatgccaccgtgatgaagtagagtccaccatagtagcgaggaacgagcgactgcgcgtcgctgttcagccgtgccgaattgaagtgaaatgcggtctctccgtatatggctagattgatttaacgtagcgagattgttattgtacatattgtgctgtttatcgtatcattttgaatgttgctattatgatcggatgactgtttaatattgtttttcctttgcagaagatggaattttattttgtttgttttaaactatatttaattatcttgaatatatttaccttatttttaacctgtgttttacttagtctatcgtcctgaaag

SEQ ID NO: 3440 - DNA, 1109 bp, Diabrotica virgifera
  SmartBlast Evalue=2E-62; Info=Reverse transcriptase n=2 Tax= Ostrinia nubilalis RepID=A4KWG0_OSTNU
gggtgatcaaaggagtaaatgtggacggagagatgctacaccacctaagctacgcagacgatatagtcctgattgcagacgatttgggacaaataaagaaaatgttggaagaacttagtacagcatgtcataaaataggcttaaaaatgaatataacaaaacaaaatatatgacgaacaaaatgaacaaatagaactcgtagacaaatacatatatctgggtcacgaaattaagataggtaaggacaatcaaacaaccgaagtatccagaagaataatacaaggatgggcagcatacgagctcttaggaacatttttaagagtgacattccaactaatatgaagaaaaaagttttcgaccaatgcgtgctaccggtgatgacctatggtgcagaaacattatcgctcacaaagaaaaacgcacaaaaactaagagtagcgcagagaagaatggagcgatcaatgataggggccactctgcgagacaggattagaaacgaagatctacgagctaagaccaaagtcatagacgtcattgaaagaagctgtaacttaaaatggaaatgggctggacacgttgccagaatgaaggacggaagatggactcgcaaactagttgaatggagaccaagagccgataaacgtagcagaggaagaccaccaatacgatggcaagacgacttacgaaagacaacaaaaaactggatacaaaaagcacaagatagaacactttggagacaaacaggggaggcctatgtccagcagtggattgagagaggctgatgatgatgatgatgatgatgatgtcacagtaacagagcgcgttcacatgactggcgcttaacgcgcgatcaaaactacatacattttattttaggccgtcacccgccaacgtgcgttttaatgacctaaaacgcgcgttagcatgtgaacggtctcaagtaaaatgtatttagttgtaatcaagcgttatcaaaatgcgcgttaagtgcttgtcatgagaacggggtcttttgctaaggaatactctgtattgatttatttgacagttctatcagtaaatgtccatctaatttactaccgttgcacgtcattatctacgccagagat

SEQ ID NO: 3441 - DNA, 832 bp, Diabrotica virgifera
  SmartBlast Evalue=4E-59; Info=Reverse transcriptase n=2 Tax= Ostrinia nubilalis RepID=A4KWG0_OSTNU
gggtgatcaaaggagtaaatgtggacggagagatgctacaccacctaagctacgcagacgatatagtcctgattgcagacgatttgggacaaataaagaaaatgttggaagaacttagtacagcatgtcataaaataggcttaaaaatgaatataacaaaacaaaatatatgacgaacaaaatgaacaaatagaactcgtagacaaatacatatatctgggtcacgaaattaagataggtaaggacaatcaaacaaccgaagtatccagaagaataatacaaggatgggcagcatacgagctcttaggaacatttttaagagtgacattccaactaatatgaagaaaaaagttttcgaccaatgcgtgctaccggtgatgacctatggtgcagaaacattatcgctcacaaagaaaaacgcacaaaaactaagagtagcgcagagaagaatggagcgatcaatgataggggccactctgcgagacaggattagaaacgaagatctacgagctaagaccaaagtcatagacgtcattgaaagaagctgtaacttaaaatggaaatgggctggacacgttgccagaatgaaggacggaagatggactcgcaaactagttgaatggagaccaagagccgataaacgtagcagaggaagaccaccaatacgatggcaagacgacttacgaaagacaacaaaaaactggatgcagaaagcacaagatagaacactttggagacaaacaggggaggacatatgtccagcagtggattgagagaggctgatgatgatgatgagggattaatttgattacttcgaatcttccgaccaaag

SEQ ID NO: 3442 - DNA, 819 bp, Diabrotica virgifera
  SmartBlast Evalue=2E-24; Info=Endonuclease-reverse transcriptase n=1 Tax=Bombyx mori RepID=D7F166_BOMMO
aacatatttcgattactaacatgtaaaacattaagtaatatcacaacccagcaagtgcatatgagtatttttttcagtatatggttaataattttgcagtggtaatcaggtgtctttataatattaaaagtttttattaaccctttccagtcagatgatcccatttgggatcatggcaatgttgcattgatttatttgtcagttctgtcattgatttatttgacactgcattgatttatatgatgctgtcacagtatgatagtaaaatggaaatgggctggacacgttgccagaatgaaggacggaagatggactcgcaaactagttgaatggagaccaagagccgataaacgtagcagaggaagaccaccaatacgatggcaagacgacttacgaaagacaacaaaaaactggatacaaaaagcacaagatagaacactttggagacaaacaggggaggcctatgtccagcagtggattgagagaggctgatgatgatgatgatgatgatgatgtcacagtaacagagcgcgttcacatgactggcgcttaacgcgcgatcaaaactacatacattttattttaggccgtcacccgccaacgtgcgttttaatgacctaaaacgcgcgttagcatgtgaacggtctcaagtaaaatgtatttagttgtaatcaagcgttatcaaaatgcgcgttaagtgcttgtcatgagaacggggtcttttgctaaggaatactctgtattgatttatttgacagttctatcagtaaatgtccatctaatttactaccgttgcacgtcattatctacgccagagat

SEQ ID NO: 3443 - DNA, 542 bp, Diabrotica virgifera
  SmartBlast Evalue=1E-20; Info=Endonuclease-reverse transcriptase n=1 Tax=Bombyx mori RepID=D7F166_BOMMO
aacatatttcgattactaacatgtaaaacattaagtaatatcacaacccagcaagtgcatatgagtatttttttcagtatatggttaataattttgcagtggtaatcaggtgtctttataatattaaaagtttttattaaccctttccagtcagatgatcccatttgggatcatggcaatgttgcattgatttatttgtcagttctgtcattgatttatttgacactgcattgatttatatgatgctgtcacagtatgatagtaaaatggaaatgggctggacacgttgccagaatgaaggacggaagatggactcgcaaactagttgaatggagaccaagagccgataaacgtagcagaggaagaccaccaatacgatggcaagacgacttacgaaagacaacaaaaaactggatgcagaaagcacaagatagaacactttggagacaaacaggggaggacatatgtccagcagtggattgagagaggctgatgatgatgatgagggattaatttgattacttcgaatcttccgaccaaag

SEQ ID NO: 3444 - DNA, 877 bp, Diabrotica virgifera
ctgttatttcaattgctgtattatttcacatatcgatggcttagtgtgaaaacctcgtatctcattaaatgacaattttacaggagagaaaaaactgattttcagcataatataacataaatacaaaaattacgttacatatttttaagtcgagcacattgagacaaatatctgatattggcccagagctaaaagtgttaaatgtgctattaaattggaaatacaaatattaactatgaaaaacacgtaaatatccttgcagtatatagagcctttgcccaagtaactatgataacctcgtatatcttgatatacgtgtttttcatctcaaatgaggttgtgtttattattatttacgaggttttcatttttcatagcttattgcacacctccaaatactaggtagatacaatacaaatcttttgatttaaggttcataaaatgtttctatatgccggactaccttttgttgttcacaaaaaacatttctccaagtcgaatctctcaaacaaacactccaaattaagtaccaaattcttggttataaatatacgtggtattcacactaaatcaagagagcaattgatatacgtggtttcttttttcggctgtagaaaatagtctggtgtatttggatttttgctaacagttgtaaatcgtgagatacaaggttttcaaactaaaaccaccaaaatatcattttcgaaaaaaaaatgagatacgaagttttcacactaagccaacgtaatatctgaataataagtcaatatcttaaatacaataattaactcgttttggacttggcaaccatttaacgcctgttactgtattataattttttatcgtattttgacaaacaatcatacgtattaatcaa

SEQ ID NO: 3445 - DNA, 838 bp, Diabrotica virgifera
ggtgtgaaaacctcgtatctcataaaattacaattttacaaggagaggcaaaaaatgattttctgcataatataacctaaaaacaaaaattacgttacgtattttttaattcgagcacattgagacaaatatctgatattggcccagagctaaaagtgttaaatgtgctattaaattggaaatacaaatattaactatgaaaaacacgtaaatatccttgcagtatatagagcctttgcccaagtaactatgataacctcgtatatcttgatatacgtgtttttcatctcaaatgaggttgtgtttattattatttacgaggttttcatttttcatagcttattgcacacctccaaatactaggtagatacaatacaaatcttttgatttaaggttcataaaatgtttctatatgccggactaccttttgttgttcacaaaaaacatttctccaagtcgaatctctcaaacaaacactccaaattaagtaccaaattcttggttataaatatacgtggtattcacactaaatcaagagagcaattgatatacgtggtttcttttttcggctgtagaaaatagtctggtgtatttggatttttgctaacagttgtaaatcgtgagatacaaggttttcaaactaaaaccaccaaaatatcattttcgaaaaaaaaatgagatacgaagttttcacactaagccaacgtaatatctgaataataagtcaatatcttaaatacaataattaactcgttttggacttggcaaccatttaacgcctgttactgtattataattttttatcgtattttgacaaacaatcatacgtattaatcaa

SEQ ID NO: 3446 - DNA, 750 bp, Diabrotica virgifera
ctgttatttcaattgctgtattatttcacatatcgatggcttagtgtgaaaacctcgtatctcattaaatgacaattttacaggagagaaaaaactgattttcagcataatataacataaatacaaaaattacgttacatatttttaagtcgagcacattgagacaaatatctgatattggcccagagctaaaagtgttaaatgtgctattaaattggaaatacaaatattaactatgaaaaacacgtaaatatccttgcagtatatagagcctttgcccaagtaactatgataacctcgtatatcttgatatacgtgtttttcatctcaaatgaggttgtgtttattattatttacgaggttttcatttttcatagcttattgcacacctccaaatactaggtagatacaatacaaatcttttgatttaaggttcataaaatgtttctatatgccggactaccttttgttgttcacaaaaaacatttctccaagtcgaatctctcaaacaaacactccaaattaagtaccaaattcttggttataaatatacgtggtattcacactaaatcaagagagcaattgatatacgtggtttcttttttcggctgtagaaaatagtctactgtatttggattttttctaacagttgtaaatggtgagatacaaggttttcaaactaaaaccaccaaaatgtcattttcgaaaaaaaaatgagatacgaggttttcacactaagccatcaatgta

SEQ ID NO: 3447 - DNA, 711 bp, Diabrotica virgifera
ggtgtgaaaacctcgtatctcataaaattacaattttacaaggagaggcaaaaaatgattttctgcataatataacctaaaaacaaaaattacgttacgtattttttaattcgagcacattgagacaaatatctgatattggcccagagctaaaagtgttaaatgtgctattaaattggaaatacaaatattaactatgaaaaacacgtaaatatccttgcagtatatagagcctttgcccaagtaactatgataacctcgtatatcttgatatacgtgtttttcatctcaaatgaggttgtgtttattattatttacgaggttttcatttttcatagcttattgcacacctccaaatactaggtagatacaatacaaatcttttgatttaaggttcataaaatgtttctatatgccggactaccttttgttgttcacaaaaaacatttctccaagtcgaatctctcaaacaaacactccaaattaagtaccaaattcttggttataaatatacgtggtattcacactaaatcaagagagcaattgatatacgtggtttcttttttcggctgtagaaaatagtctactgtatttggattttttctaacagttgtaaatggtgagatacaaggttttcaaactaaaaccaccaaaatgtcattttcgaaaaaaaaatgagatacgaggttttcacactaagccatcaatgta

SEQ ID NO: 3448 - DNA, 708 bp, Diabrotica virgifera
  SmartBlast Evalue=1E-78; Info=Ribosomal protein L15 n=6 Tax= Cucujiformia RepID=D1M845_9CUCU
cgtttaactttctttttcgttggatgtctttgtaggttttaaaaatgggagcctacaagtatatacaggagttgtatagaaaaaaacaaagtgatgttcttagatttttactgagagtgagagtctggcaatatcgccaattgactaaactccacagaactcccagacccagtcggcctgacaaggctcgcagaatgggttacagggccaagcaaggttttgttatttaccgtattagagtacgacgtggaggacgcaagcgtccagtaccaaaaggtgccacctacggtaaacccaaaagccatggagttaatgaattgaaacctgtccgtaacttacaagctattgctgaggaacgtgtaggaagaaggtgtggtggattaagagtcctaaactcctactgggtagcccaagattcaacatacaaatattttgaaatcattttggtcgacccctcacataacgctattcgcaaggaccccaaaattaactggattgtcaactcagtacacaaacacagagaactccgtggcaaaacttcctctggcaaatcatctcgtggtttgggcaagggtcacagatactctcaaaccaagggaggatccaggcgtgccgcttggctcagaaggaactcactgcaattgcgcagaaaacgttaaaatttatttttttataattagaccaataaaatttacggattaataaaaa

SEQ ID NO: 3449 - DNA, 701 bp, Diabrotica virgifera
  SmartBlast Evalue=1E-78; Info=Ribosomal protein L15 n=6 Tax= Cucujiformia RepID=D1M845_9CUCU
cgtttaactttctttttcgttggatgtctttgtaggttttaaaaatgggagcctacaagtatatacaggagttgtatagaaaaaaacaaagtgatgttcttagatttttactgagagtgagagtctggcaatatcgccaattgactaaactccacagaactcccagacccagtcggcctgacaaggctcgcagaatgggttacagggccaagcaaggttttgttatttaccgtattagagtacgacgtggaggacgcaagcgtccagtaccaaaaggtgccacctacggtaaacccaaaagccatggagttaatgaattgaaacctgtccgtaacttacaagctattgctgaggaacgtgtaggaagaaggtgtggtggattaagagtcctaaactcctactgggtagcccaagattcaacatacaaatattttgaaatcattttggtcgacccctcacataacgctattcgcaaggaccccaaaattaactggattgtcaactcagtacacaaacacagagaactccgtggcaaaacttcctctggcaaatcatctcgtggtttgggcaagggtcacagatactctcaaaccaagggaggatccaggcgtgccgcttggctcagaaggaactcactgcaattgcgcagaaaacgttaaaatttatttttttataattagaccaataaaatttacggattt

SEQ ID NO: 3450 - DNA, 708 bp, Diabrotica virgifera
  SmartBlast Evalue=1E-78; Info=Ribosomal protein L15 n=6 Tax= Cucujiformia RepID=D1M845_9CUCU
cgtttaactttctttttcgttggatgtctttgtaggttttaaaaatgggagcctacaagtatatacaggagttgtatagaaaaaaacaaagtgatgttcttagatttttactgagagtgagagtgtggcaatatcgccaattgactaaactccacagaactcccagacccagtcggcctgacaaagctcgtagaatgggttacagagctaagcaaggttttgttatttaccgtattagagtacgacgtggaggacgcaagcgtccagtaccaaaaggtgccacctacggtaaacccaaaagccatggagttaacgaattgaaacctgtccgtaacttacaagctattgctgaggaacgtgtaggaagaagatgtggtggattgagagtcctaaactcatactgggtagcccaagattctacatacaaatattttgaaatcattttggtcgacccctcacataacgctattcgcaaggaccccaaaattaactggattgtcaactcagtacacaaacacagagaactccgtggcaaaacttcctctggcaaatcatctcgtggtttgggcaagggtcacagatactctcaaaccaagggaggatccaggcgtgccgcttggctcagaaggaactcactgcaattgcgcagaaaacgttaaaatttatttttttataattagaccaataaaatttacggattaataaaaa

SEQ ID NO: 3451 - DNA, 701 bp, Diabrotica virgifera
  SmartBlast Evalue=1E-78; Info=Ribosomal protein L15 n=6 Tax= Cucujiformia RepID=D1M845_9CUCU
cgtttaactttctttttcgttggatgtctttgtaggttttaaaaatgggagcctacaagtatatacaggagttgtatagaaaaaaacaaagtgatgttcttagatttttactgagagtgagagtgtggcaatatcgccaattgactaaactccacagaactcccagacccagtcggcctgacaaagctcgtagaatgggttacagagctaagcaaggttttgttatttaccgtattagagtacgacgtggaggacgcaagcgtccagtaccaaaaggtgccacctacggtaaacccaaaagccatggagttaacgaattgaaacctgtccgtaacttacaagctattgctgaggaacgtgtaggaagaagatgtggtggattgagagtcctaaactcatactgggtagcccaagattctacatacaaatattttgaaatcattttggtcgacccctcacataacgctattcgcaaggaccccaaaattaactggattgtcaactcagtacacaaacacagagaactccgtggcaaaacttcctctggcaaatcatctcgtggtttgggcaagggtcacagatactctcaaaccaagggaggatccaggcgtgccgcttggctcagaaggaactcactgcaattgcgcagaaaacgttaaaatttatttttttataattagaccaataaaatttacggattt

SEQ ID NO: 3452 - DNA, 990 bp, Diabrotica virgifera
aaactgcttttatctttttcatcttttttcatctttatacagatttgagtatctagaaactgtctttcggtccttttctagacgaagagaaggtaaatgcgtggccaaagtgtcctctatttgctttctcctattttcgtcgtatcttgtgcttatatcgcaccttgaaaaccatatggcaatatctgcaattttttcatgaaatgacctttgaatgcagtctaataggaaaaaaaatctattttttaatgctatatagcagcgtctgcaaaaaattttaagttcggcaccagaaagatacatccctatggcttttgtcaaaaatcggttcttctttttataccatcaggcattatctgcagtagttgatgctctacggttctaaaattggaaaaaaaaaccccagatctatatggcaatatgtgcaaaatgtgacccacgctcgtaaaatgaaagcaagatctactaaggaaacatcctttgaatgcaacaaaacagagtgctgcatagagatttgattgcaacactggaaataagcgacaagactataacaaattgatatacaacgtcgtactgcagatcccaaaagaaaagcgaattataaccgacagacattatataagcgacagattataatatgcaagactttgattaagtgttaacactaaaaatttgtaataaataagtacaatcaataaaaaactgttatttgatatgcatttttactctaccatgtgcgaaaattgatatattttttaataccatatggccgtatgtgctaaaatacctatttcctgggggaaatttttatgtacttcttaattcatataaaaatatgtaaaattaaagacaattgtgccaaataccaggtttacagcttaatttttggaattacagtaaataaaattaactttacaaaaacttaaaatgctcataactcaatattatgatttttgcagttgctgccctatggttttcaaagtgcgatat

SEQ ID NO: 3453 - DNA, 978 bp, Diabrotica virgifera
aaactgcttttatctttttcatcttttttcatctttatacagatttgagtatctagaaactgtctttcggtccttttctagacgaagagaaggtaaatgcgtggccaaagtgtcctctatttgctttctcctattttcgtcgtatcttgtgcttatatcgcaccttgaaaaccatatggcaatatctgcaattttttcatgaaatgacctttgaatgcagtctaataggaaaaaaaatctattttttaatgctatatagcagcgtctgcaaaaaattttaagttcggcaccagaaagatacatccctatggcttttgtcaaaaatcggttcttctttttataccatcaggcattatctgcagtagttgatgctctacggttctaaaattggaaaaaaaaaccccagatctatatggcaatatgtgcaaaatgtgacccacgctcgtaaaatgaaagcaagatctactaaggaaacatcctttgaatgcaacaaaacagagtgctgcatagagatttgattgcaacactggaaataagcgacaagactataacaaattgatatacaacgtcgtactgcagatcccaaaagaaaagcgaattataaccgacagacattatataagcgacagattataatatgcaagactttgattaagtgttaacactaaaaatttgtaataaataagtacaatcaataaaaaactgttatttgatatgcatttttactgcgtcatttgcgaaaattgatatattttttaaaaccatatggccgtatgtgctaaaacacctattaattttagaaaattttatgtacttcttaattcatataaaaataagcaaaattaaagacaattataccaaatatcaggtttgtagtttaatttttggaactacaggaaataaaattaattttacaaaaacttaaaatgctcataactcgatattatgatttttgcagttactgccctatggttttca

SEQ ID NO: 3454 - DNA, 529 bp, Diabrotica virgifera
ggctaagatggaactaagtcaagcatattcgcatccaccaggaatatgcaatctcaaaaacaagatgtagactctcattatgtaaggctaatgttattcaagagcactatcataggttttatgcagatttacacgtgaccaatgcaacaatagaagacgaacagacagattataatatgcaagactttgattaagtgttaacactaaaaatttgtaataaataagtacaatcaataaaaaactgttatttgatatgcatttttactctaccatgtgcgaaaattgatatattttttaataccatatggccgtatgtgctaaaatacctatttcctgggggaaatttttatgtacttcttaattcatataaaaatatgtaaaattaaagacaattgtgccaaataccaggtttacagcttaatttttggaattacagtaaataaaattaactttacaaaaacttaaaatgctcataactcaatattatgatttttgcagttgctgccctatggttttcaaagtgcgatat

SEQ ID NO: 3455 - DNA, 517 bp, Diabrotica virgifera
ggctaagatggaactaagtcaagcatattcgcatccaccaggaatatgcaatctcaaaaacaagatgtagactctcattatgtaaggctaatgttattcaagagcactatcataggttttatgcagatttacacgtgaccaatgcaacaatagaagacgaacagacagattataatatgcaagactttgattaagtgttaacactaaaaatttgtaataaataagtacaatcaataaaaaactgttatttgatatgcatttttactgcgtcatttgcgaaaattgatatattttttaaaaccatatggccgtatgtgctaaaacacctattaattttagaaaattttatgtacttcttaattcatataaaaataagcaaaattaaagacaattataccaaatatcaggtttgtagtttaatttttggaactacaggaaataaaattaattttacaaaaacttaaaatgctcataactcgatattatgatttttgcagttactgccctatggttttca

SEQ ID NO: 3456 - DNA, 927 bp, Diabrotica virgifera
  SmartBlast Evalue=7E-11; Info=TRAS3 protein n=1 Tax=Bombyx mori RepID=Q9BLI5_BOMMO
ctcgttagtctctggcacttggtcataagacctttgtaccaaaccctattcttctccttaaactttaataagttctgtggcctcaacgaaggcaacagttttcttattggtagttttaggatctcttctggttcaaacctcagttgactagtgaattccaaccttacatcacctagcacactgcaatggcatagtatctgtatagcagtctcttcttccatttcgcactttctgcaccatggttcattcaccttacctagtttgtataggtgattcttaaacggcaatgtccagtcaccatttcagtgaccgttttgatctctcgtttattgaggttcatcaaactgttcgagagttttattatcaatattcttgattatttttttagtctgatttgcccttgagtggttctccatttattttgatgattctttatcagccatttctgaacctcgtttttcatagcatctttagtgatgccacagaaaggttctgggccttcaaaagtttttctcgagccttgtttcgctaacatatctgctcgttcgttcccatgcaccccttcatgacccggcacccatattaaagacactttgttgtcttttgccaggttattgaggagatctttgcagtttctcaccagttttgatttggtgagagggttctttacagccagaatagccgattggctatctgtgtaaatgttgattctcttagctttagggtcttcattaatgatttcatcaatgcaggccaccaaagcaaaaacttcagcctggaacaccgttgtgtgttgacctaggctgtaagatttattacagttgcatgtttgcccaaaaactcctgatccagtaccatgggcagttttagatccatcagtgaaccatattaagtccccatttaatgtttgggacttttgttctctag

SEQ ID NO: 3457 - DNA, 812 bp, Diabrotica virgifera
  SmartBlast Evalue=5E-11; Info=TRAS3 protein n=1 Tax=Bombyx mori RepID=Q9BLI5_BOMMO
tggtagttttaggatctcttctggttcaaacctcagttgatcagtgaaatcctgcctcacatcatattgcaatggcacagtatgtgtatggtagtctcttcatccatttcgcacttcggtaccatggttctttcaccttatctaatttttaaaggtggtttcttaaacggcaatgtccagtcaccatttcagtgaccgttttgatctctcgtttattgaggttcatcaaattttcgagttgttttttatcaatattcttgattattttcgtagtctgatttgcccttgagtggttctccatttattttgatgattctttatcagccatttctgaacctcgtttttcatagcatctttagtgatgccacagaaaggttctgggccttcaaaagtttttctcgagccttgtttcgctaacatatctgctcgttcgttcccatgcaccccttcatgacccggcacccatattaaagacactttgttgtcttttgccaggttattgaggagatctttgcagtttctcaccagttttgatttggtgagagggttctttacagccagaatagccgattggctatctgtgtaaatgttgattctcttagctttagggtcttcattaatgatttcatcaatgcaggccaccaaagcaaaaacttcagcctggaacaccgttgtgtgttgacctaggctgtaagatttattacagttgcatgtttgcccaaaaactcctgatccagtaccatgggcagttttagatccatcagtgaaccatattaagtccccatttaatgtttgggacttttgttctctag

SEQ ID NO: 3458 - DNA, 578 bp, Diabrotica virgifera
ctcgttagtctctggcacttggtcataagacctttgtaccaaaccctattcttctccttaaactttaataagttctgtggcctcaacgaaggcaacagttttcttattggtagttttaggatctcttctggttcaaacctcagttgactagtgaattccaaccttacatcacctagcacactgcaatggcatagtatctgtatagcagtctcttcttccatttcgcactttctgcaccatggttcattcaccttacctagtttgtataggtgattcttaaacggcaatgtccagtcaccatttcagtgaccgttttgatctctcgtttattgaggttcatcaaactgttcgagagttttattatcaatattcttgattatttttttagtctgatttgccgttgagtggctctccatttcttttgatgattctttatcagccatttctgaacaaatatctcttattgtaaacgtataatatatttaaataaaaaatcaaaacaaactacacctgatgacccgagcctacatcaatatttacaataatggtttcgggtcaatccattttaaatcacccaa

SEQ ID NO: 3459 - DNA, 463 bp, Diabrotica virgifera
tggtagttttaggatctcttctggttcaaacctcagttgatcagtgaaatcctgcctcacatcatattgcaatggcacagtatgtgtatggtagtctcttcatccatttcgcacttcggtaccatggttctttcaccttatctaatttttaaaggtggtttcttaaacggcaatgtccagtcaccatttcagtgaccgttttgatctctcgtttattgaggttcatcaaattttcgagttgttttttatcaatattcttgattattttcgtagtctgatttgccgttgagtggctctccatttcttttgatgattctttatcagccatttctgaacaaatatctcttattgtaaacgtataatatatttaaataaaaaatcaaaacaaactacacctgatgacccgagcctacatcaatatttacaataatggtttcgggtcaatccattttaaatcacccaa

SEQ ID NO: 3460 - DNA, 838 bp, Diabrotica virgifera
gcatgagataaatcataatacggtatgagacaataaaaggttgcaaaaaaatgtctttatatcaattattacaaaatataactttagagagtaaacttaaacctaaggaacagagaaaacaacatacaatttaggtgacaaagagtaacaacatattttttaggttaagatctaacagcatcattaaatcacagattatgtgtaaatgctgtatgacagatttatgaaacatatcacataacgaaacaaaaaagtgctaccaaatcaaatatacttagatcagggcgcatctgtaaaaatattagtacattgggatgttgagaggtgactcatatttttttgcagaaattgcccgaaaaaactcatataacaatatttgagttatcctcccactcaaaaagggtccggaacactgttcaaacaatcaaaatctcaagaaatgaaggaaaaattcgatttttttcttggtttctcttgattataaccttaaaagtattcattttcgagaaaagttgcaccgacataaaagttgcgtaattaaatttcctacaatatacgataactgaaaattttaaaaattgtcacacctgttgcaaaatagcaataatttcgaaaaaaaccataaaaaacaagtattcgcattttacgcttttcaaccatttatcccacacttacgaccttcatatttaacacagaaaaactttatatggtaaaacaatactgcaaattccattaagaccggttcaatagattttgcaaaataaattttgcaatccagctttcgcaaaaagaattcattttttcaaaatgttgtagcactgaaaataaagcagacagc

SEQ ID NO: 3461 - DNA, 796 bp, Diabrotica virgifera
tgaatggcgtaaatatcaacagcatcggattggtcgatgataaggtgttgattgtagattccgactcgagtctacgacgactcatagacagggccaactcggtctgtgagaaattcgatatgaaataaacattaagaaaactaaattgatgtcaatctgaaaaaccagaatgttactctacctttcacaataaacgggacagacatttaagctcaggttaatagatttaggggatttacagggcgcatctgtaaaaatattagtacattgggatgttgagaggtgactcatatttttttgcagaaattgcctgaaaaaactcatataacaatatttgagttatcctcccactcaaaaagggtccggaacactgttcaaacaatcaaaatctcaagaaatgaaggaaaaattcgatttttttcttggtttctcttgattataaccttaaaagtattcattttcgagaaaagttgcaccgacataaaagttgcgtaattaaatttcctacaatatacgataactgaaaattttaaaaattgtcacacctgttgcaaaatagcaataatttcgaaaaaaaccataaaaaacaagtattcgcattttacgcttttcaaccatttatcccacacttacgaccttcatatttaacacagaaaaactttatatggtaaaacaatactgcaaattccattaagaccggttcaatagattttgcaaaataaattttgcaatccagctttcgcaaaaagaattcattttttcaaaatgttgtagcactgaaaataaagcagacagc

SEQ ID NO: 3462 - DNA, 592 bp, Diabrotica virgifera
gcatgagataaatcataatacggtatgagacaataaaaggttgcaaaaaaatgtctttatatcaattattacaaaatataactttagagagtaaacttaaacctaaggaacagagaaaacaacatacaatttaggtgacaaagagtaacaacatattttttaggttaagatctaacagcatcattaaatcacagattatgtgtaaatgctgtatgacagatttatgaaacatatcacataacgaaacaaaaaagtgctaccaaatcaaatatacttagatcagggcgcatctgtaaaaatattagtacattgggatgttgagaggtgactcatatttttttgcagaaattgcccgaaaaaactcatataacaatatttgagttatcctcccatataggttaatttcaagctatttctgcaaaaaaacagagtcacttctcaaggtatatctcaaaacagatccgccctggactaattcgtttttatagcgttttaggcttattaaaacaattattccatgaaataaaaaatatttaaaaactgtaacaataaagaattcagacggcgtttgcaatcagtttggcatgagaaa

SEQ ID NO: 3463 - DNA, 550 bp, Diabrotica virgifera
tgaatggcgtaaatatcaacagcatcggattggtcgatgataaggtgttgattgtagattccgactcgagtctacgacgactcatagacagggccaactcggtctgtgagaaattcgatatgaaataaacattaagaaaactaaattgatgtcaatctgaaaaaccagaatgttactctacctttcacaataaacgggacagacatttaagctcaggttaatagatttaggggatttacagggcgcatctgtaaaaatattagtacattgggatgttgagaggtgactcatatttttttgcagaaattgcctgaaaaaactcatataacaatatttgagttatcctcccatataggttaatttcaagctatttctgcaaaaaaacagagtcacttctcaaggtatatctcaaaacagatccgccctggactaattcgtttttatagcgttttaggcttattaaaacaattattccatgaaataaaaaatatttaaaaactgtaacaataaagaattcagacggcgtttgcaatcagtttggcatgagaaa

SEQ ID NO: 3464 - DNA, 747 bp, Diabrotica virgifera
  SmartBlast Evalue=2E-13; Info=Endonuclease-reverse transcriptase n=1 Tax=Bombyx mori RepID=D7F159_BOMMO
tttccatttgcagatgtatgtcttcgtttccaccttctttgttttttttcttcttctcttcttcttcctctttataagcaattctgcttgttcattggcggattgatacctctatggaaggttgtcactccaccttttgcgcggtcggccgatacttcttctaccgattggtgatttatctcgtgctattttgaccacacgtgtctcccccattctggttatgtggttgttccattctttttttctatttagtgtccattcgtttatacactgtacgttacattgtcttctaatatcttcgctcctctttcgatctctcagtgtatttcctgtaattcttctcagtactctcatctctgccgtttccagtagtctttgtgttgtggctgtatcgggtcttgtttctgatgcatatgtcattattggtcttacactggctttataaattcttgacttcatctcagtgttaatatgtcggtttcgccatatagtgttattaaggcatcctgccagtctatttgctttttgtacttgatttctcacttctttgtccaggtctccgtaacttgacaatgtaattccaaggtattttattccattacttgttcaatactgataccatcaatttctattttacatctgattggttctttactgatactgttgttttagttttctgagatgaaattgtcatattgaattcttttgctcttatgttaaatctgtgactaatctttgcagactatc

SEQ ID NO: 3465 - DNA, 703 bp, Diabrotica virgifera
  SmartBlast Evalue=4E-13; Info=Endonuclease-reverse transcriptase n=1 Tax=Bombyx mori RepID=D7F159_BOMMO
ttattttattcttcttcttcttcctctttataagcaattctgcttgttcattggcggattgacacttctatggaaggttgtcactccatcttttgcaaggttggccgatacttcttctaccgattggtgatttatctcttactattttgaccacacgtgtctcccccattctggttatgtggttgttccattctttttttctatttagtgtccattcgtttatacactgtacgttacattgtcttctaatatcttcgctcctctttcgatctctcagtgtatttcctgtaattcttctcagtactctcatctctgccgtttccagtagtctttgtgttgtggctgtatcgggtcttgtttctgatgcatatgtcattattggtcttacactggctttataaattcttgacttcatctcagtgttaatatgtcggtttcgccatatagtgttattaaggcatcctgccagtctatttgctttttgtacttgatttctcacttctttgtccaggtctccgtaacttgacaatgtaattccaaggtattttattccattacttgttcaatactgataccatcaatttctattttacatctgattggttctttactgatactgttgttttagttttctgagatgaaattgtcatattgaattcttttgctcttatgttaaatctgtgactaatctttgcagactatc

SEQ ID NO: 3466 - DNA, 670 bp, Diabrotica virgifera
  SmartBlast Evalue=7E-10; Info=Reverse transcriptase n=2 Tax= Ostrinia nubilalis RepID=A4KWG0_OSTNU
tttccatttgcagatgtatgtcttcgtttccaccttctttgttttttttcttcttctcttcttcttcctctttataagcaattctgcttgttcattggcggattgatacctctatggaaggttgtcactccaccttttgcgcggtcggccgatacttcttctaccgattggtgatttatctcgtgctattttgaccacacgtgtctcccccattctggttatgtggttgttccattctttttttctatttagtgtccattcgtttatacactgtacgttacattgtcttctaatatcttcgctcctctttcgatctctcagtgtatttcctgtaattcttctcagtactctcatctctgccgtttccagtagtctttgtgttgtggctgtatcgggtcttgtttctgatgcatatatcattattggtctccgcctgcagttttgtttggtgtgatcgagtagctcacagaactgttgccggtcccaagcccggataaaggaggagggggtctacagccaggttagcaccctaatgatagacgttaaaaccatagctcatagaaacaggattatgcctcggaacaggaatttttaattattgtaaccgaaaattaaaaaaaaacccctttttcgtactaaattgttgataattaaaaaaacaacgctaaaa

SEQ ID NO: 3467 - DNA, 626 bp, Diabrotica virgifera
  SmartBlast Evalue=8E-10; Info=Reverse transcriptase n=2 Tax= Ostrinia nubilalis RepID=A4KWG0_OSTNU
ttattttattcttcttcttcttcctctttataagcaattctgcttgttcattggcggattgacacttctatggaaggttgtcactccatcttttgcaaggttggccgatacttcttctaccgattggtgatttatctcttactattttgaccacacgtgtctcccccattctggttatgtggttgttccattctttttttctatttagtgtccattcgtttatacactgtacgttacattgtcttctaatatcttcgctcctctttcgatctctcagtgtatttcctgtaattcttctcagtactctcatctctgccgtttccagtagtctttgtgttgtggctgtatcgggtcttgtttctgatgcatatatcattattggtctccgcctgcagttttgtttggtgtgatcgagtagctcacagaactgttgccggtcccaagcccggataaaggaggagggggtctacagccaggttagcaccctaatgatagacgttaaaaccatagctcatagaaacaggattatgcctcggaacaggaatttttaattattgtaaccgaaaattaaaaaaaaacccctttttcgtactaaattgttgataattaaaaaaacaacgctaaaa

SEQ ID NO: 3468 - DNA, 970 bp, Diabrotica virgifera
ccgtctacaacccatttgaaattatcaaatagtacttactgtctatagaacaaattttgaatttgctattatagagaaacatcaagattaaatacaatgtttcacttgttgcgtcgcaaatagtaaagcttggcgagcaaggtgtagatttaacaatatagctttactttctcttgtccataatgcttaaaaggtataactagaagagataatgatgggaactagacagacaatagatggaaccaaattgtaacatgtaagaagaataaggatcaatttgacatacttgaaagtaaggtgccaaacagttttagagtgaacagagacaaaaatagagtacaataaacacctaactgcaaaaaaaaacacaagggttggccaattttataacaagaacagtgtattatttagggaataaattaagcacggtaaatttttatgaatgtatttttggtcgagagaggactgtctaactagccgatcatttacattgaatggaacaaaacaaacacagcgaatgaaaataattctggactataactatactctataaacaaatgcacatatagatattaaattatatttcaaacataaagtttgaaaggagcatattttttgtgtgtgaatttgatggccttggccgagccaattagccagacattttgttattttaaaaacaaacaaatttgtttttcaatcagaggaattttttctgtatttctaactctaaatacataacaaactaacatattatctacaattattatctaaataatactctgttttggttgttcattttttttttgtaaatttttattttttttttgtatttttttttgcattttttttattattgttaatttgttttttttattaatttttttattgttattttttattaaattagctttttttacttacgctaagacgtaaacccgattcatcctcgcggaggtttacatcttcttag

SEQ ID NO: 3469 - DNA, 915 bp, Diabrotica virgifera
ccgtctacaacccatttgaaattatcaaatagtacttactgtctatagaacaaattttgaatttgctattatagagaaacatcaagattaaatacaatgtttcacttgttgcgtcgcaaatagtaaagcttggcgagcaaggtgtagatttaacaatatagctttactttctcttgtccataatgcttaaaaggtataactagaagagataatgatgggaactagacagacaatagatggaaccaaattgtaacatgtaagaagaataaggatcaatttgacatacttgaaagtaaggtgccaaacagttttagagtgaacagagacaaaaatagagtacaataaacacctaactgcaaaaaaaaacacaagggttggccaattttataacaagaacagtgtattatttagggaataaattaagcacggtaaatttttatgaatgtatttttggtcgagagaggactgtctaactagccgatcatttacattgaatggaacaaaacaaacacagcgaatgaaaataattctggactataactatactctataaacaaatgcacatatagatattaaattatatttcaaacataaagtttgaaaggagcatattttttgtgtgtgaatttgatggccttggccgagccaattagccagacattttgttattttaaaaacaaacaaatttgtttttcaatcagaggaattttttctgtatttctaactctaaatacataacaaactaacatattacaattattatctaaataatacactattttggttgtaaatatcctttcttgtacatatttatttttttttgtattttttatatctttaatttgtttttttattatttttattaattgtttttttactacgctaagacataaacccgattcaacatctcggaag

SEQ ID NO: 3470 - DNA, 461 bp, Diabrotica virgifera
tttctcactagaatcatcttttaacaatatggcaacatgatattccaaataaattaataattaataaacagggcttaaatagatcgacaacaacaatgtacaatttttttttgtgaatttgatggccttggccgagccaattagccagacattttgttattttaaaaacaaacaaatttgtttttcaatcagaggaattttttctgtatttctaactctaaatacataacaaactaacatattatctacaattattatctaaataatactctgttttggttgttcattttttttttgtaaatttttattttttttttgtatttttttttgcattttttttattattgttaatttgttttttttattaatttttttattgttattttttattaaattagctttttttacttacgctaagacgtaaacccgattcatcctcgcggaggtttacatcttcttag

SEQ ID NO: 3471 - DNA, 406 bp, Diabrotica virgifera
tttctcactagaatcatcttttaacaatatggcaacatgatattccaaataaattaataattaataaacagggcttaaatagatcgacaacaacaatgtacaatttttttttgtgaatttgatggccttggccgagccaattagccagacattttgttattttaaaaacaaacaaatttgtttttcaatcagaggaattttttctgtatttctaactctaaatacataacaaactaacatattacaattattatctaaataatacactattttggttgtaaatatcctttcttgtacatatttatttttttttgtattttttatatctttaatttgtttttttattatttttattaattgtttttttactacgctaagacataaacccgattcaacatctcggaag

SEQ ID NO: 3472 - DNA, 680 bp, Diabrotica virgifera
  SmartBlast Evalue=2E-62; Info=Host cell factor n=1 Tax= Harpegnathos saltator RepID=E2BBL6_9HYME
gggtaaagttatttgatgatttatcaaaactttgatccaaaaccagtatacaaacttttgttgtttaatgggtagtggcaacattgtatcctgttttggaacaaattaaagtgagattgtttaaatttgacattataggtatccattggtttacactatcttaaatgtccaagtacagtgcaatgtgatcacgtaatggcgggtaaggcgttaaagtggaaaatagtggcagataccactggacctcatcctcggccaagacatggacatcgtgcaattattattaaagacttgatggttgtttttggtggaggaaatgaagggattgttgatgagcttcatgtttttaatacagcaacaaatcaatggtttattccaattactaaaggtgatgtacctccaggatgtgctgcttttggttttgtagttgatggaaccaaattactagtttttgggggaatggtagagtatggaaagtacagcaatgatttacgagttacaggctgcaaaatgggaatggaagaagctgaaaccaaaagaaccaaaaattggtgatccaccttgtccgagattagggcatagttttactatagtgaattcaaaagtgtacctgtttggtggtttagcaaatgatagtgcagaccccaaaaataatattccaagatatttgaatgaccttt

SEQ ID NO: 3473 - DNA, 675 bp, Diabrotica virgifera
  SmartBlast Evalue=2E-60; Info=Host cell factor n=1 Tax= Harpegnathos saltator RepID=E2BBL6_9HYME
gggtaaagttatttgatgatttatcaaaactttgatccaaaaccagtatacaaacttttgttgtttaatgggtagtggcaacattgtatcctgttttggaacaaattaaagtgagattgtttaaatttgacattataggtatccattggtttacactatcttaaatgtccaagtacagtgcaatgtgatcacgtaatggcgggtaaggcgttaaagtggaaaatagtggcagataccactggacctcatcctcggccaagacatggacatcgtgcaattattattaaagacttgatggttgtttttggtggaggaaatgaagggattgttgatgagcttcatgtttttaatacagcaacaaatcaatggtttattccaattactaaaggtgatgtacctccaggatgtgctgcttttggttttgtagttgatggaaccaaattactagtttttgggggaatggtagagtatggaaagtacagcaatgatttacgagttacaggctgcaaaatgggaatggaagaagctgaaaccaaaagaaccaaaaattggcaatcttccttgtccacggttaggacatagttttactgtagtaaattcaaaggtgtatctctttggcggattagcaaatgatagtacagatcccaaaaacaatatcccgagatacttaaatga

SEQ ID NO: 3474 - DNA, 635 bp, Diabrotica virgifera
  SmartBlast Evalue=1E-62; Info=Host cell factor n=1 Tax= Harpegnathos saltator RepID=E2BBL6_9HYME
ctgagttttcaaaactttcattccaaatcaacatacatgtttgttttttaatgactagggtaattgtatcctatttctgaacaaattgcagtgtatttacacattggttaagctacattcaatgtcccagtgcagtacaacaatcacataatggctggtaaggcgttaaagtggaaaatagtggcagataccactggacctcatcctcggccaagacatggacatcgtgcaattattattaaagacttgatggttgtttttggtggaggaaatgaagggattgttgatgagcttcatgtttttaatacagcaacaaatcaatggtttattccaattactaaaggtgatgtacctccaggatgtgctgcttttggttttgtagttgatggaaccaaattactagtttttgggggaatggtagagtatggaaagtacagcaatgatttacgagttacaggctgcaaaatgggaatggaagaagctgaaaccaaaagaaccaaaaattggtgatccaccttgtccgagattagggcatagttttactatagtgaattcaaaagtgtacctgtttggtggtttagcaaatgatagtgcagaccccaaaaataatattccaagatatttgaatgaccttt

SEQ ID NO: 3475 - DNA, 630 bp, Diabrotica virgifera
  SmartBlast Evalue=2E-60; Info=Host cell factor n=1 Tax= Harpegnathos saltator RepID=E2BBL6_9HYME
ctgagttttcaaaactttcattccaaatcaacatacatgtttgttttttaatgactagggtaattgtatcctatttctgaacaaattgcagtgtatttacacattggttaagctacattcaatgtcccagtgcagtacaacaatcacataatggctggtaaggcgttaaagtggaaaatagtggcagataccactggacctcatcctcggccaagacatggacatcgtgcaattattattaaagacttgatggttgtttttggtggaggaaatgaagggattgttgatgagcttcatgtttttaatacagcaacaaatcaatggtttattccaattactaaaggtgatgtacctccaggatgtgctgcttttggttttgtagttgatggaaccaaattactagtttttgggggaatggtagagtatggaaagtacagcaatgatttacgagttacaggctgcaaaatgggaatggaagaagctgaaaccaaaagaaccaaaaattggcaatcttccttgtccacggttaggacatagttttactgtagtaaattcaaaggtgtatctctttggcggattagcaaatgatagtacagatcccaaaaacaatatcccgagatacttaaatga

SEQ ID NO: 3476 - DNA, 789 bp, Diabrotica virgifera
ttcgattacgtaaaaactgctatacagagtaagcaaaaaaaaacgggacatactcagttaatacagtgtatcggaagtagatttgaaatagtcgatcaacactgtattaactgcatatttatgttccttttttatttggcttattctgtatgtttattcattccatatttcttacaacaatttttacatgtaatcaatgacaaaactgtcttcatcgacctacatttttttactgtgtaaataatttgtgttgaaaacgtttggcaaagaagaatatgaacaaagcaaaattaaaaaatgacagaagatttcgttacagaggagcatgtttaggttcgcattatggaggtaagggtggaaatgggagttaagttggtttagcagtaaatggttgacttcaattaaaacatcctgggttaaccgataatattataaaaggcccggtttcatgtaaaatttaaatatgtttcatttacatatttcaggtaaaaattttgtggatcctttgctttattataggagtaccgtctagtcagtgttaattgtcaaaagacaaactctgtctacctcgttcgcttatcgctccggaccggtcttaacaatgggccaagtcagataaatttaataatatttacgaccgcactaattgaagtcaaccattttctgctaaacaaactttatacagtttgtctactggtatacaaataaacatctgtgatttaagaattattagcaaactttactggaatcaaacatcatttcattaaaaaaatcatcgattacgtcatc

SEQ ID NO: 3477 - DNA, 778 bp, Diabrotica virgifera
ttcgattacgtaaaaactgctatacagagtaagcaaaaaaaaacgggacatactcagttaatacagtgtatcggaagtagatttgaaatagtcgatcaacactgtattaactgcatatttatgttccttttttatttggcttattctgtatgtttattcattccatatttcttacaacaatttttacatgtaatcaatgacaaaactgtcttcatcgacctacatttttttactgtgtaaataatttgtgttgaaaacgtttggcaaagaagaatatgaacaaagcaaaattaaaaaatgacagaagatttcgttacagaggagcatgtttaggttcgcattatggaggtaagggtggaaatgggagttaagttggtttagcagtaaatggttgacttcaattaaaacatcctgggttaaccgataatattataaaaggcccggtttcatgtaaaatttaaatatgtttcatttacatatttcaggtaaaaattttgtggatcctttgctttattataggagtaccgtctagtcagtgttaattgtcaaaagacaaactctgtctacctcgttcgcttatcgctccggaccggtcttaacaatgggccaagtcagataaatttaataatatttacgaccgcactaattgaagtcaaccattctctgctaaacaaactttacccagaaagctggtaggattagcccatgtgcacgtatctgaattggcagcggtacatcagatgagtttcaaatcgagacgggtctaagacaaggtgat

SEQ ID NO: 3478 - DNA, 546 bp, Diabrotica virgifera
tgcttacaaagacttcactctcataatttctaattttctaattctaattttcagcaattctgaacttgctctaagcctaaccatcgtaacagtctaacttcatatcagtttaacgctggtacagtttgtttagcaataaatggtcgactccaattagtaccgactataaacatcctgggttaaccgataatagtataaaaggcccggtttcaggcaatatatgtttcattcacatatttcaggtaaaaattttgtggatcctttgctttattataggagtaccgtctagtcagtgttaattgtcaaaagacaaactctgtctacctcgttcgcttatcgctccggaccggtcttaacaatgggccaagtcagataaatttaataatatttacgaccgcactaattgaagtcaaccattttctgctaaacaaactttatacagtttgtctactggtatacaaataaacatctgtgatttaagaattattagcaaactttactggaatcaaacatcatttcattaaaaaaatcatcgattacgtcatc

SEQ ID NO: 3479 - DNA, 535 bp, Diabrotica virgifera
tgcttacaaagacttcactctcataatttctaattttctaattctaattttcagcaattctgaacttgctctaagcctaaccatcgtaacagtctaacttcatatcagtttaacgctggtacagtttgtttagcaataaatggtcgactccaattagtaccgactataaacatcctgggttaaccgataatagtataaaaggcccggtttcaggcaatatatgtttcattcacatatttcaggtaaaaattttgtggatcctttgctttattataggagtaccgtctagtcagtgttaattgtcaaaagacaaactctgtctacctcgttcgcttatcgctccggaccggtcttaacaatgggccaagtcagataaatttaataatatttacgaccgcactaattgaagtcaaccattctctgctaaacaaactttacccagaaagctggtaggattagcccatgtgcacgtatctgaattggcagcggtacatcagatgagtttcaaatcgagacgggtctaagacaaggtgat

SEQ ID NO: 3480 - DNA, 584 bp, Diabrotica virgifera
  SmartBlast Evalue=1E-60; Info=Ribosomal protein L14 n=1 Tax= Chrysomela tremulae RepID=D1M7X9_9CUCU
gtgatctccatcttcctttttcatttagtgtaaagcatgcctttccaaaggtttgtagaaaccggccgcgtggccgttgtatcggaaggcccacataagggcaaacttgttagtattgtagacgtaatcgaccaaacaagggttttggttgatggccccaacagcaatgtacccagaggacagcttaggttaaacgaattgcatttaacaaagttccgcattaggtatccattttcagctccaactcgtgttgtaagaaaagcatggactgatgctaagattgatgaaaaatggaatgaatctgtctgggccaaaaaagtagctgccaaggaaaagagatcacaactcacagatcttgaccggttcaaacttcgtagggctcgttcacgaagaaaccacatccgtacagcaactttccttgctttaaggaaggccgcatcaagaaacggtttcctctatggtaaaaagaagatggctaaaggaggtgacaaacctaaaccaagcaagaaggcgaagaaagaaaagcctgcacccaagaagaaataatttttagattaaatgacaatatatttgtttaaaaaaca

SEQ ID NO: 3481 - DNA, 584 bp, Diabrotica virgifera
  SmartBlast Evalue=1E-60; Info=Ribosomal protein L14 n=1 Tax= Chrysomela tremulae RepID=D1M7X9_9CUCU
gtgatctccatcttcctttttcatttagtgtaaagcatgcctttccaaaggtttgtagaaaccggccgcgtggccgttgtatcggaaggcccacataagggcaaacttgttagtattgtagacgtaatcgaccagacaagggttttagttgatggccccaatagcaatgtacccagaggacagcttaggttaaatgaattgcatttaacaaagttccgcattaggtatccattttcagctccaactcgtgttgtaagaaaagcatggactgatgctaagattgatgaaaaatggaatgaatccgtctgggccaaaaaagtagcagccaaggaaaagagatcacaactcacagatcttgaccggttcaaacttcgtagggctcgttcacgaagaaaccacatccgtacagcaactttccttgctttaaggaaggccgcatcaagaaacggtttcctctatggtaaaaagaagatggctaaaggaggtgacaaacctaaaccaagcaagaaggcgaagaaagaaaagcctgcatccaagaagaaataatttttagattaaatgacaatatatttgtttaaaaaaca

SEQ ID NO: 3482 - DNA, 576 bp, Diabrotica virgifera
  SmartBlast Evalue=1E-60; Info=Ribosomal protein L14 n=1 Tax= Chrysomela tremulae RepID=D1M7X9_9CUCU
gtgatctccatcttcctttttcatttagtgtaaagcatgcctttccaaaggtttgtagaaaccggccgcgtggccgttgtatcggaaggcccacataagggcaaacttgttagtattgtagacgtaatcgaccaaacaagggttttggttgatggccccaacagcaatgtacccagaggacagcttaggttaaacgaattgcatttaacaaagttccgcattaggtatccattttcagctccaactcgtgttgtaagaaaagcatggactgatgctaagattgatgaaaaatggaatgaatctgtctgggccaaaaaagtagctgccaaggaaaagagatcacaactcacagatcttgaccggttcaaacttcgtagggctcgttcacgaagaaaccacatccgtacagcaactttccttgctttaaggaaggccgcatcaagaaacggtttcctctatggtaaaaagaagatggctaaaggaggtgacaaacctaaaccaagcaagaaggcgaagaaagaaaagcctgcacccaagaagaaataatttttagattaaatgacaatatatttgttt

SEQ ID NO: 3483 - DNA, 576 bp, Diabrotica virgifera
  SmartBlast Evalue=1E-60; Info=Ribosomal protein L14 n=1 Tax= Chrysomela tremulae RepID=D1M7X9_9CUCU
gtgatctccatcttcctttttcatttagtgtaaagcatgcctttccaaaggtttgtagaaaccggccgcgtggccgttgtatcggaaggcccacataagggcaaacttgttagtattgtagacgtaatcgaccagacaagggttttagttgatggccccaatagcaatgtacccagaggacagcttaggttaaatgaattgcatttaacaaagttccgcattaggtatccattttcagctccaactcgtgttgtaagaaaagcatggactgatgctaagattgatgaaaaatggaatgaatccgtctgggccaaaaaagtagcagccaaggaaaagagatcacaactcacagatcttgaccggttcaaacttcgtagggctcgttcacgaagaaaccacatccgtacagcaactttccttgctttaaggaaggccgcatcaagaaacggtttcctctatggtaaaaagaagatggctaaaggaggtgacaaacctaaaccaagcaagaaggcgaagaaagaaaagcctgcatccaagaagaaataatttttagattaaatgacaatatatttgttt

SEQ ID NO: 3484 - DNA, 702 bp, Diabrotica virgifera
gtcataggcgcccatacccttgggcaagggggccgtgcccccccctagcagtggcggctggtcagggtcggcagtgccgaaccacacatttatggacacattatagattttttaaatatttaatttaatcagagttggtgacatgacaggctgtcatgtcaccattcagaatttccgttatcaaaatcacttgcttccatacagtcatgatgtgaacttgtcacatagagctcattggtacctcgggcgaaaaacattggatattttatcatccatgttataattcacatctttgtcatatgttccgatgacggatcaattgtaaagggtttttacccatatatttttactttggtggttgcatgtagattctaagattgcactgatgatgatcggtcaaccgatcgaaaactagttctgtctttgatgtagccctgtatagggattttaacaaatataccttttataaaggatatatcatttgaatattaattttaattagcctgtgattaatattatatttaatagttatttatgataaaattgtactttttaacacgtgtactttgtacgcacgtaagaagttatacttctattatatgatttcaacgaaataaatatactttcaacaggttatttgtatttaaagattaaactaatttttacttactactttccaaaaatttttattaaaacaatact

SEQ ID NO: 3485 - DNA, 667 bp, Diabrotica virgifera
gccggttttaagcagacgaacttaaagtccgtctaaatacaatattccagaagtcaaaaacatcttaatttgaaaatctgtgggttttattatttttaataattcatagataggtactatgaaagatatttatacgatattaaagatatatccacttgcttccgtacagccatgatgtgaacttgtcacatagagctcattggtacctcgggcgaaaaacattggatattttatcatccatgttataattcacatctttgtcatatgttccgatgacggatcaattgtaaagggtttttacccatatatttttactttggtggttgcatgtagattctaagattgcactgatgatgatcggtcaaccgatcgaaaactagttctgtctttgatgtagccctgtatagggattttaacaaatataccttttataaaggatatatcatttgaatattaattttaattagcctgtgattaatattatatttaatagttatttatgataaaattgtactttttaacacgtgtactttgtacgcacgtaagaagttatacttctattatatgatttcaacgaaataaatatactttcaacaggttatttgtatttaaagattaaactaatttttacttactactttccaaaaatttttattaaaacaatact

SEQ ID NO: 3486 - DNA, 580 bp, Diabrotica virgifera
gtcataggcgcccatacccttgggcaagggggccgtgcccccccctagcagtggcggctggtcagggtcggcagtgccgaaccacacatttatggacacattatagattttttaaatatttaatttaatcagagttggtgacatgacaggctgtcatgtcaccattcagaatttccgttatcaaaatcacttgcttccatacagtcatgatgtgaacttgtcacatagagctcattggtacctcgggcgaaaaacattggatattttatcatccatgttataattcacatctttgtcatatgttccgatgacggatcaattgtaaagggtttttacccatatatttttactttggtggttgcatgtagattctaagattgcactgatgatgatcggtcaaccgatcgaaaactagttctgtctttgatgtagccctgtatagggattttaacaaatataccttttataaaggattttatgtttttgtaatggtatacagccaactacaggaaatttttcctcgtggatttttaaataatcaattgttgccacatattaacaaagagtatattaggttagg

SEQ ID NO: 3487 - DNA, 545 bp, Diabrotica virgifera
gccggttttaagcagacgaacttaaagtccgtctaaatacaatattccagaagtcaaaaacatcttaatttgaaaatctgtgggttttattatttttaataattcatagataggtactatgaaagatatttatacgatattaaagatatatccacttgcttccgtacagccatgatgtgaacttgtcacatagagctcattggtacctcgggcgaaaaacattggatattttatcatccatgttataattcacatctttgtcatatgttccgatgacggatcaattgtaaagggtttttacccatatatttttactttggtggttgcatgtagattctaagattgcactgatgatgatcggtcaaccgatcgaaaactagttctgtctttgatgtagccctgtatagggattttaacaaatataccttttataaaggattttatgtttttgtaatggtatacagccaactacaggaaatttttcctcgtggatttttaaataatcaattgttgccacatattaacaaagagtatattaggttagg

SEQ ID NO: 3488 - DNA, 795 bp, Diabrotica virgifera
  SmartBlast Evalue=6E-57; Info=Craniofacial development protein 2 (Fragment) n=1 Tax=Harpegnathos saltator RepID=E2C874_9HYME
ctccgatgaatagggggttgagcgaagggctaacaacccttccctgtaaaactcaattgttgcgaatacaatggctaatgaaacaaacggacggatctcacaacgacgaactcagcaaagaaaaatggacatgattatggatttaaaatttggaacctggaatgtgcgaaccctcttaaaggcaggagctatgataagtatggcagaagaaattgaaaaatacggagttgaaatattggcactgcaggaaataagatggaagagccaggcagaaattcgtaaaaataagttctcactatactactccggaaatgaaatgagacaaggtgaaagaggagtaaccaaaagactgcgaaaatccattatcgcatttacaccaatatcagacagaatttgcaccataagacttaaaggtaaactgcataacgtgacaatggttaatgaatatgcaccgacggaagaggctgatgaagacgaggttgaaagattctatggagaacttcaggaagtatgtgataaaatccaaagacacgatgctgttataacattaggcgactttaatgctaagctggggaaagaagaaactttcgtaaacatatttgggaaacatagtttgcataatgaaaccagtcaaaatggacttaaagttgcacaatttgcaacagcaaataattatgtaattgtcagcaataacttccagagaaaagatatccataaaggaacatggaaaataccaggagccaatgaagccaatcaaattgaccacatcctcatctacaaaaagatgggcaacag

SEQ ID NO: 3489 - DNA, 619 bp, Diabrotica virgifera
  SmartBlast Evalue=3E-22; Info=Craniofacial development protein 2 (Fragment) n=1 Tax=Harpegnathos saltator RepID=E2C874_9HYME
ctccgatgaatagggggttgagcgaagggctaacaacccttccctgtaaaactcaattgttgcgaatacaatggctaatgaaacaaacggacggatctcacaacgacgaactcagcaaagaaaaatggacatgattatggatttaaaatttggaacctggaatgtgcgaaccctcttaaaggcaggagctatgataagtatggcagaagaaattgaaaaatacggagttgaaatattggcactgcaggaaataagatggaagagccaggcagaaattcgtaaaaataagttctcactatactactccggaaatgaaatgagacaaggtgaaagaggagtaaccaaaagactgcgaaaatccattatcgcatttacaccaatatcagacagaatttgcaccataagacttaaaggtaaactgcataacgtgacaatggttaatgaatatgcatagtgtgaccaactagtccgaaaaatccgggacatggcgcgaattacgaagtcgtgtcccggcgtcccgggcaaggcttccgggccatccgaattttcaaggttttggtaaaattctattttgaaattttgaatacgttattcttctaagattcacatcaaattgaat

SEQ ID NO: 3490 - DNA, 584 bp, Diabrotica virgifera
  SmartBlast Evalue=4E-46; Info=Craniofacial development protein 2 (Fragment) n=1 Tax=Harpegnathos saltator RepID=E2C874_9HYME
cacagagttaaaatattggcaatgcaggaaatcagatggaagaaccaggggagaaattcgtaaaaataaatctcactattatgttccggaatcgaagtcagacaagaaagagcaataggatttatagtaaccaaaagactgcgaaaatccattatcgcatttacaccaatatcagacagaatttgcaccataagacttaaaggtaaactgcataacgtgacaatggttaatgaatatgcaccgacggaagaggctgatgaagacgaggttgaaagattctatggagaacttcaggaagtatgtgataaaatccaaagacacgatgctgttataacattaggcgactttaatgctaagctggggaaagaagaaactttcgtaaacatatttgggaaacatagtttgcataatgaaaccagtcaaaatggacttaaagttgcacaatttgcaacagcaaataattatgtaattgtcagcaataacttccagagaaaagatatccataaaggaacatggaaaataccaggagccaatgaagccaatcaaattgaccacatcctcatctacaaaaagatgggcaacag

SEQ ID NO: 3491 - DNA, 408 bp, Diabrotica virgifera
  SmartBlast Evalue=2E-11; Info=Craniofacial development protein 2 (Fragment) n=1 Tax=Harpegnathos saltator RepID=E2C874_9HYME
cacagagttaaaatattggcaatgcaggaaatcagatggaagaaccaggggagaaattcgtaaaaataaatctcactattatgttccggaatcgaagtcagacaagaaagagcaataggatttatagtaaccaaaagactgcgaaaatccattatcgcatttacaccaatatcagacagaatttgcaccataagacttaaaggtaaactgcataacgtgacaatggttaatgaatatgcatagtgtgaccaactagtccgaaaaatccgggacatggcgcgaattacgaagtcgtgtcccggcgtcccgggcaaggcttccgggccatccgaattttcaaggttttggtaaaattctattttgaaattttgaatacgttattcttctaagattcacatcaaattgaat

SEQ ID NO: 3492 - DNA, 699 bp, Diabrotica virgifera
gagtaggcgcgcctacaaacaggcaatttctacgtagcatgcgttaaaacgcatgcattggacacgggtcaaaacgctcaaatactatttgtttatagctttgtttgacgatgaaataattgatttttagcaatgcaaatggtcaagccggtgtaatttggcttgaactttcaaatgcgttaagcagaattgctattttatttttgatcaaaagttattcgggttcaagaatgcaatttttcgattttttgaaagtttaaccgcgtttatcttgaaaactatgcagcctacgataaaacttgtaagaacattttttgcttagaatgaaggtaaattaaatgtaagaccaaatacttacgatgtcgggatagtatcacgaggttttttcctggttttccctcgtgatttactatggaatctctaacgcgagaattttactgtcatcgttgcatttggttgtctttttgacagatcacatgctatgattttttgtgacggatattcttgagttgggattgatttcatgtaatcgaatgaactatcttttagtaaagtcgtcccaggaacgcaactcataaatattggcggtatcattttaaagtcttctactttaaaatacgtctgaattgccaatataaatgagtcagattaaataaattattagaagaatttttttacttagcaacaacatttttgttt

SEQ ID NO: 3493 - DNA, 645 bp, Diabrotica virgifera
gagtaggcgcgcctacaaacaggcaatttctacgtagcatgcgttaaaacgcatgcattggacacgggtcaaaacgctcaaatactatttgtttatagctttgtttgacgatgaaataattgatttttagcaatgcaaatggtcaagccggtgtaatttggcttgaactttcaaatgcgttaagcagaattgctattttatttttgatcaaaagttattcgggttcaagaatgcaatttttcgattttttgaaagtttaaccgcgtttatcttgaaaactatgcagcctacgataaaacttgtaagaacattttttgcttagaatgaaggtaaattaaatgtaagaccaaatacttacgatgtcgggatagtatcacgaggttttttcctggttttccctcgtgatttactatggaatctctaacgcgagaattttactgtcatcgttgcatttggttgtctttttgacagatcacatgctatgattttttgcgacggatattcttgagttgggattgatttcatgtaatcgaataaactatcttttagtaaagtcgtcccaggaacgcaactcataaatattggcgatatcattttaaagtcttctactttaaaatgtataatatacgtctgcattgccaatat

SEQ ID NO: 3494 - DNA, 553 bp, Diabrotica virgifera
aacatgaccaatttccaagttctaaatgatgttatgagagtaggtgggcacaaagtacatcaggttttttaggtatcaaacttttaggatcgagcatcttatagtcttgggatgggcagcatttatcaagatgcgaaatattctaaaaggaatttgagtattatttgaatattacttttgagagtaaactaaatgtaagaccaaatacttacgatgtcgggatagtatcacgaggttttttcctggttttccctcgtgatttactatggaatctctaacgcgagaattttactgtcatcgttgcatttggttgtctttttgacagatcacatgctatgattttttgtgacggatattcttgagttgggattgatttcatgtaatcgaatgaactatcttttagtaaagtcgtcccaggaacgcaactcataaatattggcggtatcattttaaagtcttctactttaaaatacgtctgaattgccaatataaatgagtcagattaaataaattattagaagaatttttttacttagcaacaacatttttgttt

SEQ ID NO: 3495 - DNA, 499 bp, Diabrotica virgifera
aacatgaccaatttccaagttctaaatgatgttatgagagtaggtgggcacaaagtacatcaggttttttaggtatcaaacttttaggatcgagcatcttatagtcttgggatgggcagcatttatcaagatgcgaaatattctaaaaggaatttgagtattatttgaatattacttttgagagtaaactaaatgtaagaccaaatacttacgatgtcgggatagtatcacgaggttttttcctggttttccctcgtgatttactatggaatctctaacgcgagaattttactgtcatcgttgcatttggttgtctttttgacagatcacatgctatgattttttgcgacggatattcttgagttgggattgatttcatgtaatcgaataaactatcttttagtaaagtcgtcccaggaacgcaactcataaatattggcgatatcattttaaagtcttctactttaaaatgtataatatacgtctgcattgccaatat

SEQ ID NO: 3496 - DNA, 651 bp, Diabrotica virgifera
  SmartBlast Evalue=2E-32; Info=Endonuclease-reverse transcriptase n=1 Tax=Schistosoma mansoni RepID=Q4QQE8_SCHMA
gagaacgattatagagtaatcattagagtggcagaataagctatatgtgattatagacttcgagaaagcgtttgatcgtgtagatcgcaaagccttatggaaattgctagagaaataaggaatgcctcccaagtatatcagaattataaaactgttctacgaagggtccacagcacgcatagtccacgaaggcaagttaacagaacaaatacatattggtacaggagtaaggcaaggctgtgtgctctctccaaccttattcctgatagtaatgactggatcatgtctaaggctactagtaataagactggaataagatggaatgtttttaaccaacttgaggacttggaatttgcagatgacatatgccttttaacagaaaaaagacaacacatgcaacgcaaaactgaaaaagtagcagagtcagggaagaaggtcggacttaacccttaagtactaacaccttaaatcaatgacctaaacactaactaaccgtctgacagacaggtttaacattttacttgttattttttatttgtttaatattttaatgcagaaaaatatttcgatgacttactgaaagtattacttatctaaaaaacacagtagttgatctagtttttctgtatttattaaaataaaaaacattat

SEQ ID NO: 3497 - DNA, 639 bp, Diabrotica virgifera
  SmartBlast Evalue=2E-47; Info=Endonuclease-reverse transcriptase n=1 Tax=Schistosoma mansoni RepID=Q4QQE8_SCHMA
gagaacgattatagagtaatcattagagtggcagaataagctatatgtgattatagacttcgagaaagcgtttgatcgtgtagatcgcaaagccttatggaaattgctagagaaataaggaatgcctcccaagtatatcagaattataaaactgttctacgaagggtccacagcacgcatagtccacgaaggcaagttaacagaacaaatacatattggtacaggagtaaggcaaggctgtgtgctctctccaaccttattcctgatagtaatgactggatcatgtctaaggctactagtaataagactggaataagatggaatgtttttaaccaacttgaggacttggaatttgcagatgacatatgccttttaacagaaaaaagacaacacatgcaacgcaaaactgaaaaagtagcagaggcagggaagaaggtcggacttaacataaacgtcagaaaaactaagataatgaaaataaatacaccaagagaaatgggaatatcactgggaggcacgaaattagaaacggtagagaaatttaactacttgggcagtattttgaacaacaaaggagggacggaggaggacgtaaaacggagaataggaatagctcaaaacgcattcaatatgctaagg

SEQ ID NO: 3498 - DNA, 528 bp, Diabrotica virgifera
attgtgttgggatgaagtacaacttgcacaagttgccgaagccggtggagatacaatatttggcaaaatattaagaaaagaaattccatgtaacttcatttatgaggataatttggagtagggctgtatgctctgtccaaccttattcctgatagtaattgactggatcatgtcgtaaggctactagtaataagatggaatgtttttaaccaacttgaggacttggaatttgcagatgacatatgccttttaacagaaaaaagacaacacatgcaacgcaaaactgaaaaagtagcagagtcagggaagaaggtcggacttaacccttaagtactaacaccttaaatcaatgacctaaacactaactaaccgtctgacagacaggtttaacattttacttgttattttttatttgtttaatattttaatgcagaaaaatatttcgatgacttactgaaagtattacttatctaaaaaacacagtagttgatctagtttttctgtatttattaaaataaaaaacattat

SEQ ID NO: 3499 - DNA, 516 bp, Diabrotica virgifera
  SmartBlast Evalue=1E-23; Info=Endonuclease-reverse transcriptase n=1 Tax=Schistosoma mansoni RepID=Q4QQE8_SCHMA
attgtgttgggatgaagtacaacttgcacaagttgccgaagccggtggagatacaatatttggcaaaatattaagaaaagaaattccatgtaacttcatttatgaggataatttggagtagggctgtatgctctgtccaaccttattcctgatagtaattgactggatcatgtcgtaaggctactagtaataagatggaatgtttttaaccaacttgaggacttggaatttgcagatgacatatgccttttaacagaaaaaagacaacacatgcaacgcaaaactgaaaaagtagcagaggcagggaagaaggtcggacttaacataaacgtcagaaaaactaagataatgaaaataaatacaccaagagaaatgggaatatcactgggaggcacgaaattagaaacggtagagaaatttaactacttgggcagtattttgaacaacaaaggagggacggaggaggacgtaaaacggagaataggaatagctcaaaacgcattcaatatgctaagg

SEQ ID NO: 3500 - DNA, 705 bp, Diabrotica virgifera
atgaggttagctttgtatgttgtaaaaattaaaggcaaactccaatataaaattatttgtgacaacaactgtttgtgtaatataaaaaacttaaaaatgcaaaaattcgacaaaaaaatcaacagactgacatccacaaaagtaaacaaaccagaaacgtcacaactgtacttaaaatctgaaacgattcccaaccgtctttttttgtacctatctcttttcaatatactgagtctagagcgttcataaaaataacatgtgtttttacttaataataggcggtagctggtttgtcattagtttcatacgtggaagagaatgatgctagataaaaagtatgtgttttatctcgccaggtattaatgacgcacgggtaaagaatcgtggacccaactgtagttgtaagcatatttaaaagttaaaaccataaaaacactttatcttaacctgcgctatactaatttttcaaggtgccttgcccaaattattatcggtaatattaaaaataaatttgtcgataatttcaacaatagtagtaatttttcatttataatatgatctacatatcgactatgttagtattttacaaatatatgacctttgcaataatttttctgttatttattattaatttggtattatttccacacagatatgcaaatagatattacaatgagttttggtaaggaaaaaatgtattatttt

SEQ ID NO: 3501 - DNA, 594 bp, Diabrotica virgifera
aaattcaacagactgacggccacaaaagtaaacaaaccagaaccgtcacaaattgtactcaaaatatgaaaacatccccaaacgtctttttttgtacctatctctttccattgttgactgagtctagagcgttcataaaaataacatgtgtttttacttaataataggcggtagctggtttgtcattagtttcatacgtggaagagaatgatgctagataaaaagtatgtgttttatctcgccaggtattaatgacgcacgggtaaagaatcgtggacccaactgtagttgtaagcatatttaaaagttaaaaccataaaaacactttatcttaacctgcgctatactaatttttcaaggtgccttgcccaaattattatcggtaatattaaaaataaatttgtcgataatttcaacaatagtagtaatttttcatttataatatgatctacatatcgactatgttagtattttacaaatatatgacctttgcaataatttttctgttatttattattaatttggtattatttccacacagatatgcaaatagatattacaatgagttttggtaaggaaaaaatgtattatttt

SEQ ID NO: 3502 - DNA, 570 bp, Diabrotica virgifera
atgaggttagctttgtatgttgtaaaaattaaaggcaaactccaatataaaattatttgtgacaacaactgtttgtgtaatataaaaaacttaaaaatgcaaaaattcgacaaaaaaatcaacagactgacatccacaaaagtaaacaaaccagaaacgtcacaactgtacttaaaatctgaaacgattcccaaccgtctttttttgtacctatctcttttcaatatactgagtctagagcgttcataaaaataacatgtgtttttacttaataataggcggtagctggtttgtcattagtttcatacgtggaagagaatgatgctagataaaaagtatgtgttttatctcgccaggtattaatgacggacgggtaaaaaaccacggactcaagtgtagaaataatctgcgtgcagtgatgattgaatgaacttagtattgtcaagacctgagtctcctacaaaatgattgtttaagaaaatacaaaaagtaagttaaaatattttgtaaatgtttgtttaacaatccagcgaccagagaaaattattattaacaatgagttttagatta

SEQ ID NO: 3503 - DNA, 459 bp, Diabrotica virgifera
aaattcaacagactgacggccacaaaagtaaacaaaccagaaccgtcacaaattgtactcaaaatatgaaaacatccccaaacgtctttttttgtacctatctctttccattgttgactgagtctagagcgttcataaaaataacatgtgtttttacttaataataggcggtagctggtttgtcattagtttcatacgtggaagagaatgatgctagataaaaagtatgtgttttatctcgccaggtattaatgacggacgggtaaaaaaccacggactcaagtgtagaaataatctgcgtgcagtgatgattgaatgaacttagtattgtcaagacctgagtctcctacaaaatgattgtttaagaaaatacaaaaagtaagttaaaatattttgtaaatgtttgtttaacaatccagcgaccagagaaaattattattaacaatgagttttagatta

SEQ ID NO: 3504 - DNA, 643 bp, Diabrotica virgifera
aactatttagtttaagaggtattctatttgtttatcccagagacctttattttgcaataagataagacagaaaataattaagatagggccattctgagtatgccaaatgaaagtagaagaatgatagtatcaaaatgtattaaaaaaaagataaaaaataattaatatagtcaaaaccccgaatgtaatttaaaaatgttgtccgtagaaacaatatctttatatattcgaaaagatagtattttaacacgaattttcaaataaaaaatttagcctgggttcatttgggacaaagttagccatatgtgtttatttttaattcacagctaatttgtttataataattaaggaaatctcattaatgccattttaaagaatgggatttgtatttttgttaaaaaatttgcacaaacattgtatcttcacagcaccctctacgatttttcaaaaatgtagttcaaacgattactagggtgaacctacaaatccaccgagttaaaataccgaaaaagcaatttcaaacgaatataattttctgtatctccggatcaactcaatggattttgatctttcttttttaatttgatgtaatttcatacgtacattacaaatatgcaatttgtttataaatttattaatcaac

SEQ ID NO: 3505 - DNA, 612 bp, Diabrotica virgifera
aactatttagtttaagaggtattctatttgtttatcccagagacctttattttgcaataagataagacagaaaataattaagatagggccattctgagtatgccaaatgaaagtagaagaatgatagtatcaaaatgtattaaaaaaaagataaaaaataattaatatagtcaaaaccccgaatgtaatttaaaaatgttgtccgtagaaacaatatctttatatattcgaaaagatagtattttaacacgaattttcaaataaaaaatttagcctgggttcatttgggacaaagttagccatatgtgtttatttttaattcacagctaatttgtttataataattaaggaaatctcattaatgccattttaaagaatgggatttgtatttttgttaaaaaatttgcacaaacattgtatcttcacagcaccctctacgatttttcaaaaatgtagttcaaacggttactatggggatcctacgaatccaccgagttaaaacaccgaaaaagcaatttcaattacaattttctgtatccccggatcaactcaatggattttgatcagtttttaaatttgtatgtaacttctacgtacattgcaaatatgcaa

SEQ ID NO: 3506 - DNA, 535 bp, Diabrotica virgifera
aaatacaataattaggtaatataatcaaaaatcctaatgccaaattttcgaaattttgcagtttacaaacaggactaactttaaaaatattggccgtaggaacaatccttttataatattcgaaaagctagtattttaacacgaattttcaaataaaaaatttagcctgggttcatttgggacaaagttagccatatgtgtttatttttaattcacagctaatttgtttataataattaaggaaatctcattaatgccattttaaagaatgggatttgtatttttgttaaaaaatttgcacaaacattgtatcttcacagcaccctctacgatttttcaaaaatgtagttcaaacgattactagggtgaacctacaaatccaccgagttaaaataccgaaaaagcaatttcaaacgaatataattttctgtatctccggatcaactcaatggattttgatctttcttttttaatttgatgtaatttcatacgtacattacaaatatgcaatttgtttataaatttattaatcaac

SEQ ID NO: 3507 - DNA, 504 bp, Diabrotica virgifera
aaatacaataattaggtaatataatcaaaaatcctaatgccaaattttcgaaattttgcagtttacaaacaggactaactttaaaaatattggccgtaggaacaatccttttataatattcgaaaagctagtattttaacacgaattttcaaataaaaaatttagcctgggttcatttgggacaaagttagccatatgtgtttatttttaattcacagctaatttgtttataataattaaggaaatctcattaatgccattttaaagaatgggatttgtatttttgttaaaaaatttgcacaaacattgtatcttcacagcaccctctacgatttttcaaaaatgtagttcaaacggttactatggggatcctacgaatccaccgagttaaaacaccgaaaaagcaatttcaattacaattttctgtatccccggatcaactcaatggattttgatcagtttttaaatttgtatgtaacttctacgtacattgcaaatatgcaa

SEQ ID NO: 3508 - DNA, 738 bp, Diabrotica virgifera
catcattacattatatataatatattgtatatataatgcttgcccctccccaatcaaaatttcaaatgacgcccctgtgcgacactaagctctgggatcgaatttggggtatgaagtccaactcaaattctttgtattagttcatcccataaatgttctagagactgaggtctgggttgcacgctggccattccaagacccgaaaaccgacttcggtaatgtaatctttcacttgaggtatgcggccttgcattgtcctacataaaaataaattcgtctccaatctagtcaacataagataccacaaacattgccaaaatttcctcgatgtatctagcacccgttaaccatcctcgtagtctaggcagattatcggagaataggccatttttgggaaaagttatttaccagcaattttattgctggaatcgaatcttatgatttatatattaataatataggtatgcaaagtccgcagatagtgtgctacttttttataaacaaaatggcgcccaaaaatcgtgtttttttttattttttgctctataactcaaaagattttaactttacatcaaaaacaccaaaataaaaattcaccgtaattaaattctgcatagagacgtgtttttcacgatttacttcgacgaaaattttccccggaaaatgcgggtttttccaacaaaacctttaattttcaactaaaattttagataagtaattgtttatcaataattaaat

SEQ ID NO: 3509 - DNA, 629 bp, Diabrotica virgifera
catcattacattatatataatatattgtatatataatgcttgcccctccccaatcaaaatttcaaatgacgcccctgtgcgacactaagctctgggatcgaatttggggtatgaagtccaactcaaattctttgtattagttcatcccataaatgttctagagactgaggtctgggttgcacgctggccattccaagacccgaaaaccgacttcggtaatgtaatctttcacttgaggtatgcggccttgcattgtcctacataaaaataaattcgtctccaatctagtcaacataagataccacaaacattgccaaaatttcctcgatgtatctagcacccgttaaccatcctcgtagtctaggcagattatcggagaataggccatttttgggaaaagttatttaccagcaattttattgctggaatcgaatcttatgatttatatattaataatataggtatgcaaagtccgcagatagtgtgctacttttttataaacaaaatggcgcccgaaaatcgtgttttttcaatttttgctctataactccaaagattttactttacaccaaaaacacccaaataaaaagttcaccgtaatgaaattctgcatagagacagatttttcc

SEQ ID NO: 3510 - DNA, 512 bp, Diabrotica virgifera
taaatctattattcttgccctggattgtagagacagctgtcctaccacttttttgtgagttttctctccattcctgttccaacctcacccatatacctcctaaaaaattacattgtttgtttaatagtaacagtgtatattctctgggctaattagcaaaatacaaggaaaagttatttaccagcaattttattgctggaatcgaatcttatgattctatatattaataatataggtatgcaaagtccacagatagtgtgctacttttttataaacaaaatggcgcccaaaaatcgtgtttttttttattttttgctctataactcaaaagattttaactttacatcaaaaacaccaaaataaaaattcaccgtaattaaattctgcatagagacgtgtttttcacgatttacttcgacgaaaattttccccggaaaatgcgggtttttccaacaaaacctttaattttcaactaaaattttagataagtaattgtttatcaataattaaat

SEQ ID NO: 3511 - DNA, 403 bp, Diabrotica virgifera
taaatctattattcttgccctggattgtagagacagctgtcctaccacttttttgtgagttttctctccattcctgttccaacctcacccatatacctcctaaaaaattacattgtttgtttaatagtaacagtgtatattctctgggctaattagcaaaatacaaggaaaagttatttaccagcaattttattgctggaatcgaatcttatgattctatatattaataatataggtatgcaaagtccacagatagtgtgctacttttttataaacaaaatggcgcccgaaaatcgtgttttttcaatttttgctctataactccaaagattttactttacaccaaaaacacccaaataaaaagttcaccgtaatgaaattctgcatagagacagatttttcc

SEQ ID NO: 3512 - DNA, 547 bp, Diabrotica virgifera
ttttaaaaccggtcagaatagcgctctctaagcgaactgaaatataggaaggttttggcttcgtgttgcaacgaaatgaaaattattcatttttatttttattcgataaattgttgttttaatacgatttctaactttttaacttattttcagacgtaactgtacctttctatgttcttggtacagactatgaaaattattctgtaggtttcgtctgttttgaacgtaatggtgtttttctaggtatgtaccgtttttaatattacctataatgtatatacaatcgaacccgcttattggaatagccttcgtgccaagcaaaagtattcctataaccgggatattctaataaccgatcattggtggctagtagaaacgtttcgggacctcaaatttctattccttaaaccgggatattcctttaaatggtattctaataagcgggttcgacaatataactcgaaaagtagaaaatggagccggctccctttcaacaatgaactattcaaattgaatattttgaagattggaaagtgatgttaaatag

SEQ ID NO: 3513 - DNA, 455 bp, Diabrotica virgifera
ttttaaaaccggtcagaatagcgctctctaagcgaactgaaatataggaaggttttggcttcgtgttgcaacgaaatgaaaattattcatttttatttttattcgataaattgttgttttaatacgatttctaactttttaacttattttcagacgtaactgtacctttctatgttcttggtacagactatgaaaattattctgtaggtttcgtctgttttgaacgtaatggtgtttttctaggtatgtaccgtttttaatattacctataatgtatatacaatcgaacccgcttattggaatagccttcgtgccaagcaaaagtattcctataaccgggatattctaataaccgatcattggtggctagtagaaacgtttcgggacctcaaatttctattccttaaaccgggatattcctttaagaggtattcttataagcgggtttgactgta

SEQ ID NO: 3514 - DNA, 470 bp, Diabrotica virgifera
gtcttaagactacaattgaatcgtttattgttgaaaggaggtaagtaccattttttactttttgagttttgttaaaaaatccctcctctctttctatatccacctcgaagcaaacacaggcattgtatggatatcgtttatacactgtgaaactacatttaacaccaggagatgcggatatagacagaaaggtttttttactacagtcgaacccgcttattggaatagccttcgtgccaagcaaaagtattcctataaccgggatattctaataaccgatcattggtggctagtagaaacgtttcgggacctcaaatttctattccttaaaccgggatattcctttaaatggtattctaataagcgggttcgacaatataactcgaaaagtagaaaatggagccggctccctttcaacaatgaactattcaaattgaatattttgaagattggaaagtgatgttaaatag

SEQ ID NO: 3515 - DNA, 378 bp, Diabrotica virgifera
gtcttaagactacaattgaatcgtttattgttgaaaggaggtaagtaccattttttactttttgagttttgttaaaaaatccctcctctctttctatatccacctcgaagcaaacacaggcattgtatggatatcgtttatacactgtgaaactacatttaacaccaggagatgcggatatagacagaaaggtttttttactacagtcgaacccgcttattggaatagccttcgtgccaagcaaaagtattcctataaccgggatattctaataaccgatcattggtggctagtagaaacgtttcgggacctcaaatttctattccttaaaccgggatattcctttaagaggtattcttataagcgggtttgactgta

SEQ ID NO: 3516 - DNA, 512 bp, Diabrotica virgifera
aatgataactgctggtcctgaaaacgatagtcttgattctaatgcaaaaaacctgtacctttttggtttgatttttggataaatttttatggatgcacacatatccccaataattacattttttaaaaaccggataaagaatagtaatgcccataaatttgttcccaaaagcaccaaaaattcaaaatattcgaaaagctttgtataacttttctcgcaatgcgtggttctgggattggcattgaaattagtggaaatttcaattgttttgatacatacaacatcttatactgatatgtctgctctctcatgttgtttgcacaggagcacaggaccgaccaacatggaaggcaatagtaaacgcggcaaagactctcgaaaagttataaatccattgatgatgatgatgactaaatatttttgacgttaaatttacaataaggaacaggtttttttgcattacaattaagattttcgttttcaagaccagcagttatcatcacgaataggca

SEQ ID NO: 3517 - DNA, 495 bp, Diabrotica virgifera
gaaatcccagacaaaaaaatccccaagtaaatatttgctacctaaaagttttccagtgaatttaaaaaaaaattatggttgcacagattctcaattacgtttttttttaaacccggatctcgaatagtaatgcccataaatttgttcccaaaagcaccaaaaattcaaaatattcgaaaagctttgtataacttttctcgcaatgcgtggttctgggattggcattgaaattagtggaaatttcaattgttttgatacatacaacatcttatactgatatgtctgctctctcatgttgtttgcacaggagcacaggaccgaccaacatggaaggcaatagtaaacgcggcaaagactctcgaaaagttataaatccattgatgatgatgatgactaaatatttttgacgttaaatttacaataaggaacaggtttttttgcattacaattaagattttcgttttcaagaccagcagttatcatcacgaataggca

SEQ ID NO: 3518 - DNA, 378 bp, Diabrotica virgifera
aatgataactgctggtcctgaaaacgatagtcttgattctaatgcaaaaaacctgtacctttttggtttgatttttggataaatttttatggatgcacacatatccccaataattacattttttaaaaaccggataaagaatagtaatgcccataaatttgttcccaaaagcaccaaaaattcaaaatattcgaaaagctttgtataacttttctcgcaatgcgtggttctgggattggcattgaaattagtggaaatttcaattgttttgatacatacaaaatcgtataccgatatatctgctctcatgcactaaggctgaaaaacatttgcatcgattgcactaacagaaaaactttcagaggactattcggcggc

SEQ ID NO: 3519 - DNA, 361 bp, Diabrotica virgifera
gaaatcccagacaaaaaaatccccaagtaaatatttgctacctaaaagttttccagtgaatttaaaaaaaaattatggttgcacagattctcaattacgtttttttttaaacccggatctcgaatagtaatgcccataaatttgttcccaaaagcaccaaaaattcaaaatattcgaaaagctttgtataacttttctcgcaatgcgtggttctgggattggcattgaaattagtggaaatttcaattgttttgatacatacaaaatcgtataccgatatatctgctctcatgcactaaggctgaaaaacatttgcatcgattgcactaacagaaaaactttcagaggactattcggcggc

SEQ ID NO: 3520 - DNA, 6807 bp, Diabrotica virgifera
aagaccaacttcacctccacgatggtgtgcggtggaagcagatccaagtggcttgtatgtagattcaggtccctaaactagtgatgggacattatgtcactactagtgattttaaaaatcactgtaactaccatttcttgataagttttataactgtgaccaataaacagatatttgtcattttctcacaaaatgtgtttatataatacgaatatttttggtgaatgtgatgatttgtcatatataataagtatacatggatgtcttttacgaaacgcattttgttgatattttatgcttttatatattgtagggtgaggttaattatactctaaaaaccatgcctattatgtcaaaatatacaacactaatcaaacaatcaattataacccgtatttaaccaaatttttgataattacaatcttatcgtataaatatgtaatttttaatttttcgagattgatgtggtacgaaaaacataaataaaattctttaaaattactcatttcaagagaaagcattcaacaaggctttgtgattttttgtctttgttagtattgcaaatgtattattataaattaatactgtaactactttttattgtgaatactgaggtcagttactgtttaaaatcactgttattaaaaaatcatgattactgttcatggcttaattcaaaaatcaccacgttcaccattgctgacctaaacaagccacctggatgctgaccgacgaagctctggcatacagtaatactgagatggtaccactactgccactacttatatcgctaacacatggtcaactctacccattttatcttttagatgcatctctcctacattccgaatcaagaaaaggtttttattaatctttttcccatttccagataaaatttttgatattcaatcatctagtagttgacaaattgaattaacttgaatttggtattgtttcttataatataactcttctttcagcatagatgaattcaattggtttaagttaaaggtgctaattgctatatcgtagctgcactttttttgctacatcatctataacacttatcatataaaatgtccttcgataatctaggatttatccagataaattagtgctttcttcaaccaatttttccttatttatgtgtaagcatagattttcatgcatctattagatgtatcactcagaataaagcaaacaaaaatttatccctcgttcatcctttttcccctaaacctaaatcccccaacacacaaggtaaaggtgtaattgtaccgtgcccatacctgcatggcagttgtgtgtctaaatagaactgtctcaaacggtcgactgggggcaccaggccacaccccctttcattttaggccttataccggcacagggagcgctgcaggtatgtactgattatttctcccgtactcgtgggaccaatatggaatcctatagaaaacaaaactattcaaccacaggggactcacagaagtacccaactaatacttatagtactacttataatatcgaggcttatcggaggactctggaagagaacaaacaaaaatctgataaaaaagatagcgaaaggtttgagggtcctcggcagagaatatctggggcacagaagaggaagcttagaaaaatgagggccgacggaatcgacacttctaagttcaaattaccacctagacctcaaagtaatgttccaagaaatgttggaactaatgatagaactatcacctcatcgggtacttctaatactcatagtactgctactacttatagtactagttataattttgaggcttataggcggactctggaagagaacaaaaatactcaggacgttatgcagactcattcgaaagataccaatctcgaggctcctcagaaaagaccatctgtgtcacaaagaagaaaactctggagaatgaggaaacaaggaattgatacttccaaggtcatatttcctcctaaacctcaaaagattactatagacaatgccgaaatcgcacaggccgttgaacagactgtgtttaacctccttcagaaaagaagacctaccacctcatcaagtgcttctaatacatccactgaggcttattggcggtctccaaaacagaacaagcccaccccatcgggttataaatatagtgagcatgtgacgcagactcattcgacagatactgatcggtcaaaattatctgggagtcagaggaggattcttcagagaatgaggtcagagggcattgacactaccaattttaaattgcctcctagacctcgaaataccccatacgcagcgtattatgccgaagtcacaaagggtcttaaacggactagagaaactactgaaaaggaattaacaaaaagaagcaaacctgcgcccataaagacagcagtcattcctagagaatatccagacaaaattgtggctgagaatgacgttggggcgatacaagatgccttaacgaaacttattgatgaagctccttctgctcctgtttatgaaaaaaaccgactcatggatgggtactatgggttaatatgtgctgacgaggagtcctttcgtatcaccaaggactatttggaagaaaacactccgtggaaggtagttaagactgaagaacttccaaaatccacaaaatacgtacgcatgttgatgtatcttccgaacactaagaatgatgatttgacggcacctttggcgcgacttgaaaaacaaaatcctggtctcaggaccaacctttggatgattctgagctctgaagcaactgctgatgaaggactgcatgtgagtcttcggatcgataaagagtctgaagaagtgcttaaacgacttgaatggaagccttacttccttttacagagagcgagttttaaaccgttggattaagtcaaaataaaacaatcctgcaactgcaggcggctaaaggaaaacctacttcatagatcaaaagttccggccctaaccatgagatggtgactaaaaaatatagaacaattttaataaaagtttcttgagtggagaagattcgaaaatccacaatactagaatgtctcagcaagactattgagtataaaaaccatcaagaagagaaagctagactatttcggacatgcaatgaaaggtcccaaatataggttgctacaaaatattatgcaaaggaaaatagcaggtcaacacagtacagaacgaaaatgaacttcatggttgaagaacttgtgacattggtacctatgctgttgctacaacctatggttttcccatttaggcccgggaccaacataaggtggaagaaattacaaaaaggtctagtggatgccccaaaaattaacaaagtgcaaattcaagatcgtacagatcaaaactgaataccaatgggttggttatgaattgtttcatctatatacccttctattgattctaaagaacaactttcagataaataattttttaaaattgagtcctctcagatattttgatttagttttgcttatttgcttcaatgtcgaatacaagcaacatgttggcttactgtctcgctaactattatcttgaagtccttacattcttgtatattttcttttcttgtcatcatttttttattggagaatggttttgtccacttttgcatgtaaaagttaaatcattcaatacttctttatcaattacagttcgctgacattattctatcactcgttcttggaccaagggatgtgtcacttttctaatcaacctaaagctgagtagggaaagaattaatcccaggggacgagttttgcaaggaccttgcacatccttaaacggtcccaagactgctgggtactcccaactagtgacaggtggccctattgaaacaacccagtggatataggctggaggtagtcgataaacaatccccatgccaagccgtgagacactgtggtgaaggcaacaaggcactagggtgagagtgtcgcgaacggttcctttggggcaccaggtcgcactccatcgtatttagaccttaccgccttggcatggtgaatctctcaaggctatggagaagaaagatctatgcaaggtgcaatggtacgatcttcgtacctaatgaacatgggaaagaatggtcaacaggatttttagtagactgacgatcagtaaccatggactcggacatgaacagatctatggatagtctgggattcgtcatttttggacaaaggggttttatgaacattcgcagtcgatcctgaatctgtattagagcttgagaaacttgaaatgtcaccctttttcggaatgggatattataacaaatcgctccacttaaacatgggaaacaaatatctagaatggtggaggaatacaccaagaaacacttcattttcaaattgcacctcgcaatttatttatattgattccgttcataaagaagacatttcattttttacacaattaagaacatcaaaatattgctctccttgcttgaccaattttagcaatttatagatgttctgatcaagattaccatttttcaatcattgcattatgcaagattctattcggcaatgtctgtgatatatagattcacgtttgaaaactgtttctggtgaaaaatcctctttttctgtgtcttaacagaatactatcaaaaacaatttattgagtctccctaaaatctgcaggtcacttttccatctccaaattcttacgaattgagacaaaatttgaacccattggaaaaaagattatggtacatttaagtactgatctacaaattatgtttctgtaagtgttgcctatatgagtacctttaacactttctcctgactcctgacatcttctcatgatcaaatccttaattccaagtcatgatactttcttcccacttacttttctttcttgattatctacagggatttaaactgcacaaattgggaagttaaactgatcttaaatcaaaagattaaggaaataaaattaaaaatatcaaatcattttgattgagatgtcatagaatgtataaaaaactggacatacatttgtaatgtattttataatgtaaatttaaaacttattctgtaatataagccgtatgttaaataaaaaaatataaactacccagtcgagcctaaaacaattagaagaaaaatgcctttgtggaatagaacactggaaaacctaaaaagaacaagtaaagggcctatcaaataaagaaagaaattggggaagtacaaaacatacagaaaaactcttgcagaatataactaagagacaagaagagcaaaaagagaatcttgggaaggattatttcatccagtgtaatacattaacattagctatgttgattatcccagttttcaatctagagctccaacagaaacctaagccatattgggtacccaaatttttcacgtagaacagtaaaatcttgcttcaacagaaatatttagagatatttggtactctaatgctacatcgaaaatgcagggggtaggagttttaccagaaacccaagatattgagctcatttgagagacatggaatcacagggcgtatgttaaaggaataccaaggtactcataattcatcgctgaagatgtcacaacagcagaagtggaaattctagctgagctctgcctgccttcttgaagataattcattattagagagggttgatagcctcatcaatataattgcttccttacaaaaatcaattgagaaattggatattatggatgtatattccaagcaaaattgaatataagaagagaggaattcccttccccaagatcttttcacaattgattttgaacgagtctttataaaaggtaatgaatggtggagtcgctgaggtagaaacctgagccttggctgaaaactgggttcaattttacttaattcgtatgtaaaatgttctcattgactaagttatgttaataatttaatcattttgtcacagattttatgttaaattagtttttttttttactttaggattaggtatactggtagtgtacaatctttgttaattctatgtaggggtgattccatttcaagtcactcaattttggatctccgatttttctgaaaattggtgtatagcatctgcggaatgtaaaaataagatatttaaggttgaattgtcttctgatgaaacttcgtacccttgtaaattgtaactttcctacaatatgtattcaatattggtcgatagataaacagaaagaagtttattgcagcggtgtttattacaccactggcctagataataacacatgttgggaatttctatatacaagcagcagttgggttatttattacttcgctaaaaacaggtaaagaaacatattcttcgattgcatttttccccgttataaccaatcctcgttatagaggtgttatagttcaataggaatatcatgaagcatttagcgtacctcgttataagcgaaacctcgtaatatccgttttcgttatagagagaattcactgtattatgtttttcattgatactttacgatagaaaatgcaaatttgtttatataaacaccaaatccctgtaaaatcgaataaaataacattttgagaaaaagaagaagagtttttgacctttgtcttatttttacgtcccgcataggctatacactaagtttcggaaaaatcgaagatccaaaagtttttgtccgattgatctgacatggaatgtaccgttattgtctgtaatttttgaatattttaaaatttacgtccatgtatatatatataatatttatagcaactgtaaaatattagtttcctagttcaataaaatttaatgt

SEQ ID NO: 3521 - DNA, 6281 bp, Diabrotica virgifera
aagaccaacttcacctccacgatggtgtgcggtggaagcagatccaagtggcttgtatgtagattcaggtccctaaactagtgatgggacattatgtcactactagtgattttaaaaatcactgtaactaccatttcttgataagttttataactgtgaccaataaacagatatttgtcattttctcacaaaatgtgtttatataatacgaatatttttggtgaatgtgatgatttgtcatatataataagtatacatggatgtcttttacgaaacgcattttgttgatattttatgcttttatatattgtagggtgaggttaattatactctaaaaaccatgcctattatgtcaaaatatacaacactaatcaaacaatcaattataacccgtatttaaccaaatttttgataattacaatcttatcgtataaatatgtaatttttaatttttcgagattgatgtggtacgaaaaacataaataaaattctttaaaattactcatttcaagagaaagcattcaacaaggctttgtgattttttgtctttgttagtattgcaaatgtattattataaattaatactgtaactactttttattgtgaatactgaggtcagttactgtttaaaatcactgttattaaaaaatcatgattactgttcatggcttaattcaaaaatcaccacgttcaccattgctgacctaaacaagccacctggatgctgaccgacgaagctctggcatacagtaatactgagatggtaccactactgccactacttatatcgctaacacatggtcaactctacccattttatcttttagatgcatctctcctacattccgaatcaagaaaaggtttttattaatctttttcccatttccagataaaatttttgatattcaatcatctagtagttgacaaattgaattaacttgaatttggtattgtttcttataatataactcttctttcagcatagatgaattcaattggtttaagttaaaggtgctaattgctatatcgtagctgcactttttttgctacatcatctataacacttatcatataaaatgtccttcgataatctaggatttatccagataaattagtgctttcttcaaccaatttttccttatttatgtgtaagcatagattttcatgcatctattagatgtatcactcagaataaagcaaacaaaaatttatccctcgttcatcctttttcccctaaacctaaatcccccaacacacaaggtaaaggtgtaattgtaccgtgcccatacctgcatggcagttgtgtgtctaaatagaactgtctcaaacggtcgactgggggcaccaggccacaccccctttcattttaggccttataccggcacagggagcgctgcaggtatgtactgattatttctcccgtactcgtgggaccaatatggaatcctatagaaaacaaaactattcaaccacaggggactcacagaagtacccaactaatacttatagtactacttataatatcgaggcttatcggaggactctggaagagaacaaacaaaaatctgataaaaaagatagcgaaaggtttgagggtcctcggcagagaatatctggggcacagaagaggaagcttagaaaaatgagggccgacggaatcgacacttctaagttcaaattaccacctagacctcaaagtaatgttccaagaaatgttggaactaatgatagaactatcacctcatcgggtacttctaatactcatagtactgctactacttatagtactagttataattttgaggcttataggcggactctggaagagaacaaaaatactcaggacgttatgcagactcattcgaaagataccaatctcgaggctcctcagaaaagaccatctgtgtcacaaagaagaaaactctggagaatgaggaaacaaggaattgatacttccaaggtcatatttcctcctaaacctcaaaagattactatagacaatgccgaaatcgcacaggccgttgaacagactgtgtttaacctccttcagaaaagaagacctaccacctcatcaagtgcttctaatacatccactgaggcttattggcggtctccaaaacagaacaagcccaccccatcgggttataaatatagtgagcatgtgacgcagactcattcgacagatactgatcggtcaaaattatctgggagtcagaggaggattcttcagagaatgaggtcagagggcattgacactaccaattttaaattgcctcctagacctcgaaataccccatacgcagcgtattatgccgaagtcacaaagggtcttaaacggactagagaaactactgaaaaggaattaacaaaaagaagcaaacctgcgcccataaagacagcagtcattcctagagaatatccagacaaaattgtggctgagaatgacgttggggcgatacaagatgccttaacgaaacttattgatgaagctccttctgctcctgtttatgaaaaaaaccgactcatggatgggtactatgggttaatatgtgctgacgaggagtcctttcgtatcaccaaggactatttggaagaaaacactccgtggaaggtagttaagactgaagaacttccaaaatccacaaaatacgtacgcatgttgatgtatcttccgaacactaagaatgatgatttgacggcacctttggcgcgacttgaaaaacaaaatcctggtctcaggaccaacctttggatgattctgagctctgaagcaactgctgatgaaggactgcatgtgagtcttcggatcgataaagagtctgaagaagtgcttaaacgacttgaatggaagccttacttccttttacagagagcgagttttaaaccgttggattaagtcaaaataaaacaatcctgcaactgcaggcggctaaaggaaaacctacttcatagatcaaaagttccggccctaaccatgagatggtgactaaaaaatatagaacaattttaataaaagtttcttgagtggagaagattcgaaaatccacaatactagaatgtctcagcaagactattgagtataaaaaccatcaagaagagaaagctagactatttcggacatgcaatgaaaggtcccaaatataggttgctacaaaatattatgcaaaggaaaatagcaggtcaacacagtacagaacgaaaatgaacttcatggttgaagaacttgtgacattggtacctatgctgttgctacaacctatggttttcccatttaggcccgggaccaacataaggtggaagaaattacaaaaaggtctagtggatgccccaaaaattaacaaagtgcaaattcaagatcgtacagatcaaaactgaataccaatgggttggttatgaattgtttcatctatatacccttctattgattctaaagaacaactttcagataaataattttttaaaattgagtcctctcagatattttgatttagttttgcttatttgcttcaatgtcgaatacaagcaacatgttggcttactgtctcgctaactattatcttgaagtccttacattcttgtatattttcttttcttgtcatcatttttttattggagaatggttttgtccacttttgcatgtaaaagttaaatcattcaatacttctttatcaattacagttcgctgacattattctatcactcgttcttggaccaagggatgtgtcacttttctaatcaacctaaagctgagtagggaaagaattaatcccaggggacgagttttgcaaggaccttgcacatccttaaacggtcccaagactgctgggtactcccaactagtgacaggtggccctattgaaacaacccagtggatataggctggaggtagtcgataaacaatccccatgccaagccgtgagacactgtggtgaaggcaacaaggcactagggtgagagtgtcgcgaacggttcctttggggcaccaggtcgcactccatcgtatttagaccttaccgccttggcatggtgaatctctcaaggctatggagaagaaagatctatgcaaggtgcaatggtacgatcttcgtacctaatgaacatgggaaagaatggtcaacaggatttttagtagactgacgatcagtaaccatggactcggacatgaacagatctatggatagtctgggattcgtcatttttggacaaaggggttttatgaacattcgcagtcgatcctgaatctgtattagagcttgagaaacttgaaatgtcaccctttttcggaatgggatattataacaaatcgctccacttaaacatgggaaacaaatatctagaatggtggaggaatacaccaagaaacacttcattttcaaattgcacctcgcaatttatttatattgattccgttcataaagaagacatttcattttttacacaattaagaacatcaaaatattgctctccttgcttgaccaattttagcaatttatagatgttctgatcaagattaccatttttcaatcattgcattatgcaagattctattcggcaatgtctgtgatatatagattcacgtttgaaaactgtttctggtgaaaaatcctctttttctgtgtcttaacagaatactatcaaaaacaatttattgagtctccctaaaatctgcaggtcacttttccatctccaaattcttacgaattgagacaaaatttgaacccattggaaaaaagattatggtacatttaagtactgatctacaaattatgtttctgtaagtgttgcctatatgagtacctttaacactttctcctgactcctgacatcttctcatgatcaaatccttaattccaagtcatgatactttcttcccacttacttttctttcttgattatctacagggatttaaactgcacaaattgggaagttaaactgatcttaaatcaaaagattaaggaaataaaattaaaaatatcaaatcattttgattgagatgtcatagaatgtataaaaaactggacatacatttgtaatgtattttataatgtaaatttaaaacttattctgtaatataagccgtatgttaaataaaaaaatataaactacccagtcgagcctaaaacaattagaagaaaaatgcctttgtggaatagaacactggaaaacctaaaaagaacaagtaaagggcctatcaaataaagaaagaaattggggaagtacaaaacatacagaaaaactcttgcagaatataactaagagacaagaagagcaaaaagagaatcttgggaaggattatttcatccagtgtaatacattaacattagctatgttgattatcccagttttcaatctagagctccaacagaaacctaagccatattgggtacccaaatttttcacgtagaacagtaaaatcttgcttcaacagaaatatttagagatatttggtactctaatgctacatcgaaaatgcagggggtaggagttttaccagaaacccaagatattgagctcatttgagagacatggaatcacagggcgtatgttaaaggaataccaaggtactcataattcatcgctgaagatgtcacaacagcagaagtggaaattctagctgagctctgcctgccttcttgaagataattcattattagagagggttgatagcctcatcaatataattgcttccttacaaaaatcaattgagaaattggatattatggatgtatattccaagcaaaattgaatataagaagagaggaattcccttccccaagatcttttcacaattgattttgaacgagtctttataaaaggtaatgaatggtggagtcgctgaggtagaaacctgagccttggctgaaaactgggttcaattttacttaattcgtatgtaaaatgttctcattgactgagggccggttgttcgagagctaatcaacagtgatcattatcaaatgtttaattgctgtcaccaactgtcaatgtcaactttgtttgggttgctgaaaacataatatgaaattacttaatcaattatgttaataattgttatgtaattgattaactaatctcataattttaatcaattgtgttttcagcaacccaataaaagttgacattgacagttttggtgacagtattgaatatttgatagtgatcactgttgattggcgttcgaacaaccggccctaagttatgttaataatttaatcattttgtcacagatttttatgttaaatttagtttttttttttacttaggattaggtatactggta

SEQ ID NO: 3522 - DNA, 6194 bp, Diabrotica virgifera
aagaccaacttcacctccacgatggtgtgcggtggaagcagatccaagtggcttgtatgtagattcaggtccctaaactagtgatgggacattatgtcactactagtgattttaaaaatcactgtaactaccatttcttgataagttttataactgtgaccaataaacagatatttgtcattttctcacaaaatgtgtttatataatacgaatatttttggtgaatgtgatgatttgtcatatataataagtatacatggatgtcttttacgaaacgcattttgttgatattttatgcttttatatattgtagggtgaggttaattatactctaaaaaccatgcctattatgtcaaaatatacaacactaatcaaacaatcaattataacccgtatttaaccaaatttttgataattacaatcttatcgtataaatatgtaatttttaatttttcgagattgatgtggtacgaaaaacataaataaaattctttaaaattactcatttcaagagaaagcattcaacaaggctttgtgattttttgtctttgttagtattgcaaatgtattattataaattaatactgtaactactttttattgtgaatactgaggtcagttactgtttaaaatcactgttattaaaaaatcatgattactgttcatggcttaattcaaaaatcaccacgttcaccattgctgacctaaacaagccacctggatgctgaccgacgaagctctggcatacagtaatactgagatggtaccactactgccactacttatatcgctaacacatggtcaactctacccattttatcttttagatgcatctctcctacattccgaatcaagaaaaggtttttattaatctttttcccatttccagataaaatttttgatattcaatcatctagtagttgacaaattgaattaacttgaatttggtattgtttcttataatataactcttctttcagcatagatgaattcaattggtttaagttaaaggtgctaattgctatatcgtagctgcactttttttgctacatcatctataacacttatcatataaaatgtccttcgataatctaggatttatccagataaattagtgctttcttcaaccaatttttccttatttatgtgtaagcatagattttcatgcatctattagatgtatcactcagaataaagcaaacaaaaatttatccctcgttcatcctttttcccctaaacctaaatcccccaacacacaaggtaaaggtgtaattgtaccgtgcccatacctgcatggcagttgtgtgtctaaatagaactgtctcaaacggtcgactgggggcaccaggccacaccccctttcattttaggccttataccggcacagggagcgctgcaggtatgtactgattatttctcccgtactcgtgggaccaatatggaatcctatagaaaacaaaactattcaaccacaggggactcacagaagtacccaactaatacttatagtactacttataatatcgaggcttatcggaggactctggaagagaacaaacaaaaatctgataaaaaagatagcgaaaggtttgagggtcctcggcagagaatatctggggcacagaagaggaagcttagaaaaatgagggccgacggaatcgacacttctaagttcaaattaccacctagacctcaaagtaatgttccaagaaatgttggaactaatgatagaactatcacctcatcgggtacttctaatactcatagtactgctactacttatagtactagttataattttgaggcttataggcggactctggaagagaacaaaaatactcaggacgttatgcagactcattcgaaagataccaatctcgaggctcctcagaaaagaccatctgtgtcacaaagaagaaaactctggagaatgaggaaacaaggaattgatacttccaaggtcatatttcctcctaaacctcaaaagattactatagacaatgccgaaatcgcacaggccgttgaacagactgtgtttaacctccttcagaaaagaagacctaccacctcatcaagtgcttctaatacatccactgaggcttattggcggtctccaaaacagaacaagcccaccccatcgggttataaatatagtgagcatgtgacgcagactcattcgacagatactgatcggtcaaaattatctgggagtcagaggaggattcttcagagaatgaggtcagagggcattgacactaccaattttaaattgcctcctagacctcgaaataccccatacgcagcgtattatgccgaagtcacaaagggtcttaaacggactagagaaactactgaaaaggaattaacaaaaagaagcaaacctgcgcccataaagacagcagtcattcctagagaatatccagacaaaattgtggctgagaatgacgttggggcgatacaagatgccttaacgaaacttattgatgaagctccttctgctcctgtttatgaaaaaaaccgactcatggatgggtactatgggttaatatgtgctgacgaggagtcctttcgtatcaccaaggactatttggaagaaaacactccgtggaaggtagttaagactgaagaacttccaaaatccacaaaatacgtacgcatgttgatgtatcttccgaacactaagaatgatgatttgacggcacctttggcgcgacttgaaaaacaaaatcctggtctcaggaccaacctttggatgattctgagctctgaagcaactgctgatgaaggactgcatgtgagtcttcggatcgataaagagtctgaagaagtgcttaaacgacttgaatggaagccttacttccttttacagagagcgagttttaaaccgttggattaagtcaaaataaaacaatcctgcaactgcaggcggctaaaggaaaacctacttcatagatcaaaagttccggccctaaccatgagatggtgactaaaaaatatagaacaattttaataaaagtttcttgagtggagaagattcgaaaatccacaatactagaatgtctcagcaagactattgagtataaaaaccatcaagaagagaaagctagactatttcggacatgcaatgaaaggtcccaaatataggttgctacaaaatattatgcaaaggaaaatagcaggtcaacacagtacagaacgaaaatgaacttcatggttgaagaacttgtgacattggtacctatgctgttgctacaacctatggttttcccatttaggcccgggaccaacataaggtggaagaaattacaaaaaggtctagtggatgccccaaaaattaacaaagtgcaaattcaagatcgtacagatcaaaactgaataccaatgggttggttatgaattgtttcatctatatacccttctattgattctaaagaacaactttcagataaataattttttaaaattgagtcctctcagatattttgatttagttttgcttatttgcttcaatgtcgaatacaagcaacatgttggcttactgtctcgctaactattatcttgaagtccttacattcttgtatattttcttttcttgtcatcatttttttattggagaatggttttgtccacttttgcatgtaaaagttaaatcattcaatacttctttatcaattacagttcgctgacattattctatcactcgttcttggaccaagggatgtgtcacttttctaatcaacctaaagctgagtagggaaagaattaatcccaggggacgagttttgcaaggaccttgcacatccttaaacggtcccaagactgctgggtactcccaactagtgacaggtggccctattgaaacaacccagtggatataggctggaggtagtcgataaacaatccccatgccaagccgtgagacactgtggtgaaggcaacaaggcactagggtgagagtgtcgcgaacggttcctttggggcaccaggtcgcactccatcgtatttagaccttaccgccttggcatggtgaatctctcaaggctatggagaagaaagatctatgcaaggtgcaatggtacgatcttcgtacctaatgaacatgggaaagaatggtcaacaggatttttagtagactgacgatcagtaaccatggactcggacatgaacagatctatggatagtctgggattcgtcatttttggacaaaggggttttatgaacattcgcagtcgatcctgaatctgtattagagcttgagaaacttgaaatgtcaccctttttcggaatgggatattataacaaatcgctccacttaaacatgggaaacaaatatctagaatggtggaggaatacaccaagaaacacttcattttcaaattgcacctcgcaatttatttatattgattccgttcataaagaagacatttcattttttacacaattaagaacatcaaaatattgctctccttgcttgaccaattttagcaatttatagatgttctgatcaagattaccatttttcaatcattgcattatgcaagattctattcggcaatgtctgtgatatatagattcacgtttgaaaactgtttctggtgaaaaatcctctttttctgtgtcttaacagaatactatcaaaaacaatttattgagtctccctaaaatctgcaggtcacttttccatctccaaattcttacgaattgagacaaaatttgaacccattggaaaaaagattatggtacatttaagtactgatctacaaattatgtttctgtaagtgttgcctatatgagtacctttaacactttctcctgactcctgacatcttctcatgatcaaatccttaattccaagtcatgatactttcttcccacttacttttctttcttgattatctacagggatttaaactgcacaaattgggaagttaaactgatcttaaatcaaaagattaaggaaataaaattaaaaatatcaaatcattttgattgagatgtcatagaatgtataaaaaactggacatacatttgtaatgtattttataatgtaaatttaaaacttattctgtaatataagccgtatgttaaataaaaaaatataaactacccagtcgagcctaaaacaattagaagaaaaatgcctttgtggaatagaacactggaaaacctaaaaagaacaagtaaagggcctatcaaataaagaaagaaattggggaagtacaaaacatacagaaaaactcttgcagaatataactaagagacaagaagagcaaaaagagaatcttgggaaggattatttcatccagtgtaatacattaacattagctatgttgattatcccagttttcaatctagagctccaacagaaacctaagccatattgggtacccaaatttttcacgtagaacagtaaaatcttgcttcaacagaaatatttagagatatttggtactctaatgctacatcgaaaatgcagggggtaggagttttaccagaaacccaagatattgagctcatttgagagacatggaatcacagggcgtatgttaaaggaataccaaggtactcataattcatcgctgaagatgtcacaacagcagaagtggaaattctagctgagctctgcctgccttcttgaagataattcattattagagagggttgatagcctcatcaatataattgcttccttacaaaaatcaattgagaaattggatattatggatgtatattccaagcaaaattgaatataagaagagaggaattcccttccccaagatcttttcacaattgattttgaacgagtctttataaaaggtaatgaatggtggagtcgctgaggtagaaacctgagccttggctgaaaactgggttcaattttacttaattcgtatgtaaaatgttctcattgactgagggccggttgttcgagagctaatcaacagtgatcattatcaaatgtttaattgctgtcaccaactgtcaatgtcaactttgtttgggttgctgaaaacataatatgaaattacttaatcaattatgttaataattgttatgtaattgattaactaatctcataattttaatcaattatgttttcagcaacccaataaaagttgacattgacagttttggtgacagcaattaaatacttgatagtgatcattgttgattagcgttcgaacaaccggccc

SEQ ID NO: 3523 - DNA, 5358 bp, Diabrotica virgifera
  SmartBlast Evalue=5E-68; Info=Protein phosphatase 1E (PP2C domain containing) n=3 Tax=Danio rerio RepID=B3DGT0_DANRE
accgggaccccatattgcatcactagcgtgtgtgccatcaaaaacacacgccgacgaatggaagatcgacacgtagttatacatgatttgaatacgatgttcaacattcaggaagcaagtccgtccagttactacgcagtattcgatggccacgcgggccacgacgctgccgcctatagctcagctcatttgcatcagttccttgccgaaaataaatgttttgcttcaaatccgaaacaagccttgctagatgccttttgtaaaacagatgctttatttattgataagtgtaaagttgaacacttttccagtggtgccactgccgttgttgcattattacgtcccaaagagaaaatgttatatgtagcttgggcgggagactctcaagctgtattagtgagtagaagaagggcgctacaaattgtaaatccacacaagccttgcagagaggacgaacgagaacgaatagaaaaacgtggaggttgtgttatattgtggggtacgtggagagttaatggtcagttagcagtatccagagcaataggtgatccagagtacaaaccttttgtcattgccgttccagatatccaggaaataatgttagataatgacgatttcttagtattagcttgtgacggtttatgggatattatttcagaggggactgttgccaggaccgtttataatttagtcacagaaaatccagacgacacagacagaatcagtcagcgcttggtccatttagcgaaagaacaaggctcgaccgataacatctctgtgatagtggtgtttttacgagaaccctctaaaatagcagcggaagcccattgggcgaaccgcaatctagttcctgtaaccatggaggcgagcctcgacaattcaaataaccccttcggcatgtccaacggcgccaacactgacaatatcatcacgcaaaaatcagacggcctattattgaaccttacggacaactataaacaaaacggtaccgacttacaaacttctgacttcttttcaaccgaaaagtcaaatggaaaacgatcggcctcagattttgatgacgaggatttcggacctgaaacagatgttgatgctttagacgatcttttatcaccagggcctaaagaatctattgcaaagaacttctcggacgctttttcaccatctccaaacaacaatctcttaggagatgaaggtgtatttaacccattcatggaacaccaagaaaaagcagcactcgaaatggagaagagcttgcggaaacgagaaagcagagacgaattcgaagaagatgagagattggcaagggaagaaacgcctactccacctgcagatgccgttcacgatgttagtgggctagtggaaaaccaagctgatagcgaatccgaagacgagtggaattacttcaaaggcgacgaagcgaataaagaaaacgtttcgccgcagcaagagaaagaggttgctgacatccccgaagaggacgatacaatgtctcagctgaacccgaatgctgcagaatttgttcctgtatcaccgacgaggagtgtcccatctcccacctgccgcatgctaatgaacgaccaaatcgtatcacaatcgccttgcaaagcgaaagatgtagatatcaacgtgcctagtcctagagatttcgaaaaggaagtgaagtccagacctagtgaagtcgataccaatggtcatgaaaacatggagaacatcttaaatggtaaaaatatcgacgaaatccccgagttccttccagaaaactccacaccgaaaaaggttttccaaaacgatgaatttcactttggacccaatgctgctccttttactcccaaacttttagaccaatctgaagctttgtcgactaaggccgtttatggcgatgaatcaacggccactcttgagagtacttttaataactcaaaccaagacttgcatatgttaaataaagaatcagatcctatgtccatgtccttctatgcagataagggtgaatctaatcccttcgatttaaataaagttcaactactacctgataatctcgatgatttcttgaacaaacctgataacgataatttcaatgaaaccatctcggatttacctgaacacacacatttagatgagcgcaaaaataacgatgacgcaatacaaattacggatttagataaacaatcatatgatgatgaaaaagaacttgcctcacctttagaaccggaaagagaactattaactacagaggagactgattttgccaaaactcctgaacctactcatgaaaatttattgggagaattttgttgcatacccaaaaaagaagtaccagcagacctaccggcagatgtagaacttatttcacccgttccagccgaagctattgaagttagtgatctattaaaatctgatgtagtgactttgccagctgacgtcgagttggtaccggcagatatcttaaataaatcgtctgcccacgatgatttgcctagtaatgagtccccatcaacagatccactttctgaacctattagtcacagtcctcaaccggcactggaggagtttgcacgtgtagaatcagcagtaagtgacgatttaggcatttctgaaaggcctatttcacctgatcttcaaaaagaactgctagcaagtcctttacctgcagctctttcaccagaaccacacaaagagactcttgcaagtccttctccaagtcctctttcgccagaaccgcacaaagaagctcttagtccctctccaagtcctctttcgccagagccgcacaatgaagctcttagtccttctccaagtcctatttcgccagaaccgcaaaaagaagatcttggaaatccttcccctagtccgctttctccagaaccacaacaaggcacgcttgagcatgcttctccaattcctctagtgccagaaactcaaaagggagacattgaattttcttcagaaccgtttagtggagtacaagcagttagtgcttccccagtcccggcactcaacaaagaagatttacaggcaagttctcctcatcctctatcaccagaacctcaagtacatgacgtggctagttcatctccagttcctaatttgttgcctccatctcccaaacctgtttgtagacttccactagaattatatcaaggtttggaggaagcgaaatctcccgaatgtgatagttcgcatcctgaaccaaaaccagcttcgccactactatatacagaagccaaatctcccgatttcggtaaatcagagaaaattgatttggccattactcccgaaccaataccagaacacttcaaactcgattatcctgtaggtgagtcaaaatcttctgtttgtgatttatcagaacctaaatcaccaatacaagaagtattactacacgccgattctaccgaagaaaaattattagacgaagcccaacaacgattcgaagacttatgtcaccctatagaatctcctgaggatgtcacttcttctgttaaggacgatttatcatctccagtacaggatcttcagagtaaatcacctgttggagatcaagtaattgatgatagttttgttcaagaagctgttgttgaagttcatgcttccaaagaatctgaggatcagcaacctcctttgatagaaccagaaattatagagccaattgctgcaaatatcaccgatttgccggagttggtaatgcctcctccaagaatgtgtgtctacccattgaagacacaagaaattccacttgacgtaaagactgaaactatttctccagaattcgccgaaccgacgatagtgacgccgtccgaagagagtaaagcggacgatttggtttcatcaacattagatgaagccgtcaaagaaccgtcgacggaagaacagaaaatggcagaagagttacaaaaagaaatgattggtattggtgttgcttctgcagtggctgctggagctgctatcacggctgttgtatcagcaacaaaggtggaagacaagaagaagtctccaagtgcttctgctaaaaagcctgcaagtcctaaaacaacgacagccaacaagagtccagctgttgcttctaaaactacatcaaaactgaccccagcggcacccaagcagactacaagtagaacatccgccacaaaggctacaacaccaaagactggtttgactaaaccacctgcgactactgcatccgctcccaaacctagtccgagaaccgcattatctaaaccacgaacaacacctacagcaactgcaaaaacagctccaccaaaaccggcagacaaattggcaaatggtgatgtcaagagtacaattaggagcactttacatgttaaaaagacagtttcagaaacaaatggcaccacaaagacttcaacttcaaggccagctaccgcgtctaaggtaagcttgactcaaaaaccggctgccaaaccagctactgcagctccaccctctaaaacaaccattccttcacgttcggcaccattaactactagatccgctccgactgcaaagagaccgacgactttaacgagcaaaaccaccacttcaaccttgtctgctgacaaaacgtcaaccacaactaagccaagcttgacaaagacttcaccaaaatcgaccaatgttcctccaaagacgacctcaaccttgtcaaaaccaagagttccactaacaagaactgttgccaaggcacctccagacacagaaaagcaaatcaaagaaagcgccaacaaaataacggcctcacgttcccttactagcgctagaactgttggatctgcttctactgtgagaagtaccctagcttccactcgcagagttgaaagcaaggtcagtagcacacgaacgacaactgtaacgaaaacgagcacgaccacaatgaaatcgaccacagccaaaaagccagccgaactaataaaaggccccgtaaccaaaaccaaaacaaccaaaatagaaaaacctaaagaaaatggaatctccaccgtagtaacggaagaaataaccgtagtcaataacaccaacgccgtcattgacaaccagatcgatagtcaacctgaattgatgaaagacaattccccgatcgataacaaactacttattgagactcctcaacttgttgaaactaacgcagactgaaagagtaataattaaaaaaaaacggtttattattatttacttagcttatatttaatattacgaaataactgttatatttaaaattttttatataccttttatgccccttattataaactgtttttcatggcggtgtcaagtatgtgaagcatttctgaaaaaaattctgatttttatattgtggtccggctaaaagatatagaatactgcaaaaatggcgatttttct

SEQ ID NO: 3524 - DNA, 4902 bp, Diabrotica virgifera
gtcagatcccacgaattcaccgtttttagaggcctcgaacctcgtacagtacgcaacaacacactctcagtgtacttgcacgagagtgtatacagctacggttttgtttagtcggtgaaaaacccagaaatcattttgcgccggctttttgttagtggctaaaagtttggtttgtgttgtgtgaatttttgagtgattacgaccacttgggctaccaaggacttttgcttcttaaactacaagttttaagacgacacagacagaatcagtcagcgcttggtccatttagcgaaagaacaaggctcgaccgataacatctctgtgatagtggtgtttttacgagaaccctctaaaatagcagcggaagcccattgggcgaaccgcaatctagttcctgtaaccatggaggcgagcctcgacaattcaaataaccccttcggcatgtccaacggcgccaacactgacaatatcatcacgcaaaaatcagacggcctattattgaaccttacggacaactataaacaaaacggtaccgacttacaaacttctgacttcttttcaaccgaaaagtcaaatggaaaacgatcggcctcagattttgatgacgaggatttcggacctgaaacagatgttgatgctttagacgatcttttatcaccagggcctaaagaatctattgcaaagaacttctcggacgctttttcaccatctccaaacaacaatctcttaggagatgaaggtgtatttaacccattcatggaacaccaagaaaaagcagcactcgaaatggagaagagcttgcggaaacgagaaagcagagacgaattcgaagaagatgagagattggcaagggaagaaacgcctactccacctgcagatgccgttcacgatgttagtgggctagtggaaaaccaagctgatagcgaatccgaagacgagtggaattacttcaaaggcgacgaagcgaataaagaaaacgtttcgccgcagcaagagaaagaggttgctgacatccccgaagaggacgatacaatgtctcagctgaacccgaatgctgcagaatttgttcctgtatcaccgacgaggagtgtcccatctcccacctgccgcatgctaatgaacgaccaaatcgtatcacaatcgccttgcaaagcgaaagatgtagatatcaacgtgcctagtcctagagatttcgaaaaggaagtgaagtccagacctagtgaagtcgataccaatggtcatgaaaacatggagaacatcttaaatggtaaaaatatcgacgaaatccccgagttccttccagaaaactccacaccgaaaaaggttttccaaaacgatgaatttcactttggacccaatgctgctccttttactcccaaacttttagaccaatctgaagctttgtcgactaaggccgtttatggcgatgaatcaacggccactcttgagagtacttttaataactcaaaccaagacttgcatatgttaaataaagaatcagatcctatgtccatgtccttctatgcagataagggtgaatctaatcccttcgatttaaataaagttcaactactacctgataatctcgatgatttcttgaacaaacctgataacgataatttcaatgaaaccatctcggatttacctgaacacacacatttagatgagcgcaaaaataacgatgacgcaatacaaattacggatttagataaacaatcatatgatgatgaaaaagaacttgcctcacctttagaaccggaaagagaactattaactacagaggagactgattttgccaaaactcctgaacctactcatgaaaatttattgggagaattttgttgcatacccaaaaaagaagtaccagcagacctaccggcagatgtagaacttatttcacccgttccagccgaagctattgaagttagtgatctattaaaatctgatgtagtgactttgccagctgacgtcgagttggtaccggcagatatcttaaataaatcgtctgcccacgatgatttgcctagtaatgagtccccatcaacagatccactttctgaacctattagtcacagtcctcaaccggcactggaggagtttgcacgtgtagaatcagcagtaagtgacgatttaggcatttctgaaaggcctatttcacctgatcttcaaaaagaactgctagcaagtcctttacctgcagctctttcaccagaaccacacaaagagactcttgcaagtccttctccaagtcctctttcgccagaaccgcacaaagaagctcttagtccctctccaagtcctctttcgccagagccgcacaatgaagctcttagtccttctccaagtcctatttcgccagaaccgcaaaaagaagatcttggaaatccttcccctagtccgctttctccagaaccacaacaaggcacgcttgagcatgcttctccaattcctctagtgccagaaactcaaaagggagacattgaattttcttcagaaccgtttagtggagtacaagcagttagtgcttccccagtcccggcactcaacaaagaagatttacaggcaagttctcctcatcctctatcaccagaacctcaagtacatgacgtggctagttcatctccagttcctaatttgttgcctccatctcccaaacctgtttgtagacttccactagaattatatcaaggtttggaggaagcgaaatctcccgaatgtgatagttcgcatcctgaaccaaaaccagcttcgccactactatatacagaagccaaatctcccgatttcggtaaatcagagaaaattgatttggccattactcccgaaccaataccagaacacttcaaactcgattatcctgtaggtgagtcaaaatcttctgtttgtgatttatcagaacctaaatcaccaatacaagaagtattactacacgccgattctaccgaagaaaaattattagacgaagcccaacaacgattcgaagacttatgtcaccctatagaatctcctgaggatgtcacttcttctgttaaggacgatttatcatctccagtacaggatcttcagagtaaatcacctgttggagatcaagtaattgatgatagttttgttcaagaagctgttgttgaagttcatgcttccaaagaatctgaggatcagcaacctcctttgatagaaccagaaattatagagccaattgctgcaaatatcaccgatttgccggagttggtaatgcctcctccaagaatgtgtgtctacccattgaagacacaagaaattccacttgacgtaaagactgaaactatttctccagaattcgccgaaccgacgatagtgacgccgtccgaagagagtaaagcggacgatttggtttcatcaacattagatgaagccgtcaaagaaccgtcgacggaagaacagaaaatggcagaagagttacaaaaagaaatgattggtattggtgttgcttctgcagtggctgctggagctgctatcacggctgttgtatcagcaacaaaggtggaagacaagaagaagtctccaagtgcttctgctaaaaagcctgcaagtcctaaaacaacgacagccaacaagagtccagctgttgcttctaaaactacatcaaaactgaccccagcggcacccaagcagactacaagtagaacatccgccacaaaggctacaacaccaaagactggtttgactaaaccacctgcgactactgcatccgctcccaaacctagtccgagaaccgcattatctaaaccacgaacaacacctacagcaactgcaaaaacagctccaccaaaaccggcagacaaattggcaaatggtgatgtcaagagtacaattaggagcactttacatgttaaaaagacagtttcagaaacaaatggcaccacaaagacttcaacttcaaggccagctaccgcgtctaaggtaagcttgactcaaaaaccggctgccaaaccagctactgcagctccaccctctaaaacaaccattccttcacgttcggcaccattaactactagatccgctccgactgcaaagagaccgacgactttaacgagcaaaaccaccacttcaaccttgtctgctgacaaaacgtcaaccacaactaagccaagcttgacaaagacttcaccaaaatcgaccaatgttcctccaaagacgacctcaaccttgtcaaaaccaagagttccactaacaagaactgttgccaaggcacctccagacacagaaaagcaaatcaaagaaagcgccaacaaaataacggcctcacgttcccttactagcgctagaactgttggatctgcttctactgtgagaagtaccctagcttccactcgcagagttgaaagcaaggtcagtagcacacgaacgacaactgtaacgaaaacgagcacgaccacaatgaaatcgaccacagccaaaaagccagccgaactaataaaaggccccgtaaccaaaaccaaaacaaccaaaatagaaaaacctaaagaaaatggaatctccaccgtagtaacggaagaaataaccgtagtcaataacaccaacgccgtcattgacaaccagatcgatagtcaacctgaattgatgaaagacaattccccgatcgataacaaactacttattgagactcctcaacttgttgaaactaacgcagactgaaagagtaataattaaaaaaaaacggtttattattatttacttagcttatatttaatattacgaaataactgttatatttaaaattttttatataccttttatgccccttattataaactgtttttcatggcggtgtcaagtatgtgaagcatttctgaaaaaaattctgatttttatattgtggtccggctaaaagatatagaatactgcaaaaatggcgatttttct

SEQ ID NO: 3525 - DNA, 4156 bp, Diabrotica virgifera
ggttttaacttttaacaatttaacgttcttcttatgctttcaagtgcctctattttaacaatttgtatggttttttaattcagtgtcctgtgatatattttatagttgtgtggcagcttttttctaccgagagaaagttcacgatgttagtgggctagtggaaaaccaagctgatagcgaatccgaagacgagtggaattacttcaaaggcgacgaagcgaataaagaaaacgtttcgccgcagcaagagaaagaggttgctgacatccccgaagaggacgatacaatgtctcagctgaacccgaatgctgcagaatttgttcctgtatcaccgacgaggagtgtcccatctcccacctgccgcatgctaatgaacgaccaaatcgtatcacaatcgccttgcaaagcgaaagatgtagatatcaacgtgcctagtcctagagatttcgaaaaggaagtgaagtccagacctagtgaagtcgataccaatggtcatgaaaacatggagaacatcttaaatggtaaaaatatcgacgaaatccccgagttccttccagaaaactccacaccgaaaaaggttttccaaaacgatgaatttcactttggacccaatgctgctccttttactcccaaacttttagaccaatctgaagctttgtcgactaaggccgtttatggcgatgaatcaacggccactcttgagagtacttttaataactcaaaccaagacttgcatatgttaaataaagaatcagatcctatgtccatgtccttctatgcagataagggtgaatctaatcccttcgatttaaataaagttcaactactacctgataatctcgatgatttcttgaacaaacctgataacgataatttcaatgaaaccatctcggatttacctgaacacacacatttagatgagcgcaaaaataacgatgacgcaatacaaattacggatttagataaacaatcatatgatgatgaaaaagaacttgcctcacctttagaaccggaaagagaactattaactacagaggagactgattttgccaaaactcctgaacctactcatgaaaatttattgggagaattttgttgcatacccaaaaaagaagtaccagcagacctaccggcagatgtagaacttatttcacccgttccagccgaagctattgaagttagtgatctattaaaatctgatgtagtgactttgccagctgacgtcgagttggtaccggcagatatcttaaataaatcgtctgcccacgatgatttgcctagtaatgagtccccatcaacagatccactttctgaacctattagtcacagtcctcaaccggcactggaggagtttgcacgtgtagaatcagcagtaagtgacgatttaggcatttctgaaaggcctatttcacctgatcttcaaaaagaactgctagcaagtcctttacctgcagctctttcaccagaaccacacaaagagactcttgcaagtccttctccaagtcctctttcgccagaaccgcacaaagaagctcttagtccctctccaagtcctctttcgccagagccgcacaatgaagctcttagtccttctccaagtcctatttcgccagaaccgcaaaaagaagatcttggaaatccttcccctagtccgctttctccagaaccacaacaaggcacgcttgagcatgcttctccaattcctctagtgccagaaactcaaaagggagacattgaattttcttcagaaccgtttagtggagtacaagcagttagtgcttccccagtcccggcactcaacaaagaagatttacaggcaagttctcctcatcctctatcaccagaacctcaagtacatgacgtggctagttcatctccagttcctaatttgttgcctccatctcccaaacctgtttgtagacttccactagaattatatcaaggtttggaggaagcgaaatctcccgaatgtgatagttcgcatcctgaaccaaaaccagcttcgccactactatatacagaagccaaatctcccgatttcggtaaatcagagaaaattgatttggccattactcccgaaccaataccagaacacttcaaactcgattatcctgtaggtgagtcaaaatcttctgtttgtgatttatcagaacctaaatcaccaatacaagaagtattactacacgccgattctaccgaagaaaaattattagacgaagcccaacaacgattcgaagacttatgtcaccctatagaatctcctgaggatgtcacttcttctgttaaggacgatttatcatctccagtacaggatcttcagagtaaatcacctgttggagatcaagtaattgatgatagttttgttcaagaagctgttgttgaagttcatgcttccaaagaatctgaggatcagcaacctcctttgatagaaccagaaattatagagccaattgctgcaaatatcaccgatttgccggagttggtaatgcctcctccaagaatgtgtgtctacccattgaagacacaagaaattccacttgacgtaaagactgaaactatttctccagaattcgccgaaccgacgatagtgacgccgtccgaagagagtaaagcggacgatttggtttcatcaacattagatgaagccgtcaaagaaccgtcgacggaagaacagaaaatggcagaagagttacaaaaagaaatgattggtattggtgttgcttctgcagtggctgctggagctgctatcacggctgttgtatcagcaacaaaggtggaagacaagaagaagtctccaagtgcttctgctaaaaagcctgcaagtcctaaaacaacgacagccaacaagagtccagctgttgcttctaaaactacatcaaaactgaccccagcggcacccaagcagactacaagtagaacatccgccacaaaggctacaacaccaaagactggtttgactaaaccacctgcgactactgcatccgctcccaaacctagtccgagaaccgcattatctaaaccacgaacaacacctacagcaactgcaaaaacagctccaccaaaaccggcagacaaattggcaaatggtgatgtcaagagtacaattaggagcactttacatgttaaaaagacagtttcagaaacaaatggcaccacaaagacttcaacttcaaggccagctaccgcgtctaaggtaagcttgactcaaaaaccggctgccaaaccagctactgcagctccaccctctaaaacaaccattccttcacgttcggcaccattaactactagatccgctccgactgcaaagagaccgacgactttaacgagcaaaaccaccacttcaaccttgtctgctgacaaaacgtcaaccacaactaagccaagcttgacaaagacttcaccaaaatcgaccaatgttcctccaaagacgacctcaaccttgtcaaaaccaagagttccactaacaagaactgttgccaaggcacctccagacacagaaaagcaaatcaaagaaagcgccaacaaaataacggcctcacgttcccttactagcgctagaactgttggatctgcttctactgtgagaagtaccctagcttccactcgcagagttgaaagcaaggtcagtagcacacgaacgacaactgtaacgaaaacgagcacgaccacaatgaaatcgaccacagccaaaaagccagccgaactaataaaaggccccgtaaccaaaaccaaaacaaccaaaatagaaaaacctaaagaaaatggaatctccaccgtagtaacggaagaaataaccgtagtcaataacaccaacgccgtcattgacaaccagatcgatagtcaacctgaattgatgaaagacaattccccgatcgataacaaactacttattgagactcctcaacttgttgaaactaacgcagactgaaagagtaataattaaaaaaaaacggtttattattatttacttagcttatatttaatattacgaaataactgttatatttaaaattttttatataccttttatgccccttattataaactgtttttcatggcggtgtcaagtatgtgaagcatttctgaaaaaaattctgatttttatattgtggtccggctaaaagatatagaatactgcaaaaatggcgatttttct

SEQ ID NO: 3526 - DNA, 4049 bp, Diabrotica virgifera
  SmartBlast Evalue=0; Info=Ankyrin-2 n=1 Tax=Camponotus floridanus RepID=E2A638_9HYME
cagtacgggagtgttgtattatcttcagtattttgagaggtttcagtgtaaaaaatcgttgtgatttaggtgatgatcctctactagaccaacagcagtacaaatacatgacggtggacgatatgaagagctacggcgacgattccatgaggctggacgttaccaacgacgagaagagtgaatataacagaaattctatcgctccttctcagatcagcaatgacatcatcattacaccacaacatgtcaaagagtattacgctacaaatgcgtattccgctccagataatgttgacatcaatcgacagccaatcactgttggtttcctggtgtctttcattgtcgatgctcgaggtggggccatgcgaggatgtcgtcattccggtgtcagagtcatcgttcccccaagatgcgcttctagtcctacaagaattacttgccgctacgtcagacctcaaagaactccaactccaccaccactgatggaaggggaagcactggctagcagactgctagagcttggtcctgttggcgctaaattcttaggaccagtgatacttgaagtgccgcattttgcttcactaagaggtaaacaaagggaaataatcgtcctgagatccgacaacggtgaaacatggaaagaacatactttggaggctagtgaagaagctatacaagatgtattaaatcatagttttgatggagaagaacttagtcagatagaagatctacacaccagtcgcataactcgcatcctaacaaatgatttcccgcattacttcgctgttatttctcgtatcagacaagaagtccacgctattggtccagacggtggtactgtgtccagcattgcagtgccgcttgtacaagcagtcttccctccgaatgctctaaccaagaaaataagagttggtttacaggcacaggcaatagaacccgaactcgtatccaaactcctaggtcatggtgtagctgtatcgccgatagtgacggtcgagccgagaagacgcaagttccacaaagccatcaccctcagcatgccagctccgaaggctcactctcaaggaatgatcaaccaatatcaaggagcgtccaatacaactcttcgacttttatgttccataactgggggtcaaaataaagctgtgtgggaggatgtcacaggatccacacctcttacgttcgttaaagattgtgtttcattcacaactacagtatctgcaagattttggctgatggactgcagaaatgtggcggatgctgccagaatggccacggaactttataatcaggcaatgcatgttccatttatggcaaaatttgtagtgtttgccaagagagttactccagttgaagcaagagtgagagtattctgcatgacagatgataaagaagataaaactctcgaacatcaagagaactttactgaaatagcaaagagtagagatatcgaggttcttgaaggtaaagatgtatttatggaatttggtggaaatatagtaccagtactccaatccggtgatcagccaaaattaggtttcaaagctttcagagaaaaccgtttagcgttcacagtaagacttagagatcaggacgaggaatcgactggtcgcattatattcatgagcgacgccaaagttgccagaggtgaacccaatcaaactccattatgcactcttaaccttgtcctaccaaaagatgttattccaagtagagattcgcaatcggatctactttctttagacaaagatcacagctatcttttgcatggaggaataagtaaaccagacactattcatagagcagatttccggttaacagatatttgtaatttgttggacgacgattgggagaaactagccctggaactggatattccgccatctgatattgacctcatcaaagaagaatatcctgagaatcatcctcagcaagctatgattatgtttaggttgtggttaagacagaaggctaacaaagctacaggcaataaactggaacaagcgctaaacaaaataggacggcaagatattgttaacaaatgcatatgcaacgtcgaattagtaactgatgatatggaaaaagccttagcgaagatccatctcgaccaatctggctttgaaaatcttaaagaagaattgggaccttctcgggatgcttctcttaggcgagatgcacatgtagataagtctttccaaaatagtcaagatgagctagataaaagtgaaaaagtaaaaaaaaagggtgcaaattgaaaatcataacgatattaacaaagcgccacctgcgaacgaaccttccgaactaatagaaccatcgactcctgtaaaaatacagcacgaagccatagaagagatcacccagcaattgaaccaactgcattcgactccgaagataagcgatccccatgccggaacacctcctccgagtcctgctgaattcggagtagccgagccggttttaaatagcaaacatgtccatatacaggaatcagttccagaggaagacttctatcagcaagaacctcagttttcaatcgtcacacaagaggttgttgatcctgttacaggagctaaaattacaagaacgatcaaaacagcctctcaagtcattacatcaccactaaccatccaaaacgaatctgacttgagacattcaatgcaaaccacactggatcagttcatggaagaggagaggcagccccactaggcacccgatttcgttatcgcgacaatataattgttacttaaacaaactttcatactactattttcaataatatttgacacgccagtgcatgtgtgttatttttattgtaatttttcggaaatatttaaaaatgttgaatctgtaatttaaataccatattgaattgtaatatgtcaccatataaataataataacgtatatattgtaccttttgtaatcatcatcatcatcatcatcatcattatccaaccaatttacgcataggtcccccataattgtttcctcacttccacggttttgtgctgattgttgccagtttttactaatctgcctgatatcatctgtccatcgtgtaggtggccttcatctacttgcctccaatcagtgatctgtcaaagacaaatttgaaatttttttctttttcaatcacctatttgtggactagccgcttcttcttcacgtgccatatcagacttatccgacgttggcgatcaccatttcaaaggcttttcgatcttcttctctgatactagccgcagcccgcagctccctaaatcagtgtaatgattgctgaaaagtattttttactgtgattgaaatacattgatacacagccatttttagtcaataaattaaatattttataaagttgaaaccacaatggtgaatgtaaattattagattgtaacattttgcaaatatttggtaatgtgaaatggaaccaaacagtataaattatattttgggtaatatccttaaatttttcaaatataaactagaatataggataaaaatgtaatcaaaatgtatgttgatttaataataatgtagatcttgtaagggatactgttaaaatatttaacagtcgtaaagttaaatcacaatcaaattcaaaaaagtacaagaatatcgaaatatgcttatattttgcttgatcttgacttttttgttcctctgtggtatgaattaaattatttaggggaaaacttttgaggaaagggatttgacaaaacaggcgtataacaggcaaataacaaatcgttattgatacatttttttagccaaatcgtaatttttatggaattattaataaggaatatgtttaatgacagattcttcacaacataaacaatcagtaacagctttgacaggtgacagttggctgtatagttaatagggagaaaggccttttcatcatgtgacgaacgcaagcacagccgccctcagccgccacgttgatataaacatataaatacagcgccgattcaatattttcgtactgttttgatcaacaatggcaaggaccgcagtattatctccccaattggatcatgcattag

SEQ ID NO: 3527 - DNA, 4004 bp, Diabrotica virgifera
  SmartBlast Evalue=0; Info=Ankyrin-2 n=1 Tax=Camponotus floridanus RepID=E2A638_9HYME
cagtacgggagtgttgtattatcttcagtattttgagaggtttcagtgtaaaaaatcgttgtgatttaggtgatgatcctctactagaccaacagcagtacaaatacatgacggtggacgatatgaagagctacggcgacgattccatgaggctggacgttaccaacgacgagaagagtgaatataacagaaattctatcgctccttctcagatcagcaatgacatcatcattacaccacaacatgtcaaagagtattacgctacaaatgcgtattccgctccagataatgttgacatcaatcgacagccaatcactgttggtttcctggtgtctttcattgtcgatgctcgaggtggggccatgcgaggatgtcgtcattccggtgtcagagtcatcgttcccccaagatgcgcttctagtcctacaagaattacttgccgctacgtcagacctcaaagaactccaactccaccaccactgatggaaggggaagcactggctagcagactgctagagcttggtcctgttggcgctaaattcttaggaccagtgatacttgaagtgccgcattttgcttcactaagaggtaaacaaagggaaataatcgtcctgagatccgacaacggtgaaacatggaaagaacatactttggaggctagtgaagaagctatacaagatgtattaaatcatagttttgatggagaagaacttagtcagatagaagatctacacaccagtcgcataactcgcatcctaacaaatgatttcccgcattacttcgctgttatttctcgtatcagacaagaagtccacgctattggtccagacggtggtactgtgtccagcattgcagtgccgcttgtacaagcagtcttccctccgaatgctctaaccaagaaaataagagttggtttacaggcacaggcaatagaacccgaactcgtatccaaactcctaggtcatggtgtagctgtatcgccgatagtgacggtcgagccgagaagacgcaagttccacaaagccatcaccctcagcatgccagctccgaaggctcactctcaaggaatgatcaaccaatatcaaggagcgtccaatacaactcttcgacttttatgttccataactgggggtcaaaataaagctgtgtgggaggatgtcacaggatccacacctcttacgttcgttaaagattgtgtttcattcacaactacagtatctgcaagattttggctgatggactgcagaaatgtggcggatgctgccagaatggccacggaactttataatcaggcaatgcatgttccatttatggcaaaatttgtagtgtttgccaagagagttactccagttgaagcaagagtgagagtattctgcatgacagatgataaagaagataaaactctcgaacatcaagagaactttactgaaatagcaaagagtagagatatcgaggttcttgaaggtaaagatgtatttatggaatttggtggaaatatagtaccagtactccaatccggtgatcagccaaaattaggtttcaaagctttcagagaaaaccgtttagcgttcacagtaagacttagagatcaggacgaggaatcgactggtcgcattatattcatgagcgacgccaaagttgccagaggtgaacccaatcaaactccattatgcactcttaaccttgtcctaccaaaagatgttattccaagtagagattcgcaatcggatctactttctttagacaaagatcacagctatcttttgcatggaggaataagtaaaccagacactattcatagagcagatttccggttaacagatatttgtaatttgttggacgacgattgggagaaactagccctggaactggatattccgccatctgatattgacctcatcaaagaagaatatcctgagaatcatcctcagcaagctatgattatgtttaggttgtggttaagacagaaggctaacaaagctacaggcaataaactggaacaagcgctaaacaaaataggacggcaagatattgttaacaaatgcatatgcaacgtcgaattagtaactgatgatatggaaaaagccttagcgaagatccatctcgaccaatctggctttgaaaatcttaaagaagaattgggaccttctcgggatgcttctcttaggcgagatgcacatgtagataagtctttccaaaatagtcaagatgagctagataaaagtgaaaaagtaaaaaaaaagggtgcaaattgaaaatcataacgatattaacaaagcgccacctgcgaacgaaccttccgaactaatagaaccatcgactcctgtaaaaatacagcacgaagccatagaagagatcacccagcaattgaaccaactgcattcgactccgaagataagcgatccccatgccggaacacctcctccgagtcctgctgaattcggagtagccgagccggttttaaatagcaaacatgtccatatacaggaatcagttccagagggcactccgaatcatcaagagtctgagccagccttctctacgccgttcaagatcgagcatcctgatccagaccctatagctactttaaagagaaatgttcacgatacgttgactttcttacaccaagaaagaaacgattttcttcctgaagacgatataattattcctagtcggaaggatgaccatatctccaaaaagataaatttagatagtattcatttgaaaacgccaaaacgttcaactagtgactatgatgacagttttcgcgaaaccgtagaaagtgaggtagacgacgtgataaaagaagccgaagaggttgttaataatagattaagtaattcagatactttgttagaagaaaaattcagtagaaacttcacaaatagggatttagaagaaaaggttgatagtatatttgatgacgtaaaaaccaacacagaagattctttagataatttagaaagcttgaaggatgattctatttctataatacaggaaaagagtgaagaagcatttaaatttttagaaaatgaagcatcaagtcctctaactagtaaatacgatgatagtagatcgtttatagaaaagaaattgaggattctatatttgacgatgtttctcaaaagtctcctaagacacctcgtagttctataccagtagcaaagcctagaaagagtgtagaaaaagagaggacagatatggatgaaaggaccgtatcaccgacagatcctgaattgttatctaaaatacccgtagtgaagggtggtaaaatcaaaactattaagaaacattcaaaagatcccttaaaagagttcgttactctttcaagggatgtaaattgggacgatgatcttgaaacagacaagattatcgaaacagtaacgacagatcctatagtaaaaaccacagtcactagaataacaacagaaaccacatcagaaccaacaaaaagtaaaataccgaaaccacatccggatgctttaaatttgacttcgactagtgaaccaatagatttggaagcatcgccgaaaagtaaaattccagttctcagaacagagtctactagaatcacttctccagaaaccgtatacgtagaaaaaactactctatcgccggatggagtgaaaatagttgaaactaccaccaccatagcatcacctggatccaaggtgtcaaccaaaagcagcacgttggattccgaatccgatgatgatagtagaagaagtcctctaaaggggatactgaagaaaaccacagtcagaaccatcggtagctctagcggatctgatatagccctacacgaggagggagctgaactgagcgaagacgattcagcatcaaaaaatccaaaaaccttagagacctggcatgttctttaccctctagtgtggtcgtttatcgcattggcaacaagcatgatcgtgttggcactgctcgcacaaaattgacaatgaagacttctatcagcaagaacctcagttttcaatcgtcacacaagaggt

SEQ ID NO: 3528 - DNA, 3955 bp, Diabrotica virgifera
  SmartBlast Evalue=0; Info=Ankyrin-2 n=1 Tax=Camponotus floridanus RepID=E2A638_9HYME
cagtacgggagtgttgtattatcttcagtattttgagaggtttcagtgtaaaaaatcgttgtgatttaggtgatgatcctctactagaccaacagcagtacaaatacatgacggtggacgatatgaagagctacggcgacgattccatgaggctggacgttaccaacgacgagaagagtgaatataacagaaattctatcgctccttctcagatcagcaatgacatcatcattacaccacaacatgtcaaagagtattacgctacaaatgcgtattccgctccagataatgttgacatcaatcgacagccaatcactgttggtttcctggtgtctttcattgtcgatgctcgaggtggggccatgcgaggatgtcgtcattccggtgtcagagtcatcgttcccccaagatgcgcttctagtcctacaagaattacttgccgctacgtcagacctcaaagaactccaactccaccaccactgatggaaggggaagcactggctagcagactgctagagcttggtcctgttggcgctaaattcttaggaccagtgatacttgaagtgccgcattttgcttcactaagaggtaaacaaagggaaataatcgtcctgagatccgacaacggtgaaacatggaaagaacatactttggaggctagtgaagaagctatacaagatgtattaaatcatagttttgatggagaagaacttagtcagatagaagatctacacaccagtcgcataactcgcatcctaacaaatgatttcccgcattacttcgctgttatttctcgtatcagacaagaagtccacgctattggtccagacggtggtactgtgtccagcattgcagtgccgcttgtacaagcagtcttccctccgaatgctctaaccaagaaaataagagttggtttacaggcacaggcaatagaacccgaactcgtatccaaactcctaggtcatggtgtagctgtatcgccgatagtgacggtcgagccgagaagacgcaagttccacaaagccatcaccctcagcatgccagctccgaaggctcactctcaaggaatgatcaaccaatatcaaggagcgtccaatacaactcttcgacttttatgttccataactgggggtcaaaataaagctgtgtgggaggatgtcacaggatccacacctcttacgttcgttaaagattgtgtttcattcacaactacagtatctgcaagattttggctgatggactgcagaaatgtggcggatgctgccagaatggccacggaactttataatcaggcaatgcatgttccatttatggcaaaatttgtagtgtttgccaagagagttactccagttgaagcaagagtgagagtattctgcatgacagatgataaagaagataaaactctcgaacatcaagagaactttactgaaatagcaaagagtagagatatcgaggttcttgaaggtaaagatgtatttatggaatttggtggaaatatagtaccagtactccaatccggtgatcagccaaaattaggtttcaaagctttcagagaaaaccgtttagcgttcacagtaagacttagagatcaggacgaggaatcgactggtcgcattatattcatgagcgacgccaaagttgccagaggtgaacccaatcaaactccattatgcactcttaaccttgtcctaccaaaagatgttattccaagtagagattcgcaatcggatctactttctttagacaaagatcacagctatcttttgcatggaggaataagtaaaccagacactattcatagagcagatttccggttaacagatatttgtaatttgttggacgacgattgggagaaactagccctggaactggatattccgccatctgatattgacctcatcaaagaagaatatcctgagaatcatcctcagcaagctatgattatgtttaggttgtggttaagacagaaggctaacaaagctacaggcaataaactggaacaagcgctaaacaaaataggacggcaagatattgttaacaaatgcatatgcaacgtcgaattagtaactgatgatatggaaaaagccttagcgaagatccatctcgaccaatctggctttgaaaatcttaaagaagaattgggaccttctcgggatgcttctcttaggcgagatgcacatgtagataagtctttccaaaatagtcaagatgagctagataaaagtgaaaaagtaaaaaaaaagggtgcaaattgaaaatcataacgatattaacaaagcgccacctgcgaacgaaccttccgaactaatagaaccatcgactcctgtaaaaatacagcacgaagccatagaagagatcacccagcaattgaaccaactgcattcgactccgaagataagcgatccccatgccggaacacctcctccgagtcctgctgaattcggagtagccgagccggttttaaatagcaaacatgtccatatacaggaatcagttccagaggaagacttctatcagcaagaacctcagttttcaatcgtcacacaagaggttgttgatcctgttacaggagctaaaattacaagaacgatcaaaacagcctctcaagtcattacatcaccactaaccatccaaaacgaatctgacttgagacattcaatgcaaaccacactggatcagttcatggaagaggagaggcagccccactaggcacccgatttcgttatcgcgacaatataattgttacttaaacaaactttcatactactattttcaataatatttgacacgccagtgcatgtgtgttatttttattgtaatttttcggaaatatttaaaaatgttgaatctgtaatttaaataccatattgaattgtaatatgtcaccatataaataataataacgtatatattgtaccttttgtaatcatcatcatcatcatcatcatcattatccaaccaatttacgcataggtcccccataattgtttcctcacttccacggttttgtgctgattgttgccagtttttactaatctgcctgatatcatctgtccatcgtgtaggtggccttcatctacttgcctccaatcagtgatctgtcaaagacaaatttgaaatttttttctttttcaatcacctatttgtggactagccgcttcttcttcacgtgccatatcagacttatccgacgttggcgatcaccatttcaaaggcttttcgatcttcttctctgatactagccgcagcccgcagctccctaaatcagtgtaatgattgctgaaaagtattttttactgtgattgaaatacattgatacacagccatttttagtcaataaattaaatattttataaagttgaaaccacaatggtgaatgtaaattattagattgtaacattttgcaaatatttggtaatgtgaaatggaaccaaacagtataaattatattttgggtaatatccttaaatttttcaaatataaactagaatataggataaaaatgtaatcaaaatgtatgttgatttaataataatgtagatcttgtaagggatactgttaaaatatttaacagtcgtaaagttaaatcacaatcaaattcaaaaaagtacaagaatatcgaaatatgcttatattttgcttgatcttgacttttttgttcctctgtggtatgaattaaattatttagaggaaaacttttgagaaaagggatttgacaaaacaggcaaataacaaatcggtgttgatacatttttttagccaaatcgtaatttttatcgagttcataaggaatatgtttaatgacagattcttcacaacataaacaatcagtaacagctttgacaggtgacagttggctgtatagttaatagggagataggccttttcatcatgtgacgagcgcaagcacagccgccatgttgatataaacatataaatacagctccgattaaat

SEQ ID NO: 3529 - DNA, 3892 bp, Diabrotica virgifera
  SmartBlast Evalue=1E-159; Info="Limpet, isoform F n=1 Tax= Drosophila melanogaster RepID=Q7KUQ5_DROME"
aatgttgtacggtaggttgttttctgtttagttctaacctaaaaaactttttattttaaaattatgactgaaaagtttacgttcctttcgtttttctaacatgtgacggtttgtttgttgttttgtcgtaattacaagctgtgtttttcgtgtgccgttgtagttttgttgtttttgttgattattgaataatgattgttgccaccaggacaccgcaagattggttttccgttgatggcgtccagatcaaagaagctgatatcggacaaccttgtacggaatgttcaaaatgcaaagatgggtacgaaccgcacaaatggagaaaaacatgcaaacattgcaagtgctccagagacggacacgagatagtggcggagcatggggctcgatcgcgactcggcttcgtagcaacccatgatgggctagacgctagatccttaggatacaccttcgtgcctccaggtcttaccagtgctagacaggtagaccaatattattccactctgccttctgaggaagttccaaaactcgggtccaaaggtgaaaccaatcgttcccaaagaattgttagacaattacctaagcaagatttgtcgttgtctgcttgcaagtttgtcgagcctcagaaccaagctagttatgaagactttatatctggccgaaaccaaatagctctcgacgtaggcttagcaaaacccactccgcccaatagtatttgtgctcattgtcaaaaacctatccatagtcaacaaatcagtgtcgctgcccctagattaggaaaatcggtgtggcacccctcgtgttttaagtgtactagctgtgatgatctcctagtggatcttgcttactgtgtgtacgaggataatatatattgcgaaagacattacgctgaaaaaatgaagccaaggtgtgctggatgtgacgagttaattttcagtggagaatacaccaaggctatgaacaaggactggcacggccaacatttctgctgctggcaatgtgacgaaagccttactggccaacgctatgttctccgcgacgaacatccatactgcgtctcctgctacgaatcagtcttcgccaatgcttgcgaaaaatgtagcaaagtcatcggtatcgactctaaggatttgtcctacaaagacaagcattggcatgaagcctgcttcctctgcactacctgcggagagtccctggtagacaaacagttcggatctaaaggtgataggatctactgcggcaactgctacgaccaacagttcgcctccagatgcgacggatgccacgagatctttagagctggtaccaagaaaatggaatacaagaccagacaatggcatgagaagtgcttctgttgttgtgtatgcaaggtaccaatcggtacccagagcttcatccctcgtgaacaagaaatctactgcgccaagtgttatgaagaaaaattcgcaactcgctgcatcaagtgcaacaaggtgatcaccagtggtggggtaacttacaagaacgaaccctggcatagggaatgcttcacttgcaccaactgccaacgcagcttagccggtgaacgcttcacgtcccgcgacgacaagccttactgtgccgaatgcttcggcgaactcttcgccaagcgctgtaccgcttgcagaaagcccatcaccggtatcggcggcaccaagttcatctctttcgaggaacgccactggcacaacgattgcttcttctgcgcttcctgcaagaccagcttggtcggacgcggattcatcaccgatcaggacgacatcatctgtccggattgcgccaagaccaaacttatgtaaatccgttgacaggtgtcaacgagatcgcggctgtcaactgtcatcgatgccatattgttgacagctgtcaacgaggttgtgaggttgggaaatttgacctgtaggttgacaaaaatctcagaatactaaatacttttatttgttttaaataataaacgacatcaaatattaaataaaagtaattgtaatcattttgtatttacaacgtatggaaaatacattcttgttcatgtgggtcacatatcaattgtttagggagaatattgtaaaaaaaacgtacatatcaaagtcaaaatcaatgattttgtcaacctactaacagatttttgagtgttaaatcaaaagatatggatttttctatttaaattactgtgaatattttttaaagtaatgtcacacaaacacacactatcgtacactctagcggcgaaattgggtaccattttttagttgtaaaaaacagtacttaattccccaaacacacacacaaattcacgcacacatgacattttataaacagaaaaaattaatgaaaaaatttattaaaaaaaaggacaaatcaggtacgacgggttaaataacataaactagcacatgtattctgtctctaaaggacttcaggacatctccattcattatattccaacgaatttccttgtccaacgacatttctttcttctgttatcaaattcgtacagtttttggcaccatatcattgcgcatgaccttagtcatctcagcctgttctttttttttgcgaataggcttgaagtgcaaagttaaatgagtctttgaaacgtcctgctgtaaaggtctttatatgagtaccgttttacctgtatgttcagtaagtattaaattttttaaccacaattttgaggagcaagtccaattttgagtcaagaccataaccaactaatttttacgctattgcttatgatctgtcggtaaaaatgttcacttaccccgtcgtacctacaaattttattttatttttttgaatatgtttaacttttaaagtttttgacaatttagttatgtatctatcgttaatttcttatttagtttattgtcagaggtctattaatttagaatgcttatttatttttatttttttacatttcaagactactactactaatttttaaatcgcttctagcttttgaattttcgatgtatcacataagttggttgagcaataaatcgattgatgatgtagccatattctaaataagtaaaacattgccttattctgatatcgtataataagtgttaatatatcaaataagaaaatctgcgactaattcgacaaaacaattcaacaccttaaatcaagctggccgttgctgtttatcgtaaacgataaaaggccaaaatcggtgcgcgtacgacaaacgtcaaaaattggcatgcctgcgattaacgtcaagaattggcatggctgcgataaacgtcaagaattggcatgtctgcgataaacgtcaaaaattgactcgtcagcgataaacgtcaaaaattggtatgtctgcgataaacggcaacgatctgtaaaggctacacagttaaaaaattatcgcttaaaacgtaatctagtttgcttttctgtgtggcgcaaacgagcaaatttagttgactagttcttgaatttttttgtcgacgcaaattgttagtgggcgttaatatattttatttgtaatttatggaaactttttaagcgtttgttgtagataatattttatgtatacagctttatagcatttacatacgatggaagagcaattttggtgctatttgagtagtttagaaattttgattaatccttaaatggttggaatcttaatttggttgttgcatattattgtatttatcattgcttggatttatattaacgaaaaaattgttatcgataatttattagatgttaaccagtttaatgtatattttaatcttgttttaagtacttgtaaccaatgggaatgttgtgaaaaacatttattgttataagaatcattgaaaacatcaagagctttgcttttagggacatctgttatattttattctttaataaattcttt

SEQ ID NO: 3530 - DNA, 3838 bp, Diabrotica virgifera
  SmartBlast Evalue=1E-159; Info="Limpet, isoform F n=1 Tax= Drosophila melanogaster RepID=Q7KUQ5_DROME"
cgggcctgctacgactgtgagtgctgatttcctcggaaagtggtaccgctgttgtttttgatgttatcgaaacatttacttagttaaatcggtagtttttaagtgtttgtgctaaattggattacaattagacttaaaatatgatttctaatgatattagtggcgatttggtgccttggactggacttactctggcttgtgtaaggattctgcagctttactgtaaagtttttcagcaggatgtacaggatttcaataaacttaaggaaaaaacatgcaaacattgcaagtgctccagagacggacacgagatagtggcggagcatggggctcgatcgcgactcggcttcgtagcaacccatgatgggctagacgctagatccttaggatacaccttcgtgcctccaggtcttaccagtgctagacaggtagaccaatattattccactctgccttctgaggaagttccaaaactcgggtccaaaggtgaaaccaatcgttcccaaagaattgttagacaattacctaagcaagatttgtcgttgtctgcttgcaagtttgtcgagcctcagaaccaagctagttatgaagactttatatctggccgaaaccaaatagctctcgacgtaggcttagcaaaacccactccgcccaatagtatttgtgctcattgtcaaaaacctatccatagtcaacaaatcagtgtcgctgcccctagattaggaaaatcggtgtggcacccctcgtgttttaagtgtactagctgtgatgatctcctagtggatcttgcttactgtgtgtacgaggataatatatattgcgaaagacattacgctgaaaaaatgaagccaaggtgtgctggatgtgacgagttaattttcagtggagaatacaccaaggctatgaacaaggactggcacggccaacatttctgctgctggcaatgtgacgaaagccttactggccaacgctatgttctccgcgacgaacatccatactgcgtctcctgctacgaatcagtcttcgccaatgcttgcgaaaaatgtagcaaagtcatcggtatcgactctaaggatttgtcctacaaagacaagcattggcatgaagcctgcttcctctgcactacctgcggagagtccctggtagacaaacagttcggatctaaaggtgataggatctactgcggcaactgctacgaccaacagttcgcctccagatgcgacggatgccacgagatctttagagctggtaccaagaaaatggaatacaagaccagacaatggcatgagaagtgcttctgttgttgtgtatgcaaggtaccaatcggtacccagagcttcatccctcgtgaacaagaaatctactgcgccaagtgttatgaagaaaaattcgcaactcgctgcatcaagtgcaacaaggtgatcaccagtggtggggtaacttacaagaacgaaccctggcatagggaatgcttcacttgcaccaactgccaacgcagcttagccggtgaacgcttcacgtcccgcgacgacaagccttactgtgccgaatgcttcggcgaactcttcgccaagcgctgtaccgcttgcagaaagcccatcaccggtatcggcggcaccaagttcatctctttcgaggaacgccactggcacaacgattgcttcttctgcgcttcctgcaagaccagcttggtcggacgcggattcatcaccgatcaggacgacatcatctgtccggattgcgccaagaccaaacttatgtaaatccgttgacaggtgtcaacgagatcgcggctgtcaactgtcatcgatgccatattgttgacagctgtcaacgaggttgtgaggttgggaaatttgacctgtaggttgacaaaaatctcagaatactaaatacttttatttgttttaaataataaacgacatcaaatattaaataaaagtaattgtaatcattttgtatttacaacgtatggaaaatacattcttgttcatgtgggtcacatatcaattgtttagggagaatattgtaaaaaaaacgtacatatcaaagtcaaaatcaatgattttgtcaacctactaacagatttttgagtgttaaatcaaaagatatggatttttctatttaaattactgtgaatattttttaaagtaatgtcacacaaacacacactatcgtacactctagcggcgaaattgggtaccattttttagttgtaaaaaacagtacttaattccccaaacacacacacaaattcacgcacacatgacattttataaacagaaaaaattaatgaaaaaatttattaaaaaaaaggacaaatcaggtacgacgggttaaataacataaactagcacatgtattctgtctctaaaggacttcaggacatctccattcattatattccaacgaatttccttgtccaacgacatttctttcttctgttatcaaattcgtacagtttttggcaccatatcattgcgcatgaccttagtcatctcagcctgttctttttttttgcgaataggcttgaagtgcaaagttaaatgagtctttgaaacgtcctgctgtaaaggtctttatatgagtaccgttttacctgtatgttcagtaagtattaaattttttaaccacaattttgaggagcaagtccaattttgagtcaagaccataaccaactaatttttacgctattgcttatgatctgtcggtaaaaatgttcacttaccccgtcgtacctacaaattttattttatttttttgaatatgtttaacttttaaagtttttgacaatttagttatgtatctatcgttaatttcttatttagtttattgtcagaggtctattaatttagaatgcttatttatttttatttttttacatttcaagactactactactaatttttaaatcgcttctagcttttgaattttcgatgtatcacataagttggttgagcaataaatcgattgatgatgtagccatattctaaataagtaaaacattgccttattctgatatcgtataataagtgttaatatatcaaataagaaaatctgcgactaattcgacaaaacaattcaacaccttaaatcaagctggccgttgctgtttatcgtaaacgataaaaggccaaaatcggtgcgcgtacgacaaacgtcaaaaattggcatgcctgcgattaacgtcaagaattggcatggctgcgataaacgtcaagaattggcatgtctgcgataaacgtcaaaaattgactcgtcagcgataaacgtcaaaaattggtatgtctgcgataaacggcaacgatctgtaaaggctacacagttaaaaaattatcgcttaaaacgtaatctagtttgcttttctgtgtggcgcaaacgagcaaatttagttgactagttcttgaatttttttgtcgacgcaaattgttagtgggcgttaatatattttatttgtaatttatggaaactttttaagcgtttgttgtagataatattttatgtatacagctttatagcatttacatacgatggaagagcaattttggtgctatttgagtagtttagaaattttgattaatccttaaatggttggaatcttaatttggttgttgcatattattgtatttatcattgcttggatttatattaacgaaaaaattgttatcgataatttattagatgttaaccagtttaatgtatattttaatcttgttttaagtacttgtaaccaatgggaatgttgtgaaaaacatttattgttataagaatcattgaaaacatcaagagctttgcttttagggacatctgttatattttattctttaataaattcttt

SEQ ID NO: 3531 - DNA, 3168 bp, Diabrotica virgifera
  SmartBlast Evalue=1E-159; Info="Limpet, isoform F n=1 Tax= Drosophila melanogaster RepID=Q7KUQ5_DROME"
cgacctacacttagcacaccgcgtttgtgtagattttttcttgaaaaaagaaaaccacctcgaaaatccgaccatgggagacgtagaagtgagctccaacttcaccatcaccgaaaagaagaccaagaaggtcaagaagacgaccaaacaacgcagaggaagtaacgagcaaaccgaagttaccattcaagagctcaaaaatggcaaccagggtggagaatacaccaaggctatgaacaaggactggcacggccaacatttctgctgctggcaatgtgacgaaagccttactggccaacgctatgttctccgcgacgaacatccatactgcgtctcctgctacgaatcagtcttcgccaatgcttgcgaaaaatgtagcaaagtcatcggtatcgactctaaggatttgtcctacaaagacaagcattggcatgaagcctgcttcctctgcactacctgcggagagtccctggtagacaaacagttcggatctaaaggtgataggatctactgcggcaactgctacgaccaacagttcgcctccagatgcgacggatgccacgagatctttagagctggtaccaagaaaatggaatacaagaccagacaatggcatgagaagtgcttctgttgttgtgtatgcaaggtaccaatcggtacccagagcttcatccctcgtgaacaagaaatctactgcgccaagtgttatgaagaaaaattcgcaactcgctgcatcaagtgcaacaaggtgatcaccagtggtggggtaacttacaagaacgaaccctggcatagggaatgcttcacttgcaccaactgccaacgcagcttagccggtgaacgcttcacgtcccgcgacgacaagccttactgtgccgaatgcttcggcgaactcttcgccaagcgctgtaccgcttgcagaaagcccatcaccggtatcggcggcaccaagttcatctctttcgaggaacgccactggcacaacgattgcttcttctgcgcttcctgcaagaccagcttggtcggacgcggattcatcaccgatcaggacgacatcatctgtccggattgcgccaagaccaaacttatgtaaatccgttgacaggtgtcaacgagatcgcggctgtcaactgtcatcgatgccatattgttgacagctgtcaacgaggttgtgaggttgggaaatttgacctgtaggttgacaaaaatctcagaatactaaatacttttatttgttttaaataataaacgacatcaaatattaaataaaagtaattgtaatcattttgtatttacaacgtatggaaaatacattcttgttcatgtgggtcacatatcaattgtttagggagaatattgtaaaaaaaacgtacatatcaaagtcaaaatcaatgattttgtcaacctactaacagatttttgagtgttaaatcaaaagatatggatttttctatttaaattactgtgaatattttttaaagtaatgtcacacaaacacacactatcgtacactctagcggcgaaattgggtaccattttttagttgtaaaaaacagtacttaattccccaaacacacacacaaattcacgcacacatgacattttataaacagaaaaaattaatgaaaaaatttattaaaaaaaaggacaaatcaggtacgacgggttaaataacataaactagcacatgtattctgtctctaaaggacttcaggacatctccattcattatattccaacgaatttccttgtccaacgacatttctttcttctgttatcaaattcgtacagtttttggcaccatatcattgcgcatgaccttagtcatctcagcctgttctttttttttgcgaataggcttgaagtgcaaagttaaatgagtctttgaaacgtcctgctgtaaaggtctttatatgagtaccgttttacctgtatgttcagtaagtattaaattttttaaccacaattttgaggagcaagtccaattttgagtcaagaccataaccaactaatttttacgctattgcttatgatctgtcggtaaaaatgttcacttaccccgtcgtacctacaaattttattttatttttttgaatatgtttaacttttaaagtttttgacaatttagttatgtatctatcgttaatttcttatttagtttattgtcagaggtctattaatttagaatgcttatttatttttatttttttacatttcaagactactactactaatttttaaatcgcttctagcttttgaattttcgatgtatcacataagttggttgagcaataaatcgattgatgatgtagccatattctaaataagtaaaacattgccttattctgatatcgtataataagtgttaatatatcaaataagaaaatctgcgactaattcgacaaaacaattcaacaccttaaatcaagctggccgttgctgtttatcgtaaacgataaaaggccaaaatcggtgcgcgtacgacaaacgtcaaaaattggcatgcctgcgattaacgtcaagaattggcatggctgcgataaacgtcaagaattggcatgtctgcgataaacgtcaaaaattgactcgtcagcgataaacgtcaaaaattggtatgtctgcgataaacggcaacgatctgtaaaggctacacagttaaaaaattatcgcttaaaacgtaatctagtttgcttttctgtgtggcgcaaacgagcaaatttagttgactagttcttgaatttttttgtcgacgcaaattgttagtgggcgttaatatattttatttgtaatttatggaaactttttaagcgtttgttgtagataatattttatgtatacagctttatagcatttacatacgatggaagagcaattttggtgctatttgagtagtttagaaattttgattaatccttaaatggttggaatcttaatttggttgttgcatattattgtatttatcattgcttggatttatattaacgaaaaaattgttatcgataatttattagatgttaaccagtttaatgtatattttaatcttgttttaagtacttgtaaccaatgggaatgttgtgaaaaacatttattgttataagaatcattgaaaacatcaagagctttgcttttagggacatctgttatattttattctttaataaattcttt

SEQ ID NO: 3532 - DNA, 4388 bp, Diabrotica virgifera
  SmartBlast Evalue=1E-142; Info=Endonuclease-reverse transcriptase n=1 Tax=Bombyx mori RepID=D7F159_BOMMO
tgtttaaattattttattaggtacattacaatataacatatatgttgctatagtatttcatacatcatacgcatgtaaatcattaacaataaaaaaatgacaattctaaactacgttttgaaaaaactgcacaatcacctatcaggtaaatattttcccagtttatatgtccaccgcatgtaaatcaccgagccacaactatagcatccgcagatttcaattaaaataaaattactttcgtcttaacaacttttactcgactaaattgcctacataacttatcttcgacgatgaagttctcgagacaaaatggtatcaaaaagaatagagatgttttattttaattagaaataagagattattaagctacgagatgttaatcatttacatgcggcacccatttaatgcagacaaataaaaatatatgccatatttataagtattagaataaaatttgtgcctcgagcagttattgctacttttttaaaaagcagcaatatttgcttcacagaaatctagacagcttgagacaaataaaaatgctacatcaatgcttaaaattgtgccctgaaaatgtcaaattatacagtaggcaatgatttaacagatttttcaattatatatttattttgtctgtggtattttcctattaatataaaaacattcagccacgaccccggagcggttctaacctcagaatttcaataataaaaaaaggaaattcttggttaggggattaatgatatagaagaaaagccaaatcacaaatcagtctgctacacactttcttcttcgaggaataggaatcagtaattaacacgaacgatgcttatcaagaaatagtacgcattcacaagagtcctggtaaaagataaatgcatttttctttggtatgattacattagtctttatagtaacaattagaattagaatttatacagataaaatgagtacgagctctaacaactaaatgtttggacaaacggaaatttatcgaaaacattaatcttcacaatcttgcttattggattaaagaacgagatccacaatacatcaaagtccatcattaataacaaaatattgaaatagcttggtttctacaaactttggattacagtgttgatcaaaaaataaacgaaaatgttgtggcaacttaattttcagaattatctacagcatactctatatataacaaataagggtattacgaggtttcgcttataacgaggtacattaggtgttccatgaaattcctattgaattataacacctttacaacgaagcatccttacttataacgagggaaaatgaggttgaagagcatgtttcttcacctgtttttggcgctgtgatggctataaataaatacccaagatgcctgtatacagaaatgcctaaaatctgtatgcttattgagtcaacatcatcctgtttatccaccaaatatttttcaacagcgccattcaaacaatatttaatatcttatattgctcggaatggcttcactataggaagttagtgttttagaaaactacatattcatatgtatgctcaatattattgttgtctgatataacgagatcagcttataacgaggtaattagtatgccatttcagttctcgttatagaggggggtctgctgtacttaccgtgtataaaataaataattttgacaactagttataagttttaagttgcttgacagttacttgtaacttgtaacaaaactctagcgaaaagctttgataaaatatttattcaatacgacgaaatagagtagtaatgcaggatgaaaaggaaattctggacacctttgaagagatggcataccagagaacataccatccttaaaaaacgatgataaactggctcttttgaaaatgagacttcaacatatttcctatatcgctacctgcattctaataccacgtatgaggatctttaggcgaaacgagttagaggttgattcccagtacattgcgcacgctccaccgaatgagtccaatcccaagtacgaaaaaacattgtttcttgtacttgggattagaataattcagcagagcatgcgcaatatactcagaatcaacctccaactcgaataaaaatcctcatatgtggtattagaatgtaggtagcgatatgtattatgtgtgttaattacaaaatgtaaagaggaacaagattaaacaagggcattgccaaaatcaaagataatgcaggaagatatctctgaccggcaccgagctctgttggactttcttcaaaaccacgctataagagacgttaacctctaaaccttctaaaattgttttcccaggcggcggtacataaactctattataattagcctaggaataaatttccaaactctttggaaacttgttcgtaggccaatagggcttttcattcacagtcatttgtttcgagcttcttcttcttcttcttagccttctatcgtccacgtttggacataggcctctcccaactccttccatcggtctctatcctgagcaacatatttccaattcgttccggctactcttttaatatcatcaacccatctcatctgtggtcttcctctcggtcgtttactttggtaaggtctccaatgttgtatcgtggcattccaacgttggtctttttgtctaacagtgtggcctgcgaagctccatttaagtttggcaacttttgttgttatgtcctcgacttttgtttttgatcttacccagtcgctcctctttttatctgacagtcgtatacctaacattgctctttccatagctctttctgttgtagctagtttattcatatttgccttggttagggtccaggtttgacacccatatgtcatgataggaaggatgcactggttgaacactttggtcctcaaatattgatgtattttgcggttcttaagtatccaaccaagttttccaaatcctgcccatgctagtcttgctctcctataatttccgcactttggttttctttgtcaagtttcaggatttggcctaggtagatatattcctggactttttctatctcactgccatttatagttatgcgtctggggtcatctgtgtttgtcattatttttgttttcttcatgttcatttttaggccgacgtattgggagctgcctgcgagttcctccatcataatttgcagttcctcgaatgagctcgctataatcacaatgtcgtcagcgaatctgaggtggttaccgcttgttccattaacgttaatgccataggttgaccaatttgtagttttgaagacgtcttctagggctaggttgaaaagctttggcgatattacgtctccttgtctcacgcctctcttaatggggatgggatttgtattttcgttagttgtactatcatacttgcattttcatatatattatgtattagttacctatatctggaatctattctacaattattaatagcttgttctatggcccagatctcgatactatcaaacgccttttcatagtctacgaaggcaagaaatacgggtagttggtattcatttgccttctctatcaatgttctcattgtcagcagatggtctgatgtactatatcctttgtggaagccagactgttccactagttggtaattgtccattttgtaggtcaaccggttgttaataattctcagtaatagtttgtatacttgactgagcaacgatataggtctataattctgtaggtcacatttgtccctttttttgtgtaaaagtattactagactttcgttccagtctttagggatcttgctattatggagacatttattaaatagctctgttagtatagggattgttactgttttgcttgttttcaagagctcggcaattataccgtcctgtcctggagctttattattttttagttcttttaaagctctttctatttcgaatccctttatatttggtagtacttctgatcccacgttgtttatttgtcttttgacgttcatcctttgttgattcattaggctggctttgggagctgtacaagcttttgtagaagtcttcgactatttttgtaattttatatttgtccttctcttccttactattggcgtctttaattttgatgatttttttgaacacccagtgccggtcttagacattttaagcctctgttgttttcaatgactcgctctattaagttctcgttccatttttgtaagtcgcgttttagttcttttctaattgttttattaagttctatgtattcttgagtatggcgtttgttttgcgttagtagttgtcgtctttccgtcattagttgtttagtttcgttgcttattttgtcttctttagtacttgttttctttgcgacctttagtccggcttcgagaaggttcttattgat

SEQ ID NO: 3533 - DNA, 3810 bp, Diabrotica virgifera
  SmartBlast Evalue=4E-14; Info=Endonuclease-reverse transcriptase n=1 Tax=Bombyx mori RepID=D5LB38_BOMMO
tgtttaaattattttattaggtacattacaatataacatatatgttgctatagtatttcatacatcatacgcatgtaaatcattaacaataaaaaaatgacaattctaaactacgttttgaaaaaactgcacaatcacctatcaggtaaatattttcccagtttatatgtccaccgcatgtaaatcaccgagccacaactatagcatccgcagatttcaattaaaataaaattactttcgtcttaacaacttttactcgactaaattgcctacataacttatcttcgacgatgaagttctcgagacaaaatggtatcaaaaagaatagagatgttttattttaattagaaataagagattattaagctacgagatgttaatcatttacatgcggcacccatttaatgcagacaaataaaaatatatgccatatttataagtattagaataaaatttgtgcctcgagcagttattgctacttttttaaaaagcagcaatatttgcttcacagaaatctagacagcttgagacaaataaaaatgctacatcaatgcttaaaattgtgccctgaaaatgtcaaattatacagtaggcaatgatttaacagatttttcaattatatatttattttgtctgtggtattttcctattaatataaaaacattcagccacgaccccggagcggttctaacctcagaatttcaataataaaaaaaggaaattcttggttaggggattaatgatatagaagaaaagccaaatcacaaatcagtctgctacacactttcttcttcgaggaataggaatcagtaattaacacgaacgatgcttatcaagaaatagtacgcattcacaagagtcctggtaaaagataaatgcatttttctttggtatgattacattagtctttatagtaacaattagaattagaatttatacagataaaatgagtacgagctctaacaactaaatgtttggacaaacggaaatttatcgaaaacattaatcttcacaatcttgcttattggattaaagaacgagatccacaatacatcaaagtccatcattaataacaaaatattgaaatagcttggtttctacaaactttggattacagtgttgatcaaaaaataaacgaaaatgttgtggcaacttaattttcagaattatctacagcatactctatatataacaaataagggtattacgaggtttcgcttataacgaggtacattaggtgttccatgaaattcctattgaattataacacctttacaacgaagcatccttacttataacgagggaaaatgaggttgaagagcatgtttcttcacctgtttttggcgctgtgatggctataaataaatacccaagatgcctgtatacagaaatgcctaaaatctgtatgcttattgagtcaacatcatcctgtttatccaccaaatatttttcaacagcgccattcaaacaatatttaatatcttatattgctcggaatggcttcactataggaagttagtgttttagaaaactacatattcatatgtatgctcaatattattgttgtctgatataacgagatcagcttataacgaggtaattagtatgccatttcagttctcgttatagaggggggtctgctgtacttaccgtgtataaaataaataattttgacaactagttataagttttaagttgcttgacagttacttgtaacttgtaacaaaactctagcgaaaagctttgataaaatatttattcaatacgacgaaatagagtagtaatgcaggatgaaaaggaaattctggacacctttgaagagatggcataccagagaacataccatccttaaaaaacgatgataaactggctcttttgaaaatgagacttcaacatatttcctatatcgctacctgcattctaataccacgtatgaggatctttaggcgaaacgagttagaggttgattcccagtacattgcgcacgctccaccgaatgagtccaatcccaagtacgaaaaaacattgtttcttgtacttgggattagaataattcagcagagcatgcgcaatatactcagaatcaacctccaactcgaataaaaatcctcatatgtggtattagaatgtaggtagcgatatgtattatgtgtgttaattacaaaatgtaaagaggaacaagattaaacaagggcattgccaaaatcaaagataatgcaggaagatatctctgaccggcaccgagctctgttggactttcttcaaaaccacgctataagagacgttaacctctaaaccttctaaaattgttttcccaggcggcggtacataaactctattataattagcctaggaataaatttccaaactctttggaaacttgttcgtaggccaatagggcttttcattcacagtcatttgtttcgagcttcttcttcttcttcttagccttctatcgtccacgtttggacataggcctctcccaactccttccatcggtctctatcctgagcaacatatttccaattcgttccggctactcttttaatatcatcaacccatctcatctgtggtcttcctctcggtcgtttactttggtaaggtctccaatgttgtatcgtggcattccaaatagggcttttcatcgattgtcatttgtttcgagccccgtcatatgtcatacaatcagtgtatattaatattatacacagattatacaacatacgacagaagctcgaaacaaatgacaatcgatgaaaagccctattctcatagactatgcaccgccgcctagaaaatcaattttagaaggtttagagacaatcatctcttatagcgtagttttgaaagaaagtccaacagagatcttgattacaactcttcttcttcttcatgtgccttgtccgttgcggacgttggctatcatcatagcaattttaattttgtttgcggcgtttctgaataactcgatcgatgttagtccaaaccattggcgtaagttttgaagccatgagtgtcttcttcttccgggtccgcgtttgctttctattttaccctgtattatcagttggagtatatgatatttatcatgtttcataatatgaacgaggtattcaagtttccgtttcttaattgtgaaagagatttctttttgttttcccattcggttcagtacctctacgttggtggttattacttcatacttaattgattacaaggagtgttatttgatcattatcattatagacatcaatgttatgtcatttttattcacaatgagtttgattggtccaaaccaaattgtgtttaggtatttatcaatcttagtcatcactgataatcacgccccaaacagaatgcggtactgaagggaaggaggggttctagagcttcatcaaacaggtttcacctattctccgaagtaggagtcaaagtgttatcatgcatacagggtgctaccatccatcgaatcagtggccagccggttgttaggtcggttatgtgattttcggcctatttttcacccatctattattcactagcgagtaaacattgtgtcgagacctttagtttgggaaatgccgatattttctcctattcgccgtgtgcaagtacttggaggggatacgagaaacgatcgtgcgtgagtagcggagaaatattgcaacttttaacatatttcttaaataattcagattgtcaaatatgacgtcaactagacgtatagttctgtcattgaagaaaatgggatttcgcaaatgttgttataaatagtaaaaattatatgttgctccacaatattgatatgat

SEQ ID NO: 3534 - DNA, 2537 bp, Diabrotica virgifera
tgtttaaattattttattaggtacattacaatataacatatatgttgctatagtatttcatacatcatacgcatgtaaatcattaacaataaaaaaatgacaattctaaactacgttttgaaaaaactgcacaatcacctatcaggtaaatattttcccagtttatatgtccaccgcatgtaaatcaccgagccacaactatagcatccgcagatttcaattaaaataaaattactttcgtcttaacaacttttactcgactaaattgcctacataacttatcttcgacgatgaagttctcgagacaaaatggtatcaaaaagaatagagatgttttattttaattagaaataagagattattaagctacgagatgttaatcatttacatgcggcacccatttaatgcagacaaataaaaatatatgccatatttataagtattagaataaaatttgtgcctcgagcagttattgctacttttttaaaaagcagcaatatttgcttcacagaaatctagacagcttgagacaaataaaaatgctacatcaatgcttaaaattgtgccctgaaaatgtcaaattatacagtaggcaatgatttaacagatttttcaattatatatttattttgtctgtggtattttcctattaatataaaaacattcagccacgaccccggagcggttctaacctcagaatttcaataataaaaaaaggaaattcttggttaggggattaatgatatagaagaaaagccaaatcacaaatcagtctgctacacactttcttcttcgaggaataggaatcagtaattaacacgaacgatgcttatcaagaaatagtacgcattcacaagagtcctggtaaaagataaatgcatttttctttggtatgattacattagtctttatagtaacaattagaattagaatttatacagataaaatgagtacgagctctaacaactaaatgtttggacaaacggaaatttatcgaaaacattaatcttcacaatcttgcttattggattaaagaacgagatccacaatacatcaaagtccatcattaataacaaaatattgaaatagcttggtttctacaaacttttgattacagtgttgatcgaaaaataaacgaaaatgttgtggcaacgtaattttcagaattatttacagcatactcatctataacaaataagggtattacgaggtttcgcttataatgaggtacattagatgtcccatgaaattcatcttaaattataacacctttacaacgaagcatccttacttataacgagggaaaatgaggttgaagagcatgtttcttcgcctgtttttggcgctgtgatggctataaataaataccccagttgcctgtataaagaaatgcctaaaatctgtatgcttatcaaggccagtgatgtaataaactccaccgcatgtcaacatcgtcctgtttatccaccaatcttttttaacagcgccattcaaacaatatttaatatcttatattgctcggaatggcttcaccacaggaagttagtgttttagaaaactacatattcatatgtctccacaatattattgttgtctgatataacgagatcagcttataatgaggtaattaatctgccatttcacttctcgttatagagggagtctgctgtacttaccgtgcataaaataaataattttgacattaactcgttataagcttataagttgcttgacagttacttgtaacaaacctctagcgaaaagctttgataaaatatttattcaatacgacaaaatagtcgatagagcttcagacaagaagaaaaacataacgtactacgaaagagcgtagcaatgcaggataaagaggaaattctgaacaccattgaagagatggcataccagagaacataccatccttaaaaaagatgataaactggctctattgaaaatgagacttcaacatatttcgtatattttgtgtgtttattacaaaatgtaaagaggaacaagattaaataagagagaagatatagtccgtccgctataactcctcccatgcgatacgattcatctcaatcaaattaagtcaaaacataaattgaaacgaacgtcgatgtgtataaacattttgtatactgtatactatatactacacacatcggtgtacgtttcacttcctcctttgacccaattcgattgaaaacgaatcgtaccgcaagggaaaagttacagcggacagactatatctctgatcgtcactgagctctgttggactttctttcaaaactacgtcacaagagacgttaacctctaaaccttctaaaattgttttcccaggcggcggtacataaactctattataattagcctaggaacaaatttccaacctctttggaaacttgttcgtaggccaatagggcttttcattcacagtcatttgtttcgagcctccgtcatacgtcatacaatcagtgtacattaatattatacacagattatacaacatatgacagaagctcgaaacaaatgacaat

SEQ ID NO: 3535 - DNA, 3936 bp, Diabrotica virgifera
  SmartBlast Evalue=7E-67; Info=Carbonic anhydrase 1 n=13 Tax= Drosophila RepID=Q9V396_DROME
tgggtgtaatggaaagtgtagaccatgagagaatggctgttgactggggatattgcgaaattaacggacctcactcatgggtatctaaatttcctgatgctgctggagaacgtcaaagcccgattgatatttcgcctgtgagcgtaacaaaattccataccgaagaaaggctgcaatggaagtatgaaccggaatcatcgactaaattggaaaatactggagctgcttggaaagttggcgttaaaggcaaaggatcagaattaaaaggagggcctcttgatgatgaatatgtgctggaccaattccactgccactggggagaaacaaatgacaaaggatcagaacacacaattgatggtgaaccttttgctggagagcttcatatggtacactggaactctgctaagtatgccgacattaatgaggctgcaagtaaccagatggattgagcgtgttgggagtatttttaaagcctggaagaaaaatgacgagttggaaaaagtagttaaatacttggatcagattacacataaaggagatgttgttgaaattcccgaatcaattgatccaaaattgctaattccgaaagataccggagggtactacacttaccatgggtccctcactactcctccatgttcagaatgtgttatttgggttgtcttcaaggaaccgatagaagtttctgatgaacagttgaacgccttcagacaaatcaggaagtacaacaaaaacgacgaaatatgttgtgacgcaaactgtgatggttatgtaaagaagaatttcagacccacggtgcccattggggagagagaagtaaaagaatgccgacaataaaatgtatggaagttttgacagattatttcacgtgttcgcacaatggcttataattcagtgtcagtacttaaacgctttttagaaaattgagcgcattaaatttatgaagttacaaaaaattgctagttaaaattacagttacctataggttcaatgttaatgaaaaatagtgctgagcagtcgagtcgtcatggtaatggctcagcaggctcacagactttctttgatctaaatcttttattaggtttatgtttctgggcacgatctagtcaaaaacacaaatgtttaaacaccataggataaaaattaaattagatatgtggttattacgtgggattcctgagtgaatgaagtcagccgatgaaagatgaatatggtgagagattgaatctcgcagcctagtgacctcattcatagatatttactggaacgcgttaatatattataaaagcgaagataatactgcaaataaggatttccgctgttttcgctgtattttttctcccaaccgttcttctatactgtgtctgtcctggcaatctctttcttcgagatatctttgttccatgatctggtctgcttaatttctaaacaattgagttgtacttttctttattctgtcggattatattgtataatttgatccttccagcaaccagactccgatcttttaacacgtttgtaccagaatagtcctttttcctctatttaatcgattttatcgggattcatatccatgcgtgtctaaatatcatcttcattttattctgtaccgacttgtgactctacaatttctacttagacattctatctccgtttgttttgaggccaatactttttgggacagtttttgggacacaaccgtaatatgcgttggtttattaaaaataataattctcctattaaagacttcaaacacgaaaaatttacttgtatttgaattctttatatcttactcatttacgcttttatgaatcttattttgtgcgtggtcctagcgcactgtcataggctggtttacaaagagattaattttatccaatattaacatgaagatctggtctattgaaagacatattcgacttaaaaccatcggtccattcaccaaggaaatcttccacgttggcatttagtgtacgcactgcgcactattagcctgatttatcttagggcggggacgtggacgacacggctgtcttgggcacacgggcacgttggagaatggtctgctatgaaaagcatttgctagtttattgtacaatggaacgggcctataccggggacgtgcgccgtctattcttctacggcacgtgcctttcacgtctcgtcgtagaatgaattggcattgacacatattatactcttggtttataatgtgcgttctttgttaaaaaactacgacttaatattattaaatttaaaaagatttgaagacaatattctcatctatatagtatactacacatataccgtgaaatattctcgttcaatactcctacaaatcttagtagtaaccgtagagttgtatgagagtttaagacaatctatttacatagaggaatcattgcatgttttgtatatatttattattatacaattacagcgttattttggatgaagtgaaaatcaatgatatattttgttacttcgcaaagtattttgataaagattttaagggatatttggaccatctgttgtgagttatataatcgatagaaattttacaatacgtactcggcttgctcaattgaaacgtatcgtttatccagaaaatttttataggtaaacataactacaaataactactatatttaaggcacatagtccattgtttccccaaccgattgtttaacctttgtaaagaattcttgtggacgtagattgaagaattattttacgacattttgtatttcttcgtccatctgaaaacgattactttttaacgtcatttttagtggcccaaagacgtgaaaatcgtaaagcgataaatcggaactatagtgaggattctctaatattctctatttctattgttgtagattttttcacttcttcggcaacataaggcccagcattttcgtgcagaagaattacaagcttttctggacgttttggtcatattgcttgattaaccttgtttaaagtttcattatacaggttttcgttaatatgcactctaagtttcgtaaactcatggttcgtaaacgcaagggttcttcatgattgaaaaaacatgttaacatgaccttgcccgcagaaagttgaaattggtatgagcgcacgctgattatatttatatggattcagtcagttgagagattactattgtttccaaggctaacctgacaaagatatgtttcaattgaacaagcttatagttaattttcattagtgctttctattttatcataatatgtttgaaattggtatcttagtttggatttcacttcttcaattgtaacttatagtgtcttaatatcgctgtgcctttaaaaaactgtataacgatttcgaccgaggcacaaaataaatacctttgtattttgataagcattataactaattgaagcatattgaaatgtatcaaacagttagaaatatacaccaaattcatgtatataaatgttcttaatgttttagtttacattttggtagaagtaaataacatcacaagcttaatatctgggtagaagtgtgtagaagagtttgtagtaaatgagtgttaacaatttgtcaaggaaagaagtttttccaatagaaactttattagcaatagcttaagaagatgatcaccactagctgtagatagcgataaacgaagaagtgaagcctaagttagataatcaggccaattctgtgactacaaatcgaatagaaataagtcaaatcaaatagaggtcagcaagttggatcagaatttgtaggaattgatatactgtaactcatctcgacctctactatcagcacgttgggtagaaattgatttcgactagacaagctttgtcgaaattggtcttcacgcttgcgcgttggtatcattattgctaccagacaaagaagaataaaaacacaacgaaattggcatacgactaggtaccc

SEQ ID NO: 3536 - DNA, 3781 bp, Diabrotica virgifera
  SmartBlast Evalue=7E-67; Info=Carbonic anhydrase 1 n=13 Tax= Drosophila RepID=Q9V396_DROME
tgggtgtaatggaaagtgtagaccatgagagaatggctgttgactggggatattgcgaaattaacggacctcactcatgggtatctaaatttcctgatgctgctggagaacgtcaaagcccgattgatatttcgcctgtgagcgtaacaaaattccataccgaagaaaggctgcaatggaagtatgaaccggaatcatcgactaaattggaaaatactggagctgcttggaaagttggcgttaaaggcaaaggatcagaattaaaaggagggcctcttgatgatgaatatgtgctggaccaattccactgccactggggagaaacaaatgacaaaggatcagaacacacaattgatggtgaaccttttgctggagagcttcatatggtacactggaactctgctaagtatgccgacattaatgaggctgcaagtaaccagatggattgagcgtgttgggagtatttttaaagcctggaagaaaaatgacgagttggaaaaagtagttaaatacttggatcagattacacataaaggagatgttgttgaaattcccgaatcaattgatccaaaattgctaattccgaaagataccggagggtactacacttaccatgggtccctcactactcctccatgttcagaatgtgttatttgggttgtcttcaaggaaccgatagaagtttctgatgaacagttgaacgccttcagacaaatcaggaagtacaacaaaaacgacgaaatatgttgtgacgcaaactgtgatggttatgtaaagaagaatttcagacccacggtgcccattggggagagagaagtaaaagaatgccgacaataaaatgtatggaagttttgacagattatttcacgtgttcgcacaatggcttataattcagtgtcagtacttaaacgctttttagaaaattgagcgcattaaatttatgaagttacaaaaaattgctagttaaaattacagttacctataggttcaatgttaatgaaaaatagtgctgagcagtcgagtcgtcatggtaatggctcagcaggctcacagactttctttgatctaaatcttttattaggtttatgtttctgggcacgatctagtcaaaaacacaaatgtttaaacaccataggataaaaattaaattagatatgtggttattacgtgggattcctgagtgaatgaagtcagccgatgaaagatgaatatggtgagagattgaatctcgcagcctagtgacctcattcatagatatttactggaacgcgttaatatattataaaagcgaagataatactgcaaataaggatttccgctgttttcgctgtattttttctcccaaccgttcttctatactgtgtctgtcctggcaatctctttcttcgagatatctttgttccatgatctggtctgcttaatttctaaacaattgagttgtacttttctttattctgtcggattatattgtataatttgatccttccagcaaccagactccgatcttttaacacgtttgtaccagaatagtcctttttcctctatttaatcgattttatcgggattcatatccatgcgtgtctaaatatcatcttcattttattctgtaccgacttgtgactctacaatttctacttagacattctatctccgtttgttttgaggccaatactttttgggacagtttttgggacacaaccgtaatatgcgttggtttattaaaaataataattctcctattaaagacttcaaacacgaaaaatttacttgtatttgaattctttatatcttactcatttacgcttttatgaatcttattttgtgcgtggtcctagcgcactgtcataggctggtttacaaagagattaattttatccaatattaacatgaagatctggtctattgaaagacatattcgacttaaaaccatcggtccattcaccaaggaaatcttccacgttggcatttagtgtacgcactgcgcactattagcctgatttatcttagggcggggacgtggacgacacggctgtcttgggcacacgggcacgttggagaatggtctgctatgaaaagcatttgctagtttattgtacaatggaacgggcctataccggggacgtgcgccgtctattcttctacggcacgtgcctttcacgtctcgtcgtagaatgaattggcattgacacatattatactcttggtttataatgtgcgttctttgttaaaaaactacgacttaatattattaaatttaaaaagatttgaagacaatattctcatctatatagtatactacacatataccgtgaaatattctcgttcaatactcctacaaatcttagtagtaaccgtagagttgtatgagagtttaagacaatctatttacatagaggaatcattgcatgttttgtatatatttattattatacaattacagcgttattttggatgaagtgaaaatcaatgatatattttgttacttcgcaaagtattttgataaagattttaagggatatttggaccatctgttgtgagttatataatcgatagaaattttacaatacgtactcggcttgctcaattgaaacgtatcgtttatccagaaaatttttataggtaaacataactacaaataactactatatttaaggcacatagtccattgtttccccaaccgattgtttaacctttgtaaagaattcttgtggacgtagattgaagaattattttacgacattttgtatttcttcgtccatctgaaaacgattactttttaacgtcatttttagtggcccaaagacgtgaaaatcgtaaagcgataaatcggaactatagtgaggattctctaatattctctatttctattgttgtagattttttcacttcttcggcaacataaggcccagcattttcgtgcagaagaattacaagcttttctggacgttttggtcatattgcttgattaaccttgtttaaagtttcattatacaggttttcgttaatatgcactctaagtttcgtaaactcatggttcgtaaacgcaagggttcttcatgattgaaaaaacatgttaacatgaccttgcccgcagaaagttgaaattggtatgagcgcacgctgattatatttatatggattcagtcagttgagagattactattgtttccaaggctaacctgacaaagatatgtttcaattgaacaagcttatagttaattttcattagtgctttctattttatcataatatgtttgaaattggtatcttagtttggatttcacttcttcaattgtaacttatagtgtcttaatatcgctgtgcctttaaaaaactgtataacgatttcgaccgaggcacaaaataaatacctttgtattttgataagcattataactaattgaagcatattgaaatgtatcaaacagttagaaatatacaccaaattcatgtatataaatgttcttaatgttttagtttacattttggtagaagtaaataacatcacaagcttaatatctgggtagaagtgtgtagaagagtttgtagtaaatgagtgttaacaatttgtcaaggaaagaagtttttccaatagaaactttattagcaatagcttaagaagatgatcaccactagctgtagatagcgataaacggagaagtgaagcctaagttagataatcagggtcgaatagaaataagtcaaatcaaatagaggtcagaagttggatcagaatttgtaggaattgatattctgaaactcatctcgacctctactatca

SEQ ID NO: 3537 - DNA, 2844 bp, Diabrotica virgifera
  SmartBlast Evalue=5E-67; Info=Carbonic anhydrase 1 n=13 Tax= Drosophila RepID=Q9V396_DROME
tgggtgtaatggaaagtgtagaccatgagagaatggctgttgactggggatattgcgaaattaacggacctcactcatgggtatctaaatttcctgatgctgctggagaacgtcaaagcccgattgatatttcgcctgtgagcgtaacaaaattccataccgaagaaaggctgcaatggaagtatgaaccggaatcatcgactaaattggaaaatactggagctgcttggaaagttggcgttaaaggcaaaggatcagaattaaaaggagggcctcttgatgatgaatatgtgctggaccaattccactgccactggggagaaacaaatgacaaaggatcagaacacacaattgatggtgaaccttttgctggagagcttcatatggtacactggaactctgctaagtatgccgacattaatgaggctgcaagtaaccagatggattgagcgtgttgggagtatttttaaagcctggaagaaaaatgacgagttggaaaaagtagttaaatacttggatcagattacacataaaggagatgttgttgaaattcccgaatcaattgatccaaaattgctaattccgaaagataccggagggtactacacttaccatgggtccctcactactcctccatgttcagaatgtgttatttgggttgtcttcaaggaaccgatagaagtttctgatgaacagttgaacgccttcagacaaatcaggaagtacaacaaaaacgacgaaatatgttgtgacgcaaactgtgatggttatgtaaagaagaatttcagacccacggtgcccattggggagagagaagtaaaagaatgccgacaataaaatgtatggaagttttgacagattatttcacgtgttcgcacaatggcttataattcagtgtcagtacttaaacgctttttagaaaattgagcgcattaaatttatgaagttacaaaaaattgctagttaaaattacagttacctataggttcaatgttaatgaaaaatagtgctgagcagtcgagtcgtcatggtaatggctcagcaggctcacagactttctttgatctaaatcttttattaggtttatgtttctgggcacgatctagtcaaaaacacaaatgtttaaacaccataggataaaaattaaattagatatgtggttattacgtgggattcctgagtgaatgaagtcagccgatgaaagatgaatatggtgagagattgaatctcgcagcctagtgacctcattcatagatatttactggaacgcgttaatatattataaaagcgaagataatactgcaaataaggatttccgctgttttcgctgtattttttctcccaaccgttcttctatactgtgtctgtcctggcaatctctttcttcgagatatctttgttccatgatctggtctgcttaatttctaaacaattgagttgtacttttctttattctgtcggattatattgtataatttgatccttccagcaaccagactccgatcttttaacacgtttgtaccagaatagtcctttttcctctatttaatcgattttatcgggattcatatccatgcgtgtctaaatatcatcttcattttattctgtaccgacttgtgactctacaatttctacttagacattctatctccgtttgttttgaggccaatactttttgggacagtttttgggacacaaccgtaatatgcgttggtttattaaaaataataattctcctattaaagacttcaaacacgaaaaatttacttgtatttgaattctttatatcttactcatttacgcttttatgaatcttattttgtgcgtggtcctagcgcactgtcataggctggtttacaaagagattaattttatccaatattaacatgaagatctggtctattgaaagacatattcgacttaaaaccatcggtccattcaccaaggaaatcttccacgttggcatttagtgtacgcactgcgcactattagcctgatttatcttagggcggggacgtggacgacacggctgtcttgggcacacgggcacgttggagaatggtctgctatgaaaagcatttgctagtttattgtacaatggaacgggcctataccggggacgtgcgccgtctattcttctacggcacgtgcctttcacgtctcgtcgtagaatgaattggcattgacacatattatactcttggtttataatgtgcgttctttgttaaaaaactacgacttaatattattaaatttaaaaagatttgaagacaatattctcatctatatagtatactacacatataccgtgaaatattctcgttcaatactcctacaaatcttagtagtaaccgtagagttgtatgagagtttaagacaatctatttacatagaggaatcattgcatgttttgtatatatttattattatacaattacagcgttattttggatgaagtgaaaatcaatgatatattttgttacttcgcaaagtattttgataaagattttaagggatatttggaccatctgttgtgagttatataatcgatagaaattttacaatacgtactcggcttgctcaattgaaacgtatcgtttatccagaaaaaaattataggtaaacataactacataatataattattactatatttaaggcacatagtccattgtttccccaacccattatttaacctttgtaaagaattcttgtggctctagattgaagaattcttttacgacattttgtatttcttcgtccatctgaaaacgattaccttttaacgtctatttttagtggcccaaagacgtgaaaatcgtaaagcgataaatcggaactata

SEQ ID NO: 3538 - DNA, 6175 bp, Diabrotica virgifera
  SmartBlast Evalue=5E-98; Info=Cell division cycle 42 n=23 Tax= Coelomata RepID=Q6PFU4_DANRE
caacccaaaagtgcagttttataatagtttttatccatttttaggttgttttttatacatttttaataattaagctataatgcagacgatcaagtgtgtggtggttggagatggagccgttggtaaaacttgtttattaattagttatactacaaataaatttccttccgaatatgtcccaacagtcttcgacaactatgcagtgactgttatgataggaggggaaccctacaccttaggtttatttgatactgcaggtcaagaagattatgacagactacgccccttaagctacccacaaacagatgtcttcttagtatgtttttcagttgttagtccgtcctcttttgagaatgtcaaagaaaagtgggtacctgaaattacacaccattgtcagaaaacaccttttttattagttggtacacaagttgatcttcgtgacgatggagctaccatagagaaactagcaaaaaacaaacagaagcccatatcaattgaacaaggagaaaaactagccaaagaactgaaagcagtaaagtatgtcgagtgttccgccttaacccagaaaggactgaagaatgtttttgatgaagcgattcttgcagctctagaaccaccagaaccagtcaagcgcaaaaagtgtgtcatcttgtaaatctaattacacacctttaaaccccatcagaaagtatcaaaagtatttctaaggagggacaaaatagcccaaaacaaggacaattttttatctctttcctgaagttggcatcgagttgaaaattaatacttttggtatatgcggctgttggtaggactttcttgtattatttcttccaacatattggattttcttcctatttgatgtgtgtttgtgcacaataattaattgaaaaaccattttacagggtgtaccataattgttagatactttagttaaatgataatagatggcatcatttgagataaaatttgatttttattcacgaattttctccatgtattctttgttatgtattaaaatgtacaatttatattcaaattgaatctttgacatcaaagtcgtggcgccatctagcagctcttttgaaatttataccattttcgtattatctgtacatatttagttgtaacacagatggggagaggcattattttacaccctgtataataattgattgatttgaatgcaagaaacatacaatttattccagagaaagctaaccacagcatctaggacatatccaaagtcctataatctttcaatttgtctgtgctaacttctaacctcttttttacaaacttatcaaacgtttgacttctgttaaagctttttaactaatatagattgtctaaaagggcagtaatcgtttacttttgtttcttccggtatgctcaaaaaccatcaacacagtttgtagaggaactaaaatttttggagagactgaaggagacgttgacaggggttctcatacctgcctagagaagataatacaataatacattttatatatttattaataatatagtaataatgttgcgcgtgcgttgtctactaagcattgtggatttggtcgatcttccgatttagtttaagaaataaaaatatatgggcaacttttttttggttttgtttcctggccttggtgtgaaaccttagccacgtaattactataactatctcgggggagtaatgtgtagtgtgtgttgagtaaatgggttgttacttagtaaattcggcttcgtaaagacaaagtttctacccagactggattcgaacttattgggttcaaaggtaggctctcttaccactgagccacggaagcttgtacccgtctttgttaagattagtttatagttggcgaagaacatttcagtaagtttagctcgcgtatttcgcctctaatcttggaaaaaatatatggacgtgtttcaaatttcaaacaaattgtttattttaagaaaaacgttacgaaaacatatttagttcaaaagtactaattcctcaatatatttcattatttgaactaacattttttttatcctgattattgatttagagatgtgtacaaatcaacaatgcattagtgaatccttcactctctcttagtgtacataatttgaaacaattaattttacatccaattataggtccatgacatgtgacacattcatgtcatatatcattaagtagcaattgctcaattctatgctttcgaaattataaagtaaatcctttctgcaccagtaaaacagaattgaacaattgtgtcagcagaaacatatatttttggatagtaatgggagtcgaatgagtgtccttagataggattttgttatgattaaagtaaactttattgtaacttactgagcatggggatacgtgagcgtggggatatactcggacatttactcaaataatccttatttttgaagcttggttaggcaaatacagagacaacttaaaaacaggttaatttcaaattttctttgccacactcggtgaaatagtcggacaagtttgctagtaaaatactaagacaacttaaaaacacagatatgttaaaaaaaaatcataatgcagatgtggggctaaactaagacatgtgggaatgtccgggtatttcaccacaactatgattagaaaaggcaaatattaatcggataataaaaaggtattttcagatatcttccttttaacccaggtatttccaacaaatcaattagtgcaatattaggatattgctcataaacaccacaaagcagccgattgaacaaatcttagtatctctccagatagcttatgaaattttacatcagatagagcagataactcaaaagtcaaatatttaaagatatcctagtattgttctagtgggacgatatgtactatgtttatgagctttgtatgtattttgaacatatgttcgataatccgaacaatttgataatccaaactacccctgtaccaattagttcggattatcgacgctctactgtacacaaagttaacatcaaactaaacaataagcactataggatacataagaattattatcttagtgattttatttttaaaatttgtacttactgtctattggtatttgaagggcaattgctataatcgtatgcactagaataagcaactaataccaacaacgcgcacaaaagggagactttaaaaaccattttgaccaataaacacttgagaatatctctagctagatatacgagaagattttgttttaaagttaatgctaaaacattcaagatatatatgcctactttatttatttttctaatacttcctagaacacaaaatccttatatttttgttagattttgtaataatattatttgtttgatatagtttcttaaaataactttaatttaaaggtaaataggattaaaatgtaagtgatgtgttgttactgataacttttctctaagcttttacctatgtaaattttgcatatattaccaggtgaaggttataatcaaaaataataattctacaaaccttctcttttgcaagttctttgtattccaaaaaactatgtagaaacgggagtttttataaacatgtaagaaaagaaagaggtaccttgatataataaaaataaatttaacataaactaaatatataatggtagggaaacccaagcggggacttttgcagttactcgagcgcgtcagattatcatatggggagaaacctggtaccctgcagatgtacctctaccatatattggctcttaacacaggggagttcgttaacactagacgcaccaacatttctgcatacctagaagcaccgcagcggtcaaaatgacgggtattagaatttctattgccagccgtttttgaattctttttttacttgataaaaacctatattgagttaataactaataataaaagacatatttaattaatttaaatgaattacttaattatttaagcacgatttatgcagtagcaaaatttttcaattttgcttgtacaagacccacacaaattttatttacatttatgtatatgacaaatttcacatgtttttcactttcacctgctatgtcttctctgttgttttttgtggtgttgaatcgtggaccttgaacaaagaatatgtgcagaaaattggaagcattccaaatgtggctatatcggagaatagccaaaacagaatcggagagtcacaaatgaggaggtcctcagaataatgtagaagaaccgagagataccaccatcaaatctcgaaagtgcgagtactttagacacattttgcgaaatgaatccagatatacccttctagaagccatcctgcaaggaaaaatatgtggaaaacggggcccaggaagaagaacatcctgcggataaggtaaaaattcccatgatggtcgccaacattcatcacggataggcacataaaaataatatgctcaaaaatattatatgcctaagtgaatacataaatataagctagtgaagctactactatagtatagtctagcgctattgcaaagtaacttccatcctatagtgtcgacggaggaattctctaaactgcttccgcgaattcctcttacccggttagtaataattcctaaagaggtattggtatcctcaatctcaactttatcttcagaatcgctacccgatgaatgtccttgatcaacttgatcaggcacatactcgtcttattcattattggatatattttcatcacataactctactttatattcattatctgacaaattctgtacccactccaatagttatttctcagtcaaatatcgacgagacgtgataacagcagaaaagagaaagttcacaatgaaaaatcaaaatacatattgagcacgcacttgcaaaaagtatactcaaattacttaataacaaatgttttcgatgcattttatacataaaataagtaaaaacttcccagaaaaatagaacaaaatgtagaataccttgtcattactacccaatttttctagatagacattaagtatattcaaaatgtaattatactgtaaaagttcctgtaaaagagaaattataatcctcaaataaatattaaagtcccaaattataaattttgtaaaataaatatgaatgagtaatacaaagggtcaaaaagggaaagcagtcaaaatgactgctctgctgcttctaggtagacattagcatatcttaaaaagtaactccgctaagtagctgtaaaagagaaattatattcttgaaatagatctaggaaaagtcataaattatcaagtttctaaaataactatgaatgagtaaaacagagtgtcaataatagaaagcagtcaaaatgaccgctctggtgcttctagtgttaaggggggcccgaaaaaaaaatatatccttaaaaatctcaaaattgtcagattaagataaggtaagttaaatacatgcaaaggagtgtatatttcaaaaatctgacgatttgagcccggcgtaaggaaatggaaatgggaaagtcccaaaatttcaacaggaaaaagcgaatatttcgcgaaataaatgacagatcgaaaaactaaaaaaaattgtgctaagtattttttaaaaatctatcgaatgatactaaacacgagtctccacggagaggggtggggggtaaatttaatattttaaatacgaattccgcgatatttcgcaaaatgaacatcagatcgaacaactgtaaaatacacttattcaatatttttgaaacatctatagaatggcaccacacacgacctcccacgaaggtgaggtgggggttactttaaaatcctaaataggagcccccattttttattgcagatttggattccttacgtaaaagtaagtaacttttattcgaaacgttttttcgaattatggatagatggcgctataatcgaaaaaacgattgttggaaatggaaaattaaattaaaaaatggcaagcgcccacttaaatggaaaactttacttaactttttttggttttaggacctactcttcacaacccagtaggtccccaaagcgctcgagagactgcacatttagcatactttgctcccccaccataaccaacaactctagatataactgagcttaacctttaactacccgcgcattaagttatgacataactacacgcgtggagtactttatacgccacaaga

SEQ ID NO: 3539 - DNA, 4004 bp, Diabrotica virgifera
  SmartBlast Evalue=3E-98; Info=Cell division cycle 42 n=23 Tax= Coelomata RepID=Q6PFU4_DANRE
caacccaaaagtgcagttttataatagtttttatccatttttaggttgttttttatacatttttaataattaagctataatgcagacgatcaagtgtgtggtggttggagatggagccgttggtaaaacttgtttattaattagttatactacaaataaatttccttccgaatatgtcccaacagtcttcgacaactatgcagtgactgttatgataggaggggaaccctacaccttaggtttatttgatactgcaggtcaagaagattatgacagactacgccccttaagctacccacaaacagatgtcttcttagtatgtttttcagttgttagtccgtcctcttttgagaatgtcaaagaaaagtgggtacctgaaattacacaccattgtcagaaaacaccttttttattagttggtacacaagttgatcttcgtgacgatggagctaccatagagaaactagcaaaaaacaaacagaagcccatatcaattgaacaaggagaaaaactagccaaagaactgaaagcagtaaagtatgtcgagtgttccgccttaacccagaaaggactgaagaatgtttttgatgaagcgattcttgcagctctagaaccaccagaaccagtcaagcgcaaaaagtgtgtcatcttgtaaatctaattacacacctttaaaccccatcagaaagtatcaaaagtatttctaaggagggacaaaatagcccaaaacaaggacaattttttatctctttcctgaagttggcatcgagttgaaaattaatacttttggtatatgcggctgttggtaggactttcttgtattatttcttccaacatattggattttcttcctatttgatgtgtgtttgtgcacaataattaattgaaaaaccattttacagggtgtaccataattgttagatactttagttaaatgataatagatggcatcatttgagataaaatttgatttttattcacgaattttctccatgtattctttgttatgtattaaaatgtacaatttatattcaaattgaatctttgacatcaaagtcgtggcgccatctagcagctcttttgaaatttataccattttcgtattatctgtacatatttagttgtaacacagatggggagaggcattattttacaccctgtataataattgattgatttgaatgcaagaaacatacaatttattccagagaaagctaaccacagcatctaggacatatccaaagtcctataatctttcaatttgtctgtgctaacttctaacctcttttttacaaacttatcaaacgtttgacttctgttaaagctttttaactaatatagattgtctaaaagggcagtaatcgtttacttttgtttcttccggtatgctcaaaaaccatcaacacagtttgtagaggaactaaaatttttggagagactgaaggagacgttgacaggggttctcatacctgcctagagaagataatacaataatacattttatatatttattaataatatagtaataatgttgcgcgtgcgttgtctactaagcattgtggatttggtcgatcttccgatttagtttaagaaataaaaatatatgggcaacttttttttggttttgtttcctggccttggtgtgaaaccttagccacgtaattactataactatctcgggggagtaatgtgtagtgtgtgttgagtaaatgggttgttacttagtaaattcggcttcgtaaagacaaagtttctacccagactggattcgaacttattgggttcaaaggtaggctctcttaccactgagccacggaagcttgtacccgtctttgttaagattagtttatagttggcgaagaacatttcagtaagtttagctcgcgtatttcgcctctaatcttggaaaaaatatatggacgtgtttcaaatttcaaacaaattgtttattttaagaaaaacgttacgaaaacatatttagttcaaaagtactaattcctcaatatatttcattatttgaactaacattttttttatcctgattattgatttagagatgtgtacaaatcaacaatgcattagtgaatccttcactctctcttagtgtacataatttgaaacaattaattttacatccaattataggtccatgacatgtgacacattcatgtcatatatcattaagtagcaattgctcaattctatgctttcgaaattataaagtaaatcctttctgcaccagtaaaacagaattgaacaattgtgtcagcagaaacatatatttttggatagtaatgggagtcgaatgagtgtccttagataggattttgttatgattaaagtaaactttattgtaacttactgagcatggggatacgtgagcgtggggatatactcggacatttactcaaataatccttatttttgaagcttggttaggcaaatacagagacaacttaaaaacaggttaatttcaaattttctttgccacactcggtgaaatagtcggacaagtttgctagtaaaatactaagacaacttaaaaacacagatatgttaaaaaaaaatcataatgcagatgtggggctaaactaagacatgtgggaatgtccgggtatttcaccacaactatgattagaaaaggcaaatattaatcggataataaaaaggtattttcagatatcttccttttaacccaggtatttccaacaaatcaattagtgcaatattaggatattgctcataaacaccacaaagcagccgattgaacaaatcttagtatctctccagatagcttatgaaattttacatcagatagagcagataactcaaaagtcaaatatttgaagatatcctagtattgttctagtgcgacgatatatataccaaaaaattataatttaaaaataaaaatcgacctgtttcgggatttttctccagagtcgcccattctcgagaaaataaatgtattccaactcaaacgttctcactgtataaaaaatgagactaaaagacataaaaaatagacagatctgatgttttcgaaatccctaatatttcgtacagttgttcacataaacatctttttggaaaaataatagagtaattaatagaaatacggaccgttttgtagctgttttaagaaatccttatcgaaaaaacaccattcaactctcatttcgtcctgacaattgttttaaatgtattgaggattaaggattttttatttatatacaggttcgtttccttctggttaggttttttcgttaatttaggtttcacattacgtaaaaatggtgctaacacacaaaaagagtttcgaaagaggggcagatatatttaaaacaatttaccaaggtgcaggggatccaaaaaattatcactctttgtaatgaagaaagttgaagattaaaatatgagaatggagagattgtttacgaagcaacatttttgttcaatgaactgtatttttgttggagagaaatttaaacattaacaattaagagaatatttggattgtggacattgtttgtcagacaaaaaacctagtagaatgttttaacaatgcgatttattattaatccaacggaaaggcatattgaatatcctgtacattttaacattaatttaaaaattataattcgtgaatatcgacatccatattctaaatatagacttggaactaacaaatgactaaaatttttggattccccgatagcaccaacgtgaaattacacaataaaatgtatcaacagttgaataattttttacgctagagcatatgtatataaactcgagagaatggagtgtgtgtgataattttgtattttatttaactgcatttatgtttggagttttaaaatgagtattgaaaacatatttccagattttagtactaattgagcatattttttagtgtgtacagaaaagtttgaatgttgtgtaatctaagtattctaatataaagttatttaatacatgaaataaacatttatatgtaaact

SEQ ID NO: 3540 - DNA, 401 bp, Diabrotica virgifera
ggggtggggggttagtttaaaatattaaaaaggagccctcattttttactgcagatttggattccttacgtaaaaataagtaacttttattcgaaacgattttttcgaattatggatagatggcgctataatcgaaaaaacgattgttggaaatggaaaattaaattaaaaaatggcaagcgcccacttaaatggaaaactttacttaactttttttggttttaggacctactcttcacaacccagtaggtccccaaagcgctcgagagactgcacatttagcatactttgctcccccaccataaccaacaactctagatataactgagcttaacctttaactacccgcgcattaagttatgacataactacacgcgtggagtactttatacgccacaaga

SEQ ID NO: 3541 - DNA, 5400 bp, Diabrotica virgifera
  SmartBlast Evalue=0; Info=Nucleolar protein c7b n=1 Tax=Aedes aegypti RepID=Q17HC3_AEDAE
gccaagtggacacaaaaaaatgtaattgaagttttgcttgtttttcgtgataattatatggacttttgtttgagttggttatctcctggccgaaaaataattatttttattatacacgtgtatttttaaatcataagacatagtttttgaaatatatattggttactcttcgagtttccggtttagaaaaattatttaaaaatggttcgatcatacattgcattgccattagtttctcctacaagaaagtccaagacacaagatgaattttggtcccgaagggcatcacaggatgttggaagggtcactcataaggaaggttttcctggaatgcggagcaaaagcagaagcgtagaccacggcattacatccccatttgatttggacgccttacgagcaaaagtcgatagccagtttgatagaagtcttgatagagatctagatggttctacaaatagtttatcggaaaagaggaaagctggtccaccggaaaatacgactgtttacacggtggcagacagagacacgctaacatcagtagcagcccgatttgataccactccttccgaattaacgaaattaaatcgtctagcaactccgtacatttttccaggccaacagctgtacgtgcccaacagggaacaagcggaaaacgattccgaaggttctactcccgtagaagactctcatgatgatttgccaccggcggaaaaagaattgttggagaacttgaggccagtcagtccgaagcctggccatgtggagagagtgcgcactccatcatgcccccaaggaggcagcagcagtgaatacgaagactcggaatccgcggtcttccgcgagcgattcctcaagatcaacgtgcgccacatcacggatggccaaggcgtcgttagcggagtgctcttggtcactcccaacgccgtcatgttcgaccctaacgtgatagatcccttggtcatcgaacacggacctgaggcttatggtgtgatcgcgcccatggagtttgtcgttaacgccgctatctacaatgacatcgcgcacatgagggttggacattgcgagagtaatttgtcggagaaacaagaaatttattatccgaaatctgaaaaggaagaagagcaagattcgttgatggttaaagatgaaacgttccctgaacttgtcacaggcgatgatgctgagtctgtgtgttcctgtaccgaaagagaaggtgacgcgttcccaaaagcatttgaaagggaattggttacgccgactaatttagaagatccagaaggtcagcataaatctttagaagaaagaagaaaatctctgctggaccatcattgggcgataccgtccagggatagacagtctatagatacagatgaaatgccagctataactccaactggcgcccccgacgatcacattcaagacgaagatgatagcttaaacaaagagagttgtcacgattccggtattgatattagagaatcaagtataccaccaattgtacatgttcctccaaaaaagaaatatagcgatgctgatatagtactttccaaagattgggtaccgccaatcacaattggagcaaccaatttgagttataccagtgaacctacagatagtcctgcgagaaagaagacgaactcggtgtcatttagtttggattctagctcggagctcgaccctggccaacctccactgtcaactagttactctgagtcaaaggaagatgtagataaggctgatagtagaaaaaataagatgttaaaaagactgtcatatcccttgtcttgggtcgaaactactctcagcggagacaaagatgaagataaacctcctagtcaaccccattcagcagctgacgttcaacattcttcagttttctcaaaagtattttcaaggcgttcatcggtgggaactttcatgagacaaccgacagaaagtagctcaaaatcaaaaacccctgcaccaaaactggattacagatcgatggtatctgtggaagatatgccagaattattcgtttcgttcgataaattgatcccgaggccggcgagatcttgcgacgaccctccgctatatctgcgattgagaatgggcaaaccactcaacaaagttatacccaggtctacgcctctgatgtcgtacgggaagaagaagatgaggcccgaatactggttcagcgtcccgaagaatagaatagacgaactctacaaattcattcagggatgggtgcctcatttgtatggtgaattggatgaagaaaaggtcaaggaaagaggattctccttggtggagatggacacggagctatggagtgaagagccgacaccatctgctagtcgccatggaagccaagacggggaaattaccgaattaaccaaagaaagctgggaggtattgccgatgtcagaagaactgcggcgagcattctattcgtcgtcagctgcaccttctttagatatagaacttaccccaccagacctaatcggtacgacagaaatccttaaggaccaccacagggaacacctttgtaggcatttaccggccagggcggaaggctacgcttggacgttaatatttagtaccagtcaacacggtttcagtttaaattccatgtataggaaaatgttcaaactcgagtcacctatactcatggttatagaagacacagacaataatgtatttggtgctctgacctcatgtgccctttccgtatctgaccatttctacggcaccggcgaatctctgctattttccttcacgcctgatttcaaagtattcaactggacgggagaaaacttgtacttcatcaaaggcaacaacgaaagtatcagcattggcgccggcgatggtaaatttgggctctggctcgatggcgacctctacattggcaggtccgagtcctgccagacatacgggaacgatccgcttacgcctaaaattgacttcgtagtgaagacgcttgaatgttgggcgtttatttcgagttaatttgtgatcgagtcaggaggagagaaactcgtgttaaacagtggtgcatatcaagaaggcgtgaaaaacaatatttttacaaactaataaagatttaaaattagccggagctttagtcgtagaaccagagagtaacacaactgcacaactgttggaaacaaacaaacaaaaacatctatataacagagaaacaatattgaaaaaaaaaacataatgaagagatatttattgtagaggtaacggctgccgtacagttattatatggctcgttaaaattagttttttatgaataatgttattgaaaaattgttaaaaaacgattaatatacattgtacgcttatatagctcatcaattgtcggcaccagcaaaattacctgaaacggtaactaataaatacctttatttttattaaatgaaagttatgtatatctataaagaacttgtttcctcttgtgtattatgcaatgtatattataatatattcattacggatttttttatagaccagagaggttacagtcataaatattatagcatatacagaccgtttagtgtttgatcagatatagcccactgaagtaagcgctaaaaccggcaacattgcttatgagcatgagttgcattgccactgtagaatgacgaatgactgaatgaatcggcgcgaatcaggtgcattcagtgggctatggggaagcggtgttcccatttatagcgagtatatctaatttaaaactaaacaatctgtatatttgattccttcaggtattccaaataaccatcaggtatttataaagtgcgtatttcgacacttctttaattttacttccccgtttgcttagttattgaagcaataattacacgtgttaaaaaatgcatgtacagaaataatttttgtaagtttcttgtttttttaacagtgaaatgaagtaatagatgacgttatagatacacagggtgttccaaaatttattttagtacatttgttattattatttgcctgaacaattctttctctgttcatttttatgttgttttaattaaactgttggttcttaatggcatttggtatttactttgagaaggcatatgtatgtcatgtgcgaattcttaatctttcaataccaagaaagtattccactctattttattaatgggtttgtttgttgttcctcatcttcgcctctttctctcttcagtcctgaatcctggaaggtcgatccatcttgttggggatcttcctcgtgatcttcggccttctatattttcttgaataataagtgtttctatggtttcggtgtctgcttgctggagagaactatgatcaatgatcctagatataagtattaggtcacatcctcaaacaggtcaaccgtggttatgtgtggatggttgttatgtagtttacctattatcacgatctttgtttttgatatgtttaactgcagaccaaatatttgagtttcgttttcaactttcaactagtcgcatgatatcaattaacttgtcttgactatttgcaaaacgtaggttgtttatttttcagccctttattgagatgctcttttcccatctttcaagccctcttctcttctcatttcttcgcctagtcagtgacaattaggatcaatatacacagccgtgtggtacatcgaattgtagatatgattgatttagtcttccatgttgctcaatactaataattgttgtagatcggtttaaaataaattggaacatccttaatcgtaatcccattggatattatttaatgagagagttaaagtatatatatttatgtatttgtgatgtaaataacacgaaagttgttaaaaaaggctattgaacttgtaaaaagttagtgaggctgtaacattttaggctgtgacctctcattatatatatgtgtataattttttgtaaattcttttattcgatcttaatttagaagtacaaaatatttagcagagtaactaattttactaggcgtagtaggtactagaattttatacagtgagtgcaaaaattaacgtatttttgtaattttgataggtgtacaaaaaaatttttgaattttttttcgaaatatatcgggcatcgaaatattggcaacttatgttagtttttgtacacattgtatagcccgtctttagttttaacacttaaatttttatattactgtattatgtacataatgatattcacaaagaactgtcaaaattcatttacatgatacgtcgaagcagaaactttaccaaagatataaccctgtggtgtaccaatatttttaacgtaaattatcgcgattttaatattgatctaaatgcattttgacaggtttttctatttacttatttatggaagaatattcccaaaaaaattacaaaaaaagtaaaatatatacctacagggcggc

SEQ ID NO: 3542 - DNA, 3149 bp, Diabrotica virgifera
  SmartBlast Evalue=1E-87; Info=Oxidation resistance protein 1 n= 2 Tax=Formicidae RepID=E2BJZ9_9HYME
gtgaaggtgattcggttttccgactttttttttaagttgttgtgattatgctcgctaccaagatgcgattcggagacattattaaaaaaatgaaaaagaaaacgaaattgcgtagtaatagtgatttcggtcctaaaaaggtattgccgatgtcagaagaactgcggcgagcattctattcgtcgtcagctgcaccttctttagatatagaacttaccccaccagacctaatcggtacgacagaaatccttaaggaccaccacagggaacacctttgtaggcatttaccggccagggcggaaggctacgcttggacgttaatatttagtaccagtcaacacggtttcagtttaaattccatgtataggaaaatgttcaaactcgagtcacctatactcatggttatagaagacacagacaataatgtatttggtgctctgacctcatgtgccctttccgtatctgaccatttctacggcaccggcgaatctctgctattttccttcacgcctgatttcaaagtattcaactggacgggagaaaacttgtacttcatcaaaggcaacaacgaaagtatcagcattggcgccggcgatggtaaatttgggctctggctcgatggcgacctctacattggcaggtccgagtcctgccagacatacgggaacgatccgcttacgcctaaaattgacttcgtagtgaagacgcttgaatgttgggcgtttatttcgagttaatttgtgatcgagtcaggaggagagaaactcgtgttaaacagtggtgcatatcaagaaggcgtgaaaaacaatatttttacaaactaataaagatttaaaattagccggagctttagtcgtagaaccagagagtaacacaactgcacaactgttggaaacaaacaaacaaaaacatctatataacagagaaacaatattgaaaaaaaaaacataatgaagagatatttattgtagaggtaacggctgccgtacagttattatatggctcgttaaaattagttttttatgaataatgttattgaaaaattgttaaaaaacgattaatatacattgtacgcttatatagctcatcaattgtcggcaccagcaaaattacctgaaacggtaactaataaatacctttatttttattaaatgaaagttatgtatatctataaagaacttgtttcctcttgtgtattatgcaatgtatattataatatattcattacggatttttttatagaccagagaggttacagtcataaatattatagcatatacagaccgtttagtgtttgatcagatatagcccactgaagtaagcgctaaaaccggcaacattgcttatgagcatgagttgcattgccactgtagaatgacgaatgactgaatgaatcggcgcgaatcaggtgcattcagtgggctatggggaagcggtgttcccatttatagcgagtatatctaatttaaaactaaacaatctgtatatttgattccttcaggtattccaaataaccatcaggtatttataaagtgcgtatttcgacacttctttaattttacttccccgtttgcttagttattgaagcaataattacacgtgttaaaaaatgcatgtacagaaataatttttgtaagtttcttgtttttttaacagtgaaatgaagtaatagatgacgttatagatacacagggtgttccaaaatttattttagtacatttgttattattatttgcctgaacaattctttctctgttcatttttatgttgttttaattaaactgttggttcttaatggcatttggtatttactttgagaaggcatatgtatgtcatgtgcgaattcttaatctttcaataccaagaaagtattccactctattttattaatgggtttgtttgttgttcctcatcttcgcctctttctctcttcagtcctgaatcctggaaggtcgatccatcttgttggggatcttcctcgtgatcttcggccttctatattttcttgaataataagtgtttctatggtttcggtgtctgcttgctggagagaactatgatcaatgatcctagatataagtattaggtcacatcctcaaacaggtcaaccgtggttatgtgtggatggttgttatgtagtttacctattatcacgatctttgtttttgatatgtttaactgcagaccaaatatttgagtttcgttttcaactttcaactagtcgcatgatatcaattaacttgtcttgactatttgcaaaacgtaggttgtttatttttcagccctttattgagatgctcttttcccatctttcaagccctcttctcttctcatttcttcgcctagtcagtgacaattaggatcaatatacacagccgtgtggtacatcgaattgtagatatgattgatttagtcttccatgttgctcaatactaataattgttgtagatcggtttaaaataaattggaacatccttaatcgtaatcccattggatattatttaatgagagagttaaagtatatatatttatgtatttgtgatgtaaataacacgaaagttgttaaaaaaggctattgaacttgtaaaaagttagtgaggctgtaacattttaggctgtgacctctcattatatatatgtgtataattttttgtaaattcttttattcgatcttaatttagaagtacaaaatatttagcagagtaactaattttactaggcgtagtaggtactagaattttatacagtgagtgcaaaaattaacgtatttttgtaattttgataggtgtacaaaaaaatttttgaattttttttcgaaatatatcgggcatcgaaatattggcaacttatgttagtttttgtacacattgtatagcccgtctttagttttaacacttaaatttttatattactgtattatgtacataatgatattcacaaagaactgtcaaaattcatttacatgatacgtcgaagcagaaactttaccaaagatataaccctgtggtgtaccaatatttttaacgtaaattatcgcgattttaatattgatctaaatgcattttgacaggtttttctatttacttatttatggaagaatattcccaaaaaaattacaaaaaaagtaaaatatatacctacagggcggc

SEQ ID NO: 3543 - DNA, 1869 bp, Diabrotica virgifera
  SmartBlast Evalue=1E-120; Info=Nuclear receptor coactivator 7 n= 1 Tax=Camponotus floridanus RepID=E1ZVL9_9HYME
gccaagtggacacaaaaaaatgtaattgaagttttgcttgtttttcgtgataattatatggacttttgtttgagttggttatctcctggccgaaaaataattatttttattatacacgtgtatttttaaatcataagacatagtttttgaaatatatattggttactcttcgagtttccggtttagaaaaattatttaaaaatggttcgatcatacattgcattgccattagtttctcctacaagaaagtccaagacacaagatgaattttggtcccgaagggcatcacaggatgttggaagggtcactcataaggaaggttttcctggaatgcggagcaaaagcagaagcgtagaccacggcattacatccccatttgatttggacgccttacgagcaaaagtcgatagccagtttgatagaagtcttgatagagatctagatggttctacaaatagtttatcggaaaagaggaaagctggtccaccggaaaatacgactgtttacacggtggcagacagagacacgctaacatcagtagcagcccgatttgataccactccttccgaattaacgaaattaaatcgtctagcaactccgtacatttttccaggccaacagctgtacgtgcccaacagggaacaagcggaaaacgattccgaaggttctactcccgtagaagactctcatgatgatttgccaccggcggaaaaagaattgttggagaacttgaggccagtcagtccgaagcctggccatgtggagagagtgcgcactccatcatgcccccaaggaggcagcagcagtgaatacgaagactcggaatccgcggtcttccgcgagcgattcctcaagatcaacgtgcgccacatcacggatggccaaggcgtcgttagcggagtgctcttggtcactcccaacgccgtcatgttcgaccctaacgtgatagatcccttggtcatcgaacacggacctgaggcttatggtgtgatcgcgcccatggagtttgtcgttaacgccgctatctacaatgacatcgcgcacatgagggttggacattgcgagagtaatttgtcggagaaacaagaaatttattatccgaaatctgaaaaggaagaagagcaagattcgttgatggttaaagatgaaacgttccctgaacttgtcacaggcgatgatgctgagtctgtgtgttcctgtaccgaaagagaaggtgacgcgttcccaaaagcatttgaaagggaattggttacgccgactaatttagaagatccagaaggtcagcataaatctttagaagaaagaagaaaatctctgctggaccatcattgggcgataccgtccagggatagacagtctatagatacagatgaaatgccagctataactccaactggcgcccccgacgatcacattcaagacgaagatgatagcttaaacaaagagagttgtcacgattccggtattgatattagagaatcaagtataccaccaattgtacatgttcctccaaaaaagaaatatagcgatgctgatatagtactttccaaagattgggtaccgccaatcacaattggagcaaccaatttgagttataccagtgaacctacagatagtcctgcgagaaagaagacgaactcggtgtcatttagtttggattctagctcggagctcgaccctggccaacctccactgtcaactagttactctgagtcaaaggaagatgtagataaggctgatagtagaaaaaataaggtaaactcaataactctaactatgacaaaactgttcaaaagctcaattgggtactactactacttgactgccaatttcctgtttatataggtacattttctgactttccaaaac

SEQ ID NO: 3544 - DNA, 3246 bp, Diabrotica virgifera
  SmartBlast Evalue=0; Info=Lysosomal alpha-mannosidase (Mannosidase alpha class 2b member 1) n=1 Tax=Aedes aegypti RepID=Q178W1_AEDAE
ataaatgtgatcttaaaaatatgtatagctttgattaattctccggtaacattatatttctcatctattgctaaaagttgatgttagttcaatatggaaagaaaaatatatatttccttcatttttatatttgtctctactttgtgtttactagaagtaaactcggactatttggattcgtgtgccactaaggcgtgttccaacatagagccagataaaataaatgttcatctgattccacattctcatgatgatgttggatggttaaaaactattgaagattatttctatggagaaagaaacgatatacacaacgctggtgtacagtatgtcttggattctgttttacaagctcttaagcaaaacaacaaaagaagatacatacaagttgaggcagcctttttctggaaatggtggcaaatccaaccggaaaataaaagagagttgttcaaaaaattcgttgacaatgggcagattgaaatggttggaggagcatggtcaatgaacgacgaagcctgcgttaactatcaatcaactatcaaccaatttacatggggtctaaggctactcaacgatactttaggtgaatgtggacgtcccaaggttggatggcaaatagatccgtttggccatagcagagagcaagcctcgttatttaaacaaatgggatatgatgccatattctttacacgtctaagccaagatgatagattggctagaaaacatacacaagatttggagttcctgtggacgagcaatgataattttggggacagcaatatattcaccagtattatggacagctattatgcaccaagtgatttctgctgggattatcttcagtgcaactcagacgccatcaacgatgatcctgacagttttgactttaacttagataaaaaggttgaagagtttgctgctcatattgcaaactattcttcatattttagaaccaacaacattttgtatgccatgggtggcgattttcagtatcaagcagctgaaattaattatttaaatattgacaagctaataaaaggtttccaaacgtatcccgaatacaacaaaacatacaacgtcttttattccactccttcgtgctatgtaaaggcagtcaatccagctaatgctcaattggatgttaaaaaagatggtgatttcttcccatataatgaaaacaatcatatcttctggtctggttactatacatcaaggtctacgctgaagaggtttgaaagaactggaaacaatattttacaggctgcccagcaaatcaatgcttttggaaaaatgatgaactttgtcgatggagatcaggctgaagaaaatttacgcagtttgagggaagctgtgggtaccatgcagcaccatgacgcaattaccggaacggagaaagaacgggttgccaaagattattcgagaattttaaccagtgctattaggacgaccgaagaaaatatcggaggaattatagggaaaattcttaaaaaagaaaatgctacagatattaatctaccattatcgacatgcttactagctaatattagtgtttgtgaagacacaatgaaggatcgttctattatagtgctttataatcctctgccacgattcgtatggtacgatataagagtacctgttcaaaatgcaaactttacacttaccggttgttatggtgaggaagactttgaaattgttaaacatatgaagtatccattggaattcaacacaacaagtgaatatgaacttgtaagtcacctgcaacttcacccgatgggactaaaagtattttatttggaaaaaactagcaataaatcagtggctttagaaactaagtacctttcaggaaacaaaactttcactttacaaaaggagaacatgaaattaacatatgataaaacaacttcaaaacagaaactaacaacaagcaaaaaaactgaaaatattgttcaagaatttttatattatcgcagcaataatggttcagctgataatattacctcaggagcgtacattttcagacccgaaagtggtactcaagccgtactcattccagaagattcagacgaagttggttatattcaaggaaatatagtatcagaagtacaacaacgttttggaaagtatgtagtacagacgatgaggatgatgtctgatagtatcaatggtgtggatttggagtatattgaatatgattggatggtaggcccactggataacactacagtcgatacggttcacagcatcggaaaagaaatagttaaacgttactatatcgaggaaattaaaaacaacaagaccttttacactgattccaatggcagacaattaattaaaagaataagaaatgatcatgaattccacgatgatgatgtagaagctgcttcgtctaattattatccagttacgtcaaagatttctatagaagacatcaaaagtgacttaaagctctccatattaactgacagatcacaaggaggaacgagtttaaaagacggggaagtagaattaatgctccatcgaaggactttaaaggacgactacaaaggtgtagaggaacctctacaagaaatggaatttgataattatattgtcgttagaggttcgcattacttgacaatgggttcttcaggagtttctaaatatgaaaggattctggctcttaacaaattaacacaaccatgggtgctaacagctgatgctacttctgaagacttatctctagaacaacttcaaaagaatattaacttcgagtggactggtctacaagaatacgatggtcatcgtggactagattggcaagttaacattttgaatttcgagccatggaaagatgatacttatcttttgcgattggaacacattttttcgtatgatgaagacacagaaatggcagaaaaagtaacagtagagttaaagaatttgttccaaccgtacttaatttcatcaataaaagaattgagtctcggagccaatcaggaaatcgaagcggattttgacgattataattatcaaattaccttgggaccaatggagataagaacttttttggtaacatttgaaaagcaaaatcccaaacatatgaatgctttataaaaaaatattaaaactttaaaacccaaccataaacattctgcaatgtataaaaataaataattgtatttagcaggtccttattttagtacacattaatgtattaatctatattttattaacccctatgttataagttactattaaacatagttt

SEQ ID NO: 3545 - DNA, 3241 bp, Diabrotica virgifera
  SmartBlast Evalue=0; Info=Lysosomal alpha-mannosidase (Mannosidase alpha class 2b member 1) n=1 Tax=Aedes aegypti RepID=Q178W1_AEDAE
atcaataaatgtgatcttaaaaatatgtatagctttgattaattctccggtaacattatatttctcatctattgctaaaagttgatgttagttcaatatggaaagaaaaagatatatttccttcatttttctctttgtctcgatactagaagtaaactcggactatttggattcttgtgccactaaggcgtgttccaacatagagccagataaaataaatgttcatctgattccacattctcatgatgatgttggatggttaaaaactattgaagattatttctatggagaaagaaacgatatacacaacgctggtgtacaatatgtcttggattctgttttacaagctcttaggcaaaacgacaaaagaagatacatacaagttgagacagcctttttctggaaatggtggcaaatccaaccggaaaacaaaagagagttgttcaaaaaattcgttgacaatgggcagattgaaatggttggaggagcatggtcaatgaacgacgaagcctgcgttaactatcaatcaactatcaaccaatttacatggggtctaaggctactcaacgatactttaggtgaatgtggacgtcccaaggttggatggcaaatagatccgtttggccatagcagagagcaagcctcgttatttaaacaaatgggatatgatgccatattctttacacgtctaagccaagatgatagattggctagaaaacatacacaagatttggagttcctgtggacgagcaatgataattttggggacagcaatatattcaccagtattatggacagctattatgcaccaagtgatttctgctgggattatcttcagtgcaactcagacgccatcaacgatgatcctgacagttttgactttaacttagataaaaaggttgaagagtttgctgctcatattgcaaactattcttcatattttagaaccaacaacattttgtatgccatgggtggcgattttcagtatcaagcagctgaaattaattatttaaatattgacaagctaataaaaggtttccaaacgtatcccgaatacaacaaaacatacaacgtcttttattccactccttcgtgctatgtaaaggcagtcaatccagctaatgctcaattggatgttaaaaaagatggtgatttcttcccatataatgaaaacaatcatatcttctggtctggttactatacatcaaggtctacgctgaagaggtttgaaagaactggaaacaatattttacaggctgcccagcaaatcaatgcttttggaaaaatgatgaactttgtcgatggagatcaggctgaagaaaatttacgcagtttgagggaagctgtgggtaccatgcagcaccatgacgcaattaccggaacggagaaagaacgggttgccaaagattattcgagaattttaaccagtgctattaggacgaccgaagaaaatatcggaggaattatagggaaaattcttaaaaaagaaaatgctacagatattaatctaccattatcgacatgcttactagctaatattagtgtttgtgaagacacaatgaaggatcgttctattatagtgctttataatcctctgccacgattcgtatggtacgatataagagtacctgttcaaaatgcaaactttacacttaccggttgttatggtgaggaagactttgaaattgttaaacatatgaagtatccattggaattcaacacaacaagtgaatatgaacttgtaagtcacctgcaacttcacccgatgggactaaaagtattttatttggaaaaaactagcaataaatcagtggctttagaaactaagtacctttcaggaaacaaaactttcactttacaaaaggagaacatgaaattaacatatgataaaacaacttcaaaacagaaactaacaacaagcaaaaaaactgaaaatattgttcaagaatttttatattatcgcagcaataatggttcagctgataatattacctcaggagcgtacattttcagacccgaaagtggtactcaagccgtactcattccagaagattcagacgaagttggttatattcaaggaaatatagtatcagaagtacaacaacgttttggaaagtatgtagtacagacgatgaggatgatgtctgatagtatcaatggtgtggatttggagtatattgaatatgattggatggtaggcccactggataacactacagtcgatacggttcacagcatcggaaaagaaatagttaaacgttactatatcgaggaaattaaaaacaacaagaccttttacactgattccaatggcagacaattaattaaaagaataagaaatgatcatgaattccacgatgatgatgtagaagctgcttcgtctaattattatccagttacgtcaaagatttctatagaagacatcaaaagtgacttaaagctctccatattaactgacagatcacaaggaggaacgagtttaaaagacggggaagtagaattaatgctccatcgaaggactttaaaggacgactacaaaggtgtagaggaacctctacaagaaatggaatttgataattatattgtcgttagaggttcgcattacttgacaatgggttcttcaggagtttctaaatatgaaaggattctggctcttaacaaattaacacaaccatgggtgctaacagctgatgctacttctgaagacttatctctagaacaacttcaaaagaatattaacttcgagtggactggtctacaagaatacgatggtcatcgtggactagattggcaagttaacattttgaatttcgagccatggaaagatgatacttatcttttgcgattggaacacattttttcgtatgatgaagacacagaaatggcagaaaaagtaacagtagagttaaagaatttgttccaaccgtacttaatttcatcaataaaagaattgagtctcggagccaatcaggaaatcgaagcggattttgacgattataattatcaaattaccttgggaccaatggagataagaacttttttggtaacatttgaaaagcaaaatcccaaacatatgaatgctttataaaaaaatattaaaactttaaaacccaaccataaacattctgcaatgtataaaaataaataattgtatttagcaggtccttattttagtacacattaatgtattaatctatattttattaacccctatgttataagttactattaaacatagttt

SEQ ID NO: 3546 - DNA, 3026 bp, Diabrotica virgifera
  SmartBlast Evalue=0; Info=Lysosomal alpha-mannosidase (Mannosidase alpha class 2b member 1) n=1 Tax=Aedes aegypti RepID=Q178W1_AEDAE
taaatgttcatctgattccacattctcatgatgatgttggatggttaaaaactattgaagattatttctatggagaaagaaacgatatacacaacgctggtgtacagtatgtcttggattctgttttacaagctcttaagcaaaacgacaaaagaagatacatacaagttgagacagcctttttctggaaatggtggcaaatccaaccggaaaacaaaagaaagttgttcaaaaaattcgttgacaatgggcagattgaaatggttggaggagcatggtcaatgaacgacgaagcctgcgttaactatcaatcaactgtcagccaatttacatggggtctaaggctactcaacgatactttaggtgaatgtggacgtcccaaggttggatggcaaatagatccgtttggccatagcagagagcaagcctcgttatttaaacaaatgggatatgatgccatattctttacacgtctaagccaagatgatagattggctagaaaacatacacaagatttggagttcctgtggacgagcaatgataattttggggacagcaatatattcaccagtattatggacagctattatgcaccaagtgatttctgctgggattatcttcagtgcaactcagacgccatcaacgatgatcctgacagttttgactttaacttagataaaaaggttgaagagtttgctgctcatattgcaaactattcttcatattttagaaccaacaacattttgtatgccatgggtggcgattttcagtatcaagcagctgaaattaattatttaaatattgacaagctaataaaaggtttccaaacgtatcccgaatacaacaaaacatacaacgtcttttattccactccttcgtgctatgtaaaggcagtcaatccagctaatgctcaattggatgttaaaaaagatggtgatttcttcccatataatgaaaacaatcatatcttctggtctggttactatacatcaaggtctacgctgaagaggtttgaaagaactggaaacaatattttacaggctgcccagcaaatcaatgcttttggaaaaatgatgaactttgtcgatggagatcaggctgaagaaaatttacgcagtttgagggaagctgtgggtaccatgcagcaccatgacgcaattaccggaacggagaaagaacgggttgccaaagattattcgagaattttaaccagtgctattaggacgaccgaagaaaatatcggaggaattatagggaaaattcttaaaaaagaaaatgctacagatattaatctaccattatcgacatgcttactagctaatattagtgtttgtgaagacacaatgaaggatcgttctattatagtgctttataatcctctgccacgattcgtatggtacgatataagagtacctgttcaaaatgcaaactttacacttaccggttgttatggtgaggaagactttgaaattgttaaacatatgaagtatccattggaattcaacacaacaagtgaatatgaacttgtaagtcacctgcaacttcacccgatgggactaaaagtattttatttggaaaaaactagcaataaatcagtggctttagaaactaagtacctttcaggaaacaaaactttcactttacaaaaggagaacatgaaattaacatatgataaaacaacttcaaaacagaaactaacaacaagcaaaaaaactgaaaatattgttcaagaatttttatattatcgcagcaataatggttcagctgataatattacctcaggagcgtacattttcagacccgaaagtggtactcaagccgtactcattccagaagattcagacgaagttggttatattcaaggaaatatagtatcagaagtacaacaacgttttggaaagtatgtagtacagacgatgaggatgatgtctgatagtatcaatggtgtggatttggagtatattgaatatgattggatggtaggcccactggataacactacagtcgatacggttcacagcatcggaaaagaaatagttaaacgttactatatcgaggaaattaaaaacaacaagaccttttacactgattccaatggcagacaattaattaaaagaataagaaatgatcatgaattccacgatgatgatgtagaagctgcttcgtctaattattatccagttacgtcaaagatttctatagaagacatcaaaagtgacttaaagctctccatattaactgacagatcacaaggaggaacgagtttaaaagacggggaagtagaattaatgctccatcgaaggactttaaaggacgactacaaaggtgtagaggaacctctacaagaaatggaatttgataattatattgtcgttagaggttcgcattacttgacaatgggttcttcaggagtttctaaatatgaaaggattctggctcttaacaaattaacacaaccatgggtgctaacagctgatgctacttctgaagacttatctctagaacaacttcaaaagaatattaacttcgagtggactggtctacaagaatacgatggtcatcgtggactagattggcaagttaacattttgaatttcgagccatggaaagatgatacttatcttttgcgattggaacacattttttcgtatgatgaagacacagaaatggcagaaaaagtaacagtagagttaaagaatttgttccaaccgtacttaatttcatcaataaaagaattgagtctcggagccaatcaggaaatcgaagcggattttgacgattataattatcaaattaccttgggaccaatggagataagaacttttttggtaacatttgaaaagcaaaatcccaaacatatgaatgctttataaaaaaatattaaaactttaaaacccaaccataaacattctgcaatgtataaaaataaataattgtatttagcaggtccttattttagtacacattaatgtattaatctatattttattaacccctatgttataagttactattaaacatagttt

SEQ ID NO: 3547 - DNA, 3328 bp, Diabrotica virgifera
  SmartBlast Evalue=5E-32; Info="RING finger protein, putative n= 1 Tax=Pediculus humanus corporis RepID=E0VTT6_PEDHC"
taaatatatcgtagcggttagtagttagcgtcggcagtgaactcataaaaatagaaacagtcatttgggttgtgttgtgatagtctttgtgtaattgtgtatttcattataatccgtatttgcgaaagaaagaaattgaagaggggattggtgttatcattgttattaccgattagattagatatgtgcgataaattcctacgacttgtctgatgtggaaaaaatacaatttctcaaaatttgtgcaattgtgttaaaaatatgtgttgctgttttccgttttgccttttctccaaggaaaaaaagccaggtaatatagagtctattataacgaacgatggcaattccacaagacaaagcaggccgccgagacaagatcaaccccgctccacacccagatctccacaatcaccgcaatctccacaacatccaccgatgtccaattccacacctcagtcacctcaaaatcaccccagcagccacacaccacctagtccacagtcgcaaccaactacctctacgacggctccagaccacagaacaaatatcactgaggaggagccaccagcgcaaggaagcccactacctcctaggtatccgaagattgaagatttcggcagtgccgaagaattacacaatctatcatcaaaagacttgaaaatattattaaccttaaatagagtagatttcaaaggatgcgtggaaaagaccgaattgttagaaagagctgaacgactttgggaagatacgaatgagtcaaagaaagaaattccagaaaacctacccatcggagagctctgcaaattgtgcatggatgcacccttagactgcgtcctactggaatgtggccatatagcaacgtgcacggactgtggcaaaaaattgcagagtgtcctatatgtcgacaatacgtagttcgagtagtcagaacgtttaaagcataaaatgttattaaataattaaaaattgtgcttgtatcaagttgtacatatttatgaattgtttgtttattactgaacagtcaataagaaggtatttcttttgatattaccaatttttatggggttcggttcattcgtggtagttttggtttatctttattaagagaaaaaatctcgtaatttaattttatgttattaactgtcttatacggcagcgttttacgtgaccttaataataccataacgttttggcttacaattacacaatagctcaaaatttaccaacttgtatcccagtgatactttgacagttttaatttaattatgtcaaattgtcactagctcaatacgagtcagtaattgtcactagcgtaatactaagaggtcgagtgtaattcggtaagattatttcatgaatagaactgttcaaaacattacttctttaatcgccttatagcggtacgctttaattactatttttgctaattttattttcttaatttttaataacttttctcaaaacgaaataatatgggtcatataaattcacatgtaaaatacaaaccagatgctaagagggacacggttttacgaaacggaatgtatccttaaccatatgtttttggtgtgttcagtttaacaaactgaattccccataaattaattaccttatcagaccttatgtcaataactcacaattggacatgcattcgaaaacgtaaactgcagaaatgtttcaacccttaaacgccagatctaaatatttattgcccatctggtcagatggtaaaacacaaacagattggcgtctgtggtttcttttcagccactcaatcagtcggttacaacacataggaaaaacaccttttgttaccaaaataaataaatattttactgttcgtcgttaacttatttttattattttaattaattccgtcaactcacacctaccggaatagccttattgatatattcgtctgaatatttgctaaacctgctcatcttgttcactttgacaagtgtaaaacattaattctgattgatgtcactgagtgtttatttaattttaaatttgagcaacaacaaaagatatctttagcgctacttaactacgggtaattatcaaaaattattatcgctataatttcgatttttgaaggtttttattggtcaaaatctctatgaatgaaataatcagtagcaattggcacgagagttctaaaattatcgatttgtttcccgagtggcactttgacagttttaatttcacgaccagaagggtagtgaaattatgtcaaagtgtcacgagggcaataagtcgataataattttacagatcgagtgtaattcgctgagattatttcatgaataaaactgtctttttaaattattttaactaatattttattgatatctttacctgaatatttgctaaacctgtttcttgatgttttctgtgacaagttgtaaaaaagtaattgtcatttatgttctgaatgttcatttttgcgtagtaacgaagggcatctcttgcctgcaagggtaaaatggtgtgtgtgaaaaaatcgatttttgaattttccgccaaaactgggttattttttccactctttcttatgcaatttttagtttatttctatctcatttagttttcaaaatgtgacactggtaaaacagtatatgagtacctgtacttgcgtctctgctatggtaaaacagtatattcggcaaactctacaaagacaaaatagtatacatcgtcttacactgcttatccctggtattatgttacatcaattttttgaaactctactagtaaaacaggatatttgtggtatatacttgttatacggtaacatatttcataaaaacggtgtcccaattccaatggtaaaatagtataacatttcatatactcttttaccatagtatgaccaatgggaatttttatctcctccgacggtatatacgtataaagtcttttatatactctttaggtatactggaaaaatgataaaacagtatatgccactttacaagcacatttgaaaaaactacacctatttgctgttgtaataataattattataataacatactttttttatattccaaatttcatttgtctaactttataaatgacaaaacggcacagtaaaagaacaaaaagtcatttatctcaaaactcacttttttcacatatactattttatctttgcaggcaagatctgacgtaatgcttgacgacgggatattatcaaaaattatcactgtaatttttatctctgtagctttctattggtcagaatctcctatgaatgaaataatcgctgtaatcaagcgataatggtcgagtaaacaaatggtggagtgtaattttcgtctgt

SEQ ID NO: 3548 - DNA, 3236 bp, Diabrotica virgifera
  SmartBlast Evalue=5E-32; Info="RING finger protein, putative n= 1 Tax=Pediculus humanus corporis RepID=E0VTT6_PEDHC"
acctgacaggtcgaagttgatggagctgaaatcgaaggatcttcaagactatttaaataagagaaatatatccacatacggtttagtcgagaagcaagaattggtagatatattttgtaataaacacatacccgaaaaacccaaacggggcgtggagaaactaacagcaaattttgctggctcactaccaaatttaagacccttaaatgaaatttttggtaatatagagtctattataacgaacgatggcaattccacaagacaaagcaggccgccgagacaagatcaaccccgctccacacccagatctccacaatcaccgcaatctccacaacatccaccgatgtccaattccacacctcagtcacctcaaaatcaccccagcagccacacaccacctagtccacagtcgcaaccaactacctctacgacggctccagaccacagaacaaatatcactgaggaggagccaccagcgcaaggaagcccactacctcctaggtatccgaagattgaagatttcggcagtgccgaagaattacacaatctatcatcaaaagacttgaaaatattattaaccttaaatagagtagatttcaaaggatgcgtggaaaagaccgaattgttagaaagagctgaacgactttgggaagatacgaatgagtcaaagaaagaaattccagaaaacctacccatcggagagctctgcaaattgtgcatggatgcacccttagactgcgtcctactggaatgtggccatatagcaacgtgcacggactgtggcaaaaaattgcagagtgtcctatatgtcgacaatacgtagttcgagtagtcagaacgtttaaagcataaaatgttattaaataattaaaaattgtgcttgtatcaagttgtacatatttatgaattgtttgtttattactgaacagtcaataagaaggtatttcttttgatattaccaatttttatggggttcggttcattcgtggtagttttggtttatctttattaagagaaaaaatctcgtaatttaattttatgttattaactgtcttatacggcagcgttttacgtgaccttaataataccataacgttttggcttacaattacacaatagctcaaaatttaccaacttgtatcccagtgatactttgacagttttaatttaattatgtcaaattgtcactagctcaatacgagtcagtaattgtcactagcgtaatactaagaggtcgagtgtaattcggtaagattatttcatgaatagaactgttcaaaacattacttctttaatcgccttatagcggtacgctttaattactatttttgctaattttattttcttaatttttaataacttttctcaaaacgaaataatatgggtcatataaattcacatgtaaaatacaaaccagatgctaagagggacacggttttacgaaacggaatgtatccttaaccatatgtttttggtgtgttcagtttaacaaactgaattccccataaattaattaccttatcagaccttatgtcaataactcacaattggacatgcattcgaaaacgtaaactgcagaaatgtttcaacccttaaacgccagatctaaatatttattgcccatctggtcagatggtaaaacacaaacagattggcgtctgtggtttcttttcagccactcaatcagtcggttacaacacataggaaaaacaccttttgttaccaaaataaataaatattttactgttcgtcgttaacttatttttattattttaattaattccgtcaactcacacctaccggaatagccttattgatatattcgtctgaatatttgctaaacctgctcatcttgttcactttgacaagtgtaaaacattaattctgattgatgtcactgagtgtttatttaattttaaatttgagcaacaacaaaagatatctttagcgctacttaactacgggtaattatcaaaaattattatcgctataatttcgatttttgaaggtttttattggtcaaaatctctatgaatgaaataatcagtagcaattggcacgagagttctaaaattatcgatttgtttcccgagtggcactttgacagttttaatttcacgaccagaagggtagtgaaattatgtcaaagtgtcacgagggcaataagtcgataataattttacagatcgagtgtaattcgctgagattatttcatgaataaaactgtctttttaaattattttaactaatattttattgatatctttacctgaatatttgctaaacctgtttcttgatgttttctgtgacaagttgtaaaaaagtaattgtcatttatgttctgaatgttcatttttgcgtagtaacgaagggcatctcttgcctgcaagggtaaaatggtgtgtgtgaaaaaatcgatttttgaattttccgccaaaactgggttattttttccactctttcttatgcaatttttagtttatttctatctcatttagttttcaaaatgtgacactggtaaaacagtatatgagtacctgtacttgcgtctctgctatggtaaaacagtatattcggcaaactctacaaagacaaaatagtatacatcgtcttacactgcttatccctggtattatgttacatcaattttttgaaactctactagtaaaacaggatatttgtggtatatacttgttatacggtaacatatttcataaaaacggtgtcccaattccaatggtaaaatagtataacatttcatatactcttttaccatagtatgaccaatgggaatttttatctcctccgacggtatatacgtataaagtcttttatatactctttaggtatactggaaaaatgataaaacagtatatgccactttacaagcacatttgaaaaaactacacctatttgctgttgtaataataattattataataacatactttttttatattccaaatttcatttgtctaactttataaatgacaaaacggcacagtaaaagaacaaaaagtcatttatctcaaaactcacttttttcacatatactattttatctttgcaggcaagatctgacgtaatgcttgacgacgggatattatcaaaaattatcactgtaatttttatctctgtagctttctattggtcagaatctcctatgaatgaaataatcgctgtaatcaagcgataatggtcgagtaaacaaatggtggagtgtaattttcgtctgt

SEQ ID NO: 3549 - DNA, 2782 bp, Diabrotica virgifera
cattcaattttacctgaaacggggtctcttatactattatcggttaacccaggatgtttatagtcggtactacttgaagtcaaccatttactgctaagcaaactttacctcgcttctaaacgcgcatttcgccggcgcgtgttgtgtgtcggttgggttcaatttgcgccaggcctaagtcaagaaccaagtttgtaaatattaattttgttattgaattctacgtcttgcgcaagtcaaaaatctagttattcaataatcaatatttatgattcaacgaaatgtaagaacgattgattaatagtttttgtagtattttgtacgatatgactattggacggtagctagtccgtattatagtagtataattgttgatattttattattaaatttaaaatttgagacatttgttactgtattgttataatattcatagatgaacgattcttgtcataatcaaatagacccttctggtatagagataaatacatagaaataaatccaacatctggaatttgacctgaagaacgaggaactaacttattatgtattttgtggtttattcaatcaaaaaagcactgtgctagagaatagaaaataattggaaaaataaaaacagcccagaaaggagaatttgcatttcaaattgttgactagaattggcacgtctacgcgtttgcagtttgccagtggcttactgtgcataaaaagcaaacataagatttttgtttttattttttaacaagctaagtgccgggtgtttttccaaaagctcaaagtattgttagtatatttcacgactttgcgcctattttggattagagatgaaagctttgacttaccttacggtgtgtggcgacacgctttaattactattttggctaattttattttttaataacttttctcaaaacgaaataatatgggtcatataaacttcacatttaatatacaaaccagatgctgagaagggccgttaagttttacgaaacgaaatgtatccttaaccatatgtttttggtgtgttcagtttaacaaactgaattccccataaattaattaccttatcagaccttatgtcaataactcacaattggacatgcattcgaaaacgtaaactgcagaaatgtttcaacccttaaacgccagatctaaatatttattgcccatctggtcagatggtaaaacacaaacagattggcgtctgtggtttcttttcagccactcaatcagtcggttacaacacataggaaaaacaccttttgttaccaaaataaataaatattttactgttcgtcgttaacttatttttattattttaattaattccgtcaactcacacctaccggaatagccttattgatatattcgtctgaatatttgctaaacctgctcatcttgttcactttgacaagtgtaaaacattaattctgattgatgtcactgagtgtttatttaattttaaatttgagcaacaacaaaagatatctttagcgctacttaactacgggtaattatcaaaaattattatcgctataatttcgatttttgaaggtttttattggtcaaaatctctatgaatgaaataatcagtagcaattggcacgagagttctaaaattatcgatttgtttcccgagtggcactttgacagttttaatttcacgaccagaagggtagtgaaattatgtcaaagtgtcacgagggcaataagtcgataataattttacagatcgagtgtaattcgctgagattatttcatgaataaaactgtctttttaaattattttaactaatattttattgatatctttacctgaatatttgctaaacctgtttcttgatgttttctgtgacaagttgtaaaaaagtaattgtcatttatgttctgaatgttcatttttgcgtagtaacgaagggcatctcttgcctgcaagggtaaaatggtgtgtgtgaaaaaatcgatttttgaattttccgccaaaactgggttattttttccactctttcttatgcaatttttagtttatttctatctcatttagttttcaaaatgtgacactggtaaaacagtatatgagtacctgtacttgcgtctctgctatggtaaaacagtatattcggcaaactctacaaagacaaaatagtatacatcgtcttacactgcttatccctggtattatgttacatcaattttttgaaactctactagtaaaacaggatatttgtggtatatacttgttatacggtaacatatttcataaaaacggtgtcccaattccaatggtaaaatagtataacatttcatatactcttttaccatagtatgaccaatgggaatttttatctcctccgacggtatatacgtataaagtcttttatatactctttaggtatactggaaaaatgataaaacagtatatgccactttacaagcacatttgaaaaaactacacctatttgctgttgtaataataattattataataacatactttttttatattccaaatttcatttgtctaactttataaatgacaaaacggcacagtaaaagaacaaaaagtcatttatctcaaaactcacttttttcacatatactattttatctttgcaggcaagatctgacgtaatgcttgacgacgggatattatcaaaaattatcactgtaatttttatctctgtagctttctattggtcagaatctcctatgaatgaaataatcgctgtaatcaagcgataatggtcgagtaaacaaatggtggagtgtaattttcgtctgt

SEQ ID NO: 3550 - DNA, 3614 bp, Diabrotica virgifera
  SmartBlast Evalue=1E-140; Info="Tens, putative n=1 Tax= Pediculus humanus corporis RepID=E0VF33_PEDHC"
tgccaggggaaacaaggataaactaggcgtgatagtgtcatcgtacatgcattactccagcatatgtggcagcgccgaacaagccttagatagattttcaatgcgaaaatttttagaagataatgttggacctctaattttaccttccaataaaagatatgttgactactttgccggactactttcccaccacatcaaagtaaatgcggcaccgatgtacctaacacacgtcacagtgttaggtgctccatcgttctatcaaggtggatgtagggctttcttaaaattgtatgaggggcacactcctgtttatacctctggcatttattctatatcaagtggcatcagccaattcacagtaaacgtaacgggagacggaagaaaaggcttacaacttagaggggatattctcatcaaatgttaccaccgaggagaagtaggaagggaaactatttttgcttgccagttccatacgtgcgctgtttcagatcacaccttgagttttaccaggcaagagttagattttgcttgcaacgatcctaggtttcccttggacggcgctgttgagcttcatttttcaccaggtccagaaggccgacatccagtaccggctccaacgcctgctgtaccttttatacatagcgacgatcctataacgagagcagatagtccactgttggaggattatgaggactcggaagagtatgatgaagaagacgtaaatcataccttcggacctttagacggaagcatctacgctactatcgcaaaaaagccggaattgtcaccgggagctgtttctagtccattgacggtgtcgatggacagtggcatatcatcagcaggacaccatccgccgaacgccaacaccaccacctcctcgggcagtccacctctcacggctcaaccgtcccctctcactccggaagatcaacaccgcgaacttgacgaactgctcagcgatatgatgctcaccgttcagtcgattccggacttgaaaccgtcgccgacctcatctattaacgtgagagaagaagataacttccgatttatagacgacgaagacgagaggggtattccgtaccacgctaggcagaccagtcaacccttcagctacgggataaacgccaacatgatcagcgagtccaagcggcttgccagcccttcccttgtgcgaaaagccagtggcaaaggttcgatcaacaatgatgggatctacacaatgggcagtgacagcacttacaaaagttctcccagtagtgacggcacatacaagagctctatcagtagcgatggtacgctgaggaaagtgcaggcacaggtgtacccggaattcggaactaaagttaacagttattcgaacagaaatcatttagatgatatatacaatacaagtcaatcgcttcaaccaataaaagggacttcagagaagaatattacagagaagatgtaagaaggtacgatcctttaaagagaagcctcaccgaaggcacaataagaagaagtccagagaaaatctacaagcagtcacagtcattagtaaacagcccatattcggattcagagagcttgtcacctccaggtgcttttagaaacaacacaaagtcgccagaatttcacgaaacgtacgctaccagttccaatttaacatggcttcaacgccaacaacagaaattaaaagaacggagagaacttattctgagagaagagcgccagccacatgaaaccaggcttatgtctgaacttcgctcgatacagtccaggcatatgcgtcctacagcaagtcatcgtcttgacggctataccagtgacaccacagccttcgctgacgatgacgaggattacactattcctctacacatcaataccatgcacaaaaatggaacctccactcccggatctaccagtacttacagtactctgaagtctacttatagcaacagtgttaaaaatgaaaggcctttcgtcagcgtcaaaagggctcacgaacgatatgcacaaaatggtaaccagaccccagcacaaattttagctgcaaaccctttagggcacgtagtccgtcctccttccagaagcactgaccaagtagatagtggacttttatcgttagcggaaaaacagcaatacaaaaactacagtaaacaacaacaaacgtaccaacgtgaagaatcaattcagtcttggcgatcacagacaggcaccgagctggactcgagtccttctcacaattcttctccgagacctcaaaccccagcgtttcctgtgcacgccaggactccgtacataaatgcttctactccaactgtacaattcgacataccttccgaacgattacctccaaaaagtcctacaacccagagaaaggaccgaccgacttctccctccgacttgaccaacggttcatcagaatacactcacacaataactaaccgcagcatttcggcaacgccaacatcaggtttcagagataccaccgatatctatcagcatagtccaaaaagtccaagctacaatggctcttcgtcccccaccgtttactacggaacatccagaagaagctccatcaactcgaacaacgaatcgccacatgaggtttcagcagctaatgtaaaatttgttagagatacttccaagttttggtataagccttctattaccagagaacaggctatcattatgctccgtgagcaacaaccaggaacttttgtagtaagagactcgaactccttcccaggagcttttggattggccttacgagttgcaacagtgccatcgaacgtgcaaaacaagagtggctccagtgacgatttaatccgccactttcttattgaacccaccagcagaggagttcgactaaagggatgtcagaacgagccagtgttcagctctttgtccgcattgatataccaacattcgattacccagatggcgcttccttgcagacttattcttccaaatgaggacttgaggtattcggaacaaaatggcgtccagcaacaatcactctatacgcaaggagcagcctgtaacgttctgtacctctccaccatcgacatggaatcgttaaccggacccgaagctatcaagaaagccgtgatgcagctcttccagaaaaacccacttccaggcacggcagtagttcacttcaaagtcagcgaccaaggtgtaacattaacggacaacaaacgaaagttgttctttagaaaacattaccctattaatacagtgtcgcactgtggactggatcccgccgatcataagtggctcgtcaatgccgaagatacaggagcagagaaaagttctaatagaatattcggctttgtagctagaaaaccaaatgttaataatcccgacaaccagtgtcatctatttgctgaactagaacccgagcaaccagcagccgccattgtaaatttcttaaacaaaatcctgacatctagtggcatcaaacccaacatcgtctgaaacgaaacgtgggaaacccccaatctccccatcactacgtcaacaaatcgaccgaaaaaaagtttaacgaatacagctgttacaaaatttctaacgcctagtccctttttatttaatataatatatatacttttaagattaataaattg

SEQ ID NO: 3551 - DNA, 3482 bp, Diabrotica virgifera
  SmartBlast Evalue=1E-140; Info="Tens, putative n=1 Tax= Pediculus humanus corporis RepID=E0VF33_PEDHC"
tgccaggggaaacaaggataaactaggcgtgatagtgtcatcgtacatgcattactccagcatatgtggcagcgccgaacaagccttagatagattttcaatgcgaaaatttttagaagataatgttggacctctaattttaccttccaataaaagatatgttgactactttgccggactactttcccaccacatcaaagtaaatgcggcaccgatgtacctaacacacgtcacagtgttaggtgctccatcgttctatcaaggtggatgtagggctttcttaaaattgtatgaggggcacactcctgtttatacctctggcatttattctatatcaagtggcatcagccaattcacagtaaacgtaacgggagacggaagaaaaggcttacaacttagaggggatattctcatcaaatgttaccaccgaggagaagtaggaagggaaactatttttgcttgccagttccatacgtgcgctgtttcagatcacaccttgagttttaccaggcaagagttagattttgcttgcaacgatcctaggtttcccttggacggcgctgttgagcttcatttttcaccaggtccagaaggccgacatccagtaccggctccaacgcctgctgtaccttttatacatagcgacgatcctataacgagagcagatagtccactgttggaggattatgaggactcggaagagtatgatgaaggacaccatccgccgaacgccaacaccaccacctcctcgggcagtccacctctcacggctcaaccgtcccctctcactccggaagatcaacaccgcgaacttgacgaactgctcagcgatatgatgctcaccgttcagtcgattccggacttgaaaccgtcgccgacctcatctattaacgtgagagaagaagataacttccgatttatagacgacgaagacgagaggggtattccgtaccacgctaggcagaccagtcaacccttcagctacgggataaacgccaacatgatcagcgagtccaagcggcttgccagcccttcccttgtgcgaaaagccagtggcaaaggttcgatcaacaatgatgggatctacacaatgggcagtgacagcacttacaaaagttctcccagtagtgacggcacatacaagagctctatcagtagcgatggtacgctgaggaaagtgcaggcacaggtgtacccggaattcggaactaaagttaacagttattcgaacagaaatcatttagatgatatatacaatacaagtcaatcgcttcaaccaataaaagggacttcagagaagaatattacagagaagatgtaagaaggtacgatcctttaaagagaagcctcaccgaaggcacaataagaagaagtccagagaaaatctacaagcagtcacagtcattagtaaacagcccatattcggattcagagagcttgtcacctccaggtgcttttagaaacaacacaaagtcgccagaatttcacgaaacgtacgctaccagttccaatttaacatggcttcaacgccaacaacagaaattaaaagaacggagagaacttattctgagagaagagcgccagccacatgaaaccaggcttatgtctgaacttcgctcgatacagtccaggcatatgcgtcctacagcaagtcatcgtcttgacggctataccagtgacaccacagccttcgctgacgatgacgaggattacactattcctctacacatcaataccatgcacaaaaatggaacctccactcccggatctaccagtacttacagtactctgaagtctacttatagcaacagtgttaaaaatgaaaggcctttcgtcagcgtcaaaagggctcacgaacgatatgcacaaaatggtaaccagaccccagcacaaattttagctgcaaaccctttagggcacgtagtccgtcctccttccagaagcactgaccaagtagatagtggacttttatcgttagcggaaaaacagcaatacaaaaactacagtaaacaacaacaaacgtaccaacgtgaagaatcaattcagtcttggcgatcacagacaggcaccgagctggactcgagtccttctcacaattcttctccgagacctcaaaccccagcgtttcctgtgcacgccaggactccgtacataaatgcttctactccaactgtacaattcgacataccttccgaacgattacctccaaaaagtcctacaacccagagaaaggaccgaccgacttctccctccgacttgaccaacggttcatcagaatacactcacacaataactaaccgcagcatttcggcaacgccaacatcaggtttcagagataccaccgatatctatcagcatagtccaaaaagtccaagctacaatggctcttcgtcccccaccgtttactacggaacatccagaagaagctccatcaactcgaacaacgaatcgccacatgaggtttcagcagctaatgtaaaatttgttagagatacttccaagttttggtataagccttctattaccagagaacaggctatcattatgctccgtgagcaacaaccaggaacttttgtagtaagagactcgaactccttcccaggagcttttggattggccttacgagttgcaacagtgccatcgaacgtgcaaaacaagagtggctccagtgacgatttaatccgccactttcttattgaacccaccagcagaggagttcgactaaagggatgtcagaacgagccagtgttcagctctttgtccgcattgatataccaacattcgattacccagatggcgcttccttgcagacttattcttccaaatgaggacttgaggtattcggaacaaaatggcgtccagcaacaatcactctatacgcaaggagcagcctgtaacgttctgtacctctccaccatcgacatggaatcgttaaccggacccgaagctatcaagaaagccgtgatgcagctcttccagaaaaacccacttccaggcacggcagtagttcacttcaaagtcagcgaccaaggtgtaacattaacggacaacaaacgaaagttgttctttagaaaacattaccctattaatacagtgtcgcactgtggactggatcccgccgatcataagtggctcgtcaatgccgaagatacaggagcagagaaaagttctaatagaatattcggctttgtagctagaaaaccaaatgttaataatcccgacaaccagtgtcatctatttgctgaactagaacccgagcaaccagcagccgccattgtaaatttcttaaacaaaatcctgacatctagtggcatcaaacccaacatcgtctgaaacgaaacgtgggaaacccccaatctccccatcactacgtcaacaaatcgaccgaaaaaaagtttaacgaatacagctgttacaaaatttctaacgcctagtccctttttatttaatataatatatatacttttaagattaataaattg

SEQ ID NO: 3552 - DNA, 1773 bp, Diabrotica virgifera
  SmartBlast Evalue=1E-126; Info="Tens, putative n=1 Tax= Pediculus humanus corporis RepID=E0VF33_PEDHC"
accgactgcagaggaaaggctacccagaccacccacggatggaaagccgtctggtgatcatagatcttctatcgacagagagcaacctgttggtcaacggcagcttgttgatcgagttgatcatagatcacctattgacagagatcaacctcaacagcttgttgatcgaggggaacgctctgaagataggtcagacggcagacctcctgtggatggtgctaggctagaggcgctgaatgacctgatcgctaacctatcgagtgggtctgataaatctaacgagagtcctaacaatgttgcaccagcatggcagtaccaacgtgaagaatcaattcagtcttggcgatcacagacaggcaccgagctggactcgagtccttctcacaattcttctccgagacctcaaaccccagcgtttcctgtgcacgccaggactccgtacataaatgcttctactccaactgtacaattcgacataccttccgaacgattacctccaaaaagtcctacaacccagagaaaggaccgaccgacttctccctccgacttgaccaacggttcatcagaatacactcacacaataactaaccgcagcatttcggcaacgccaacatcaggtttcagagataccaccgatatctatcagcatagtccaaaaagtccaagctacaatggctcttcgtcccccaccgtttactacggaacatccagaagaagctccatcaactcgaacaacgaatcgccacatgaggtttcagcagctaatgtaaaatttgttagagatacttccaagttttggtataagccttctattaccagagaacaggctatcattatgctccgtgagcaacaaccaggaacttttgtagtaagagactcgaactccttcccaggagcttttggattggccttacgagttgcaacagtgccatcgaacgtgcaaaacaagagtggctccagtgacgatttaatccgccactttcttattgaacccaccagcagaggagttcgactaaagggatgtcagaacgagccagtgttcagctctttgtccgcattgatataccaacattcgattacccagatggcgcttccttgcagacttattcttccaaatgaggacttgaggtattcggaacaaaatggcgtccagcaacaatcactctatacgcaaggagcagcctgtaacgttctgtacctctccaccatcgacatggaatcgttaaccggacccgaagctatcaagaaagccgtgatgcagctcttccagaaaaacccacttccaggcacggcagtagttcacttcaaagtcagcgaccaaggtgtaacattaacggacaacaaacgaaagttgttctttagaaaacattaccctattaatacagtgtcgcactgtggactggatcccgccgatcataagtggctcgtcaatgccgaagatacaggagcagagaaaagttctaatagaatattcggctttgtagctagaaaaccaaatgttaataatcccgacaaccagtgtcatctatttgctgaactagaacccgagcaaccagcagccgccattgtaaatttcttaaacaaaatcctgacatctagtggcatcaaacccaacatcgtctgaaacgaaacgtgggaaacccccaatctccccatcactacgtcaacaaatcgaccgaaaaaaagtttaacgaatacagctgttacaaaatttctaacgcctagtccctttttatttaatataatatatatacttttaagattaataaattg

SEQ ID NO: 3553 - DNA, 3089 bp, Diabrotica virgifera
  SmartBlast Evalue=1E-114; Info="G/t mismatch-specific thymine DNA glycosylase, putative n=1 Tax=Pediculus humanus corporis RepID=E0VM66_PEDHC"
aacaaaatttatttgatcattttttttcgtaaattctaatactgcttaaagtacaaaaaattgaggatagaagtttcttaaaaatgtgaaactagtacgagtattaaatataacattagatataaaaaaagtcactttttgtaataaaacattgaataggtcataattattaaataaataatatcagttctgttactatataaaagtatttttctttttttttatttgggccaccacttacagagtgttttgtgatggcccgttttgaatgcagtgatatgtgggaataagggcaagggacaagtaaagacgacctgaagagctataacaaatgtttattttaacttaaagacatggcctacaactataacgatgaacctcacactcagattgacacacacacgcaaccgagatctgaatgtagaataatgcacaaaacccttggcctatctaacattcaaagtttagagaaaaatacttatgacaaaaaaatatcaccatttaccctgtgcaagtctctgttgttgtcaaaatgcaagtgaccaactgtactcaagcggacagacttgctaggtactagctgaacatatggtacaggtacacaacatgaaaacacactgacggaaaccaatcagaatcctcccaagtagggtgggtaacctggcggatgagtcggtgtagcttgagggtaactatagtacggatagtttggacttggaacatgcaaaccaggtgcatagctctgagcatatggtatttgtgggtaaccaattggcattggttcataatgaccactccacgttggcgttggatacagtgggtaacttgaacttggaggataattatatggaattggactagctctggatgaagatgatacattataattattgaactgacccgcatattggtcaggtgcttcaccaagtggagcttcaccttcagttatgctgggaatttgatctactaacgattccaatcctgacaggctttttgtagcaatatcttgtgtttgtcttggcgatgcatactgatctgtttggtgctgaggttccatgttgtacgattgataatgataatgtgtctgttcgctattgctagaaggggctggactgcctaatcgacattcagcctcatcggccatactagttggtggttcaaaatctggaggaccgatgggtgatgcaggcgaacctaactgttcagaacttattgctgcacttatttctgaacttaagtccgaatgagtgaaaggttgtgaatggggtcttggagattgactgtaaggaggccgaggtgactgactatatgggggccgaggagactgactgtactgtggtctgggagactgactatattgtggtctgggagactgactatactgaggtcttggagaatttgtgtaagctggtcgtggagactggctgtatggaggtcgtggcgattggctataagactgtggtggttgtggagcatataaatttcccaccccattaggaggtgtcatagcagggcccatttgataaaaattgttgggagactgaattggagacgggtttgagtaacattgagacaaattggtcgatgtattgttgtctggtggatttaagtccatattttcaaccttaaccttcttaggccggcctctttttttctttggaaaatcacagttactattctgagtagagggaggtttccgaactactggctttggtggagattcttctccttctacttttatttttttcggtctacctcttttctttttacatggtataatcgtaccatcttcattttggatcacagcattacttatgtcagtgagctccggagaaaatgcatcaggctttggttctgcttcgtagcaagactttaaacttggttcagaaaataccatttcattctcatcgatttcagttatcagaccatttaaataatcacggaatttttttaatgccgcgtaaaaaggaaccttatctgcagctcgtggcaactgagcacatcgtgcacttgaagacggcatcacccacatatgcgtgtttgtaccttcaacaacatctggttgccggccgaatttgaaatccttcttccccgaaaatacttcataaatgagttttccattaaatacagctatcttaggtctaaacttttttaatttttctaacaaaatttgactaccctctttaatttctttacgagttagatcagcactacccttggtggcacgttgtaccatatttgtaaaccctatgcctacttgaagtaacttatagtcttcatcggcagacatttgttggggcgttaagcccgacaggtacagacatttccaaaaatggttgcctggcccagcatagtgatgacctttgtaggccgcaaaaagtcccggatttattccaattataattatatctaagttttcggtgagatgatctggtagtgttcttttggacacctcttcctctggcataccattgaaacgatcatgtttttttcgttcttttataggccgtggtattcctccgttcatgtcttggttaaactcgggctgatcaggtttgattttcttttttcgtcctcgctttttgggccctggcataagttggttattgactgggggcatttgatgcataagatgtgggggccctggtgcggcaggaagcataggaatagggtcatcatcaatgaaactataggggtcctccaacttttcacatttgacttcatggttatgtgcaacattcgtaggattcaacatcaaatcagcactagtttcataaccatcatcatggggttcgagtttcatatttctagcttgtacttatttgagaaggtcaccgggtggttgtaggaatcgtacgctaacggtccaggaccaaggctggagacacctgaatcctgcccaccactgcttccgcccgattccattgtcgctcccaataacgtggaggactcacgaaaaagagttgccacctgcatgggaggatattgtaacgagctcgcgctcgctccaattattttaactacacacacattccgtcgcttcccgcactagctttgtaaaaacccaacaacaacctcaccctttaaaa

SEQ ID NO: 3554 - DNA, 2952 bp, Diabrotica virgifera
  SmartBlast Evalue=1E-114; Info="G/t mismatch-specific thymine DNA glycosylase, putative n=1 Tax=Pediculus humanus corporis RepID=E0VM66_PEDHC"
aacaaaatttatttgatcattttttttcgtaaattctaatactgcttaaagtacaaaaaattgaggatagaagtttcttaaaaatgtgaaactagtacgagtattaaatataacattagatataaaaaaagtcactttttgtaataaaacattgaataggtcataattattaaataaataatatcagttctgttactatataaaagtatttttctttttttttatttgggccaccacttacagagtgttttgtgatggcccgttttgaatgcagtgatatgtgggaataagggcaagggacaagtaaagacgacctgaagagctataacaaatgtttattttaacttaaagacatggcctacaactataacgatgaacctcacactcagattgacacacacacgcaaccgagatctgaatgtagaataatgcacaaaacccttggcctatctaacattcaaagtttagagaaaaatacttatgacaaaaaaatatcaccatttaccctgtgcaagtctctgttgttgtcaaaatgcaagtgaccaactgtactcaagcggacagacttgctaggtactagctgaacatatggtacaggtacacaacatgaaaacacactgacggaaaccaatcagaatcctcccaagtagggtgggtaacctggcggatgagtcggtgtagcttgagggtaactatagtacggatagtttggacttggaacatgcaaaccaggtgcatagctctgagcatatggtatttgtgggtaaccaattggcattggttcataatgaccactccacgttggcgttggatacagtgggtaacttgaacttggaggataattatatggaattggactagctctggatgaagatgatacattataattattgaactgacccgcatattggtcaggtgcttcaccaagtggagcttcaccttcagttatgctgggaatttgatctactaacgattccaatcctgacaggctttttgtagcaatatcttgtgtttgtcttggcgatgcatactgatctgtttggtgctgaggttccatgttgtacgattgataatgataatgtgtctgttcgctattgctagaaggggctggactgcctaatcgacattcagcctcatcggccatactagttggtggttcaaaatctggaggaccgatgggtgatgcaggcgaacctaactgttcagaacttattgctgcacttatttctgaacttaagtccgaatgagtgaaaggttgtgaatggggtcttggagattgactgtaaggaggccgaggtgactgactatatgggggccgaggagactgactgtactgtggtctgggagactgactatattgtggtctgggagactgactatactgaggtcttggagaatttgtgtaagctggtcgtggagactggctgtatggaggtcgtggcgattggctataagactgtggtggttgtggagcatataaatttcccaccccattaggaggtgtcatagcagggcccatttgataaaaattgttgggagactgaattggagacgggtttgagtaacattgagacaaattggtcgatgtattgttgtctggtggatttaagtccatattttcaaccttaaccttcttaggccggcctctttttttctttggaaaatcacagttactattctgagtagagggaggtttccgaactactggctttggtggagattcttctccttctacttttatttttttcggtctacctcttttctttttacatggtataatcgtaccatcttcattttggatcacagcattacttatgtcagtgagctccggagaaaatgcatcaggctttggttctgcttcgtagcaagactttaaacttggttcagaaaataccatttcattctcatcgatttcagttatcagaccatttaaataatcacggaatttttttaatgccgcgtaaaaaggaaccttatctgcagctcgtggcaactgagcacatcgtgcacttgaagacggcatcacccacatatgcgtgtttgtaccttcaacaacatctggttgccggccgaatttgaaatccttcttccccgaaaatacttcataaatgagttttccattaaatacagctatcttaggtctaaacttttttaatttttctaacaaaatttgactaccctctttaatttctttacgagttagatcagcactacccttggtggcacgttgtaccatatttgtaaaccctatgcctacttgaagtaacttatagtcttcatcggcagacatttgttggggcgttaagcccgacaggtacagacatttccaaaaatggttgcctggcccagcatagtgatgacctttgtaggccgcaaaaagtcccggatttattccaattataattatatctaagttttcggtgagatgatctggtagtgttcttttggacacctcttcctctggcataccattgaaacgatcatgtttttttcgttcttttataggccgtggtattcctccgttcatgtcttggttaaactcgggctgatcaggtttgattttcttttttcgtcctcgctttttgggccctggcataagttggttattgactgggggcatttgatgcataagatgtgggggccctggtgcggcaggaagcataggaatagggtcatcatcaatgaaactataggggtcctccaacttttcacatttgacttcatggttatgtgcaacattcgtaggattcaacatcaaatcagcactagtttcataaccatcatcatggggttcgagtttcatatttctaggaaaaaaacaatgaaaaattcacatgacccattattttcgcacaggtatcacttaacacttaatttgtacatagaatttgagggcgtgtttcaaatacatcatgcaggtaaagtgtattcaggaggcaggatggattcaag

SEQ ID NO: 3555 - DNA, 2665 bp, Diabrotica virgifera
  SmartBlast Evalue=1E-111; Info="G/t mismatch-specific thymine DNA glycosylase, putative n=1 Tax=Pediculus humanus corporis RepID=E0VM66_PEDHC"
aacaaaatttatttgatcattttttttcgtaaattctaatactgcttaaagtacaaaaaattgaggatagaagtttcttaaaaatgtgaaactagtacgagtattaaatataacattagatataaaaaaagtcactttttgtaataaaacattgaataggtcataattattaaataaataatatcagttctgttactatataaaagtatttttctttttttttatttgggccaccacttacagagtgttttgtgatggcccgttttgaatgcagtgatatgtgggaataagggcaagggacaagtaaagacgacctgaagagctataacaaatgtttattttaacttaaagacatggcctacaactataacgatgaacctcacactcagattgacacacacacgcaaccgagatctgaatgtagaataatgcacaaaacccttggcctatctaacattcaaagtttagagaaaaatacttatgacaaaaaaatatcaccatttaccctgtgcaagtctctgttgttgtcaaaatgcaagtgaccaactgtactcaagcggacagacttgctaggtactagctgaacatatggtacaggtacacaacatgaaaacacactgacggaaaccaatcagaatcctcccaagtagggtgggtaacctggcggatgagtcggtgtagcttgagggtaactatagtacggatagtttggacttggaacatgcaaaccaggtgcatagctctgagcatatggtatttgtgggtaaccaattggcattggttcataatgaccactccacgttggcgttggatacagtgggtaacttgaacttggaggataattatatggaattggactagctctggatgaagatgatacattataattattgaactgacccgcatattggtcaggtgcttcaccaagtggagcttcaccttcagttatgctgggaatttgatctactaacgattccaatcctgacaggctttttgtagcaatatcttgtgtttgtcttggcgatgcatactgatctgtttggtgctgaggttccatgttgtacgattgataatgataatgtgtctgttcgctattgctagaaggggctggactgcctaatcgacattcagcctcatcggccatactagttggtggttcaaaatctggaggaccgatgggtgatgcaggcgaacctaactgttcagaacttattgctgcacttatttctgaacttaagtccgaatgagtgaaaggttgtgaatggggtcttggagattgactgtaaggaggccgaggtgactgactatatgggggccgaggagactgactgtactgtggtctgggagactgactatattgtggtctgggagactgactatactgaggtcttggagaatttgtgtaagctggtcgtggagactggctgtatggaggtcgtggcgattggctataagactgtggtggttgtggagcatataaatttcccaccccattaggaggtgtcatagcagggcccatttgataaaaattgttgggagactgaattggagacgggtttgagtaacattgagacaaattggtcgatgtattgttgtctggtggatttaagtccatattttcaaccttaaccttcttaggccggcctctttttttctttggaaaatcacagttactattctgagtagagggaggtttccgaactactggctttggtggagattcttctccttctacttttatttttttcggtctacctcttttctttttacatggtataatcgtaccatcttcattttggatcacagcattacttatgtcagtgagctccggagaaaatgcatcaggctttggttctgcttcgtagcaagactttaaacttggttcagaaaataccatttcattctcatcgatttcagttatcagaccatttaaataatcacggaatttttttaatgccgcgtaaaaaggaaccttatctgcagctcgtggcaactgagcacatcgtgcacttgaagacggcatcacccacatatgcgtgtttgtaccttcaacaacatctggttgccggccgaatttgaaatccttcttccccgaaaatacttcataaatgagttttccattaaatacagctatcttaggtctaaacttttttaatttttctaacaaaatttgactaccctctttaatttctttacgagttagatcagcactacccttggtggcacgttgtaccatatttgtaaaccctatgcctacttgaagtaacttatagtcttcatcggcagacatttgttggggcgttaagcccgacaggtacagacatttccaaaaatggttgcctggcccagcatagtgatgacctttgtaggccgcaaaaagtcccggatttattccaattataattatatctaagttttcggtgagatgatctggtagtgttcttttggacacctcttcctctggcataccattgaaacgatcatgtttttttcgttcttttataggccgtggtattcctccgttcatgtcttggttaaactcgggcctcttaaaagttttaagtgatcgaaaaaagttattgttatgtaaccaaaaaataccacatcacattttctgctagacatacaaaatggtaacatctaacacaattatgtcacattatct

SEQ ID NO: 3556 - DNA, 6823 bp, Diabrotica virgifera
  SmartBlast Evalue=1E-113; Info=Innexin inx7 n=1 Tax=Camponotus floridanus RepID=E1ZXF0_9HYME
atagatttctgtaattttgtaacaaaaaaatggcaaactttgcgctgtttttttagtcattagttgttagcattgctgctaactctaaactgttttctttttgttattgttaacactttactacaaaaatagcgacaaatctttcgttaattttgagacatctattataaaatttgtgttgtcgtcaagaaaaactttgttttagcaaatttgtcgattcaagtttcagatgatgaaaaaaaaaaccgtacaagaaaacagctgcaggggaaaattatttttataaattattatgtgcatacaatgaatacattcaacaaattacggtacatggcaatataaacattttatctataagataaagaatgcaaaatgacgaaattaacataaaactattaaaaataaaattttaaaaataatatattattcgtggtacgttcggcccagtaagaacaacgcaattttggataatatcgtcaacttttttgaagtgcatgaacttggaaacggtaaataaaaatttcttatctatgcaacatttaaataaacgtaatattaaacgtatgagtctataaataacatgatgttgcataaacatatttcttacgcaatagaattattacgaaaagataatcacaatcatatggtaaaatgctacaatgagttaataaaaatggtaaaaaataattataaaagggtagtttttggtgtatatggcaattacacagcaagtatttgtacacagtacattgcagtttctttttatacagggtgtttcattaataattgtccatatagtaactggagaaaccttagcacaaaatacgaagatttaacctaaaacacttaaataaaatgtggttccttactgagttacagggtgttttatctaaaaatttaaaacatatttttgcttagtattttaaaactattcgacgtatccttttcatacttagcagaaagttcaactactagacaccctactaaattgtgataaacaaacgtttatatctactaccagaggcgtacgacaggggatggtgaatggttgacccttcttaaattctacgccactggaggaattactattttagtgccatttttagattctccaatactttctacgtgaataatatactcttcattggtaacgataaagtcattagttttcgagatatttgaagttaaatatgaaacggcacagttattttgataatttatgatatgattcatatgattaaaatttaaaaattatttgtacccagtactttaagactatttggcgtatccttatcatacttagcagaaagtgtaggtactgtacatcctactaaattaagataaataaacgtttttagcttctaccagaggcgtacgacaggggatagtggctggttgacccttcccaaattctacgccactgacgaaattgctattttgtgtatgctccagctgaaaaagttgtggattatccaggaaaagaatagaactataatttttcgtatttccgtaagctttttggatctcttaaaggatcttggataaagtgaaactaaacaacatcgtcatcatgctgcaggatttcagataatccatttctaaatatttatatacctttccaattgttgtgttctttccttcatctgcctctatgtatatattaagtgtcatgtattgtgtaagatgttaagaatctgaaattatttggatatattaacttctgtaccttgtactctatttccccgatttatatttatcttacatcttcgcttatgttgataatatgctcacatttggtccttgctcttgatgtcctttggaagtcattaagattaagacgatattgcgataataatagactacaaggtttataataaattagagaatttcctggtaaggattatagtctgtagattaagtctaataatgataagagaaagattaaagatttaagtattgaacatttacttttcagtgacatcaaattttgattttgatcccattattcttagtatagtcaagtgtgtaaaaataaacacaaaattgttaaatttattaatctttactatgcaatgaagactttcttcttcaagtgccatcttcgttccgaaggttggcgatcatcagggctatacgtattttcgaaactgctgaccgaaacaattcgttgttgctacagctataccattcccgtagattctttagccaggagtttcgtcttcttcctatggacctttttcctgctatcttcccctgcataattattcgaaggagttcagatctttcgcctcttgtaatgtgtcccaaatattgcagtgaagactttagtactttccaaatgttcagacttcacaattaatctgataataggtcaggggcgtaacagagggccccgcagcatgaagcttgcggggggcccaatcgtttaagggcccatcttgtcatctgatattatgtaaaaatctgttattgttatattatttttacgttgtctgtttaaatttataaacgtaaaaatttctaactagacgtatttgccaagtgaatcatctcataatatcaagaaacttaatcccttccgtcctaccgaaattttatggcagcgacaataaactatataatgcattgtacgtgactattgaaagatattagaattgcaatttgccgaatttaagaacaatatttttaaatctaaaaatgggttttctttctctctgttcttgttctttgcctacttttagtatttcgatacaatattatagccagtaatttcatattggttgtttgcattgaatgttatttatgtttgttttgttttacggttatagttgcatcagcttggtacgcatttatttaacaattattgacgacttttcttgtgtaatcattggacaatctatcaacagataaacgttaagataaggaaattataacacttaccctttagggaagtcaatgtagaaaaacttgcattgtttcggtttcggaaaaaatcaaacaagcttatatttttctaaaacattttttgttagtttatatatcttatcttaaagtgaaaagttctactcacagatgcctctaattgtttattaattctttaaacaataaaactgttttatattaaataattttaaaagatatcggtgaattcatcattttactttgttcaaaaaagtttctatttgctttttgattatgctgaattcgactatgtcgttaaatcagggccataagtacgatggccccctaaacgtgatctgggggccccctaccggggggtctggggttaatcacccagcagaaggagtccgggaaaattgatatttaaccacttgaaaacgcattttaatgtacttcatgactgaagtttcctgtacctacctacatattgctattttagttgaccaacacaaaaaaaaatttaaatcacattattttaagctaaatatttaccatcaatataacatattttctgttttcataaaaaatatactacatataatgttacttacattcttcggctataatgtaggtttttaatcgcgttatattgcctataggcagtataacgcgattacaatagcggggcccccttcgccgcgggccccgcggcactgccccggttgccccaatggtagctacggccctgtcagacattacaatttgaaaattcaaaataaattttttttagcacttatacagtatgtctgcgtggcttcgaaccatatgggaaacaatacgatcaattttacgaaaaaaattattcttcatgaaatgctttgaatggtcttaaatctgagatacaaaataagccagataaaccatcagatatcaaagtttatcaattttatacgaggtaagtcaaaaaataggaatttaactcaacgataaagtacttttatatttaacaatatacgattttaattttaattggtaattacatccttgtaaataaaaaattaatttttccaaatatttctcaaattaccgataaaaaacatcattttgttacaattataataactattttattattaattttttaattttacgaaaaaattctttataaaattcttatcagattctttataaaaagctctgcattatctcaaaacgaagattcaatcgtaatatatctcactttaccaactttatacgaggtatgtcgaaaaatatgaatttctctctaagagttaagtacctttatagttcacaatatttcaactggaatgatataattgcatatttaaacatagtttttaattgcgaacaactttttataataaattgtttcaatattgtaaaatataaaggtggtatatgtactattgagcgaaattaatattttttgacatacctcgtacaaaatcaataaaatttaatatctgattattgcaacttaagttttataccatgcagagcattttatgaagaataacttttttttcgtaatatagatatataataaaaaagtttcccataggttccaagccacgcaaacacactgtataggaaatcaagtaagaattattttaacatttactatttttaaagctggttattaaatgtattgtaggtaagttgtacagaaaacaacaaaagaagttgtttatttggaatgggtctgtataccaataaagatgagaaatataagttgttatgaacagtgaatgataacgctaacacaaaaaagtttttgttaaataagtcgtatttagtaagtaattgtttaacgcgggagcagtcgcgctcacttctgtcacgtaagcagtcgcgcgtagaacaaaatctaacaatatgaatttaaaacaaagtttaattttataatatttttgtttgctttttatgttaaaaatatctatttctaacaattttaaaactaataattggttcccaccaaagccataaataccacaaaaaaaaaataaaaatgaaattaaaaaataaaaaaaaaatcctacgcattactacaatcttcttcgaggcacttacaagtggaaagttatgttgcaaaatttttcattaagttatcacggaaaatgatggattttttctaacggcgcgactgctcccgggttaaaacgggccccatttcaaattttgcgggggggccccgacggagtttgttacaccactgaatagggtactaaagtcaagaagaaacgttaatatacaaggtttttttaatatctttagtaccttatggacggtaatctattaatctatatggcagcttaacaaatcttctataccaccactcttctaaacgcacatcacattttgttacaatactcctgccactatttttaaatatcatttaacttcaggcacttaagcgtacttcagatctgaatcctccaggtccagtagcggcttcttcatggagcttctttcctcgtagtcttgagcgatgcctacgaaaatttccttaaagactaaaggatcgacgttcttagacaaatacaccaaaaacaaccaatcagagtagctgggcgttctggtaacgtttagtactctccaagggttcagctttcctggacacgagctcgagaaaatcattctgttgaagcctcggctcctggcgtgcagaatgtaggttataattctccagagtagacctaagatggagcagatgaagaggaagatgaaccaaaaccagacggcggtgtagattttgtcgttgatgatgttgagggccattacgcacatagcgtcgtggtattggatggagccagagggaccgtatttgtggaaggtgcatttggttatctttggaaaaacttcatccaaaatatctacgctggaatccaaaccattgcgccaaaccgtcgatcccaatttaaggaatttgtagcccaaaaatctgttagtgatggcaatttgtatgatgacatggatgaaattgaggacttcgaccagcatcaatttcagtgcccagtttttgttaacgtaaacgccatcttgaaagagttgtctcacttgttgaatcttcttttctctatctgatttagacggaattttgttatcgccaactttcacctctttttcttgcaaagaaaacgccgcgtactttaagctatctaccaagtatctcaatcttctcccttccatcttcttccatagtaaatgcggtataaggaacataagaccttggaagaataacacgaaaggaacccactgatagtacgcgtgccgtactatgggttcattcgagtcaataccatatggaccaacgccaggatgtgccaaattaccagtgtctagcatatgagcactcatttcttttgtcactgtgaaggtcgtcgtaaagaaacaaaacgtgttcataacatgttccggtacacccccatccgctatacatcgtatatgctctccaatgtactgtctagaagttaccaaaatggacgaaattataaaaatatacaccgttgccttgtaatgtagcctgaacacccaattatcgataatatattgctgaggttttaacttgaagtttttctttagtccctcaaaggtactcaacatcgtgaaagcctagaactgtaatcctcttcgaatatacgtcaaaacaagacgtcatttaccgagcaccaaacactagaagctgcatcagcgagcagaaaaaatcgccaatcaaatttggagtagcgcttgcgatctactataaaactgtttatagcgtaatttggctgggatggcgacggtgatgctcaaatgtcatcaattagtcgggttaaattaaacgctgtattgttactaacggctcgagacatgcgcactgtgtgagcgactaaatttatagattctattgtgaattatgaag

SEQ ID NO: 3557 - DNA, 1279 bp, Diabrotica virgifera
  SmartBlast Evalue=3E-14; Info=Endonuclease-reverse transcriptase n=1 Tax=Bombyx mori RepID=D7F170_BOMMO
atagatttctgtaattttgtaacaaaaaaatggcaaactttgcgctgtttttttagtcattagttgttagcattgctgctaactctaaactgttttctttttgttattgttaacactttactacaaaaatagcgacaaatctttcgttaattttgagacatctattataaaatttgtgttgtcgtcaagaaaaactttgttttagcaaatttgtcgattcaagtttcagatgatgaaaaaaaaaaccgtacaagaaaacagctgcaggggaaaattatttttataaattattatgtgcatacaatgaatacattcaacaaattacggtacatggcaatataaacattttatctataagataaagaatgcaaaatgacgaaattaacataaaactattaaaaataaaattttaaaaataatatattattcgtggtacgttcggcccagtaagaacaacgcaattttggataatatcgtcaacttttttgaagtgcatgaacttggaaacggtaaataaaaatttcttatctatgcaacatttaaataaacgtaatattaaacgtatgagtctataaataacatgatgttgcataaacatatttcttacgcaatagaattattacgaaaagataatcacaatcatatggtaaaatgctacaatgagttaataaaaatggtaaaaaataattataaaagggtagtttttggtgtatatggcaattacacagcaagtatttgtacacagtacattgcagtttctttttatacagggtgtttcattaataattgtccatatagtaactggagaaaccttagcacaaaatacgaagatttaacctaaaacacttaaataaaatgtggttccttactgagttacagggtgttttatctaaaaatttaaaacatatttttgcttagtattttaaaacttagaatataccaaactgtaataagagcaacagtcacctacggatgtgaaacatgggtactaaacaaaacagaagaagaaatgatagagagatgggaacgcaaggtactgaggactattttcgggggaaaatacggcagacggttggcaaagaagaactaatcaagaattaaggatgctttacaaggaaccaactataacaagatacacaaaggcacaaagaatcaggtgggcaggtcatgtcgagaggatggataggtcaagaatgccaaagaagatactattaagaaaaccagttgggacaaggagacgaggtagaccaagaaaaagatggcacgaaaagtttcaaga

SEQ ID NO: 3558 - DNA, 507 bp, Diabrotica virgifera
  SmartBlast Evalue=8E-17; Info=Endonuclease-reverse transcriptase n=1 Tax=Bombyx mori RepID=D7F170_BOMMO
taaacgagtaaagcactttacatatctaggtgtcataatagatgaaaaaaggacacgagcaaaatgaactaaagcacaggatagctaaaggtaaccgaaaggtcggcaagtttaaaaaaattattaaaatcaaattatgtatcaagaaagacgaaaatcagaatataccaaactgtaataagagcaacagtcacctacggatgtgaaacatgggtactaaacaaaacagaagaagaaatgatagagagatgggaacgcaaggtactgaggactattttcgggggaaaatacggcagacggttggcaaagaagaactaatcaagaattaaggatgctttacaaggaaccaactataacaagatacacaaaggcacaaagaatcaggtgggcaggtcatgtcgagaggatggataggtcaagaatgccaaagaagatactattaagaaaaccagttgggacaaggagacgaggtagaccaagaaaaagatggcacgaaaagtttcaaga

SEQ ID NO: 3559 - DNA, 3306 bp, Diabrotica virgifera
gatgtacccacttcaatccagtttgaatcgtttcggataggaattttaataaatttatgtaccatctacctacaggttttacttccttggtaagttttctaaatttattattacctaagtttagtgggcctgctatcctctaaattatcttcctctctaggatcctcaatctttcttcctctttctgtgtctgacacattacttcagcaccatatgtgcagcacatttgacttatagcgaaatattaattcatgctcgacagtttttcactcttcttaaagtggaacattatctatatcaaaaagtatcaaaccttctttcatttcagtttttggaaacgtctaaaagtcgggactgtactgaaacttgcacattgtgtaaccatgtctttttctaaaaattgttgagtaataggtattctatgaatgtgctgacccattatcgtgagcatcagtgcgttatcttttttagagtggacggccgtagctcaggggcaagatactgaccttctaagccaaatcatatgagttcgaatcctggtgctaacaacattttcatttatatccaccaacaagaaagaatttcctctggctggccatattacattaattacaagtaaatttaatgaaacatttttcttgataacaattaaatttatttggaaacccttaaaggggccacaaatgtcacaacaaagcgttttcgctctgtaggaagagcatcatcaggtttacaaacctaacatgctaagccatccaaaaatacaaaggttaaaacttatttttggtggcttagcatgttaggcttgtaacactgatgatgatctttttacagggcgaaggcgttttgttgtgatgtttgtggcccttttaggtgtttttgaataaatataccttttatcaagaaacatttttcattaaaattattttcatttctaaaaatgatgtgagctgttcaccgtgcttcaagacttgtatgatctgacaacatagtattatgtcatacatgttttaaaatgtttagtgaggacagcagaaaaaactgagtaattatcaaaatttattgacaaaagtttgccgtttcagtgttatacttattcttagctacaattttgctgccattcgtaataaaaattatagtctagtcagtgaaggtaaaatacagcataatacaaatacaatttggctgaaggttcgacatcccccagggtaaaagcaccttacggcactgggtcaacttgtcaaccatgaagttgagagtaagtagaacttaattttggtgtaaatctgtacagcctcagaaaattatgcgggaaaatactcattgactggactattaaggctgtcacaaaaatgactcggtttggttttcgtattacagcaaattgcttgttttctagtgtaatttgaattatcaaacttgaataattaacctgttatcttgacgttgttttatggttgttgatacatttcaattacctttggcattcatttataatacaaatgtcagtattaatataattagaagcattcaatattactataataacggatattttttcctttggaacgatcgcatctttttttttaatatccagcggataggaagttttggtatttgggtatccaaaggcctcttatctttcttcggcagtacttcatcccttagtgcaccataataaatcctcagcggagtaagaaatattatgttctctagattctagatagtatgttacttgacttgtctgtaaaaatgtccgagttcttttgaaaggtaggttcctcaagagcagtgactaatattggtgtagctaatacgttattaagtctcgatgtattgttagctttgagcctcaagatagcattttgattacggtgtcaaatcaaaagtcacatgggacgtcacgatgagttatggagactttggtatctaggaatctggaacactggcaaaatctataatgctgcatttacatataagtagattaattgaatgccagtattgccatttatcatttacgaatcgaatttgtttgtagtgaggtatttttaatcctgtatttatatacagaaaaaattaacagtcatagttagactataatttaatacctaacattatacagcaggaaaaatgaaagaatacccattaacgaacaaataaaatacgctgtattttcctgtcaccgtgtcacacaaaagattggccagcgcaagtacatgtaataattattattgttacatgtacttgcgctggacaattttctttgtgacacggtgacaggagaatgcagcgtgttttatatgttcgttcatgggtgttctttcatttttccgactgtatgattctttgatttgatttgtagcagactataataacaacaatttgcaaagattgggtggaaaacattcagaacaacatgtgtcttttaccatatgacattgtatgttttaataaatttggaagtatactgtgagcaaaatgaaagaaatgatcatcgtgaagatagttttatggaattaaccaaacaatccaagatgtcttcggaaaaataaactacttaaacaaatcggttattcgaagatcaacaaaggattcgttcattttgcagaggagtatgtacctttagcctggattaaatctaatatttatacatttttataaatcttttttcggaaatacttcactatgaatgttctacctttaactaagtgtgtatagagctgtggtaataattagtaacggatatatttagaaaggtgtggatacatacatacaagaaggacttttactgtaacgagaaatatttttaagtttaatatatacaaaaaaaatattaatattaaaccagttgaccattataatatgtcaataaatatctacatatatatcctaagttgagcttttttactgcttaggtgtgctgatgtgattgctatgcacttctctgtatataataatgaagtatttaaagtttattcgtaaattttataattgggtgctaaatttttattgtagtggagccgtgcattcgcgattattatttatttatattttaacacttgcaatattacatgtaccgcgtaacaattcacatgatatgctcttgattgcataaaatatcgctggtggtattattattgaatcatctttgcattcttcctacttattcaccatctttcatgcactggtaatgtgcttttcagactccagttaggtttgtttacggctatatctagcaacgagagtctgaatggcgtcatgaaagttcagaagctttttatagtaaagaaaaatgtacacaacgga

SEQ ID NO: 3560 - DNA, 3082 bp, Diabrotica virgifera
  SmartBlast Evalue=2E-13; Info=Histone-lysine N- methyltransferase SETMAR (Fragment) n=2 Tax=Harpegnathos saltator RepID=E2C2X6_9HYME
gatgtacccacttcaatccagtttgaatcgtttcggataggaattttaataaatttatgtaccatctacctacaggttttacttccttggtaagttttctaaatttattattacctaagtttagtgggcctgctatcctctaaattatcttcctctctaggatcctcaatctttcttcctctttctgtgtctgacacattacttcagcaccatatgtgcagcacatttgacttatagcgaaatattaattcatgctcgacagtttttcactcttcttaaagtggaacattatctatatcaaaaagtatcaaaccttctttcatttcagtttttggaaacgtctaaaagtcgggactgtactgaaacttgcacattgtgtaaccatgtctttttctaaaaattgttgagtaataggtattctatgaatgtgctgacccattatcgtgagcatcagtgcgttatcttttttagagtggacggccgtagctcaggggcaagatactgaccttctaagccaaatcatatgagttcgaatcctggtgctaacaacattttcatttatatccaccaacaagaaagaatttcctctggctggccatattacattaattacaagtaaatttaatgaaacatttttcttgataacaattaaatttatttggaaacccttaaaggggccacaaatgtcacaacaaagcgttttcgctctgtaggaagagcatcatcaggtttacaaacctaacatgctaagccatccaaaaatacaaaggttaaaacttatttttggtggcttagcatgttaggcttgtaacactgatgatgatctttttacagggcgaaggcgttttgttgtgatgtttgtggcccttttaggtgtttttgaataaatataccttttatcaagaaacatttttcattaaaattattttcatttctaaaaatgatgtgagctgttcaccgtgcttcaagacttgtatgatctgacaacatagtattatgtcatacatgttttaaaatgtttagtgaggacagcagaaaaaactgagtaattatcaaaatttattgacaaaagtttgccgtttcagtgttatacttattcttagctacaattttgctgccattcgtaataaaaattatagtctagtcagtgaaggtaaaatacagcataatacaaatacaatttggctgaaggttcgacatcccccagggtaaaagcaccttacggcactgggtcaacttgtcaaccatgaagttgagagtaagtagaacttaattttggtgtaaatctgtacagcctcagaaaattatgcgggaaaatactcattgactggactattaaggctgtcacaaaaatgactcggtttggttttcgtattacagcaaattgcttgttttctagtgtaatttgaattatcaaacttgaataattaacctgttatcttgacgttgttttatggttgttgatacatttcaattacctttggcattcatttataatacaaatgtcagtattaatataattagaagcattcaatattactataataacggatattttttcctttggaacgatcgcatctttttttttaatatccagcggataggaagttttggtatttgggtatccaaaggcctcttatctttcttcggcagtacttcatcccttagtgcaccataataaatcctcagcggagtaagaaatattatgttctctagattctagatagtatgttacttgacttgtctgtaaaaatgtccgagttcttttgaaaggtaggttcctcaagagcagtgactaatattggtgtagctaatacgttattaagtctcgatgtattgttagctttgagcctcaagatagcattttgattacggtgtcaaatcaaaagtcacatgggacgtcacgatgagttatggagactttggtatctaggaatctggaacactggcaaaatctataatgctgcatttacatataagtagattaattgaatgccagtattgccatttatcatttacgaatcgaatttgtttgtagtgaggtatttttaatcctgtatttatatacagaaaaaattaacagtcatagttagactataatttaatacctaacattatacagcaggaaaaatgaaagaatacccattaacgaacaaataaaatacgctgtattttcctgtcaccgtgtcacacaaaagattggccagcgcaagtacatgtaataattattattgttacatgtacttgcgctggacaattttctttgtgacacggtgacaggagaatgcagcgtattttatatgttcgttcatggatattctttcatttttccgagtgtaataaatgttctaatagtcaactactaaaattcgcatttacaacttttaagaatatattaggcttctgtttatccaaaaaggatttttaaatgatatttaaatacacaaaatatttttccaatatacactaagttccttttttatatgagaagtgaagttttgtttgtataataaagtttatatttagttaaaacgttatttgactgtttcattatgtagatttttatgaaaatgacctcataaccttataaacaactgttaaaaggttcgtttggtaaatcattgttacagaagatacttttttgcacagtagagctttacaagtacactggtaattcatcgttcattaatttaatacttatatcagataggggtaataggctcttcaataagtttttataagatcaataagaaaaccacaattttgtgaagtgaaatacacttgttagactagattgcaattgatgtattccatccctgaagtgagaatcaagaaggactacaaaatacgcttttacagcttttttgacctcattatttgatgatcactaggggccaagtctggtgaatacggtggatgctccaacaattcgaactttaattcatggattttagtcatggtgcattgcctgatgaaaaatgattttttcttctgtagaccgagtcttttctcttcggttggtctaaaagattacaataatattcggaatttattgtaatcttttagaccaaccgaagagaaa

SEQ ID NO: 3561 - DNA, 1868 bp, Diabrotica virgifera
gatgtacccacttcaatccagtttgaatcgtttcggataggaattttaataaatttatgtaccatctacctacaggttttacttccttggtaagttttctaaatttattattacctaagtttagtgggcctgctatcctctaaattatcttcctctctaggatcctcaatctttcttcctctttctgtgtctgacacattacttcagcaccatatgtgcagcacatttgacttatagcgaaatattaattcatgctcgacagtttttcactcttcttaaagtggaacattatctatatcaaaaagtatcaaaccttctttcatttcagtttttggaaacgtctaaaagtcgggactgtactgaaacttgcacattgtgtaaccatgtctttttctaaaaattgttgagtaataggtattctatgaatgtgctgacccattatcgtgagcatcagtgcgttatcttttttagagtggacggccgtagctcaggggcaagatactgaccttctaagccaaatcatatgagttcgaatcctggtgctaacaacattttcatttatatccaccaacaagaaagaatttcctctggctggccatattacattaattacaagtaaatttaatgaaacatttttcttgataacaattaaatttatttggaaacccttaaaggggccacaaatgtcacaacaaagcgttttcgctctgtaggaagagcatcatcaggtttacaaacctaacatgctaagccatccaaaaatacaaaggttaaaacttatttttggtggcttagcatgttaggcttgtaacactgatgatgatctttttacagggcgaaggcgttttgttgtgatgtttgtggcccttttaggtgtttttgaataaatataccttttatcaagaaacatttttcattaaaattattttcatttctaaaaatgatgtgagctgttcaccgtgcttcaagacttgtatgatctgacaacatagtattatgtcatacatgttttaaaatgtttagtgaggacagcagaaaaaactgagtaattatcaaaatttattgacaaaagtttgccgtttcagtgttatacttattcttagctacaattttgctgccattcgtaataaaaattatagtctagtcagtgaaggtaaaatacagcataatacaaatacaatttggctgaaggttcgacatcccccagggtaaaagcaccttacggcactgggtcaacttgtcaaccatgaagttgagagtaagtagaacttaattttggtgtaaatctgtacagcctcagaaaattatgcgggaaaatactcattgactggactattaaggctgtcacaaaaatgactcggtttggttttcgtattacagcaaattgcttgttttctagtgtaatttgaattatcaaacttgaataattaacctgttatcttgacgttgttttatggttgttgatacatttcaattacctttggcattcatttataatacaaatgtcagtattaatataattagaagcattcagtattactataataacggatattttttcctttggaacgatcgcatctttttttaatatccagcggataggaagttttggtatcaaaggcctcttatctttcttcggcagtacttcatcccttagtgcaccataataaatcctcagcggagtaagaaatattatgttctctagattctagatagtatgttacttgacttgtctgtaaaaatgtccgagttcttttgaaaggtaggttcctcaagagcagtgactaatattggtgtagctaatacgttattaagtctcaatgtattgttagctttgagcctcaagatagcattttgattacggtgtc

SEQ ID NO: 3562 - DNA, 3297 bp, Diabrotica virgifera
  misc_feature (2014)..(2014): n is a, c, g, or t
  SmartBlast Evalue=0; Info=Pol polyprotein (Fragment) n=1 Tax= Drosophila buzzatii RepID=A1BPH1_DROBU
attgatattgacattaattcattattagttagtaaaaaccaaggataatcgtccataccttgaaatctctatcttgggacattcttgtttagctttgctggacacagggtccaatatctctattttaggttctttaggtctggaatttctccagaattctaatgttaagataggaatggatgagagtttgcaagtgactacagctgatggtcaagtccaaccaattttaggtcagtttaccactgagatttctgttagttcatgtaaaaggatgattacattttttgttataccttctgttaagaattcagttatcctagggatggattttctgaaaacttttaatagtgaattaaatttttctgaattttctttatctgtctcttcttttaatatctcttgtgttgatgcagttaaagatatgagtagactcaatgctcaggagttagagcagttgaataatgtcatcaaatccttctcttctaactcttcgaagaatcagttaggcagaactcatctcattgaacatcatattgatgtgggttcgtctaagcccttcagacaataccagtatccattgcctcaagcctggcatgaaagcttagttaaggaggtggatgaaatgcttaagcttggtattatcgagcagagctcgtcgagcttttgtagccccttgtggttgacaaagaagaaggatggaacttttcgtgtctgtttcgacggacgtaaacttaacagcataacgatgaatagggatgcttatcctatacctcgtatagacatcatcctgactaagctgcaaaatgctaaatacatttcatccatcgacctaaagaaggcattcctacagattccattaagcgaagagagtaagaagcttactgcctttgcagtaagtggcaaaggattgtaccagtttactacaatgccttttggtctggtgtctgctccacagactatgtgtagattaatggatttggtaataggtcctgctttagatcccttttgtcaatattatcttgatgatattctagtcattactcctgatttcgacactcatatctctgtattgcagcagttgtttcagcgtctcaaagatgcaaatttgactattaacttagataaaagcagcttttgtcgtgactctattaagtttttaggatatgttgttgattctcacggcctacatactgaccctgacaaagtgtcagctattcgtgattttcctgtgcctaagaataccacccaggttcgtcgattgttaggaatggtgggttactataaaaagtttgttaagtcttattctaccttgttgtcccctattactgacttacttcaaaataggaaaaagggacaaaatattgtgtggactcctgaagctaatgaagctttcattaaaatcaaggaggctctcaccaactccccagttatggtagccccagatttcactaagcctttctatttaatgactgattgttcaaacacagcatctggtggtgtactctatcaaattgttgatggagaagaacaccctatagcctacaccagcaggaaattaaataaagcccagaaaaattatacgacaactgaaaaagagttgttagccataattacgggtattgagcatttcagatattttcttgaaggtcgttcgtttacggtcataactgaccatagtagtttggtgtggctacagagtatgaagaacccatctcctcgtttggctaggtggattttaaaattggcacaatatgattataaaattgttcatcgtaaagctgcaggtgtagtagtcgctgatgcactatctagaacttttgatattaatttgttagatttatctactttacaaccagatgattggtatcgaaaaatgttgtatgatgttcagaatgttccaggtaaatttcctgattttaaagttgagcacggtgttttatataaacatgttttaagttctatggatgccctcacgggaatgtctgagtggaagatagtagttccaacagcaaanagagcagaggttttggccacttttcatgaccatcctactgcagcgcattttggcttctacaaaactttctgtcgtatatctgaactgtattactggccaagatgcgtcagactattcgtagttatctcgctcgatgcaaaatttgtgctacgtgtaagtcgacaaatcttccccaaccaggtttaatgggtaattatcgacggattgattttccattccaacttatatctttggatcttattggtccttatcctaggtcgtataaaggtgctcaatatgccttagtagttgttgattactttacaaaatttcctttggttcatacgatgtctaaagcaactacttcagcaattatcaagtatctggagaatgaagttttcttaatttatggtgttccacagatcgtgtcatgcgacaatgggccccagttcacagccaaggcttttcgtgatctcatgtctaaatacaacgtacaaaagatctggtacaatgcgaactatcatcctcaaattaatcatactgaaagagtaaacaaatcaatcgtgactgctttaagatcgtattcttttcctgatcagagagcttgggatactcatatccactctatagtacaagctatcaggacttcttctcacgaaataaccaaatgtcctccatcgtacttaatgtttggtcgtcatgttcctctttctggtgattactttggtaagatttccgataatgccactaattttcctgcaatatcagataagctacaccgtttagaagatcttcagcatcttcctgatatctatgtggatgttcgcaaacgtttaaaggcatcttatgatagaaataagtgccgttatgatctgagaaagcgagccttatcgttcagagttggagattccgttttgaagaaaattttgtcaaatcagataaagtgaatttccaatctgccaagctgtgtcaaaaatacataccttgcactgttattaaggttatctctcctttgatctatgagttgaaggaaacctccactggcaggaaactaggcaggtttcatgtcaaagatttacttgaggataagactgtaggtccacataacttgtctgataattctgatggttcatcttcagatgaagattaaattgtgagggccagtttgttatttataatctgtttatctattttgtttacctggttaatttctgtttgttgtgcttttttttcttattttatcttatcttaatgttggttaatatcttagtttatgaacttgttcattttcttgttggcaatat

SEQ ID NO: 3563 - DNA, 3180 bp, Diabrotica virgifera
  misc_feature (2014)..(2014): n is a, c, g, or t
  SmartBlast Evalue=0; Info=Pol polyprotein (Fragment) n=1 Tax= Drosophila buzzatii RepID=A1BPH1_DROBU
attgatattgacattaattcattattagttagtaaaaaccaaggataatcgtccataccttgaaatctctatcttgggacattcttgtttagctttgctggacacagggtccaatatctctattttaggttctttaggtctggaatttctccagaattctaatgttaagataggaatggatgagagtttgcaagtgactacagctgatggtcaagtccaaccaattttaggtcagtttaccactgagatttctgttagttcatgtaaaaggatgattacattttttgttataccttctgttaagaattcagttatcctagggatggattttctgaaaacttttaatagtgaattaaatttttctgaattttctttatctgtctcttcttttaatatctcttgtgttgatgcagttaaagatatgagtagactcaatgctcaggagttagagcagttgaataatgtcatcaaatccttctcttctaactcttcgaagaatcagttaggcagaactcatctcattgaacatcatattgatgtgggttcgtctaagcccttcagacaataccagtatccattgcctcaagcctggcatgaaagcttagttaaggaggtggatgaaatgcttaagcttggtattatcgagcagagctcgtcgagcttttgtagccccttgtggttgacaaagaagaaggatggaacttttcgtgtctgtttcgacggacgtaaacttaacagcataacgatgaatagggatgcttatcctatacctcgtatagacatcatcctgactaagctgcaaaatgctaaatacatttcatccatcgacctaaagaaggcattcctacagattccattaagcgaagagagtaagaagcttactgcctttgcagtaagtggcaaaggattgtaccagtttactacaatgccttttggtctggtgtctgctccacagactatgtgtagattaatggatttggtaataggtcctgctttagatcccttttgtcaatattatcttgatgatattctagtcattactcctgatttcgacactcatatctctgtattgcagcagttgtttcagcgtctcaaagatgcaaatttgactattaacttagataaaagcagcttttgtcgtgactctattaagtttttaggatatgttgttgattctcacggcctacatactgaccctgacaaagtgtcagctattcgtgattttcctgtgcctaagaataccacccaggttcgtcgattgttaggaatggtgggttactataaaaagtttgttaagtcttattctaccttgttgtcccctattactgacttacttcaaaataggaaaaagggacaaaatattgtgtggactcctgaagctaatgaagctttcattaaaatcaaggaggctctcaccaactccccagttatggtagccccagatttcactaagcctttctatttaatgactgattgttcaaacacagcatctggtggtgtactctatcaaattgttgatggagaagaacaccctatagcctacaccagcaggaaattaaataaagcccagaaaaattatacgacaactgaaaaagagttgttagccataattacgggtattgagcatttcagatattttcttgaaggtcgttcgtttacggtcataactgaccatagtagtttggtgtggctacagagtatgaagaacccatctcctcgtttggctaggtggattttaaaattggcacaatatgattataaaattgttcatcgtaaagctgcaggtgtagtagtcgctgatgcactatctagaacttttgatattaatttgttagatttatctactttacaaccagatgattggtatcgaaaaatgttgtatgatgttcagaatgttccaggtaaatttcctgattttaaagttgagcacggtgttttatataaacatgttttaagttctatggatgccctcacgggaatgtctgagtggaagatagtagttccaacagcaaanagagcagaggttttggccacttttcatgaccatcctactgcagcgcattttggcttctacaaaactttctgtcgtatatctgaactgtattactggccaagatgcgtcagactattcgtagttatctcgctcgatgcaaaatttgtgctacgtgtaagtcgacaaatcttccccaaccaggtttaatgggtaattatcgacggattgattttccattccaacttatatctttggatcttattggtccttatcctaggtcgtataaaggtgctcaatatgccttagtagttgttgattactttacaaaatttcctttggttcatacgatgtctaaagcaactacttcagcaattatcaagtatctggagaatgaagttttcttaatttatggtgttccacagatcgtgtcatgcgacaatgggccccagttcacagccaaggcttttcgtgatctcatgtctaaatacaacgtacaaaagatctggtacaatgcgaactatcatcctcaaattaatcatactgaaagagtaaacaaatcaatcgtgactgctttaagatcgtattcttttcctgatcagagagcttgggatactcatatccactctatagtacaagctatcaggacttcttctcacgaaataaccaaatgtcctccatcgtacttaatgtttggtcgtcatgttcctctttctggtgattactttggtaagatttccgataatgccactaattttcctgcaatatcagataagctacaccgtttagaagatcttcagcatcttcctgatatctatgtggatgttcgcaaacgtttaaaggcatcttatgatagaaataagtgccgttatgatctgagaaagcgagccttatcgttcagagttggagattccgttttgaagaaaattttgtcaaatcagataaagtgaatttccaatctgccaagctgtgtcaaaaatacataccttgcactgttattaaggttatctctcctttgatctatgagttgaaggaaacctccactggtaagaactgggaaggtttcatattaaagacttactcgaggataagacagtaggtccacataacttggttgataatttggatgattcatcttcagacgaagattaactgataagggaccagtttgtttatttaaaatctattta

SEQ ID NO: 3564 - DNA, 1411 bp, Diabrotica virgifera
  SmartBlast Evalue=9E-75; Info=Pol polyprotein (Fragment) n=1 Tax=Drosophila buzzatii RepID=A1BPH1_DROBU
attgatattgacattaattcattattagttagtaaaaaccaaggataatcgtccataccttgaaatctctatcttgggacattcttgtttagctttgctggacacagggtccaatatctctattttaggttctttaggtctggaatttctccagaattctaatgttaagataggaatggatgagagtttgcaagtgactacagctgatggtcaagtccaaccaattttaggtcagtttaccactgagatttctgttagttcatgtaaaaggatgattacattttttgttataccttctgttaagaattcagttatcctagggatggattttctgaaaacttttaatagtgaattaaatttttctgaattttctttatctgtctcttcttttaatatctcttgtgttgatgcagttaaagatatgagtagactcaatgctcaggagttagagcagttgaataatgtcatcaaatccttctcttctaactcttcgaagaatcagttaggcagaactcatctcattgaacatcatattgatgtgggttcgtctaagcccttcagacaataccagtatccattgcctcaagcctggcatgaaagcttagttaaggaggtggatgaaatgcttaagcttggtattatcgagcagagctcgtcgagcttttgtagccccttgtggttgacaaagaagaaggatggaacttttcgtgtctgtttcgacggacgtaaacttaacagcataacgatgaatagggatgcttatcctatacctcgtatagacatcatcctgactaagctgcaaaatgctaaatacatttcatccatcgacctaaagaaggcattcctacagattccattaagcgaagagagtaagaagcttactgcctttgcagtaagtggcaaaggattgtaccagtttactacaatgccttttggtctggtgtctgctccacagactatgtgtagattaatggatttggtaataggtcctgctttagatcccttttgtcaatattatcttgatgatattctagtcattactcctgatttcgacactcatatctctgtattgcagcagttgtttcagcgtctaaaagatgcaaatttgacgattaactttgataaaagcagcttttgtcgtgattctattaagtttttaggatatgttgtagactctcaaggtctccatatcggaatctccaattctaaaaatatcgtggacagatagaacacgtcacaaagaggttctgagaaagatgaataaagaaatggaaatcttaaataccgtcaaaacaagaacattggaatatctgggacatattacacgtggagagagatacaacttgctccaattgattatgcagggaaagattcaaaggaaaaagaagcataggaagacgcagaatattgt

SEQ ID NO: 3565 - DNA, 3398 bp, Diabrotica virgifera
  SmartBlast Evalue=1E-44; Info=CG7967 n=3 Tax=melanogaster subgroup RepID=Q9W0B3_DROME
attataaaattagtcatttataattgagaattaataatcttttgatattgtataatggtggtaaaatttcctcctgtaacagcggaggtaaagcctcttgctcatcttttaaaactggctgatgagcatgacgaaagaaatctagtagtagcctactgggctagaatggcagcctgcttgttagctcttcaattagttcctggcaagaagagtccagagacagcagcactgataaaatcgttattggattggttagaacaaacaaaacaagcaaatgctgataatgagggaatcacaagtgaaactatagcacagtctctcattgaagaatatgctctacgattgtttagtcatgcagatgaacaggatcgtgcagaaatatttaataaaaatactgtaaagactttttatactgctggtatgttgatggatgttctagaccagtttggcaatctagctgaagacattagagaaaaacgtaaatatgctaagtggaaagcagcttacatccataattgcttaaaagctggggatacaccaatgcccggtcctcccagaccatataatgacgaagattctgatggtattgtacacaacagtcaattgagtcaagaagagctttctacattttcaaaatatactggacctggaactgttgatgttcaaccaaaaccagcagatccaccactgcctccatcagacgatccctttaaccccccaaagcctctaattccccctgatgaccctttcactcacgctcctgcttcatcacccataactcctcaatacccaacgaatattcaacctcaagtcccatctccttacaatccacccccatcagtatcttctccatttgatgcagtaccttctaccccatctccttcaagtgcagtgattcccacccctcagccaagacaatcaccatcatcaactgggtacactccaacatcccaagacatacaaaaggcacagaagttctccaagtttgccacatcagccttaaattatgatgatactaaaacagctttagattatcttcagaaagccatgaatttgttagtttgtggaaaagaagattaagcaattttattgatgagatttgtatatgcaatttttaagagatatttgttgttgaaaagagattagatcatatatctaatctctttggtggtggggtccacccaccaactatcttcgtagccataaaacataaaataataatttttttagcttttggcgtacagggtaatattatttcaaaagtatgtagtgtgtgttagttcattatataaatattattatgataatacaataaaagttgatgcagccatccactcaagacacctgagcgttggagcaaagaagttcattggatcgttagggtatgttcgtagctcacattccgcgaccaaatgaccgattggattggctagaagcttcaaagtcatagtctgatgatggaagtttccctgacttgtatatactttctgcacctacactgtattcatatatcaaaattgtcatttttgttggatgtcacgtaggtagccaagagagttctcattccataatcccatcccaagccatgccaaaatgctccggtcaaatttgacactacctcccggactaaaatgtttctagtgatatattgagtgtcacaagagctttcaaatgaagtatcagaagtcacatattgacttttaaagaaacgtcatactatcaatatggtcaaaactggaaaaaataaggtttgcgtctcagctgatcaaattataagttttacacagttatcattaaacatttaaccgtcgctattttgaaatatttgagacaagatgtttcaaatgagtaattacttgccattagatccgatttaaaatcatatatttttgtatcaaataatttatatattaatgtaatgtgtagtgtacctgtttatattaatactacatatattttgtagagggttatttaagatacttaatactgttttcatgtcaatcttctacttctttcgatgccgtgcctgtgttaaacggcacggaaataacattaaacctttctcgatcttttttctgcacagaaaatttgctttttgtccctgatttcttaatcatgagagccttgtatgacaacaatctcttctacttacacctggtaatcaatcgaggaacatggtataggtatactgcctctcattgtttggccaaagtagctaacttttcttaaccaccactacatcccaaatgcctctattttatttattgtattgaccgtatcgtctatgtttcgtaactataaagcaaaataaaccacacataacatttgagtgttcttactctcgtttcagtagttaggtttatgttgatggaagtgcaggtttccattttagcctttacttatttgtcgcatgtgatttcattgtttggccaacttcacaaatatttaaagtattatactaattcagtagtatgccccaatcattatcggtgtttgtgtaatacgaattttatctacggccatcaattttgtttgttagaacataatatatggatatatttcgttatctagaagctttaccaattcaacaggaattttatctgatccgaattcattttatatcgatacttcatatcaataattaatttttctctttacttattacccataataaccataaagcaaacatggagtgcaatcaatagaacaagagaatgctgtagatttttaggttttgaaatgttcagtcagttatgctcaaagctcttgttaaccacactatttaactaaaatggattccacactggaatatatgtatactgatttgtttatgattggaataaactaatgttaacggtagttctttctcttaaaaattgcagatattaaaataagtgatgtacagatgtgctttaatatagttttaaatttcgtacaatatttaacctgaatttaaaatctatgctttcatcctatggaaatcaatatattattatgaaaaaacgtttatctttaattttataacttgtttaaaaaataaccagtaaaacccattataaaaatacagttatgtatgtaatagatattgcggtgttaacatcagacagctatgtttaatgtagcagcagttcagtgtaacctttttttaagaagttatttggaatgttattacattacatattgttggtttctatggaaaactattgcagtggtagaaaaataagtaaaattttaaaaagaaaataaaggacttagtgcgtaaacattatatcgtgggcgtactgggaaaatccactaactccattttttcaattttgacattttaataccattaaatccacaaacatcaatatgttaacaggaaaaaccgtatatctccaaattcgtcacccaccgtg

SEQ ID NO: 3566 - DNA, 2050 bp, Diabrotica virgifera
  SmartBlast Evalue=6E-45; Info=CG7967 n=3 Tax=melanogaster subgroup RepID=Q9W0B3_DROME
attataaaattagtcatttataattgagaattaataatcttttgatattgtataatggtggtaaaatttcctcctgtaacagcggaggtaaagcctcttgctcatcttttaaaactggctgatgagcatgacgaaagaaatctagtagtagcctactgggctagaatggcagcctgcttgttagctcttcaattagttcctggcaagaagagtccagagacagcagcactgataaaatcgttattggattggttagaacaaacaaaacaagcaaatgctgataatgagggaatcacaagtgaaactatagcacagtctctcattgaagaatatgctctacgattgtttagtcatgcagatgaacaggatcgtgcagaaatatttaataaaaatactgtaaagactttttatactgctggtatgttgatggatgttctagaccagtttggcaatctagctgaagacattagagaaaaacgtaaatatgctaagtggaaagcagcttacatccataattgcttaaaagctggggatacaccaatgcccggtcctcccagaccatataatgacgaagattctgatggtattgtacacaacagtcaattgagtcaagaagagctttctacattttcaaaatatactggacctggaactgttgatgttcaaccaaaaccagcagatccaccactgcctccatcagacgatccctttaaccccccaaagcctctaattccccctgatgaccctttcactcacgctcctgcttcatcacccataactcctcaatacccaacgaatattcaacctcaagtcccatctccttacaatccacccccatcagtatcttctccatttgatgcagtaccttctaccccatctccttcaagtgcagtgattcccacccctcagccaagacaatcaccatcatcaactgggtacactccaacatcccaagacatacaaaaggcacagaagttctccaagtttgccacatcagccttaaattatgatgatactaaaacagctttagattatcttcagaaagccatgaatttgttagtttgtggaaaagaagattaagcaattttattgatgagatttgtatatgcaatttttaagagatatttgttgttgaaaagagattagatcatatatctaatctctttggtggtggggtccacccaccaactatcttcgtagccataaaacataaaataataatttttttagcttttggcgtacagggtaatattatttcaaaagtatgtagtgtgtgttagttcattatataaatattattatgataatacaataaaagttgatgcagccatccactcaagacacctgagcgttggagcaaagaagttcattggatcgttagggtatgttcgtagctcacattccgcgaccaaatgaccgattggattggctagaagcttcaaagtcatagtctgatgatggaagtttccctgacttgtatatactttctgcacctacactgtattcatatatcaaaattgtcatttttgttggatgtcacgtaggtagccaagagagttctcattccataatcccatcccaagccatgccaaaatgctccggtcaaatttgacactacctcccggactaaaatgtttctagtgatatattgagtgtcacaagagctttcaaatgaagtatcagaagtcacatattgacttttaaagaaacgtcatactatcaatatggtcaaaactggaaaaaataaggtttgcgtctcagctgatcaaattataagttttacacagttatcattaaacatttaaccgtcgctattttgaaatatttgagacaagatgtttcaaatgagtaattacttgccattagatccgatttaaaatcatatatttttgtatcaaataatttatatattaatgattattatattttattttgtttcaacaaatttatctgggcgacattctgtaatgtgtagtgtccctgtttatattaatactacatatattttgtagagggttatttaagatacttaatactgttttcatgtcaa

SEQ ID NO: 3567 - DNA, 1956 bp, Diabrotica virgifera
  SmartBlast Evalue=5E-45; Info=CG7967 n=3 Tax=melanogaster subgroup RepID=Q9W0B3_DROME
attataaaattagtcatttataattgagaattaataatcttttgatattgtataatggtggtaaaatttcctcctgtaacagcggaggtaaagcctcttgctcatcttttaaaactggctgatgagcatgacgaaagaaatctagtagtagcctactgggctagaatggcagcctgcttgttagctcttcaattagttcctggcaagaagagtccagagacagcagcactgataaaatcgttattggattggttagaacaaacaaaacaagcaaatgctgataatgagggaatcacaagtgaaactatagcacagtctctcattgaagaatatgctctacgattgtttagtcatgcagatgaacaggatcgtgcagaaatatttaataaaaatactgtaaagactttttatactgctggtatgttgatggatgttctagaccagtttggcaatctagctgaagacattagagaaaaacgtaaatatgctaagtggaaagcagcttacatccataattgcttaaaagctggggatacaccaatgcccggtcctcccagaccatataatgacgaagattctgatggtattgtacacaacagtcaattgagtcaagaagagctttctacattttcaaaatatactggacctggaactgttgatgttcaaccaaaaccagcagatccaccactgcctccatcagacgatccctttaaccccccaaagcctctaattccccctgatgaccctttcactcacgctcctgcttcatcacccataactcctcaatacccaacgaatattcaacctcaagtcccatctccttacaatccacccccatcagtatcttctccatttgatgcagtaccttctaccccatctccttcaagtgcagtgattcccacccctcagccaagacaatcaccatcatcaactgggtacactccaacatcccaagacatacaaaaggcacagaagttctccaagtttgccacatcagccttaaattatgatgatactaaaacagctttagattatcttcagaaagccatgaatttgttagtttgtggaaaagaagattaagcaattttattgatgagatttgtatatgcaatttttaagagatatttgttgttgaaaagagattagatcatatatctaatctctttggtggtggggtccacccaccaactatcttcgtagccataaaacataaaataataatttttttagcttttggcgtacagggtaatattatttcaaaagtatgtagtgtgtgttagttcattatataaatattattatgataatacaataaaagttgatgcagccatccactcaagacacctgagcgttggagcaaagaagttcattggatcgttagggtatgttcgtagctcacattccgcgaccaaatgaccgattggattggctagaagcttcaaagtcatagtctgatgatggaagtttccctgacttgtatatactttctgcacctacactgtattcatatatcaaaattgtcatttttgttggatgtcacgtaggtagccaagagagttctcattccataatcccaaccatctaccatcgaggtcgaagtccatcatcctgaaattcgaaactgagatatctgaactactttagctgtatattgtttttgtgatgtaaatcatacaaaacagtggaaggtcgatatttcgtaaaaatcctaaaataaaaataataataattaatatatatataaataataaaaacgtggtattataaaaagttatttttttataaaagcgtacctaattatttttatgataaattttcctggtattttttcattctatgtcccggttttgggccagctgacatatattttgttaataagctttggaacaactgtctatatataaaaaaacagctatgccaaaatgctccggtcaaatttgacgctacctcccggac

SEQ ID NO: 3568 - DNA, 3256 bp, Diabrotica virgifera
  SmartBlast Evalue=4E-51; Info="Prostatic acid phosphatase, putative n=1 Tax=Pediculus humanus corporis RepID=E0W1G0_PEDHC"
gtgtcatcatgtttcttcaaatccaattcctggtccttttgttttgggcagcaattgctgcatcagaccaaactgtgttagaaggaagtgcatcaaatctaactgcatccaatcaattggtagctgtagtccagatatttagacatggacataggactcctacagtattctacaaaaacgataaatatgctgatttatcaaaatattggaacggccttaacttaggagacttaacaaatgaaggaaaaagacaacactatagactagcgatgtttacaaggatgaggtatggaaaatggctgccccaaaattataacaaaaacgatttttacgcccaaaccacagaatacgatcgaacacatatgtcaggacaagtaaacatttatggactgtatccttccaaattggatcaaagatggaggttgttgactgattggcaacctattccacttcatccaggtgatgctaatatttgggaatcaattcctaaatgtgcagcttatacgggagaatacgcaaaagttcttgcatctgatcggtatgccgctattaataaacagtacgcagatgtgtatgcctatttatcaaaatattcaggtaacaacgttaccaacgttgaacaggcatatccagtatttgatagttttaaaagtgaatctactgttggtcttcgtctcccagtgtgggcatcaaaagtgtatccggaaccattaagagaactgattggacatatgttcaacgcttatgtttataccactaagcaacaacgactgtacgctggagctttgttagattccatccttaactactttgacaataaaataaacggttcagtatcccaaaaattcaaaatgtacagcggacatgacctcaacgttgccggtatattaagagtgtttggtgcatttaatccaccctatcctccagattttgcgagcagtttatatttagaactaagaaataattcaggaagttattttgtaaacgcgtggagcaaagatggatccaacttcaaccaggtttctataaagggatgtgctttggattgtcctttagatgaagttagacaaagattggatgggatattacttgacgttgataccaaagtcaaagagtgcaatgctaaattggaattcgaaaatgttgatgtagaaaatatgtacaaaaagcttaccgaaactggtgaaatggaacgacttaaagatttattttaaaataaattatagatagtacacaaactgtgtttacatttcagtcccaaaaaatcatcttttttcaagtagtttatatccaaataaacttgaaaataagcaaaaagtaatagtatatagtgcagttaccttacggaataaaccagtgagtttttattatttatttattcaaaacattacaaagcataccgtttgtaaggttaagtgacggccgaaaggccagttctcggaactagttctggttctgaaactggttcataattactaatgagtataccaaatgataccagatccgacctaactaatttgtcaacaatcatgactgaagatcatcaacaacctcaaaacaaaacctcatattcaactgtgcttaacaatgcttcttcaattcaatttccttcaaagctgcaagcaattttatttaattcgctacctgatactaaaatagaagagtacttaatagcacttggtgaagttgttcatccacggaatattttattttcatcaaggctatcaaataacagaatatgtatttatctctccagcgaatccctggtggaaaaatttatgtccggtccagcagaaataacaattaaaggcgaaaatctaaaagcacgaaaattgataactccaaacgaaagactgttactatcgggtgtttgcccttctattccacatattctaatagagaatgagttaaccaaatttggtcttaaattaatgtcacctttaaccttccttagaatcggtagtcaacttccagaatttcaacacgtcctcagttttagaagacaaacttatattcaaccacttgcagatatagaccttccctcttctttcttaatgacatatgatcaaacttcgtatcgcatatatttaagtttagataaaccttcatgttttatctgtaagaacacaggtcacattgcagcaaattgttcaaatcataatcaacaaaacgattcctctcatatccaacaccaaccgcaacaaccaatacaacaacaaccaatacaactacaaccaatgcaacaacaaccaatacaacaacaaccaatacaacaacaaccaatacaacaacaaccacaagaatcccccaagtctattccatcacccctagaaatggaaccaaatcatccagtcgtaattctaatgccgaaccttcacttaaccaacaaacagatactaatttaatgccccccgtattaattatggaaactaattgtatatctaaggatcagtcaacgaccaataagagaacaatttcggaaattaatactactccatctcccactgaagaattaaataaagaatttaaagtaccaacacaaaccaaaaagaaacaaaaaaagcaaactgaatctaccagatcaattcaggaaataatgatgccaacaaaaacagtatttcacgatacgtcaaataattttaacttaacatatgaacaaacacttgacttttttgaaaattatactagctcgactgatcccattagtttattacaaacatacacaacggatatacccaattttatttacatgttaacaacaattaagccatattttacagaaaaaagcatgaaaaccaaatgcactaaattaataaacaaaatcgaaaaaatgctagacgatcccgcttatcaagatagtgattgttcgacaaattcagctccagaaataaactaaaatcttcgaaccgatactacaaactcctccgccctggacctttcctcccgcaatatgtgatctaactctttctaaatacaataagcttgatacccccatgcaacaattaatcaatcttttctcaacatacttgcttctttcccagatcattgttatatttatacagattcatctaagactgctgatggtgtgggatcggcagttgtagattcaaacactatattacaatttaaattatcttccacttgcagtatttactctggagaactatattcaattctgcaagccctcattcacattcgtactcaaaaaattccaaaatctgtcataattaccgactctctcagtgcattacatacg

SEQ ID NO: 3569 - DNA, 3252 bp, Diabrotica virgifera
  SmartBlast Evalue=5E-52; Info="Prostatic acid phosphatase, putative n=1 Tax=Pediculus humanus corporis RepID=E0W1G0_PEDHC"
catgtttcttcagatcaaattcctggtccttttgttttgggcagtaattgctgcatcagaccgaactgtgttagaaggaagtgcatcagatttaactgaatccaatcaattgatagctgtagtccagatcattagacatggacatagacttcctacagtattttacaaaaacgataaatattctgatttatcaaaatattggaacggccttgacttgggagacctaacaaatgaaggaaaacgacaacactatagactatcgatgtttacaaggaacaggtatggaaaatggctgcctaaaaattataacaaaaacgatttctacgcccaaaccacagaatacgatcgaacacatatgtcaggacaagtaaacatttatggcctgtatccttccaaattggatcaaagatggaggttgttgactgattggcaacctattccacttcatccaggtgatgctaatatttgggaatcaatacctaaaaactgtgcagcttatacaggagaatacgcaaaagttcttgcatctgatcggtatgccgctattaataaacagtacgcagatgtgtatgcctatttatcaaaatattcaggtaacaacgttaccaacgttgaacaggcctttccagtgtttgatagttttaaaagtgaatctactgttggtcttcgtctcccagtgtgggcatcaaaagtgtatcccaaaccattaacagaactgattggacatatgtacaacgcttgggtttataccactaagcaacaacgactgtacgctggagctttgttagattctatccttaactactttgacaataaaataaacggttcagtatcccaaaaattcaaaatgtacagcggacatgacctcaacattgcctctatattaagcgcgtttggtgcatttaatccaccctatcctccagactttgcgagcagtatatatttggaattaagaaataattcagggagttattttgtaaacgcgtggagcaaagatggatccaacttcaaccaggtttctataaagggatgtgctttggattgtcctttagatgaagttagacaaagattggatgggatattacttgacgttgataccaaagtcaaagagtgcaatgctaaattggaattcgaaaatgttgatgtagaaaatatgtacaaaaagcttaccgaaactggtgaaatggaacgacttaaagatttattttaaaataaattatagatagtacacaaactgtgtttacatttcagtcccaaaaaatcatcttttttcaagtagtttatatccaaataaacttgaaaataagcaaaaagtaatagtatatagtgcagttaccttacggaataaaccagtgagtttttattatttatttattcaaaacattacaaagcataccgtttgtaaggttaagtgacggccgaaaggccagttctcggaactagttctggttctgaaactggttcataattactaatgagtataccaaatgataccagatccgacctaactaatttgtcaacaatcatgactgaagatcatcaacaacctcaaaacaaaacctcatattcaactgtgcttaacaatgcttcttcaattcaatttccttcaaagctgcaagcaattttatttaattcgctacctgatactaaaatagaagagtacttaatagcacttggtgaagttgttcatccacggaatattttattttcatcaaggctatcaaataacagaatatgtatttatctctccagcgaatccctggtggaaaaatttatgtccggtccagcagaaataacaattaaaggcgaaaatctaaaagcacgaaaattgataactccaaacgaaagactgttactatcgggtgtttgcccttctattccacatattctaatagagaatgagttaaccaaatttggtcttaaattaatgtcacctttaaccttccttagaatcggtagtcaacttccagaatttcaacacgtcctcagttttagaagacaaacttatattcaaccacttgcagatatagaccttccctcttctttcttaatgacatatgatcaaacttcgtatcgcatatatttaagtttagataaaccttcatgttttatctgtaagaacacaggtcacattgcagcaaattgttcaaatcataatcaacaaaacgattcctctcatatccaacaccaaccgcaacaaccaatacaacaacaaccaatacaactacaaccaatgcaacaacaaccaatacaacaacaaccaatacaacaacaaccaatacaacaacaaccacaagaatcccccaagtctattccatcacccctagaaatggaaccaaatcatccagtcgtaattctaatgccgaaccttcacttaaccaacaaacagatactaatttaatgccccccgtattaattatggaaactaattgtatatctaaggatcagtcaacgaccaataagagaacaatttcggaaattaatactactccatctcccactgaagaattaaataaagaatttaaagtaccaacacaaaccaaaaagaaacaaaaaaagcaaactgaatctaccagatcaattcaggaaataatgatgccaacaaaaacagtatttcacgatacgtcaaataattttaacttaacatatgaacaaacacttgacttttttgaaaattatactagctcgactgatcccattagtttattacaaacatacacaacggatatacccaattttatttacatgttaacaacaattaagccatattttacagaaaaaagcatgaaaaccaaatgcactaaattaataaacaaaatcgaaaaaatgctagacgatcccgcttatcaagatagtgattgttcgacaaattcagctccagaaataaactaaaatcttcgaaccgatactacaaactcctccgccctggacctttcctcccgcaatatgtgatctaactctttctaaatacaataagcttgatacccccatgcaacaattaatcaatcttttctcaacatacttgcttctttcccagatcattgttatatttatacagattcatctaagactgctgatggtgtgggatcggcagttgtagattcaaacactatattacaatttaaattatcttccacttgcagtatttactctggagaactatattcaattctgcaagccctcattcacattcgtactcaaaaaattccaaaatctgtcataattaccgactctctcagtgcattacatacg

SEQ ID NO: 3570 - DNA, 837 bp, Diabrotica virgifera
  SmartBlast Evalue=1E-23; Info=Pol-like protein n=1 Tax= Biomphalaria glabrata RepID=A3FMR3_BIOGL
cactgaactaagtgataaacataaatacagttgttccaatggatctttgaacaaatgtaatgaatgatttgcaaacaagtttaatcagaaaaatgaagtttgattcttatttacaaatctctagtacgatccaaactcgattatggatcaattgtatactcatctgcaaagaagacacttcttgctcaactagaagtcatacaaaatacagcattaagaatagccacaggagcattctgtactagccccattaatagtttacaatgtttaaccggagaaccacctttaaatttccgaagaatgtacttgtcattagtctacgcatcatccatatatgcaatagaatcgcatcccactttccaccacactattgcagaacgtttcaaagaaacttatgtaaataaaaaaagaactaaccccccttttacgagagaatcagaaaatatctctctctcaataatattcaattcccaaaatttttaatcagacaaatacagttactcctccgccctggacctttcctcctgcaatatgtgatctaactctttctaaatacaataagcttgatacccccatgcaacaattaatcaatcttttctcaacatacttgcttctttcccagatcattgttatatttatacagattcatctaagactgctgatggtgtgggatcggcagttgtagattcaaacactatattacaatttaaattatcttccacttgcagtatttactctggagaactatattcaattctgcaagccctcattcacattcgtactcaaaaaattccaaaatctgtcataattaccgactctctcagtgcattacatacg

SEQ ID NO: 3571 - DNA, 3077 bp, Diabrotica virgifera
  SmartBlast Evalue=7E-47; Info=Endonuclease-reverse transcriptase n=1 Tax=Bombyx mori RepID=D7F173_BOMMO
atcactagtttggctaaagaactgaatttgaaaaaggtcgactcactgcaacagacattctattgccatctgttaggttttctcaattcagtgaaaaaatttcactattttagcttaattatgtagcatgattattaagtggtcgttatttaacccatttaacagttctgtatgattttgaagatactttacaggtgcttgaaattaaaaaactgatatttctcgggtgtctaataaattgaatagggtctttagagtttccgtcgagtaatttacggtgacgctatttcgataaaacctcaaaaatgcaatttcagtaacggaaaatcatagaacggataatccgcgcacggataatcggggtcctactgtattattcattgttaatgaaaacgggatggttcccgggagttcgctgtatacattatagttaagtaacatcgaagtaaaaactcctgttgtatttggtttaattttaatcaggaattaaaattgaaaaatccaaaggggttacataagtttcagaacgaacattttcagacttataagtccatcttcaattaactttgtacttgctaaatatcctcaaaaccaaacaggctgtggttgaatttagttgaattgaaaagttacattataaaattgtaaaaataaaacgacttatagctgataaaagtttataactttccgggaacataatagtccctactcgaaaaggaggtcacatatacgagtatgtattggtctgtgttcgccaattagttgggaactggggaaaaaaggagtttttactttgatgttaaaaagttatatgcattgtacaatttacaataaacaaattaaactgccattgcatatgtgcttgcaactgtttctgttaatttatttgttatacattattgaaatcaactatcacactgattcaaaaattactttggtgaggaaaggaagtttaaaaaaaaagagttatttatgaagtaaattcgtgacatgcttccacgtgaaaacaaactttttgaatcattcaaataaaagtaccacttgttataatctgtatattaaatcagatttgattggtatacttacttacttattcctcttcactccatgcggagcatagggcgtcaactgtctgcctccattctgtcctatcctttccactaatctttatttctgcccaagttttcccaatagcattaatttctttctccatacttcttttccacgggtctacctggtcttcccttgccatgtggtgtgtattctagggtttgtctcgctatgtctgtgtcaggtctccttagtgtgtgccccatccaactcgatttccttttgcatattgtcttggatataggttcctggttagttcttgtccataactcttggtttgatatgcggtttggccagtaaatgttaagaatcttccttaggcatttatttatgaacacttgcatctgtctgatacattttcttggcactttccatgtttctgttccgtatagtaacacagtcttcacgttgctgttgaaaattcttatcttggttttacttgtcatctgacgtgatgaccacattttccttagcatattgaatgcgttttgagctattcctattctccgttttacatcctcctttgtccctcctttgttgttcaaaatactgcccaaatagttaaatttctctaccgtttctaattccgtgcctcccagtgatattcccatttctcttggtgtatttattttcattatcataatgaaaatgaaaaaataatgaaaatttgattggtatagtagactccaaattcagctaggtcaggaatggcgaaccttttttatgtgagtacgataaagccatagaaattcctctttaaatagataacgtagtcgagaagtccatagaaaacctcttttcctatactttgtggatctctcaaaagcgtttgaaagagtccaactgaaagacatgaagcagaaaaacgtcaataaaaacacagcaagaatcagggagcttaacagttgccataaaacaagaatataatcaacatggactgacagaagaaatagaacgtgtgggcaggaatcaaacagggagatcacctcagtacgactctctttaacaggatcacggacaagataatagaaagcgcaaatgaaaccaacatcgactacaaaatggccaatgacctccaacgcctattttacagattcaatataacaacacataagttagacatgttaatatctcacgaaaaatatgacggaatgcattaactaagtctactaaaacttctaaagaataattgaaagtaaatgactgaaacttcatattatcatttttgtagagtagtaatatcactaattttgatttgactagcacttttcgttcattatctctcagtgtttcatcgaatatatcgcagtgatcaagtattcttattaaaagaaacatcttaacatcagtggcgtgctggccatataaatgaaacggtgcaatcaccgagaggctgcggcctcttgaggccggccaaataaatttttgtttcataaaaatttctagatctgatgtaacaacaattttttttaatttcgaatcgactgatgttaacaaaacatttcacaaaaatttaaatcttttttgattgtaaaatacagtttaagtaaattaataagactctatgtacataaatgattgctacagataaataagcatttattaactctctcagtgacacgagtatcttgtgaaagaagcttttcaacgttgaaatacataaaaaataggataagaattactttaacacaagatcacttagaaacatttgtgctaatggctagagaaaaagactgagctgtatgagcttaaaaataatgaaataatcgacgaatttgctcaaaaatcttctttaagggcgtaggcgcaaaattttgcgcaatgtgttttgaaaacatttatttttttcgaatcctgagaaaactaataagtatttttgaaaaattagacgcagattgaaatattgcattattaccgagggccgaaagtccctgcaaacttctataatgtttattttaataagttac

SEQ ID NO: 3572 - DNA, 3009 bp, Diabrotica virgifera
  SmartBlast Evalue=7E-47; Info=Endonuclease-reverse transcriptase n=1 Tax=Bombyx mori RepID=D7F173_BOMMO
atcactagtttggctaaagaactgaatttgaaaaaggtcgactcactgcaacagacattctattgccatctgttaggttttctcaattcagtgaaaaaatttcactattttagcttaattatgtagcatgattattaagtggtcgttatttaacccatttaacagttctgtatgattttgaagatactttacaggtgcttgaaattaaaaaactgatatttctcgggtgtctaataaattgaatagggtctttagagtttccgtcgagtaatttacggtgacgctatttcgataaaacctcaaaaatgcaatttcagtaacggaaaatcatagaacggataatccgcgcacggataatcggggtcctactgtattattcattgttaatgaaaacgggatggttcccgggagttcgctgtatacattatagttaagtaacatcgaagtaaaaactcctgttgtatttggtttaattttaatcaggaattaaaattgaaaaatccaaaggggttacataagtttcagaacgaacattttcagacttataagtccatcttcaattaactttgtacttgctaaatatcctcaaaaccaaacaggctgtggttgaatttagttgaattgaaaagttacattataaaattgtaaaaataaaacgacttatagctgataaaagtttataactttccgggaacataatagtccctactcgaaaaggaggtcacatatacgagtatgtattggtctgtgttcgccaattagttgggaactggggaaaaaaggagtttttactttgatgttaaaaagttatatgcattgtacaatttacaataaacaaattaaactgccattgcatatgtgcttgcaactgtttctgttaatttatttgttatacattattgaaatcaactatcacactgattcaaaaattactttggtgaggaaaggaagtttaaaaaaaaagagttatttatgaagtaaattcgtgacatgcttccacgtgaaaacaaactttttgaatcattcaaataaaagtaccacttgttataatctgtatattaaatcagatttgattggtatacttacttacttattcctcttcactccatgcggagcatagggcgtcaactgtctgcctccattctgtcctatcctttccactaatctttatttctgcccaagttttcccaatagcattaatttctttctccatacttcttttccacgggtctacctggtcttcccttgccatgtggtgtgtattctagggtttgtctcgctatgtctgtgtcaggtctccttagtgtgtgccccatccaactcgatttccttttgcatattgtcttggatataggttcctggttagttcttgtccataactcttggtttgatatgcggtttggccagtaaatgttaagaatcttccttaggcatttatttatgaacacttgcatctgtctgatacattttcttggcactttccatgtttctgttccgtatagtaacacagtcttcacgttgctgttgaaaattcttatcttggttttacttgtcatctgacgtgatgaccacattttccttagcatattgaatgcgttttgagctattcctattctccgttttacatcctcctttgtccctcctttgttgttcaaaatactgcccaaatagttaaatttctctaccgtttctaattccgtgcctcccagtgatattcccatttctcttggtgtatttattttcattatcataatgaaaatgaaaaaataatgaaaatttgattggtatagtagactccaaattcagctaggtcaggaatggcgaaccttttttatgtgagtacgataaagccatagaaattcctctttaaatagataacgtagtcgagaagtccatagaaaacctcttttcctatactttgtggatctctcaaaagcgtttgaaagagtccaactgaaagacatgaagcagaaaaacgtcaataaaaacacagcaagaatcagggagcttaacagttgccataaaacaagaatataatcaacatggactgacagaagaaatagaacgtgtgggcaggaatcaaacagggagatcacctcagtacgactctctttaacaggatcacggacaagataatagaaagcgcaaatgaaaccaacatcgactacaaaatggccaatgacctccaacgcctattttacagattcaatataacaacacataagttagacatgttaatatctcacgaaaaatatgacggaatgcattaactaagtctactaaaacttctaaagaataattgaaagtaaatgactgaaacttcatattatcatttttgtagagtagtaatatcactaattttgatttgactagcacttttcgttcattatctctcagtgtttcatcgaatatatcgcagtgatcaagtattcttattaaaagaaacatcttaacattaaggagaaacagcaaaattgtaatctaaaattattcaaaatgtcaagataactgttagcactgtaagtcgagaatggcactgtgtgattggcatctaaagaagttattattgaaggtatgtttaaaccttaaacggaataagcaggtttttcagaattaagcgttaagaccttaagcgtcattaggttttatatcatacattctatcaccacctaataacagcaataacatctaaatttaagccatatatattttattattaatattaaatcaccttagtttaattttgtcaatttcaaaaacaatataaagttgcaataatatgaatctattatattttttattcttaagacctattgctcagattttgtacagaaaaatatctgatcctttgtatattaataataagtaggcggacttttgtataaaattcaaaaaattgtaaaattttctaatgaaattggtagagtaaaatataaatacgtactatatttctctactgtttaatctaatcgtattttatacagaattctgttaataaatgttcataac

SEQ ID NO: 3573 - DNA, 1205 bp, Diabrotica virgifera
ggtaataatgtaatctttcattgttcgtttgggtttttcaaaaatacttattagtttcctcaggatttgaaaaaaaagtgaatgattttaaaacacattggcgcgaaattttgcggctacgaccttaatgcggaaattattgaatgagagttaattattgtataaaataattgcaaagtaatgtttagaataatgcgttgtattaacatttaaatattgttaaattaaagtatttgtactgtacttgtatttgtaccctcttgtataattattattgatttactaaaattcaacttgatacataattgaaaaattctcaaaatttaattttattttcatcttttaatcacattaaatttatatatatttattcaggaaattatggtttctgccttactgcaaacaacgttgtcatacatgtgataatatttattatttgtaagattgcttattcttaaataataaaacagcaaatttgaaacaatttcattgaatttaaagtttaatgtttgatttaaaaataatttatatttttgttttataataacgattaaaaaatcctgaaaatagaaggtaaaatgaggatggaaagccgcttttctataaaatcaccgggccgcttgaaaagttccagcacgccactgcttaacattaaggagaaacagcaaaattgtaatctaaaattattcaaaatgtcaagataactgttagcactgtaagtcgagaatggcactgtgtgattggcatctaaagaagttattattgaaggtatgtttaaaccttaaacggaataagcaggtttttcagaattaagcgttaagaccttaagcgtcattaggttttatatcatacattctatcaccacctaataacagcaataacatctaaatttaagccatatatattttattattaatattaaatcaccttagtttaattttgtcaatttcaaaaacaatataaagttgcaataatatgaatctattatattttttattcttaagacctattgctcagattttgtacagaaaaatatctgatcctttgtatattaataataagtaggcggacttttgtataaaattcaaaaaattgtaaaattttctaatgaaattggtagagtaaaatataaatacgtactatatttctctactgtttaatctaatcgtattttatacagaattctgttaataaatgttcataac

SEQ ID NO: 3574 - DNA, 3450 bp, Diabrotica virgifera
ttcaaaataaactttttatttattctaagggactttcggccctcggtaataatttagtctttcattctgcgtttaaatttttcaaaaatatttattggttttttcaggattcgaaaaaaatgaacacaatgtccgtggtaatattttccaaatctatctttgtcatacaacgcactcagtcgaatagaatattgtcagcatattgtcagtcagacagtgacaatcagtgacaattttaaatatttgacatggcatcgggaatattttgagttgttgattaaataatattgatagtgtatttgataaataattgatttaagacgtgaacttaataaaacgttatttattgtgtattatttatggaagatccaagcagagaatacatcaagatattaagcgttccatagtaacaatatattattaagaggaaacagtagcgatcagcaggtggcaaagacgcgtttcaggattgcggctgtaattttgaatattttgtcgagatatttggcacacatattcgtaatataataaagaatggcggtacagagcccaatttagaaatatgttagtacgtggaaattactctataactaaataaaatattgaaaaaaggagcctgtaccgccattaagaagaaaaaaaaactttcttcaaataaactttttatcccatgcctagattttgtgtaatcttggaactactaaaatgttttatttctaacaagaaatcgaacatataataactaaataactaattaggcagcatagagaaattatcactgtcattttgacaaacctgcgtcagattttctctaatctgttctgtcatctttatcgatatctgttcagtgcagtagtgtgttaatttaagaattagtttttgttgtttcataggaaagtagtgtttattgatagttaacttattatatatttgttgttgttgtataagttgttggcctctttgaaagaatagattgtttttaattgggagttttagttatatgtaggtaggtaagtatattttacgtaaaaatatttcgaattctaatgcgagtatataaagttttaggagaattttttaatctaaaaatattatcaatagtttaacaaaatggaaaaagtaattcaaacgaaaaataaagtgaaaccttccaagaaaaagtccattaaaaaccgtaccaaaattatgcgaaaatcgaaatttgtttcgcttcacaacaaaaaatgattatttattattgttttattattagatatttcatgcaaatacttttctaaatacctatcttaacataaaattttcacccagtttggtttatttttataaatatctatttattaataataaaatcgttttctatcacttccatttaacgcgactatgatattgtcaaaatattaatcttagataatgtcaaagattaccactgttgccaaagtttatgataccatgatactatctcccgaatttatattttgttgctacgtgttgatcgctactgtttactcttaaaaaataacggttagcgatagaaaagtgaaaaattagagttgtattaatctttgtgttctacatcatataaaattaagaaaaaaaatttgcccaaaaaaataaaaaaatatcaggggggtaccttgtgacgtacgggtatcaaaaatagataacaacctattctcagtcctgccgaatataggggtaaaattttataaaaatcggtcaaaccgtttcggagaagtatggcaaaaaacattgtgaaatgagcattttatacatatagttgtaaaaattttggtggctactaaaatgactatataaaaccgtataagccttccctgaacttctacaaataattcaacatcaaaattagcaaaatcggtccaggcattatcgagttctagcgagacacacgaacagcaattgatttttataaataagataaaaccaaataaacttgattgataaataaataaaattttattgataaataaacaataaatgcaaataaataataaagctgtcactgttattgaaaattattataaacgtcaaaattcataagctatcaaacactgtgatttctatggaaaagcggcttaattttgcgatactagtttctgttagttaaaaagagacctagtataacagtagttcgtgaataatttcgtgcaagggaaaagttagaataatatctgcccgggtcgaaattttatttttatttataaaagagtcatttttaattattgattaattatagttggaacaaaattagatcgagtaggaaattagttactcctagtcgaggaaatgaagcattttggctcgcaattttttcgtccagcatggatttaattgaaattttcacagaaggtagggaatagtccaaggatcattttctatatcatgccgctgtacgctaaaaccttgggggtggttgccaccccatctcgggggcggaattttttattacattttaaccatgtaaatcgatgtaaaaagtaattctaagaaaaaaatgtttttacattttcttcgtaaaactaatatttttcgagttattcgcgcttgaaagtaacagtttttcgatgaaaaaatcgacttttttagagggttttttgagaatacctcgaaaaatatgcatttaatcaaaaaaactgtagatatcaaaattgtatcttttagtaacacaaaccaaattatttttctgtaatatctttaagaccaatacaaaccgagatacggcatgttaaaagttagcttttttcgtcaaatgcataatttgaaatattcaaaagccaaataacggaaaaactttgcatttttcgagaaaaacttaaataatcttttttcaagtatacagttagactttcaaaaaataataataaaagtttctagctgaaataagcgacttatgatcaaaaaaggtcggtacctgcttttctctatgaaaaaatcagtgaaaacaaccccctaactaccctcctaattaaaaattggtcttcacctttctgtaattccttttatatttgtattatcaatacacccaagaagtttgacctatttaaaaggcctaattttagaaaaattggagtttaaagaaaaattaattttttggaatttcccatttttcaccttttacttcaaaatatctccgaaaatactggagatacgaaaaaaatgataatactaaattgtagctttctttaataactaaaattcccttgtgcatagattttcattacagtgaacagttagcgagatatagctgtttaaaacctctatttacgagcaaacacccccttattcgagccctttaaacccaccctaattaaaaactaagggatcttacggaatttagtttacacagtcttataactcttcaaaaatcctacaaagtcatttttgaataaactcttttcatcgccaaaaatgaaggagctatctttataaaac

SEQ ID NO: 3575 - DNA, 3009 bp, Diabrotica virgifera
ttcaaaataaactttttatttattctaagggactttcggccctcggtaataatttagtctttcattctgcgtttaaatttttcaaaaatatttattggttttttcaggattcgaaaaaaatgaacacaatgtccgtggtaatattttccaaatctatctttgtcatacaacgcactcagtcgaatagaatattgtcagcatattgtcagtcagacagtgacaatcagtgacaattttaaatatttgacatggcatcgggaatattttgagttgttgattaaataatattgatagtgtatttgataaataattgatttaagacgtgaacttaataaaacgttatttattgtgtattatttatggaagatccaagcagagaatacatcaagatattaagcgttccatagtaacaatatattattaagaggaaacagtagcgatcagcaggtggcaaagacgcgtttcaggattgcggctgtaattttgaatattttgtcgagatatttggcacacatattcgtaatataataaagaatggcggtacagagcccaatttagaaatatgttagtacgtggaaattactctataactaaataaaatattgaaaaaaggagcctgtaccgccattaagaagaaaaaaaaactttcttcaaataaactttttatcccatgcctagattttgtgtaatcttggaactactaaaatgttttatttctaacaagaaatcgaacatataataactaaataactaattaggcagcatagagaaattatcactgtcattttgacaaacctgcgtcagattttctctaatctgttctgtcatctttatcgatatctgttcagtgcagtagtgtgttaatttaagaattagtttttgttgtttcataggaaagtagtgtttattgatagttaacttattatatatttgttgttgttgtataagttgttggcctctttgaaagaatagattgtttttaattgggagttttagttatatgtaggtaggtaagtatattttacgtaaaaatatttcgaattctaatgcgagtatataaagttttaggagaattttttaatctaaaaatattatcaatagtttaacaaaatggaaaaagtaattcaaacgaaaaataaagtgaaaccttccaagaaaaagtccattaaaaaccgtaccaaaattatgcgaaaatcgaaatttgtttcgcttcacaacaaaaaatgattatttattattgttttattattagatatttcatgcaaatacttttctaaatacctatcttaacataaaattttcacccagtttggtttatttttataaatatctatttattaataataaaatcgttttctatcacttccatttaacgcgactatgatattgtcaaaatattaatcttagataatgtcaaagattaccactgttgccaaagtttatgataccatgatactatctcccgaatttatattttgttgctacgtgttgatcgctactgtttactcttaaaaaataacggttagcgatagaaaagtgaaaaattagagttgtattaatctttgtgttctacatcatataaaattaagaaaaaaaatttgcccaaaaaaataaaaaaatatcaggggggtaccttgtgacgtacgggtatcaaaaatagataacaacctattctcagtcctgccgaatataggggtaaaattttataaaaatcggtcaaaccgtttcggagaagtatggcaaaaaacattgtgaaatgagcattttatacatatagttgtaaaaattttggtggctactaaaatgactatataaaaccgtataagccttccctgaacttctacaaataattcaacatcaaaattagcaaaatcggtccaggcattatcgagttctagcgagacacacgaacagcaattgatttttataaataagataaaaccaaataaacttgattgataaataaataaaattttattgataaataaacaataaatgcaaataaataataaagctgtcactgttattgaaaattattataaacgtcaaaattcataagctatcaaacactgtgatttctatggaaaagcggcttaattttgcgatactagtttctgttagttaaaaagagacctagtataacagtagttcgtgaataatttcgtgcaagggaaaagttagaataatatctgcccgggtcgaaattttatttttatttataaaagagtcatttttaattattgattaattatagttggaacaaaattagatcgagtaggaaattagttactcctagtcgaggaaatgaagcattttggctcgcaattttttcgtccagcatggatttaattgaaattttcacagaaggtagggaatagtccaaggatcattttctatatcatgccgctgtacgctaaaaccttgggggtggttgccaccccatctcgggggcggaattttttattacattttaaccatgtaaatcgatgtaaaaagtaattctaagaaaaaaatgtttttacattttcttcgtaaaactaatatttttcgagttattcgcgcttgaaagtaacagtttttcgatgaaaaaatcgacttttttagagggttttttgagaatacctcgaaaaatatgcatttaatcaaaaaaactgtagatatcaaaattgtatcttttagtaactcaaactaaattctttttctataatatctttaacaaaccgagatacggcatgttaaaggttagcttttctcgtcaaatgcaaaatttgaaatatccaaagccaaataacgggaaaactttgcatttttcgaggaaaacttaaattatctttttttaagtatacaattaaacttttcaaataataataataaaaaatgtctaacataaaaatggagcgacttatgatcaaaaaaaaatgtcggtacctgcttttctctacgaaaaaatcagtgaaaataacccgctaactaccctcgtaattaaaaattgatcttcactttcctgta

SEQ ID NO: 3576 - DNA, 741 bp, Diabrotica virgifera
tttaagaccaatataaaccgagatacggtacgttaaaggttagctttttttcgtcaaatgcataatttgaaatattcaaagccaaataatgaaaaatttgcatttttcgaggaaaacttaaataatcttttttcaagtatacaattagacctttcaaagaataataataaaaagtttctagcatgaaaattaagcgacttgatcaaaaaaatgtcggtacctgcttttctctacgaaaaaatcagtgaaaacaaccccctaactaccctcctaattaaaaattggtcttcacctttctgtaattccttttatatttgtattatcaatacacccaagaagtttgacctatttaaaaggcctaattttagaaaaattggagtttaaagaaaaattaattttttggaatttcccatttttcaccttttacttcaaaatatctccgaaaatactggagatacgaaaaaaatgataatactaaattgtagctttctttaataactaaaattcccttgtgcatagattttcattacagtgaacagttagcgagatatagctgtttaaaacctctatttacgagcaaacacccccttattcgagccctttaaacccaccctaattaaaaactaagggatcttacggaatttagtttacacagtcttataactcttcaaaaatcctacaaagtcatttttgaataaactcttttcatcgccaaaaatgaaggagctatctttataaaac

SEQ ID NO: 3577 - DNA, 2947 bp, Diabrotica virgifera
  SmartBlast Evalue=0; Info=Dynamin n=4 Tax=Apocrita RepID=E2AA61_ 9HYME
tccgaggtggtgaatagaatttgttgatttttcactagtttatgtaaaattccggcctaaaaatggcagggaatttgggaatggagcagcttattcccatagtgaataagttgcaagatgccttcacacagctgggcgttcatatgactcttgatctgcctcaaatcgctgtggtgggcggacaatccgcagggaaaagttcagttttggagaatttcgtcggaaaagacttccttcctagaggctccggaatcgtcacaagaagaccgctcatattgcaactcatcaatgccatatctgaacatgcggagtttttgcattgtaaaggaaagaaatttgttgatttcaatgaagtccgtttggagattgaagcagaaactgacagagtcaccggaagcaataagggaatatcaaatatacccattaacctaagggtatattctccaaatgtactaaatctaactcttatcgatttacctggcttaacaaaggttccgattggagaccaaccgatcgacatcgaacagcaaatcagaggtatgatcatgcaattcataaagagggaatcatgcctcatcttagccgttacacctgccaatacagatttggcaaactcagatgctctgaaactggccaaagaggtagatccccaaggtataagaactattggtgtcatcaccaagctggatctcatggacgaaggtactgatgctcgtgatatattagagaataaactgttacctttaagacgagggtatatcggtgttgttaatcgatctcagaaagatatagacggccggaaagacataaacgctgctttgaatgccgagaagaagtttttctttagccatccatcgtatcgtcacatagcagaacgcctaggtactccctacctacaacgagttctcaaccaacaactcaccaaccacatcagagacaccctgcccagtttgagagataaactacaaaagcaactgttacaattggagaaagatgtggaccagttcaaacacttccgacctgacgatccctctatcaagactaaggcgatgttacagatgatccagcaattgcaagtggacttcgacagaactattgaaggttccggctcggcacaaatcaacacgaacgaactgtcaggcggtgctaaaatcaacaggctattccacgaaaggttccccttcgaaattgtcaagatggaattcgatgagaaggagctccgcagggagatcgccttcgctattagaaacattcatggtattagggttggtttgtttactccagatatggcttttgaggctatagtaaaaaagcaaatatctcggctgaaggaaccttctttgaagtgcgtcgatttggtcgtgcaggagctgtcaaacgttgttaggatgtgcagtgacaggatggcccgctatcctcgattacgagaagaagtagaacgaatcgttactacgcatattaggagcagagagcaaaactgcaaagagcagttgtgcctacttatcgactgtgaattagcatacatgaatactaaccacgaagacttcattggatttgcaaatgcacaaagccagtccgagagcgcgacagccaaaggcaccagaggcactctcggcaaccaagtgatccgaaagggctacatgtgtatccacaatttgggtataatgaaaggtggttcgcgagattactggttcgtactcacgtcggagagcatctcctggtacaaggacgaagaggagagggagaagaagtacatgttgcctttggacggtctgaaactgagggatatcgaacagagttttatgtcgagaaggcatatgttcgccattttcaatccggacggaagaaatgtatataaggactacaaacaacttgaattgagctgtgaaacattggacgaggtcgattcgtggaaagcgtcgttccttcgggccggcgtctatcccgaaaagcagacggaaacattgaacggcgaagattcttccggcgaaagcgtaaccagctctatggatcctcaactggaacgacaagtggaaaccatcaggaacttggtcgacagctacatgcgcatcgtcacgaaaaccaccagagacttggtgcccaaaaccatcatgtacatgatcatcaaccataccaaagacttcatcaacggagaactgttggcccatatctacgccagcggggatcagtcacaaatgatggaagaggctcccgaagaggctcagaaacgtgaagagatgttacggatgtaccacgcctgcaaagaggcgttgaatatcatcggcgatgtttcgatggctaccgtttctacaccggttcctccacctgtcaaaaatgactggctggccagtgggctggagaatcccagactgtccccacctagtcccggaggacctcggaagaccacaccgcagatgagtgcagtaggatccagcggttcgttgggttctcgagctcctcctccgccaccaagcagcggcagacccgcaccggcgattcccaatagacctggaggtggagcccctccgatgcctccgggtagaccacaaggacaggctcttcccgcacctctcattccgactcgagtcggaggccagcagggtcaggggggtattcaagtgccccagcaagtgcagatggccgtaggaagagcagtcaccaatgccgctatcaacgaactatccaacgccttcaaattccataagtaaatctttatttatttattttttgtttgagtttatacattctctttcgttcttcttagcgcgtctagtagaaaaccaggttttatataatataatatttaaagctggtaaatgagatattttgtagtttagactgaatatgggctttctattggacctaaggagatcttactaacactaacctttcaatgccagtatactaactgttctttttgttgttaagattgttattattactatta

SEQ ID NO: 3578 - DNA, 2739 bp, Diabrotica virgifera
  SmartBlast Evalue=0; Info=Dynamin n=4 Tax=Apocrita RepID=E2AA61_ 9HYME
tccgaggtggtgaatagaatttgttgatttttcactagtttatgtaaaattccggcctaaaaatggcagggaatttgggaatggagcagcttattcccatagtgaataagttgcaagatgccttcacacagctgggcgttcatatgactcttgatctgcctcaaatcgctgtggtgggcggacaatccgcagggaaaagttcagttttggagaatttcgtcggaaaagacttccttcctagaggctccggaatcgtcacaagaagaccgctcatattgcaactcatcaatgccatatctgaacatgcggagtttttgcattgtaaaggaaagaaatttgttgatttcaatgaagtccgtttggagattgaagcagaaactgacagagtcaccggaagcaataagggaatatcaaatatacccattaacctaagggtatattctccaaatgtactaaatctaactcttatcgatttacctggcttaacaaaggttccgattggagaccaaccgatcgacatcgaacagcaaatcagaggtatgatcatgcaattcataaagagggaatcatgcctcatcttagccgttacacctgccaatacagatttggcaaactcagatgctctgaaactggccaaagaggtagatccccaaggtataagaactattggtgtcatcaccaagctggatctcatggacgaaggtactgatgctcgtgatatattagagaataaactgttacctttaagacgagggtatatcggtgttgttaatcgatctcagaaagatatagacggccggaaagacataaacgctgctttgaatgccgagaagaagtttttctttagccatccatcgtatcgtcacatagcagaacgcctaggtactccctacctacaacgagttctcaaccaacaactcaccaaccacatcagagacaccctgcccagtttgagagataaactacaaaagcaactgttacaattggagaaagatgtggaccagttcaaacacttccgacctgacgatccctctatcaagactaaggcgatgttacagatgatccagcaattgcaagtggacttcgacagaactattgaaggttccggctcggcacaaatcaacacgaacgaactgtcaggcggtgctaaaatcaacaggctattccacgaaaggttccccttcgaaattgtcaagatggaattcgatgagaaggagctccgcagggagatcgccttcgctattagaaacattcatggtattagggttggtttgtttactccagatatggcttttgaggctatagtaaaaaagcaaatatctcggctgaaggaaccttctttgaagtgcgtcgatttggtcgtgcaggagctgtcaaacgttgttaggatgtgcagtgacaggatggcccgctatcctcgattacgagaagaagtagaacgaatcgttactacgcatattaggagcagagagcaaaactgcaaagagcagttgtgcctacttatcgactgtgaattagcatacatgaatactaaccacgaagacttcattggatttgcaaatgcacaaagccagtccgagagcgcgacagccaaaggcaccagaggcactctcggcaaccaagtgatccgaaagggctacatgtgtatccacaatttgggtataatgaaaggtggttcgcgagattactggttcgtactcacgtcggagagcatctcctggtacaaggacgaagaggagagggagaagaagtacatgttgcctttggacggtctgaaactgagggatatcgaacagagttttatgtcgagaaggcatatgttcgccattttcaatccggacggaagaaatgtatataaggactacaaacaacttgaattgagctgtgaaacattggacgaggtcgattcgtggaaagcgtcgttccttcgggccggcgtctatcccgaaaagcagacggaaacattgaacggcgaagattcttccggcgaaagcgtaaccagctctatggatcctcaactggaacgacaagtggaaaccatcaggaacttggtcgacagctacatgcgcatcgtcacgaaaaccaccagagacttggtgcccaaaaccatcatgtacatgatcatcaaccataccaaagacttcatcaacggagaactgttggcccatatctacgccagcggggatcagtcacaaatgatggaagaggctcccgaagaggctcagaaacgtgaagagatgttacggatgtaccacgcctgcaaagaggcgttgaatatcatcggcgatgtttcgatggctaccgtttctacaccggttcctccacctgtcaaaaatgactggctggccagtgggctggagaatcccagactgtccccacctagtcccggaggacctcggaagaccacaccgcagatgagtgcagtaggatccagcggttcgttgggttctcgagctcctcctccgccaccaagcagcggcagacccgcaccggcgattcccaatagacctggaggtggagcccctccgatgcctccgggtagaccacaaggacaggctcttcccgcacctctcattccgactcgaccagtacctaacgttccgcccagaattccggaccgacctcatcccgggagacccaattagttagaaaatggagctctagtcaataatccttaagccactcacgcacatacacaaaacataacaacactcgctagctaggggaccagaaacgagg

SEQ ID NO: 3579 - DNA, 1267 bp, Diabrotica virgifera
  SmartBlast Evalue=1E-175; Info="Dynamin, putative n=1 Tax= Pediculus humanus corporis RepID=E0VWF3_PEDHC"
tccgaggtggtgaatagaatttgttgatttttcactagtttatgtaaaattccggcctaaaaatggcagggaatttgggaatggagcagcttattcccatagtgaataagttgcaagatgccttcacacagctgggcgttcatatgactcttgatctgcctcaaatcgctgtggtgggcggacaatccgcagggaaaagttcagttttggagaatttcgtcggaaaagacttccttcctagaggctccggaatcgtcacaagaagaccgctcatattgcaactcatcaatgccatatctgaacatgcggagtttttgcattgtaaaggaaagaaatttgttgatttcaatgaagtccgtttggagattgaagcagaaactgacagagtcaccggaagcaataagggaatatcaaatatacccattaacctaagggtatattctccaaatgtactaaatctaactcttatcgatttacctggcttaacaaaggttccgattggagaccaaccgatcgacatcgaacagcaaatcagaggtatgatcatgcaattcataaagagggaatcatgcctcatcttagccgttacacctgccaatacagatttggcaaactcagatgctctgaaactggccaaagaggtagatccccaaggtataagaactattggtgtcatcaccaagctggatctcatggacgaaggtactgatgctcgtgatatattagagaataaactgttacctttaagacgagggtatatcggtgttgttaatcgatctcagaaagatatagacggccggaaagacataaacgctgctttgaatgccgagaagaagtttttctttagccatccatcgtatcgtcacatagcagaacgcctaggtactccctacctacaacgagttctcaaccaacaactcaccaaccacatcagagacaccctgcccagtttgaaagataaactacaatagcaactgttacaacgggaaaaaggtatggaccgttctcttaagactaaggctatgtatgtaacatattatgatccagcaagtgaacctcggcagaatcatcgaaagttccgtttggcacaaatcaactcgagcgaactgtctggcggagctcaaatcattacgttattccacgaaaagttctcctttgaaattgtcaagctggaattcgatgtgaagaagcttcgtagggagatcgccttcccaggtatggcttttgaggctattgtaaaaaataactctgctgagggaaccttccc

SEQ ID NO: 3580 - DNA, 2514 bp, Diabrotica virgifera
cgattttctaagtcctgccttttgcaatagtggaagggtagacgaggtacttacaatttgtggaaatatccacaaatttcctgtgacaactcctgtaaaaattagattttccaaaaaataaaaatagggttttgcgatgaatttctgagtcctgccatatccgtagaatgacaggatactatggattttatgaagaaatttttttgggcaggagggttgcaaacggtctaacggagtatatatgtatacaaacatgtaaggaaaataatgaaattttcatgattttctgggtcctgccaactaaataaattaaacatatttatttcaaaatgatcaaaaaagatattggcatgacgtctcctatgtttaagtatacttgtcgcttggaaaattctgcgaaaaattttcaccctgattccgtgactttctgagtcctgcctttaaaaagttttaatactcaaatgcaatcaatactttttcggtacttggcaggaaggttaaacggttctagtaagacggcaggagtcctagatttgtaagaagtttcgtacaaaatttgacgatgttctgagtcatgccattttgcatatgtttcaagaatcttaatataagtctatttacaaagaggcaggatggttttatagttatttcgtatacagggtggggcattagtgtgacaaagtctaattactcgtttgtcgtaagagatacgaaaaaaagttatttaggtaaaacgtggggcaaagagaggatcataatttaaaaatactttctaatatacagggctacccgtattgacagggtgacacaaacttatgtttttttaatggaacaccctgtatataattttaagattcctaagataattttaagacaatttaacacaattcacataatccaaaaatgtttcctaagggagctagagctctttgaagatggcgccttgtaattagatttttttatctccagaacgcttccatttcgatagacaaaaactggtccgcctttttatcttccagagataaatcgattccatcaattgcgaatctctagtaccggtcataggagtccgttttgggtaggacaacggttattttatcgcataacttttttgtcttgaacttttaagcattgttgacactatattattaaattgtgaggtattctagtactaaacggtactcttactttaagtcggtaggatgcaccgttttctagaaaaatcaatttcaaaatttttcgtattttgaatttaagaaaaatttgaaaaaataaaaaagaacggtgtatttaccgacttaaagcaggagtaacttttagtactggaatacctcataatttaatactctactgtcaatgcaatactctactttaaatgcttaacaattaaagcaagttatgagatttcgttgatctaaccaagacggacgcctatgacacacaattgagagcacacgttatttttcatgtaattgccttaacatatgtcttatttttaaaagccaccgccatttataacataatgacaactggtttattgttttataagctcaacgagtgtaattctaacagtgttgccatagttatctaaaatatgttttcttatgaaaaataaaatatttcgttttaaataatgttaagtagttgataattatattttctaccaatccaaataaaaaaggtcgtataaaaagcatagtattctacttgcatgtaatggctattactcactctgatgaattacgacactcgccaacggctcgtttcgcaaacttcatcatcgtgagtaatagccatcattatatgctcgttgaataatatactattatttattattagttttagaacaaaaatgtacctatacgaaaatggagagaattaaattttaaacaattttgatctcttttaatttttttgctaaaatcaatatttcaggtaggtagtactatgcggtaaaggtgcgagcataagacctgattggtttgatagcagtggtttttgttcaatatctccgtcattttcaacttttcgacaaaaatggtacgaattgaaattgttctaaataaatcgtgtttacaataattataataatttttttaaccatttttttcgtacgggtgatattttccgagttaattgtacctacttacagtagacgcctatatttttgacactgatatattccacgttaaaattttcgtggacccccacttacaacttgtgaacgtagaatcccattgagtccctcgtggacccctgggggttcacctggaccacttagagaatcactgcactagtgggtcgcgacctactcgttggcaaacgctgatataatgggatgtataatctatcattttatatgaatatggttgcagttatgtatataattaaaaaaggatcaattcttgccctatttagtagtgaacaaattcagacttcattttatgctgtcaattttaatgcacagatttattaaaagtaacacaagagtgtttcttaaatcacaagatattt

SEQ ID NO: 3581 - DNA, 2534 bp, Diabrotica virgifera
ttatacagaagttcagccacgattttccaagtcctgcctcctgcaatagtggaagggtagacgaggtacttacaatttgtggaaacatccacaaattcccttgacatttcctgtaaaaattagattttcccaaaaaacaaaaaatagggttttgcgatgaatttccaagtcctgccacatccgcagaatgacaggacactatggattttatgaagaaaaccttttgggcaggagggttgcaaacgggctaacggagtatatatgtatacaaacatgtaaggaaaataatgaaattttcatgattttctgggtcctgccaactaaataaattaaacatatttatttcaaaatgatcaaaaaagatattggcatgacgtctcctatgtttaagtatacttgtcgcttggaaaattctgcgaaaaattttcaccctgattccgtgactttctgagtcctgcctttaaaaagttttaatactcaaatgcaatcaatactttttcggtacttggcaggaaggttaaacggttctagtaagacggcaggagtcctagatttgtaagaagtttcgtacaaaatttgacgatgttctgagtcatgccattttgcatatgtttcaagaatcttaatataagtctatttacaaagaggcaggatggttttatagttatttcgtatacagggtggggcattagtgtgacaaagtctaattactcgtttgtcgtaagagatacgaaaaaaagttatttaggtaaaacgtggggcaaagagaggatcataatttaaaaatactttctaatatacagggctacccgtattgacagggtgacacaaacttatgtttttttaatggaacaccctgtatataattttaagattcctaagataattttaagacaatttaacacaattcacataatccaaaaatgtttcctaagggagctagagctctttgaagatggcgccttgtaattagatttttttatctccagaacgcttccatttcgatagacaaaaactggtccgcctttttatcttccagagataaatcgattccatcaattgcgaatctctagtaccggtcataggagtccgttttgggtaggacaacggttattttatcgcataacttttttgtcttgaacttttaagcattgttgacactatattattaaattgtgaggtattctagtactaaacggtactcttactttaagtcggtaggatgcaccgttttctagaaaaatcaatttcaaaatttttcgtattttgaatttaagaaaaatttgaaaaaataaaaaagaacggtgtatttaccgacttaaagcaggagtaacttttagtactggaatacctcataatttaatactctactgtcaatgcaatactctactttaaatgcttaacaattaaagcaagttatgagatttcgttgatctaaccaagacggacgcctatgacacacaattgagagcacacgttatttttcatgtaattgccttaacatatgtcttatttttaaaagccaccgccatttataacataatgacaactggtttattgttttataagctcaacgagtgtaattctaacagtgttgccatagttatctaaaatatgttttcttatgaaaaataaaatatttcgttttaaataatgttaagtagttgataattatattttctaccaatccaaataaaaaaggtcgtataaaaagcatagtattctacttgcatgtaatggctattactcactctgatgaattacgacactcgccaacggctcgtttcgcaaacttcatcatcgtgagtaatagccatcattatatgctcgttgaataatatactattatttattattagttttagaacaaaaatgtacctatacgaaaatggagagaattaaattttaaacaattttgatctcttttaatttttttgctaaaatcaatatttcaggtaggtagtactatgcggtaaaggtgcgagcataagacctgattggtttgatagcagtggtttttgttcaatatctccgtcattttcaacttttcgacaaaaatggtacgaattgaaattgttctaaataaatcgtgtttacaataattataataatttttttaaccatttttttcgtacgggtgatattttccgagttaattgtacctacttacagtagacgcctatatttttgacactgatatattccacgttaaaattttcgtggacccccacttacaacttgtgaacgtagaatcccattgagtccctcgtggacccctgggggttcacctggaccacttagagaatcactgcactagtgggtcgcgacctactcgttggcaaacgctgatataatgggatgtataatctatcattttatatgaatatggttgcagttatgtatataattaaaaaaggatcaattcttgccctatttagtagtgaacaaattcagacttcattttatgctgtcaattttaatgcacagatttattaaaagtaacacaagagtgtttcttaaatcacaagatattt

SEQ ID NO: 3582 - DNA, 1866 bp, Diabrotica virgifera
acaatatacagggtggggcattagtgtgacaaagtccaattactcgtttgtcgcaagagatacgaaaaaaagttatttaggtaaaagttggggcacacatagtaccataatttaaaaatattttcaaatatacagggctacccgtattgacagggtgacacaaacttatgtttttttaatggaacaccctgtatataattttaagattcctaagataattttaagacaatttaacacaattcacataatccaaaaatgtttcctaagggagctagagctctttgaagatggcgccttgtaattagatttttttatctccagaacgcttccatttcgatagacaaaaactggtccgcctttttatcttccagagataaatcgattccatcaattgcgaatctctagtaccggtcataggagtccgttttgggtaggacaacggttattttatcgcataacttttttgtcttgaacttttaagcattgttgacactatattattaaattgtgaggtattctagtactaaacggtactcttactttaagtcggtaggatgcaccgttttctagaaaaatcaatttcaaaatttttcgtattttgaatttaagaaaaatttgaaaaaataaaaaagaacggtgtatttaccgacttaaagcaggagtaacttttagtactggaatacctcataatttaatactctactgtcaatgcaatactctactttaaatgcttaacaattaaagcaagttatgagatttcgttgatctaaccaagacggacgcctatgacacacaattgagagcacacgttatttttcatgtaattgccttaacatatgtcttatttttaaaagccaccgccatttataacataatgacaactggtttattgttttataagctcaacgagtgtaattctaacagtgttgccatagttatctaaaatatgttttcttatgaaaaataaaatatttcgttttaaataatgttaagtagttgataattatattttctaccaatccaaataaaaaaggtcgtataaaaagcatagtattctacttgcatgtaatggctattactcactctgatgaattacgacactcgccaacggctcgtttcgcaaacttcatcatcgtgagtaatagccatcattatatgctcgttgaataatatactattatttattattagttttagaacaaaaatgtacctatacgaaaatggagagaattaaattttaaacaattttgatctcttttaatttttttgctaaaatcaatatttcaggtaggtagtactatgcggtaaaggtgcgagcataagacctgattggtttgatagcagtggtttttgttcaatatctccgtcattttcaacttttcgacaaaaatggtacgaattgaaattgttctaaataaatcgtgtttacaataattataataatttttttaaccatttttttcgtacgggtgatattttccgagttaattgtacctacttacagtagacgcctatatttttgacactgatatattccacgttaaaattttcgtggacccccacttacaacttgtgaacgtagaatcccattgagtccctcgtggacccctgggggttcacctggaccacttagagaatcactgcactagtgggtcgcgacctactcgttggcaaacgctgatataatgggatgtataatctatcattttatatgaatatggttgcagttatgtatataattaaaaaaggatcaattcttgccctatttagtagtgaacaaattcagacttcattttatgctgtcaattttaatgcacagatttattaaaagtaacacaagagtgtttcttaaatcacaagatattt

SEQ ID NO: 3583 - DNA, 2586 bp, Diabrotica virgifera
  SmartBlast Evalue=1E-140; Info=Thioredoxin domain-containing protein 5 n=1 Tax=Harpegnathos saltator RepID=E2B7N7_9HYME
gattagtgtaggttgaatgtactttgtccggcaaacgattttcgtgtttaatgataattattaaataaattgtaatacttgtacaaagaaaatgggtcctcatagtgtattgtcgttaatgtttgcgtcagtagtaatcacattagctcatgaagatgtttactcaatcaaatacaccacagaaaatttttcccaagaagttggaaagaaaaatcattttgtcatgttctacgccccttggtgcgggcattgtcaaaaattttctccaaaatgggaacaattagctgaaatgttgaatgaagatgacacgaataatataaaaatagctaaagttgattgtactacagacagtgaagtatgctccgaacaagatattactggatatcccacacttaaattttacaaagtaggagactcagaaggtgtgaggtttagaggaaccagagatcttccttcaataaccaattttatcaaggagcaactgagagagggagatgaaagccatactgaggaagcagtctctgatgaagccacggccgttgatggcttgaccgagctgacagaagataacttccacaaacatgttaagagtggaaaacattttatcaagttctatgccccttggtgtggacactgtcagaaattagccccagcgtgggagcaactcgctaaaactctagagcttgacaatgaagttaccgtagggaaagtagactgcacgcagcatagatctgtctgtaacgactttgacgtgaaaggataccccactctattatggatagaaaatggcgcaaaggtggacaagtaccaaggagacagaagccacgtcgacctcaagcaatacgttaacaaaatgttaggatccgagaagacagaaggagcaactccaaaagaggctgcatctgacgctgatcttccatcaggagaagtaaccggcgacaacttcaagtctaccatagaatcgggcatttctttcgtcaagttttacgcgccatggtgtgggcattgtaagagactggcaccagtttgggacagcctcagagagaagctcgtctcaagacctgaagttaaggtccttaaagtagactgtacgttagaagttaacaaacagttgtgtaatgacgaagaaattgaaggttttcccagtcttaatctataccaaaacggcgagaagatcgcttcgtatagtggcagtaggagtttggaagatctacaagactttttgttgaagcatacaccacgtgatgaactataaacatttctagtttacaaaaaattataacttctttatttaaaatcaattttttttgttcttggtttttttgttcgaaaagtattttcttcgttgaattaacgaaacaaactattcacaccactgttttacatatctttccgcaatacagggtggtttgtattaggtattatcttatctatgataagtatcacttatttgcttgttaactgtatataccacttaactaaaccacttcaggtcaacgttttacacactctagcaacgattgtctttgaaaaaatacttaacatcgttatttcacgaaggattccacaacctttactttaaatatacagggtgtcccagaaaatggtgcgttcctttgaggtatggatataatacacaatgtaaagcaagaaagtcctataacatttttttctaaagttaactgtttccaaaaaaaaaattacattgttctccatataagcgaacttttattttcataaaattaactaatctgacatcactgtacaagaactgtttgtgacaggttattgacaccagcaatttaggtcagacagtagacacctgcaaaatagttataccaccctatgtgtgaaaataaacaaaacaagaatttgtttgtttgttgaggaggaagacagggtttaatgtaaatactaaaggcccatggggcaactatttttgaattgtgactgtgtctatcttagattttgtatacatagttgtcagatttcaatttgcataccaaaatgtattttcgtttttttggccaaatggttgagtttagaaaaaaatgttataagacttttttgctctacatggtgcttgtttcctatacctttaaggaacacactattttcggggacaccctgtatactgagataatgatcttctccacatctcctaatagtttttcattacaactctatgccagtcatagaaattagtaatcaagtagcaattttgttatatctttacagcacaaaagattcaaaacatatagtgtttttgcatctacatgaccaacgtagatatagtcagtaacagagttgctcattgtggtagagttaatgaacgctcaggggtcagtcagcaaacacggaacattcgaaagtggtaacgaaaaatcagtattttgttcaaactgaattgttgatattatagttttttttttatttacactagagagtaccaattaaagcttttccttaccacgaaataatacttcttcaggcttatatatttgataaagattcaaaattgttattgatgcattgttttagtgatgaatgtttgtatgtgatgtatttattatcatatataaaaaa

SEQ ID NO: 3584 - DNA, 2230 bp, Diabrotica virgifera
  SmartBlast Evalue=1E-140; Info=Thioredoxin domain-containing protein 5 n=1 Tax=Harpegnathos saltator RepID=E2B7N7_9HYME
gattagtgtaggttgaatgtactttgtccggcaaacgattttcgtgtttaatgataattattaaataaattgtaatacttgtacaaagaaaatgggtcctcatagtgtattgtcgttaatgtttgcgtcagtagtaatcacattagctcatgaagatgtttactcaatcaaatacaccacagaaaatttttcccaagaagttggaaagaaaaatcattttgtcatgttctacgccccttggtgcgggcattgtcaaaaattttctccaaaatgggaacaattagctgaaatgttgaatgaagatgacacgaataatataaaaatagctaaagttgattgtactacagacagtgaagtatgctccgaacaagatattactggatatcccacacttaaattttacaaagtaggagactcagaaggtgtgaggtttagaggaaccagagatcttccttcaataaccaattttatcaaggagcaactgagagagggagatgaaagccatactgaggaagcagtctctgatgaagccacggccgttgatggcttgaccgagctgacagaagataacttccacaaacatgttaagagtggaaaacattttatcaagttctatgccccttggtgtggacactgtcagaaattagccccagcgtgggagcaactcgctaaaactctagagcttgacaatgaagttaccgtagggaaagtagactgcacgcagcatagatctgtctgtaacgactttgacgtgaaaggataccccactctattatggatagaaaatggcgcaaaggtggacaagtaccaaggagacagaagccacgtcgacctcaagcaatacgttaacaaaatgttaggatccgagaagacagaaggagcaactccaaaagaggctgcatctgacgctgatcttccatcaggagaagtaaccggcgacaacttcaagtctaccatagaatcgggcatttctttcgtcaagttttacgcgccatggtgtgggcattgtaagagactggcaccagtttgggacagcctcagagagaagctcgtctcaagacctgaagttaaggtccttaaagtagactgtacgttagaagttaacaaacagttgtgtaatgacgaagaaattgaaggttttcccagtcttaatctataccaaaacggcgagaagatcgcttcgtatagtggcagtaggagtttggaagatctacaagactttttgttgaagcatacaccacgtgatgaactataaacatttctagtttacaaaaaattataacttctttatttaaaatcaattttttttgttcttggtttttttgttcgaaaagtattttcttcgttgaattaacgaaacaaactattcacaccactgttttacatatctttccgcaatacagggtggtttgtattaggtattatcttatctatgataagtatcacttatttgcttgttaactgtatataccacttaactaaaccacttcaggtcaacgttttacacactctagcaacgattgtctttgaaaaaatacttaacatcgttatttcacgaaggattccacaacctttactttaaatatacagggtgtcccagaaaatggtgcgttcctttgaggtatggatataatacacaatgtaaagcaagaaagtcctataacatttttttctaaagttaactgtttccaaaaaaaaaattacattgttctccatataagcgaacttttattttcataaaattaactaatctgacatcactgtacaagaactgtttgtgacaggttattgacaccagcaatttaggtcagacagtagacacctgcaaaatagttataccaccctatgtgtgaaaataaacaaaacaagaatttgtttgtttgttgaggaggaagacagggtttaatgtaaatactaaaggcccatggggcaactatttttgaattgtgactgtgtctatcttagattttgtatacatagttgtcagatttcaatttgcataccaaaatgtattttcgtttttttggccaaatggttgagtttagaaaaaaatgttataagacttttttgctctacatggtgccttctacctatacctttaaggaacgcactattttaggggacaccctgtataatataagcaacgccttcgggggtcggattagtgtgatttttttcacaaaatagtagagactggtaccaactccatgaaaatgttataaaagttatt

SEQ ID NO: 3585 - DNA, 1989 bp, Diabrotica virgifera
  SmartBlast Evalue=1E-140; Info=Thioredoxin domain-containing protein 5 n=1 Tax=Harpegnathos saltator RepID=E2B7N7_9HYME
gattagtgtaggttgaatgtactttgtccggcaaacgattttcgtgtttaatgataattattaaataaattgtaatacttgtacaaagaaaatgggtcctcatagtgtattgtcgttaatgtttgcgtcagtagtaatcacattagctcatgaagatgtttactcaatcaaatacaccacagaaaatttttcccaagaagttggaaagaaaaatcattttgtcatgttctacgccccttggtgcgggcattgtcaaaaattttctccaaaatgggaacaattagctgaaatgttgaatgaagatgacacgaataatataaaaatagctaaagttgattgtactacagacagtgaagtatgctccgaacaagatattactggatatcccacacttaaattttacaaagtaggagactcagaaggtgtgaggtttagaggaaccagagatcttccttcaataaccaattttatcaaggagcaactgagagagggagatgaaagccatactgaggaagcagtctctgatgaagccacggccgttgatggcttgaccgagctgacagaagataacttccacaaacatgttaagagtggaaaacattttatcaagttctatgccccttggtgtggacactgtcagaaattagccccagcgtgggagcaactcgctaaaactctagagcttgacaatgaagttaccgtagggaaagtagactgcacgcagcatagatctgtctgtaacgactttgacgtgaaaggataccccactctattatggatagaaaatggcgcaaaggtggacaagtaccaaggagacagaagccacgtcgacctcaagcaatacgttaacaaaatgttaggatccgagaagacagaaggagcaactccaaaagaggctgcatctgacgctgatcttccatcaggagaagtaaccggcgacaacttcaagtctaccatagaatcgggcatttctttcgtcaagttttacgcgccatggtgtgggcattgtaagagactggcaccagtttgggacagcctcagagagaagctcgtctcaagacctgaagttaaggtccttaaagtagactgtacgttagaagttaacaaacagttgtgtaatgacgaagaaattgaaggttttcccagtcttaatctataccaaaacggcgagaagatcgcttcgtatagtggcagtaggagtttggaagatctacaagactttttgttgaagcatacaccacgtgatgaactataaacatttctagtttacaaaaaattataacttctttatttaaaatcaattttttttgttcttggtttttttgttcgaaaagtattttcttcgttgaattaacgaaacaaactattcacaccactgttttacatatctttccgcaatacagggtggtttgtattaggtattatcttatctatgataagtatcacttatttgcttgttaactgtatataccacttaactaaaccacttcaggtcaacgttttacacactctagcaacgattgtctttgaaaaaatacttaacatcgttatttcacgaaggattccacaacctttactttaaatatacagggtgtcccagaaaatggtgcgttcctttgaggtatggatataatacacaatgtaaagcaagaaagtcctataacatttttttctaaagttaactgtttccaaaaaaaaaattacattgttctccatataagcgaacttttattttcataaaattaactaatctgacatcactgtacaagaactgtttgtgatttaggttattgacaccacaaatgtaggtcagacaggtagacacctgcaaaataattataccaccctatgtgtgaaaatcaaacaaaacaagaatttgtttgtttgttgaggaaaaagacagttttaactatttggaatgggatgagccactattattgaagaagtgatttttattaacgtttcgacgcccaggtcgggtgccgttgt

SEQ ID NO: 3586 - DNA, 3766 bp, Diabrotica virgifera
  SmartBlast Evalue=2E-49; Info=Zinc finger protein n=1 Tax= Bombyx mori RepID=Q3L234_BOMMO
ctggcatttatgcgcgtagtaccggtttttcattttgtagagtttttaataaagtgtttacttttattataacatatttgactcgaatgtggcataattcaagtgattttttattatttaactcatttataaacatacagtcgtatttaactacttgaaaacagtacaaaaagattaaccatgagttctggcagcatttgttataagtgcaatcaacccggtcactttgctagggagtgctcacagccaggaggcggtagagattctggaagaggctctttcagtagaagtcgcgacaaatgccacaagtgcaacaaaatgggtcactatgcacgtgactgtaaggaggaagctgctcgttgttatcgttgctatggtgaagggcactttgctaaggattgtatgcaaagtccagatatgccgtcctgctacaattgtagaaaaccaggacatattgctcgcagttgtccagaagcaggtggggacaggtcctcaggtaatgacacttgccacaactgtcaaagaccagggcatatttcaagaaattgccctgagagcacaaaaacatgctacttgtgtcacaaaccaggtcatctgaaaagagattgccgagaaaatgactacagaaagtagtaccacatgtttattattttgttgtacctattttatatatttaaacatttgagaatgtctgttttcctaatttcttgttggaactaatgtttcttatattctttttatattaagctgtaggctaaaactcaattctcatttgtccaatttccaaagtgatattgtacttacttgttatttctaatagtaaagacgttcttatcagttttatcgaaaaacgaaatgtatgcctgttctaacttatttaaaatttttatcaacatttgaagagtggccgagctaagtgatctaagtgccaaaattaaaaattgccagaaatcaaagaaaatttgaccaaccaaaaaataaaacaattgaggtctggactgagatattctttttcacattatgatcgacgatagtggctcttatccctcgggaagctattggtgtgctcttttactatttatcatgaagagtgtacttaaacattggcacttgatcatttaacaaagaacatgatgcttgacttagggccgcttgttcgaacgctaatcaacaatgatcactgtcaaatgtttaattgctgtcaccagctgtcaatgtcaactttgattgggttgctgaaaacataattgattaactaatttcataattgtaatccataattatgttttcagcaacttaaacaaagttgacattgacagttggtgacagtgattgaatgtttgatagtgatcatttttgattagcgttcgaacaaccggcccttacaggcggctcatctttgggttttgtttgcaaccactagaatgaagttggcatacaaatatcatagggggacattggcatagcaacatagatcatattaattgggaaaataaacaaaatttatattttgacacttagatcacttacctcggccactcttcatttatgaattatgaaaataaccagacatttaatatgttgaaattgtttaaatggtacaaaaaataaggttttgatttttctgtttcttaagctgacattttggttataaaaacgttaaattatataaataaagatttaagtttgtcttgagttcatttttcaatgatctataaattctacacaatttaatcaattaataatagtattctctataaccttgaccaagttatatttaataaaaaaaaacagtatagatgactagtattagaatcaaacacattggcaatggaagtctttttttcaatacttaaagtgttatttaatttagtttgttaattagtaggatttgggataaagttagtcggagtaaatcatcaaaagtatgatgttgccaagttatatcgtcaatataatatattggccatattatggccaatgaatgaatcagttggagtactattaagatgtcatcaagagaaaactaatatttattggttggatgtgatgtgcatcatgtacgattgacatataaattgtgacatgaaaatgacatggagcctagtatttaatgctgaatgtgaataagaaaataatagttttaattgtattacactaatcacataaaatatgataagaataaaattattcttaactgaataagtgaccttatcaatcattctataattgaaattttttatttgacgtgagcattaaaaaaaacaggtgaaaaatttattttacgtttcttacaataaattgattgttagcatgaacacgaacatctctctttagctccatctcaccttggggagcattgggcggttatgcatttgttggctaaaggtgtaagattgctggctggccggttcagcgcaagattacacaaacataagtacagttaattatagaattatttcttttactagatgaagatacaagtttgattcatcattcttgatttttcaacccattgtgtcttgacatgtcccaggattaattttaattcgtttctattatttgccttagttttcctgtgttgtactcctacttttattagattgtgttccataaatttgtattgcaattatatattggcaaacgtttctacttaaagagtgtataaagaatgtttacagaatgataaaaaattcatggaattgagagatgtataatgcaagcctggtgtagaggctatttgaatccactgtcttacgtcagtttaactgataattagatgcaaaatttcactggtcattttgtgctcatattttttatgaaaattattttttaaatacttcctaagatttcagcaacactagattaattttgttttaatattaacacattgaaaaaagcaccacaatatcaatcatataatagaaattaggaaacatataaattgtatgttgcaatatttgtatcaaatgtaaaaaagtgagataacattcgtctgatactcttgtatcaactaaataaaaagtgttttcacatgaaaagctttaggtatataagttccctatgaaattttttcttttttttttttaaataacgtaatcattttacaaataggccaaaaatttgacacgtttttcatagcaattaataaaaagtaactttagatttcaggatgggcacacgttagtaaagagaaattttaaaattgatgtaagacgtctttaattgcagtaaataaaagacaattaagacttaagctctaacagtgaaagtaatgtccttaagaacagtttgttataacttgtccagtgtatcttggttcttagagatgcacaaaggagacaatgtgttgtgaaaggttaaataactatattctgtcgttacctacatcagtaagttctatagagcgtttcacgttaagaatggaacgttgcttagatagggctacgtatttattatggacggtagaagcgcgccgatgccacgccgtctggttagaatgaattgtgcctaagagttttggcaacactgatctgcataagccaaatattccgttcttaacgtgaaatacagtataggagtttgtacttgcgcatgttcaattgaagtgtcaaggtacgccggtcaaattatacaattttaattaacaaagtgtagatctctttggaggaaaatttctatgagtatattgaggaatattttattttacagtgacacgattattgtaaaatataaacttggggaaagtataatttttattaataaa

SEQ ID NO: 3587 - DNA, 1528 bp, Diabrotica virgifera
  SmartBlast Evalue=7E-50; Info=Zinc finger protein n=1 Tax= Bombyx mori RepID=Q3L234_BOMMO
ctggcatttatgcgcgtagtaccggtttttcattttgtagagtttttaataaagtgtttacttttattataacatatttgactcgaatgtggcataattcaagtgattttttattatttaactcatttataaacatacagtcgtatttaactacttgaaaacagtacaaaaagattaaccatgagttctggcagcatttgttataagtgcaatcaacccggtcactttgctagggagtgctcacagccaggaggcggtagagattctggaagaggctctttcagtagaagtcgcgacaaatgccacaagtgcaacaaaatgggtcactatgcacgtgactgtaaggaggaagctgctcgttgttatcgttgctatggtgaagggcactttgctaaggattgtatgcaaagtccagatatgccgtcctgctacaattgtagaaaaccaggacatattgctcgcagttgtccagaagcaggtggggacaggtcctcaggtaatgacacttgccacaactgtcaaagaccagggcatatttcaagaaattgccctgagagcacaaaaacatgctacttgtgtcacaaaccaggtcatctgaaaagagattgccgagaaaatgactacagaaagtagtaccacatgtttattattttgttgtacctattttatatatttaaacatttgagaatgtctgttttcctaatttcttgttggaactaatgtttcttatattctttttatattaagctgtaggctaaaactcaattctcatttgtccaatttccaaagtgatattgtacttacttgttatttctaatagtaaagacgttcttatcagttttatcgaaaaacgaaatgtatgcctgttctaacttatttaaaatttttatcaacatttgaagagtggccgagctaagtgatctaagtgccaaaattaaaaattgccagaaatcaaagaaaatttgaccaaccaaaaaataaaacaattgaggtctggactgagatattctttttcacattatgatcgacgatagtggctcttatccctcgggaagctattggtgtgctcttttactatttatcatgaagagtgtacttaaacattggcacttgatcatttaacaaagaacatgatgcttgacttagggccgcttgttcgaacgctaatcaacaatgatcactgtcatgtttgattgctgtcaccagctgtcaatgtcaactttgattgggttgctgaaaacataattgattataattatgagattagttaatcaattaacataacaattattaacataattgattactaatttcataattgtaatcaattgtgttttcagcaacccaacaaggtgacattgacagttggtgacagtgattaaatatttgatggtgatcatggttgattggcgttcgaacaaccggccctaaaacacaaaaaagcaagttcaatagcggaaccgaattcaaaattattttgcacatcatatttgaaacattatttggttaaacatctcattcttgttgg

SEQ ID NO: 3588 - DNA, 1435 bp, Diabrotica virgifera
  SmartBlast Evalue=7E-43; Info=Ribonuclease t2 n=1 Tax=Culex quinquefasciatus RepID=B0WUA5_CULQU
catggtttcacgtatcgtcgtatcgagcgtcagtatcaaaaacaaatatgacatgaacgataaacagctgatggcgtcaataaacattttttaaatttacgtttttattagaaatgcacttaaatttccaaattctagttctaagcctcgtggtctattccgagaacgttagagccgcacaactaccacaattaaatggagtcagtcccaccccttatcacgactgggacttcttaatgttctcacaaagatggccgattacttcgtgcgccgaatgggaagacaaaaaatcaggcaacacttgcgtcttcccaccagaccgaacacaatggacagttcacgggatgtggcccactaaaaacggaacagagggccccttgttctgcccttctgctatccactttgatccggatctactggatcccatgttggatgctctcaaagcacaatggacaaatgtggaggctaataccaaagtttattccttctggaaacatgagtgggataaacatggaacttgttcggtagatttgccagcactcaacagtattcctagtttctttagtaaaggtctagaattaaataaacaattaaatatcgccgacatgctactacaaagtaaaataaccccaggaaccaccggttacactgtagacgagatagtagatgccataaaagcagtgacacaacaccaaccgaatatcgagtgtatagtggaaagccatactaagcaatccatgattagtgagattaggatatgtctggataaatccttcgaagtgatcgactgtgtaggttcagctctaacgaattgtaacaaaaagaaacccataatgtacttagataatgtcccggatgatgcaatgagtcagattgattacatagatgaatattcggaagagaggtatagggagagtgcgtattacatggagttttataagtttgttaaatttcttatatggttttctatgtaatattgtaagatatgtatggtgagtgatcagattattaataatctttgtctgttaaactttttttctacttttaagggccggttgttcgagcgctaatcagcagtgatcactgtcaaatatttaattgctgtcaccaaaactgtcaatgtcaacttttattgggttgctgaaaacataattgattataattatgagattagttaatcaattaacataacaattattaacataattgattactaatttcataattgtaatcaattgtgttttcagcaacccaacaaggtgacattgacagttggtgacagtgattaaatatttgatggtgatcatggttgattggcgttcgaacaaccggccctaaaacacaaaaaagcaagttcaatagcggaaccgaattcaaaattattttgcacatcatatttgaaacattatttggttaaacatctcattcttgttgg

SEQ ID NO: 3589 - DNA, 2310 bp, Diabrotica virgifera
  SmartBlast Evalue=9E-84; Info="Phenylalanyl-tRNA synthetase beta chain, putative n=1 Tax=Pediculus humanus corporis RepID= E0VK28_PEDHC"
gcggcctattttcctattagaatagtaaatggcattcaaaagatggtatttcgtatcagaatcaatcaaatcgtttcatcataatgcttttattcctgattaagctaaaaaagctagttccacagcgttcaatgacctaagccaaacaaagagacctctaaaccactcaagtgaaaatgacatttatttttgttactggattggccacccagagattacacctgaaaacattgtgggctttctgaagtcctgtcatttggtatttgaccgacctaggtttatatgttcagaaatatgccctgacgaggttactgttaaccaatttctgaatctccagaaggagggggggatatgcccttaaaaccccacatactgttcaaacgtcaaccaaaggattctacatgcaaatgtgcaatcattacggaataaagtagtaaatgaagtcttattgcatactgtaacgagccggttctgtgcttctccggccgagctgttatttaagaatcgaatgaatcgcagaaactgcgcgggagaagaagagagagaagatgctgacacacgaatcgggttggtgggaaaatactctgaactattgttacatttctttattatatctgaatatattatgtggtgtgaaccgaaagttagtgcattttacccatagtccttttccccccgcgattcgttattgctcaatatcgccccgtggtgaccataatctatcacgcgaacccgtactctgttacaaacttacatattttgttatatataacataatctcacataacctaattttaatcaacatttttttaatagtttacactaacatattttgttatatataacataacctaattttaatcaacatttttttaatagttttgtttcatgccttcagtattaacaatactggacaaactagacaatccttaccttttcttctaacaaatttacacaacgtgttaattaattgttatcagtttaccatttacaacatcgtggaaagtacacagtcaaataaaagatgcaacaaaatctattaatccctattagttttaatagaaactgatttttcgaaaacaagatcagtttttgagggataaaccacttttagttgctcctgctcgtctacagtctttacttgctccacctccaagtctttctcaaataacagcaccatgtctttgagcagcgtattcagtacgtttttacaagagtgcggtgagagagaactggtaacctcgatgaacattcgggttgttgtcacttcaatcttagaaatatctgaattcgtaataggtggaaatgatatgacttccttattcgcatttatgacacatggatattgcggttttccttcaatcaggtataaaaatttgtgaattccactatatgtgctcctcttcttttccttccttaaattattggcttccgtttgaagttttgtaaatagctcagcaccactcattacggtcgctctgtttaaaggtttaatcatcagttcagaaggttgagaggttgagtagattaaatctcctggaggcaatttattgaaatcatgagtggctatagttgctacattccttttctcacagactgaatcatggagcttgttttgtaattggataaatttcttgaaagattcctcggtaaatgacacattgttgacaacgcaggcagcaaagtgctctcttaccgttttaacgccatttttaataatcaccttgaaattattgttgtgactcttaacattaatagagtacttataatctgcaacactattatcatcctcctcatcatcatttttactcttatttttcttttttagattttcctttgttcgcaacatcaccattagtagtctttggacagttctgcttgacataatctaagacttgttttgttctacattgatcaattaatttcaacagacgcctgtctgagacgggattagattttaaatttaaatcttttaatttatgacattcagcaagctccccaggaagtgtttttattttattctcgctaatatccagcaatttcaggagaggtaacacatgtatgttgttcggaatttcttcgatttcatttccatgtaacttcaactcggataaattaactaattcttcggaacaaactctagggaacaacttcagcttattattagaaagatctaagaccgctaatttactattcttcgtaaattcaggaaaagattcaagcctgttcacgtttaaatttaaggtcgttagtggtaaatctgcaaaaccatcaggaatcgaagttattagatttctcgacaaatctaac

SEQ ID NO: 3590 - DNA, 2312 bp, Diabrotica virgifera
  SmartBlast Evalue=9E-84; Info="Phenylalanyl-tRNA synthetase beta chain, putative n=1 Tax=Pediculus humanus corporis RepID= E0VK28_PEDHC"
catcaacaaatatttgtcttgaaaataagtgattatttcaacaaaactaaactaaaataaatattggtaaattgaaatttgttgcaatgaataaataaagcaatagttgcaaatgataaactgttaactgcatataagctgcagtgactgattttaaattatgtttctattagtaatgatcgtcgaattagtctgaaatttgaagggtggattgtggtttacttacaactcaagttcgtatatatttcttatttaaaaaactgatattttgacattaattttaaaacgcattctgcatgatagctgctttaaacgaattgcgtatgcgtacagcatagtttttcgaacaaatgtaatgtggtattaaccctgaaaataataatattgtaacaaaataaaacttatgtaacgagccggccctgtgcttctctggccgagctgtatgatgtctcccttcaagaatcgaatgaatcgcagagactgcgcgggagaaaaagattagaagatgctgacacacgaatcgagtcggtggggaaaagactctggactattgttacatttttttattattctattattgtagtaactatactgtttgttcatgttttgttaatcacggaatatattatgtggtgtgaaccgaaagttagtgcattttacccatagtccttttccccccgcgattcgttattgctcaatatcgccccgtggtgaccataatctatcacgcgaacccgtactctgttacaaacttacatattttgttatatataacataatctcacataacctaattttaatcaacatttttttaatagtttacactaacatattttgttatatataacataacctaattttaatcaacatttttttaatagttttgtttcatgccttcagtattaacaatactggacaaactagacaatccttaccttttcttctaacaaatttacacaacgtgttaattaattgttatcagtttaccatttacaacatcgtggaaagtacacagtcaaataaaagatgcaacaaaatctattaatccctattagttttaatagaaactgatttttcgaaaacaagatcagtttttgagggataaaccacttttagttgctcctgctcgtctacagtctttacttgctccacctccaagtctttctcaaataacagcaccatgtctttgagcagcgtattcagtacgtttttacaagagtgcggtgagagagaactggtaacctcgatgaacattcgggttgttgtcacttcaatcttagaaatatctgaattcgtaataggtggaaatgatatgacttccttattcgcatttatgacacatggatattgcggttttccttcaatcaggtataaaaatttgtgaattccactatatgtgctcctcttcttttccttccttaaattattggcttccgtttgaagttttgtaaatagctcagcaccactcattacggtcgctctgtttaaaggtttaatcatcagttcagaaggttgagaggttgagtagattaaatctcctggaggcaatttattgaaatcatgagtggctatagttgctacattccttttctcacagactgaatcatggagcttgttttgtaattggataaatttcttgaaagattcctcggtaaatgacacattgttgacaacgcaggcagcaaagtgctctcttaccgttttaacgccatttttaataatcaccttgaaattattgttgtgactcttaacattaatagagtacttataatctgcaacactattatcatcctcctcatcatcatttttactcttatttttcttttttagattttcctttgttcgcaacatcaccattagtagtctttggacagttctgcttgacataatctaagacttgttttgttctacattgatcaattaatttcaacagacgcctgtctgagacgggattagattttaaatttaaatcttttaatttatgacattcagcaagctccccaggaagtgtttttattttattctcgctaatatccagcaatttcaggagaggtaacacatgtatgttgttcggaatttcttcgatttcatttccatgtaacttcaactcggataaattaactaattcttcggaacaaactctagggaacaacttcagcttattattagaaagatctaagaccgctaatttactattcttcgtaaattcaggaaaagattcaagcctgttcacgtttaaatttaaggtcgttagtggtaaatctgcaaaaccatcaggaatcgaagttattagatttctcgacaaatctaac

SEQ ID NO: 3591 - DNA, 1855 bp, Diabrotica virgifera
  SmartBlast Evalue=7E-84; Info="Phenylalanyl-tRNA synthetase beta chain, putative n=1 Tax=Pediculus humanus corporis RepID= E0VK28_PEDHC"
attcccgtgaagaatcgaatgaatcgcgcgggagaagaagagagagaagatgctgacacacgaatcgggttggtgggaaaatactctgaactattgttacatttctttattattttattattgtagtaactatagcgtttgttcatgttttgttaatcacggaatatattatgtggtgtgaaccgaaagttagtgcattttacccatagtccttttccccccgcgattcgttattgctcaatatcgccccgtggtgaccataatctatcacgcgaacccgtactctgttacaaacttacatattttgttatatataacataatctcacataacctaattttaatcaacatttttttaatagtttacactaacatattttgttatatataacataacctaattttaatcaacatttttttaatagttttgtttcatgccttcagtattaacaatactggacaaactagacaatccttaccttttcttctaacaaatttacacaacgtgttaattaattgttatcagtttaccatttacaacatcgtggaaagtacacagtcaaataaaagatgcaacaaaatctattaatccctattagttttaatagaaactgatttttcgaaaacaagatcagtttttgagggataaaccacttttagttgctcctgctcgtctacagtctttacttgctccacctccaagtctttctcaaataacagcaccatgtctttgagcagcgtattcagtacgtttttacaagagtgcggtgagagagaactggtaacctcgatgaacattcgggttgttgtcacttcaatcttagaaatatctgaattcgtaataggtggaaatgatatgacttccttattcgcatttatgacacatggatattgcggttttccttcaatcaggtataaaaatttgtgaattccactatatgtgctcctcttcttttccttccttaaattattggcttccgtttgaagttttgtaaatagctcagcaccactcattacggtcgctctgtttaaaggtttaatcatcagttcagaaggttgagaggttgagtagattaaatctcctggaggcaatttattgaaatcatgagtggctatagttgctacattccttttctcacagactgaatcatggagcttgttttgtaattggataaatttcttgaaagattcctcggtaaatgacacattgttgacaacgcaggcagcaaagtgctctcttaccgttttaacgccatttttaataatcaccttgaaattattgttgtgactcttaacattaatagagtacttataatctgcaacactattatcatcctcctcatcatcatttttactcttatttttcttttttagattttcctttgttcgcaacatcaccattagtagtctttggacagttctgcttgacataatctaagacttgttttgttctacattgatcaattaatttcaacagacgcctgtctgagacgggattagattttaaatttaaatcttttaatttatgacattcagcaagctccccaggaagtgtttttattttattctcgctaatatccagcaatttcaggagaggtaacacatgtatgttgttcggaatttcttcgatttcatttccatgtaacttcaactcggataaattaactaattcttcggaacaaactctagggaacaacttcagcttattattagaaagatctaagaccgctaatttactattcttcgtaaattcaggaaaagattcaagcctgttcacgtttaaatttaaggtcgttagtggtaaatctgcaaaaccatcaggaatcgaagttattagatttctcgacaaatctaac

SEQ ID NO: 3592 - DNA, 2070 bp, Diabrotica virgifera
attcagagcatttatattttacttaaatacttaaaatccccagaacattcttcttgcaccaggacggcgacgtagtggtcttaccatatatctgaatccataaactacttcacctccttcaactgagaagatagcgtagtcagtctcgttttcgttgacgattttcaaagatgatccatttaagccttcaagtaaaagcacttgggtttcgttgggttggacgacttgagtgcggaccacctcttggtttcttccattaatatgaacgatctgagcggtaaaagcatgagttccatgattaacaacggtgtatctatcatgaacaatgggtttacgtagcatagcgggacgcataaccactcttggtctgcgcattggtctacattgtccaacttgaggtctattttgttgagctggatggtgctgttgttgaccttgatggtgctgttgttgaccttgatggtgctgttgttgagctggatggtgctgttgttgagctgggtggtgctgttgttgagctggatgatgaccaccttgggctggacgatggccaccttgagcaggatgtccaccttgaccaggaagatggcctggtcgtatcattggcctacaagctggacgacggaatggacgacgtcctgggcctgttgggctacctgctggtttacaaggacgggctactgctggtttacatgctggtctacgtccaggatggtattgaggtctacgaaccataacatgttgaggtttgcgatgtccagcagggtacatgggtcttcgtctatatctaccaacttgatgcatgacaactacagatgatgcaggtgctagatggaaattattcaccagcattactgaatgttcatcagatactagttgtttgatttttctttcaatgtctcgaactactcttccaccggtggctgtgataatagcgacttctgtgtaatgtctgttcaatatatttaatagagctactccagcgtctttgttatgctcaattactacagtttcatttggtttaactaccctgtattgatcattggcacggtcatcgctgtcggtgtatgtcacctcaacttctatttcagattgtccattgttggtaacagtgaagttatgatgttcggaaagggtaacatcattaggatcatacatcaaagcagtgacggacgaacgtgagactaaatggaagctctccaaagttgttagaatatgagtaacaacagtttctttttgctcatcaatatttctaactaaatcctcaagatcttcaataacatctcctccttcagctctaaaaactgcatcttcagtgtggcttgtgttgataacttccaaaacggtagattggaattgagctgtgagttcaaaagactcagatgtattaggctcaacggttttgcggtggagttctagagtttgaactggtgaagtacgcttcaactcaatatcgaaagcagctttaccaaggttagttacagtgtactttccaggatgttcatcgcttccttcaacattttgactcaaaacagtgacagcagttcttgggcttaaagaaaagttttccagaacgactatttcaacttctgtttcgtctgagtctagaagttcttcaatgttgttttccaagtcgtcaataacgagaccaccttcagcagaaaatgatacctcctggtcgtaactgttgttgctcactttcaacacgctttgttcaagactgtcctcaatggctatctcagtggtttggtctggctggaccacaaaccattgtggagcatcatcttggttattgaggtgtactacctcaacaaaaagatcagcttttccgtgattggtgacgacatactttttgtcttcttccttatctcctccgctctgagacaatgctaagatcgtagttctaggaggtaaaacgaaatgatctagtttcgatgtctccgaaacagagaaagtggtttcatattcgtatgtttcataatatgtcgtcgtctccactgaatattcttgggtgctctcttgcatggatcgtggtcggtatgccatcttgaagccggtgtttgctgtgtt

SEQ ID NO: 3593 - DNA, 2069 bp, Diabrotica virgifera
attcagagcatttatattttacttaaatacttaaaatccccagaacattcttcttgcaccaggacggcgacgtagtggtcttaccatatatctgaatccataaactacttcacctccttcaactgagaagatagcgtagtcagtctcgttttcgttgacgattttcaaagatgatccatttaagccttcaagtaaaagcacttgggtttcgttgggttggacgacttgagtgcggaccacctcttggtttcttccattaatatgaacgatctgagcggtaaaagcatgagttccatgattaacaacggtgtatctatcatgaacaatgggtttacgtagcatagcgggacgcataaccactcttggtctgcgcattggtctacattgtccaacttgaggtctattttgttgagctggatggtgctgttgttgaccttgatggtgctgttgttgaccttgatggtgctgttgttgagctggatggtgctgttgttgagctgggtggtgctgttgttgagctggatgatgaccaccttgggctggacgatggccaccttgagcaggatgtccaccttgaccaggaagatggcctggtcgtatcattggcctacaagctggacgacggaatggacgacgtcctgggcctgttgggctacctgctggtttacaaggacgggctactgctggtttacatgctggtctacgtccaggatggtattgaggtctacgaaccataacatgttgaggtttgcgatgtccagcagggtacatgggtcttcgtctatatctaccaacttgatgcatgacaactacagatgatgcaggtgctagatggaaattattcaccagcattactgaatgttcatcagatactagttgtttgatttttctttcaatgtctcgaactactcttccaccggtggctgtgataatagcgacttctgtgtaatgtctgttcaatatatttaatagagctactccagcgtctttgttatgctcaattactacagtttcatttggtttaactaccctgtattgatcattggcacggtcatcgctgtcggtgtatgtcacctcaacttctatttcagattgtccattgttggtaacagtgaagttatgatgttcggaaagggtaacatcattaggatcatacatcaaagcagtgacggacgaacgtgagactaaatggaagctctccaaagttgttagaatatgagtaacaacagtttctttttgctcatcaatatttctaactaaatcctcaagatcttcaataacatctcctccttcagctctaaaaactgcatcttcagtgtggcttgtgttgataacttccaaaacggtagattggaattgagctgtgagttcaaaagactcagatgtattaggctcaacggttttgcggtggagttctagagtttgaactggtgaagtacgcttcaactcaatatcgaaagcagctttaccaaggttagttacagtgtactttccaggatgttcatcgcttccttcaacattttgactcaaaacagtgacagcagttcttgggcttaaagaaaagttttccagaacgactatttcaacttctgtttcgtctgagtctagaagttcttcaatgttgttttccaagtcgtcaataacgagaccaccttcagcagaaaatgatacctcctggtcgtaactgttgttgctcactttcaacacactttgttcaagattgtcctcaatagcaatctcactggtttggtctggctggaccacaaaccattgtggagcatcatcttggttattgaggtgtactacctcaacaaaaagatcagcttttccgtgattggtgacgacatactttttgtcttcttccttatctccgccgctctgagacaatgctaagatcgtagttctaggaggtaaaacgaaatgatctagtttcgatgtctccgagacagagaaagtggtttcatattcgtatgtttcatatgtcgtcgtctccactgaatattcttgggtgctaacttcctgagattgtacgcggagcatcttgaaggcggtgttttctgggtttaatc

SEQ ID NO: 3594 - DNA, 2126 bp, Diabrotica virgifera
attcagagcatttatattttacttaaatacttaaaatccccagaacattcttcttgcaccaggacggcgacgtagtggtcttaccatatatctgaatccataaactacttcacctccttcaactgagaagatagcgtagtcagtctcgttttcgttgacgattttcaaagatgatccatttaagccttcaagtaaaagcacttgggtttcgttgggttggacgacttgagtgcggaccacctcttggtttcttccattaatatgaacgatctgagcggtaaaagcatgagttccatgattaacaacggtgtatctatcatgaacaatgggtttacgtagcatagcgggacgcataaccactcttggtctgcgcattggtctacattgtccaacttgaggtctattttgttgagctggatggtgctgttgttgaccttgatggtgctgttgttgagctggatggtgctgttgttgagctgggtggtgctgttgttgagctgggtggtgctgttgttgagctggatggtgctgttgttgagctggatggtgctgttgttgagctgggtggtgtccttgttgagctggatgatgtccaccttgggctggacgatggccaccttgagcaggatgtccaccttgaccaggatgataggctggtcgtatcattggcctacaagctggacgacggaatggacgacgtcctgggcctgttaggctacctactggtttacaaggacgggctactgctggtttacacgctggtctacgtccaggatggtattgaggtctacgaaccataacatgttgaggtttgcgatgtccagctgggtacatgggtcttcgggtatatctaccaacttgatgcatgacaactacggatgatgcaggtgctagatggaaattatttaccagcattactgaattttcatcagacactagttgtttgatttttctttcaatatctcgaactactcttccaccggtagctgtgataatagcgacttctgtgtaatttctgttcaatatatttaatagagctactccagcgtctttgttatgctcaattactacagtttcatttggtttaactaccctgtattgatcattggcacggtcatcgctgtcagtgtatgtaacctcaacttctatttcagattgtcctttgttggtaacagtgaagttatgatgttcggaaaggctaacatcattaggatcatacatcaaagcagtgacggatgaacgtgagaccaaatggaagctctccaaagttgttagaatatgagtaacaacagtttcttgttgctcatcaatatttctaactaaatcctcaagatcttcaataacatctcctccttcagctctaaaaactgcatcttcagtgtggcttgtgttgataacttccaaaacggtagattggaattgagctgtgagttcaaaagactcagaggtattaggctgaacggttttgcgatggagctctagagtttgaacgggtgaggtacgcttcaactcaatatcgaaagcagctttaccatggttagttactgtatactttccaggatgttcatcgcttccttcaacattttgactcaaaacagtgacagcagttcttgggcttaatgaaaagttttctagaacgactatttcaatttctgtttcgtctgagtctagaagttcttgaatgttgttttccaagtcgtcaataacgttaccaccttcagcagaaaatgatacttcctgttcgtaactgttgttgctcactttcaacacgctttgttcaagactgtcctcaatagctatctcagtggtttggtctggctggaccacaaaccattgtggagcatcatcttggttattgaggtgtactacctcaacaaaaagatcagcttttccgtgattggtgacgacatactttttgtcttcttccttatctccgccgctctgagacaatgctaagatcgtagttctagggggtaaaacgaaatgatctagtttcgatgtctccgagacagagaaagtggtttcatattcgtatgtttcatatgtcgtcgtctccactgaatattcttgggtgctatcttgctgggatagtaggcggtacatcttgaaggcggtgtttactgggt

SEQ ID NO: 3595 - DNA, 2541 bp, Diabrotica virgifera
  SmartBlast Evalue=4E-66; Info=Reticulon/nogo n=1 Tax=Aedes aegypti RepID=Q17NG9_AEDAE
ctgcaatcgggcaggcaggtagttttcctatatacgaacttcacttattcacttcatatatgaactaaatataggcgagcgtgtaattatatccttcaatttaaactcgtcattgtagtcagtatatagcgacaagtacatagcgaccttacatctctaattcaaggttgggtgcggattgttttggttcggtggtttattagtgcatgccattatgtcagaagattttaaaaaattagccaacgaaatagtccaggacgttgtggacggtgtacaggagattcaacacttacctgccaatgataataagtcaggttgttgtcagagatcgctgctctgtgttttattcagccctaatgcatggtttaatcctgagaaattggatcctaaagtggagagtctgatctactggcgtgatcccaagaaatctggtccagtctttggaggagtcctcgtagttctactcgctctcacatatttctctctaatcagtgtggtagcgtacgtttcactcatcgccctcggcgtcactttagcttttaggatttacaaaagtattgtacaagctgttcaaaagactggtgatggacatccattcaaagaatatctggaactcgatatatcgctaccgcaggaaaaagtcaaacagatcacagaagtggccattgcacatatcaatgccgctatcgtggaacttagaagattattcttggtcgaagatttggtagattccatcaaattcgcagtattgttatggactcttacctatgtgggagcgtggttcaacggaatgactctaattattctcgcttgggtcgccctcttcactcttccaaaagtttacgaagtgaataagactcaaatcgatgccaatttggagattgttcggacaaaattggctgaaattacttcaaagataaaggcagcaataccgatgggcaagaaagccgaagaaaagaaggaacaatagatttaacaacatctatcagactatattactatacatatattaatttattgttgtttctttattccattaaacgttcttatgtaatgtttctaaatataattagtgtacatatataagatgttattttaatgtttttttatttgaattttttgatgttatttatttcttgtaatacatagagtcgaagaagaatatagaatttaacataataaatgtgttgcagagaaataattattattaaatagagatatttgattttcgtttattgaattcactacactatattatcattatttattgatagttatcaattttgctcaaagtttatcagaatcgaatttgaagtattattttttgtgtttggcgtgtgagcaactttgaaaactgatgttcagtttgcaatatgttcttttgttttgttagttactactatctaatatgaatagaacataaccagccatgaattcttcactagtcgtatgaaatgtatcacaaccagggtaaagctgctatctaatacttattttgtatcaataaaataactttatacatactttgattataatagaaagtaaaagaatagtctgaaaagtcttgtgtatttggtgacaagcagaaataatcgagtcatagaagagtgagtgaataatatgatagtaataaatcaaaaaatacctactttgctactaaaaacctataaacttactgaagaattatcatttatgacatcaagataaatacggtaaaacaatgttgggccacttggttttgaagatattattgttacaccttgtataatgagatatgcaagaggctttatccaaggaatgtcgagatcgggaaattgtttacaagaaacaggttggttggtttaactgaaaggaaagaaaccaagagtgtggtgaggcctgcgttggtgaactctgacctgtacaaaggttcgggaaaagaggatgtaggtagctgaaatgaaaatataacggtggatgttgggcaagaacagaagagacaagatcagatccgacgtgattagggaaactactactttgtgactaggtctcaaaaaaggttcaagtacatgtgggatgaatgatacagctgttggaagttgaggaaaaaagaggtagaagaaaaccgagaatatggaaggactgtggggcagagggagaaaggtttaaacgaagaagacatgatgaacagtaatgaatagcgaagaaatataaggaacatcaacatctgaatagggaaaagttgatgaagaaaaagaagtcatgcaatgaaaaacaatttattagcgaattatttatataatagaataaaaaaatgccttttagcatttttaatgcataataaaatgtaagccaatatcaaggaaaaggcgaagaaaaacacacttcagagacttaagatttattcttatagtaccttcattggacctaggccatcattcggccccacgaaagtttgtttgtagtacatgtgaataggctcctatctcaccttatgttttctttcaatttattctacactatattttgaaagaatgtggtacttatagtccaagaggcagc

SEQ ID NO: 3596 - DNA, 2345 bp, Diabrotica virgifera
  SmartBlast Evalue=3E-63; Info=ER protein reticulon n=1 Tax= Aedes aegypti RepID=Q1HQZ3_AEDAE
ggctagctagatacatacctacctcatgtctctttttaactaactcttcttgtatgtgtacgctattttaaggctttatgcgcacattgatatcttgtagtgctattataggattttgtttatttttcattaaaaatgggtagaagacaaaataaataccaagatgtatccgaggatctaccggaaagaggacctgtggagagtctgatctactggcgtgatcccaagaaatctggtccagtctttggaggagtcctcgtagttctactcgctctcacatatttctctctaatcagtgtggtagcgtacgtttcactcatcgccctcggcgtcactttagcttttaggatttacaaaagtattgtacaagctgttcaaaagactggtgatggacatccattcaaagaatatctggaactcgatatatcgctaccgcaggaaaaagtcaaacagatcacagaagtggccattgcacatatcaatgccgctatcgtggaacttagaagattattcttggtcgaagatttggtagattccatcaaattcgcagtattgttatggactcttacctatgtgggagcgtggttcaacggaatgactctaattattctcgcttgggtcgccctcttcactcttccaaaagtttacgaagtgaataagactcaaatcgatgccaatttggagattgttcggacaaaattggctgaaattacttcaaagataaaggcagcaataccgatgggcaagaaagccgaagaaaagaaggaacaatagatttaacaacatctatcagactatattactatacatatattaatttattgttgtttctttattccattaaacgttcttatgtaatgtttctaaatataattagtgtacatatataagatgttattttaatgtttttttatttgaattttttgatgttatttatttcttgtaatacatagagtcgaagaagaatatagaatttaacataataaatgtgttgcagagaaataattattattaaatagagatatttgattttcgtttattgaattcactacactatattatcattatttattgatagttatcaattttgctcaaagtttatcagaatcgaatttgaagtattattttttgtgtttggcgtgtgagcaactttgaaaactgatgttcagtttgcaatatgttcttttgttttgttagttactactatctaatatgaatagaacataaccagccatgaattcttcactagtcgtatgaaatgtatcacaaccagggtaaagctgctatctaatacttattttgtatcaataaaataactttatacatactttgattataatagaaagtaaaagaatagtctgaaaagtcttgtgtatttggtgacaagcagaaataatcgagtcatagaagagtgagtgaataatatgatagtaataaatcaaaaaatacctactttgctactaaaaacctataaacttactgaagaattatcatttatgacatcaagataaatacggtaaaacaatgttgggccacttggttttgaagatattattgttacaccttgtataatgagatatgcaagaggctttatccaaggaatgtcgagatcgggaaattgtttacaagaaacaggttggttggtttaactgaaaggaaagaaaccaagagtgtggtgaggcctgcgttggtgaactctgacctgtacaaaggttcgggaaaagaggatgtaggtagctgaaatgaaaatataacggtggatgttgggcaagaacagaagagacaagatcagatccgacgtgattagggaaactactactttgtgactaggtctcaaaaaaggttcaagtacatgtgggatgaatgatacagctgttggaagttgaggaaaaaagaggtagaagaaaaccgagaatatggaaggactgtggggcagagggagaaaggtttaaacgaagaagacatgatgaacagtaatgaatagcgaagaaatataaggaacatcaacatctgaatagggaaaagttgatgaagaaaaagaagtcatgcaatgaaaaacaatttattagcgaattatttatataatagaataaaaaaatgccttttagcatttttaatgcataataaaatgtaagccaatatcaaggaaaaggcgaagaaaaacacacttcagagacttaagatttattcttatagtaccttcattggacctaggccatcattcggccccacgaaagtttgtttgtagtacatgtgaataggctcctatctcaccttatgttttctttcaatttattctacactatattttgaaagaatgtggtacttatagtccaagaggcagc

SEQ ID NO: 3597 - DNA, 1093 bp, Diabrotica virgifera
gtttatttactttgaggtgtgattttttgggattgttgacttcgtaggtacctacttgcaaaataatgaatacgggtttggttgacattaacattattttacctaccagatgcaactaacctaccaacctacttttttaatctttagatttttgagttgcgcgttgttgccagacttcaatttgcatattaaatgtattttcgttttttgatcaaacggatcaatttagaaaaaaatgttatcaagccttttttgctctacattgtgccttctatctatacctttaaggaacgcactattttcggggacaccttgtataatgagatatgcaagaggctttatccaaggaatgtcgagatcgggaaattgtttacaagaaacaggttggttggtttaactgaaaggaaagaaaccaagagtgtggtgaggcctgcgttggtgaactctgacctgtacaaaggttcgggaaaagaggatgtaggtagctgaaatgaaaatataacggtggatgttgggcaagaacagaagagacaagatcagatccgacgtgattagggaaactactactttgtgactaggtctcaaaaaaggttcaagtacatgtgggatgaatgatacagctgttggaagttgaggaaaaaagaggtagaagaaaaccgagaatatggaaggactgtggggcagagggagaaaggtttaaacgaagaagacatgatgaacagtaatgaatagcgaagaaatataaggaacatcaacatctgaatagggaaaagttgatgaagaaaaagaagtcatgcaatgaaaaacaatttattagcgaattatttatataatagaataaaaaaatgccttttagcatttttaatgcataataaaatgtaagccaatatcaaggaaaaggcgaagaaaaacacacttcagagacttaagatttattcttatagtaccttcattggacctaggccatcattcggccccacgaaagtttgtttgtagtacatgtgaataggctcctatctcaccttatgttttctttcaatttattctacactatattttgaaagaatgtggtacttatagtccaagaggcagc

SEQ ID NO: 3598 - DNA, 2046 bp, Diabrotica virgifera
  SmartBlast Evalue=2E-81; Info=Synaptobrevin-like protein YKT6 n= 1 Tax=Camponotus floridanus RepID=E2ATZ0_9HYME
atctatttttcaagtttttagtacgaaaaaaagtaatagaaatcaatagaaattttaatctctattttgaaattagctattaaattaaactaagcatcaaaaatccatcacgtttacataagtttacaaaacttagtcaatatcgatattattaacttaaaacctttttacttatcagtacaaaattgatatatgggttatattaaattttacagaaaaaaatacaattcatattaaatagatcaacttaaaaacactatagttttaattattactttgtttctcagtgtaactcaaatttcctacagttttgaacgaattcctcattacttttcttagtgtagtgtgaagtattacccctaccattctccgaccgatatttctgtcccctgaacatcaaaggagccgacaggtgctttcgcttcttgttggatggagtattctttggaaacaccaaggaacccaaacagctgattgctgttcggtcatcggcagtagccgacgacgggtatgttcggaacaatctctcgcgctcactccaacttgtactatttgtacataaggtttctctttgttacttcaaaatttgttcctcaaaacttctttctgatataacgttgatgatataactatctcataactgcgagcgatacatcacaccaaattttacctatatagttatgggcacgttattcctgagagttatcttaactttaactcaaacgttaaacttaacttcggtcatccatcacacgactgattgtcataaaatagctcactctttaccaaagattatacaggcaagaaattttctagtctgagtctacaaaaataggttactatgcgacgtaaagataaataagataatatttttatttaaaactgggtcaggggcggagcaaagggataaactctcgtaggtgggatacgtaaaactataaaatcttaatattttggcagttttaattacgtgaaagagaatgaaaaataagtaggtacacatcatattactgaatctgatacttactacacacgaacaatccttaacgagataaaaaacagatatatttcaccctgttctagatcattccataaacatatatttccacaactataagctcttttgcagatattacaccataacaatatatcaacttttaaaaataaatacaaacgttacatttaattatttggaatgagtatatacgcctatctatgtaaaactacaacaactattcgtttttctcgctgtcttgtagaatgccttggactgtatgcttaaaccttccgacttgctcactaagtcgtctagtttctcgcctcgttccaaaactgcttgtatggtattatgcaaaataatcttcgtttcatcaagatcttcttgaatttttgtaatagcatctgcttctctaggattttgatatttcgctaagtaggtatttaattgtggaaatggtacatctctctcctcaaggctgggccagttagctgcaggaattttggcaccaaattcgtctagtatttttgttattagtgtgtgagaaacccttgatgggtattcatgatcagttatgataacaccagctaagttatcagctcgtacatatacatgacacaaatattctccttctttaacactctgccttgaggctggtattgttctttccactatggttttgcaaaagaatgacatgaactcctgaattgaccctctttggaaaaagctgaagctttgaagttcgaaggctgatttcaaccaggttgcagttgttggtcctttgtataaaacactgagacaatatattttcaccattgtttattaatgtttttttgactaataccaaaatactatcagatcataacataacctttcaatatggtacacacctaaactacactttctcaaaaacttaacatgtataattaacaaatgtattcaatattgtaaaataattaggaaccactttcactaaaatctaatacattaaaaattatgtcaaaactggcactgacaaataatttaatcttcgaactttcaacttcaat

SEQ ID NO: 3599 - DNA, 1936 bp, Diabrotica virgifera
  SmartBlast Evalue=2E-81; Info=Synaptobrevin-like protein YKT6 n= 1 Tax=Camponotus floridanus RepID=E2ATZ0_9HYME
gccgcattttaataaattagtagtcaaatgaagagaacagtaaaccaaaattatactacttatcaacgaggaccctggaaataattaatagttcctatcgtcttcaattatatgggagtataatatacagttctatgtacattcgcaaatttaatttatcatgaccccttaaaatcctccataattttccgcccccaaaaaattccactacaatttctgcttagaaaaatttccctagccgctttcaaattaccccaaaattgtgggaaaatacaccaatctggcaaccctgtttctatctaccgtttgaaacaccaccgaacccgaacagctgtttgctgttcggtcatcaacggtggccgacgatggatatttacgtttacggtcatctacccatcctgtagcatgttccgaacaatctctcgcgctcactccaacttgtactatttctgcataactctttgttacgtcaaacttggttcctcaaatgttatttctaatataacgttgatgatataactatctcataactgcgagcgatacatcacaccaaattttacctatatagttatgggcacgttattcctgagagttatcttaactttaactcaaacgttaaacttaacttcggtcatccatcacacgactgattgtcataaaatagctcactctttaccaaagattatacaggcaagaaattttctagtctgagtctacaaaaataggttactatgcgacgtaaagataaataagataatatttttatttaaaactgggtcaggggcggagcaaagggataaactctcgtaggtgggatacgtaaaactataaaatcttaatattttggcagttttaattacgtgaaagagaatgaaaaataagtaggtacacatcatattactgaatctgatacttactacacacgaacaatccttaacgagataaaaaacagatatatttcaccctgttctagatcattccataaacatatatttccacaactataagctcttttgcagatattacaccataacaatatatcaacttttaaaaataaatacaaacgttacatttaattatttggaatgagtatatacgcctatctatgtaaaactacaacaactattcgtttttctcgctgtcttgtagaatgccttggactgtatgcttaaaccttccgacttgctcactaagtcgtctagtttctcgcctcgttccaaaactgcttgtatggtattatgcaaaataatcttcgtttcatcaagatcttcttgaatttttgtaatagcatctgcttctctaggattttgatatttcgctaagtaggtatttaattgtggaaatggtacatctctctcctcaaggctgggccagttagctgcaggaattttggcaccaaattcgtctagtatttttgttattagtgtgtgagaaacccttgatgggtattcatgatcagttatgataacaccagctaagttatcagctcgtacatatacatgacacaaatattctccttctttaacactctgccttgaggctggtattgttctttccactatggttttgcaaaagaatgacatgaactcctgaattgaccctctttggaaaaagctgaagctttgaagttcgaaggctgatttcaaccaggttgcagttgttggtcctttgtataaaacactgagacaatatattttcaccattgtttattaatgtttttttgactaataccaaaatactatcagatcataacataacctttcaatatggtacacacctaaactacactttctcaaaaacttaacatgtataattaacaaatgtattcaatattgtaaaataattaggaaccactttcactaaaatctaatacattaaaaattatgtcaaaactggcactgacaaataatttaatcttcgaactttcaacttcaat

SEQ ID NO: 3600 - DNA, 1717 bp, Diabrotica virgifera
  SmartBlast Evalue=1E-81; Info=Synaptobrevin-like protein YKT6 n= 1 Tax=Camponotus floridanus RepID=E2ATZ0_9HYME
tcccactacaatttctgcttagaaaaatttcaatagacgctttcaaattaacccaaaaatttgggaaaacacaccaatctggcaaccctgtttctatctaccgtttgaaagcaacttagaaacaccaaggaacccaaacagctgattgctgttcggtcatcggcagtagccgacgacgggtatgttcggaacaatctctcgcgctcactccaacttgtactatttgtacataaggtttctctttgttacttcaaaatttgttcctcaaaacttctttctgatataacgttgatgatataactatctcataactgcgagcgatacatcacaccaaattttacctatatagttatgggcacgttattcctgagagttatcttaactttaactcaaacgttaaacttaacttcggtcatccatcacacgactgattgtcataaaatagctcactctttaccaaagattatacaggcaagaaattttctagtctgagtctacaaaaataggttactatgcgacgtaaagataaataagataatatttttatttaaaactgggtcaggggcggagcaaagggataaactctcgtaggtgggatacgtaaaactataaaatcttaatattttggcagttttaattacgtgaaagagaatgaaaaataagtaggtacacatcatattactgaatctgatacttactacacacgaacaatccttaacgagataaaaaacagatatatttcaccctgttctagatcattccataaacatatatttccacaactataagctcttttgcagatattacaccataacaatatatcaacttttaaaaataaatacaaacgttacatttaattatttggaatgagtatatacgcctatctatgtaaaactacaacaactattcgtttttctcgctgtcttgtagaatgccttggactgtatgcttaaaccttccgacttgctcactaagtcgtctagtttctcgcctcgttccaaaactgcttgtatggtattatgcaaaataatcttcgtttcatcaagatcttcttgaatttttgtaatagcatctgcttctctaggattttgatatttcgctaagtaggtatttaattgtggaaatggtacatctctctcctcaaggctgggccagttagctgcaggaattttggcaccaaattcgtctagtatttttgttattagtgtgtgagaaacccttgatgggtattcatgatcagttatgataacaccagctaagttatcagctcgtacatatacatgacacaaatattctccttctttaacactctgccttgaggctggtattgttctttccactatggttttgcaaaagaatgacatgaactcctgaattgaccctctttggaaaaagctgaagctttgaagttcgaaggctgatttcaaccaggttgcagttgttggtcctttgtataaaacactgagacaatatattttcaccattgtttattaatgtttttttgactaataccaaaatactatcagatcataacataacctttcaatatggtacacacctaaactacactttctcaaaaacttaacatgtataattaacaaatgtattcaatattgtaaaataattaggaaccactttcactaaaatctaatacattaaaaattatgtcaaaactggcactgacaaataatttaatcttcgaactttcaacttcaat

SEQ ID NO: 3601 - DNA, 3490 bp, Diabrotica virgifera
taataatacaaaatataatgaaaatttcagtagaatatataaatttcaaagtaccttttccgtttggacacaattttataaacaattccaaattattaattttatatacagactgtttagtgtttgagtagatgtaccccaatgaaggaagcgctaaaatgagaaatgcgcacaaaagagaaattttatgacaatgggttgcattgccactgtagaatgcaatgatgtaaattttcgttagttttgaatatttgtaacgtttcgttactttaactattattacccggtactttatacttgttacgttcggtactttttgtttttaggtagtgttaaatatcaaatattcataattcatatccgatattgagcagtataaatttatcaccccgtatatcacatcagccaatttgttattatatttaaacatgtgcgggttatttaatttgtttaattgttgcaattcataaactatattttggcaatggacattaatttagctgactaagtaaaaacctttgttcttttgtcgtgtgggctatgacccaattcatattgccaacaagagagaatacattttagaatcaactcaaccaggccagatgtgcctttaacttcgttccttcgagtcacttaagggctcccggggtagagtgtggtagtgaattagacaatcgccttattgatatcttcgtctgaatctttgctaaacctgctcatggtgttcactttgacaagttataaaagataaattgtgattaatgtcactgaatgtttaattttgaatctgcgtgacaacgaaggacgcctgccgcactacttgacgacgtgtaatcaccaaaaattattacctctgaaattttgatttctataggattctattggtcaaaatctatatgaatgaaataatcaattttatgcatcaaaaattattattggatgttattttagttttaaacggaaggaaaatatgctatgaatactttatttttgttctatattctctatatgtttcataggattaaattgatctgtttgataccacgagatctatccacagccaataaccaatttccaggagcgtcatttgaaattttgatagggggggcaagcattatctatacaatacattatatatgcaaacataatacaaaattgatcaattttttgtaaatttcagtcattttcagggccaaatctgccccatatcaaatgacgcccctgccaatttctgtacctatgtattattacattgtaatatagtttgcatctcttgacattccagcgacgaatgctactcccattaaagctatatctggagtgtataaccgaagtatgcacagaccagttcttcttcttgtagtaacttctcctgtcggaggttggctatcatcacagctatccgtaccttattggcggctgctctggaaatatctactaagctaaccactctcttaggttactcagccagcaaattcttcttctacctatggatcttttacccttaattttaccttgtcacacagaccagtaagatcagctaataattgacatatgaaatcattgttagatatgagttatatctctgtatgttgtttgtatgatatgagttctataagagatctacagttgtcttcaggaagtcatatcttaaatgtgcaatattttttaaaactttcatccgatgttacctactgttaaggtttatgagaaatctgtttcctatctcagttgtgatgaaaattattttgttcaatttttattggtattttcgtttcattgtgagccttatattttttgaaagatctgatatattatgtttctaatgtagtatcttaacaaaatcagtactagaaaagggaagatggcatgttaaattcagcatttatagagcaccggatttctctgaacaggggataatgttttaacatgcacaaaagatcataactaaccattcctaaacttcaaaatttacgacatattatgttatgctgttagattcaaattaacagaaaatgattgaatcgaaacacaatacaacctgccatatccggacggttctgcggcgtccggatctaccgaaatctaccgagaaaggcagtcctgctgttggacaacgcactaaaagatggcgaaataatgtattatagaatctataaaacgtgtctatcgacgaaagttattgacggcgttgattactggaatgtatgaaggagaaaacgtctcagagactgtaaaagaagtagtggtcttgatatccggattttttcatatccggatcggtctgtcgccacattgatccggatatggcaggtttgactgtatttcgattctttaattttgtatggtatgtgtgccattcgaaggcaaaactgtaatagatacagagaagctgatgaaaaattttatgggaacaaatttgggttccaaaaaaaaaactagaaaaaacgcattgacttaaaaactatgataactagaacaatttcaataatcgatacatgacacatattttacttaactgatgaaaatacttaattatttgagtgaaagtttttgtccaaaaatgactgctatttagatccacaaacatttgtaaaagttaatacttttgtccctttattaggttaatatgtttgtggaaaataaaatagctcttcacgtcacatacttctttctaaagcttatcacgcaggggagctatactataatatatatttcatatgttacagaactattgctcactataataaatagtgagcctatataccggaacgataatatatatttttatacttacaatatattatataaaaaaagtatatctcgaatatgcctcgtcgagtaataatttatgtttatattaagacatatagtccgtccgctgtaacttttcccatgcggtgcgattcattttcaatcaaactgagtcaaaacacaaagtgaaacgtacgtcgatgtgtgtagtatatagtatacagtatacaaaatgtataatatacacatcgacgttcgtttcaatttgtgttttgacttagtttgattgaagatgagtcgtgccgcatgggaggagttacagctgacggactatatgaagagtggagatatataacggtgaaataaatacagaatcgagaaaaatgagtttttatcaggaaacggaactctgtacttaacggcggatgtaataatttatgtttatattaagacatatagtccgtccgctgtaacttttcccatgcggtgcgattcattttcaatcgaactgaatcaaaacacaaagtgaaacgtacgccgatgtgtgtagtatatagtatacagtatacaaaatgtataatatacacatcgacgttcgtttcaatttgtgttttggacttagtttgattgaggatgaatcgtgccgcatgggaggggttacagctgacggactatatgaagagtggagatatataacggtgaaataaatacagaatcgagaaaaatgagtttttat

SEQ ID NO: 3602 - DNA, 1288 bp, Diabrotica virgifera
taataatacaaaatataatgaaaatttcagtagaatatataaatttcaaagtaccttttccgtttggacacaattttataaacaattccaaattattaattttatatacagactgtttagtgtttgagtagatgtaccccaatgaaggaagcgctaaaatgagaaatgcgcacaaaagagaaattttatgacaatgggttgcattgccactgtagaatgcaatgatgtaaattttcgttagttttgaatatttgtaacgtttcgttactttaactattattacccggtactttatacttgttacgttcggtactttttgtttttaggtagtgttaaatatcaaatattcataattcatatccgatattgagcagtataaatttatcaccccgtatatcacatcagccaatttgttattatatttaaacatgtgcgggttatttaatttgtttaattgttgcaattcataaactatattttggcaatggacattaatttagctgactaagtaaaaacctttgttcttttgtcgtgtgggctatgacccaattcatattgccaacaagagagaacctacttttagaatcattcattagaatcaactcaaccaggccagatgtgcctttgacttcattccttcgagtaacttcaacgagtcaatatgtagcattataatacactaaaactaattcgcgtacgagccacatatcagtacgactacgttctcccggggttggttctactaccctgatgtcagtcgctatcaataaattatctaagtgctattggtgtttcaataacagacgatcatcctccactgaacccgaagattagacaggtagagtacatccactcgaagcaaacaaatatttcaaactaacaaagtgaaatattagattctttttctggtttctggaccatcgttctgtcaacttttcatttgtattaaaaaatagtaaatttatttttattacagttgtagtacttaataaagtaataaatagagtaatatcaaacaaaccgtaaaccgattctcttcggcagacctctttagtgtttacatttcaccccgtcaccgcctcggtttatcttccgaagtactaaaataccgacatggacaaggcaatcgacaaagtttttgtttgatttggtgttaccgaaatctgggtatttcgccaatttacttgttgttttgttctgtaccgaaagtaccgagtaacgagtatttctaccaacgacggatcggtactttgtgtattgggcaaatacccgttatagacggagaggc

SEQ ID NO: 3603 - DNA, 908 bp, Diabrotica virgifera
taattttatcaccccgtatatcacatgaaccaatttgttatcatatttaatcatgtgcgggctatttcatttgtttaattgttgcaattcataaacaatattttggccatggacattaatttagctaagtaaaaacctttgttatttttgtcgtgtgggctatgacccaattaatgttgccaacaagagagaatatacatttagaatcattcattagaatcaattcaaccaggccagatgtgcctttaattcattccttcgagtcacgtcataaattcaatatgtagcatcataacaggctaaatataattcgcgtacgagccacatatcagtagaactacgttctcccggggttggttctactaccctgatgtcagtcgctatcaataaattatctaagtgctattggtgtttcaataacagacgatcatcctccactgaacccgaagattagacaggtagagtacatccactcgaagcaaacaaatatttcaaactaacaaagtgaaatattagattctttttctggtttctggaccatcgttctgtcaacttttcatttgtattaaaaaatagtaaatttatttttattacagttgtagtacttaataaagtaataaatagagtaatatcaaacaaaccgtaaaccgattctcttcggcagacctctttagtgtttacatttcaccccgtcaccgcctcggtttatcttccgaagtactaaaataccgacatggacaaggcaatcgacaaagtttttgtttgatttggtgttaccgaaatctgggtatttcgccaatttacttgttgttttgttctgtaccgaaagtaccgagtaacgagtatttctaccaacgacggatcggtactttgtgtattgggcaaatacccgttatagacggagaggc

SEQ ID NO: 3604 - DNA, 2560 bp, Diabrotica virgifera
  SmartBlast Evalue=5E-36; Info=Endonuclease-reverse transcriptase n=1 Tax=Bombyx mori RepID=D7F170_BOMMO
gtatcaactttgcaaaaaaaaatttatagaacaaaatttactcagaattggtcagtttatcgacttccatagttgttttgattgaacaaattttcatcccctggatggggttgttttcacccccagggcaaaagccctgttcggcgtagatcttgacaaagggtgcaattactacctataataaatccaaatgtttaaggaaatcaaccttgattctcaaaattcccgagaaaatggctgttgattggactaatagaattagtattatattatttttgctgtgcgttcattcataaattatgtgtttggaaaacttatttcaataataaataaatgttacttattttaaaatttttataaaattgcattcttcttacattgagtgttttctgttaaggctggtgatcaacatggctatttgcaatttcgaaattgatacacggattaaccattcaggaaggtttcgcagccaagaaattcttctgcatcacacgcttcttcgtcctctagagacgtggccaagaaactcaaattttctcttctttataataaatccaatttcaggtgcaatgttcattgtttctatggtatgtttttaaaccaagagaagtaattcaaatttaccgcccgtaatgcttgtttgtaattgacccaacctgagtcaagcttactccactgttatgaaattttgacactaatggaatttatgaaattttgatactactggcatttcataggttaattaagttatatcagcgatttgttgttttctgcgttattcctttaatttttagatttttagtctactttcatactggtagcacgagataaaaaaagactagaagaggcacttttaacccttgcaagagaagcaaagacgagaggattaatataatcaatcagaataaaacaaaataccttataagcacaagagacaatgtaaacagaataacagaaataaagataggtgaacatacattccagagagtagattacttcaaatacctgggggtgatggtggacggcaaaaacggaaggagtatagagataaacgaaagaattaaagcaggtaatagagtatattggcaatatcaccgactactcaaggacaaaaacctgagcaaaaaaacaaaatcaaaaatatatacagcagcaattagaccagtgataacctatggagcagaagtaatgtgccttacgaaaaaagacgaagaaaagttaagaatatttgagagaaaaattttgagaagaatacatggcccagtaaagacagaaacaggggaatattgaaagctgatgaaccatgaaataataaatataactgaaggagaagatatagtaaaattcattgaagcacaaagactcagatggtttgggcacacacaaagaagaggggtagaagaactgatcaggaagataatgaactggagaccagtaacaaacagaccaagaggaagaccaaaaataagatgggaaggtcaactgctagacgatatatcaaagatggaaattgcaaactggagagaaaagattcaggaccggagtgagtggaagaagatagtagagcagacaaaaaaacatcacaacctatgaacgatgacctataggaaactgcggactaatccatcgcgtgaaatggattaaaagagctcatagtatttgagcgacctatactctaacaagagtgaacgtactaccaaatatatagtctactttcatataaaaacggttgtttttagaactctttagccacgtattagtacataaaatataatatgtatggattaccgtcgaatgccgatatgatcaatgaaaaaagatatattcggtgatttttctagtgacttcttgggtgtgaatctgtcttcttagtttactcctgatttaaaaacaaacccagcactgccttatttgtgactatccgtccaaaaatcgctgagtcaaaaatctttttaaggagttccttatttagtgtgcagatttccacatcgtatagtattatgtaaaacacaatacctaaccactctaattcttccaatcatagaaattccggtcctctgacttcgagtgttattcttgtacatttggcccctgtataatcgtgatattggaacattttgataatcaatgtttggtttttgtaagatttccagtagcttttcgtgcttaacattttcagagaccttagtatagtcaaatgtttatttacaatttttatttacaaattcaatcaaaattaataaatattcacttccgttagtcatcagtgttcatcatttttcaattaaagaagtctgcagcagtaagtttattttataattaataaggtgtggtacgaattttggtgttacgtttccgacaaagactcttgtcagaatattgacaagttgtatgaacagaactactttttggaacaaaaatgacttgttaatttctataattttgtatttgatcacgtgtgataaaaattagtgggaaaaattgtatctatcaggattgacaatcaaacatgacaataatgaagtatttttaagtttatgtgatcgttgtgtggtaaaag

SEQ ID NO: 3605 - DNA, 2433 bp, Diabrotica virgifera
  SmartBlast Evalue=1E-60; Info=Endonuclease-reverse transcriptase n=1 Tax=Bombyx mori RepID=D7F170_BOMMO
ctgatcatcaacggaggagaggagctcacgaagcgaatgcacaagttaatggttacaatttggaaggacgaaagcatgcccatagaatggaaaaacggacacatcgcaccaatctttaagaaaggaactccaactaagtgctgcaactatagaccaattatgctactaaatacaacgtataagatattgaccataattaattatattaattaattatattaattataagaaacccactaaatcaatacacagaaaaaattataggaccataccaacagggttttagaaaaggaagatcaacaatagatgcaatacacgtactgacacaaacaattgaaaaaagctatgaacatgacatagaattacacatactattcatcgacttccaacaggccttcgacggcatatacagacaacaattaataaaagaaatgaaaaaaatggagataccggcaaaattaataagactaactagaatgacaataaaagactcaacagcaaaagttaaaacaaatgagggcgatacaaatgacatcaaaatagaacttgaagtaagacaaggagacagtctgtcaacgacaaacgacactatttaatatcgctctagaaggagtaattagggacacagggctgaaaaagacaattattcaaagctcaacacagatcataggatatgcagatgaactgggactggtagcacgagataaaaaaagactagaagaggcacttttaaccctggtaagagaagcaaagacgagaggactaataatcaatcagaataaaacaaaatatcttataagcacacgagacaatgtaaacagaatagcagaaataaagataggtgaaaatacattccagagagtagattgcttcaaatacctgggggtgatggtggacggcaaaaacggaaggagtatagagataaacgacagaattaaagcaggtaatagagtatattggaaatatcaccaactactcaaggacaaaaacctgagcaaaaaaaaacaaaatcaaaaatatacacagcagcaatcagatcagtgatagcctatggagcagaagtaatgtgccttacgaaaaaagacgaagaaaagttaaaaataattgagagaaaaattataaggatacatggcccagtaaagacagaaacaggggaatattgaaagctgatgaaccatgaaataataagtataactgaaggagaagatatagtaaaattcattgaagcacaaagactcagatggtttgggcacacacaaagaagaggggtagaagaactgatcaggaagataatgaactggagaccagtaacaaacagaccaagaggaagaccaaaaataagatgggaaggtcaactgctagacgatatatcaaagatggaaattgcaaactggagagaaaagattcaggaccggagtgagtggaagaagatagtagagcagacaaaaaaacatcacaacctatgaacgatgacctataggaaactgcggactaatccatcgcgtgaaatggattaaaagagctcatagtatttgagcgacctatactctaacaagagtgaacgtactaccaaatatatagtctactttcatataaaaacggttgtttttagaactctttagccacgtattagtacataaaatataatatgtatggattaccgtcgaatgccgatatgatcaatgaaaaaagatatattcggtgatttttctagtgacttcttgggtgtgaatctgtcttcttagtttactcctgatttaaaaacaaacccagcactgccttatttgtgactatccgtccaaaaatcgctgagtcaaaaatctttttaaggagttccttatttagtgtgcagatttccacatcgtatagtattatgtaaaacacaatacctaaccactctaattcttccaatcatagaaattccggtcctctgacttcgagtgttattcttgtacatttggcccctgtataatcgtgatattggaacattttgataatcaatgtttggtttttgtaagatttccagtagcttttcgtgcttaacattttcagagaccttagtatagtcaaatgtttatttacaatttttatttacaaattcaatcaaaattaataaatattcacttccgttagtcatcagtgttcatcatttttcaattaaagaagtctgcagcagtaagtttattttataattaataaggtgtggtacgaattttggtgttacgtttccgacaaagactcttgtcagaatattgacaagttgtatgaacagaactactttttggaacaaaaatgacttgttaatttctataattttgtatttgatcacgtgtgataaaaattagtgggaaaaattgtatctatcaggattgacaatcaaacatgacaataatgaagtatttttaagtttatgtgatcgttgtgtggtaaaag

SEQ ID NO: 3606 - DNA, 667 bp, Diabrotica virgifera
gtatcaactttgcaaaaaaaaatttatagaacaaaatttactcagaattggtcagtttatcgacttccatagttgttttgattgagaaaaaaatttcatcccctagatgttttcgcccccatggcaaaagcccgcttcggcgtagggtagattttgacaaaggttataaatactacctaaattcaaattttcaaggaaatcgaccttgtttctcaaaattccacgagaaagtggctgttgatttgactaatattgcgcagagtttttttaccaaaactgtaaacatttcgtccattttgtactttggttctcttttgaaatactcttggaaccaattagattttctttttattttaatgaatctccttagtatattatgtcttattcttaataatctcttatatcaaaaaagttagattaatgttcttataatatctagttcttggcttaatattgctagtattttatgtttaatatattcattgcgattttttaaataacgctacaacttttctacaaggaaactgcctaaatattggcaattataggttaaatttagtcgattttagtaattttaaacagtcttatcatggaaataaccgaaaggcatttccataatttcatttatatcttaccaagaaaacgtaatttcagaactgcatcctgg

SEQ ID NO: 3607 - DNA, 3757 bp, Diabrotica virgifera
  SmartBlast Evalue=1E-45; Info=Endonuclease-reverse transcriptase n=1 Tax=Bombyx mori RepID=D5LB38_BOMMO
tgccgaccgcagtgtgtttctctgcacagtcgcagtgatcggctgtgaaaagtctagctttggtaaattcaaagagatttttcagcgctgcctcttggactataaaggaatatattcatattaagacaaaaatactgactaaggacagacaggtcctcatatctacttattagaaagttaatccagcagttttgatcatgtagtatgtatggggcacgaagaatatatcattcgaaatagtgctacttagtaagactgcaacaatgctggaactaaaattgactaaagttgaaaactattttggctattagaagaaattgagggaactcagtaacgtatgcactccctttatgatttcaataatcaagtcagatgaattatgtactaaagtttggcagtacacgaaaacttggggcttgtgaaccttttcaaaataaacattacaatgacaaaataaatgaccataggcattttaagttggatgtaaaatggagtatcatattcgatctaaaatatgtggtaaaatagtggtacctgtcactaatgtattcagtattgtggtatattagatgtcgctacatatttaggaaaagatgtatccaggctccacaaatgtggtctagaagtaataatacactctctccaagatgaatcacaaatcaagttattaaaaaatattacattaaatattatagtgtaaaacacttttgacgcgtttcggcccaacatgagccatcatcagaaacaacatgtaacaacaaacctataatacatttttttctattctcatactgtaatacatccataattatgatttcactacctgtatcataatgaacttcattatgatacagatttttaaccaatagaatcgtgatatggcattcgcgataaaggtggcgcacgcgcagtgaccaatggctagtcaaatgcacaagctttgacagttctcaatatgtaaacaaactgtcaaactgacaaactactaaattattaaatttgaatatattttttgttgtaaatgatcatagaaaaaatcgtgtatacaacttacatttaattatcattatgaagctcgtactccatacgaaactcgccactaggcggctcgtttcgtatccctcatactcgcttcataatgaccaacattaaatgatcattgcataatatactattttgtaaaaacaagtgaaaatattggaagagacggcgcccacctcggtctaaactcttaccagacgggaaggagaaagaatcaggcggctcagtctagttaaaatacaccacaaacatttttttaattattctacttcacatgttaacatgtgcagatataattttaaaattgttatgtttagggtgtattttaactagacagcctagtgattctttctccttcccgtctggtaagtttttggactgaagtgggcgttgtctctcctaattctttccctttgctttaatcaaaaaatgtattgtaggtttgttgtaacctgttactcctgttttcatatattttctgacttgttttgtagtaaattcaactatctatttactacaaaacaagtcaaaacttacgtatgaaaacaggaggtgaccttaaaaaatgttttaaggtcttctaaaaaactcatgaaaaaacatataggaggtattgtcacatcactgatgatatatttctggtatatccagagaatgtctaaaaatatactttgaatgtcctaagaacattcgtggacattcatggaatgttccaataagacattcagggaatgtttaaaatgctgacagatgactttcctgggacatttaggggacgttcttgtgcttttgaggacattccaggaatgttttcaacgtcctgtgtgtacattctaggaacatacatggaatgtttggtgttattagggttgttgctgatgatggctcgttttagcatagatggcaaagtgttttaaacttgtaatgatttttaataaattgatatgtggttcagggccggagtacctcaggcggtaggatgtctgacttccatccaggtgaataagcctgaataaaatgagtaccttgggtaaaaccagaggtatttatagagcactggctctacttcttaccttccttgtatactgtaggccctagatatagcagactaccctgctataatcccaaaaccgcattaacggtataaaatttcttctttaagtaccgtgcccaaattttaggcgtgggtagctttcataacaacttgccgatatcgttctcgatctttgcccacattgcccattctcgaactccacattgcccttccaaggcttcgttaaaaattatttctgagtaaacgttaaaaaaagttagggataacgcacaaccctgtctgaaacctctttgaatgcaaattttgtctgtttctttgccgtctaccagaatagaagcttcttgattcaaatatagatgttgtaaagtctaagatctttatcatctattccaatcatttctagatattcaaacagcttatcatgttgaaccctatcaaacgccttctcaaaatctataaagcacacgtaatttggattctgtacttccgatgatcgttgaagtaatgttagcattgagaacaaagcttctcttgttctcaatccttctctaaaaccgaattgtttgtttcccattgtctcttcacatttctgcttgattctattaagaattatcttaagaggtagcttgagagagtggctcatgagactggttggtctaaagtctttacatgatgatgtattgggtatttttggaagtgggataaatgtagactccaaccatatttgtggcattattccagtttcatatatgtggttgtaaatgtttgttagttctgagacattgtcaaaatacaaataatggtactgaattaaacaaaaattttgttgcttagtaaaaaattcgtctaatgtataatacatgtctgaattgccgatataaatgagtcagattaaataaattattagaagaattttttactaagcaacaacatttttgtttaatttagtattattttgtattttgacaacgacacccgacttgggcgtcgaaacgttaataaaataatttttttgggaaaattgtggcttatttcccattgaaaatagttgattataaaaatgccacaaggaaatagcttcagaacaacattaagagacattgtcgtcatctagaagtttgagccagtctgatggtatttggccagggcctggagatttctcatttttgctttgtttgatggctttctctacttccgcttgtaaaatactaagaccagtattcgtatactttgtggtgttaagtggtggcctagtatccgaacggatccggtataaaaccggagacgattattaatttgtggttcatctgggagaaagtgtacaaatttatttgaaaagtttcaacgaagctccagttggtcgtgtggttacgagtagattatttaaatatatcagctaaattcaaacatacggctagagtactattttttatatgggtagcaattatttggctgttaatagattatgtataaaactgtaataaagtagttcttgcaacctgtaaatctttatattatttttcttttagaaaaaattaataattagctaaatattattaggaaaaaaattttgttgttgactttttcacacttttaaaaaattatttattgtttagaataatttatatttaatatttttttaatagagtataattcgaaaaa

SEQ ID NO: 3608 - DNA, 1340 bp, Diabrotica virgifera
ctaattatgctaaacgaaaccaattgtgtcgcaaattcctcggtggaatgcagtaggatgtggatacccatattgaaagaggaagtcaatagaaagaaaataccacaattagtaagtcaatagtcgagttagtacatattttatattttagtattacttatatatccatgtattattgatattatttataatttaaacaaaattatagtaaagtcagaatttggtattaattttgagagtaaattaaatgtaagaccaaatacttacgatgtcgggatagtatcacgaggtttttcctggttttccctcgtgatttactatgagatctctaacgcgagaattttaatgtcaccgttgcatgtggttgtctttttaaagacagatcacatgctatgatttttttgtgacggatattcttgagttggggttgatttcatgtaatcgaatgaactatctttcagtaaagtcgtcccaggaacgcaactcataaatattggcaatatcattttaaagtcttctactttaaaatgtatcatatgtatctgaattgccgatataaatgagtcagattaaataaattattagaagaattttttactaagcaacaacatttttgtttaatttagtattattttgtattttgacaacgacacccgacttgggcgtcgaaacgttaataaaataatttttttgggaaaattgtggcttatttcccattgaaaatagttgattataaaaatgccacaaggaaatagcttcagaacaacattaagagacattgtcgtcatctagaagtttgagccagtctgatggtatttggccagggcctggagatttctcatttttgctttgtttgatggctttctctacttccgcttgtaaaatactaagaccagtattcgtatactttgtggtgttaagtggtggcctagtatccgaacggatccggtataaaaccggagacgattattaatttgtggttcatctgggagaaagtgtacaaatttatttgaaaagtttcaacgaagctccagttggtcgtgtggttacgagtagattatttaaatatatcagctaaattcaaacatacggctagagtactattttttatatgggtagcaattatttggctgttaatagattatgtataaaactgtaataaagtagttcttgcaacctgtaaatctttatattatttttcttttagaaaaaattaataattagctaaatattattaggaaaaaaattttgttgttgactttttcacacttttaaaaaattatttattgtttagaataatttatatttaatatttttttaatagagtataattcgaaaaa

SEQ ID NO: 3609 - DNA, 528 bp, Diabrotica virgifera
ctaattatgctaaacgaaaccaattgtgtcgcaaattcctcggtggaatgcagtaggatgtggatacccatattgaaagaggaagtcaatagaaagaaaataccacaattagtaagtcaatagtcgagttagtacatattttatattttagtattacttatatatccatgtattattgatattatttataatttaaacaaaattatagtaaagtcagaatttggtattaattttgagagtaaattaaatgtaagaccaaatacttacgatgtcgggatagtatcacgaggtttttcctggttttccctcgtgatttactatgagatctctaacgcgagaattttaatgtcaccgttgcatgtggttgtctttttaaagacagatcgcatgctgtgagtttttttgtgacggatgttcttgagttggggttgatttcatgtggtcggatgaactatctttcagtggagtcgtcccgggaacgcaactcatgggtattggcaatatcattttgaagtcttcttctttggg

SEQ ID NO: 3610 - DNA, 2578 bp, Diabrotica virgifera
acccattaccattagattcataaaaagacaaaaaatggtaatttttgggttgtgatagtcttgcattgatggtacgaagtgtttgaactatttttattttaatttaatttagcaaaattagctcgttattaaaaaatttataaaattaaatttgaatgtttgacgtcaaattttacattttcaaaacgtagtttcacttcaagccgacagtggcgctggcgcgctagtggcaacgtgcttccggattcctgagggagttggatgtataacagtcaatagtatttggtttcactgtaataatagtgttagtaatcgttgattataagaaaccaagtttctgtagaagaacggctaagttaattcctactctagtgttatgtgggggcgcttttattaattactattgtcggagaagaataggttaaattaatcattgagaaaataattcctaatttaacactatatctttcttcagccaaattatttcacacaacaccacaaaaaaagaatgtgtgtactttgtacacgcgtaagaagttatacttgtttaccttttaataacattgcattttcataattaattttatttactacataccttgtttaccttttaataacataacctttatactacttttcctcttatcattttttgggctatgaccttgacaattgtccagtaaccagaaccaatatgattggccaatataattaaaagtgctaaaaatgttgctgagctatgaaaccaggtgtctcttttccgaacttgcacggccccaatagggcacacaaacaacatctaagtatttctttccataattcgtggcttgagtcattttgatgtaaaacgttcgagatacctatagcactctataagtaggctgtgaactctattagtcagggagcttgttacagtggtttaggcttcaaataagtctatcacagatcgaaaccatctccaacttcacagaaattcacattaattttacaacaaatgtgacaaataaaccaataattttaattccagcagcgccatatatgaattgaatcaacaactttttgtcatacttctttacgtctcgaaaactaaatatttgaaaatttttaatgagttatttatcaacgtttataccagaaattgtcaaatctcgaaactataacctacacttaacaaagttttgtggaagttataacttagccgttcatattaaatcatctaagatgaattgtatatagaagtaagttgtttaaattttatttttgcatattttgttaaatcccacactttaatacactttttggcgggaatagtttgtaaattaattagttgccaaaaatatagaggttgatcaatgctctggtttggtttgaactgtttacttcttctccgtttgttttgaaactgatatcttggagattaatgtggagtataattataattgcgaattaaagttctagcatctttcgctaactggaagatccagtttcagccatttaaatcgtgtttattgtgaattttggactttcctaatgtacagttacgatcattgaatagtttacaggcttacgtatctaggagccaatttttttaaatttcacctcgtttaaacgcaccttttacgttaaagtgacgttaccagtggtgtaactagaataggttgattaaaattaaaaaatcaaaataatataaatatattttacaaaatttaacaaaatggaaagtatacaaagaagttttttttgaggagtttgatatcgatttattttatacgcgaaatttttgacacgtattgactttttgaaatcttttgactttgatatttatcagatccgtacgacactgcaactttacagtattacaatataaaaattaaggtgtaaactattcagtgatcgtaactgtacatcgatcgatatggttgaggcaacatgttagttaaaaagcgtcatatgttttagtaaaccaataataaatcttgcagttcacaaggtttttcgtatcaaaatgttaatgaagacttcttagtttgacagatcgtccaatattccaatattctaaaagtaaaaattcagttcaactcttccaaaatcccaatagaaccatttttttaatacagcgtaattaacagtaaaataaatgaaaattattattaaaatctatttgtctcatcgatcttcaacactttcagctctataatatacataccttcaactcaaattagtaatgaagtacaaaatttcaacagacttgcactaaattgtcagtattaggtcgcttaaaattttggtatcctaatgatattagtatccccgcccactgatgtcattcctgagatgacaactgacatttttagtagcatatgatagttgacaagaaatatacgtgataacataatatgtgacctatgcgacattttatgatactttgcctgtttgtttaatatgcttttttttaatatacatgaaaatacgtgatttacatatcgttatttacattttagatatataatttacttatgtatatgcatttttaagtgcattcattgccaatactggctcaaattgattaattgaaaca

SEQ ID NO: 3611 - DNA, 1618 bp, Diabrotica virgifera
taattatcgatgcgtctacactgtctttttgaacaatattgaaagcagcgtgcaaaccaaattttggattgcattaatcttttcagcaaatgttaaacacctgttcacggacggaacgacacaggtttaaacgataataatattcaggtataggtttttcagatttccaaagacgagttctttaaagaacgcttgccgattagagggttaacaaagttttgtggaagttataacttagccgttcatattaaatcatctaagatgaattgtatatagaagtaagttgtttaaattttatttttgcatattttgttaaatcccacactttaatacactttttggcgggaatagtttgtaaattaattagttgccaaaaatatagaggttgatcaatgctctggtttggtttgaactgtttacttcttctccgtttgttttgaaactgatatcttggagattaatgtggagtataattataattgcgaattaaagttctagcatctttcgctaactggaagatccagtttcagccatttaaatcgtgtttattgtgaattttggactttcctaatgtacagttacgatcattgaatagtttacaggcttacgtatctaggagccaatttttttaaatttcacctcgtttaaacgcaccttttacgttaaagtgacgttaccagtggtgtaactagaataggttgattaaaattaaaaaatcaaaataatataaatatattttacaaaatttaacaaaatggaaagtatacaaagaagttttttttgaggagtttgatatcgatttattttatacgcgaaatttttgacacgtattgactttttgaaatcttttgactttgatatttatcagatccgtacgacactgcaactttacagtattacaatataaaaattaaggtgtaaactattcagtgatcgtaactgtacatcgatcgatatggttgaggcaacatgttagttaaaaagcgtcatatgttttagtaaaccaataataaatcttgcagttcacaaggtttttcgtatcaaaatgttaatgaagacttcttagtttgacagatcgtccaatattccaatattctaaaagtaaaaattcagttcaactcttccaaaatcccaatagaaccatttttttaatacagcgtaattaacagtaaaataaatgaaaattattattaaaatctatttgtctcatcgatcttcaacactttcagctctataatatacataccttcaactcaaattagtaatgaagtacaaaatttcaacagacttgcactaaattgtcagtattaggtcgcttaaaattttggtatcctaatgatattagtatccccgcccactgatgtcattcctgagatgacaactgacatttttagtagcatatgatagttgacaagaaatatacgtgataacataatatgtgacctatgcgacattttatgatactttgcctgtttgtttaatatgcttttttttaatatacatgaaaatacgtgatttacatatcgttatttacattttagatatataatttacttatgtatatgcatttttaagtgcattcattgccaatactggctcaaattgattaattgaaaca

SEQ ID NO: 3612 - DNA, 1381 bp, Diabrotica virgifera
acattttacataacataaaaaagaactatggcgaatgcttattgttgttcagttgagatataagaatatattatcccatttggctaaacttctccttcaattgtgcagtatgacaataaacaaaaattgacatctcacaactaacatcaaaaatacaccctattttaatacatcatattatataaattacacacaggttaaaaacattttttaaagtattattatacagtagagcgtcgataatccgaactaattggtacaggggtagttcggattatcaaattgttcggattatcgaacctatgttcaaaatacatacaaagctcataaacatagtacagttacgatcattgaatagtttacaggcttacgtatctaggagccaatttttttaaatttcacctcgtttaaacgcaccttttacgttaaagtgacgttaccagtggtgtaactagaataggttgattaaaattaaaaaatcaaaataatataaatatattttacaaaatttaacaaaatggaaagtatacaaagaagttttttttgaggagtttgatatcgatttattttatacgcgaaatttttgacacgtattgactttttgaaatcttttgactttgatatttatcagatccgtacgacactgcaactttacagtattacaatataaaaattaaggtgtaaactattcagtgatcgtaactgtacatcgatcgatatggttgaggcaacatgttagttaaaaagcgtcatatgttttagtaaaccaataataaatcttgcagttcacaaggtttttcgtatcaaaatgttaatgaagacttcttagtttgacagatcgtccaatattccaatattctaaaagtaaaaattcagttcaactcttccaaaatcccaatagaaccatttttttaatacagcgtaattaacagtaaaataaatgaaaattattattaaaatctatttgtctcatcgatcttcaacactttcagctctataatatacataccttcaactcaaattagtaatgaagtacaaaatttcaacagacttgcactaaattgtcagtattaggtcgcttaaaattttggtatcctaatgatattagtatccccgcccactgatgtcattcctgagatgacaactgacatttttagtagcatatgatagttgacaagaaatatacgtgataacataatatgtgacctatgcgacattttatgatactttgcctgtttgtttaatatgcttttttttaatatacatgaaaatacgtgatttacatatcgttatttacattttagatatataatttacttatgtatatgcatttttaagtgcattcattgccaatactggctcaaattgattaattgaaaca

SEQ ID NO: 3613 - DNA, 1910 bp, Diabrotica virgifera
  SmartBlast Evalue=0; Info=Methionine aminopeptidase 2 n=3 Tax= Aculeata RepID=E2A544_9HYME
cgttaacgtcacttttcttaatcggcgtgttttcgttttgtcttttttttgcaacagaaaaatggcggccttaaaaactgaaattaaagaagataaagagaatgaggaggaccaagaacgcattgacgatggtggagtagaaacagaaaatacggaaacttccaaaaagaagaaaaaaaagaaaagaaaaaagtacgctaatgatgaagatggaaaagtcgaagaaaacaataagcagatatcagcggaaaacggcgaagtggacggtgagggtgacggtgatggggaaaaaaagaaaaagaagagaaataggaagaagggtggtaaaccaaaacaaacagaccccccttctgtcgctatagccgacttgtttcccgataatgtctttcctataggagaaatacaagaatatggtacagataaagatgatcggactgccaaagaccgatttttgtctgaagaaaagcgtgcgctggatagaatgcataatgatatctataatgaagtgcgtcttgcggcagaagcccacagacagactcgccaacacatccagaagtggatcaaaccaggaatgactatgatagaaatatgtgaagaattggaaaatactgccaggaagctaattgctgaaaatggactgaaagctggacttgcctttcccactggatgttcaaaaaatcactgtgctgcccactatacccccaatgctggtgataagactgtatttgaatatgatgatgtggtgaagattgattttggaactcacattaatggaaggataattgattgtgcatttactcacacttttaatcccaagtatgataaattagttgaagctgtaagggatgctactaatactggtattagagcagcaggtatcgatgttcaactctgtgaaataggtgcacaaattcaagaagtaatggaatcatatgaagttgaattagatggaaaaacttaccaagtcaaatctataagaaacttgaacggccattccatatccccttacaggatacatgctgggaaaactgtaccaatagtaaaaggtggagaagcaactgtcatggaagagaatgaattttatgcaattgaaactttcggttctactggtagaggtgttgtacatgacgatatggaatgttctcattatatgaagaattttgatgtctcttatgtgccattaagattgcagtcttcaaaatctcttctaaacatcataaacaagaacttcggtacactggctttctgtaaaaggtggttggaccgtgctggagcaacgaaataccaaatggccttaaaggatttgtgtgacaagaacatcgttgatgactaccctccattgtgtgacatcaagggctgctacaccgctcagtttgagcacacaatcatgttgagaccgacctgcaaagaagttgtctccaggggggatgattattaggaagttaccaagaaaattttttatcgattgaaaattattgatgtcagttgtaaattacaaatttggtaaatacacttgcgatcatgaagggggggtcgctcgatgaattgttcaagttggatgtctcgaattttttaggcctgttgtccgatttgagtgatttttttggtatgttgtagccttgttctttggcagtatcgccataataatgttgttgctagacaggtgaattgtcattgtatgccgggtgtagcaatcgtactgtgtttgttcctcaaggttcgggacaccccgtggaatgttttggcatggataaggtattgaaattgaaactcgattgtagccttgggctttcttaacattttcttttttgatttgtttgtttatgttggataataaaaggggttgggtaccttaacaacgaaccatgttcttcatcaatacagggtgtttctgaataagtgcgacagac

SEQ ID NO: 3614 - DNA, 1787 bp, Diabrotica virgifera
  SmartBlast Evalue=0; Info=Methionine aminopeptidase 2 n=3 Tax= Aculeata RepID=E2A544_9HYME
cgttaacgtcacttttcttaatcggcgtgttttcgttttgtcttttttttgcaacagaaaaatggcggccttaaaaactgaaattaaagaagataaagagaatgaggaggaccaagaacgcattgacgatggtggagtagaaacagaaaatacggaaacttccaaaaagaagaaaaaaaagaaaagaaaaaagtacgctaatgatgaagatggaaaagtcgaagaaaacaataagcagatatcagcggaaaacggcgaagtggacggtgagggtgacggtgatggggaaaaaaagaaaaagaagagaaataggaagaagggtggtaaaccaaaacaaacagaccccccttctgtcgctatagccgacttgtttcccgataatgtctttcctataggagaaatacaagaatatggtacagataaagatgatcggactgccaaagaccgatttttgtctgaagaaaagcgtgcgctggatagaatgcataatgatatctataatgaagtgcgtcttgcggcagaagcccacagacagactcgccaacacatccagaagtggatcaaaccaggaatgactatgatagaaatatgtgaagaattggaaaatactgccaggaagctaattgctgaaaatggactgaaagctggacttgcctttcccactggatgttcaaaaaatcactgtgctgcccactatacccccaatgctggtgataagactgtatttgaatatgatgatgtggtgaagattgattttggaactcacattaatggaaggataattgattgtgcatttactcacacttttaatcccaagtatgataaattagttgaagctgtaagggatgctactaatactggtattagagcagcaggtatcgatgttcaactctgtgaaataggtgcacaaattcaagaagtaatggaatcatatgaagttgaattagatggaaaaacttaccaagtcaaatctataagaaacttgaacggccattccatatccccttacaggatacatgctgggaaaactgtaccaatagtaaaaggtggagaagcaactgtcatggaagagaatgaattttatgcaattgaaactttcggttctactggtagaggtgttgtacatgacgatatggaatgttctcattatatgaagaattttgatgtctcttatgtgccattaagattgcagtcttcaaaatctcttctaaacatcataaacaagaacttcggtacactggctttctgtaaaaggtggttggaccgtgctggagcaacgaaataccaaatggccttaaaggatttgtgtgacaagaacatcgttgatgactaccctccattgtgtgacatcaagggctgctacaccgctcagtttgagcacacaatcatgttgagaccgacctgcaaagaagttgtctccaggggggatgattattaggaagttaccaagaaaattttttatcgattgaaaattattgatgtcagttgtaaattacaaatttggtaaatacacttgcgatcatgaagggggggtcgctcgatgaattgttcaagttggatgtctcaaatcggacaacgggtttggaaagttcgagacatctagcttgaatgactcatcgagtgacccgctttttatgatcgtgagtgtatttttgttgtttttacttgatacagatgttgataattattgtctacaaggatttttattttgatttgttataagtggtttccgtgaattaactaattttgttatgtgttgacatggacattggaaataataaagattg

SEQ ID NO: 3615 - DNA, 1769 bp, Diabrotica virgifera
  SmartBlast Evalue=0; Info=Methionine aminopeptidase 2 n=3 Tax= Aculeata RepID=E2A544_9HYME
cgttaacgtcacttttcttaatcggcgtgttttcgttttgtcttttttttgcaacagaaaaatggcggccttaaaaactgaaattaaagaagataaagagaatgaggaggaccaagaacgcattgacgatggtggagtagaaacagaaaatacggaaacttccaaaaagaagaaaaaaaagaaaagaaaaaagtacgctaatgatgaagatggaaaagtcgaagaaaacaataagcagatatcagcggaaaacggcgaagtggacggtgagggtgacggtgatggggaaaaaaagaaaaagaagagaaataggaagaagggtggtaaaccaaaacaaacagaccccccttctgtcgctatagccgacttgtttcccgataatgtctttcctataggagaaatacaagaatatggtacagataaagatgatcggactgccaaagaccgatttttgtctgaagaaaagcgtgcgctggatagaatgcataatgatatctataatgaagtgcgtcttgcggcagaagcccacagacagactcgccaacacatccagaagtggatcaaaccaggaatgactatgatagaaatatgtgaagaattggaaaatactgccaggaagctaattgctgaaaatggactgaaagctggacttgcctttcccactggatgttcaaaaaatcactgtgctgcccactatacccccaatgctggtgataagactgtatttgaatatgatgatgtggtgaagattgattttggaactcacattaatggaaggataattgattgtgcatttactcacacttttaatcccaagtatgataaattagttgaagctgtaagggatgctactaatactggtattagagcagcaggtatcgatgttcaactctgtgaaataggtgcacaaattcaagaagtaatggaatcatatgaagttgaattagatggaaaaacttaccaagtcaaatctataagaaacttgaacggccattccatatccccttacaggatacatgctgggaaaactgtaccaatagtaaaaggtggagaagcaactgtcatggaagagaatgaattttatgcaattgaaactttcggttctactggtagaggtgttgtacatgacgatatggaatgttctcattatatgaagaattttgatgtctcttatgtgccattaagattgcagtcttcaaaatctcttctaaacatcataaacaagaacttcggtacactggctttctgtaaaaggtggttggaccgtgctggagcaacgaaataccaaatggccttaaaggatttgtgtgacaagaacatcgttgatgactaccctccattgtgtgacatcaagggctgctacaccgctcagtttgagcacacaatcatgttgagaccgacctgcaaagaagttgtctccaggggggatgattattaggaagttaccaagaaaattttttatcgattgaaaattattgatgtcagttgtaaattacaaatttggtaaatacacttgcgatcatgaaaggggggtcgctcgatgaattgttcaggttggatgtctcgaattttttagacctgttgtccgatttgagtgattttttagtatgttatagccttgttctttaacaatattgttatggcgatgttgctaaggaataaggctgtaacatgctggagaaatcactcaaatcggacagcgggtttagaaagttcgaggcatctaacttgaatggctcatcgagtgacccgctttttatgatcgtgag

SEQ ID NO: 3616 - DNA, 3063 bp, Diabrotica virgifera
  SmartBlast Evalue=1E-71; Info=Host cell factor C1 n=1 Tax=Aedes aegypti RepID=Q16XE7_AEDAE
tgagcggatgcaggttaggtgacttatggtttttagaaacagagacaatgacgtggatgaaaccacaagtttcaggcattactcctttacctagatcccttcatacatccacattaattggccataggatgtttatttttgggggatgggttcctacagtttctacagaagttaaatcatctcaagagtggaagtgcacaagtaccttagcatgcctcaatttggagacaatgagctgggacgacttaaatatccaaaaagagtctgaaatggatctaccttgtgccagagcaggacactgtgcagttggaattagtacacgactctacatttggtcgggtagagatgggtatagaaaagcctggaaaaatcaggtatgttgtaaagacttgtggtatctggatgtggataaacctcctgctcctagtcgtgtatctttagttaaagcaggaacacacaaccttgaagtcaattggactggagcattatcagttcaaacatacattttacagatacaaaatatgatttacctccaccagccgcagccaaagtcccagcaccaactatagcgcctgcggtcccatcattggtgacttcacccaagacaactgctcccattcaaaccaatgtacatactactcagcccactccaattgttaaaacgactgcaactcctaatcacattatttcaccccgaattatttcatctcttgctgcaaaagggccacaagtgaagattcaaggtacaactggaactattatcagacaaggcagtcctcaagtagcaggcaagcagttaatagtaaaacaaggaggtaatattattcaaaaaggaggagttgcgcagcaagttgtaaccttggttaaaactagtgcaggcatgacgttagcggccttgccaaaaggaggcaatattgttcaggcaaaatcaaatgttttacctcaagcgcccaaaaatactattgtaaaaattgtacctagtagcccggccaataaagttctaacaaccataaagacgataccataccaaatgaataaagcaactgggaaattagttcctttcaaagccacagggcaaatgcctacattaggcaatcagcaagttttggttgtgaattcaaatgcaggtttgaaaactatacaaactttaacaaatgcacaatctgtaaatttaaataatgtaaaaactacttctataaatgcccaaccaatcgtaactgcctcaaatttaaccagtttgcaaggaatgaagattgctggaaaacctattaccatatcaatgcccatgcaagttgttggatctcctaagacggttactctgtcaaaaaatacaaaacaggtaatgattggtgggaaaccagtcactgtacagatggcgacaggtggtaataaaacactgaccctggttcaacccaatcaatctgcagcagtaggcaagatcgtacgactaccaattaattcgacaataaatcactccaacagcggtgaacaaccaaaactaatggtaatttctcgtcccaaacaaccaaatgcaaatatagcttcgacttcctttgatagtccagccacaacagatgcagcacttgctgccatagctgcagaagctggtctgatagatcctgagcctgaaaaaggaggtgtagtaaaactagatggtggtgagcaaacaatagttcttccccaggggagcagtgcatccgatgtttctgcccaaatagaagttgcaacgggtctcataggaggaggttctattcttggattgaaaggaggctctagattgaataggccaccaaaatcttttaggtatcgcttaggattgtatggaggtggtaaagatggtgaagatgatgatacaaaaccttcaactacgacagctgaagctgattctacacaagctaccgccacagaactgtcagaaatgtcaactgctgaaaatgtaaaaatggactgggacccagacttaacacctaaagacactggagaaagcttagactctagagtaaaaccttactctgaaacaatatcagaagctgaagcaaaatcagatgaaataaaagaatctgaagacaaacctgaagctgatgtaggaacagatgttagcatgagattagaaggtgaagaaagaacaaataatgaagtcaaattagaagccgaagaaaggccagaaagcggagatagattggaaaataaggaaagagtgaaagttgaagtcaaattggatgctgaagaaagaacagacagtgaaaataaattggaagccgaggtaaaatcagaaaatggagacaatatggaagcagaggaacgactcagcaatgaagtcaaaatggaagcagaagaaagatcagagactgaagtcaaattgaaatctgacgttaccgagaagtcagatataaaattctcagaagaagatcaaacaaagttagacataaacgtaactgcaaagcaagggacaggaagcaatagtacatttaatatagtcgagaaaaattccaatgatacagtgaagatggaaacagatagtagacgagaacaatcagctgatccaaattatcacaattaccatagtcaaagtagtgacatcttgaaaacagaagatatgacccccaatgatgatcctttagctgcgttagcttctgctgctttggatcattcaaaagagttaaaaaagactgaaaataatgttcatggtcctgaacatcctgttaaagacacttggtatactgttcgcttcattaggggtaatagttgtgatgtacggagttattttttgttaaatgacgacaccgctgatctgacgttggacacgttgccttataccataaattatccttcaggatttagccttgaaccaggcacggcttacaagttcagagtcgctgctatcaactccttaggccgtagtgattggagtgaggtatcagcgtttaaaacttgtctaccaggttttccaggtgctccttctgcaatcaaaataacaaatcagttgatggcgcaaatctttcttgggaacctcctagtgccaaccaaggtgaaatattagaatattctgtttatttggctgtg

SEQ ID NO: 3617 - DNA, 1822 bp, Diabrotica virgifera
  SmartBlast Evalue=5E-72; Info=Host cell factor C1 n=1 Tax=Aedes aegypti RepID=Q16XE7_AEDAE
tgagcggatgcaggttaggtgacttatggtttttagaaacagagacaatgacgtggatgaaaccacaagtttcaggcattactcctttacctagatcccttcatacatccacattaattggccataggatgtttatttttgggggatgggttcctacagtttctacagaagttaaatcatctcaagagtggaagtgcacaagtaccttagcatgcctcaatttggagacaatgagctgggacgacttaaatatccaaaaagagtctgaaatggatctaccttgtgccagagcaggacactgtgcagttggaattagtacacgactctacatttggtcgggtagagatgggtatagaaaagcctggaaaaatcaggtatgttgtaaagacttgtggtatctggatgtggataaacctcctgctcctagtcgtgtatctttagttaaagcaggaacacacaaccttgaagtcaattggactggagcattatcagttcaaacatacattttacagatacaaaatatgatttacctccaccagccgcagccaaagtcccagcaccaactatagcgcctgcggtcccatcattggtgacttcacccaagacaactgctcccattcaaaccaatgtacatactactcagcccactccaattgttaaaacgactgcaactcctaatcacattatttcaccccgaattatttcatctcttgctgcaaaagggccacaagtgaagattcaaggtacaactggaactattatcagacaaggcagtcctcaagtagcaggcaagcagttaatagtaaaacaaggaggtaatattattcaaaaaggaggagttgcgcagcaagttgtaaccttggttaaaactagtgcaggcatgacgttagcggccttgccaaaaggaggcaatattgttcaggcaaaatcaaatgttttacctcaagcgcccaaaaatactattgtaaaaattgtacctagtagcccggccaataaagttctaacaaccataaagacgataccataccaaatgaataaagcaactgggaaattagttcctttcaaagccacagggcaaatgcctacattaggcaatcagcaagttttggttgtgaattcaaatgcaggtttgaaaactatacaaactttaacaaatgcacaatctgtaaatttaaataatgtaaaaactacttctataaatgcccaaccaatcgtaactgcctcaaatttaaccagtttgcaaggaatgaagattgctggaaaacctattaccatatcaatgcccatgcaagttgttggatctcctaagacggttactctgtcaaaaaatacaaaacaggtaatgattggtgggaaaccagtcactgtacagatggcgacaggtggtaataaaacactgaccctggttcaacccaatcaatctgcagcagtaggcaagatcgtacgactaccaattaattcgacaataaatcactccaacagcggtgaacaaccaaaactaatggtaatttctcgtcccaaacaaccaaatgcaaatatagcttcgacttcctttgatagtccagccacaacagatgcagcacttgctgccatagctgcagaagctggtctgatagatcctgcacctgagggaggcgtaggaaaattagatggatctgagggaaatgctacacaaacagtagttctttcgcagggaagcagtacatccaatgttgctgctcctgtgcaagtcttaggatctggttctattatgcagcaacttgggtttgaaagggggtgctagattccaaagaccacctaaaagctttaggtatcgtttagg

SEQ ID NO: 3618 - DNA, 410 bp, Diabrotica virgifera
  SmartBlast Evalue=7E-28; Info=Host cell factor n=1 Tax= Harpegnathos saltator RepID=E2BBL6_9HYME
agctactgctgccttggctagaaataattcccatgatcctgaagtgcctcttaaagacacttggtatactgtcggcttcattcgagggaatagttgtgatgtaaagagttatttcttgttaaatgaagacactgagaatctgaccttagacactttgccttctactgtaaattacccgcgggattcaatcttgaaccaggcacggcttacaagttcagagtcgctgctatcaactccttaggccgtagtgattggagtgaggtatcagcgtttaaaacttgtctaccaggttttccaggtgctccttctgcaatcaaaataacaaatcagttgatggcgcaaatctttcttgggaacctcctagtgccaaccaaggtgaaatattagaatattctgtttatttggctgtg

SEQ ID NO: 3619 - DNA, 2636 bp, Diabrotica virgifera
  SmartBlast Evalue=1E-139; Info=Dihydrolipoamide acetyltransferase component of pyruvate dehydrogenase n=1 Tax= Aedes aegypti RepID=Q17DA3_AEDAE
tacaatataatttatttaattaatcattttgatatttacatacataaaccatacaacaaattataacaaacgtatgagaatatttccgaaaacaatgaaacaaaaagaagttgatttgtaaacgtctaacgaccaactcaaccggccaactgactgatgaccgatccatgtgataaatgcagtaaacatgatacagcactttctttttcaaataatggataagaacaatgacaaaatgggtgaaccttactagaaatacaaaaaaagaacacgaagtcaaacaactattaagtcttaataataaataataaatatttttgaatattttgcacaactacgaatttcttttgttgttactcaactaaatcgacctttcagcgagttattctaacctaacttaataaaaaattgacgtatgacatgtgacagtcatatttgtttaatttgacgtattttgttctattaaacgtaagtcactaccagttataagtatggaatgataatataaaaacatttataaaatgttaacgatttcaaaattatttaaacgatttcttataatgtggtgtgtgataaataatacgaatatgtcgttgtctaatatgaaacttccaacttatggcgaacgataacagtccataacgctgataacagaataaagattatcttacgtaagcaccacatagtgtagagcagctgaaaatgtatgaaaactttctacacaacgttttagagcagttttcttcgctacattttcaggaactttcgttaaacgctaatacataagcgtcacctatcaacaaaatattgaacttacaactcttacaaatacataacttaaaagtttaaaatatctcgccaaaaagtcccctacagctgggcgaaaaactcttgttttgtctccgtgttctgggtgtgcgaatccactgtttcttcaccctgtccattggcagcttttcgtctgtatgagatgaactggttaggaactgtttagttcaacgggttgtcgcctccttagatgatcatcgccactggatcttcaaggttttctttgaaggcttgcagccatctagcgcctacagcgccatctaccgtgcggtggtcacaactcaaggtcacagacatgtactgtgcagatttgaagcctttttctgacaagggatcctcaatcaaccgactcgagctagttccgatggccaggatacagctctgtggtgggttgatgacagcacagaattggtcgacgcccatcatgcccaagttggatatgctgaaggtgcccccttggaattcttgtggttgaagctttccttctcttgctttggctgcaagagctttcatagctttgctgatctctacaacgccttttcgttctgcttcgaagatgatgggcgtgatcaagcctttgtcggtggatactgctacgctgacgtccacgtttctgtactgcctgattgtggattcgttccatgaagagttggcctctggaacctttaaactagcttgtgcaacagccttgatgataaaatcgttaacgctcaacttcacgttctgcttctctaacttcttgttatatttcgctctgatggccatcaagttatcgatgttgatatcaactgacaaataatagtggggaatggactgtttcgactggagcagcctcttggcgatggtggctctcattcctgtgactgggatgtctacgaagggagatgccgaagcaccagccgaaggcaaggctgctgccatgggatgtgctgctgaggcggcttctagggctgctagatcagaagtagttattgagccgaatagtccggtacctttaccttgcaatctgatattcctctgttcggccaacctctttgccatgggactgacatagaccctacctgtggaagatacatcagcaaccattgctggagcaggtggtgctgcagctactggagcggctggcgatggtgcaggagcactaggtgcagctgcctttggtggagctggagctgcagctccgtcatctttgaaatctttgaaagctgcaatatctgcttcgttttcgactatgatacacaccagtttacctataggaacatccttggtcccagctggtatgataattcttgctagataaccttcctcaggagtctcgaagcccatggtcgccttgtcagtctcgatttcagcgagtagatcgccctcattcagtttgtcgccctcctttttttcccaacttacaatagtacccagttccattgttggagaaagggctggcagtgtaactttggtatgacttggaagatcggcggcataatatctgacaaaattgtgttctgctttcacccatcgttgtaaaacttgtgaatgttcattgccaaataaagctctgtgataatgtcttcgtttgcagcactctatggaaacatttctcaaagtcttggatcggagagattttctaaaaatttctttggcaacatcatttcgtaatatgatcgttcggaacattttgaattttcgtgtttaattttgtactgttcttcagttatgtcttaagcttatggtgaatttgatgtgaattcgagggcgactcaccgatatccttctctaggtcatttaaaagacggtctttcacgaaattgaat

SEQ ID NO: 3620 - DNA, 2591 bp, Diabrotica virgifera
  SmartBlast Evalue=1E-131; Info=Dihydrolipoamide acetyltransferase component of pyruvate dehydrogenase n=1 Tax= Aedes aegypti RepID=Q17DA3_AEDAE
tacaatataatttatttaattaatcattttgatatttacatacataaaccatacaacaaattataacaaacgtatgagaatatttccgaaaacaatgaaacaaaaagaagttgatttgtaaacgtctaacgaccaactcaaccggccaactgactgatgaccgatccatgtgataaatgcagtaaacatgatacagcactttctttttcaaataatggataagaacaatgacaaaatgggtgaaccttactagaaatacaaaaaaagaacacgaagtcaaacaactattaagtcttaataataaataataaatatttttgaatattttgcacaactacgaatttcttttgttgttactcaactaaatcgacctttcagcgagttattctaacctaacttaataaaaaattgacgtatgacatgtgacagtcatatttgtttaatttgacgtattttgttctattaaacgtaagtcactaccagttataagtatggaatgataatataaaaacatttataaaatgttaacgatttcaaaattatttaaacgatttcttataatgtggtgtgtgataaataatacgaatatgtcgttgtctaatatgaaacttccaacttatggcgaacgataacagtccataacgctgataacagaataaagattatcttacgtaagcaccacatagtgtagagcagctgaaaatgtatgaaaactttctacacaacgttttagagcagttttcttcgctacattttcaggaactttcgttaaacgctaatacataagcgtcacctatcaacaaaatattgaacttacaactcttacaaatacataacttaaaagtttaaaatatctcgccaaaaagtcccctacagctgggcgaaaaactcttgttttgtctccgtgttctgggtgtgcgaatccactgtttcttcaccctgtccattggcagcttttcgtctgtatgagatgaactggttaggaactgtttagttcaacgggttgtcgcctccttagatgatcatcgccactggatcttcaaggttttctttgaaggcttgcagccatctagcgcctacagcgccatctaccgtgcggtggtcacaactcaaggtcacagacatgtactgtgcagatttgaagcctttttctgacaagggatcctcaatcaaccgactcgagctagttccgatggccaggatacagctctgtggtgggttgatgacagcacagaattggtcgacgcccatcatgcccaagttggatatgctgaaggtgcccccttggaattcttgtggttgaagctttccttctcttgctttggctgcaagagctttcatagctttgctgatctctacaacgccttttcgttctgcttcgaagatgatgggcgtgatcaagcctttgtcggtggatactgctacgctgacgtccacgtttctgtactgcctgattgtggattcgttccatgaagagttggcctctggaacctttaaactagcttgtgcaacagccttgatgataaaatcgttaacgctcaacttcacgttctgcttctctaacttcttgttatatttcgctctgatggccatcaagttatcgatgttgatatcaactgacaaataatagtggggaatggactgtttcgactggagcagcctcttggcgatggtggctctcattcctgtgactgggatgtctacgaagggagatgccgaagcaccagccgaaggcaaggctgctgccatgggatgtgctgctgaggcggcttctagggctgcttgcaatctgatattcctctgttcggccaacctctttgccatgggactgacatagaccctacctgtggaagatacatcagcaaccattgctggagcaggtggtgctgcagctactggagcggctggcgatggtgcaggagcactaggtgcagctgcctttggtggagctggagctgcagctccgtcatctttgaaatctttgaaagctgcaatatctgcttcgttttcgactatgatacacaccagtttacctataggaacatccttggtcccagctggtatgataattcttgctagataaccttcctcaggagtctcgaagcccatggtcgccttgtcagtctcgatttcagcgagtagatcgccctcattcagtttgtcgccctcctttttttcccaacttacaatagtacccagttccattgttggagaaagggctggcagtgtaactttggtatgacttggaagatcggcggcataatatctgacaaaattgtgttctgctttcacccatcgttgtaaaacttgtgaatgttcattgccaaataaagctctgtgataatgtcttcgtttgcagcactctatggaaacatttctcaaagtcttggatcggagagattttctaaaaatttctttggcaacatcatttcgtaatatgatcgttcggaacattttgaattttcgtgtttaattttgtactgttcttcagttatgtcttaagcttatggtgaatttgatgtgaattcgagggcgactcaccgatatccttctctaggtcatttaaaagacggtctttcacgaaattgaat

SEQ ID NO: 3621 - DNA, 2509 bp, Diabrotica virgifera
ggcctgggatgtggggctagatgggatacttagatttcgatatttttcagattctgttgaataaaaaattaagcacaagttttgcgactagcgcatatcgtgattattgatacaagttattcctattccaacaaaaaagaagaccccctatggaaaatgtccattatggtctgcttttcgagaaatcccgcctttactatttggcatttttcaatttacaattatcagatcacaataattttgagcttgacataggcttgttctaactggcggtcaaaccagtcagaaactatcagcgaacagtcgaccaacacgagtagaggggatagcactgatgacttgtgacgttccgccccttatagaatcaattattgatgggaagatattatttaactatgaaaatattatttaattattttcagaattattttctttcaatgtttattcaaatagaacttaaacccatctcagaatttttaaatgcttgatgacgtcacatttaaaacgtggcaacattggtttccccactttgacagccaatgcttagtagaggggtacgaaggattcagctgtgaacgtgagccttggattgccattgtttctcgagtgttcggtctgaatcgtagtgtgcggggtcattagactcaattattcacctctaattctcagttccaaattgattaaatattacaataaaagtatagtgaagttatccagcagcagtggatttgaagaattttagagcatactatatccaatgagttctaccccggtaaatacacattttattaagtattttattcagccattttggaagtccttgacatttgctaactaagtttcacatagtctattttcatggtttttatgttttattttcatggatcaaactcatctagagataattcaatattcgttgttaatttgtgcttccagttggaaaatagagctaatttaaactccattttttatattcctttcaagtctacagaactcctatcttttgaacgatgatcaaataagtatccatcgcttagtcttactatatttcatccttgtataatatatctatataccggtgtatatattataataaaatattctttcacagtaattatattttgtatttcaattggaaattacttgtgttatttgaccaaggtcatctgatagcaacctgataaaaggtcaagctgtctagtcattcaagtttttggacttaatgacctatttcttcttattcccataggaataaaaacacctcctcgtatctcttgcttcttttttttgacattggtagattggtagtaacaccacactgtgttttttttagcacctaccatgaaatcttaaagccaccctacaacaacaccaaggccagaccacacagagagaaacaatcaataggcgaccagcctggattatttccacattttctttttttgagtacctccagctgctttccaacagttttgagtaccttcagctgctttctaccagtcttcctctcctgtacctccagcaggacagctgctagcgagagttagcacccttgggtgctcattacatcaacttcaagattaggaaagagtggtttgtttgggaacatttactgtgctcttattaaagacagactggttttgtgatatttagtacattttttttttatagttcaattgcacacacatttttcctgctttatattttttataggtttttttttctttacaacataatatttaattgatagcgttccccaacactctgcaatctataaaggtataaatttctgagctcagatattttccctgataatagtagtcggtactcttatcttgattatttttaggctgtgttccacttttgtataattatttaaactcattccattattttagtatatgtttaattaaatttttaaaaattaacttcacatattagtcaaaattgtaattattaactttatttaacttgaacttattaactttacttaactttaacttattaactttatttaactttaactttaatttattaaattcatatgaacttctggattctaatccctcagattagtttttggtttcacttgttattattactattataaaccacgagttaggaaaaggatctgtgtatccactcgtaggtttatttattcaataaggcttgtgcctgtcccactcacagtgaggtatttatatgttatatatagtatcaggtagtatttaattaaggtgtacgtattataaacgtacaattattatttggtgagggttctactaacctagttgtaagttgtacttcctgtattagaggtacccgtagtcagtttttctaaccttataaagagtattcttagatcatagttgtatgatgattttgtaattgactttcactagtatcactttttcctgtcatgttagagttacacactagttacttgtcctaactcagagattgttaaaaagatctagtagttacattcaataaatatacatttattgtg

SEQ ID NO: 3622 - DNA, 1948 bp, Diabrotica virgifera
ggcctgggatgtggggctagatgggatacttagatttcgatatttttcagattctgttgaataaaaaattaagcacaagttttgcgactagcgcatatcgtgattattgatacaagttattcctattccaacaaaaaagaagaccccctatggaaaatgtccattatggtctgcttttcgagaaatcccgcctttactatttggcatttttcaatttacaattatcagatcacaataattttgagcttgacataggcttgttctaactggcggtcaaaccagtcagaaactatcagcgaacagtcgaccaacacgagtagaggggatagcactgatgacttgtgacgttccgccccttatagaatcaattattgatgggaagatattatttaactatgaaaatattatttaattattttcagaattattttctttcaatgtttattcaaatagaacttaaacccatctcagaatttttaaatgcttgatgacgtcacatttaaaacgtggcaacattggtttccccactttgacagccaatgcttagtagaggggtacgaaggattcagctgtgaacgtgagccttggattgccattgtttctcgagtgttcggtctgaatcgtagtgtgcggggtcattagactcaattattcacctctaattctcagttccaaattgattaaatattacaataaaagtatagtgaagttatccagcagcagtggatttgaagaattttagagcatactatatccaatgagttctaccccgcacctaccatgaaatcttaaagccaccctacaacaacaccaaggccagaccacacagagagaaacaatcaataggcgaccagcctggattatttccacattttctttttttgagtacctccagctgctttccaacagttttgagtaccttcagctgctttctaccagtcttcctctcctgtacctccagcaggacagctgctagcgagagttagcacccttgggtgctcattacatcaacttcaagattaggaaagagtggtttgtttgggaacatttactgtgctcttattaaagacagactggttttgtgatatttagtacattttttttttatagttcaattgcacacacatttttcctgctttatattttttataggtttttttttctttacaacataatatttaattgatagcgttccccaacactctgcaatctataaaggtataaatttctgagctcagatattttccctgataatagtagtcggtactcttatcttgattatttttaggctgtgttccacttttgtataattatttaaactcattccattattttagtatatgtttaattaaatttttaaaaattaacttcacatattagtcaaaattgtaattattaactttatttaacttgaacttattaactttacttaactttaacttattaactttatttaactttaactttaatttattaaattcatatgaacttctggattctaatccctcagattagtttttggtttcacttgttattattactattataaaccacgagttaggaaaaggatctgtgtatccactcgtaggtttatttattcaataaggcttgtgcctgtcccactcacagtgaggtatttatatgttatatatagtatcaggtagtatttaattaaggtgtacgtattataaacgtacaattattatttggtgagggttctactaacctagttgtaagttgtacttcctgtattagaggtacccgtagtcagtttttctaaccttataaagagtattcttagatcatagttgtatgatgattttgtaattgactttcactagtatcactttttcctgtcatgttagagttacacactagttacttgtcctaactcagagattgttaaaaagatctagtagttacattcaataaatatacatttattgtg

SEQ ID NO: 3623 - DNA, 744 bp, Diabrotica virgifera
ggcctgggatgtggggctagatgggatacttagatttcgatatttttcagattctgttgaataaaaaattaagcacaagttttgcgactagcgcatatcgtgattattgatacaagttattcctattccaacaaaaaagaagaccccctatggaaaatgtccattatggtctgcttttcgagaaatcccgcctttactatttggcatttttcaatttacaattatcagatcacaataattttgagcttgacataggcttgttctaactggcggtcaaaccagtcagaaactatcagcgaacagtcgaccaacacgagtagaggggatagcactgatgacttgtgacgttccgccccttatagaatcaattattgatgggaagatattatttaactatgaaaatattatttaattattttctttcaatggttattaaaatataacgtaacaccatcacagaattttaaatgcttgtgacgtcacattttaagtgtggcaacattggtttgcttgcgtttgacagcgtatcgatgggagaggggaattgaattgcccacggagatcgtcagccagctaacgagagggcattggctttctagaagtgtgtcggagtggcaggtcggtagcttgatattttacccacaatttcaagatccaaattataattaaagattgaatccatccagcattagggaatataaagttattagtgaatacgaagttgaagaatttgaatgcagattt

SEQ ID NO: 3624 - DNA, 1785 bp, Diabrotica virgifera
  SmartBlast Evalue=1E-168; Info=fumble isoform 1 n=1 Tax= Tribolium castaneum RepID=UPI0001C0B3A3
cacctacttaaacctctgttttttcagtttttctgtaatttactgcatatatgcgttcgcgataattagttttataggtgttgaacattcatataatctcaagtgattaaaggttattagactgtcatatctaaaacgtttgacgaaatccattccttcatcctaatctgatcatcatggttaaagttctttcgacatttttcaatggcgccacacagttgtaaaggttgtttaagagacgtaatggcagctaggatgtctaagaaaaacacggatccaccaatggaagttaacggtgtcgatgaagcccatacagtccacaatttgtcaatgccatggtttggtatggacataggtggctcgctatgcaagttagtgtattttgaacctaaggagcttccaggaaccagggaagaggcagcttcccaagtagagactctaatgaacattaggaggtaccttacaaagaattctgcatatggaaagactggtcatcgagacatgcatttacagatggataacgtaaaaatacgaggtatattaggcacattacattttattaggttcccaacgagtggaatgaaaaattttcttagtctggcgaaatacaaaggtatggcaaaactagtaaccacagtatccgccactggcggaggagcgtacaaatttgaagaagatttcaggcgggaagtgaatttaaagcttgccaaattcgacgaatttgactcactattagcaggattacattacatagatagaaataatccctccgagtgttattactgggcgaactcaacagatgaagaaaggtgtagtaaagtgaactacgatttttcaaggccttatcccttcctcattgtaaatataggatctggagttagcgttttagcagtatattcagaaacccaatataaacgtatttcaggtactagtataggaggaggtacattcttaggactttgttgtcttttaactggctgtaatacattcgaagaagcaataggattagctgctgaaggtgacaatcgaaacgtagacaaactcgttagggatatatacggaggtgactacgcaagattcggacttccaggagatttagtagctagtagctttggacaaatgaattcgagagaaaggcgcagcaacgtcaccaaacaggatctggctagagcgacgttggtaacgatcactaacaacatcggatctatagcgagaatgtgtgcgatacaggaaaaaattgaaagggtggtcttcatcggtaactttttaagagtaaatccaatagcaatgaaactattggcttatgctatggattactggtccgacggtacaatgaaggcactcttcttggaacacgaaggatattttggagcagtaggatgtcttctgcagttccacgaagaattgaaaagttaaataatgataaagtcatctgtgcacatatataattctatgcgaatccttaaattagtttctgtgagataacatgtatctctttcgcgaaaggaagttataaagggtaatgattttgtgagattgtcgaaagtatattccgtttactattttgtaacaggaatcttttttcaaacatcgattctttgatatattatcgataatcgaatactatcgatatgtagttgaatgacatgatgacgttggcagttaacattcgtcattatctcattatcgtaaaaatataaaaaaatttatcactgtacagatctcgaaagtgttatttattttataaatacatagttaatttctgagagtacatgagattacttg

SEQ ID NO: 3625 - DNA, 1709 bp, Diabrotica virgifera
  SmartBlast Evalue=1E-168; Info=fumble isoform 1 n=1 Tax= Tribolium castaneum RepID=UPI0001C0B3A3
attacatgttacacttcctttcgtgattgtagattatcattggataaaaacttttgatagctgcattttggatttctagctggcctacatttaaaacgtgtagaagtcaattctttcgacatttttcaatggcgccacacagttgtaaaggttgtttaagagacgtaatggcagctaggatgtctaagaaaaacacggatccaccaatggaagttaacggtgtcgatgaagcccatacagtccacaatttgtcaatgccatggtttggtatggacataggtggctcgctatgcaagttagtgtattttgaacctaaggagcttccaggaaccagggaagaggcagcttcccaagtagagactctaatgaacattaggaggtaccttacaaagaattctgcatatggaaagactggtcatcgagacatgcatttacagatggataacgtaaaaatacgaggtatattaggcacattacattttattaggttcccaacgagtggaatgaaaaattttcttagtctggcgaaatacaaaggtatggcaaaactagtaaccacagtatccgccactggcggaggagcgtacaaatttgaagaagatttcaggcgggaagtgaatttaaagcttgccaaattcgacgaatttgactcactattagcaggattacattacatagatagaaataatccctccgagtgttattactgggcgaactcaacagatgaagaaaggtgtagtaaagtgaactacgatttttcaaggccttatcccttcctcattgtaaatataggatctggagttagcgttttagcagtatattcagaaacccaatataaacgtatttcaggtactagtataggaggaggtacattcttaggactttgttgtcttttaactggctgtaatacattcgaagaagcaataggattagctgctgaaggtgacaatcgaaacgtagacaaactcgttagggatatatacggaggtgactacgcaagattcggacttccaggagatttagtagctagtagctttggacaaatgaattcgagagaaaggcgcagcaacgtcaccaaacaggatctggctagagcgacgttggtaacgatcactaacaacatcggatctatagcgagaatgtgtgcgatacaggaaaaaattgaaagggtggtcttcatcggtaactttttaagagtaaatccaatagcaatgaaactattggcttatgctatggattactggtccgacggtacaatgaaggcactcttcttggaacacgaaggatattttggagcagtaggatgtcttctgcagttccacgaagaattgaaaagttaaataatgataaagtcatctgtgcacatatataattctatgcgaatccttaaattagtttctgtgagataacatgtatctctttcgcgaaaggaagttataaagggtaatgattttgtgagattgtcgaaagtatattccgtttactattttgtaacaggaatcttttttcaaacatcgattctttgatatattatcgataatcgaatactatcgatatgtagttgaatgacatgatgacgttggcagttaacattcgtcattatctcattatcgtaaaaatataaaaaaatttatcactgtacagatctcgaaagtgttatttattttataaatacatagttaatttctgagagtacatgagattacttg

SEQ ID NO: 3626 - DNA, 1553 bp, Diabrotica virgifera
  SmartBlast Evalue=1E-161; Info=Fumble n=2 Tax=Tribolium castaneum RepID=D6WCF9_TRICA
gcaatatatcgacacacctacgttttaagtgttattcattagtatttgtgctgttttgttattaagtggtgtgtactatgagtgaatcagatacaacaatgccatggtttggtatggacataggtggctcgctatgcaagttagtgtattttgaacctaaggagcttccaggaaccagggaagaggcagcttcccaagtagagactctaatgaacattaggaggtaccttacaaagaattctgcatatggaaagactggtcatcgagacatgcatttacagatggataacgtaaaaatacgaggtatattaggcacattacattttattaggttcccaacgagtggaatgaaaaattttcttagtctggcgaaatacaaaggtatggcaaaactagtaaccacagtatccgccactggcggaggagcgtacaaatttgaagaagatttcaggcgggaagtgaatttaaagcttgccaaattcgacgaatttgactcactattagcaggattacattacatagatagaaataatccctccgagtgttattactgggcgaactcaacagatgaagaaaggtgtagtaaagtgaactacgatttttcaaggccttatcccttcctcattgtaaatataggatctggagttagcgttttagcagtatattcagaaacccaatataaacgtatttcaggtactagtataggaggaggtacattcttaggactttgttgtcttttaactggctgtaatacattcgaagaagcaataggattagctgctgaaggtgacaatcgaaacgtagacaaactcgttagggatatatacggaggtgactacgcaagattcggacttccaggagatttagtagctagtagctttggacaaatgaattcgagagaaaggcgcagcaacgtcaccaaacaggatctggctagagcgacgttggtaacgatcactaacaacatcggatctatagcgagaatgtgtgcgatacaggaaaaaattgaaagggtggtcttcatcggtaactttttaagagtaaatccaatagcaatgaaactattggcttatgctatggattactggtccgacggtacaatgaaggcactcttcttggaacacgaaggatattttggagcagtaggatgtcttctgcagttccacgaagaattgaaaagttaaataatgataaagtcatctgtgcacatatataattctatgcgaatccttaaattagtttctgtgagataacatgtatctctttcgcgaaaggaagttataaagggtaatgattttgtgagattgtcgaaagtatattccgtttactattttgtaacaggaatcttttttcaaacatcgattctttgatatattatcgataatcgaatactatcgatatgtagttgaatgacatgatgacgttggcagttaacattcgtcattatctcattatcgtaaaaatataaaaaaatttatcactgtacagatctcgaaagtgttatttattttataaatacatagttaatttctgagagtacatgagattacttg

SEQ ID NO: 3627 - DNA, 2636 bp, Diabrotica virgifera
  SmartBlast Evalue=2E-35; Info=Endonuclease-reverse transcriptase n=1 Tax=Bombyx mori RepID=D5LB38_BOMMO
atttataattttgttattgtatacgtgaatttatgcaatggacaaaagtgtagagaaaattgttgagtgagaagatagagatatgtaatagtcaaagatccgaatctaggttgaccttcacccatgtgtttaccggatgaaacaatttttttattaaaggacaccgcacacatcttatgtaaagtataatgtcgctcaaatgaaatgaagtaaaatttacataaacagattcgtctcgaaataatagtgatttcgtatcgttgcgccaactctgaatcgtgcttaattagggcgtaaattgatataaataaatctaaaatcaaatgggagtgtacgtgattataagtgagagaaaagatcttgtaaatcgaaagttcgtaaatctttcttcaagaggctgaatcttatcgataataatagtacttacgtataatttggtacctatgtatggtacctatgtatgtttggtaacaaagtacatggtagtcagtaagcgcgaaatattaaatacacagcttttggttaaccaacaattaattgacagggtcgacagctacacataccttggtaccaacataaacagtcagtgggaccactcaagtgaaataaaacaacgcataggaaaagcgagatcagcgttcataatgatgaagtctcttttcagaagccacgatttacctcttgctaccaaaatctctatcatcagatgctatgtattttctacgttattatactgagtagaggcctggacactttccgaggcttctttgagaaaactcgaggcattcgagatgtggtgttacaggcgcattttgagaatttcgtgggtggatcgtgtgactaatgttgaggttctacgtagaataggcaaggaatgcgagattattaacacaatcaaagagcgcaaactagaatatcttggccatcttatgaggaatgaacagagatatggcttgttgcaactcattcttcaagggcaaggtatttggaaagagaggaccagggagaagaagaatatcttggcttcaaaacctgagaaagtggtttaatacatcgacaaccgactattcagaatagcagcaagcaaagttaggatagccatgctgatcgccaacatccggaacggataggcaccttaagaagaacttcgttgttcgtaagtctatctacccagtaaaccctcattattcttctataggtccacatttcaaaggcgttaagtcgtctcattgtctctacatttaacgtccatgattccattccctagtatagtacactgtatacgtaacattttgttaggcgtactttaagagcttaatctttgccacataggacctttttcattttcataaaattagaccgtgctttttcgtgtatactgtacctgttctcaactgctgcagtcttagtatggtttagtctttgaactacgttgacgtaaagttttcttgtggtatcacataccgcacgtcactgtttacgttcacagtgtattctttcgttattagtatggcagcaagctcatccagttgttttactttcaattgctttcaacattattttactatttttcagttaacaatactcaagtttttaattcagtttataaaggattttgtaagaaccttgaccattttttattatgcatgtattcataattttcttgaaaaaataaagtttatttgaagtatttgaagcagtattttattctacagcagtgtgaagaattattccgtagacaaatccgtagtctacgtcctaaaagatccacgtcagtagttaagggttataggtagttaaaataaactattaattaatatgcacacaaaagaaataaattaaaatgtatcatcaaatagcctacatataattataatactacagtagaactcctgttagcgaccacctctataaagtgaccatctgcgtataaggaccgattctgtgttcccggtcattagaaatggaaatcccctttcttttaaagctctttatacccaccattttcttaaacgaccgcgggcacccatcatcggaattttctatggtctgtttaaaccaggaggagtaattcaaatttaccacgtcgtaatgcttatttgtaattggtccaaccgcaggcaagtttactccactgttatgaagttttgacacttggcatttcataggttaattaagctatatcagcgattttttgtgttttctgctttattccttgcatttttggatttttagcctgcgtttatataaaaaacatttgcttttagaactccttagcgacgtatgagtataatataatatttatggattaccgtcgaaggccgatatgatcaaccaaaaaagaagatgtatttggtgacttttctagtgactttcttgggtgtgaatctatcttttagtttactcctcctgctttaaaaacaacccttagtacctgtcaattataaaaacaccctcaataaaggacaatacaattcgaccattgctaagaattataaacaatggacaaataaaatttaataaaaaaattttttgtcctggcaaattagtttaaaaagcccctatagggctacaaacatagaaacaaaacgttttcgctctgtaacaagagcatcatcagtgttacaagaacatgg

SEQ ID NO: 3628 - DNA, 1369 bp, Diabrotica virgifera
  SmartBlast Evalue=1E-35; Info=Endonuclease-reverse transcriptase n=1 Tax=Bombyx mori RepID=D5LB38_BOMMO
atttataattttgttattgtatacgtgaatttatgcaatggacaaaagtgtagagaaaattgttgagtgagaagatagagatatgtaatagtcaaagatccgaatctaggttgaccttcacccatgtgtttaccggatgaaacaatttttttattaaaggacaccgcacacatcttatgtaaagtataatgtcgctcaaatgaaatgaagtaaaatttacataaacagattcgtctcgaaataatagtgatttcgtatcgttgcgccaactctgaatcgtgcttaattagggcgtaaattgatataaataaatctaaaatcaaatgggagtgtacgtgattataagtgagagaaaagatcttgtaaatcgaaagttcgtaaatctttcttcaagaggctgaatcttatcgataataatagtacttacgtataatttggtacctatgtatggtacctatgtatgtttggtaacaaagtacatggtagtcagtaagcgcgaaatattaaatacacagcttttggttaaccaacaattaattgacagggtcgacagctacacataccttggtaccaacataaacagtcagtgggaccactcaagtgaaataaaacaacgcataggaaaagcgagatcagcgttcataatgatgaagtctcttttcagaagccacgatttacctcttgctaccaaaatctctatcatcagatgctatgtattttctacgttattatactgagtagaggcctggacactttccgaggcttctttgagaaaactcgaggcattcgagatgtggtgttacaggcgcattttgagaatttcgtgggtggatcgtgtgactaatgttgaggttctacgtagaataggcaaggaatgcgagattattaacacaatcaaagagcgcaaactagaatatcttggccatcttatgaggaatgaacagagatatggcttgttgcaactcattcttcaagggcaaggtatttggaaagagaggaccagggagaagaagaatatcttggcttcaaaacctgagaaagtggtttaatacatcgacaaccgactattcagaatagcagcaagcaaagttaggatagccatgctgatcgccaacatccggaacggataggcaccttaagaagaagaagaagaatttattaccagtttacttaaaaccttacattacaagagcaagtacacccaaaatgattcaaagaaataggttttattactcggggaatttgaatgaccaatttcaacaaaaggtcgacatattcagaaaatattggcattatacattttttttttgtaaaaatatgaaattaatgtaaaatatgccagatatacataaaatgtattttgcatata

SEQ ID NO: 3629 - DNA, 988 bp, Diabrotica virgifera
gaattattccgtagttgacgtaaaaacaaatacagtgatatgacaaattcatattgaaaacaaagtagaataggcaacggtatgacataccgcatgtcagagtctacgtcctaaaagatccacgtcagtagttaagggttataggtagttaaaataaactattaattaatatgcacacaaaagaaataaattaaaatgtatcatcaaatagcctacatataattataatactacagtagaactcctgttagcgaccacctctataaagtgaccatctgcgtataaggaccgattctgtgttcccggtcattagaaatggaaatcccctttcttttaaagctctttatacccaccattttcttaaacgaccgcgggcacccatcatcggaattttctatggtctgtttaaaccaggaggagtaattcaaatttaccacgtcgtaatgcttatttgtaattggtccaaccgcaggcaagtttactccactgttatgaagttttgacacttggcatttcataggttaattaagctatatcagcgattttttgtgttttctgctttattccttgcatttttggatttttagcctgcgtttatataaaaaacatttgcttttagaactccttagcgacgtatgagtataatataatatttatggattaccgtcgaaggccgatatgatcaaccaaaaaagaagatgtatttggtgacttttctagtgactttcttgggtgtgaatctatcttttagtttactcctcctgctttaaaaacaacccttagtacctgtcaattataaaaacaccctcaataaaggacaatacaattcgaccattgctaagaattataaacaatggacaaataaaatttaataaaaaaattttttgtcctggcaaattagtttaaaaagcccctatagggctacaaacatagaaacaaaacgttttcgctctgtaacaagagcatcatcagtgttacaagaacatgg

SEQ ID NO: 3630 - DNA, 1848 bp, Diabrotica virgifera
  SmartBlast Evalue=2E-23; Info=Endonuclease-reverse transcriptase n=1 Tax=Bombyx mori RepID=D7F164_BOMMO
cgcttaactaacctggcataactcatcttctaattaacatattttttagtgaaaataagatgaaattgatgaaatattgatgtgaaatttttaaataatcaagtggattcacataaattattgtgtatttttatatacagtaaacagattcaaactatactctaaaaaaataggttaaggattattaacttctaactgaaaaataaatatcctttaaaattttatgatttgaaaaataaatttacaacagtttagacagaaagtaaacagaaagtatttacttttttcgatttatcgtttcgactattacttatttttcagacctaagttaataatcctatcctaacctaacatctgacgaatacacagttttacagtgtaaaaacagtaaaaattttacaaatatgtcgaatgaatttattaaaaaaaagtaatgattttcgtgatatgttattcgtcttttaattactttatttttaattaccgtgttctacgatcttgtcgttgaagtcgctcacagccatatctagaatatcacatgttttcattaaatcaacataataccttctcttattaggttattcggaaatctttatcgacttataacgttattttagcactcgtctgttgaagcaatcccatttatgcaactgtctccccccactcccaagattcagatgtatcacacattattcttcagaggtaacatcgttgacgacatagttttgttctctgacaacctcaaggagatatgtacaatgaatgctacatgaacttcagttgatgtgtgccagtgtggatcttaaaataaacatctccaaaacaaaattcatgacaaacctagtacctagcggaaatatcgatattggagacaacgaagtagagctgacggaaaaatacatataccttggacacgaaataaagatcacaagagacaaccaaacatgcgaactacgaagaagaataaacttagcatgggcagcctatggaaaacttaaagacatctttaaaagcgatataccaatttctttaaaacgtaaaacatttgaccaatgtgtggtacctgtgatgacctatagcctagaggatgatggcctagaggaaaattgaaaggttattactgtatatatagcttcgtgaccgagttagaaatgaagacaagacgaagaacaggagttaccgatgtaatttcccaaattgtcaaactgaaatggaactggacggacatgtcgaccgaatcagtgatgaaagaataaccacatattaatacttaggaatatggttaacggatgatggaaagagaaaaaagaagttcaatttcaaaaaaacatacaactcaaacacttactatgcagctgtaactttaacatatgatcaacgcacaagaaaaatattatatagcagtgtttctacatcttcagatgtggtgtatggatccgtatccacactctgctctccaatgtgattgacataatatgtcataatataaggacatatacagggtgttagtaaataagtatgaaaaactttaagggccaattctacatgaaaaaataatgccagtttgctcataaacatatgtccgcaaaagcctcgcttccgagacacgaagtgttgaaaccctttacctcaaactgccaatttatccgctccaagaccagttgagccatgaaaatgaaacttcgtcagttccaggaggcagccattgcgcattccttgacacacaattaagaattctgcattcatcattctcgcgcatacgggtaattatttttaaattccacttgcctttttttcatatggtgcacttgcctttttaatacattatcaagaaatatccaatataac

SEQ ID NO: 3631 - DNA, 1583 bp, Diabrotica virgifera
  SmartBlast Evalue=2E-23; Info=Endonuclease-reverse transcriptase n=1 Tax=Bombyx mori RepID=D7F164_BOMMO
cgcttaactaacctggcataactcatcttctaattaacatattttttagtgaaaataagatgaaattgatgaaatattgatgtgaaatttttaaataatcaagtggattcacataaattattgtgtatttttatatacagtaaacagattcaaactatactctaaaaaaataggttaaggattattaacttctaactgaaaaataaatatcctttaaaattttatgatttgaaaaataaatttacaacagtttagacagaaagtaaacagaaagtatttacttttttcgatttatcgtttcgactattacttatttttcagacctaagttaataatcctatcctaacctaacatctgacgaatacacagttttacagtgtaaaaacagtaaaaattttacaaatatgtcgaatgaatttattaaaaaaaagtaatgattttcgtgatatgttattcgtcttttaattactttatttttaattaccgtgttctacgatcttgtcgttgaagtcgctcacagccatatctagaatatcacatgttttcattaaatcaacataataccttctcttattaggttattcggaaatctttatcgacttataacgttattttagcactcgtctgttgaagcaatcccatttatgcaactgtctccccccactcccaagattcagatgtatcacacattattcttcagaggtaacatcgttgacgacatagttttgttctctgacaacctcaaggagatatgtacaatgaatgctacatgaacttcagttgatgtgtgccagtgtggatcttaaaataaacatctccaaaacaaaattcatgacaaacctagtacctagcggaaatatcgatattggagacaacgaagtagagctgacggaaaaatacatataccttggacacgaaataaagatcacaagagacaaccaaacatgcgaactacgaagaagaataaacttagcatgggcagcctatggaaaacttaaagacatctttaaaagcgatataccaatttctttaaaacgtaaaacatttgaccaatgtgtggtacctgtgatgacctatagcctagaggatgatggcctagaggaaaattgaaaggttattactgtatatatagcttcgtgaccgagttagaaatgaagacaagacgaagaacaggagttaccgatgtaatttcccaaattgtcaaactgaaatggaactggacggacatgtcgaccgaatcagtgatgaaagaataaccacatattaatacttaggaatatggttaacggatgatggaaagagaaaaaagaagttcaatttcaaaaaaacatacaactcaaacacttactatgcagctgtaactttaacatatgatcaacgcacaagaaaaatattatatagcagtgtttctacatcttcagatgtggtgtatggatccgtatccacactctgctctccaatgtgattgacaatatgtcataatataaggacatatacagggtgttagcaaataagtatgaaaaacttcaagggccgattctacatgaaaaaataatgccagtctgctcataaacatatgtccg

SEQ ID NO: 3632 - DNA, 1414 bp, Diabrotica virgifera
  SmartBlast Evalue=5E-54; Info=Reverse transcriptase n=2 Tax= Ostrinia nubilalis RepID=A4KWG0_OSTNU
cgcttaactaacctggcataactcatcttctaattaacatattttttagtgaaaataagatgaaattgatgaaatattgatgtgaaatttttaaataatcaagtggattcacataaattattgtgtatttttatatacagtaaacagattcaaactatactctaaaaaaataggttaaggattattaacttctaactgaaaaataaatatcctttaaaattttatgatttgaaaaataaatttacaacagtttagacagaaagtaaacagaaagtatttacttttttcgatttatcgtttcgactattacttatttttcagacctaagttaataatcctatcctaacctaacatctgacgaatacacagttttacagtgtaaaaacagtaaaaattttacaaatatgtcgaatgaatttattaaaaaaaagtaatgattttcgtgatatgttattcgtcttttaattactttatttttaattaccgtgttctacgatcttgtcgttgaagtcgctcacagccatatctagaatatcacatgttttcattaaatcaacataataccttctcttattaggttattcggaaatctttatcgacttataacgttattttagcactcgtctgttgaagcaatcccatttatgcaactgtctccccccactcccaagattcagatgtatcacacattattcttcagaggtaacatcgttgacgacatagttttgttctctgacaacctcaaggagatatgtacaatgaatgctacatgaacttcagttgatgtgtgccagtgtggatcttaaaataaacatctccaaaacaaaattcatgacaaacctagtacctagcggaaatatcgatattggagacaacgaagtagagctgacggaaaaatacatataccttggacacgaaataaagatcacaagagacaaccaaacatgcgaactacgaagaagaataaacttagcatgggcagcctatggaaaacttaaagacatctttaaaagcgatataccaatttctttaaaacgtaaaacatttgaccaatgtgtgttgcctgtgatgacttatggtgccgaaactttgacattgacagctacaacttctaaaatgctgcaaatagctcagaggaaaatggaaaggtcaatgctgagtatatcacttcgtgaccgagttagaaatgaagacttaaaacgaagaacacgagttaccatggagttaccgatgtaatttaccgaattgccaccctgaaatggaactgggccggacacgtcgcccgaatcagtgatgagaggtggacgaagagattaattgagtggaggccgagattagacaaaagaagtagaggaagaccacctactcgttcgactgacgatctcaagaaaatgtcaagaaattgggaggcaaa

SEQ ID NO: 3633 - DNA, 2146 bp, Diabrotica virgifera
  SmartBlast Evalue=3E-24; Info=Endonuclease-reverse transcriptase n=1 Tax=Bombyx mori RepID=D5LB38_BOMMO
atttcaatacgaaaaaaaagaaagtaatggtagtcattaagagcgaaatatattacatacacggcttttggttaaccaacacccaattgacagagtggacagctacacataccttggtacctacataaacagtcaatgggaccactctagtgaaataaaacaacgcataggaaaagcgagatcagcattcataatgatgaagtctcgtttcagaagtcacatttaccacttggtaacaaaatttatattatagatcctatgtattttctagattattatactgagtagaagcctggactctttccgaagcttctttaagaaaactcaaggcattcgagatgtggtattacagtcgcattttaagaatttcgtggatgggttgtgtgactaatgttgaggtcttacgtagaatgggcaatgggcaagaaatgcgagattattaacacacattattataacaagagcgcaaagtagaatatcttggccatgttatgaggaatgaacagagattgccgctactcattcttcagggcaaggtattgggaagagaggaccagggagaagaagaataagcagagtgagacgaagaagaatatctcattttaaattcttcttcttcttcttcatgtgcctcgtccgttgcggacattggcacgttagtccaaaccattggcgtaagttttgaagccatgagtgtcttcttcttctgggtccacgtttgctctctattttactctgtattgtcagtggcagtatacgatatttatcatgtctcataatatgatcgaggtattcaggtttcagtttcttaattgtgaaagacatttcttatttttgttttcccctcggcgcaatacctctacgttggtagtgtgagtcgtccaggatattttgaggataggtcggtacacccacatttcgaattcctctagcttttgtattaatgtttccgttattgtccaggcctctgctccatacacaagaccggaaagatatcattttagcagccgtatttttagtgggatagatatgtcgaatttgatgaatatatttctcatgttgtcataaatgttgctctggccttttcaattctagatcgtatttcggttgtttgatcctatttcgagttgacgactgttccaaggtatacatatgagtgtaatgtgtagtgtgtgtgtattgtgtaaatgtcttgttacttagcaaagtcgaactcattgtttttgcaaagaaacgctaattgtatccgaacgtctgcggtccctccggtgagtaccgatcccacaaggagagaaactattttcatttattaatttttaataaatgaaaaattcaccaccaaggtgagattcgaactcacgacctttaggtccaaaggtaggcgttcttaccactgagccacagaggggttacaatcatgattgaaactcaaagtccaaaatgtttactggcagggggaggggccacttttctaaacaaaaccacgtgattcgtatttccatggttacaaaacttgttttcaatgttttgcagattttttaacatccggcaaacgcgcatctgtcgccatttaatacgtcactgctgccatctactaaatgacacgtgaactcagtttctcatctattaagtgatagccgaactaatttatcactagaacaatgccaacttgttagggttatatcaacaaaatccctagattgcagcttttaagtataatttttatctttaggtacagttaatttaaaaattatggcagtatgaataatgaacgtttgcttaaaataaagcttattgcatagttaatcatctatggtagttattttgtaccgaaaaattattacataaatccaatttttagggcaggatatgaagtaagttatgacatgggttcctttaagtccagttataaaaaaattactgctttctttggaaatttaactagatactattaaactagaaagtttacagttcacgtacatgcccacaagttgaaaattggttttgaaatagtgacggtaactaaaaattatataaattttaaaattgtgtcataccaccttaatctgtgacttttacaagttataagacaacagacgacgaatatacaaaacgaaagggactccaccatatgcagtaaagatag

SEQ ID NO: 3634 - DNA, 1518 bp, Diabrotica virgifera
  SmartBlast Evalue=2E-24; Info=Endonuclease-reverse transcriptase n=1 Tax=Bombyx mori RepID=D5LB38_BOMMO
atttcaatacgaaaaaaaagaaagtaatggtagtcattaagagcgaaatatattacatacacggcttttggttaaccaacacccaattgacagagtggacagctacacataccttggtacctacataaacagtcaatgggaccactctagtgaaataaaacaacgcataggaaaagcgagatcagcattcataatgatgaagtctcgtttcagaagtcacatttaccacttggtaacaaaatttatattatagatcctatgtattttctagattattatactgagtagaagcctggactctttccgaagcttctttaagaaaactcaaggcattcgagatgtggtattacagtcgcattttaagaatttcgtggatgggttgtgtgactaatgttgaggtcttacgtagaatgggcaatgggcaagaaatgcgagattattaacacacattattataacaagagcgcaaagtagaatatcttggccatgttatgaggaatgaacagagattgccgctactcattcttcagggcaaggtattgggaagagaggaccagggagaagaagaataagcagagtgagacgaagaagaatatctcattttaaattcttcttcttcttcttcatgtgcctcgtccgttgcggacattggcacgttagtccaaaccattggcgtaagttttgaagccatgagtgtcttcttcttctgggtccacgtttgctctctattttactctgtattgtcagtggcagtatacgatatttatcatgtctcataatatgatcgaggtattcaggtttcagtttcttaattgtgaaagacatttcttatttttgttttcccctcggcgcaatacctctacgttggtagtgtgagtcgtccaggatattttgaggataggtcggtacacccacatttcgaattcctctagcttttgtattaatgtttccgttattgtccaggcctctgctccatacacaagaccggaaagatatcattttagcagccgtatttttagtgggatagatatgtcgaatttgatgaatatatttctcatgttgtcataaatgttgctctggccttttcaattctagatcgtatttcggttgtttgatcctatttcgagttgacgactgttccaaggtatacatatgagtgtaatgtgtagtgtgtgtgtattgtgtaaatgtcttgttacttagcaaagtcgaagtcattgttttttaaggtgaccaactattttttgttcaaaaagagtacactttgcaagtattgaaaatatgttaatcccctagacctacagaaaaatttaaatcctaatactaaatctatttctgggcaaaaataattaatcctaatactaaatctgtttctgggccaaaaataattaatcctaatgtttatggtatgagtttttgctatctactaaataatagttttttctcacttaattcgtgcaattatttactttatataacgacacaatgaaaagtctctatttctctgattgaaatacg

SEQ ID NO: 3635 - DNA, 1171 bp, Diabrotica virgifera
gcggggcgaatgatgcgaggcaaatgtgcgaggcaaatggtgcgaggcaaatttactgttttagaagggtccatttgaaacaatttaatgctctaaagttcactagcctttctatccattcacaatgagtataaaattatacaaatgagtactttcagaataaaggtttgaaaagagtacagttaacgaaaaaagagtacaaaactccgtaaatgagtacagttggtcaccttattgtttttgcaaagaaacgctaattgttgtatccgaacttctgcggtccctccggtgagtaccgatcccacaaggacagaaactattttcatttattaatttttaagaaatgagaaattctccaccaaggtgagattcgaactcacgacctttaggtccaaaggtaggcgttcttaccatgccaccgagccacagaggggttacaatcatgattgaaactcaaagtccaaaatgtttactggcagggggaggggccacttttctaaacaaaaccacgtgattcgtatttccatggttacaaaacttgttttcaatgttttgcagattttttaacatccggcaaacgcgcatctgtcgccatttaatacgtcactgctgccatctactaaatgacacgtgaactcagtttctcatctattaagtgatagccgaactaatttatcactagaacaatgccaacttgttagggttatatcaacaaaatccctagattgcagcttttaagtataatttttatctttaggtacagttaatttaaaaattatggcagtatgaataatgaacgtttgcttaaaataaagcttattgcatagttaatcatctatggtagttattttgtaccgaaaaattattacataaatccaatttttagggcaggatatgaagtaagttatgacatgggttcctttaagtccagttataaaaaaattactgctttctttggaaatttaactagatactattaaactagaaagtttacagttcacgtacatgcccacaagttgaaaattggttttgaaatagtgacggtaactaaaaattatataaattttaaaattgtgtcataccaccttaatctgtgacttttacaagttataagacaacagacgacgaatatacaaaacgaaagggactccaccatatgcagtaaagatag

SEQ ID NO: 3636 - DNA, 2265 bp, Diabrotica virgifera
  SmartBlast Evalue=1E-126; Info=Molybdenum cofactor synthesis protein cinnamon n=1 Tax=Harpegnathos saltator RepID=E2CA55_ 9HYME
ccaatcgttggatcgaagcttacttgtactcggtggtactctggtcgtgaatcattattaactaacggtgagttcttaatttgaatcgtgggaaactcgtagtttgcacagtgttccatatagcgtaaagcagggatgatgtacagcagacaagttaccccgcaagatacgggattacctggtaatccaaagaacttcttttcttttccgtggtaagtcaatgtagcgaacgttgtgggtttccctggtttcatattaactctagcgaagtggatttttgctccaaaatcttctaccaagacctgtttaagaacatcgaattcgcccatagaaataccaccactagttacaatcacatcgttgttcataaatgcttttttctaagacagctttaacggaatccgggtcatctctggcgataccacaatccattgagtcgtagctgtactctttcaataaattcattaaagtaaatttattggcatccctaattttgccaggagccagttcttcttttggatcacctatttcgtttcctgtagatattaccccaaccaacggacgcttgaataccttcacttctgttttacccaacatcgctaagactcccacatgtgcagccttgatctgctcatatttgttcaagaccaaagaattgaccgctacatcgctgcctatctccctaatatcttgtcctagtttaggtgcaatctcaatgttgataacaagttccaggctgccgtctggagaagcttgaactatcgaagtatcttccacttgaactacagcatcggctccaggcggcaaaggtgcgcctgtggagattcgtatcgcttcccccgactttagtacttctccgatgggtgcgtcacctgccgctgctacttctttgatagctctcgttcctgctccgtccgcagctattacagcatagccgtcttttatggaagccctaaatggtggaaccggtgctaaagcatatacatcttctgccaaaattctatcaactgatcgatcgaaagcaacgacttctgtttcgtcggtaggggtacattgagttagcactatttgagttgcttctggtacttctatgaggggataaggagatttgcgacttcttgatgcaactttatcgatttttaccttgcttggggtaaatcctaaaccatcgcctccacctttggtttgtatgctttgatgcagcaaaacaacaagatctttttgatcggtcaatagcgctacagcatgtggtatacagcttttgacgaaaccaaagcattcggttgccccttttttgcttcctggcaaatttataatcactgttttacctctaataccacaaaccgccctagaaagcatagccatattcgtgatggctaaactattcgaaatcatagcatagctaagaccgggagcatctttttctataacttgtcgagttgcctctggagtaacgtctctattggcgaatccagtacctccagttgtcaaaataacgttacatttcttctcatcgctccagtttaatagaaccgatttgatgtcttctatttcatctggaacgatttgttgaatgacttgaactgatgagtaattttttagaacttcttctttcaaacttgggccagatgtgtcttttttagaatctctgtgacaagtgtcgctgacagtcagtatgccaaatgttagaggtgtcatagtttctattatagttgtatattgtatagagtatagtatagacagtatagatagagtattgttcatttctaggtaaaaaaaactcagtcagtttcggttgtgtcaatttcgtctgccatcggaacgatgttatgttatttaagaacagtggctctttcattgtttaaagtttaaaagaccattgttctaaaaataattttttaaaagacagttgaaaataaataaaggaataaaaggtgcctgttgtttgcgatagcccgataatggataatgatcgtcgctctgccctgccgccgtgtgccatgagtcatttttaccgtatagttcaaattacacaaatacccattatctctcaaatattatattatggtcgaagccaagttttatcaatgaaactcgatatttttaagacattccagaagcggctacagataaaatgttttaacataatacatacatttttattgttgaaatgtttgtctgatgaaaatcggtccgggttagccggacttccgggttatcgggggccgacttatcgaggttccactgtattccactgaaaaaggg

SEQ ID NO: 3637 - DNA, 1825 bp, Diabrotica virgifera
  SmartBlast Evalue=1E-126; Info=Molybdenum cofactor synthesis protein cinnamon n=1 Tax=Harpegnathos saltator RepID=E2CA55_ 9HYME
ccaatcgttggatcgaagcttacttgtactcggtggtactctggtcgtgaatcattattaactaacggtgagttcttaatttgaatcgtgggaaactcgtagtttgcacagtgttccatatagcgtaaagcagggatgatgtacagcagacaagttaccccgcaagatacgggattacctggtaatccaaagaacttcttttcttttccgtggtaagtcaatgtagcgaacgttgtgggtttccctggtttcatattaactctagcgaagtggatttttgctccaaaatcttctaccaagacctgtttaagaacatcgaattcgcccatagaaataccaccactagttacaatcacatcgttgttcataaatgcttttttctaagacagctttaacggaatccgggtcatctctggcgataccacaatccattgagtcgtagctgtactctttcaataaattcattaaagtaaatttattggcatccctaattttgccaggagccagttcttcttttggatcacctatttcgtttcctgtagatattaccccaaccaacggacgcttgaataccttcacttctgttttacccaacatcgctaagactcccacatgtgcagccttgatctgctcatatttgttcaagaccaaagaattgaccgctacatcgctgcctatctccctaatatcttgtcctagtttaggtgcaatctcaatgttgataacaagttccaggctgccgtctggagaagcttgaactatcgaagtatcttccacttgaactacagcatcggctccaggcggcaaaggtgcgcctgtggagattcgtatcgcttcccccgactttagtacttctccgatgggtgcgtcacctgccgctgctacttctttgatagctctcgttcctgctccgtccgcagctattacagcatagccgtcttttatggaagccctaaatggtggaaccggtgctaaagcatatacatcttctgccaaaattctatcaactgatcgatcgaaagcaacgacttctgtttcgtcggtaggggtacattgagttagcactatttgagttgcttctggtacttctatgaggggataaggagatttgcgacttcttgatgcaactttatcgatttttaccttgcttggggtaaatcctaaaccatcgcctccacctttggtttgtatgctttgatgcagcaaaacaacaagatctttttgatcggtcaatagcgctacagcatgtggtatacagcttttgacgaaaccaaagcattcggttgccccttttttgcttcctggcaaatttataatcactgttttacctctaataccacaaaccgccctagaaagcatagccatattcgtgatggctaaactattcgaaatcatagcatagctaagaccgggagcatctttttctataacttgtcgagttgcctctggagtaacgtctctattggcgaatccagtacctccagttgtcaaaataacgttacatttcttctcatcgctccagtttaatagaaccgatttgatgtcttctatttcatctggaacgatttgttgaatgacttgaactgatgagtaattttttagaacttcttctttcaaacttgggccagatgtgtcttttttagaatctctgtgacaagtgtcgctgacagtcagtatgccaaatgttagaggtgtcatagtttctattatactgctatagtttcttgattatcacaaccaaaaattaagaaaaccttgctttgatagactgttgtcaaacagttttgtttttgtatctcctggtgacgattttttgaaaaccagt

SEQ ID NO: 3638 - DNA, 639 bp, Diabrotica virgifera
tacaccctgtatatcatcatgggtgagggatgggtcacgaatatgaaaatacatcagaaggtgggtcgccagacataaaaggttgggaaccactggtatagagtatagtatagacagtatagatagagtattgttcatttctaggtaaaaaaaactcagtcagtttcggttgtgtcaatttcgtctgccatcggaacgatgttatgttatttaagaacagtggctctttcattgtttaaagtttaaaagaccattgttctaaaaataattttttaaaagacagttgaaaataaataaaggaataaaaggtgcctgttgtttgcgatagcccgataatggataatgatcgtcgctctgccctgccgccgtgtgccatgagtcatttttaccgtatagttcaaattacacaaatacccattatctctcaaatattatattatggtcgaagccaagttttatcaatgaaactcgatatttttaagacattccagaagcggctacagataaaatgttttaacataatacatacatttttattgttgaaatgtttgtctgatgaaaatcggtccgggttagccggacttccgggttatcgggggccgacttatcgaggttccactgtattccactgaaaaaggg

SEQ ID NO: 3639 - DNA, 2291 bp, Diabrotica virgifera
  SmartBlast Evalue=0; Info=Long-chain-fatty-acid--CoA ligase ACSBG2 n=1 Tax=Camponotus floridanus RepID=E2A0J9_9HYME
ctcgcaccccgagcacttccactctatcgtgtggtgtggtactcgcgagtgctggattcattccgtccgtctatcgtgtagaaaggtggctgctgatctaatgtggtagattttccggcaaaaacgactgacaaaatggcacaaccaacagtttatagtgaaggtccgaatcaaataattcctagtgaaaattacgtgtgtaccgatcccagtggaagcgtccgacttagaattcccgaaaatggtaaagctatcgaaactattaaacccatatcagtgccaggactcctcgaaaaaacagccagggaataccccgataagatagcgctcgctcaaaaagttaatgggaaatgggaaaccgtcaatttcaaacagtacctcgagaacgtccgcaccaccgcaaaagcctttttacaccttggtctgaagcccaatcactcagtttgcattctaggatttaacagccctgaatggttctactcggatcttgcagcaatatttgctggggggatagcggtaggagtctacaccacaaactccgcagaagcctgctacttctgcgccgagaacagcaaggcaaatataatagtggtagaagaccagaagcagttagataaaattctggaagttaggtccaggttaccagagctaaaggcgatagtacaatacagtggagaacccacacacccagatgtgataagttggaaaagactgatggaaataggtgctcaacaaaccgacgatgccttaaataatgccttgaaacaagttgctatcaacaggtgctgtactttggtctacacgtctggaactgtaggtaaccccaaaggcgtgatgctcagtcacgacaacctgacgtgggatgccttagtaataaccgagcgcatggggctcagtgcgggaggtgaagaggtcctcatcagttacctgcctctgagtcacgtagccgcccaagtcgtcgacatatacatcactataacagtagctgcggcagtttacttcgccgataaggatgccctgaagggtactctgatcaacaccatgcaggaagttcgtcctacaaagttcctgggagttccgagagtgtatgaaaagatcttcgagaagatgatgcagatcgcagctaagagcggagctctcaggaagttcatttccggctgggcgaagaaacaggctcttcaacatcacgtggatacgatgaatggactccagtccaattcgtggggttatatgttcgccaaaaacgtcctcttcagcaaagtcaaacaagccttgggtctatctcggtgtacattcttcgccagtgctgcagcaccattagcacctgatgtaaagaggtatttccacagcatcgatatacctgtgatggactgtttcggtatgtcagaagccagcggtggtcactgtcttggtatagagggcgccacgaacttcgacaccatcggtatgacgatgcccggaatgaagactaaactgttcaatgaagaaaacggccaaggcgagctgtgcatgtacggtagacatgtctttatgggatatctaaacgaaccgggaaaaactaccgaagctttagatgaagaaggttggttgcactctggagatctgggtagaatagatgacaaacagttggtttatatcacaggtagattaaaggagcttttggtaacagccggcggtgaaaacattcccccagttgccatcgagcagcaagtcaagtcagagctgccattcatcagcaacgccttcttaatcggcgacaaacgaaaatttctaaccattttggtaacccttaagactgaagtcgatcccgagaccgggatccccagagataacctcacatctgaagttaaatactggttgagatccatcggatgtcccgctgaaactgtcaaagaggttttggcagctggtccagacaaacgcgtgctagatgaactcctgaagggtatagagagagttaacaagcaagccacatccaatgctcaaactataaagaagatatcagtgcttcctgctgatttctccatacctacaggagaattaggtcctacaatgaaagtaaagcggagaattgttgaacaaaaatataaggatatcatcgaaagaatgtactcttaagaaacaattattgttgctgttgttattttgttattgttgttaaatatacttatatatttatattttaatataaaaggtgtacaaaaaactccatttttgaaattattatacttaactaatgaataagaattgttaaaatctcagatgcaccaattaaaatcctatttatcact

SEQ ID NO: 3640 - DNA, 2196 bp, Diabrotica virgifera
  SmartBlast Evalue=0; Info=Long-chain-fatty-acid--CoA ligase ACSBG2 n=1 Tax=Camponotus floridanus RepID=E2A0J9_9HYME
ctcgcaccccgagcacttccactctatcgtgtggtgtggtactcgcgagtgctggattcattccgtccgtctatcgtgtagaaaggtggctgctgatctaatgtggtagattttccggcaaaaacgactgacaaaatggcacaaccaacagtttatagtgaaggtccgaatcaaataattcctagtgaaaattacgtgtgtaccgatcccagtggaagcgtccgacttagaattcccgaaaatggtaaagctatcgaaactattaaacccatatcagtgccaggactcctcgaaaaaacagccagggaataccccgataagatagcgctcgctcaaaaagttaatgggaaatgggaaaccgtcaatttcaaacagtacctcgagaacgtccgcaccaccgcaaaagcctttttacaccttggtctgaagcccaatcactcagtttgcattctaggatttaacagccctgaatggttctactcggatcttgcagcaatatttgctggggggatagcggtaggagtctacaccacaaactccgcagaagcctgctacttctgcgccgagaacagcaaggcaaatataatagtggtagaagaccagaagcagttagataaaattctggaagttaggtccaggttaccagagctaaaggcgatagtacaatacagtggagaacccacacacccagatgtgataagttggaaaagactgatggaaataggtgctcaacaaaccgacgatgccttaaataatgccttgaaacaagttgctatcaacaggtgctgtactttggtctacacgtctggaactgtaggtaaccccaaaggcgtgatgctcagtcacgacaacctgacgtgggatgccttagtaataaccgagcgcatggggctcagtgcgggaggtgaagaggtcctcatcagttacctgcctctgagtcacgtagccgcccaagtcgtcgacatatacatcactataacagtagctgcggcagtttacttcgccgataaggatgccctgaagggtactctgatcaacaccatgcaggaagttcatttccggctgggcgaagaaacaggctcttcaacatcacgtggatacgatgaatggactccagtccaattcgtggggttatatgttcgccaaaaacgtcctcttcagcaaagtcaaacaagccttgggtctatctcggtgtacattcttcgccagtgctgcagcaccattagcacctgatgtaaagaggtatttccacagcatcgatatacctgtgatggactgtttcggtatgtcagaagccagcggtggtcactgtcttggtatagagggcgccacgaacttcgacaccatcggtatgacgatgcccggaatgaagactaaactgttcaatgaagaaaacggccaaggcgagctgtgcatgtacggtagacatgtctttatgggatatctaaacgaaccgggaaaaactaccgaagctttagatgaagaaggttggttgcactctggagatctgggtagaatagatgacaaacagttggtttatatcacaggtagattaaaggagcttttggtaacagccggcggtgaaaacattcccccagttgccatcgagcagcaagtcaagtcagagctgccattcatcagcaacgccttcttaatcggcgacaaacgaaaatttctaaccattttggtaacccttaagactgaagtcgatcccgagaccgggatccccagagataacctcacatctgaagttaaatactggttgagatccatcggatgtcccgctgaaactgtcaaagaggttttggcagctggtccagacaaacgcgtgctagatgaactcctgaagggtatagagagagttaacaagcaagccacatccaatgctcaaactataaagaagatatcagtgcttcctgctgatttctccatacctacaggagaattaggtcctacaatgaaagtaaagcggagaattgttgaacaaaaatataaggatatcatcgaaagaatgtactcttaagaaacaattattgttgctgttgttattttgttattgttgttaaatatacttatatatttatattttaatataaaaggtgtacaaaaaactccatttttgaaattattatacttaactaatgaataagaattgttaaaatctcagatgcaccaattaaaatcctatttatcact

SEQ ID NO: 3641 - DNA, 1675 bp, Diabrotica virgifera
  SmartBlast Evalue=1E-22; Info=Minos transposase n=2 Tax= Drosophila RepID=A8E1U2_DROME
gttttccagataagcgtggttgaactttcaaaggatcgaaaaattgtaatttttgaacccgaataactttttattaaagaatagaatggtaattctccttgccgcagtttgagagttcaagtcgtattctatcggttttgattgtttgcattgctaggaattagttttttttgctgttaaacagagctataaacagtagtgtttcccgtgcccaatgcatgcgttttaatacatgctatagaccgtctataaagtacccagaaaaaagaaagcagaattataattttacggtatttatttctatcacttgaaatataaaatttcaacaaataattcatctcatttacttatacaacctccatttaaatctaaacacttaactaaacgtccaggtacacccgaaactaggtcaaggccataattttcggtaatggtgttccaggcctgtaaaactgaccgaatcaaaccttctttatctcgtggcgctgctcgttccacttcaatcttcatcagtcccatatgttttcaatggggctaagatctggagatgctgctggccacggaattgttgccaattcgtgttcttgcatccaagcttgagtataagcagaagtatggcatcttgcattatcttgctgaaaacgccacccctctgaatataaaacatgagccgtttcaagaagaaaaccatttaggatgtcacaatatttcgcactatcaacagtaccattaactatacagagaggtgtagcaccacgctgagatattgctccccaaaccattattttagtgggaaatttggaaatttgaacggtaacattttctcttgataggacttttagatgatttgcaccaagctggaaacaactttcatcagatataaagacattattaaaattatcttcttgaaaacgttgacaaaaatctattcttcgttgcctttgaagaggtgtcactgtaggaattttttttggattccttgatatgtagccttgctttttcagtgacatgcggacagtttctgggcacacttttattcttcgttgatttccaattctaggcgcggattttgccgacctaaagccactaaagtatttaaattgtttccgcgaatcttacgcggtctacccgaaactggtctatgtctcatatctatgccattttttatcctctttattgtctcatacactgcactttttccgagttcagtcaaattttttaacgtttcggacaccctttctatacgaatagtacaccacttttacttttttctacttgcgacattatttgacaaatcttaagtctgtttacaaacaacaatatttgacagatggtgttgtcatccgattttgtccataacctactatcggcacaacctacttgatgcattacttttgtcttaaaatgttacaaaaaggaaatctattaaaattaggaaaaatataaaattccggatactttctagacaggtgtccacaatgaacactaattctgtctaataattggtttgtcctgaaaatgtgcatgaagcagctatttgctacatcctttgatagtacatgtactcgaactgtattgcttcatggctttatgtttgtgctcaagtttttgtaaacagaagtagaataactcacattaaaatataaaagtaacatttgcgctagacctaaagact

SEQ ID NO: 3642 - DNA, 1538 bp, Diabrotica virgifera
  SmartBlast Evalue=1E-22; Info=Minos transposase n=2 Tax= Drosophila RepID=A8E1U2_DROME
ataattagagattcccttattgattaattcatcacatcatcactctgttctgcttcatatgtatatcttaaaaagcgcaaaggataataatccgaatgttatagtccgtctagaaagtatccggaaaaaagaaagcagaattataattttacggtatttatttctatcacttgaaatataaaatttcaacaaataattcatctcatttacttatacaacctccatttaaatctaaacacttaactaaacgtccaggtacacccgaaactaggtcaaggccataattttcggtaatggtgttccaggcctgtaaaactgaccgaatcaaaccttctttatctcgtggcgctgctcgttccacttcaatcttcatcagtcccatatgttttcaatggggctaagatctggagatgctgctggccacggaattgttgccaattcgtgttcttgcatccaagcttgagtataagcagaagtatggcatcttgcattatcttgctgaaaacgccacccctctgaatataaaacatgagccgtttcaagaagaaaaccatttaggatgtcacaatatttcgcactatcaacagtaccattaactatacagagaggtgtagcaccacgctgagatattgctccccaaaccattattttagtgggaaatttggaaatttgaacggtaacattttctcttgataggacttttagatgatttgcaccaagctggaaacaactttcatcagatataaagacattattaaaattatcttcttgaaaacgttgacaaaaatctattcttcgttgcctttgaagaggtgtcactgtaggaattttttttggattccttgatatgtagccttgctttttcagtgacatgcggacagtttctgggcacacttttattcttcgttgatttccaattctaggcgcggattttgccgacctaaagccactaaagtatttaaattgtttccgcgaatcttacgcggtctacccgaaactggtctatgtctcatatctatgccattttttatcctctttattgtctcatacactgcactttttccgagttcagtcaaattttttaacgtttcggacaccctttctatacgaatagtacaccacttttacttttttctacttgcgacattatttgacaaatcttaagtctgtttacaaacaacaatatttgacagatggtgttgtcatccgattttgtccataacctactatcggcacaacctacttgatgcattacttttgtcttaaaatgttacaaaaaggaaatctattaaaattaggaaaaatataaaattccggatactttctagacaggtgtccacaatgaacactaattctgtctaataattggtttgtcctgaaaatgtgcatgaagcagctatttgctacatcctttgatagtacatgtactcgaactgtattgcttcatggctttatgtttgtgctcaagtttttgtaaacagaagtagaataactcacattaaaatataaaagtaacatttgcgctagacctaaagact

SEQ ID NO: 3643 - DNA, 931 bp, Diabrotica virgifera
atcaacagtaccgttaactatacagagaggtgtagcaccacgctgagatattgctccccaaaccattattttagtgggaaatttgaacggtaacattttctcttgataggacttttagatgatttgcaccaagctggaaacaactttcatcagatataaagacattattaacacctttgcagaggtgtcattgtagggattttttttggttccttgatatgtagccttgctttttcagtgacatgcggacagtttctggacacacttttattcttcgttgatttccaaatctgttcgctaattttcgaaactctaggcgcggattttgccgacctaaagccactaaagtatttaaattgtttccgcgaatcttacgcggtctacccgaaactggtctatgtctcatatctatgccattttttatcctctttattgtctcatacactgcactttttccgagttcagtcaaattttttaacgtttcggacaccctttctatacgaatagtacaccacttttacttttttctacttgcgacattatttgacaaatcttaagtctgtttacaaacaacaatatttgacagatggtgttgtcatccgattttgtccataacctactatcggcacaacctacttgatgcattacttttgtcttaaaatgttacaaaaaggaaatctattaaaattaggaaaaatataaaattccggatactttctagacaggtgtccacaatgaacactaattctgtctaataattggtttgtcctgaaaatgtgcatgaagcagctatttgctacatcctttgatagtacatgtactcgaactgtattgcttcatggctttatgtttgtgctcaagtttttgtaaacagaagtagaataactcacattaaaatataaaagtaacatttgcgctagacctaaagact

SEQ ID NO: 3644 - DNA, 2427 bp, Diabrotica virgifera
  SmartBlast Evalue=6E-83; Info=Probable RNA-directed DNA polymerase from transposon BS n=1 Tax=Drosophila melanogaster RepID=RTBS_DROME
ctaaagatctgactattttgattgatgatggttttttttttttcacagtatatttctcagagtttagtaaattaagtttaattttattagttgttgctaatctgtaacactaaccaaaacattgtttccagtttcttcatttttttaagtacttcccgacaaaaccaatattttctagaacatgaactcacacaacaaataaatttttgaaaacccctcataatttctattatctaattttttttatatatttaattatttcaaattctaccgtttaatggtacacaatagcaaaatatatatattttttattaatcactgataatgatagtagtcttttacctgtatattttaatcgattcataaagatacaacaaaaaccactaaaactaaaaaacaaaaaataaggtactgagattaagacagtccacctacatttagactcattttaaattaaatgagctcaagaaaatttatatatttatgctttacgttcggtttttattagttattagctactttgatactaaagttactcaccgttaatgccatgtactcactgttaatgcttttaagatacttatcaatactaagtttatatattttacaaatattttacctgggcccgcacaaatgaagaaaaaaccacagtattcgcagagcatcttgcaactgtattctcagcaccagaaaacaatgacgatgaagatgacgatataaaaaaagtacctcgaaactccatgtcaactatctcttcctctgacaacatttactccgacagaggttcgacaacaaataaaaatgataaatcctcagaaagctcctggctatgatttgataacaggagaattacttcagaagctaccgagaaaagcagtggtgttattaacagtaatatacaacagcatactacgtcttcgctactttccaatacaatggaaattagctcaagttactatgattccgaaacctggtaaacccgcaacacaagcaaattcatatcgcccgataagcctactcccaataatgtcgaaagtattagaaaggctactactacataaaatcgagcaagttgtccccataaacgaaattataccacaacaccaattcggatttagacgtgaacactcaaccatacaacaatgccacagaatagtaattataattaaaacaactcttgaagagaaaaagtttcgcgctggagtgtttctcgatatacaacaggcatttgatagagtatggcaacaagttctcctctgtaaactgaaattacacctaacggaccaactatactttattctaaaatcatatcttactgaccgatatttccaagtcaaaattgaagacaacttctcaaattaccacatcatccaatctggcgtaccacagggtagcgttctcggcccatttctatatcggatatttacagcagacgttccaaccagaaatgataccttcttagctacttttgccgatgatacgggaatcttactagtggatgtcgaccctaatgtagcatcacaaaaagttcaaaatcatttagaccaattacaaaactggctcaagcgatggaaaataaatgttaatgccagcaaatcgtacaaattacttttacaaccagaaaatctacatgtcctcaagtttctataaataatactccgattcccatcaagccagttgtcaaatacttgggattgcatctggatgaaaaactcatatggaaaacacacatttaaaattaaacgtaaacaattagatcttaaactaaaaaatatgaactggctatgtaacaagtagtctcagttatctcttgaaaataaactgcttctgtacaaagctatatttataccagtttgatcttacggaatagaactatggggctgcagtaaaccttcaaatacgaagatactccaaacatttcaatccaaaattctccgtatgataactaaagctccatggtatgtatccaaccagacacttcacaatgatctggacatccactaatcaagaacttaataaaaaatcgttcaataaaatataaaaatcgcaccactgaccacaccaacgaatttataaataatttattcacccaaccacttgctgaaagaagactaaagagaatatggccagacgacctaccacaataaacaataatacttagagaaccgtcactggatggtacctaactcaccttaatttactttcagactatttacttattacttaatgtttagagtagattgtaaaaatgcagtgtaacaaaaaaaatatttaacatattatatcaagtatcagttatgcagaagtgcgcgaaattatgtattttcgcatcaagtcaccgactcatccgcttgctaaacaattggaatgccggcattccttgctatgggttaattattgcaaagtattagtatctgcccttcagac

SEQ ID NO: 3645 - DNA, 1303 bp, Diabrotica virgifera
ctaaagatctgactattttgattgatgatggttttttttttttcacagtatatttctcagagtttagtaaattaagtttaattttattagttgttgctaatctgtaacactaaccaaaacattgtttccagtttcttcatttttttaagtacttcccgacaaaaccaatattttctagaacatgaactcacacaacaaataaatttttgaaaacccctcataatttctattatctaattttttttatatatttaattatttcaaattctaccgtttaatggtacacaatagcaaaatatatatattttttattaatcactgataatgatagtagtcttttacctgtatattttaatcgattcataaagatacaacaaaaaccactaaaactaaaaaacaaaaaataaggtactgagattaagacagtccacctacatttagactcattttaaattaaatgagctcaagaaaatttatatatttatgctttacgttcggtttttattagttattagctactttgatactaaagttactcaccgttaatgcttttacgagacatatcaataagttgactgacatttgacatatgacatatgaagtgtcagttatgctgagttgcgcaaaatgatgtattttcgcatcaattcaccggcttgctaaacaattggaatgccggcattccttcatgagtatatgctatgggttaattatcgcaaagtattagtatctgctcttcagactgatttgcgggtgccactgtttcattgtaacgatttaattttaatattccgatgaaacttggtcggataacaaaaagagaatacgagaaatgatgggagttacacatacaataattgaggacatcaaaacaaaacaactaatatggtacgaccatgtacagagaatgccagatgacaggatccgtaagcagattttggcatggacaccacgggggaggagaaaaagaggaaggccgagaagaagctggagggaggaaattgaaaaagaactagaggatagagaaatccttccaggtctatggttaaacagagaaacatgacggttaggagtcggaaggcgtcggagaacagtgtaaacttatagtactagtagtgaaacttggtaaaacgaagaagacacgtgtccgaaagtatgggtgaaaagctgaatattaaaagtgcaaaccatacgtcttaaagaaatcaaaaaacagtacgattcttcttcaaagtcataaaaatgaagttttagataaatatgacagccgaatgcaaataaatatctacatagtacatgtaac

SEQ ID NO: 3646 - DNA, 399 bp, Diabrotica virgifera
gtacggctatgtacagatgccaggattcccaaacagattatgaggtggacaccacaaggaagaaggaaaagagaaaggccgagaagaagctggaaggagggaattgaaaaagaactagaggaaagagaaatccctccaggtctatggtacagagaataatggtagttaggactcggaaggtgtcggagaacgctgtacactgttagtagtagtgaaacttggtaaaacgaagaagacacgtgtccgaaagtatgggtgaaaagctgaatattaaaagtgcaaaccatacgtcttaaagaaatcaaaaaacagtacgattcttcttcaaagtcataaaaatgaagttttagataaatatgacagccgaatgcaaataaatatctacatagtacatgtaac

SEQ ID NO: 3647 - DNA, 2941 bp, Diabrotica virgifera
cagcaaatctattaagatttagaaattagagctggagggttagatcatagaaaagtgatggtgtttaaaaatttaagcattacactatctagctacggaaagctcgaaacagaagtggaagatcaagcaaatagagaaaatagagctgcaggttgcaaccatatcaatttatatctagttatgtatcagcatctaacatctttataatcgagctcgaataaaagttaagaataaaaacacatatttttgtcatacggtaacagaaaagttttggcatttgcatctactaaactaattcattaattgctccaaattctaacttaaatttctataaaaataatgtaattcaaatataacttgtaatataactgaaggcagttattaataataaatataaattaaagttaatgtctaattagtaaaagttgaataacagtagctactataaagaacaaaaataaactgatttttacatgccatacaaaaagcgtgttcaattttattacatacagctagttaaataaactttatccaaactgtgacgactattccttctctccaacattagtaaagtgacgtagatttaatcttgccatatgacaacacagagtccaatgggttaattcttcaaagaacaaatattttattataaagatgaaatagagtgagatatttatctaatagattccatttgttttgttttttgtcgttttgtggtttcagattaatgttcttttttaaaaaagtaaatttagaccacaaccatagcatcgttctaaatacttactaatacagcaaatcagaagtttaaagaaactatacgcaggaacatttaatgcacaattaataaaggtttgtttccttaaaaaccatttttgatgaaacatcgatgattttaaagcaccaatgcagcttttcaaaaatgttgctgagctttgccagctgttgcataattgccttagcctctgctgacagaaattttaaaactaacactcttttgcttataaatcttgttatatacctaagtattcctaaggctcgtcagttgcctattgtttcatttattcatagtttttttcttaaaaaaatttcactatattttttatatatttatgtgttttttgttaaagttttgtttgttgttgggtaactgacaataatagttatgttgtgtggtttttcttactctttaatcagtgacctagattaaggtatgcaagatggttacttttatactcaatgttttattattatatccaaacttgtttaatataatagtatatagaatcatattatagtgacctaaagaaagtaactatatattgaaatatgacgtgtgatttgcttctaatggtctacatgtgattagataaaagtttgtttttacacctagataataatcataacaaaattatgattatggtataagttttagtaattcttccactacatggacagaatctatcttaaacgagtgatatacgtcctggaatgcagcaaaatacattgtattacttacgtagattatcctgttaaatactaagacaaagagtactaaaagtgacgattctgcaggtccaaatagttgttaatcgtatattttttgaaaatctgccgataaaattacctgaaattaatgtaattcaagagtgattttcggtgaagtgagccacgtagaaaaggacctctttccaatgaatccccttttataacataaaataaagtggttaaaattcggttctactttattgggattttgcagactttaggaaataacgtagaataccatattcaaatatggaatcgagtgccagcttttttaaaagttattactgattcctatctaatgttagcctaaaaacctttgacgaaatctgtataaggtacaatattttttagccatcgccctatttctaataataacctactttgtatatatttacagtggctcattattattttttcatttatcaacaacaattttgtgatatttttagtaatgattgttatttaaaagtcacatcacaaatatgcaaacgttagtagtttgcaatagttctgagggaaaacaagagtacgataattcaatatatgtgaaagcaattgttttccatcagtttattatgaacaataaccaggagttccattaaacgtatctttgctacgattatatagctcctttggttaggttaaatatgctgattgcccaacatatctaatctcattttaatctacttattgcaaagaaattaggcgagtggctcacccccaaaataacgcttatttttcgagatactgaccacggatggtgaatggcttattttggcgttactttatatttttggtggtgctaaaaagcgagaatgaagtttattttgaattttaagtggggaaacattgtcaaaaatttctaattataatttaggttctaatttattactacctgaactattacacgtacaactatcacaacattctaattcgagctctttacatgtacagacatccgttttacaccgattttttcctttgcatgaacaaaaacatttttgtaaaactttcatcgctgaacatccatcatagtaatctgggctcaaaacttcatcattgagtaaccaacaacagtcagcaacatttttgatattatattttgacaaatagcttgatcccattcaccggagggaccgcagacgttcggaaacaattagcgtctctttgcaaagacaatgacgtcgactttgcaaagtaacaagacacttactcaacacacacactacacattactcccctgacttagtgataagttatacaattacgtggctaaaggttctagttctaaaccaaagccagaatcagagaaaaaaaaaagttattatttaaaaatagtttcattttataagtgattgtagaaaaaatgctgtatgtattacaagcgcaaagt

SEQ ID NO: 3648 - DNA, 712 bp, Diabrotica virgifera
cagcaaatctattaagatttagaaattagagctggagggttagatcatagaaaagtgatggtgtttaaaaatttaagcattacactatctagctacggaaagctcgaaacagaagtggaagatcaagcaaatagagaaaatagagctgcaggttgcaaccatatcaatttatatctagttatgtatcagcatctaacatctttataatcgagctcgaataaaagttaagaataaaaacacatatttttgtcatacggtaacagaaaagttttggcatttgcatctactaaactaattcattaattgctccaaattctaacttaaatttctataaaaataatgtaattcaaatataacttgtaatataactgaaggcagttattaataataaatataaattaaagttaatgtctaattagtaaaagttgaataacagtagctactataaagaacaaaaataaactgatttttacatgccatacaaaaagcgtgttcaattttattacatacagctagtacatgtaggtacagctagttacaaaaactttatccaaactcttgcctctttagatttactcttgccatatggcaacacagagtccaatgggttaattcttcaaagaacagatatttaattataaagatgaaatagagggagatgtgtaatagattccattagttttgttttttgccgttttgtagcttcagatta

SEQ ID NO: 3649 - DNA, 398 bp, Diabrotica virgifera
ggcgcagtggtaagagcgcctacctttgaaacgaaaggtcgggagttcgaatcctaccaggggcagaaatttttcatttattataaattaataaatgaaaaatagtttctgtccttgtgggatcggtactcaccggagggaccgcagacgttcggaaacaattagcgtctctttgcaaagacaatgacgtcgactttgcaaagtaacaagacacttactcaacacacacactacacattactcccctgacttagtgataagttatacaattacgtggctaaaggttctagttctaaaccaaagccagaatcagagaaaaaaaaaagttattatttaaaaatagtttcattttataagtgattgtagaaaaaatgctgtatgtattacaagcgcaaagt

SEQ ID NO: 3650 - DNA, 1427 bp, Diabrotica virgifera
  SmartBlast Evalue=1E-51; Info=Transformer2 (Fragment) n=1 Tax= Tribolium castaneum RepID=D6X1S0_TRICA
cgccatcatcatacataccacagcgaagcgtttcctgaacctcgatgtgcgaggtttgtgtttaatttatcctttggcgctgtagaagtttattacacgcatgcattaagaaaagtacctccaattaagattaagaatttaagcaagttttaagaatttagggccagttttgtcaagtttagaaacaagatttgggcaagaggttcgtaagagggaagaatagaagaaagcaactaatacagtttgtagcattttagaaaaaaaaattagaagataacttgaaaacggagactaaactttaatggcgtcatcgtcattcgagcgataattcaggaggttgtctccgaaggttatggccgattattctcccaggcacgaggattcacctagggaatacaaaagcagaagtcacagtcgcgacagaaaagtttatagaaacggtgacaaaggcaaaagatcgagaagccgttctcattctgaaaagcgttacagatcttcaaagtactctcgcagcagatctcgttcagctgattacggacgtaggtcatcttctcacagcccaatgtcgagcaggaagcgtcataccggtaccagggacaaccccaaacagtccaggtgtttgggagtctttggattgagcgtttacaccactgaggatgaattataccatttgatgtccaaatacggtcccgtagaacgagttcaagttgttatcgatgctaaaactggacgttctagaggcttttcgtttgtctacttcgagaatgttgaagatgcaaaagtagcgaaggagcaatgcactggtatgaaacttaatggaaagagcattcgtgttgatttttccattactgaaagagcacatacacctactcctggaatttatatgggaaaaccaacatacaaatattccgatcgctacgataggcgtcgagacagaggggacagagatgattactaccgtagttctcgctacaggcgttctccatcgccttactatagtagtagtagccgaagaagacgttactctagatctagaagttattctcctcgtcgctattaaacattctatcttcttggatgcacttcgtttgatttcagttttttcctagattgtaatgtcttactttaccgtagatataaattatctagttttataccttaaggcactagtgcggattgggacaatggttttaccctaaatgtatattttttgacataatccatattggaaattagtaagaaatgtatgcgattaatttgaaaaagcccagtcttcacattattgtgaacagaaaaattactaactcaaatattttagccaatccgctacttcttttgtaaaacatgtgtttattttgaattaattttaagattttttttaaatatgtgacttacagttagtggtatccaataaatgttctaacacc

SEQ ID NO: 3651 - DNA, 1383 bp, Diabrotica virgifera
  SmartBlast Evalue=1E-51; Info=Transformer2 (Fragment) n=1 Tax= Tribolium castaneum RepID=D6X1S0_TRICA
cgtcccgccaatccgccatcgccatcatcatacataccacagcgaagcgtttcctgaacctcgatgtgcgaggtttgtgtttaatttatcctttggcgctgtagaagtttattacacggccagttttgtcaagtttagaaacaagatttgggcaagaggttcgtaagagggaagaatagaagaaagcaactaatacagtttgtagcattttagaaaaaaaaattagaagataacttgaaaacggagactaaactttaatggcgtcatcgtcattcgagcgataattcaggaggttgtctccgaaggttatggccgattattctcccaggcacgaggattcacctagggaatacaaaagcagaagtcacagtcgcgacagaaaagtttatagaaacggtgacaaaggcaaaagatcgagaagccgttctcattctgaaaagcgttacagatcttcaaagtactctcgcagcagatctcgttcagctgattacggacgtaggtcatcttctcacagcccaatgtcgagcaggaagcgtcataccggtaccagggacaaccccaaacagtccaggtgtttgggagtctttggattgagcgtttacaccactgaggatgaattataccatttgatgtccaaatacggtcccgtagaacgagttcaagttgttatcgatgctaaaactggacgttctagaggcttttcgtttgtctacttcgagaatgttgaagatgcaaaagtagcgaaggagcaatgcactggtatgaaacttaatggaaagagcattcgtgttgatttttccattactgaaagagcacatacacctactcctggaatttatatgggaaaaccaacatacaaatattccgatcgctacgataggcgtcgagacagaggggacagagatgattactaccgtagttctcgctacaggcgttctccatcgccttactatagtagtagtagccgaagaagacgttactctagatctagaagttattctcctcgtcgctattaaacattctatcttcttggatgcacttcgtttgatttcagttttttcctagattgtaatgtcttactttaccgtagatataaattatctagttttataccttaaggcactagtgcggattgggacaatggttttaccctaaatgtatattttttgacataatccatattggaaattagtaagaaatgtatgcgattaatttgaaaaagcccagtcttcacattattgtgaacagaaaaattactaactcaaatattttagccaatccgctacttcttttgtaaaacatgtgtttattttgaattaattttaagattttttttaaatatgtgacttacagttagtggtatccaataaatgttctaacacc

SEQ ID NO: 3652 - DNA, 1241 bp, Diabrotica virgifera
  SmartBlast Evalue=1E-51; Info=Transformer2 (Fragment) n=1 Tax= Tribolium castaneum RepID=D6X1S0_TRICA
cgtacccgccaatccgccatcgccatcatcatacataccacagcgaagcgtttcctgaacctcgatgtgcgaggtttgtgtttaatttatcctttggcgctgtagaagtttattacacgcgtcatcgtcattcgagcgataattcaggaggttgtctccgaaggttatggccgattattctcccaggcacgaggattcacctagggaatacaaaagcagaagtcacagtcgcgacagaaaagtttatagaaacggtgacaaaggcaaaagatcgagaagccgttctcattctgaaaagcgttacagatcttcaaagtactctcgcagcagatctcgttcagctgattacggacgtaggtcatcttctcacagcccaatgtcgagcaggaagcgtcataccggtaccagggacaaccccaaacagtccaggtgtttgggagtctttggattgagcgtttacaccactgaggatgaattataccatttgatgtccaaatacggtcccgtagaacgagttcaagttgttatcgatgctaaaactggacgttctagaggcttttcgtttgtctacttcgagaatgttgaagatgcaaaagtagcgaaggagcaatgcactggtatgaaacttaatggaaagagcattcgtgttgatttttccattactgaaagagcacatacacctactcctggaatttatatgggaaaaccaacatacaaatattccgatcgctacgataggcgtcgagacagaggggacagagatgattactaccgtagttctcgctacaggcgttctccatcgccttactatagtagtagtagccgaagaagacgttactctagatctagaagttattctcctcgtcgctattaaacattctatcttcttggatgcacttcgtttgatttcagttttttcctagattgtaatgtcttactttaccgtagatataaattatctagttttataccttaaggcactagtgcggattgggacaatggttttaccctaaatgtatattttttgacataatccatattggaaattagtaagaaatgtatgcgattaatttgaaaaagcccagtcttcacattattgtgaacagaaaaattactaactcaaatattttagccaatccgctacttcttttgtaaaacatgtgtttattttgaattaattttaagattttttttaaatatgtgacttacagttagtggtatccaataaatgttctaacacc

SEQ ID NO: 3653 - DNA, 1946 bp, Diabrotica virgifera
ccataagtagtaattaaaataattaattaattaatcaaaataagaatatgctgatcaatctcataacagagagaaaatacagagcgtaacaatacatatctatctatacctacataaattaaaaagaaaatggacaagatacagcacaacatgtaaaatgttttaaaactaaagttcaacaattttattttaattcaaaatttggtataaaatattgttacacaatcctaatactaagaatttagatttttctgtctgaacaatactgtaattattagtaagtcatgtttgaggcaagaataacaaaggacagtagtatttcaaaatgttgtagttttgtcagcaattatgaaataactttatctcaaattaaacccaaaacattagatattttacaatttcataaaagacttacaccggtacttgctttcattatttacaaaatcactttttggagattttttaaactggtcggttatatattttgtgaattacaatttcatacttttattaatcattttgacttacaatttcaagctttattttatgtacacatttttctaaacagttaaaatttacatttttacaaaaaaaaaagagcaatgaaatattattaattgtagtacttaaactattgagctggtatcattacttacatctaatattacacatataaaaatatcaactaaaattaaatatacaaagacacttgttatgtacagatctgtcggtcattatatataaataaaattggaatgaactttacaaacaataatagtttagtcaaattaaggaaacaatgtacaaatacagtagcctcactctgaacaagtcaatttaactgattggcttcaaaggggaacagacaaataatccccaccttcatttttatatcgtaatactgtaaaatcacagtgccaaaatacctagactgcatttgaataatgcgcaaaaaataaatgcaattgccaaactcgaagaaggttggtcactcaggcaagttgttgcagatttgaacgtgagctatatgtgcatatcaatagcttagtgtgaaaacctcgcatctcattttacagaaaatttttcatgagtgagtgaatttaaactgaatttctgcctactctaacccaaaatatatatgaaaaatgtaggtgtaatgatctaaacgtactcagaatcaaaaatttgtaaagatattttttttgttttaagttagagtatgcagaaattcagtttaaagtcttttctgtaaaattttctgtgaaatgagatacgaggcctcacaccaagctatcgatatggaacatcaaacaaagatgagatcattttcattctatagcacggttgggtggttcaagaggcagaaaatctccagagagcaataagataaggtattgagctagcgaagggacagcgtttcagggcagcatttgcactacacttagaatgattaaagcaagtgaattgatatattgtgcagctgcaaggaaatcttttttgactgaggatcacaagaggagatgagttgcattttgcaatgaactcataaaccgtgaaaacaacttgtagtctaacgttgcattttctgatgtaaaaaagggtttcgatagtattataacaatggtcgaataatagtttataggccgagaaatcataggtttgacgaacggtacactcatcatttaagaaatagtatagaaaaattgaagaaaaaaaatcttctgtgcaaaaggcacattcatttgaaaaccccaataaagggctacattaaaaaacaacgttctcgctctaaagaaagcatcatcagtgttctaagcaagctctacatgccaagccacgaaaaatacatgggtaaaaacccttaaaacatcgaccaaaagtcccacattgacgcgttgtatattaaatcctggcggcggatgaaacttagaaggatacctcaaagc

SEQ ID NO: 3654 - DNA, 1519 bp, Diabrotica virgifera
ccataagtagtaattaaaataattaattaattaatcaaaataagaatatgctgatcaatctcataacagagagaaaatacagagcgtaacaatacatatctatctatacctacataaattaaaaagaaaatggacaagatacagcacaacatgtaaaatgttttaaaactaaagttcaacaattttattttaattcaaaatttggtataaaatattgttacacaatcctaatactaagaatttagatttttctgtctgaacaatactgtaattattagtaagtcatgtttgaggcaagaataacaaaggacagtagtatttcaaaatgttgtagttttgtcagcaattatgaaataactttatctcaaattaaacccaaaacattagatattttacaatttcataaaagacttacaccggtacttgctttcattatttacaaaatcactttttggagattttttaaactggtcggttatatattttgtgaattacaatttcatacttttattaatcattttgacttacaatttcaagctttattttatgtacacatttttctaaacagttaaaatttacatttttacaaaaaaaaaagagcaatgaaatattattaattgtagtacttaaactattgagctggtatcattacttacatctaatattacacatataaaaatatcaactaaaattaaatatacaaagacacttgttatgtacagatctgtcggtcattatatataaataaaattggaatgaactttacaaacaataatagtttagtcaaattaaggaaacaatgtacaaatacagtagcctcactctgaacaagtcaatttaactgattggcttcaaaggggaacagacaaataatccccaccttcatttttatatcgtaatactgtaaaatcacagtgccaaaatacctagactgcatttgaataatgcgcaaaaaataaatgcaattgccaaactcgaagaaggttggtcactcaggcaagttgttgcagatttgaacgtgagctatatgtgcatatcaatagcttagtgtgaaaacctcgcatctcattttacagaaaatttttcatgagtgagtgaatttaaactgaatttctgcctactctaacccaaaatatatatgaaaaatgtaggtgtaatgatctaaacgtactcagaatcaaaaatttgtaaagatattttttttgttttaagttagagtatgcagaaattcagtttaaagtctcacttgtggggttttcggtgaaatgagatatggggtttcacactaagctatcgataagtccattcttgaaaacaatttaaatgttaaaaacacccaagaaaaaaattatctactgctgaaatcctcttcttcttcagcttgtttttaaaataacttgttatatgtgtagttcaatatccaacagtgaactttttcataatcaaaattttaactttaattaattaattttagctttaaaactcaaaaaatgaattgtatgcttttgtccaccgaccc

SEQ ID NO: 3655 - DNA, 552 bp, Diabrotica virgifera
taagatgaggtattgagctagcgaagggacagcgtttcagggcagcatttgcactacacttagaatgattaaagcaagtgaattgatatattgtgcagctgcaaggaaatcttttttgactgatgatcacaagaggagatgcaatgaactcataaaccgtgaaaacaacttgtagtctaacgttgcattttctgatgtaaaaaagggtttcgatagtattataacaatggtcgaataatagtttataggccgagaaatcataggtttgacgaacggtacactcatcatttaagaaatagtatagaaaaattgaagaaaaaaaatcttctgtgcaaaaggcacattcatttgaaaaccccaataaagggctacattaaaaaacaacgttctcgctctaaagaaagcatcatcagtgttctaagcaagctctacatgccaagccacgaaaaatacatgggtaaaaacccttaaaacatcgaccaaaagtcccacattgacgcgttgtatattaaatcctggcggcggatgaaacttagaaggatacctcaaagc

SEQ ID NO: 3656 - DNA, 2824 bp, Diabrotica virgifera
  SmartBlast Evalue=1E-122; Info=Endonuclease-reverse transcriptase HmRTE-e01 n=1 Tax=Heliconius melpomene RepID= C6Y4D5_9NEOP
aataattaagacttcgtggaatacatgtagtcattatatttttatcagatctttaatatttcatattttatttcatattttatcaacatcactatataaatacatggtttttattcgtatcaacatttttcgagatgaagtcgatcgtggttgttttattgagcctaatttccttggcacttgttgcttgcgatgattcagttagtacttcgacagacactccggtaatatcaacagaggtaccagcaccgatatcgacaagccttcgtgaagatacagtttacgtagcaacttcaaatgttcccgacccagtcttccagatagatgccgtggaagtattcaaagaagctaaggcacttcatccggttgacggtatagctttgttagaaacattttccgatttgttttacgccaaacataaagtatctggaggatggaaagttgctgaaaaatatgattacttttataatccaaatataaactacgtgtatattgaattgatggttaatgatgctaatggagaaaggagggttatgatatttaactaaaaaaataaactgtcttaatagttaacaattattgttaactcttagttttaatttcgtctttccaaataaataaaaataattcaatgtttgtattttagttaatgtaaagtcagttatggactattggatatttatgtaatttagtaggtcaacaataattacaaaaacaaggggtgcccgatctaattttgttctaactgtaattaattaataattaaacaatgattttttttaattaaaaaaaatttacccaggcatatattatttcagattttttggatcgttctgaacaaggaaggtcttttgtaatttttccctaaagttgatcgttttcgagatataaacaatttgaaagtaaaaaaatgacgacagatgacgactttcaaggctcaaaatcacaagtaacaaatatcatgtttgtaatcagtaatcatcagtaatagcaggtctatttaatagaattatggaagtcggacaaatgccagacgaatggagaagcagtatactggtacctgtttacaaaaacaagggagaaatacaacaatgtacaaattacagggctataaaactgcttagccacaccatgaaaatatgggaaagactaattgatacacggatacgtgaagagaccgaaatatccgagaatcaatttggctttatgcagggtcagcagggtagatcaacaacagatgcaattttcattataaggcagttgatggaaaaatacaggagtaaagaaacaaacgctcatatggtattcattgatcttgagaaagcatatgatagagttcctcgagagattctgtagtgggcactcaataagaaaggtgtccctggtgaatatgtaaagattgtgacggatatgtatgagacactaacgactagtgttagaacaggtgtgggagagactgataaatttcatgtgaaagtaggattgcaccaaggctctgtgcttaatccgtatttattctcattagttttggaccagataacagcgaaactacagggtaacattacatggtgcttaatgtatgctgatgatgtcgtgttagtaggaaatagtgaaagagacttagaacaaaaactggaacagtggagacaagctctggaggaaaaaggtttaaaacttagtaggacaaaaacagagtatttggaatgtttaattaaagatggaactactacaaataaaatggtatctttggatggtaaaatgattgtgaaaagcaaccattttaagtacctaggatcggtattacagagtaatggagaaatatatggagatgcatgcagtagaattagggctagatggataaagtggaaagaagcgagtggtgtgttgtgtgacagaaaaattcccatgaagctgaagggaaaattctataaaacagccataagaccggctatgatgtacggaactgaatgttgggcagtgcaaaagaaagaggaacaacgaatgcatgtggcggaaatgagaatgtttagatggatgagtggagtgacaaagaaggataaaattagatatgagtatattaggggaagtctaggtgtggcaccaattgatgccaaaatgagagagcataggttaagatgctttggtcatgttcaacgtcgagacgttagtcacccaatacgaagaatagctgaagtgcagactcctggaaggagtaggagaggaagaccaaagaagacctggggggagacgataaggcaggacatgttggtaaaggggattaacattgatatcactcaagatagaattgtgtggagaaatggaattacggaagccgaccccgcatagggataaggcaaagagaatgatgatgtaatcagtaatcatcaagtacctaaattgatccaataccaataccaatcttcttctatcgggtcccgataagaatttttgttcttttattctaaaatatatttttttaattgttaatgaggaaggttcttatgggaagacgggcattaacttctaaaaaataatgtattaaaatgaaacaagtccaaaaaactgtaagatttagtagatatcaagatttgctaaaataaggtttaaactttaatttagatacttcgtaatttcaaaaaggatattttttacttgagctttgaaaatcgtaatatctcgttcttttttcagttttaaattgtttataactcgaaactcgatatctactttaaagaaaaattacagaagatctttttttgtttagaacgatccaaaaaatctgaaataataatatagatagtttttccaacttttcccatgcgcc

SEQ ID NO: 3657 - DNA, 622 bp, Diabrotica virgifera
aataattaagacttcgtggaatacatgtagtcattatatttttatcagatctttaatatttcatattttatttcatattttatcaacatcactatataaatacatggtttttattcgtatcaacatttttcgagatgaagtcgatcgtggttgttttattgagcctaatttccttggcacttgttgcttgcgatgattcagttagtacttcgacagacactccggtaatatcaacagaggtaccagcaccgatatcgacaagccttcgtgaagatagagtttacgtagacacttcaaatgttcccgacccagtctaccagatagatgccgtggaagcattcaaagaagctaaggcacttcatccagttgacggtatagctttgttaaaaacattctccgagttgtttaacgccaaacataaagtatctggaggatggaaagttgctgaaaaatatgactacttttacaatccaaatataaactacgtgtatgttgcattgggagttatagatgctaatggagataggcttgttctgatatttaactaaaaaataaaccattttaattgttaactctcagcttttatttcgactttccaaataaagaaacataattcgaaaaa

SEQ ID NO: 3658 - DNA, 531 bp, Diabrotica virgifera
gacaagccttcgtgaagatatgaagtcgatcttttttattttactgagcctgatgttcttggaatttgtcgttggcgatgatgttcaatattatactgattcaactacatctgctcctgatcctgctcctttttggacaacggcaccaatacccagatccacaagcattggtgaagatgtagtttacgtacaagatcgacaagttcccgatccaacctatgagatagatgccgtggaagcattcaaagaagctaaggcacttcatccagttgttgacggtacacaattgttagaaacattttccaagttgtttaacaacaaacatccgatagatggaggatggaaagttgttgaaaatttgggcccactttacaatccaaatgcagactacatatatattgaactgagagttatagatgctaatggagataggacagtccggatatttaacgcaaaaaattaactattttaataattgttgactctcagttattatttcgactttccaaatacataaagaaaaataattcg

SEQ ID NO: 3659 - DNA, 1346 bp, Diabrotica virgifera
tatacaatatcaatttcaaactcccttggctcagcttgagaatattttgacaaattcattgtcagaaacataaaacacaagaattccttcctttcattatttacgtttacgaaaaaactaaagaactgagaaccgtcgacttttttgacaaataaccataggcggacgtttgaatctttattaattatttgcgaaactacaattttaatttattcatcaaaaataatgtaaactctaacaaaattagaacgattgaataggcattttcaatacctttcaaaggagatatcacttgccataaggtcccatttaagattatcggtcaaagtggctctgtaacgtcatctgccactattacgtcatctgttacgactgtttggaaaacctacgtccgtttattttctccctccaaatttcactattataagtataatcggtcataagacacgaggggagaggaaacttttggctagctctgtatagagcttcattcccgggacaaatttcccgggaaatcagtaaaaaaatggaaatccagatttcccgggattttttaatatttaattttaaattatgagcggagatattagtaactcacaattattaataaatgtttctgatacaattatctctgtctgcttaataatcattttcaactattccacttgaaatatttctttttcaattgtattttaaaccttccaattttggcgtaaatcataatgtaccatatcggttagcataaacactctattgtttatgcgacggatctgactcattttgaagcattcagaattataacataaatatttattttgaattaaaattatgtctacggataattccaaaaaggtcattaaaacaagagctagtactctataattcaaataagctgaccagacatttaataaaattattcactcactgcacttaaaaccatcatatctacatcaacagaaagcgagcgtgcgttttcaacttcaaaaaatttctctacaaaaaaaaagagccagcctgaaagatcaaacactgaacaatttatcgaggcagacctcgttggcccaagatggttgttagggttctcgtttagagtctcaccatgttcccggaggtattcttataacatcggcgtttagccttttcaattttacaacattataatgtatattgaattataattacaaccattgtttggttctggggctagttagcaagtatatgaattcactgatgagggactgataggtccgaaaacgttttgaacatattttacctattcaatccattgggattttttaatcacatgggacatagaagtggttttacttcttgttttatatttctaa

SEQ ID NO: 3660 - DNA, 1303 bp, Diabrotica virgifera
tatacaatatcaatttcaaactcccttggctcagcttgagaatattttgacaaattcattgtcagaaacataaaacacaagaattccttcctttcattatttacgtttacgaaaaaactaaagaactgagaaccgtcgacttttttgacaaataaccataggcggacgtttgaatctttattaattatttgcgaaactacaattttaatttattcatcaaaaataatgtaaactctaacaaaattagaacgattgaataggcattttcaatacctttcaaaggagatatcacttgccataaggtcccatttaagattatcggtcaaagtggctctgtaacgtcatctgccactattacgtcatctgttacgactgtttggaaaacctacgtccgtttattttctccctccaaatttcactattataagtataatcggtcataagacacgaggggagaggaaacttttggctagctctgtatagagcttcattcccgggacaaatttcccgggaaatcagtaaaaaaatggaaatccagatttcccgggattttttaatatttaattttaaattatgagcggagatattagtaactcacaattattaataaatgtttctgatacaattatctctgtctgcttaataatcattttcaactattccacttgaaatatttctttttcaattgtattttaaaccttccaattttggcgtaaatcataatgtaccatatcggttagcataaacactctattgtttatgcgacggatctgactcattttgaagcattcagaattataacataaatatttattttgaattaaaattatgtctacggataattccaaaaaggtcattaaaacaagagctagtactctataattcaaataagctgaccagacatttaataaaattattcactcactgcacttaaaaccatcatatctacatcaacagaaagcgagcgtgcgttttcaacttcaaaaaatttctctacaaaaaaaaagagccagcctgaaagatcaaacactgaacaatttatcgaggcagacctcgttggcccaagatggttgttagggttctcgtttagagtctcaccatgttcccggaggtattcttataacatcggcgtttagcctatcgcctatccaatttcacaatactgtaatgtagattgaattataagtacaaccattgtttggttctggggctagttatcaagtatgtatatacgaattcactgatgatggactgataggtccgaaaacgttctgaatgaacctattttatttaatccattggg

SEQ ID NO: 3661 - DNA, 1286 bp, Diabrotica virgifera
tatacaatatcaatttcaaactcccttggctcagcttgagaatattttgacaaattcattgtcagaaacataaaacacaagaattccttcctttcattatttacgtttacgaaaaaactaaagaactgagaaccgtcgacttttttgacaaataaccataggcggacgtttgaatctttattaattatttgcgaaactacaattttaatttattcatcaaaaataatgtaaactctaacaaaattagaacgattgaataggcattttcaatacctttcaaaggagatatcacttgccataaggtcccatttaagattatcggtcaaagtggctctgtaacgtcatctgccactattacgtcatctgttacgactgtttggaaaacctacgtccgtttattttctccctccaaatttcactattataagtataatcggtcataagacacgaggggagaggaaacttttggctagctctgtatagagcttcattcccgggacaaatttcccgggaaatcagtaaaaaaatggaaatccagatttcccgggattttttaatatttaattttaaattatgagcggagatattagtaactcacaattattaataaatgtttctgatacaattatctctgtctgcttaataatcattttcaactattccacttgaaatatttctttttcaattgtattttaaaccttccaattttggcgtaaatcataatgtaccatatcggttagcataaacactctattgtttatgcgacggatctgactcattttgaagcattcagaattataacataaatatttattttgaattaaaattatgtctacggataattccaaaaaggtcattaaaacaagagctagtactctataattcaaataagctgaccagacatttaataaaattattcactcactgcacttaaaaccatcatatctacatcaacagaaagcgagcgtgcgttttcaacttcaaaaaatttctctacaaaaaaaaagagccagcctgaaagatcaaacactgaacaatttatggtttcttaaacataaatgccaataataaaaacaacgaaaattcagattaaacacaaatttataattttcctctttttaaatttcctttaaaattttgaagttttttaaatttttgaattttttttaaacttttaatgttcaatcgatttaaatttatacctttttatactacttgcattaagtcaccctaacccttaagtggtattgtggtgtcccagtggacccaggaccaagaatatgcgt

SEQ ID NO: 3662 - DNA, 1921 bp, Diabrotica virgifera
aataaaaagatgtgatattttttaatgttttattggtgtttattatcaaatataatacatttggtaataggcggcaataaaccatttgaaaatatcacatatttgcattttttaaaatattttgctgagccccctctaactttgattaccgctagtacccgtcttggcatactttgagcagttaaattttttttgcttcaatgtgtcattgtggtttcaatgatatattagttctttaatcaaaacaatttcgttagtgaccttttcatcggaaatttctcgttttaaaagctcccaaatattttccatctgattggggtcagaggttcaacaaaatattggaaaaatataaatatgtaatattttcaaatattttataataacaattaacattgcataacggaactaaatttggaaatcatattttaaacaaggcgtactggtggaatagatgatttttgtagggaaattcttaggtggtcgtaataatatgaccagggactgtatataaatgaattcgaagagggaaataaatacatatgtactgtacactatattttttctatgtccataaacatgtcttatgtcactataaatttgtcttattctgtttttatgtaccctacataatttgtcacatttttaccaaagtattataagtcacaataacccattatgtataagccagcctatttatagattactgaaaaaaattttatcaacccttgaaatttagaaaaaattttccatagatattttaggctgaattactgaatcataacttttgttgcattatattttgtaaatttgctgacttcgtttagattagacttattaaaatatacataatttcattattcagttgaatgtgaatctgtgcactagttgatgaatttttttaaagttacatataactcattgaagcaatttataagtagcatatagtattcgattcagctacacattttgggtttttttttgaaagaatcggttactgttataattttgactatatactggcaaaataattgctatcactgactccgaatatttgacattaggatcaagtgtattatttgatatgttagattggctaaataaataatataaatttatggcttctctaaaaatgagtcaataagtcaaacaccactttattaaaatttcgtcgatgtgtaactacctaaacttgattttgagtacaagaagtatagtaggaagttcaataacatcaacatctgactaaagtatttacggaaataaacttcggtgggaaagaatacttcatggagaaaggtgaaaagcagatgtccaggaggaaattgtaaagccaaacttattgtttgatacaatatcataaaacataaacttatttttattaaacgcaaataaaaatgttaatttctgtaactgtttttaacttgttcatacataggtacatacttgcaattatgataacagcaacgttaataagatgaaatttgaaaaaaaatatttgatcgttaatgggttaagtggattgtatgtcacaaatttttcgttttgattctataatatctataattttctttgtatatttttttattaaaatttgatacttaattatttcaacagaaagtgcatttaattataatacctactttcgatagactgactgatatgaagaaaaagctgacttatgatactttggtactttaaagatatgtagattgagtctgtaaattgagtctcataactgtgcataatgctcattttactattttttccatagaaactactgaaaagtaaaatgtaacataaatgtggtataggatattcaaagaaacaatactttctttattgttggtggttattattatatattacttgtttttatgtagccagaaatattattttgtaaaattttatattattatgtaat

SEQ ID NO: 3663 - DNA, 1588 bp, Diabrotica virgifera
  SmartBlast Evalue=0.000000003; Info="LINE-1 retrotransposon- like element, putative (Fragment) n=1 Tax=Aspergillus flavus NRRL3357 RepID=B8NZ53_ASPFN"
aataaaaagatgtgatattttttaatgttttattggtgtttattatcaaatataatacatttggtaataggcggcaataaaccatttgaaaatatcacatatttgcattttttaaaatattttgctgagccccctctaactttgattaccgctagtacccgtcttggcatactttgagcagttaaattttttttgcttcaatgtgtcattgtggtttcaatgatatattagttctttaatcaaaacaatttcgttagtgaccttttcatcggaaatttctcgttttaaaagctcccaaatattttccatctgattggggtcagaggttcaacaaaatattggaaaaatataaatatgtaatattttcaaatattttataataacaattaacattgcataacggaactaaatttggaaatcatattttaaacaaggcgtactggtggaatagatgatttttgtagggaaattcttaggtggtcgtaataatatgaccagggactgtatataaatgaattcgaagagggaaataaatacatatgtactgtacactatattttttctatgtccataaacatgtcttatgtcactataaatttgtcttattctgtttttatgtaccctacataatttgtcacatttttaccaaagtattataagtcacaataacccattatgtataagccagcctatttatagattactgaaaaaaattttatcaacccttgaaatttagaaaaaattttccatagatattttaggctgaattactgaatcataacttttgttgcattatattttgtaaatttgctgacttcgtttagattagacttattaaaatatacataatttcattattcagttgaatgtgaatctgtgcactagttgatgaatttttttaaagttacatataactcattgaagcaatttataagtagcatatagtattcgattcagctacacattttgggtttttttttgaaagaatcggttactgttataattttgactatatactggcaaaataattgctatcactgactccgaatatttgacattaggatcaagtgtattatttgatatgttagattggctaaataaataatataaatttatggcttctctaaaaatgagtcaataagtcaaacaccactttattaaaatttcgtcgatgtgtaactacctaaacttgattttgagtacaagaagtatagtaggaagttcaataacatcaacatctgactaaagtatttacggaaataaacttcggtgggaaagaatacttcatggagaaaggtgaaaagcagatgtccaggaggaaattgtaaagccaaacttattgtttgatacaatatcataaaacataaacttatttttattaaacgcaaataaaaatgttttattagccgagattagaacagcagtagacaaattaaagaacaataaatcaccgggatcggatcaagtagcatcggaattactgaaggaaggaggagacgcactacagaaaacaatacatgtattgataacaaagatatggtcaaataaacagctaccagcggagtggaatggtggtattattgtacca

SEQ ID NO: 3664 - DNA, 431 bp, Diabrotica virgifera
  SmartBlast Evalue=6E-30; Info="LINE-1 retrotransposon-like element, putative (Fragment) n=1 Tax=Aspergillus flavus NRRL3357 RepID=B8NZ53_ASPFN"
gcaagaactaagtaggatcgacagagacaagaaaattttatcagaaactgaacaaaagcagaatagacttcaaaccgagaacgacgatgtgtagagataaggaaggtaatatattgacagaacagcaagagatactaagaagatggacagaacatttacggaaaagctttgaaggagatgggaatgagacgaaccctgatataccattagaccaagcagacaacagagaaaagagtccaccaacaatagccgagattagaacagcagtagacaaattaaagaacaataaatcaccgggatcggatcaagtagcatcggaattactgaaggaaggaggagacgcactacagaaaacaatacatgtattgataacaaagatatggtcaaataaacagctaccagcggagtggaatggtggtattattgtacca

SEQ ID NO: 3665 - DNA, 1878 bp, Diabrotica virgifera
  SmartBlast Evalue=3E-42; Info=Transposase n=1 Tax=Salmo salar RepID=A8C5I4_SALSA
ccccagtgaataatatttatcaatataaatcacaaaaatgtaaagaaataaacttggatgtaaaataaaatatgcactatttttgtccgtgagtgtattacttagctgttactggttctgttagtattatacgtgttcgtatataaactcctggacaaaattaacgcaccactcatatttttctcaataatctttatttattgacaatttactgtacgacaagttgcctatggactttgtttgacagtgacagttattatgtaagctaataatagtcttgttttaacaataatttgtataataatagtcttgttttaacaacaatttgtattaaacttcgttttatactaaaagtgagataaacttttcataaaagtgccgattaaagcaaagtgcttgtgagaaacaagttttttattgtgatatttttcatcacatgcatgtttggaagttcattcgcataaaaatcaaataaaaaaatgaactgccaaagaaatttgtcaatggaggaggcagtgcgagcatcgactctcctagatcaaggatattcaatgcgatacgttgcaggtttgttaggaagacatcattccagcatcagtcgcaaggtgaggcgatataatgaaacagggtcgtaccatcgaagaccagggcaagggcgaaaacgttgcactaatcaaattaatgatcgttttttgagacaacgtgctctcagagataggagagtcaccagcaatttgctaaaaaattgaactagcagatgttcgaaatgtcgcgatatcgtctcgaacagttagaagacgtttacatgaagcagaattgagcaacaggaaaccggccaaaacacccttgcttaccagagaacacagggttcagagattgaattttgcaagattgcatcaaaattggaccatcgatgattggaaacgagttcttttctccgatgagactagagtaagcctaaaagctccagatggtcgtgaagcgtgtctggcgaaggcgaggagaaaggtttgccagctgcaatatctctcctaaagtaccttttggtggtggctctaaaatgttttgcgggggaatttgttttgaagctcgtacggagttggtcctcatacgtacgaggtctacgaatgcccattagtacttagacaacattattgtcgaacatgtaatgccttttgctccgtttcttgcacctaattttttattcatgcaacacaacactcgtcctcatgtggctcgacaggttattggctacctaaatgatgttgatattccattattacagtgaccacctaacagtccggacatgaatcctatagagcatctatgagactctcaaaaaaaaaaagattccaagtcgtagaccccctattgccaatcacaaccaactcattgaggccgttattgaagaatgggagaatattccgcaagattttgttgaacatttgatttcaagcatgcctcgacccataaatgcagtcataagaagtagaggaaggcctacacggtattagtgttgacccagatgcattttattgtattattttactgattgttttctttttgcaatttggagttatgctagcttatttacgcatttccagcaaaaacaaatttttaaagaaacaataaggtaaattaaggtcatgataaagtcatgttggactaatttgtaggtgtttattattatttcaatgtaacttagttttattttgtgttcatattgtaaaatttagattaattaaagtggtgcgctaattttgtccaggagtttataagtgccacagtctttcttgtgccacagtttaatgctaaagaatcagttaattcacatgtattcagttttgaatacatgacgataacgaccaatcacggcaa

SEQ ID NO: 3666 - DNA, 1606 bp, Diabrotica virgifera
  SmartBlast Evalue=1E-46; Info=Transposase n=1 Tax=Salmo salar RepID=A8C5I4_SALSA
ccccagtgaataatatttatcaatataaatcacaaaaatgtaaagaaataaacttggatgtaaaataaaatatgcactatttttgtccgtgagtgtattacttagctgttactggttctgttagtattatacgtgttcgtatataaactcctggacaaaattaacgcaccactcatatttttctcaataatctttatttattgacaatttactgtacgacaagttgcctatggactttgtttgacagtgacagttattatgtaagctaataatagtcttgttttaacaataatttgtataataatagtcttgttttaacaacaatttgtattaaacttcgttttatactaaaagtgagataaacttttcataaaagtgccgattaaagcaaagtgcttgtgagaaacaagttttttattgtgatatttttcatcacatgcatgtttggaagttcattcgcataaaaatcaaataaaaaaatgaactgccaaagaaatttgtcaatggaggaggcagtgcgagcatcgactctcctagatcaaggatattcaatgcgatacgttgcaggtttgttaggaagacatcattccagcatcagtcgcaaggtgaggcgatataatgaaacagggtcgtaccatcgaagaccagggcaagggcgaaaacgttgcactaatcaaattaatgatcgttttttgagacaacgtgctctcagagataggagagtcaccagcaatttgctaaaaaattgaactagcagatgttcgaaatgtcgcgatatcgtctcgaacagttagaagacgtttacatgaagcagaattgagcaacaggaaaccggccaaaacacccttgcttaccagagaacacagggttcagagattgaattttgcaagattgcatcaaaattggaccatcgatgattggaaacgagttcttttctccgatgagactagagtaagcctaaaagctccagatggtcgtgaagcgtgtctggcgaaggcgaggagaaaggtttgccagctgcaatatctctcctaaagtaccttttggtggtggctctaaaatgttttgcgggggaatttgttttgaagctcgtacggagttggtcctcatacgtacgaggtctacgaatgcccattagtacttagacaacattattgtcgaacatgtaatgccttttgctccgtttcttgcacctaattttttattcatgcaacacaacgctcgtcctcatgtggctcgacaggttattggctacctaaatgatgttgatattccattattagagtggccacctaacagtccggacattaatcctatagagcatctatgggactatctcaaaaaaagattcgaagtcgtagacccctattgccaatcacaaccaactcattgaggccgttattgaagaatgggagaatattccgcaagctttttttgaacatttggtatcaagtatgcctcaacgcataaatgcagtcataaaaagtagaggagagcctacacggtatcggtattagtgttgacccagatgcattttattgtgatatcactaatatcactgatttttttctttttgccatttggaattatgctagcttatttacgc

SEQ ID NO: 3667 - DNA, 411 bp, Diabrotica virgifera
ccccagtgaataatatttatcaatataaatcacaaaaatgtaaagaaataaacttggatgtaaaataaaatatgcactatttttgtccgtgagtgtattacttagctgttactggttctgttagtattatacgtgttcgtatataaactcctggacaaaattaacgcaccactcatatttttctcaataatctttatttattgacaatttactgtacgacaagttgcctatggactttgtttgacagtgacagttattatgtaagctaataatagtcttgttgaagttatacttctttaccggcgatagagggtaaatttttatatgggaaaacctagcgaccgggcgcatgcgcaatataactttgttctgattggatgttcaaatgacatgtcaaaaattattcaatat

SEQ ID NO: 3668 - DNA, 2000 bp, Diabrotica virgifera
  SmartBlast Evalue=1E-142; Info=Signal recognition particle 72 kDa protein n=2 Tax=Culicini RepID=B0XFF2_CULQU
cccaaccatctaacactgtgctgaaattattgttcagcttgtccagaagcagttccttgagagcctttaataacttctttagctctcctatctcttttctttctatagccggtcctctcatatttaggtaaccaacgttctggatctggtgcaaccagtgcatcatagtttttgggtaactttcctttacgttttttgtgttttctcgttttcttttgactttcatctcgaggcgtacttggtaacgactcctgtttagatgaaggactctttttgttaaagctgattgtaggaagagcagttgcttccaaagcatctaaatctacttcttttgccaattcttctgtaggtgttaactgtgctgcaagttttacagctttgggctcattaaactgtgcatagcccaatattaactgagctattaatcttaaatcgtttttattagtttttagtaattcctccaaactgtttgctgctacttgtggtaaaccctttttgatatggaattcagctgcttgcctccataactgtgagagatttacacccttaacattatttttttgtagaactctacagttttttcaaatactttaagtgcgacatcttcttttcctatgcctaaatacagggtagttagagctcctactatacctggtttgtatcttgcttctccaagattttctaatatttgacaggcttccgctttttcgccttgcattaggtagatttgggcaatactcaagtttatgtatagattatcatccttagttttgatcttgttaagtaaatcaatagcatctttagatttatcagcctttatcagattaagagcccgaatggtagcagtttggagttgtaattcaggccatctttcatcaatgagcttacatgctttttcacattgatcagtctggttaatataataatttaaaatggcgttattgagagctattagtttcctttgcttcgatggcaatttaaaaaccaatccatcattgagagccactttcattttctttttggaatcaaataaattttggtctttgttgatacaagcaatattattactagctacagccattaatgcaatatcatcaagttttaattttaaatttccagtataaagcagttggctttccttagttcttccttgtttttggtaaacataggctaactgtattctgataagcgccaattcaatgtcaatttcctcttcggtagtttcatcttcctccaacatctctctacacatcttttcacactgcttgagtttcttttcagcctctaaatagttttcatattcaattaataaacatgctttgttataacactgttcataagtgttctcaacaaattcgttaattgtatccatcgcattttcattcttcagatgaaccattgcagcactcaaattggtgtaccgttcatcatcataatcatcatcatgcatatttttaatgatgtctctgtatatagagacagaattatcatattgttcaagtctgtacaaaatctgagctttcaattccttgcaacggaaatccagttcattctcacttaattcaattgtttttaaagcttcttctggtttattaacacgatagtaactataagctttttcaaatattacttcctgtaaaaattgtggatttttgttcatcaaagaaatggcttcctcaaaacgtgataggtgaataagacacaccattttacactggaaagctaaaaattcatgtggagccacacccagaattttatttgatgttttcaaagacctttcgtattccccattttgattaaatttatttaactctgcatataatgatgttattgttttgtcttttatagttttttctgccattctttgtattttagaactttaaaattagtacaatatgtaaatcaaacttaattgcaaatttttctatttttactccattttcacacagtccgctataaattggctgtaaatctaaacatgttacctacttgtgaaatca

SEQ ID NO: 3669 - DNA, 1109 bp, Diabrotica virgifera
ttccattgtatatttcatattatgaaatttattttccatttcttgcatcgaacataatgtgttttcttctataggtaaatagtaacccgtttgcattttcaatgcttcgaaaatttttaataaatgcatagcgatattatcatgcggttgaacacaaataatatttgaatcaaactcatataatgtttttttctggaaatagatttcaagattaacgaacttatgaagaaagagtcgattgttttcaccacacaaaataaacattaaatagtcttctgtcatagccacaaatttgttactttttaaatgagaccagttttctacatgatgttttacatattcgtaatttgaaggtttaaacttcagacagttattgagctgacttaacttgcttttaattaacgtttcgatgctcggtagattaattttaacaacaacaaaaaaacatgtgaatgaatttatgtcttctctgttaatatccaaattcttccattcttcatcactagtattatcttgaaattgttttatgatgattaaaagcttgtcaacgattttttcttcatttttaaatttatacttctttgtctcggtaccaaatatcttcttcaagttttcatcagcacatgttgttgtttcattcataatatcagcaacattcaggtcagcagcagtgcatagtattaaggagttacctgttattttaaaaggtttctttatagttaaatcagataaataagatagaaaatattttgcgatactgaaatcactttttttgggattgactgtcataaaatttttagtgtacgttttaccactgtgaacttttgcttgtaataacatacacgtttcatctgattcaaatacgtgatcatcaaactttcccgcagatttaacttcatttgatatattccaatttgtgtaggttttgattgcagataaaccaaaaagtgtatgtaatgctatggcatagcgatcgccgtcgttgagattatgtgcgtttctcgaatccatcaccctttaattgcaaatttttctatttttactccattttcacacagtccgctataaattggctgtaaatctaaacatgttacctacttgtgaaatca

SEQ ID NO: 3670 - DNA, 688 bp, Diabrotica virgifera
ctagcgagattaattttaacaacaacaaaataacatatgaatgcttttacgtcttctcggttgatatccaaattcgtccattctgcatcaccattattatcttgaaattgttttatgacctttaaaagcttgtcaacgtctttttcttcatttttaattttatacttctttgtctcggcaccaaatattttctgaaagtgtttatcagcatatgtttttgtttcatccataatatcagcaacattcaggtcagcagcagtacatagtattaaggagttacgtgttattataaaaggtttctttatagttaaataagatagaaaatattttgcgatactgaaatcaatttttttgggattgactgtcataaaattgttagtgtttattttaccacttttaacttttgcttgtacccaaatacacttttcatctgattcaaatacaagatcatcaaattttcccgcagattcaagttcatttgatatattccaatttgtgtaggttttgattgcagataaaccaaaaagtgtatgtaatgctatggcatagcgatcgccgtcgttgagattatgtgcgtttctcgaatccatcaccctttaattgcaaatttttctatttttactccattttcacacagtccgctataaattggctgtaaatctaaacatgttacctacttgtgaaatca

SEQ ID NO: 3671 - DNA, 1554 bp, Diabrotica virgifera
aatataaataaacattcgcttaaaaatattcgcaacatcaacaattctttttaacttaaaataagggacaaaacattgaatcctttttacagataacagttatcaaaaaacttacaattcgaaagttacttcaagaagacgctataaaatttgatgttttttccaaacaaacaattacgtattttcgtcaataaacttgccccatttagtgcactgaggctatctggatccattatgcaacttatatattatgctcgaatgtgactacaacagtctaaaacaccctggcttctatctaggggcatataatgagacgtagcagatactggataataatatagttaatactcaacagaaagatccaaggaaaaaaaggaattggtaggaagaaatatttatggctccgaaaacttcgccaatggactggcttatcagcagatgaataattgttacatgccgcgcaagatcgggaacaatattggcaaattgtcatgggagctacacactttgagtaccataccataaatttggtatggtactcaaagaagaagaagaagataactagctatttattaatagcgttaacttaacccaacagaaaaatggacatttaggcaaacagcacaagaaataaacgcgtcaatatatgcataaaagaaaaggtacaagaattaaaacgaataacaatatttaagacgagagtgtatttaagacgagcgaggagaatcataaaatcagttcttcttggcgtactgaaccaggaagaactcaaacggcagagatgcaatggattgaattggaactttgccgaggtggacgcgctctgtattcaagaggggtttcgccggaactgtatccgcagtgagcgttagtggccttctccgatctggagacgatgcatgagcgactgtgtgtcgctgtttgattccgtgtagtgtgatcgctattgtatatattgtgttgtgtattgtatcattctaatattgttattatgttttgatgacaataataagtataatgttatttttcctttgcagaagatagaattatattttatttattttgaactatatataaatatcctaaatatatttactttgtatgtaaccagtgttttactgagtctgtcgtcttaaaagagctacacgtcacacaatattctcgaagaatgagttaaatgcgtattttactgaatgatctaaaacaatgaagacaagtattgtctaaaagtttaaaaaatatgctggtatttccagggggagatggttttaatatcattaaaatgaagaaggtcgcagattttgcaaaaagacgcgaagtaaattaaaattttaaagactaaagaccagaatcaataactaatttgattttggttatcaaagcgtaaatgcaccttcgcgtaagataaatctaacaaagtggttgcaatggtgtcgattttttacatcttagctgctaaatacaaccagaaatctatcttgtatttaatttgtttggttatctgtaaataagcattcagtttttttaataaaaacaatttacaaactaatatcg

SEQ ID NO: 3672 - DNA, 1427 bp, Diabrotica virgifera
aatataaataaacattcgcttaaaaatattcgcaacatcaacaattctttttaacttaaaataagggacaaaacattgaatcctttttacagataacagttatcaaaaaacttacaattcgaaagttacttcaagaagacgctataaaatttgatgttttttccaaacaaacaattacgtattttcgtcaataaacttgccccatttagtgcactgaggctatctggatccattatgcaacttatatattatgctcgaatgtgactacaacagtctaaaacaccctggcttctatctaggggcatataatgagacgtagcagatactggataataatatagttaatactcaacagaaagatccaaggaaaaaaaggaattggtaggaagaaatatttatggctccgaaaacttcgccaatggactggcttatcagcagatgaataattgttacatgccgcgcaagatcgggaacaatattggcaaattgtcatgggagctacacactttgagtaccataccataaatttggtatggtactcaaagaagaagaagaagataactagctatttattaatagcgttaacttaacccaacagaaaaatggacatttaggcaaacagcacaagaaataaacgcgtcaatatatgcataaaagaaaaggtacaagaattaaaacgaataacaatatttaagacgagagtgtatttaagacgagcgaggagaatcataaaatcagttcttcttggcgtactgaaccaggaagaactcaaacggcagagatgcaatggattgaattggaactttgccgaggtggacgcgctctgtattcaagaggggtttcgccggaactgtatccgcagtgagcgttagtggccttctccgatctggagacgatgcatgagcgactgtgtgtcgctgtttgattccgtgtagtgtgatcgctattgtatatattgtgttgtgtattgtatcattctaatattgttattatgttttgatgacagtaataagatagacttatatttgattttatttattttgaaccgtatataaatatcttaaatatatttactttgtttttaacctgtgttttactgagtctgtcgttctgaaagagctacccgttacagattctcctgaaattgaaatctccaacctgaaattttgcatagattttctttggacatttcgtgagataacgttgtcaatatattttttgttagtgacaatacatatatgttgaattcgaccgttgttttttaaatcatgttcttgacttctaagtgataacaaaagctaaaaaatcattgaaaataaaaaactcgacagctttacctcgagaaactcataaaaggtaaaaaatcctttttgaagccattatacactcgcttgtaacgagtgtctctgccgtctgtcttggtctct

SEQ ID NO: 3673 - DNA, 680 bp, Diabrotica virgifera
  SmartBlast Evalue=2E-12; Info=Reverse transcriptase n=2 Tax= Ostrinia nubilalis RepID=A4KWG0_OSTNU
cagcccatagtcgtccactgctgaacataggcctcctcgaaaaacttccattcagatctatcctgcgctgctgcaatccagttggtacaaatcctctttatgtcgtcagtccaacttttgagtggtcttcccgggtttcgtctatccactctcggtctccattccaagatttttttttggtccacctatcatctctcattctattcatccaaatatatttactttgtatgtaaccagtgttttactgagtctgtcgtcttaaaagagctacacgtcacacaatattctcgaagaatgagttaaatgcgtattttactgaatgatctaaaacaatgaagacaagtattgtctaaaagtttaaaaaatatgctggtatttccagggggagatggttttaatatcattaaaatgaagaaggtcgcagattttgcaaaaagacgcgaagtaaattaaaattttaaagactaaagaccagaatcaataactaatttgattttggttatcaaagcgtaaatgcaccttcgcgtaagataaatctaacaaagtggttgcaatggtgtcgattttttacatcttagctgctaaatacaaccagaaatctatcttgtatttaatttgtttggttatctgtaaataagcattcagtttttttaataaaaacaatttacaaactaatatcg

SEQ ID NO: 3674 - DNA, 1461 bp, Diabrotica virgifera
  SmartBlast Evalue=1E-115; Info=Probable serine carboxypeptidase CPVL n=1 Tax=Camponotus floridanus RepID=E2AY00_9HYME
tatttgacaaaaatgtataccctattatatattattgtgctattcacaatagcgcttaaatcagtgaatacatcagggcataaggacttttttaaaaagcccccattcaaagatttctacggaaaactagacgcgaatatcagggttggcgacgcaggtgagccgctcatattgacagatcttatcaaaaatggcgatattatatgggccaaggaaaaagctaaagtgacagattttatgccagaagttagcagttatgctggatatttcagggttgacgaaacttataattcaaatttgttcttctggttctttccgtctcagaacgatcctgcaaatgatccagttatcctttggttacagggaggcccaggtgccacttctatgtttgggttgtttcaggaacatggcccgtttgagtttaatgaaaaaggtgagcttggcctaagaaatacatcttggaaccttcaacattcggtcatttacatcgatcaaccagctggtaccggctggagctttactaataaaggatacgcccaaaaccaaaccaaagtaggcgatgatctctactcagctcttgttcaattcttcactttatttgacgaataccagagtcatcccttcataatcactggggaatcctatgctggcaagtacattccagccattgcccatgctattgacaaatataatccttcagcttcagtacgcattaacctccaaggattggcaattggcaatggtttgactgatcccaagtatcaagtcaagtatgcggattatttgtataaacatggcctggtggatttgaatacgaagaataatctggagaagacagaaaatcaaataattgattacatacttcaggaggaataccatctagctgcaaattctatgacttttgatttggatgacattggaagagcatgtggcttggatatttacaactaccttacactagtatcagatgacagagcgcaagaatatatggaagggttatttcagagagaagacttacgaacagctattcacgttggtaatactgaatttgatgacggaaacgtttacccgaatttgtccaatgatatcccagtctctcaaacccatttagtagctgaccttcttagcaaatacagagttttaatatataatggacagctagatattatagttgcttatccaatgactattgactatttgcaaaatcttaaatttgatgcctcggaggtttacgctaaggccgtaaggcaaatttggcagacaaaaattggtgaagacaatgttatagcagggtatgtcaagacagcaggcaatttaacagagataatggtaaggaatgccgggcatatggtaccgaccaatcaaccacactttgcattggaaatgataaacaaatttgccagaaataaaccaattgttaattaattgtgtaattatagctaaataaaattagtttgaaat

SEQ ID NO: 3675 - DNA, 1461 bp, Diabrotica virgifera
  SmartBlast Evalue=1E-116; Info=Probable serine carboxypeptidase CPVL n=1 Tax=Camponotus floridanus RepID=E2AY00_9HYME
tatttgacaaaaatgtataccctattatatattattgtgctattcacaatagcgcttaaatcagtgaatacatcagggcataaggacttttttaaaaagcccccattcaaagatttctacggaaaactagacgcgaatatcagggttggcgacgcaggtgagccgctcatattgacagatcttatcaaaaatggcgatattatatgggccaaggaaaaagctaaagtgacagattttatgccagaagttagcagttatgctggatatttcagggttgacgaaacttataattcaaatttgttcttctggttctttccgtctcagaacgatcctgcaaatgatccagttatcctttggttacagggaggcccaggtgccacttctatgtttgggttgtttcaggaacatggcccgtttgagtttaatgaaaaaggtgagcttggcctaagaaatacatcttggaaccttcaacattcggtcatttacatcgatcaaccagctggtaccggctggagctttactaataaaggatacgcccaaaaccaaaccaaagtaggcgatgatctctactcagctcttgttcaattcttcactttatttgacgaataccagagtcatcccttcataatcactggggaatcctatgctggcaagtacattccagccattgcccatgctattgacaaatataatccttcagcttcagtacgcattaacctccaaggattggcaattggcaatggtttgactgatcccaagtatcaagtcaagtatgcggattatttgtataaacatggcctggtggatttgaatacgaagaataatctggagaagacagaaaatcaaataattgattacatacttcaggaggaataccatctagctgcaaattatataaattttgatttgaatgacattggagtagattgtggcttggatatttacaattatcttactctagtatcagatgacagagcgcaagaatatatggaacagttatttcaaagagaagacttacgaaaagctattcacgtgggtaatactgaatttgatgacaaaaacgtttactcgaatttgtccaatgatatcccagtctctcaagcccatttagtagctgaccttcttagcaaatacaaagtcttaatatataacggacagctagatattatagttgcttatccaatgactattgactatttgcaaaatcttaaatttgatgcctcggaggtttacgcgaagaccctaaggcaaatttggcagactaagattggtgaggaggatgctatagcagggtatgtcaagacagcaggcaatttaacagagataatggtaaggaatgccgggcatatggtaccgaccaatcaaccacactttgcattggaaatgataaacaaatttgccagaaataaaccaattgttaattaattgtgtaattatagctaaataaaattagtttgaaat

SEQ ID NO: 3676 - DNA, 741 bp, Diabrotica virgifera
  SmartBlast Evalue=2E-50; Info=Probable serine carboxypeptidase CPVL n=1 Tax=Harpegnathos saltator RepID=E2BR37_9HYME
caaggattggcaattggcaatggtttgactgatcccaagtatcaagtcaagtatgcggattatttgtataaacatggcctggtggatttgaatacgaagaataatctggagaagacagaaaatcaaataattgattacatacttcaggagaaataccatctagcttcaaattctataaattttgatttgaatgacattggagtagcatgtggcttggatatttacaattatcttacactagtatcagatgacagagcgcaagaatatatggaacagttatttcaaagagaagacttacgaaaagctattcacgttggtaatactgaatttgatgacaaaaacgtttactcgaatttgtccaatgatatcccagtctctcaagcccatttagtagctgaccttcttagtaaatacagagtcttaatatataatggacagctagatattatagttgcttatccaatgactattgactatttgcaaaatcttaaatttgatgcctcggaggtttacgctaagaccctaaggcaaatttggcagaccaagtttagtgaggaggatgttatagcagggtatgtcaagacagcaggcaatttaacagagataatggtaaggaatgccgggcatatggtaccgaccaatcaaccacactttgcattggaaatgataaacaaatttgccagaaataaaccaattgttaattaattgtgtaattatagctaaataaaattagtttgaaat

SEQ ID NO: 3677 - DNA, 1620 bp, Diabrotica virgifera
gcttttacaaatttagcaaaatcacaacgataaaattagatcagctgtatttaatacagctgatctattatttatcaactttttatgttaatattcaggtttctatacattttctggcgttctaaacgccactagacataaaaataaacattgcaacaagtgaagggtcgaggactgtaatagctcaatgttcctatgtatctagtatgatggcgtttactgtatatttcagctgtatgcatatctgtggtgcattgctttctgatagagcttttaagatgcttttgacgtcataatccataattgcccttaatgtgaggtgagattgaaggtgaacgagggccaagatgtcggtagtgtttgtaactaaagaatattcaagattggacaggatattttgaaggatttgctaaaattgttgccgatcttaggtagaaagcactcgaacaagaggaacactggaacacgaggttcattttacatggttttgaccagagagaaaaaataaaaagtaagaattattttggtgttggttgtttaagttaccaaacatgatttttaaatcaaaaagcaaatgttttagtcagatctcaattgaaagatacatttagtttttaagtctattcttgattttctattttttaatttttattcacattgacaaaacgaaccactatgtttttgttagcttttctatcatctatatctcaattttccttaatggtttaatagcaggttacttcgaactttggtagtttgacctctatataagggaccacttagatagagtctagtccttttttatcaatatattatgcttttttaatcattttcttattctcagttagtcttagtttaactattgcttaaatattttgatatctagcctttatagaaaattgtaataaaatgttttgaaagtaaatcagcttattgccactgctagaaaaatttgctgccaagccgttacaacttggcaaatttatatgtgcctccgatatgcgcaaacaaagaacgaccatgctatgagtgagagagatagcagaaacgcaagtacactcatcgtagaggtgttagttattcaaatttaaaataaaatcatgagaattctgtcagatattgtgtttaaatataatatatttttatttccagcttttgatacaaagtgtaattcagttaacatagtttttatttcaataattatgtattaaatgacgaagaaataattatgaataaataaacaattttaattatattttgaaggtacacagtgtttgatcagtgctgatatttttgaataaaatcaaacgatgcctattctctaaataaaaaatgcaataaaaaccaataagtgaccatgtttctgctctacatgtctccatatccggtgttctgcaacggtcttattagtgttttgtaatcggccactttaactttgttcaccttacaacataaccgtacagatgtattaaagatattgccatttgtgttaatctgagactctcgagttaccttttatagagcaaggttaaataggtcaggatagcccatcactcttgtatttaatattgtctttcccaagtcaaatttcttgttctagattgtaaagagaatgacaag

SEQ ID NO: 3678 - DNA, 1574 bp, Diabrotica virgifera
gcttttacaaatttagcaaaatcacaacgataaaattagatcagctgtatttaatacagctgatctattatttatcaactttttatgttaatattcaggtttctatacattttctggcgttctaaacgccactagacataaaaataaacattgcaacaagtgaagggtcgaggactgtaatagctcaatgttcctatgtatctagtatgatggcgtttactgtatatttcagctgtatgcatatctgtggtgcattgctttctgatagagcttttaagatgcttttgacgtcataatccataattgcccttaatgtgaggtgagattgaaggtgaacgagggccaagatgtcggtagtgtttgtaactaaagaatattcaagattggacaggatattttgaaggatttgctaaaattgttgccgatcttaggtagaaagcactcgaacaagaggaacactggaacacgaggttcattttacatggttttgaccagagagaaaaaataaaaagtaagaattattttggtgttggttgtttaagttaccaaacatgatttttaaatcaaaaagcaaatgttttagtcagatctcaattgaaagatacatttagtttttaagtctattcttgattttctattttttaatttttattcacattgacaaaacgaaccactatgtttttgttagcttttctatcatctatatctcaattttccttaatggtttaatagcaggttacttcgaactttggtagtttgacctctatataagggaccacttagatagagtctagtccttttttatcaatatattatgcttttttaatcattttcttattctcagttagtcttagtttaactattgcttaaatattttgatatctagcctttatagaaaattgtaataaaatgttttgaaagtaaatcagcttattgccactgctagaaaaatttgctgccaagccgttacaacttggcaaatttatatgtgcctccgatatgcgcaaacaaagaacgaccatgctatgagtgagagagatagcagaaacgcaagtacactcatcgtagaggtgttagttattcaaatttaaaataaaatcatgagaattctgtcagatattgtgtttaaatataatatatttttatttcaataattatgtattaaatgacgaagaaataattatgaataaataaacaattttaattatattttgaaggtacacagtgtttgatcagtgctgatatttttgaataaaatcaaacgatgcctattctctaaataaaaaatgcaataaaaaccaataagtgaccatgtttctgctctacatgtctccatatccggtgttctgcaacggtcttattagtgttttgtaatcggccactttaactttgttcaccttacaacataaccgtacagatgtattaaagatattgccatttgtgttaatctgagactctcgagttaccttttatagagcaaggttaaataggtcaggatagcccatcactcttgtatttaatattgtctttcccaagtcaaatttcttgttctagattgtaaagagaatgacaag

SEQ ID NO: 3679 - DNA, 402 bp, Diabrotica virgifera
gcttttacaaatttagcaaaatcacaacgataaaattagatcagctgtatttaatacagctgatctattatttatcaactttttatgttaatattcaggtttctatacattttctggcgttctaaacgccactagacataaaaataaacattgcaacaagtgaagggtcgaggactgtaatagctcaatgttcctatgtatctagtgcggtggctcttactgtatatacttaggacaaaaaatcgaactgtcttatcctaaaggctgatttaaatagatgttccttagcatgggcagcatttggtcgattgcaaacagtatttacatcaaacttaccaaataatactctaactaaacctttgatcagtacgtgttgccagttctgacatacagaactgaaac

SEQ ID NO: 3680 - DNA, 1801 bp, Diabrotica virgifera
cgtagtaacaaaacctattgattattatgctaatctgttattgtttaagcgtcaataacggttttgttttgttttacggttgccggttgccagtccgggacacggcgggtccataggtggtggataatggaatattctctatttgtaaagagaataggggttagatcccccccgaaccaaaactggcaaataagaaaaaaagtacaagaaaaagcggaaatctatttcgaaatatggcgctagtggccgggttgtgttggcgtatatttggtggttgggagggggggggcgcttgtcaaaatggtgccatagcgccaaagaccctaaaaacgggcctgtttggtagccctattgttgtcaggccttgtccttttgggcgtcctcgtttctttactgccactggcattttaattgtcgacaaagcaacatcgttcatttgaagagtttggtgactaataggacgttcattttctcttgtatattcccctccacgttatctaccctacttatctcttgacgaaccacctcaccacacagcttattttcactttcaaatacaacttcatcattactttcaataataacttgcgtgtcattttcgtctgtaacatctataggtgtaagtagaacagcagtatcattggcccacagtgttttgagtttttttaatagattaaacctttgctcaaataaaatgacacttacctaagtcattcaagttttccaaattcaaacttattatttccacaataattaacaattaggtacaaatataactatatactgagactggcactataataaaataagagaatcgtcaactcgtgcattaactcaccacgtgtatatatgctgaactgcaagtgaaagcgaacggcagccgaagaaaatgccgtcaaacgcatcatacgaatgacgtaatagctgttaacggcattatagtgcaagaccgtttgacggcagtttacgtacagcgtattaaaaatctcaatttttcttttaatgtttaatgatgtcagtaattttccaaatgtaaattccaaatatagaatttattcattattattttttctttatttagtttaatgcctcgacaactaatggccattgacattgtgatcattatcaaatatttatattaaattacttaatttttattaatattctattgtaaaaataaaactactagatctggatcccgcgtatggaaaaaaaaatgattaatagcaagctgaaagtttgttaatggcttgagggtgtctggtcggacgactttgatatatgggaacactgaacgaaaacggcacatgtattttgtccgacagaacggacttgaactatccgaacagagattaaactctcatgcaaaaatcagactgctatttatcaccaaatgagcgttttaatgagtggaatatgtagaatatgtcaaatgacagataataaatagcagtctgatttttgcatgatggtttaatctgtttggagagtttaagtctgttctgtcggacaaaataatgtgccgttttcgtggtctgaccgttccaaatttttaacctgttccacaattagaactgcccctgttccagtgttcccatatatcaaagtttatccgactagacacccttaagctattaacaagttttcagcttgctattaatcaacttttttttcatacgcgggatccaaaactaagtgggaagaccacgaaaacgatggaatgacaacttactggagccacattgaaaaacagacagtcatgtctacacaagaagaagaagaaggaaagaagaagaagaca

SEQ ID NO: 3681 - DNA, 1107 bp, Diabrotica virgifera
catgacacttacctaagtcattcaagtttttcaaattcaaacttattatttccacaataattaacaattaggtacaaatataactatatactgcgactggcactataataaaataagagaatcgtcaactcgtgcattaactcaccacgtgtatatatgctgaactgcaagtgaaagcgaacggcagccgaagaaagtgccgtcggcgcatcatacgaatgacgtaatagctgttaacggcattatggtgcaagaccgtttgacggcagtttacgtacagcgtattaaaaatctcaatttttcttttaatgtttaatgatgtcagtaattttccaaatgtaaattccaaatatagaatttattcattattattttttctttatttagtttaatgcctcgacaactaatggccattgacattgtgatcattatcaaatatttatattaaattacttaatttttattaatattctattgtaaaaataaaactactagatctggatcccgcgtatggaaaaaaaaatgattaatagcaagctgaaagtttgttaatggcttgagggtgtctggtcggacgactttgatatatgggaacactgaacgaaaacggcacatgtattttgtccgacagaacggacttgaactatccgaacagagattaaactctcatgcaaaaatcagactgctatttatcaccaaatgagcgttttaatgagtggaatatgtagaatatgtcaaatgacagataataaatagcagtctgatttttgcatgatggtttaatctgtttggagagtttaagtctgttctgtcggacaaaataatgtgccgttttcgtggtctgaccgttccaaatttttaacctgttccacaattagaactgcccctgttccagtgttcccatatatcaaagtttatccgactagacacccttaagctattaacaagttttcagcttgctattaatcaacttttttttcatacgcgggatccaaaactaagtgggaagaccacgaaaacgatggaatgacaacttactggagccacattgaaaaacagacagtcatgtctacacaagaagaagaagaaggaaagaagaagaagaca

SEQ ID NO: 3682 - DNA, 696 bp, Diabrotica virgifera
aatgtaattgcatattcaaacatagcttttaattccgaacaactttttataaaacatttttcgatattgtttaatataaggatactttactcttgagcgaaattcatcttttttgacatacctcgtataaaattcacaaaaatttgaatctgatggttgcatcttatattttatactattaagagcattttatgaagaataacttttttttgtaaaattgataacaaacaagtttccaattgcatttgattatttttccaattccaattcattttattatttttgctggtggctattctcggccaccagttgcccgtgctcacaatttggtgggcccactagttgcgccactagttgcgccaccagttacctagactaatagagccctaagtctgttctgtcggacaaaataatgtgccgttttcgtggtctgaccgttccaaatttttaacctgttccacaattagaactgcccctgttccagtgttcccatatatcaaagtttatccgactagacacccttaagctattaacaagttttcagcttgctattaatcaacttttttttcatacgcgggatccaaaactaagtgggaagaccacgaaaacgatggaatgacaacttactggagccacattgaaaaacagacagtcatgtctacacaagaagaagaagaaggaaagaagaagaagaca

SEQ ID NO: 3683 - DNA, 1269 bp, Diabrotica virgifera
  SmartBlast Evalue=1E-164; Info=Cathepsin L-like proteinase n=1 Tax=Diabrotica virgifera virgifera RepID=Q70EW9_DIAVI
atcaaaataggatttatttttctaaacaatatcaaagaatggtatacaaaatgtactattttatatatttggatacgtagcatcagtagcaataccacattgattctttttgtttctgctcatccatatatatccatccattccccagtcagcaccccaggagtttttcacgatccagtaatcatgtcctttctctgtaccatagcctacaaccagtaccccatggttcaaaaaattgaagtcactgctgcaggaaatatcatcgagtattcctgagtcatataattgaaaattataactagcatcaatagccactgatataggtccttttattacaactgcatttttaaggtcatcttcatcgttcttcttaatatatgtaaagttgctaattttggcagctactttagacctatcaaatctacacttatcatcaatgccttcataaggataatcattttcggacattattcctccagctgcttcaatgtattctagagccttgtccatatatccacctgcacatccattacaactatcttttgcgcaatctacaagattttgttcacttagagagaccagtttccctgtcttaataaaataacctccttctactgttcctgtcgtactgaaactccaacaggatccacaagaaccttgattcttgacctcggtgactgctcctttctctctccaatcaaacatggatggaagatcttttactggagtgagtgaatgtgtcatacggggtttagtgggtttgtcagttttagaaagtcctaacatatcggcaaattctttttcagtcaaatctgaaaatttagttactcccaatttaaaagtggatagtccatggtaatatttttcattgtgattttcgatttttcttaaattttcttgaaaaattgtgaacctcttttgttcttcgacgtaattcctgtagcttttgccttgttttaccttaaactgtacccattcttcattatcacttaatgcttgaactgcagcaatagcaagaaaaataaaaataaaacccttcatcttgaaaataatttcaatatttatacggttctaatttaaacaattattgcttgactgtacacttttttaagattatgaatatgttttatttgaaaactgatctctttatgtttgctgaatgatacaaaatattcttttatactcagttttgtttacaacaaataaacttgcaaaatcaatacaaggttcagacaattttcataattattgggacttactgaaattcct

SEQ ID NO: 3684 - DNA, 1137 bp, Diabrotica virgifera
  SmartBlast Evalue=1E-164; Info=Cathepsin L-like proteinase n=1 Tax=Diabrotica virgifera virgifera RepID=Q70EW9_DIAVI
atcaaaataggatttatttttctaaacaatatcaaagaatggtatacaaaatgtactattttatatatttggatacgtagcatcagtagcaataccacattgattctttttgtttctgctcatccatatatatccatccattccccagtcagcaccccaggagtttttcacgatccagtaatcatgtcctttctctgtaccatagcctacaaccagtaccccatggttcaaaaaattgaagtcactgctgcaggaaatatcatcgagtattcctgagtcatataattgaaaattataactagcatcaatagccactgatataggtccttttattacaactgcatttttaaggtcatcttcatcgttcttcttaatatatgtaaagttgctaattttggcagctactttagacctatcaaatctacacttatcatcaatgccttcataaggataatcattttcggacattattcctccagctgcttcaatgtattctagagccttgtccatatatccacctgcacatccattacaactatcttttgcgcaatctacaagattttgttcacttagagagaccagttttcctgtcttaagaaaatgagctccttctactgttccagtcgtactgaaactccaacaggatccgcaagaaccttgattcttgacctcggtgactgctcctttctctctccaatcaaacatggatggaagatcttttactggagtgagtgaatgtgtcacatgtggtctagtgggtttgtcagctttagaaagtcctaacatatcggcaaattctttttcagtcaaatctgaaaatttagttactcccaatttaaaagtggatagtccatggtaatatttttcattgtgattttcgatttttcttaaattttcttgaaaaattgtgaaccggttttgttcttcgacataatttctgtagcttttgccttgttttaccttaaactgtacccattcttcattatcacttaatgcttgaactgcagcaatagctagaaaaataaaaataaaaaccttcatcttgaaaataatttcaatatttatacggttctaatttaaacaattgcttaactgtacacttttataaaattatgaatatgttttatttgaaaactg

SEQ ID NO: 3685 - DNA, 1135 bp, Diabrotica virgifera
  SmartBlast Evalue=1E-167; Info=Cathepsin L-like proteinase n=1 Tax=Diabrotica virgifera virgifera RepID=Q70EW9_DIAVI
atcaaaataggatttatttttctaaacaatatcaaagaatggtatacaaaatgtactattttatatatttggatacgtagcatcagtagcaataccacattgattctttttgtttctgctcatccatatatatccatccattccccagtcagcaccccaggagtttttcacgatccagtaatcatgtcctttctctgtaccatagcctacaaccagtaccccatggttcaaaaaattgaagtcactgctgcaggaaatatcatcgagtattcctgagtcatataattgaaaattataactagcatcaatagccactgatataggtccttttattacaactgcatttttaaggtcatcttcatcgttcttcttaatatatgtaaagttgctaattttggcagctactttagacctatcaaatctacacttatcatcaatgccttcataaggataatcattttcggacattattcctccagctgcttcaatgtattctagagccttgtccatatatccacctgcacatccattacaactatcttttgcgcaatctacaagattttgttcacttagagagaccagtttccctgtcttaataaaataagctccttctactgttcctgtcgtactgaaactccaacaggatccacaagaaccttgattctttacctcggtgactgctcctttctctctccaatcaaacatggatggaagatcttttactggagtgagtgaatgtgtcacacggggtctagtgggtttgtcagttttagaaagtcctaacatatcggcaaattctttttcagtcaaatctgtaaatttagttactcccaatttaaaagtggatagtccatggtaatatttttcattgtgattttcgatttttcttaaattttcttgaaaaattgtgaaccggttttgttcttcctcgtaatttctgtaggttttgcattgttttaccttaaactgtacccattcttcattatcacttaatgcttgaactgcagaaatagctagaaaaataaaaataaaaaccttcatcgttaaaataatttcaatatttatacggatctaatttaaacaattgcttgactgtccacttttttaagattgtgaatatgttttatttgaaaac

SEQ ID NO: 3686 - DNA, 1537 bp, Diabrotica virgifera
acaatataaaaaattttgcgtcttatactaaaaaccatttcattatttttccctaaacatttgcactggaaaaattacctgttgttttgaataagataggctctgtgactgccttgtaaaaataataaacacccccaaagatatattagtaaaaattggtaactaactttttatacaggaagtcccaacggctagaacgccaatcacagtctatgaaaatgttttgtaaaaaaagcaagagaatggtatagtgatgagcgcgctaataaccggcaaaatagcacaaaagatggaaaacgtattaagttgtgagataaaaagaaattaaactagtcgagctgggaaatttagcgacataaacctaaaattcacattatattgattgtttcccttcctttcaattccatttttagggcgttttatttattgtatatttatatatttacactaactaaagtaataaaccacagaaatttcgtatttattttatcgttcctcctatgcaagtgaagataagagcttaatggtcttaacacctcatacgtcaaatttaataaaaacaatttgaccagtccaaaaaattgacaacaatttgacaggtccaaactggtaaaaaatgtcaatttgttctattaaggagacttttacattctaaataaaaaaaattgtttttgttttctttttacgtaaaaacatcccttattctacattcataatccagatgcagtagaagtaaacaaacagagacccgttaactgttacaaggagcactcctgaatcatgatttacaatgtacaaaatttgtaaatcatcacattatgcgatttacaatgtatacacattttaaatcatgattcaggagtgccccttgcaacagataacgtgtctcggtttgtttacttctactgcgtcttgagtgttaatgtagagtagtatcatagaaatactgtcccaaaattttattaagaaactcgaagtagaaacaaagttatataactcgtttgtataaaacaacgcgcgcgacgcctaacctgtgcagctgcaactcgacagctggcttctcaaacttttaatgggagcaacttttatattattgaaatttatcgaaaattattgttttgaaaatcggaaaaatgtctcgaattaaagagcacttgtatgctgtgtacagtgacccttctccttcgatggcgaccgtcaaaaattggttttacaattttcaacgtggtcgtacgtcggaatatgagaagtcacgcccaggtatcccgaaaattgtcccaattgggaaagaaaaaagtactcttccatcatgacaacgcaccggtcaatacctccgctgtcaccatagccagaaacatgattccattggtacacaccagagaccaagaaacagtagatacagtgggcatatctctgcaaacgtggtctgaagagctgtcacaagcggctgtcaagagcgaagaatgaccagcattttctgggattcacaaggtgtggtcgcaggacttgactaggcctcattattgggctcattcgg

SEQ ID NO: 3687 - DNA, 1269 bp, Diabrotica virgifera
tgttttcgtccgccactggtagaaatggtttgcttgtctgcgcgaaacgctacgtcgcaatcccaaacttatgtttgtccgactctacattctgtgacattttatgaacgctgtcttcatatcgtctgtttcccttcctttcaattccatttttagggcgttttatttattgtatatttatatatttagactaactaaagtaataaaccacagaaatttcgtatttattttatcgttcctcctatgcaagtgaagataagagtttaatggtcttaacacctcatacgtcaaatttaataaaaacaatttgaccagtccaaaaatttgacaggtccaaactggtaaaaaatgtaaatttgttctattaaggagacttttacattctaaataaaaaaaattgtttttgttttctttttacgtaaaaacatcccttattctacattcataatccagatgcagtagaagtaaacaaacagagacccgttaactgttacaaggagcactcctgaatcatgatttacaatgtacaaaatttgtaaatcatcacattatgcgatttacaatgtatacacattttaaatcatgattcaggagtgccccttgcaacagataacgtgtctcggtttgtttacttctactgcgtcttgagtgttaatgtagagtagtatcatagaaatactgtcccaaaattttattaagaaactcgaagtagaaacaaagttatataactcgtttgtataaaacaacgcgcgcgacgcctaacctgtgcagctgcaactcgacagctggcttctcaaacttttaatgggagcaacttttatattattgaaatttatcgaaaattattgttttgaaaatcggaaaaatgtctcgaattaaagagcacttgtatgctgtgtacagtgacccttctccttcgatggcgaccgtcaaaaattggttttacaattttcaacgtggtcgtacgtcggaatatgagaagtcacgcccaggtatcccgaaaattgtcccaattgggaaagaaaaaagtactcttccatcatgacaacgcaccggtcaatacctccgctgtcaccatagccagaaacatgattccattggtacacaccagagaccaagaaacagtagatacagtgggcatatctctgcaaacgtggtctgaagagctgtcacaagcggctgtcaagagcgaagaatgaccagcattttctgggattcacaaggtgtggtcgcaggacttgactaggcctcattattgggctcattcgg

SEQ ID NO: 3688 - DNA, 675 bp, Diabrotica virgifera
acaatataaaaaattttgcgtcttatactaaaaaccatttcattatttttccctaaacatttgcactggaaaaattacctgttgttttgaataagataggctctgtgactgccttgtaaaaataataaacacccccaaagatatattagtaaaaattggtaactaactttttatacaggaagtcccaacggctagaacgccaatcacagtctatgaaaatgttttgtaaaaaaagcaagagaatggtatagtgatgagcgcgctaataaccggcaaaatagcacaaaagatggaaaacgtattaagttgtgagataaaaagaaattaaactagtcgagctgggaaatttagcgacataaacctaaaaatccacatcatattgattgtttcccacctttagacgtatcggacgagtttagcaactgccactgtcacagtgacagttttagttgacatactcctctgatacgtgtaaaggtgggaaacaatcaatataatgtgaatttatatgttaatatcgctaaattcaccagctcgactagtttcatttacttaaaggaaaagatattttccaataatcaaagatcatctggaaggatcaatagataacagaggccacaatgtcttattccatactagtatatacattctgtgacattttatgaacgctgtctt

SEQ ID NO: 3689 - DNA, 1503 bp, Diabrotica virgifera
gtttaatatttcccgagataatactatttgtttataagccggggaattgtttataattttaaaatatccttgaggccgcttaaacggtcccatttcattctgtaaagtgcattatatgggtgcagtgtctttttgtacaaaaatcagaattattcttatgtgtcataattagtgtgaccaactaccccgaaaaatccgggacatggcccgaattacgaagttgtgtcccggcgtcccggacaaggcttccgggccatccgaattttcaactttttggtaaaaatctatattttcgtttttattccaagaatttacatcaaattaaattgttaagacgaaaaaaaaatttttatcgtggtataaattttaatagttctatgaaagaaaacgaaaactgtggatttttttacttgtctgttttaattatcgtcttccgaaaagaccattcaaaaacaataataattcatgtcacaatgaatcatacctaggcacgcatgtcgcatcgaaagatgtaatgtaatgattgttgatgcatctttttcttcggttttgtcaaccactttaagtagattttaactcttgagttcgttcgcgaaatatgattaatttccaaatcgttgcatgctttgagccaaattcaaatctgctgcgttgcaatatgatttttttatctaaacatttattttattgtcagtacagtaatcagtttgaatccgaaaatcgattagtgaccatctcggaattattgtttttgacctgactttttcattccaatatattattgttgttaatatgaataatggaaccaacacaagaaagtaaaaacagaaaacgatattggactttcaataaaatattggaagaatttctatttttgaaaaaaaaagtaactctaacagtaacatgaagtgtgatacttgtggatcggaattttcgatcgcccacagtggtagagcggatatactaagtcacatcaaaagtgaaaaacactgaagaggtatctgctccgcgtccagcagcaaaaaattgacttaatttttcaagccaacagcttcatcgagcattgatttagagacagcagctcgggaaggtgtttgggcgtatcatttgattaagcccatcaaaaatatcattgtcaacataaaaatgttaaataaccaataaaatgatgatattagagtcctatatttaaaaaataacaaatgacccgattttcattcaaaagtcccggattttaggtatttttttcagcattgtcccggattcgactgaattggagttggtcacactagtcataaattataccagacattctggagtcaaaggtagttcgattgaatctggcttaccttagtacaagtgtgctcatggaaggagttacagacctttgaggttacaaaatgaaaatcgatttttttcaatatatcgaaaactatcggagattttttattgaaagtggacatgcatcattctcatgggaggagcatcgtgaagcaagggtta

SEQ ID NO: 3690 - DNA, 1467 bp, Diabrotica virgifera
cttttctgttcttttataaattgtgctccttttcagtaaattaaattttctggaataccgaagaatggctcatacaacggatcatgaatgcgatacaatatatacagggtgtcccgaaaagattggtcataaatagtgtgaccaactagcccgaaaaatccgggacatggcccgaattacgaagttgtgtcccggcgtcccggacaaggcttccgggccatccgaattttcaactttttggtaaaaatctatattttcgtttttattccaagaatttacatcaaattaaattgttaagacgaaaaaaaaatttttatcgtggtataaattttaatagttctatgaaagaaaacgaaaactgtggatttttttacttgtctgttttaattatcgtcttccgaaaagaccattcaaaaacaataataattcatgtcacaatgaatcatacctaggcacgcatgtcgcatcgaaagatgtaatgtaatgattgttgatgcatctttttcttcggttttgtcaaccactttaagtagattttaactcttgagttcgttcgcgaaatatgattaatttccaaatcgttgcatgctttgagccaaattcaaatctgctgcgttgcaatatgatttttttatctaaacatttattttattgtcagtacagtaatcagtttgaatccgaaaatcgattagtgaccatctcggaattattgtttttgacctgactttttcattccaatatattattgttgttaatatgaataatggaaccaacacaagaaagtaaaaacagaaaacgatattggactttcaataaaatattggaagaatttctatttttgaaaaaaaaagtaactctaacagtaacatgaagtgtgatacttgtggatcggaattttcgatcgcccacagtggtagagcggatatactaagtcacatcaaaagtgaaaaacactgaagaggtatctgctccgcgtccagcagcaaaaaattgacttaatttttcaagccaacagcttcatcgagcattgatttagagacagcagctcgggaaggtgtttgggcgtatcatttgattaagcccatcaaaaatatcattgtcaacataaaaatgttaaataaccaataaaatgatgatattagagtcctatatttaaaaaataacaaatgacccgattttcattcaaaagtcccggattttaggtatttttttcagcattgtcccggattcgactgaattggagttggtcacactagtcataaattataccagacattctggagtcaaaggtagttcgattgaatctggcttaccttagtacaagtgtgctcatggaaggagttacagacctttgaggttacaaaatgaaaatcgatttttttcaatatatcgaaaactatcggagattttttattgaaagtggacatgcatcattctcatgggaggagcatcgtgaagcaagggtta

SEQ ID NO: 3691 - DNA, 506 bp, Diabrotica virgifera
ttacatggaaattcaacatcagttggttttctaaatttgtcctttttgagaacaatttccgtgttgcagtcgaaacgtcaaaaattaacaaaaatgtaattatcattacaacccatcctgtcatcctgttaaaaaaaaattaatgttgtttaaaaataataattataaaaatgttaaataatataatcaataaaatgatgatatcaatcagtactatcaatggaaagtcccggattttaggatttttttttcagcattgtcccgaattcgactgaattggagttggtcacactagtcataaattataccagacattctggagtcaaaggtagttcgattgaatctggcttaccttagtacaagtgtgctcatggaaggagttacagacctttgaggttacaaaatgaaaatcgatttttttcaatatatcgaaaactatcggagattttttattgaaagtggacatgcatcattctcatgggaggagcatcgtgaagcaagggtta

SEQ ID NO: 3692 - DNA, 1415 bp, Diabrotica virgifera
tctttatcgaacgagtctgatattatgagcagagcgagcgtagcgagcgaggttccgaataacagacgagttcgataaagagtctttactgacgtggtgcatacaaaattttatcgccagcaatttgatattggttttaatacttcttacaattacaatttaagaattttttaaattttagacgtaataaaaatttcatgacagtgatgacaggtgacttctgcatgatggccgctttcgatttttaatcgatagttatcaatattgaataattctaaatcggtaaagtgttgatttattttatataaatataattacaaaatactacagaatttcactttttgacatcaatttaattaacaatgtcgtaaattttgtacaatatttttaataattaaagtaaataaattgtaagttaactcaaataaataatcgattactgccatcgaccacttacattcaattcgattaatcgcggcaggtaaagtaaaattcttctttcagtacaataaagtgttactttactgccgcaaatgagggcaaatgagtacaataatgaatgactttaagtgacggttggcgataaaataaatgatgcgcctatgtctgttaatacgatattcttttaatacttgccatcagtcagtttgtttgggtgttccaaccaatgaactgtccaacaccgatggaatgggcaaaaagtgaatgtaatgacgccatgatgagatagcgctagtcagggaaggagggaagataatggccatctttcgtaaacaaaaaaattatagtggtagtcagcgttgccagcttggggtatttttccataattttggagtaatttgaaagcgtctagagcaataatttttctaagcagaaatggttggggagggacaattatgagatattttaaggggtcatggtaaattaaatttgcgtatatacgtctgtataattatactctcatataatcgaagacgataggacctatgaattatttccagggccttctgttgataagtagtataattttggtttactgttcactacatttgactactaatttattaaactgcggcaaaaatttaaatttaaggggtttgagcttcaatttgagggaatttcagtttctaagtgggggatttataaaatcacatctggcaactctggtcattatgataatatccaaccaatgaagaagtcaaattttccctgacaagctctgtctctctctaggacctctcacttgtatgttggccgcaatctcgcttcactgtttgaatgggatggggccattccatccggccattccatccgtgttgtgacagttcattggttccaaccgactttataaaaacattatacgatctgtctattacaataattgtaatcatagtagccatacttttaagagtaag

SEQ ID NO: 3693 - DNA, 1345 bp, Diabrotica virgifera
tctttatcgaacgagtctgatattatgagcagagcgagcgtagcgagcgaggttccgaataacagacgagttcgataaagagtctttactgacgtggtgcatacaaaattttatcgccagcaatttgatattggttttaatacttcttacaattacaatttaagaattttttaaattttagacgtaataaaaatttcatgacagtgatgacaggtgacttctgcatgatggccgctttcgatttttaatcgatagttatcaatattgaataattctaaatcggtaaagtgttgatttattttatataaatataattacaaaatactacagaatttcactttttgacatcaatttaattaacaatgtcgtaaattttgtacaatatttttaataattaaagtaaataaattgtaagttaactcaaataaataatcgattactgccatcgaccacttacattcaattcgattaatcgcggcaggtaaagtaaaattcttctttcagtacaataaagtgttactttactgccgcaaatgagggcaaatgagtacaataatgaatgactttaagtgacggttggcgataaaataaatgatgcgcctatgtctgttaatacgatattcttttaatacttgccatcagtcagtttgtttgggtgttccaaccgactttataaaaacattatacgatctgtctattacaataattgtaatcatagtagccatacttttaagagtaagttagagatgggatagacggttcccgttccctttaatgattcgatggtaacgattctttaatcacaaccaactacttttaagaatactatgacttaaattctctgactataaattaatacatacaaaatactgatatagcttttattttctacattcttgttatcttttacgtgataattccagcaccaaataaccccaaaaagaattgtatatcgtttttagcgatattataaaaagtaatattaaaactagtaccttttccaagctccaatttcaagtaaacgcgaaatatcaaactaatataaaaatgcaagtattacacttaagaataattataacttaagaaataaatacaaaaaataatacttaaataatgtgagcaacaacatacagttctgtttatttactcgtttctgttcaatatgtatcaatacacagtttatttatcttcaaatggcgttaatacatacaactcttgacatttcccattacatttgaggaagcaaacaatatagcgccatctagtggtgtgcggtgataaccagagtaatctaacgttacatttatacaattgctttattatttttttgtataagtgtttgaac

SEQ ID NO: 3694 - DNA, 694 bp, Diabrotica virgifera
tctttatcgaacgagtctgatattatgagcagagcgagcgtagcgagcgaggttccgaataacagacgagttcgataaagagtctttactgacgtggtgcatacaaaattttatcgccagcaatttgatattggttttaatacttcttacaattacaatttaagaattttttaaattttagacgtaataaaaatttcatgacagtgatgacaggtgacttctgcatgatggccgctttcgatttttaatcgatagttatcaatattgaataattctaaatcggtaaagtgttgatttattttatataaatataattacaaaatactacagaatttcactttttgacatcaatttaattaacaatgtcgtaaattttgtacaatatttttaataattaaagtaaataaattgtaagttaactcaaataaataatcgattactgccatcgaccacttacattcaattcgattaatcgcggcaggtaaagtaaaattcttctttcagtacaataaagtgttactttactgccgcaaatgagggcaaatgagtacaataatgaatgactttaagtgacggttggcgataaaagttgttattttattatttcgaatactttctctcctatacacctactataacactgcgcacagacgccgtaccacaccggcacctttagaatgtgtgcactctgttt

SEQ ID NO: 3695 - DNA, 1578 bp, Diabrotica virgifera
ttgcatttattgaagcaaataacagtttactgaaaatgtataaagttacccaaagtataaatgcttaatataatactattttttattggaactacacttttagtgtacctatacttatgttgtaaatggcacttagtttggtatagcatagagccagattataaaacgttaattaataatgtaagatagtaaaatcatgactttagttgttatagcacaaatttgaatctgcacatttgcaggaaagtatgaatatttcgaacattttgttcaatcaagcaacttactcatagcaaagcgtatttacgacaatttattaaatattagtttaaaaaagttgtacccaaaaaagttgaattatcttatcacattcgcggacacgactgcatatgcagacacttacaaagggacatgactgtgtgcatatgaggatgggtcctcgaatgttttatacgtgaagccgcaaaacataattttacaaaagaaatcaaaactagtaatcaatatacagggtgtttcattaataattgtccacacagtaactggagaaaccttagcacaaaatacgaagattctaacctaaaacacttaaaaaatgtggctcattactgagttacagggtgtttcatctaaaaattcaaaattctatcttgctcagcactctaaaactattcgacgtatccatttcatatttggcagaaagtgcgactactatacaccctactaagttatgataaacaaacgtttctagctactaccagaggcttacgacaggagatagtggatggttgacccttctcaaattctacgccactagaggaattactattttagtgccatttttagattctccaatactttctaggtaaataatatactcctcattggtaccgataaagtcattagtttttgagataatttgaagttaaatatgaaacggcacagttattttgataatttatgatatatgattcatatgattaaaatttaaaaattatttgtactcagtactttaaaactatttggagtatcctaatcatacctgacagaaaatgtaggcacagcacaccctaccaaatcaagataaacaaacgttcctagctactaccagaggcgcacgacagggggtagtggctggttgaccccttccaaattccacgccactgacgaaatggccactttagtgaaattttccgattttccactattttctatgcaaataatacactcttcattcgcaacgccaaaatgattagttttcgagatatttgaaattaaaaatgaaacgacacactaaggcccggtactttatgtctccgttaacagccggtcagttaaccggggtttaatcgggacagaaatatatgcataacatagacataaacgcaattatactcattattatattcataaataattataacaataattataattgcttttattacaacgcaagaggccctatgaggtacttttctgtcccgattaaaccccggttagctaaccgaggtttaaccgggacataaagtaccggccctacattaatcaaaataaccgtgtcgtttcataagatctcga

SEQ ID NO: 3696 - DNA, 958 bp, Diabrotica virgifera
ttgcatttattgaagcaaataacagtttactgaaaatgtataaagttacccaaagtataaatgcttaatataatactattttttattggaactacacttttagtgtacctatacttatgttgtaaatggcacttagtttggtatagcatagagccagattataaaacgttaattaataatgtaagatagtaaaatcatgactttagttgttatagcacaaatttgaatctgcacatttgcaggaaagtatgaatatttcgaacattttgttcaatcaagcaacttactcatagcaaagcgtatttacgacaatttattaaatattagtttaaaaaagttgtacccaaaaaagttgaattatcttatcacattcgcggacacgactgcatatgcagacacttacaaagggacatgactgtgtgcatatgaggatgggtcctcgaatgttttatacgtgaagccgcaaaacataattttacaaaagaaatcaaaactagtaatcaatatacagggtgtttcattaataattgtccacacagtaactggagaaaccttagcacaaaatacgaagattctaacctaaaacacttaaaaaatgtggctcattactgagttacagggtgtttcatctaaaaattcaaaattctatcttgctcagcactctaaaactattcgacgtatccatttcatatttggcagaaagtgcgactactatacaccctactaagttatgataaacaaacgtttctagctactaccagaggcgtacggcgggggatggtgaatgattgacccttcccaagttctacgccactgggtgaattactattttgacgaaatttttcgattctccaatgctttgtatgtaaataactttattggtatcgataaagtcatcaatttgagagatatggaagtttaaaatgaatgaatgaatagaatcaagataactatgccg

SEQ ID NO: 3697 - DNA, 913 bp, Diabrotica virgifera
ttgcatttattgaagcaaataacagtttactgaaaatgtataaagttacccaaagtataaatgcttaatataatactattttttattggaactacacttttagtgtacctatacttatgttgtaaatggcacttagtttggtatagcatagagccagattataaaacgttaattaataatgtaagatagtaaaatcatgactttagttgttatagcacaaatttgaatctgcacatttgcaggaaagtatgaatatttcgaacattttgttcaatcaagcaacttactcatagcaaagcgtatttacgacaatttattaaatattagtttaaaaaagttgtacccaaaaaagttgaattatcttatcacattcgcggacacgactgcatatgcagacacttacaaagggacatgactgtgtgcatatgaggatgggtcctcgaatgttttatacgtgaagccgcaaaacataattttacaaaagaaatcaaaactagtaatcaatatacagggtgtttcattaataattgtccacacagtaactggagaaaccttagcacaaaatacgaagattctaacctaaaacacttaaaaaatgtggctcattactgagttacagggtgtttcatctaaaaattcaaaattctatcttgctcagcactctaaaactattcgacgtatccatttcatatttggcagaaagtgcgactactatacaccctactaagttatgataaacaaacgtttctagctactaccagaggcttacgacaggagatagtggatggttgaccccttccaaattccacgccactgacgaaatggccacttagtgaaattttcctgattttccactattttttatgcaaataatacactcctcactcgctaacgctaaaatgattagttttcg

SEQ ID NO: 3698 - DNA, 1584 bp, Diabrotica virgifera
  SmartBlast Evalue=2E-91; Info=Endonuclease-reverse transcriptase n=1 Tax=Bombyx mori RepID=D7F173_BOMMO
gcacgcccagggataacgcggatgaaattgtcgaaaacccgcagaatatagacttgcatatatcttgcgagtccccttccaaaatggagataataacagctatcaaatctctgagaaataacaggtccccgggaatcgataacattgctgccgaactacttaaaactgacccgcatctaaccgctgaacttttgctccccataatccgagaggtgtgggaaacaaaccgcattccagcgggctggaaaaaggtaatattattaagcttccaaaaaagggcaacctcacactgtgcaaaaattggagaggaataaccttgcttaccgtcataaataaaatttttacgatcatcatacataaaagattaacaaacaaggttgaatttcgagcgaatcaagcaggttttagaccagaatcttcctgcatagatcacattaatacagtgagggtaataatggaacaatcggttgaatggaacacacctctatacatggtctttgtcgatttcgaacgtgcctttgacagcctgtctcatgctgctatatggaaaattttagagctaagaaacattcaataaaataatttccattataaagtcactgtacactgaggcgacgtgcagcgtgacacacaatgggatcaacagtgacgaatttgacgtacttactggagtcagacagggatgtgtgctttctccgtttctgtttaacatagctctagactatgttctctccaaactagacttcgacacaaaagggatacgatggacgttaaccacacgcctaagtgatctggaatacgccgacgatatctgcctgttaggacaaaggttccaggatgtggccgaccaattggaaacactatccactgaggccaataaaataggtttaaaaatcaatattagtaaaaccaaatccatgagaataaacgcaaggaacaacacgctatttaatatcgacaacatgcagattgaaaatgtggaaaacttcacgtaccttggaagtgtcataacagaaagcggaggtacagaaaacgatattcgtatgaggatacgaaaagctcaacaagcattcagcatgcttaaccctgtttggaggtctggggaatatactacaaggacaaagatccgaatattccagtcaaatgttatatctgttctactctatggatgtgaaacctggaaagtgacaaaatcccttacagacaaattgcaggtctttgttaacaaatgtctacgaagaattgtgcgtattttctggccaaacaccaagatctgctacacctgacccaacaaaagagggtagaaaatgaaataaaatccagaaagtgggggtggataggtcacacactccgaaaagatagttccagtattgcaaaaactgccctagagtggaatccccaaggaaaagagaaaaagaggtcgcccagcacaaatttggagaagatccatcatggacgagataagaagtcaaggaaagtcttggaatgaggtgaaggccctagcgcaaaatagaacccgatggcgcgttttcactgaagctctatgctccacttaggagttcaagaacattatatatatatata

SEQ ID NO: 3699 - DNA, 1395 bp, Diabrotica virgifera
  SmartBlast Evalue=5E-58; Info=Endonuclease-reverse transcriptase n=1 Tax=Bombyx mori RepID=D7F173_BOMMO
gttaaaagaaatgactagagacatcacgtcgaccaatacactccgagtatcaggattgaagacagtatgagattgatcctgcacagaaatatccgaaaattgcagggtgaatgaaattaaggaatatattacaaggggaacagaactaaataattgaaaaaaaacaaatttcttggcaataaaagataagtatggtatgttaaacagtaaatggttaagttcaattagttaccactataaacagcccggattaaccgataatagtataaaaggcccggtttcaggtaaaatttattttaggctttattatgggagtaccgtctagtcagtgttaattgcaaaagaccaactctgtctacctcggtggcttatcgctccgggtgggtcttaacaatgggccaggtcagataaatttaataatatttacgaccgcactaattgaattcaaaccatttactgttgaacaaaccatacttactggagtcagacagggatgtgtgctttctccgtttctgtttaacatagctctagactatgttctctccaaactagacttcgacacaaaagggatacgatggacgttaaccacacgcctaagtgatctggaatacgccgacgatatctgcctgttaggacaaaggttccaggatgtggccgaccaattggaaacactatccactgaggccaataaaataggtttaaaaatcaatattagtaaaaccaaatccatgagaataaacgcaaggaacaacacgctatttaatatcgacaacatgcagattgaaaatgtggaaaacttcacgtaccttggaagtgtcataacagaaagcggaggtacagaaaacgatattcgtatgaggatacgaaaagctcaacaagcattcagcatgcttaaccctgtttggaggtctggggaatatactacaaggacaaagatccgaatattccagtcaaatgttatatctgttctactctatggatgtgaaacctggaaagtgacaaaatcccttacagacaaattgcaggtctttgttaacaaatgtctacgaagaattgtgcgtattttctggccaaacaccaagatctgctacacctgacccaacaaaagagggtagaaaatgaaataaaatccagaaagtgggggtggataggtcacacactccgaaaagatagttccagtattgcaaaaactgccctagagtggaatccccaaggaaaagagaaaaagaggtcgcccagcacaaatttggagaagatccatcatggacgagataagaagtcaaggaaagtcttggaatgaggtgaaggccctagcgcaaaatagaacccgatggcgcgttttcactgaagctctatgctccacttaggagttcaagaacattatatatatatata

SEQ ID NO: 3700 - DNA, 449 bp, Diabrotica virgifera
  SmartBlast Evalue=5E-26; Info=Endonuclease-reverse transcriptase n=1 Tax=Bombyx mori RepID=D7F173_BOMMO
gttatgtctgttctactctatggatgtgaaacctggaaagtgacaaaataccttacagacaaattgcaggtctttgttaacaaatgtctacgaagaattgttcgtattttctggccaaacaccatcagaaacgaagatctgctacacctgacccaacaaaagagggtagaaaatgaaataaaatccagaaagtgggggtggataggtcacacactccgaaaagatagttccagtattgcaaaaactgccctagagtggaatccccaaggaaaagagaaaaagaggtcgcccagcacaaatttggagaagatccatcatggacgagataagaagtcaaggaaagtcttggaatgaggtgaaggccctagcgcaaaatagaacccgatggcgcgttttcactgaagctctatgctccacttaggagttcaagaacattatatatatatata

SEQ ID NO: 3701 - DNA, 554 bp, Diabrotica virgifera
cgcatcgaaaaatgcataaacatgttaaaatcagtatattaagggccagattttcttatttcggggtatttggggtcactgaacacgaatttgcaatcagaaccgacctccgaagcacctgggtgcccagggttactgctaaggtacgtcatctagagtttcgagggtttgtttttggcacttaattgatgcaaacagattactcgagattactgatattgtggagcagcaatgacagaacaattacatatcatttaatttctatccattaaatagatcggtgaaggtcgttatatcggatcttatacttatacgaaatactgagaaatgcgattctcgatatgattaccggtactgaaatacaagagtaatcatagtaatcaaagtatcctactaatactaatacaaaatatgtaatgagaaatgcgattctcgatatgattaccggtactcaaatacaaaagtaatcaaagtaacgaatacttaaaatgattactttatacaaaagtaacgatttgtaacgaatactctaaagtaactataatcaacatcac

SEQ ID NO: 3702 - DNA, 524 bp, Diabrotica virgifera
cgcatcgaaaaatgcataaacatgttaaaatcagtatattaagggccagattttcttatttcggggtatttggggtcactgaacacgaatttgcaatcagaaccgacctccgaagcacctgggtgcccagggttactgctaaggtacgtcatctagagtttcgagggtttgtttttggcacttaattgatgcaaacagattactcgagattactgatattgtggagcagcaatgacagaacaattaacaacattaattaacaaaatcataaaacacaataaaataccggaagaatggagaacaagcgaactaattctagctattcaaaaaaggagataaaaagcagccagaaaactacagagtatcaacttgttaaatactaccctaaaacttacaactaaattttacaagacctaatgaatcagaggataagtttagcagatgaacaacagggtttttcgtactggaagatcgtgtaacgatgcaatattcgtcataaagcaaattactgagagatcactaga

SEQ ID NO: 3703 - DNA, 1650 bp, Diabrotica virgifera
acaacggccagctttagttattaataaaattgattttacaaaacttttcgataaacctcaagcaattgttagttttttaattgatttttaacacggcttttaaatatatttattaatcgtatacaaggtttctttttgcacatctgatggaaccattactttttatataatatttatataatttttgttttacttattagttttatagccatatttggttaaaacctcattcgaagtatgggctaaatagtttatattttacaatttctaaataattaatgtacctatctgtgtttattaaaactgactgcaatataccaatgttctgtttatttaaagtaaaaataatcacaatcattttaactattattagcattataataaataatactacaaaatttcaactcatcattatcatcatctttggctggacaatcttttgtggatcctgctaacgcattgattggtatagtactgttctcttgttactgtcgtatgcgtccgtgaagtcgacgaagaggtgatgagtttcaatgttatggcgtcatcacatgtatgcttatggctttatgcgcccaaatatttgtccttctgcgttatgagtacgcattaaacgaatattgacgaatgaaccctaaccccatcctatgcggccgaataaggtgcataactaataacacatagcgaagtgtgatacctccattaaattcatttttctcgagtatctgttcgattgaattaatctgttctaattgtcgattttgttggagtgaatccggccaggtatcttccaattatgtatatccattgtgtaagcctgtagcctttcgtataaaatattcgctagtattttgtaagcatgctgcatgatacctctgaaggtgtcactctatacctggtcgcctttttatgtaatgggcatatatcacgccttgagaccattcacaaggcaaggtttcattttgccagacaagaagtaaaagtttatgcagtgtctgtagcaggggattgccccctcaattccaaatttcagctgctgaagccaattacatcaaatttggccaggttgtgctttcgactctatctttggagtcatctttaatgcatttttcactcacagttttagtgagcaatgagaaattttagaaaatatattaaattataatatttattacgttattttaggggggactatattttacccaaaataaatagccaattataaaatatttattttttggtccatactacgaagaatagtttattgtaatacgtacagggagagagttacgtgcttagcttatgaaagaagggaagatatctgtgaagcaatttattttattatgtagatacttcaatcatgctggtcagtggcgtaacttaatttttgaacttttcgtaaaactcgtattaaattgttagtgtatcctgcagaaaaggtatttcctattgcgttttcgctattatgaaaggcctattttttgccttgattcttcgtcacttctagtaacgtctacctatatactgattcacaaagcttaaatccatccataactttttgtagaagaacttgttaccttttttcttttattttcatttcattttattttggttttcattttaaaattgtatttatacaatattacgttt

SEQ ID NO: 3704 - DNA, 1177 bp, Diabrotica virgifera
ctgtcgtatgcgtccgtgaagtcgacgaagaggtgatgagtttcaatgttatggcgtcatcacatttcgctatatgctacttcttatgcggctacgctgtatgcgcccaaatatgcgttatgcgtacgcatacgcattaaacgaatattgacgaatgaaccctaaccccatcctatgcggccgaataaggtgcataactaataacacatagcgaagtgtgatacctccattaaattcatttttctcgagtatctgttcgattgaattaatctgttctaattgtcgattttgttggagtgaatccggccaggtatcttccaattatgtatatccattgtgtaagcctgtagcctttcgtataaaatattcgctagtattttgtaagcatgctgcatgatacctctgaaggtgtcactctatacctggtcgcctttttatgtaatgggcatatatcacgccttgagaccattcacaaggcaaggtttcattttgccagacaagaagtaaaagtttatgcagtgtctgtagcaggggattgccccctcaattccaaatttcagctgctgaagccaattacatcaaatttggccaggttgtgctttcgactctatctttggagtcatctttaatgcatttttcactcacagttttagtgagcaatgagaaattttagaaaatatattaaattataatatttattacgttattttaggggggactatattttacccaaaataaatagccaattataaaatatttattttttggtccatactacgaagaatagtttattgtaatacgtacagggagagagttacgtgcttagcttatgaaagaagggaagatatctgtgaagcaatttattttattatgtagatacttcaatcatgctggtcagtggcgtaacttaatttttgaacttttcgtaaaactcgtattaaattgttagtgtatcctgcagaaaaggtatttcctattgcgttttcgctattatgaaaggcctattttttgccttgattcttcgtcacttctagtaacgtctacctatatactgattcacaaagcttaaatccatccataactttttgtagaagaacttgttaccttttttcttttattttcatttcattttattttggttttcattttaaaattgtatttatacaatattacgttt

SEQ ID NO: 3705 - DNA, 553 bp, Diabrotica virgifera
acaacggccagctttagttattaataaaattgattttacaaaacttttcgataaacctcaagcaattgttagttttttaattgatttttaacacggcttttaaatatatttattaatcgtatacaaggtttctttttgcacatctgatggaaccattactttttatataatatttatataatttttgttttacttattagttttatagccatatttggttaaaacctcattcgaagtatgggctaaatagtttatattttacaatttctaaataattaatgtacctatctgtgtttattaaaactgactgcaatataccaatgttctgtttatttaaagtaaaaataatcacaatcattttaactattattagcattataataaataatactacaaaatttcaactcatcattatcatcatctttggctggacaatcttttgtggatcctggtataccaaactaacgcattgattggtattcgaggtgtgcaagtacttggaagggatacgtgaaacgatcgtgcgcgaatagcggagaaatattgcaacttt

SEQ ID NO: 3706 - DNA, 2075 bp, Diabrotica virgifera
  SmartBlast Evalue=1E-132; Info="Rho-GTPase-activating protein, putative n=1 Tax=Pediculus humanus corporis RepID=E0VEE4_PEDHC"
gacagctttatccgagagatttttctatcaaggatgttttttgtacagtaaagtgtaaagtaaaaaattgtgcgaacagtgatttaataaacgagcaagtaattatttcttgttctagtcatgttttcttaattgtgaactgtattttcaaaaacaatcatggataaaccgcaatttagtcccagtaaaggaactcctgtgaataattttgggactgacaacgatgaaccctacccaagtctatcagattatcatgattatgagccaaatcttgagtttgacgactctgaacttcaacattctacaactgttttagcccacacagttgatatgatccaggtcgaatccaatagcatgggctctccgatatcggacttcacggatgacaacttcgaagaagaactagcagaagcttgcgaggagaacttggacagtctgatgttttgttcgacttcatatccagaagtcggagatactgctcccgaaaagttttctgagatttcgagatacgggatcgtcgatgtcaaaggagatgatgcagatgggagaaaaattattgtcgtttacgcttgcaagttgcctcaaattaaggagattgatcatggattgttgttaagttatttgaaatataccttagaaagttatgtaaagcaagactacagtttaatttattttcaccacggactgacgagtaaaaacaaaccctcgatagggtggttggtccaagcttataaagcattcgacagaaattacaagaagaatctgaaagcgttatatctagtccatccaacaagctttcttaaattcgtttcgcaactgtttaggccccttatcagtgccaagtttggaaagaaattgaactatattcacaggctgaaggagttaaacgactttataccgatagaaaaattggatattcccaatgaagtgatagaacatgataagaaactcgggggagaggttccagtttcaagaacgtctcccgactctgtttatgagccgacgtgccctacccaacaattcggagttactctgcagtacattagggatcagtacaatgtaatcattccgcctgttgtgaaacaatgtatagaatacttagaccagcctgacgcattagaaacggagggtatatttagaaggtccgccaacgctaacaaagttaaaagtctgaaagaaatcgcaaatactggccaaaaggtaccttttgaggatccccatgaagctgctgtattactgaagaagtttttgagggaacttaaagaacctctgttgacttatgaactgtacgatgaaattgtacaatttcaaagttggaataatgatgaaaggctgaggctggtgtccatacttgtaatggaaaaactaccagaagacaattacaaggtcttaaaatatatcattagatttttatccagggtaatggaaaggtctgacttaaacaaaatgaatgcacaaaacctagctgtagtctttggaccaaacctagtgtggtccgattcagtttcgatgtcactagctgccataggtcccattaacatgtttacgcagtttctactagtgcatcaaaacgatatatttatgatttagagtaaacgtttatcaatgtaatttttgtacttgcgactctgtgtgaaaatatttgcgagataatagtaagggagaggaaggcaacggataattgaaatgtttttgtatataagaattagactgcttaaaaagcaaggtactgactataacactttaactgtggtacacgtattacaaccatattctgaaggtaaataattgattaatgtacagaaattctagtttattatgttgcggccgagtttttttacatatcttttccttaatttaatatatctatactttgcagcaacattattttttaatacaaataaactgtaaaatttgatttgtgttttgccatttttctcacaacatatcttggatcatgctggtgctctacatctattcaacttgttagttgctggcaattttggcgatttaaataacgccggctctgacagcctcgtcccactgaaatgtaaaatcaacgaatatagacgcat

SEQ ID NO: 3707 - DNA, 687 bp, Diabrotica virgifera
  misc_feature (568)..(571): n is a, c, g, or t
  misc_feature (611)..(612): n is a, c, g, or t
  misc_feature (614)..(615): n is a, c, g, or t
  misc_feature (638)..(640): n is a, c, g, or t
  SmartBlast Evalue=2E-23; Info="Rho-GTPase-activating protein, putative n=1 Tax=Pediculus humanus corporis RepID=E0VEE4_PEDHC"
gacagctttatccgagagatttttctatcaaggatgttttttgtacagtaaagtgtaaagtaaaaaattgtgcgaacagtgatttaataaacgagcaagtaattatttcttgttctagtcatgttttcttaattgtgaactgtattttcaaaaacaatcatggataaaccgcaatttagtcccagtaaaggaactcctgtgaataattttgggactgacaacgatgaaccctacccaagtctatcagattatcatgattatgagccaaatcttgagtttgacgactctgaacttcaacattctacaactgttttagcccacacagttgatatgatccaggtcgaatccaatagcatgggctctccgatatcggacttcacggatgacaacttcgaagaagaactagcagaagcttgcgaggagaacttggacagtctgatgttttgttcgacttcatatccagaagtcggagatactgctcccgaaaagttttctgagatttcgagatacgggatcgtcgatgtcaaaggagatgatgcagatgggagaaaaattattgtcgtttacnnnnttgtaagttgcctcaaattaaggagattgatcatggattnntnnagttatttgaaatataccttaannngttatgtaaagcaagactacagtttaatttattttcaccacggactg

SEQ ID NO: 3708 - DNA, 622 bp, Diabrotica virgifera
cgatatttcgcccgtcgacaaattcaaagagataatatttgtatattatgaaattcgagtaaaccgatgtccctttatctaggcacatgccggtatttttacaacccagttactcatcgtaaatcaatcagtttagcacttaaaaatttatacttggggattagtacagttaaaattgttagacaattatactattaagcaatataatcgaaactttttttctactttgaaggacaaaaaagcgagttcattagcggaacgtaattcaaaattattctgcaaattacatttgatacaatatttgattaaaatatctcatttttgatggtaaaaaatatattaaatacatatattaatttgtctggactaaaggtggtaaaagatggtctggagttatatttttgtttgaatttgccgacgggcgatagatagatggtgtcaacttaaacatttttggtaacttttcgccaccattacctaataaaccttcaattttctgaatttttgcagtatatctacatctattcaacttgttagttgctggcaattttggcgatttaaataacgccggctctgacagcctcgtcccactgaaatgtaaaatcaacgaatatagacgcat

SEQ ID NO: 3709 - DNA, 1163 bp, Diabrotica virgifera
tgacgtcactggtatgaaatatatgccaaaagattgtaatttgaaaatagaaatcgacctgtttcgggattttgctccggaatcgtccatttcggagaaaatgaatttgtgccataatttagcccctctcggtataatctactataaaaaatcttacatgtcatccatttgtttaattgttgataaatggttacttcttttaaaattttaattgaaaattgcaaatttttttgagaaggctcggattttccgagtaaaagttttgttgaaggaaatcggaaaaaaaatgactttgcagaactaaattacggtgaatttttgtttgagtgtttttggtttaaaggaaaaatcttaggagttacagagcactaattgaaaaaaaaaagaagatttgggagtgctaatttgtttataaatagaataacacactttgtgcggacttggcataccccatattactaatatatgcaatcctaagctaagattcgattttagcaataaaatatctggtaaataacttttcccaaaaatgccaatttttcgataatttttctagactgtcaacaaatgttgcggtggttgcgtagccaataaaccggagcgccaacccaaattctgagcagtgtcaaaatgataacgttaatatccccagttgtaactaatatcgaaatgaataagaatcactataaattgcgaccatcatcgcggtgtcgaaattcaatagcgacctcgaaaagaattagaatcaggcccatggtcaacgtttccgctccgtaaatcaacacaggcaaagcacactaaaagacacattggtatgtcggacgatttgaaaatgcggtataacttatagaacgctgctgtcagtcttacacaacgatgaagctcagcggtttggttaacttttcctgtgggaatcactaatactttgccacatatttatcgaaatagctccttcagactatatttaaaaggtgataaatgtttcccaacttcacataataggtcaagctcaataaatttagcttatctaagatgagcttgtagtcatggaagtacttactgtattctaagctttgtatttctattgtgttcgtcttttgaagcggaatgtatgtatttttgtcgacagtattattaatgtacaaagctactatgtatttttt

SEQ ID NO: 3710 - DNA, 1165 bp, Diabrotica virgifera
tgacgtcactggtatgaaatatatgccaaaagattgtaatttgaaaatagaaatcgacctgtttcgggattttgctccggaatcgtccatttcggagaaaatgaatttgtgccataatttagcccctctcggtataatctactataaaaaatcttacatgtcatccatttgtttaattgttgataaatggttacttcttttaaaattttaattgaaaattgcaaatttttttgagaaggctcggattttccgagtaaaagttttgttgaaggaaatcggaaaaaaaatgactttgtgcagaactaaattacggtgaatttttgtttgagtgttttttgcttaaaggaaaacttttaggagttacagagcactaattgaaaaaaaaagaagatttagggagtgctgatttgtttataaatagaataacacactttgtgcggacttggcataccccatattactaatatatgcaatcctaagctaagattcgattttagcaataaaatatctggtaaataacttttcccaaaaatgccaatttttcgataatttttctagactgtcaacaaatgttgcggtggttgcgtagccaataaaccggagcgccaacccaaattctgagcagtgtcaaaatgataacgttaatatccccagttgtaactaatatcgaaatgaataagaatcactataaattgcgaccatcatcgcggtgtcgaaattcaatagcgacctcgaaaagaattagaatcaggcccatggtcaacgtttccgctccgtaaatcaacacaggcaaagcacactaaaagacacattggtatgtcggacgatttgaaaatgcggtataacttatagaacgctgctgtcagtcttacacaacgatgaagctcagcggtttggttaacttttcctgtgggaatcactaatactttgccacatatttatcgaaatagctccttcagactatatttaaaaggtgataaatgtttcccaacttcacataataggtcaagctcaataaatttagcttatctaagatgagcttgtagtcatggaagtacttactgtattctaagctttgtatttctattgtgttcgtcttttgaagcggaatgtatgtatttttgtcgacagtattattaatgtacaaagctactatgtatttttt

SEQ ID NO: 3711 - DNA, 1040 bp, Diabrotica virgifera
gcccctctgtataatctactataataaatctttcatgtcttcaattatttaattattgatgaataattaggtacttccctgaaattttggttgaaaatggcagattttttgggaaaactcggattttctgagtaaaattttgttgaggaaatcgaaaaaaaataactttgtgcagaactaaattacggtgaatttttgtttgagtgtttttggtttaaaggaaaaatcttaggagttacagagcactaattgaaaaaaaaaagaagatttgggagtgctaatttgtttataaatagaataacacactttgtgcggacttggcataccccatattactaatatatgcaatcctaagctaagattcgattttagcaataaaatatctggtaaataacttttcccaaaaatgccaatttttcgataatttttctagactgtcaacaaatgttgcggtggttgcgtagccaataaaccggagcgccaacccaaattctgagcagtgtcaaaatgataacgttaatatccccagttgtaactaatatcgaaatgaataagaatcactataaattgcgaccatcatcgcggtgtcgaaattcaatagcgacctcgaaaagaattagaatcaggcccatggtcaacgtttccgctccgtaaatcaacacaggcaaagcacactaaaagacacattggtatgtcggacgatttgaaaatgcggtataacttatagaacgctgctgtcagtcttacacaacgatgaagctcagcggtttggttaacttttcctgtgggaatcactaatactttgccacatatttatcgaaatagctccttcagactatatttaaaaggtgataaatgtttcccaacttcacataataggtcaagctcaataaatttagcttatctaagatgagcttgtagtcatggaagtacttactgtattctaagctttgtatttctattgtgttcgtcttttgaagcggaatgtatgtatttttgtcgacagtattattaatgtacaaagctactatgtatttttt

SEQ ID NO: 3712 - DNA, 1392 bp, Diabrotica virgifera
  SmartBlast Evalue=2E-92; Info="Hydroxyacid oxidase, putative n= 1 Tax=Pediculus humanus corporis RepID=E0VFS2_PEDHC"
ttttcactccctctcacgtaaggtcaaaggtcaataccaaccatgaaaatttaagtacccttgcctgcccagtcagcagtcccagtaggtatcatagatgtcggtatataagaagtgttcggtacaagtttctcagtttttcctacacaattcaaaaatatagaataacaatgtctaactctgcatcaaatctagtgtgtgtcaacgattatgaagaatatgccaaggaggaattaaaaaatgggagctttgagttttataatggtggagctggacagcaaagaacgttggaatggaataaaactgattttaacaagtatcgcattagaccaaaatatatgcgcaatgtaagcaacagaaacttatcaacaaatatcttgggtaaacctgtggcagttcccataggaatatctccctctgcttatcagaaaatagcacacccggatggagaatgtgctactgcaaaagctgcccaagaatcagacaccatcttgatattaagttcacactctaattgtacctttgaagaggtcgcgaaagcggcaccacatggaagaaaatggctacaattgtatatttttcaaaacagggaaattacgaaagattttgtaaaaagagcagaaaaaaatggctttgaagcattagtagttaccgtggattttgctctatatggtatacatttaggagatttaagaagccaatttaagacaccacctcatcttcagtcgatcaattttaaccagtatacagagggcgagaatgcaataaacttctatgagtttactgacccagaagtagaatggagctacattacttggttaaaaactatcactaatctacccatcgtagtcaaaggggtattgaccggtgaagacgctattgcagcagcagatgctggagcttctgctattctcgtatcgaaccatggtggtagacaactagatagtcttccctcagcgatagaagcattaccagaggtatcaaaggcagtaggacatagaattgaactatacatggacggaggaatcagagatgggactgatgtatataaagctctaggactgggagctagaatggtgtttattggtagacctgcattatggggtttaactcacgatggagaaaaaggtgttaagaacattttagacatcctaaagaaggaactagataatgcaatgggaattacaggatgttcaaaaataaccgatataaataaagatcgagtggttcatgaaagctactacgcaaggcaatggtgatatttcagtataaacattttttataccagtattgacacaacaatcatcaacatcgagaccacaaaatttacagctatgtatttaaaaaaacattaattcattttgtaaataaaaaaatacatatttttgcttt

SEQ ID NO: 3713 - DNA, 947 bp, Diabrotica virgifera
  SmartBlast Evalue=4E-76; Info=Hydroxyacid oxidase 1 n=1 Tax= Harpegnathos saltator RepID=E2BJY7_9HYME
caaataccattctagctcctaaccctatagctttatatacatcagtgccatctctgattcctccatccatgtacacttcaattctatgcccaactgctcttgcaacctctggtaatgcttctatcgttgagggaagactgtctaattgtcttgcaccgtggttcgatacaataatagcggaagctcctgcatctgctgctgcaatagcgtcttcagctgttagtacaccttttactacgattggtaatttagttatagtttttaaccaagtaatgtagctccagtcagcatctggatcagaaaaatcaacgaagtttgtaatagtcttgttctctttatacttgtcaagaagtatcgacgttacattaggtggtgccctgaactggtttcttaaattgattagtcggataccaaatacagcaaaatcaacggtaagtaccaatgcttcaaatccgttattttctgcttcttttacaaaatctttcgtaatttccctgctttggaaaatatacatctgtagccatcttcttccatgcggtgatgctttcgagacctcttcaaatgtagaattagagtgtgaacttaatatgaagatggtttctaaatcttgagcagctttcgcagtagcacattctccatccacgtgtgctattttatggaaagcagagggagatatccctatgggaaatgccacaggcttgcctaatatagttgttgataaatttctgttgcttactttacgcatatattttggtctaatccgatatttgttaaaatcatttttattccatttcaaagttttttgttgtccagctccactgtaatagaactcaaagtacatgtttggtaatttcttcttagcatattcttcataatcgtttacacacacaagatttgatacaacagagttagacatttttaagtaagcaatcaattctctcgacaac

SEQ ID NO: 3714 - DNA, 1023 bp, Diabrotica virgifera
  SmartBlast Evalue=8E-66; Info="Hydroxyacid oxidase, putative n= 1 Tax=Pediculus humanus corporis RepID=E0VFS2_PEDHC"
tgtgataatttaagtgataaataaataatgaacaatcaagatttttaattttaatgctaatcttaatgttaaggtaccgatagtttttaagtaacgtgttctgtgttttgagataaagttacaagagagataaaaccaaaagcgaagattccaaaaaatatatttttgagagaatttagttttttgtaatagaataacaatgtctaactctgtatcaaatcttgtgtgtgtcaacgattacgaagaatatgccaaggagaaattaaaaaatgggagctttgatttttataatggtggagctggacaacaaagaacgttggaatggaataaaactgattttagcaaatatcgcattagaccaaaatatatgcgcaatgtaagcaacagaaacttatcaacaaatattttgggtaaacctgtggcagttcccataggaatatctccctctgcttttcagaaaatagcacacccggatggagaatgtgctactgcaaaagctgcccaagaatcagacaccatcttgatattaagttcacactctaattgtacctttgaagaggtcgcgaaagcggcaccacatggaagaaaatggctacaattgtatatttttcgaagcagggaaattacgaaagattttgtaaaagaagcagaaaaaaatggctttgaagcattagtagttaccgtggattttgctctatatggtatacatttaggagatttaagaagccaatttaagacaccacctcatcttgagtcgatcaattttaaaaagtatagagatggcgataatacaataaacttcgttgattttactgacccagaagtagaatggagctacattacttggttaaaaactatcactaatttacccatcgtagtcaaaggtgtattgaccggtgaagacgctattgcagcagcagatgccggagcttccgctattctcgtatcgaaccatggtggtagacaactagatagtcttccctcagcgatagaagcattaccagaggtatcaaaggcagtagg

SEQ ID NO: 3715 - DNA, 1392 bp, Diabrotica virgifera
  SmartBlast Evalue=2E-39; Info=Coiled-coil domain-containing protein MTMR15 n=1 Tax=Harpegnathos saltator RepID=E2C3G8_9HYME
tgaaaagtataaagttttctagggatgtacaagaatttttgaggtatgccgaggcatgtgagctcagacaaactttagaaactactaaaaatcatgaaactatacaagaaattggcatgaacgttaaagataaattaaaggctttggaacgtactaatgacgaaatgtatttcaacgcaccccatctaaaacgttttaccgccgagtcagtatattgcggaattttaactaatatttgtgaaatattaaaaacaacatacgtcgaggaggtccaagcatttttagagtatctgatagaaaattttccacgctcacacagaattggtacttggtatatgctattatgtgacatatttacttcccgcaatttgtcaatagaagctgtgaatgttattataacagcactcagtactaaaaaagaatatattttggagtatcagatttatgaatttgcacataaggcgcaacaactaaaaaaacgcaaaatcattgatcagtattcccatgatcaacttgttggattattaccggatcctattcatttagaacagtttcctcaatctgttgtagatgccaaaacaattagggataaccagtctggaagaaaacggcactatgaagtacaccattcagacggaagtaaatcctataaaaccgtagaacaagttgcacaagattattatgttgaaacatgtggttataccgacggcatgcattgtgaaggcacgattataatgaattcgtttacgcttttcttctgggatattatttatagccaaaatccgatcatcccgggcacttttttatctaaatatcaagaagtgccccttgatatgtacaccactgatttctacaaaaatcgcaaagaactaatcgacaaaagattgaagaatatagctgaaggttggacatatgaagtaactattcaaaacgttacagagcactggcaaaattattcacatatatcaggattgtgtggtccaatagttaagactatggatatcaaatttcttaaattgattgtggattgtatcggaagaaaggtactgtctaaaatctatgaaagattggccaaggatatacgtcagtaccgaagcggaatgcctgatttatttttatggaatgtagacgaaaaaaaggccaaatttgttgaggttaaaggagaaaatgacagactctctataaagcagcaattgtggttgaagtatttattggaaatcgaagcaaatgcagaagtttgtcatgtacactctaaaggatctaagagaaaagtgaccaataatacagccgaccaataacaacaataattaaagtaagaaaaaagaagcatttcgtgagcatttggtctttgaaggcaaaatagtcctagtatttaatgttgcatgacatgtt

SEQ ID NO: 3716 - DNA, 664 bp, Diabrotica virgifera
tgaaaagtataaagttttctagggatgtacaagaatttttgaggtatgccgaggcatgtgagctcagacaaactttagaaactactaaaaatcatgaaactatacaagaaattggcatgaacgttaaagataaattaaaggctttggaacgtactaatgacgaaatgtatttcaacgcaccccatctaaaacgttttaccgccgagtcagtatattgcggaattttaactaatatttgtgaaatattaaaaacaacatacgtcgaggaggtccaagcatttttagagtatctgatagaaaattttccacgctcacacagaattggtacttggtatatgctattatgtgacatatttacttcccgcaatttgtcaatagaagctgtgaatgttattataacagcactcagtactaaaaaagaatatattttggagtatcagatttatgaatttgcacataaggcgcaagcgctaaaaaaatctaaacaaattgaacagtatacccatgatcaacttgttgaattactaccggatcctatcaattcagaatgctttccccaagctaggatagatgccaaaataattaaggataacccatgtggaagaaaacggcattatgaagtaaacaattcaggcgaacgtaaatcctatgaaactgtagaaga

SEQ ID NO: 3717 - DNA, 1563 bp, Diabrotica virgifera
  SmartBlast Evalue=1E-128; Info="3-ketoacyl-CoA thiolase, mitochondrial n=1 Tax=Camponotus floridanus RepID=E2ARH3_9HYME"
gttacaccggttatcagactcatattaattacattctcatttatttttagtcaaaatatattatttgcttagttggtttcttgaagtgggtgagtgtacactgtaaagtaaacgattcaagtgaaaaaataatgacttctctaactaaaggaatttttattgttggtgcgaaacgtacaccttttggtacatttgggggcaaattggccaaatctcacatcaccgatctccaagtaattgcttccaaaggtgccttagccgctgctaatgttaaacccgaactagtcgacactgtagtcattggtaacgtcattccgtctgtagcagctgatggtggtttccttgcaagacacgtattgctcaaatcaggtattcctttagaaaaacccgccttttcagtgaataggctatgtggttctggattccagtctcttattaatggattacaagatataaccacgggtgtcgcggaaatagctctaacaggaggtgtagaaaacatgtcagcctccccctatatcgttcgcaacatccggttcggcaacattcctttaggcgttagccccgtactagaagacaacgtcacagtcagcggattggacactatgtgtggcttaaccatggccctaacggccgaaaagcttggagaacagttcaagctgtccagagatgaggtggaacagttttcgtttagttcccaacagcgctggaaagcagctcaagatgctggaaagttcaaagatgaaatcgtacccgttccaattaaggagaaaaaggagatggtcaactttgaagttgatgagcatccaagaccgtggactaccctggatatgttaaagaaactgcccacaatatttaaaaaggacggattggtcacagctggaacagcttcaggtatcagtgatggtgcaggcgctgttgtcgtagcaagtgaagctgcctcatccaaacataacctcaaaccactagccaggatcgttgctcactcagtggtcggtgtagatccttccatcatgggattcggaccagctccagcaatcagaaacattctcaaggccaccggaaaaactttggacgacattgatttgatagaaatcaatgaagcttttggtgcccaaactttggcttgtgccaaagatttaaaactggatatgaataaattgaacgttaatggtggggctattgccctaggtcatcctttggctgcttctggatctagaataatcgggcatttagtatacgaattaaaaagaagaaatgcaaaatatggtattggttccgcctgtattggaggaggtcaaggaattgcagtcatgattgaaaatttgtagaaggagcaaaaggcatttccagaataaaataggggttaagggttttcaccaatattaagactggacattaattgtttatagagatatttatgtatacagtattgttatttttttgaataagattgagaaataattttgaatgatatatttttaataaggtacattttgctgcatatttatatactgtagactcatctgatattttatcttctctaataaaatacgcattttt

SEQ ID NO: 3718 - DNA, 1563 bp, Diabrotica virgifera
  SmartBlast Evalue=1E-133; Info="3-ketoacyl-CoA thiolase, mitochondrial n=1 Tax=Camponotus floridanus RepID=E2ARH3_9HYME"
gttacaccggttatcagactcatattaattacattctcatttatttttagtcaaaatatattatttgcttagttggtttcttgaagtgggtgagtgtacactgtaaagtaaacgattcaagtgaaaaaataatgacttctctaactaaaggaatttttattgttggtgcgaaacgtacaccttttggtacatttgggggcaaattggccaaatctcacatcaccgatctccaagtaattgcttccaaaggtgccttagccgctgctaatgttaaacccgaactagtcgacactgtagtcattggtaacgtcattccgtctgtagcagctgatggtggtttccttgcaagacacgtattgctcaaatcaggtattcctttagaaaaacccgccttttcagtgaataggctatgtggttctggattccagtctcttattaatggattacaagacatatcgacaggagtagcagaggtagctctaacgggaggcgtggaaaacatgtcatcttgtccctacatcgtaagaaacatacggtttgggaacgttccactgggcactagtcccgttttagaagacaccttgtggttaagtgtgcttgatacgtactgtaatttgcctatggctttgactgctgaaaagcttggagaaaaatttaaactaacaaaggatgaaatcgatgagtttgcttttaattcgcagcaacggtggaaagcagctcaagatgctggaaagttcaaagatgaaatcgtacccgttccaattaaggagaaaaaggagatggtcaactttgaagttgatgagcatccaagaccgtggactaccctggatatgttaaagaaactgcccacaatatttaaaaaggacggattggtcacagctggaacagcttcaggtatcagtgatggtgcaggcgctgttgtcgtagcaagtgaagctgcctcatccaaacataacctcaaaccactagccaggatcgttgctcactcagtggtcggtgtagatccttccatcatgggattcggaccagctccagcaatcagaaacattctcaaggccaccggaaaaactttggacgacattgatttgatagaaatcaatgaagcttttggtgcccaaactttggcttgtgccaaagatttaaaactggatatgaataaattgaacgttaatggtggggctattgccctaggtcatcctttggctgcttctggatctagaataatcgggcatttagtatacgaattaaaaagaagaaatgcaaaatatggtattggttccgcctgtattggaggaggtcaaggaattgcagtcatgattgaaaatttgtagaaggagcaaaaggcatttccagaataaaataggggttaagggttttcaccaatattaagactggacattaattgtttatagagatatttatgtatacagtattgttatttttttgaataagattgagaaataattttgaatgatatatttttaataaggtacattttgctgcatatttatatactgtagactcatctgatattttatcttctctaataaaatacgcattttt

SEQ ID NO: 3719 - DNA, 1525 bp, Diabrotica virgifera
ctctctctctctctctctctctctctctctctctctctctctctctctctctctctctctctctctctctctctctctctctctctctctctctctctctctctctctctctctctctctctctctctctctctctctctctctctctctctctctctctctgaaagaatttttttccgtcacgtaaaaaactacatcgaaagaaatttggtatattctaccgcagattgcaatcaaattatttccatatttttgaaaatgaaaagtgtgcaaggagaacagtaaaattatttaatcaacttttatgaatcaaatatactagaccggtcctgtttatattaggtacatgtgatgttacgaaatcgtttttaggttgtactatacttgactgttttgctagtactaggctgttcaataagttttgcggttcgatacgagagggcgttgctactagcctaattttagtttgatacgttgtacagtaggaaaaatgaaagaatacccatgcgtcatggatgatatgcatacgaatcaaatcaaaaatttctagttaaaacaacgtctaaactaagttaatactgtaaaaaacgcatgtgactactaccccaccgtacgatttttcgctacgtaaatgtgtcaaaaattttttgtgatgttattctttttctgataatacctatatatttattggtaataaatgttacttttactaccgtaattaattatttgatatagattaataatacaaaaataatgagtaagcaaatatagtattatgaatttctccatgttaaagttgccagtggacgtaaatagtaacaggaatttaaaaaatgtcgtttatgtcagctgcattaagtgacttaaatgaaagtaaacttaatgaattcagatcattaggtatccagatcattttccagacattatctgcaaataaatgtacattcgtaaaaatatactaatctgtaattttatacactatgattgaaaagtcagagtaatatgtacacgtttggcaaactcatagacagaagttaaccatattgacagatgattacttacaaattttattgacttattttaattaaataaatacttaccaaaccaaaaatacaatataatatcaaaatagcttttaaaagaactgtgtttattcaagtaaatacaactgattattaaaatttataaactctaccgaacctaaccaagtttcactgtcaaagtgaccgaaattgaatctgtcagattatagttgaccagcacgattactcgaatagtagtttatacaatcattatctctactgatgttgaatgtttttctaagaatgacattagaagtacagaaatagtcaagtgtgagtttaaattttctactaaattaatataactacgttgaacaattgtatcgccgtctcactctgtcaattataaatatgtaactgcgtatgtcttggataacgtttttgcttagtagacaacacttaataatctatctctcttgtttgttatttatagaaataggcag

SEQ ID NO: 3720 - DNA, 1109 bp, Diabrotica virgifera
cttcaggatcaattttcttgaacgcttccattagttgttgcttgctgctactaatggtaactacagtaggaaaaatgaaagaatacgcatgcgtcatcgatgatatgcatacgaatcaaatcaaaaatttctagttaaaacaacgtctaaactaagttaatactgtaaaaaacgcatgtgactactaccccaccgtacgatttttcgctacgtaaatgtgtcaaaaattttttgtgatgttattctttttctgataatacctatatatttattggtaataaatgttacttttactaccgtaattaattatttgatatagattaataatacaaaaataatgagtaagcaaatatagtattatgaatttctccatgttaaagttgccagtggacgtaaatagtaacaggaatttaaaaaatgtcgtttatgtcagctgcattaagtgacttaaatgaaagtaaacttaatgaattcagatcattaggtatccagatcattttccagacattatctgcaaataaatgtacattcgtaaaaatatactaatctgtaattttatacactatgattgaaaagtcagagtaatatgtacacgtttggcaaactcatagacagaagttaaccatattgacagatgattacttacaaattttattgacttattttaattaaataaatacttaccaaaccaaaaatacaatataatatcaaaatagcttttaaaagaactgtgtttattcaagtaaatacaactgattattaaaatttataaactctaccgaacctaaccaagtttcactgtcaaagtgaccgaaattgaatctgtcagattatagttgaccagcacgattactcgaatagtagtttatacaatcattatctctactgatgttgaatgtttttctaagaatgacattagaagtacagaaatagtcaagtgtgagtttaaattttctactaaattaatataactacgttgaacaattgtatcgccgtctcactctgtcaattataaatatgtaactgcgtatgtcttggataacgtttttgcttagtagacaacacttaataatctatctctcttgtttgttatttatagaaataggcag

SEQ ID NO: 3721 - DNA, 653 bp, Diabrotica virgifera
taagtgacttaaatgaaagtaaacttatcatattggtatccagatcattgtccagatattatctgcaaataaatgtacatttgtaaaaatatactaatctgtaattttatacactatgattgaaaagtcagagtacacgtttggcaaactcatagacagaagttatccatattgacagatgattacttacaaattttattgacttattttaattaaataaatacttaccaaaccaaaaatacaatataatatcaaaatagcttttaaaagaactgagtttattcaagtaaatacgactgattattaaaatttataaactctaccgaacctaacccagtttcactgtcaaagtgacagaaattgaatctgtcagattatagttgaccagcacgattactcgaatagtagtttatacaatcattatctctactgatgttgaatgtttttctaagaatgacattagaagtacagaaatagtcaagtgtgagtttaaattttctactaaattaatataactacgttgaacaattgtatcgccgtctcactctgtcaattataaatatgtaactgcgtatgtcttggataacgtttttgcttagtagacaacacttaataatctatctctcttgtttgttatttatagaaataggcag

SEQ ID NO: 3722 - DNA, 1121 bp, Diabrotica virgifera
ttttatttctgcacataatacctaaatatttaaaataatctcagttatttaattatccctccgctactgatcggtcataaaaaataacactatctgcatatttcgtttttaatttttaagcataaacaaaaatgtaatatgccgacaagttgaatttgagggtaataagtatgatatttttatctatcacggttataagtaacatgaatcatttttcaccttatttctctaataacgtgttattgtaaaggcataactttcattattaatttcgtatcgccgcttatttagtctaccaaaagttatcagaatttaatgacaaagacaacgcagttttcactcggggtgttgactatgctaatatttttatttatcataataaattgtacttaggtaccatccgtattcatttcagatacgtccacctcacaaacaaaaacaagtaaaaataaacatctggcggtgagtcacgcgtcccacggcccaagaaaactgtacgccgatgacaaacgttcccaatcttgacctgcgaacgaatgaactgatagtaggatgcgcagaaatgtctacgcagttcgccgacgcaggttgtgtctggcttaggttcaatttgcgccgggcctattctgttgccagagcgatcagaaatatccaaggagcgttcaagtacgaccggtagatggtccatgtagtacttctgtatggtacttagatcggagaaaagctgttcaacgttttgactgatgtcttcgcgaagctggtgattaggggcagaccggggtaggatagagccgtttaggatcaaacaattctgacaaatctctcctccaccccagatacttctcaatccattttcatcccaatcagaatcgaccttcctcttattactagaagtccaatgactattattccatgctgtattattaccatgacatttttcgcacgatttttcttcaaatttccataaaacttcgctgagcatattttcagggcatttaatgaggttcatagggcaagctgcagagttattcttgttcgaagcggttgttgtcgcattggctgtgatggtgtcagaacaggcacagtggtgctgaggtttttcaaatgatcatcgttatatg

SEQ ID NO: 3723 - DNA, 1110 bp, Diabrotica virgifera
ctctacacactcgctctacttcgcgaggaagtgcgataccgacaaagaggtgcgataccgacaaagatccctttgactcggacgcgccagaccgacagaaaatggaagtagaacgaagtgaggcaaagttgcacaaggtggccgtctacactctcgtacttgttgaacctcgatcgacttcggcgagagtgaagtgcgagcattacatgaatattttctaataatgtgtttttgtaaaggcataactttgattattaatttcgtatagccgcttatttagtctaccaaaagttatcagaatttaatgacaaagacaacgcagttttcactcggggtgttgactatgctaatatttttatttatcataataaattgtacttaggtaccatccgtattcatttcagatacgtccacctcacaaacaaaaacaagtaaaaataaacatctggcggtgagtcacgcgtcccacggcccaagaaaactgtacgccgatgacaaacgttcccaatcttgacctgcgaacgaatgaactgatagtaggatgcgcagaaatgtctacgcagttcgccgacgcaggttgtgtctggcttaggttcaatttgcgccgggcctattctgttgccagagcgatcagaaatatccaaggagcgttcaagtacgaccggtagatggtccatgtagtacttctgtatggtacttagatcggagaaaagctgttcaacgttttgactgatgtcttcgcgaagctggtgattaggggcagaccggggtaggatagagccgtttaggatcaaacaattctgacaaatctctcctccaccccagatacttctcaatccattttcatcccaatcagaatcgaccttcctcttattactagaagtccaatgactattattccatgctgtattattaccatgacatttttcgcacgatttttcttcaaatttccataaaacttcgctgagcatattttcagggcatttaatgaggttcatagggcaagctgcagagttattcttgttcgaagcggttgttgtcgcattggctgtgatggtgtcagaacaggcacagtggtgctgaggtttttcaaatgatcatcgttatatg

SEQ ID NO: 3724 - DNA, 1039 bp, Diabrotica virgifera
caggtcataattcataatccctccgttactgatcggtcataaaaataacactatctgtaataaacaaaaatgtaatatgccgacaagttgaatttgagagcaatacgatatttttatcgatcacggttttaaaacatgaatattttctaataatgtgtttttgtaaaggcataactttgattattaatttcgtatagccgcttatttagtctaccaaaagttatcagaatttaatgacaaagacaacgcagttttcactcggggtgttgactatgctaatatttttatttatcataataaattgtacttaggtaccatccgtattcatttcagatacgtccacctcacaaacaaaaacaagtaaaaataaacatctggcggtgagtcacgcgtcccacggcccaagaaaactgtacgccgatgacaaacgttcccaatcttgacctgcgaacgaatgaactgatagtaggatgcgcagaaatgtctacgcagttcgccgacgcaggttgtgtctggcttaggttcaatttgcgccgggcctattctgttgccagagcgatcagaaatatccaaggagcgttcaagtacgaccggtagatggtccatgtagtacttctgtatggtacttagatcggagaaaagctgttcaacgttttgactgatgtcttcgcgaagctggtgattaggggcagaccggggtaggatagagccgtttaggatcaaacaattctgacaaatctctcctccaccccagatacttctcaatccattttcatcccaatcagaatcgaccttcctcttattactagaagtccaatgactattattccatgctgtattattaccatgacatttttcgcacgatttttcttcaaatttccataaaacttcgctgagcatattttcagggcatttaatgaggttcatagggcaagctgcagagttattcttgttcgaagcggttgttgtcgcattggctgtgatggtgtcagaacaggcacagtggtgctgaggtttttcaaatgatcatcgttatatg

SEQ ID NO: 3725 - DNA, 1648 bp, Diabrotica virgifera
  SmartBlast Evalue=0.000000001; Info=Transposase n=2 Tax= Meloidogyne javanica RepID=E1A4A3_MELJA
acaaaatagtttattttattttaacgtataatcttttaattgagattggaaattatagttttgcaataacgaaagataaccgcgctagagctacaggggggcgactacgaactcccccacgctacctagattttaatgggttcagttttatagtaggattaaaagcgactacgaactgccccacgctacctaggtacttagataatatttttgtgaacatatatagtttttattttactttattgtattcaaaaaggaacccaattcccaaagcatgagcgaaaattttaaataatgaaactataacaatataatcgaataaagtttatttataaatctacattaacttatatacaataacaaaaactacagttaaacaataacaatgcttaattctaatgtctgattagtgattaaaataagtaagagtgaacactatattttagattttaaaagttagctgcataataattgcaaactgacttaatgaagtctaatttagtaatgttttgattaacgtaatattcatttagcctattttcaataaaatcaacttttctttttgccgtgttatcaagtttttttttcgaatctatgtgcagttctaattttcacatatacttctgcttgaaaatttaacaaaatgtctgtaaatttaaatatgtcaagatgtgatttataaaaacattcgttaaatttcgagtgaaatgattcacatgcgtttgtagtaaatataagagatgatgaatttgaagcccacatgtaaggtggaaatgttgaatcttccgttaaataatatcaactaggtaatcacaaaattgcaaaactctgtcatcttctggcataatattaaaaagttcatcagaaaaaagtcaccaacatcatttggatctaaataaggaatgccgaaaaacaattttaaatattttccaataacagtttgatttttatattgcgaggacaaacctaaattttaaatttttcggtaccaattttgtgttaaatgaaatttgcaacaagaaataataatgtcgggccacactaacttggctgcattttgaattgctatttcaaaatcagaaattattcgcttcggtttgaaatttaaattcaaatctgtacggattgtcattaatgtatcaaaagtacttttgtacgattgctgtgatttatttggtaacaaacaaaatactagaggaacataaaaaccatttttgtagccacgtatagtaaacatctgacaaaaatattcagaacagtattgaaaagttccatctacatacaaagaatctacattacacaaaaagtaaagatttgtgaaacactaaaaattgcggaattatttttcgtagataataaaaagttttcacttgtatttgtttttaaatttaagttcactaacacttgtagaacttcttcctgtgacttgggcaatgatggtgtggattttcgtcttgcagcatagatatttcttcgaacgcaagaaatgtctttcgtcgtcagcggtaaattgctaaaattttccttcctcaattccttatggacaatctttaaaggtctttcacatatttatatcttctacagcgttcctctttgtagaattatcaataatttgccggtcaacgtggatatctggagcatgattttt

SEQ ID NO: 3726 - DNA, 1232 bp, Diabrotica virgifera
acaaaatagtttattttattttaacgtataatcttttaattgagattggaaattatagttttgcaataacgaaagataaccgcgctagagctacaggggggcgactacgaactcccccacgctacctagattttaatgggttcagttttatagtaggattaaaagcgactacgaactgccccacgctacctaggtacttagataatatttttgtgaacatatatagtttttattttactttattgtattcaaaaaggaacccaattcccaaagcatgagcgaaaattttaaataatgaaactataacaatataatcgaataaagtttatttataaatctacattaacttatatacaataacaaaaactacagttaaacaataacaatgcttaattctaatgtctgattagtgattaaaataagtaagagtgaacactatattttagattttaaaagttagctgcataataattgcaaactgacttaatgaagtctaatttagtaatgttttgattaacgtaatattcatttagcctattttcaataaaatcaacttttctttttgccgtgttatcaagtttttttttcgaatctatgtgcagttctaattttcacatatacttctgcttgaaaatttaacaaaatgtctgtaaatttaaatatgtcaagatgtgatttataaaaacattcgttaaatttcgagtgaaatgattcacatgcgtttgtagtaaatataagagatgatgaatttgaagcccacatgtaaggtggaaatgttgaatcttccgttaaataatatcaactaggtaatcacaaaattgcaaaactctgtcatcttctggcataatattaaaaagttcatcagaaaaaagtcaccaacatcatttggatctaaataaggaatgccgaaaaacaattttaaatattttccaataacagtttgatttttatattccgaggacaaacctaaattttgaatttttcggtaccaattttgtgttaaatgaaatttgcaacaaaaaataataatgtcgggccacactaacttggctgcattttgaattgctatttcaaaatcagaaattattcgcttcagtttgaaatttaaattcaaatctgtacatattgtgattaatgtatcaaaagtatgtacttttgtacgattgctgtgatttatttggtaacaaacaaaatactaaaggaacaataaaaaccattttttgtagccatgt

SEQ ID NO: 3727 - DNA, 383 bp, Diabrotica virgifera
gttaccatacaacatacaaagaatctacattacacaaaatgtaaagatttgcgtaacaactaaaaattgcgaaattatttttcgtagataatataaagttttcacctgtatttgtttttaaatttaagttcactaacacttgtagaacttcttcctgtgacttgggcaatgatggtgtggattttcgtcttgcagcatagatatttcttcgaacgcaagaaatgtctttcgtcgtcagcggtaaattgctaaaattttccttcctcaattccttatggacaatctttaaaggtctttcacatatttatatcttctacagcgttcctctttgtagaattatcaataatttgccggtcaacgtggatatctggagcatgattttt

SEQ ID NO: 3728 - DNA, 1261 bp, Diabrotica virgifera
ctgttgtattggaatcatcttcagttgtgttagaaccatttgctgttgtattggaatcgtctgatgttgtattgggaacgtctttagttgtattggaaatgtctgttgttgtattaggatcatctggtgttgtatttgaatcatctgctgttgtattagaagcgtctgttgttgtattggaatcatcttcatttgtatcagtatcgtctgctgttgtattgaaatcatcttcagtggtattagacatgtctgttgttgtattaaaattatctgctgttgtattagtatcgtctgttgttatattggaatcatcttcagttctattagaatcacctgctgttgtattggaatcgtttgctgttgtattaggatcgtcttcagttgtattggaaatgtctgctgttgtatcagaatcttcttctgttgtattagtatcgtctgctgttgtatcggagtcatcttcagttgtattgggaatgtctgttgtattagaatcatcttctgttttgttaatatcgtctgctgttgtattggaaccgtctgatgttgtattgggaacgtcttcagttgtattggaaatgtctgttgttgtattagaatcatcttctgttgtattagtatcggctgctgttatatcggagtcatcttcagttgtattggaaatgtctgttgtattagaatcatctgatgttgtattagtatcgtctgctgtggaatcatcttcagttgtattagaatcatatgctgttgtattggaaccgtctactgttgtattagtatcgtctgctgttatattggaatcatcttcagttgagttgaaatcatctgctgttgtattggaactctctgttttattagaatcatctgatgttgtattagtatcacctgctgttttattggaatcgtctgctgtggtattataatcatctgctgttatattggaatcatctgctattgtattagtattgtctgctgttggtttataatcgtctgctgttgtattggaatcatctgatgttgtataagtatcgtctgctgttgtattgggatcatcttcagttgtattggaaatgtctggtgttgtattagaatcatcttctgttgtgttagtatcgtctgctgttgtattggaatcatcttcagttgtattggaatcatcttcaattgtattggaaccaacagcagataattccaatacaatagcagaggattcaaatacaacaacagatatttccaatacaacagcagatggttccaatac

SEQ ID NO: 3729 - DNA, 1169 bp, Diabrotica virgifera
ctgttgtattggaatcatcttcagttgtgttagaaccatttgctgttgtattggaatcgtctgatgttgtattgggaacgtctttagttgtattggaaatgtctgttgttgtattaggatcatctggtgttgtatttgaatcatctgctgttgtattagaagcgtctgttgttgtattggaatcatcttcatttgtatcagtatcgtctgctgttgtattgaaatcatcttcagtggtattagacatgtctgttgttgtattaaaattatctgctgttgtattagtatcgtctgttgttatattggaatcatcttcagttctattagaatcacctgctgttgtattggaatcgtttgctgttgtattaggatcgtcttcagttgtattggaaatgtctgctgttgtatcagaatcttcttctgttgtattagtatcgtctgctgttgtatcggagtcatcttcagttgtattgggaatgtctgttgtattagaatcatcttctgttttgttaatatcgtctgctgttgtattggaaccgtctgatgttgtattgggaacgtcttcagttgtattggaaatgtctgttgttgtattagaatcatcttctgttgtattagtatcggctgctgttatatcggagtcatcttcagttgtattggaaatgtctgttgtattagaatcatctgatgttgtattagtatcgtctgctgtggaatcatcttcagttgtattagaatcatctgctgttgtattggaatcgtgtgctgttgtaatattataatcttcagtgttattggaaatgtctgttgtgttagaatcatctgatgttgtgttagtatcgtcggctgtggtattggaatcatcttcagttttattggaatcatctgcagttgtattggaaatgtctgccgttgtatttaaatcatttggtgttgtatttgaatcatcttctgttgtattagtatcgtctgctgttgtattggagtcatgttcattttcggaaatatctgttgtattagaatcatctgatattgtattggtatcgtctgctgtgttattagaaacattttcagttgtattggaatcatctgctgttgtattggaaatatctgttgttgtatttgaatcatctgcttttgtattggaatcatttgctgttgtattagta

SEQ ID NO: 3730 - DNA, 685 bp, Diabrotica virgifera
ggaatcatcttcagttgtattagaatcatctgctgttgtattggaatcgtctgatgttgtattgggaacgtctgcagttgcattggaaatgtctgtttttgtattagaatcatcttctgttgtattagtatcgtcttctgttgtatcggagtcatcttcggttgtattgaaaatgtctgttgtatcaaaatgatctgatgttgtattaatatcgtctgatgtggtattggaatcattttcagttgtattagaatcatctgctgttgtattggaatcgtgtgctgttgtaatattataatcttcagtgttattggaaatgtctgttgtgttagaatcatctgatgttgtgttagtatcgtcggctgtggtattggaatcatcttcagttttattggaatcatctgcagttgtattggaaatgtctgccgttgtatttaaatcatttggtgttgtatttgaatcatcttctgttgtattagtatcgtctgctgttgtattggagtcatgttcattttcggaaatatctgttgtattagaatcatctgatattgtattggtatcgtctgctgtgttattagaaacattttcagttgtattggaatcatctgctgttgtattggaaatatctgttgttgtatttgaatcatctgcttttgtattggaatcatttgctgttgtattagta

SEQ ID NO: 3731 - DNA, 1149 bp, Diabrotica virgifera
aaatttgcgtgcatagagattacgcccacttaaaaatttggtcatttttgatgtcttgtatttcctaaacctgttggccgatttaaaaatatagtctgttcacatttgtatggcgaatagtcgcgtcggcttccgcgtcaatatggggaacccttgtccgctaccgcttcgcctgcgaatgttccgctacggaaaattcgcgtcgcaaaactttcgcgtcggtttgggggatcctttactcttacatttaccactgggttcccccgagcactattgctatcgatattgaattatttgctcccctcacgttgtatagagtttccgatgagtgatttacggtgacgctatatcaataaaaccttaaaaattcaatttgagtaggtaatggaaaatcatagtggtaggggagcccaagcggggatttttgcagttactcgagcgcgtcagattagcatatagggagaaacctggtaccatgcagatgtacctctaccatatattggctcttagcacaggggagttcgttaagggggccgaaaaaaaatctatcttaaaaaaactcgaaattgtcagattaagataaggtaagttaagtacatgcaaaagagtgtatatttaaaaaatctgacgatttgagcggggcgtaaggaaatgggtgagtcaaaaagtttcacaaaagaaaagcgaatatttcgcgaaatgaacgtcagatcgaaaactaaaaaatacgtcttcaatatttttcaaaaatctatcgaatggtactaaacatgacccccacggagaggggtggggggtaaatttaaaattttaaatacaaaccccgcgatatttcgcaaaatgaacatcagatcgaaaaactgcaaaatacactttcaaaatgtttttgaaaaatttatcgaatggtaccaaaccacgggggcaatgtggggggttactttaaaatcttaaatgggaaccccaaatttttattacagatttggattctttacgtaaaaataagcaacttttgttcgagacattttttcgaattattgatagatggcgctataatcggaaaaaacaagtattgcaaatggaaaattaaattaaaaaatagacaagcgcccgctaaaataggaaaattttaactttaaacttttttttgta

SEQ ID NO: 3732 - DNA, 1058 bp, Diabrotica virgifera
aaatttgcgtgcatagagattacgcccacttaaaaatttggtcatttttgatgtcttgtatttcctaaacctgttggccgatttaaaaatatagtctgttcacatttgtatggcgaatagtcgcgtcggcttccgcgtcaatatggggaacccttgtccgctaccgcttcgcctgcgaatgttccgctacggaaaattcgcgtcgcaaaactttcgcgtcggtttgggggatcctttactcttacatttaccactgggttcccccgagcactattgctatcgatattgaattatttgctcccctcacgttgtatagagtttccgatgagtgatttacggtgacgctatatcaataaaaccttaaaaattcaatttgagtaggtaatggaaaatcatagtggtaggggagcccaagcggggatttttgcagttactcgagcgcgtcagattagcatatagggagaaacctggtaccatgcagatgtacctctaccatatattggctcttagcacaggggagttcgttaagggggccgaaaaaaaatctatcttaaaaaaactcgaaattgtcagattaagataaggtaagttaagtacatgcaaaagagtgtatatttaaaaaatctgacgatttgagcggggcgtaaggaaatgggtgagtcaaaaagtttcacaaaagaaaagcgaatatttcgcgaaatgaacgtcagatcgaaaactaaaaaatacgtcttcaatatttttcaaaaatctatcgaatggtactaaacatgacccccacggagaggggtggggggtaaatttaaaattttaaatacaaaccccgcgatatttcgcaaaatgaacatcagatcgaaaaactgcaaaatacactttcaaaatgtttttgaaaaatctatcgaatggtactaaacacgaccccccacggaggtggggtggggggttactttaaaatcttaaatgggacccaaatttttattgcagatttggattctttacgtaaaataagccacttttattcgagatattttttcgaattatggatagatggcgctata

SEQ ID NO: 3733 - DNA, 864 bp, Diabrotica virgifera
aaatttgcgtgcatagagattacgcccacttaaaaatttggtcatttttgatgtcttgtatttcctaaacctgttggccgatttaaaaatatagtctgttcacatttgtatggcgaatagtcgcgtcggcttccgcgtcaatatggggaacccttgtccgctaccgcttcgcctgcgaatgttccgctacggaaaattcgcgtcgcaaaactttcgcgtcggtttgggggatcctttactcttacatttaccactgggttcccccgagcactattgctatcgatattgaattatttgctcccctcacgttgtatagagtttccgatgagtgatttacggtgacgctatatcaataaaaccttaaaaattcaatttgagtaggtaatggaaaatcatagtggtaggggagcccaagcggggatttttgcagttactcgagcgcgtcagattagcatatagggagaaacctggtaccatgcagatgtacctctaccatatattggctcttagcacaggggagttcgttaagggggccgaaaaaaaatctatcttaaaaaaactcgaaattgtcagattaagataaggtaagttaagtacatgcaaaagagtgtatatttaaaaaatctgacgatttgagccgggcgtaaggaaatgagtgagtcccaaagtttcacaagaaaaaagcgaatatttcgcgaaacgaatgacatatcgaaaaactaaaaaatacgtgaccaatattttttttaaatctatcaaatgataccaaacacgacttccgacggagaggggtggggggtaaattttatattttaaatacgaatcccgcgatatttcgcgaaatgaaaatcagatcgaaaaact

SEQ ID NO: 3734 - DNA, 1323 bp, Diabrotica virgifera
aaaataaccccataattcgatagagggacaaatttcaagcaaattttttatataaagttattaaaataaatcaaaacttcgagctattaaagatcaaagattttaatttttcttgagaaaaatgcatgttttaaccaatttttcatcaataactcaaaaagtgtaagtttttaaaaaaaagttattattatcaaaattgaagctaataaaaaatgaaataaacccctactacaaaaacctttttatgttaactaaaagagagttataggtaattgaatgtatatctctttcaccgagtaaaaatttccaagtattcaagctgaaataacgggaaattgatgcattccataacataaacttattaaaaatttgtcaaagtacttaaaaatatctatcaaatgagccccgaacatgttgatagcattaaaatttatgctccaaaattttttcaaaatttatcttttaaaatttttccaaaaaatgttattgtttttttttaataactccgttcgttttacgatatcaggttcatctaaaaactgtttgaaagtaattccaagtgctatttaagcacgttgaacctaatcttttaaaccccttactttttttaaataaaaggttaaatggccccggttgcatggttcccacagcaaaatttagatttaaacgtttctatctcggttattttttaccctatagaaatagtaaaacaggtaaaatatttttgacatagaaaaactaaaatttggttatatataattttttacgtatattgagtatttttggagttattatcaaaagaatatgagaattacaataattttaaaaattatgatttttttaaattatatctttttttcaaaaatatgcattctaaaccggtcaaaattatcgaatacattacttatgctaatataaagaagttcttgtaaggattactataaattttaatttttgtggaaatggcgtatgttttatttttcactttttcctaaaaaattcgaaaggttcttttatttcatcataacttgcttaattttgacgctattgccttgttctgaagctcattgataggtattccgaagtactttggtaaatatttagcaggaatattttatacattgcaacgttttcccgatatttaagcttgaatacttagatttgagtactcgtccaaaaaaaacacattcaattgccaataactcactttgaactaacattagtttagttctttatgtgaggaatgtattcaattttttattatcttcaatttcagtaataataacttttttgcaaaagcttatagtttttgatttatacgtg

SEQ ID NO: 3735 - DNA, 1310 bp, Diabrotica virgifera
gatagaggcacaaatttcaagcaaggaatttgttatataaagttgttaaaatgaatcagagctatttaaggtattaagatcaaacattttaatttttcttgagaaaatagcatgtttttaaccaattttcaacaataactcaagaagtgtaagtttttacaaaaaagttgttattatcagaattgaagctaataaaaaactaaataaacttcctagtaaaaaaaccttttattgttaaataaaagtgagttataggtaattgaatgtatattgtttcggcgagtgaataactctaagtattcaagctgaaataacgagacattgatgcattttataacataatcttattaaagatttgcaaagtacttggaaatatctatcaaatgagcccccgaatatgttgatagcgttaaaatttatgctccaaaattttttcaaaatttatctgttaaaaatttttccaaaaaatgttattgttttttttactaactccgttcgtgtttactatatcaggttcatctaaaaactgtttgaaagtaattccaagtgctatttaagcacgttgaacctaatcttttaaaccccttactttttttaaataaaaggttaaatggccccggttgcatggttcccacagcaaaatttagatttaaacgtttctatctcggttattttttaccctatagaaatagtaaaacaggtaaaatatttttggcatagaaaaactaaaatttggttatatataattttttacgtatattgagtatttttggagttattatcaaaagaatatgagaattacaataattttaaaaattatgatttttttaaattatatctttttttcaaaaatatgcattctaaaccggtcaaaattatcgaatacattacttatgctaatataaagaagttcttgtaaggattactataaattttaatttttgtggaaatggcgtatgttttatttttcactttttcctaaaaaattcgaaaggttcttttatttcatcataacttgcttaattttgacgctattgccttgttctgaagctcattgataggtattccgaagtactttggtaaatatttagcaggaatattttatacattgcaacgttttcccgatatttaagcttgaatacttagatttgagtactcgtccaaaaaaaacacattcaattgccaataactcactttgaactaacattagtttagttctttatgtgaggaatgtattcaattttttattatcttcaatttcagtaataataacttttttgcaaaagcttatagtttttgatttatacgtg

SEQ ID NO: 3736 - DNA, 408 bp, Diabrotica virgifera
aaaataaccccataattcgatagagggacaaatttcaagcaaattttttatataaagttattaaaataaatcaaaacttcgagctattaaagatcaaagattttaatttttcttgagaaaaatgcatgttttaaccaatttttcatcaataactcaaaaagtgtaagtttttaaaaaaaagttattattatcaaaattgaagctaataaaaaatgaaataaaccccctactacaaaaaccttttaatgccaactaaaagtgagttacaggcaattgaatgtatattcctttcggcgagtaaaaaactctaagtattcaagctgaaataacgggaaactgatgcattgcataacataaacttattaaacatttgtcaaagtacttaaaaacatttctatcaaatgagcc

SEQ ID NO: 3737 - DNA, 1495 bp, Diabrotica virgifera
  SmartBlast Evalue=2E-83; Info="Squid, variant F n=3 Tax= Blattella germanica RepID=D1GJA7_BLAGE"
gttctcttctcttcttgtgatagcgaaggtaggacgtgttaggtgttagtagctcttaggctaagtataatattagttttttaatttatcggcacacaggcagttctaatggagaacggtgaagatttttcaaaagatgtctcagcagagcatcaaaatggatcaggtgatgctccagccgatagtggaagtgcagaaacgcccggccgtgacgatgatagaaaattatttgttggtggcatgtcttgggaaaccactgatagggagttacgagaacattttggccaatatggcgaaatcgaaagtataaatgtaaagacagatcccaacactggtagatcaaggggatttgcattcatagtatttaccacaacagaagctattgacaaagttgtagctgcaggtgaccatgtcattaatggcaaaaaagttgaccccaaaaaagccaaagcaaggcatggaaaaatatttgtaggtggtctcacctctgaattgagtgatgatgacatcaagaactatttctcacaatttggatcgatcattgatattgaaatgccatttgacaagcaaaagaaccaaaggaaaggattctgcttcatcacatttgaatctgaacaagtagtgaatgagttactcaagcaacccaaacaaaccattaaagacaaagaggtcgatgtaaagaaagccacacccaaaccagaccaaatgggcggccccatgatgggcatgcgcggtatgcgaggcggaggcagaggcggtccaatgaggggaggtcgcggtggccgaggcggctacggaaaccaaggaaactggaaccaagcctatggtggctatggttatggccaaggatacggctatgatggctacagccaaggttatgactactacggcagtggctatgggggttatggaggttatgattactcaaactatggcggcggtaactacggtggagccggcggataccaatctggtggtgctggcggaggccccaaacaaagaggagctggtcaacgcaaccaaaggttccaaccctatcagaagtgaggctggttaatatcataagagaatagttcgtgattcaaacattttccgtaataagtcatctcatcctcaactgaattttccaatcattccatttcatcgcggcgcttggaaaatatacccgacaacgtacaaaatttttatgttacaagtccaacataaaagtcaactatccagtcgagatttttttttattttctttttgataaatcggttaggaaatgttaaaacaaattgatggtcttcaaattatgaatttatatataaatgatacattgagttttgagttagtcaaagatattttctcttttttgtattatgtttttctttatttaactctagtatgatgtaaacgtagtttttaagtttatatgtataacttgtatgagtgaaaggaggcgttgtgtacttccattgtatgacaaaatttaataaaacgataaattttgtgt

SEQ ID NO: 3738 - DNA, 1479 bp, Diabrotica virgifera
  SmartBlast Evalue=6E-85; Info="Squid, variant F n=3 Tax= Blattella germanica RepID=D1GJA7_BLAGE"
gttctcttctcttcttgtgatagcgaaggtaggacgtgttaggtgttagtagctcttaggctaagtataatattagttttttaatttatcggcacacaggcagttctaatggagaacggtgaagatttttcaaaagatgtctcagcagagcatcaaaatggatcaggtgatgctccagccgatagtggaagtgcagaaacgcccggccgtgacgatgatagaaaattatttgttggtggcatgtcttgggaaaccactgatagggagttacgagaacattttggccaatatggcgaaatcgaaagtataaatgtaaagacagatcccaacactggtagatcaaggggatttgcattcatagtatttaccacaacagaagctattgacaaagttgtagctgcaggtgaccatgtcattaatggcaaaaaagttgaccccaaaaaagccaaagcaaggcatggaaaaatatttgtaggtggtctcacctctgaattgagtgatgatgacatcaagaactatttctcacaatttggatcgatcattgatattgaaatgccatttgacaagcaaaagaaccaaaggaaaggattctgcttcatcacatttgaatctgaacaagtagtgaatgagttactcaagcaacccaaacaaaccattaaagacaaagaggtcgatgtaaagaaagccacacccaaaccagaccaaatgggcggccccatgatgggcatgcgcggtatgcgaggcggaggcagaggcggtccaatgaggggaggtcgcggtggccgaggcggctacggaaaccaaggaaactggaaccaagcctatggtggctatggttatggccaaggatacggctatgatggctacagccaaggttatgactactacggcagtggctatgggggttatggaggttatgattactcaaactatggcggcggtaactacggtaaatacacccacaggacacattaataaactttttactcccaaccgagatgttgttaatatctcgagtggtgccttgtaagctcggtgtatatgtcaagtgataactgtgtcagggttggctgtaggaaacttgttaccaactatacaaaaacgttatttttggccaaatacattttataaattgtaaacctggttgttctacaataccttgttaaattttaattttcgacggcatgactgttggtatttttcagtttcctacagctaacccattcttagttctacacacaggaaggtcatatataacaagtgtgatattcacactagagactatgtggtcttgaaatatttttttttattatttaaggacatatttacactaagtcgacagttgttctgttcctatacataaattatatgttgacctttatacatatatttaatagtatggaagaagatacattgtgaaaatatctagagcttgaaataaagcatttgttgaaattctacattccctcaataaattaa

SEQ ID NO: 3739 - DNA, 1504 bp, Diabrotica virgifera
  SmartBlast Evalue=7E-26; Info=Endonuclease-reverse transcriptase n=1 Tax=Bombyx mori RepID=D5LB38_BOMMO
tgtgccttgtccgttacggatgttggctatcatcatagcaattttaattttgtttgcggcgtttctgaataactcgatcgatgttagtccaaaccattggcgtaagttttgaagccatgagtgtcttcttcttccgggtccgcgtttgctttctattttaccctgtattatcagttggagtatatgatatttatcatgtctcataatatgaccgaggtattcaagtttccgtttcttaattgtgaaagagatttctttttgttttcccattcggcgcagtatctctacgttggtggtgtgagtcgtccaggatattttgaggatacgtcggtacacccacatttcgaatgcctccagcttcctcattaatgttaccttttctgatatcaatgctctctgtggacgaattgccaacttttaccctggctgtctgattccagtagagacttgtcacaattcggatgtccttatcatcaattcctatgctttgtggaatttcaattagatagtcatgtcttaaattgtcaaaggctttcgattaatctacaaagcacatgtagacatccttgttcatatctctatacctctgtactaatacttgctggcaaaaccgtgaccaggcatctcgtagcgcgacggttcgtggccggacgactggtggcggacaattcgtaacagcgacagttcttaacggcgacagttggtaactgtacaagttcgtggcggacaattcgtggcgtcagaattgaattattctgtttatttttgttaacgtggaaactacagtcggaaaatgaaggagtgcccatgagcgatcgcatcaatcacttattttgtgtttgctgtctttttctataaataacaaacgtttgttatagaggaagacagcaaatgcaggtgggtgattgatgtgatcgttcatgggtgttctttcatttttccaactgtaactgttattacagttataattaaaattatgtttattaatttaacgaatcagtaccgggataaacatgtttaacacattttatgtttcgtgtttcagaatatatgtattaaagtctttaaacacaaacaaatatttaaatacatacaaacttttaacaatatttttaaaagtttatccctcttattgttccttaaatttgcatatacctagacaaaggaataatgaagtaattctgaaatatttaagccaacaaccgtctttagacattcccaattttctagtaaacattttgtaaaggaaatattataattacctgttattataataaaccttgtgattggttatagcgttggggtattcaatcaacggttatagttgatacgagggatggcttttaatactttaatactggtttaaatacttttattatattctgaaacacgaaatatgaaatgccttgaaagtgtttatcctgatactgattcgttaaattgataaacacaataattgttttaaattagaaattattgtaataacaatttcatttataattgt

SEQ ID NO: 3740 - DNA, 825 bp, Diabrotica virgifera
  SmartBlast Evalue=2E-38; Info=Endonuclease-reverse transcriptase n=1 Tax=Bombyx mori RepID=D5LB38_BOMMO
tgtgccttgtccgttacggatgttggctatcatcatagcaattttaattttgtttgcggcgtttctgaataactcgatcgatgttagtccaaaccattggcgtaagttttgaagccatgagtgtcttcttcttccgggtccgcgtttgctttctattttaccctgtattatcagttggagtatatgatatttatcatgtctcataatatgaccgaggtattcaagtttccgtttcttaattgtgaaagagatttctttttgttttcccattcggcgcagtatctctacgttggtggtgtgagtcgtccaggatattttgaggatacgtcgatacaccctcatttcgaatgcctccagctttctcattaatgtttccgtcagtgtccatgcctctgcgccatacagcaagactggaaatacatagcactttagcagccgtatttttagcgggagagatatgtcggaatcggtgaatatatttttcattttgttaaatagataatagttaagcttcaatatagatgtaaattcttatgctggtgccacaccagcgtctaatgctgttaatcatcgcattatttcgcatatttctaaagcaaataatgcgataattaacgatattagatgctagtgtggccccagtattaaagtataagtagagcttagctaagctggagcttaagatctgttcgtgcaactaggcataagttaccggaatttgataagtaaacgttgacgtgtaaagcaaatctttaagccaaacagttttacgaggtatcttcaagttcttgaacaatttatctagcgtactgaatttagaaaagc

SEQ ID NO: 3741 - DNA, 668 bp, Diabrotica virgifera
  SmartBlast Evalue=4E-36; Info=Endonuclease-reverse transcriptase n=1 Tax=Bombyx mori RepID=D5LB38_BOMMO
tgtgccttgtccgttacggatgttggctatcatcatagcaattttaattttgtttgcggcgtttctgaataactcgatcgatgttagtccaaaccattggcgtaagttttgaagccatgagtgtcttcttcttccgggtccgcgtttgctttctattttaccctgtattatcagttggagtatatgatatttatcatgtctcataatatgaccgaggtattcaagtttccgtttcttaattgtgaaagagatttctttttgttttcccattcggcgcagtatctctacgttggtggtgtgagtcgtccaggatattttgaggatacgtcgatacaccctcatttcgaatgcctccagctttctcattaatgtttccgtcagtgtccatgcctctgcgccatacagcaagactggaaatacatagcactttagcagccgtatttttagtgggagagatatgtcggaatgggtgcctacgtggtccaaattgaactgcgaaactcctttgtgttcgtcccaaaaaaccgacaggccgtggttcgtgacgaataaacagctcgtaatgacagaaagttatactaaaaatatgggacaaaaattcattcaacttatttcaaaacttttcgaattttttatgcgagttgaacctgtacagaaatatcctgctt

SEQ ID NO: 3742 - DNA, 1287 bp, Diabrotica virgifera
  SmartBlast Evalue=3E-36; Info=RAC-ROP-like G-protein n=1 Tax= Hordeum vulgare subsp. vulgare RepID=Q70WD7_HORVD
gtaactacctgtcatacatttttatggtgtcaataacctagatcactaagggccgatttcttatattgagttcaaccccagtttaacctgaacttctagtgaacgtcagtttaaagtcaaaatcgtctttctcaattcacgttcaaccgatggcagtttaaacttgaacgatgcttgaacggtggaattcggccgttcaaagatttctgaacccagttcagatgattcatggattacgcatgcgttgtattaacacgaaacgctgtcataatataaatatactattttattatattaagcctaacgataaaagataacattatttttgtttttataacatttatttataattattaaaatgactatttgactataaatacttaaatttaactttattcaaaaacagcataaaaaaggtagttcaaaatggcgacagtcttttccttttgccatctattggcatttctcgaaagctgtagaacgtgcactgacatgaacgcgcaatgagaaatgcattccaaacaaaaccgagatcaccgtgaacctggttcaactgaaccatagattaccgcaggtatgagaaatcgaccctaagtatttattcttaaaatgatgttcataatttataaacatatgcacgatgattcccttttcactttaaggtaattactattatacataacagccgaaatagccatttggaatgtggcatctataaagctcatagtcttggatgagttttcaataaaaccgtgagcgttaatgtctctagctaactcttctccctgctcagttgtaatatgtgagggatgatttcttctgagatccattttggttcccgctaaaattattttggcttttggcgagaatctcttgagttctggagcccattttaggaaaacgttttcgaaggaagtcttttcatttacagcgtatgtcacgataaagcagtccacatctttgtaagctaatcgtctcagtttatcgaactcttcttgacctgcagtatcagagagtatcactttatattcgactccatttatcggaataagcattgagtatacatcaaatacagttggtacatatctgtcatcaaatttcttatctttatacactatcaacatacatgtctttcccgtatcaccatcacccaccactgtgatccttattgtattatttttaggattcatcattccctatacattttataacatatttagtaaaattttatttagtgaatactaaaataattattgtttaattattttgtcaagacaaagctactgc

SEQ ID NO: 3743 - DNA, 911 bp, Diabrotica virgifera
  SmartBlast Evalue=2E-36; Info=RAC-ROP-like G-protein n=1 Tax= Hordeum vulgare subsp. vulgare RepID=Q70WD7_HORVD
aaacctttacaaagataatactttatttaaacaatgctattattaatatacctgcttaaaaggcaaataaagacattaatacagataatacgttaacctcagtaatagattaattttctaatattaatacagataatacgttatcctcagtaatagattaatttctaactgaaatctttaataatatgcataaataggttcattgaaaatacgttttagtatttattcttaaaatgatgttcataatttataaacatatgcacgatgattcccttttcactttaaggtaattactattatacataacagccgaaatagccatttggaatgtggcatctataaagctcatagtcttggatgagttttcaataaaaccgtgagcgttaatgtctctagctaactcttctccctgctcagttgtaatatgtgagggatgatttcttctgagatccattttggttcccgctaaaattattttggcttttggcgagaatctcttgagttctggagcccattttaggaaaacgttttcgaaggaagtcttttcatttacagcgtatgtcacgataaagcagtccacatctttgtaagctaatcgtctcagtttatcgaactcttcttgacctgcagtatcagagagtatcactttatattcgactccatttatcggaataagcattgagtatacatcaaatacagttggtacatatctgtcatcaaatttcttatctttatacactatcaacatacatgtctttcccgtatcaccatcacccaccactgtgatccttattgtattatttttaggattcatcattccctatacattttataacatatttagtaaaattttatttagtgaatactaaaataattattgtttaattattttgtcaagacaaagctactgc

SEQ ID NO: 3744 - DNA, 780 bp, Diabrotica virgifera
  SmartBlast Evalue=2E-36; Info=RAC-ROP-like G-protein n=1 Tax= Hordeum vulgare subsp. vulgare RepID=Q70WD7_HORVD
cttgaaacaccaatcgacgggtctgagcatcctccaaaaaacaatcagtacttgagacactgaatctactccactttacagactctctctgtataatataaaattatattcataatttataaacatatgcacgatgattcccttttcactttaaggtaattactattatacataacagccgaaatagccatttggaatgtggcatctataaagctcatagtcttggatgagttttcaataaaaccgtgagcgttaatgtctctagctaactcttctccctgctcagttgtaatatgtgagggatgatttcttctgagatccattttggttcccgctaaaattattttggcttttggcgagaatctcttgagttctggagcccattttaggaaaacgttttcgaaggaagtcttttcatttacagcgtatgtcacgataaagcagtccacatctttgtaagctaatcgtctcagtttatcgaactcttcttgacctgcagtatcagagagtatcactttatattcgactccatttatcggaataagcattgagtatacatcaaatacagttggtacatatctgtcatcaaatttcttatctttatacactatcaacatacatgtctttcccgtatcaccatcacccaccactgtgatccttattgtattatttttaggattcatcattccctatacattttataacatatttagtaaaattttatttagtgaatactaaaataattattgtttaattattttgtcaagacaaagctactgc

SEQ ID NO: 3745 - DNA, 1254 bp, Diabrotica virgifera
  SmartBlast Evalue=1E-25; Info=Reverse transcriptase-like protein (Fragment) n=1 Tax=Amblyomma americanum RepID=Q9Y1H0_ AMBAM
agatcagaagttagtagcatgaagaattgcgatatttgagttactccaagtgatactggtatcatcagcaaaaagaaaaacttttccatcgatttttaaactagtgatgtcattaataaagataaggaaaagtagaaggacccaatactgaaccttgtggtaccccaaatacaacatttttgagactagagtctgtatcatttgctctaaccagttgtttcctattatccaagtaagattgaaaccagttcaaagaaatacctcgaattccatagaaatctagttttttatcaaaatgtcgtgatttacacaatcaaaagctttggcataatcacaaaaaacagtggcagtgtgcagattattgtttaatgcttgataaacctcatgtagtacagaaaacatggcatcagtggtacatttattatttaaaaagccgaactgattttgtgataaaatgttgttatcaacgagaaaggacataagtcgggcttttatgagtctctcaataattttggagagtaccggtagtagtgcaataggtctataattgcaggtattagatatttcaccacccttatgaagaggaataatgatggctgtcttcaggcactctggaaatttacctttctcaaaagaatcattaattggcgagatgaggacacaaggatctacagatcgagcgagtctcgtaaattgcacggcctcgagccacgcttcacacaaccatatttgcgtacttgtgttttgggttgtgtggtcgtgctctggtcgagtggagttataatttaccaaatttaaatatacctaatcgtttctactgattcataaaatgtatactataatataatatattattaaagtttttaacattgtattttaatatactttgttttattaataataatattacctaagtattgcaccttgttcaaaaaaagttcaagataaataccgcggtttttccatatgaaaatgcaaaggaaaataatacaatttgcaaagtttgtaaatgcttgctttttgataaaataatacaaattgtatgtaggtaggtaaagtagcaaagcgttgagtagttatagcaaaagtagctacgccatctgagacacgataaggatgaaattagttttatattttcttttctcatggagcatgcatgatggagagtttttttaaaacgtaacaaagcatgttgttttgttatctatgttgttcaaacacctcagctgacacagtgtctcaagtacgattgcg

SEQ ID NO: 3746 - DNA, 883 bp, Diabrotica virgifera
  SmartBlast Evalue=3E-32; Info=Reverse transcriptase-like protein (Fragment) n=1 Tax=Amblyomma americanum RepID=Q9Y1H0_ AMBAM
agatcagaagttagtagcatgaagaattgcgatatttgagttactccaagtgatactggtatcatcagcaaaaagaaaaacttttccatcgatttttaaactagtgatgtcattaataaagataaggaaaagtagaaggacccaatactgaaccttgtggtaccccaaatacaacatttttgagactagagtctgtatcatttgctctaaccagttgtttcctattatccaagtaagattgaaaccagttcaaagaaatacctcgaattccatagaaatctagttttttatcaaaatgtcgtgatttacacaatcaaaagctttggcataatcacaaaaaacagtggcagtgtgcagattattgtttaatgcttgataaacctcatgtagtacagaaaacatggcatcagtggtacatttattatttaaaaagccgaactgattttgtgataaaatgttgttatcaacgagaaaggacataagtcgggcttttatgagtctctcaataattttggagagtaccggtagtagtgcaataggtctataattgcaggtattagatatttcaccacccttatgaagaggaataatgatggctgtcttcaggcactctggaaatttacctttctcaaaagaatcattaattagtgagatgaggacttccaacacattttctgtgagattagagaaaatttttatagatagtccatcagtactacaggatgatttgcttttgatactattgattgtttggatcagttcagagttatcgactggtcttaaaaagaatgaattcgagacctttcttgaattagggagataggaaatgggatcttgttgactgaatagttgatgttatatttttactgacattaacgaagta

SEQ ID NO: 3747 - DNA, 732 bp, Diabrotica virgifera
aaggatgtacagttcgagcgagtctcgtaaattgcacgacttcgagccacgcttcacgcaaccgtatttgcgtacttgtgtttcgagttgcgtggtcgtgcggattttaatttaccaaatttaaatataatcgtttctactgattcataatatgtatactataatatattatattaaagtttttaaacattgttaaagtttttaacattgtatttaatatgtttgagttgtgtggtcgtgctctggtcgagtggagttataatttaccaaatttaaatatacctaatcgtttctactgattcataaaatgtatactataatataatatattattaaagtttttaacattgtattttaatatactttgttttattaataataatattacctaagtattgcaccttgttcaaaaaaagttcaagataaataccgcggtttttccatatgaaaatgcaaaggaaaataatacaatttgcaaagtttgtaaatgcttgctttttgataaaataatacaaattgtatgtaggtaggtaaagtagcaaagcgttgagtagttatagcaaaagtagctacgccatctgagacacgataaggatgaaattagttttatattttcttttctcatggagcatgcatgatggagagtttttttaaaacgtaacaaagcatgttgttttgttatctatgttgttcaaacacctcagctgacacagtgtctcaagtacgattgcg

SEQ ID NO: 3748 - DNA, 1109 bp, Diabrotica virgifera
  SmartBlast Evalue=2E-60; Info=Cathepsin L-like proteinase n=1 Tax=Diabrotica virgifera virgifera RepID=Q70EW8_DIAVI
agagactgccataattatatcttaagccaagaagttaattttaattatgaaaataattttagtagttttggtgattgtagctgcagctacagcatctacggacgaagaaaaatggagacaatttaagattacccacaacagagtatataacaatattgaagagcataaacatcgatttgaaatctttaagaaaaatctgattcgtattaaagagcaaaacgaaaaatacgaaaaaggggaatcaacttttaacttcggaatcactcaatttgcagaccttaccgaagaagagttccttagtcgttttaaactcgctggtagttctaagttaagcaaaattaatagcaatgtctcttcttctaaaagtagaagtaaaacctccggtggatcagatgatttgccagaacaatatgactgggtccgcactggtgcagtgacacctgtaagagatgttgcagattgtggtgattgcacagctgaaagcgtggtagccgcagtagaaggcgctgagtttataaaaactggaaatctaatacagcgaagtcccaagcagctagaagactgcattccttttaacccagatgaatgttggatatgttatgagaaggtccttaattacaccagagattttggtattatgaccgagaaggattatccttggaaatttgaaagtgaggattgtcaaatagataacattaccaccaccgatccgctgatacagataattgactggatatatgttagcgagggggatgaggtggaattacaacgtacactttatcttgaaggacctgtagtggtttccatagatgcaaccattaattatcagctatatgcagatggtgtgctagatgatccaacttgtggaaatacaatggatgatatggatactacccttttgcttgttggctatggtgaatctaaaagacaaggccaatactggatccttaaaaattatattggcacgttttggggaaataacgggtacctttggttaagaagaaataagaataatcagtgtggagttgctacgtcagctgttattccagttcttgattattaatattattaattatatgtgtattattcaaaaaatatctgaattagta

SEQ ID NO: 3749 - DNA, 1091 bp, Diabrotica virgifera
  SmartBlast Evalue=5E-61; Info=Cathepsin L-like proteinase n=1 Tax=Diabrotica virgifera virgifera RepID=Q70EW8_DIAVI
atcttaagccaagaagttaattttaattatgaaaattattttagtagttttggtgattgtagctgcagctacagcatatactgacgacgaaaaatggagacaatttaagattacccacaacagagtatatgaaaatattgaagagaacaatcatcgattcggaatctttaagaaaaacctgattcgtattaaagaacaaaacaaaaagtacgaaaaaggtgaatcaacttttaacttcggaattactcaatttgcagaccttaccgaagaagaatttcttagtcgatttaaatccgctggtagttctaaattaactaaagtcaatagcattatttcgtcttctaaaagcagaagtaaaatctccggtgtatcagatgatttgccagaacaatatgactgggtccgcactggagcagtgacaccggtaagagatgttggagattgtggtgattgcacagctgaaagcgtggtagccgcagtagaaggcgctgagtttataaaaactggaaatctaatacagcgaagtcccaagcagctagaagactgcattccttttaacccagatgaatgttggatatgttatgagaaggtccttaattacaccagagattttggtattatgaccgagaaggattatccttggaaatttgaaagtgaggattgtcaaatagataacattaccaccaccgatccgctgatacagataattgactggatatatgttagcgagggggatgaggtggaattacaacgtacactttatcttgaaggacctgtagtggtttccatagatgcaaccattaattatcagctatatgcagatggtgtgctagatgatccaacttgtggaaatacaatggatgatatggatactacccttttgcttgttggctatggtgaatctaaaagacaaggccaatactggatccttaaaaattatattggcacgttttggggaaataacgggtacctttggttaagaagaaataagaataatcagtgtggagttgctacgtcagctgttattccagttcttgattattaatattattaattatatgtgtattattcaaaaaatatctgaattagta

SEQ ID NO: 3750 - DNA, 687 bp, Diabrotica virgifera
  SmartBlast Evalue=1E-31; Info=Cathepsin L-like proteinase n=1 Tax=Diabrotica virgifera virgifera RepID=Q70EW8_DIAVI
agagactgccataattatatcttaagccaagaagttaattttaattatgaaaataattttagtagttttggtgattgtagctgcagctacagcatctacggacgaagaaaaatggagacaatttaagattacccacaacagagtatataacaatattgaagagcataaacatcgatttgaaatctttaagaaaaatctgattcgtattaaagagcaaaacgaaaaatacgaaaaaggggaatcaacttttaacttcggaatcactcaatttgcagaccttaccgaagaagagttccttggtcgttttaaatcttctggtagttctaagttaagcgaaatcgttagcaatgtttcttcttctaaaagtagaagtaaaatctccagtgcatctgatgatttgccagatcaatatgactgggtccagtctggagcagtgacaccggtacgatattatggcgattgtggtgcttgcacagctgcaagcgtggtagcagctgtagaaggggctgagtttataaaaactggaaatctaatacagcggagtacaagacaattgcgagactgcattccttttgacccacatgaatgttggatttgttatgaaaaggtccttaattacaccagggattttggtattatgacagagaaggattatccttggaaatatgaatttgaggattgtcaaac

SEQ ID NO: 3751 - DNA, 1191 bp, Diabrotica virgifera
cctgtgtcaggtcgtgtttctgttgtcatttgtgaaaacaataacgaaaatttataaaactataaatacattatttgacacacataatatgacaggtccagcataatggacatcaggacttagctttcatataatttaaatatgaaactgaaaaaacgttctggttcaggagaaatacatatatacattttgcattttgtacaaaagaatctcgtcttcttagtgcatccaagaggtttaggcaacgcgataagaatttctattgctgacagagcatattggcaaatggtcattactggtttttcttacatctataggcggtaactggaaaactgtagactttttacaggagttatgggcacttcatcttcagatgtctctggttctcttgaaatagacgcactagcttgtctcccacttgcaggatctaccacctagagctagtgaccttccaaaattcatcttaaattcctgtaaatccatttcctttgatcattatggctatcttcactgactaaaaaatcgttatctgtcaaaatagcctccaattcacgttccatcaatatccttttactatttgtaactaaacttcaaaaacgtgagtatggtaacatattttgctaactaagtcccaatgtccaaaatgctggacaaaaagtttagaggacccctggcgtgtccagttgtaattattttcaaatatgtatttaccacaaatacgtccaatcatcaagtaacatacattaaaacaatcaatactgtaaagtacagaaaaacactacaacttactgtatttttgtggagccaccatcataacttaaaaaatttcaccacatgtaacaacaaactaccgaggtagacgctgttttgactgataaataggaagtccaatatgctgcaatataggacgcagcgatgcccaacccgaatagtcaccgtgtaataaattagtaaacattgtccagctggctggatctatggacttggaggatatgtatttaaatcttttgatttcatcagacgttcaagacgtagtgagatggacaagagcacgacgacgcatgtggagagaccacgtagatcggatggaccttgaacatatggcgaagcctgttgggcgaagcctgttggtcttcgcccaacgaaatgggcgaagacacagaaggccaacaccatgcgacccataagaag

SEQ ID NO: 3752 - DNA, 1147 bp, Diabrotica virgifera
cctgtgtcaggtcgtgtttctgttgtcatttgtgaaaacaataacgaaaatttataaaactataaatacattatttgacacacataatatgacaggtccagcataatggacatcaggacttagctttcatataatttaaatatgaaactgaaaaaacgttctggttcaggagaaatacatatatacattttgcattttgtacaaaagaatctcgtcttcttagtgcatccaagaggtttaggcaacgcgataagaatttctattgctgacagagcatattggcaaatggtcattactggtttttcttacatctataggcggtaactggaaaactgtagactttttacaggagttatgggcacttcatcttcagatgtctctggttctcttgaaatagacgcactagcttgtctcccacttgcaggatctaccacctagagctagtgaccttccaaaattcatcttaaattcctgtaaatccatttcctttgatcattatggctatcttcactgactaaaaaatcgttatctgtcaaaatagcctccaattcacgttccatcaatatccttttactatttgtaactaaacttcaaaaacgtgagtatggtaacatattttgctaactaagtcccaatgtccaaaatgctggacaaaaagtttagaggacccctggcgtgtccagttgtaattattttcaaatatgtatttaccacaaatacgtccaatcatcaagtaacatacattaaaacaatcaatactgtaaagtacagaaaaacactacaacttactgtatttttgtggagccgccatcataacttaaaaagtttcaccacatgtaacaacaaactaccgaggtaggcgctgttgtcgaatttttcaaatgagtaaatttgactgataaataggaagtccaatatgctgcaatataggatgcagcgatgcccaacccgaatagtaaccgtgtaataaattagtaaacattgtccagccggctggacctatggactgaggaggataatcgtacttaaccatatacaaatatgtggtggattcgataaatattcaaaatttctcgataagcactggcttatcgaaaaagtcgtaagaggcaaaatgttccaaaaacagtgtagtttaactaatggt

SEQ ID NO: 3753 - DNA, 463 bp, Diabrotica virgifera
cctgtgtcaggtcgtgtttctgttgtcatttgtgaaaacaataacgaaaatttataaaactataaatacattatttgacacacataatatgacaggtccagcataatggacatcaggacttagctttcatataatttaaatatgaaactgaaaaaacgttctggttcaggagaaatacatatatacattttgcattttgtacaaaagaatctcgtcttcttagtgcatccaagaggtttaggcaacgcgataagaatttctattgctgacacagcatattggcaaatggtcatggcatctataggcggcaactggaaaactgtagatcttttacaggaattatgggcacctcatctgcagatgtctccggttttcttgaaatagacgcactagcttgtctcccacttgcaggcttaccacctagagcttccaaccttccaacatacagcttaaattcctgaaa

SEQ ID NO: 3754 - DNA, 1121 bp, Diabrotica virgifera
tattcgagaggctcacagcgttgccgcatctaatgtgccgacccggagatttagtcggcctttgcgactatgcacttaaaggttatgaaggcactgaaatttgccaagcagtacttgtttatatatagaaatcccatgcatttctacattggcaatcatctaaaatctaaaccatctacaggttgtttagttttaaattagatatacaacctataaatggcaacactgctttcccgctgtcatcaatacaattgattcgcgccgactcattcagtcatttgtcattctacattggcaatgcaacgcattcccatagcaatgttgccgattttagcgtttccttcagtcgcctgtacctaatcgaaaactaaacgtattgtacaaaaatacagcaaagaaattaatcacttacagattcaagtaaaaccttttgttatttgacatcttaaggctgttttatcggtgcaccaaaacttagggacagtgttttctcggttatttaccgacagaatgtcttgaaatttggacacgttattcgaaattatgttgcctttaaaatgatggttttactttttttattttttgaaaattctgttgaaaaattagattataatgtttaacgttctattataaccaaactttttactcccatcacttgaaagagtttttttttctgtaatcgttgattttttttttcacctttctgtgtccagtaataatcgagaaaagcgtgttccaactttgaagaaaatttgctaaaaatattgaaatctaataatgaaacgagttacgcagcattggcgcttagtttcatcgttatcgccttcgtgacgacaaatctcatgaacgtacggtcagtcggtcagttcgcttgaattattagaatccatttccagttattcattcttgtatttacttcatcaacttgcttagtgtttacagtttacagtattcttagttattttgaaaacattaaacttatttagtttacgggtatttttaagactaatatattattagtttagtggtataagttacaagttctttagtttacgcgtatttttaagtattacattagtttagggatataagttgacaagataagaaatgagtcccagggt

SEQ ID NO: 3755 - DNA, 913 bp, Diabrotica virgifera
  SmartBlast Evalue=1E-13; Info=GRAM domain-containing protein 1B n=1 Tax=Harpegnathos saltator RepID=E2BPH5_9HYME
tattcgagaggctcacagcgttgccgcatctaatgtgccgacccggagatttagtcggcctttgcgactatgcacttaaaggttatgaaggcactgaaatttgccaagcagtacttgtttatatatagaaatcccatgcatttctacattggcaatcatctaaaatctaaaccatctacaggttgtttagttttaaattagatatacaacctataaatggcaacactgctttcccgctgtcatcaatacaattgattcgcgccgactcattcagtcatttgtcattctacattggcaatgcaacgcattcccatagcaatgttgccgattttagcgtttccttcagtcgcctgtacctaatcgaaaactaaacgtattgtacaaaaatgcagcaaagaaattgatcacttacagattcaagtaaaaccttttgttatttgacatcttaattcaatctccctaaaaatcttataaatcttaatatgaaataaataaatattataaaattaaaaacatactagcagtcattcacgagtcccacaatatataaaaataaatcataaataccattcatatcatcataaatatcattcatatttttactaacatgtctttgtagactttgacgtggtaaaaaaactgtcaaatgtatgcaaggatcctgcaatttgttaaaaatgtctataattcttgtttattttcttcttggcccacttgctgctgtaaaattgacactaatttgctagagtaagtcgattgaatcgaactttgaagctcgttgagagattcttcagcttgtcttaggagctgtatagaattccttagtaatttttgccacttttgagcttctactgtatgcaaagcttcttgttgttgtaacaattttatccactcctcgtgagactgaggcgga

SEQ ID NO: 3756 - DNA, 621 bp, Diabrotica virgifera
  SmartBlast Evalue=6E-14; Info=GRAM domain-containing protein 1B n=1 Tax=Harpegnathos saltator RepID=E2BPH5_9HYME
cggcgccactgagtaaagatcgaattgtcggtcgcactccctacttcaaatcaattttaaatagggagtcacgtgtgtctgacgtcaccagtctacgaaagtaagtgatacgcccacttaacattgcaatgtgcttcaactgataaaacagccttaattcaatctccctaaaaatcttataaatcttaatatgaaataaataaatattataaaattaaaaacatactagcagtcattcacgagtcccacaatatataaaaataaatcataaataccattcatatcatcataaatatcattcatatttttactaacatgtctttgtagactttgacgtggtaaaaaaactgtcaaatgtatgcaaggatcctgcaatttgttaaaaatgtctataattcttgtttattttcttcttggcccacttgctgctgtaaaattgacactaatttgctagagtaagtcgattgaatcgaactttgaagctcgttgagagattcttcagcttgtcttaggagctgtatagaattccttagtaatttttgccacttttgagcttctactgtatgcaaagcttcttgttgttgtaacaattttatccactcctcgtgagactgaggcgga

SEQ ID NO: 3757 - DNA, 1814 bp, Diabrotica virgifera
  SmartBlast Evalue=5E-58; Info="Mitochondrial import inner membrane translocase subunit Tim23, putative n=1 Tax=Pediculus humanus corporis RepID=E0VJC9_PEDHC"
gaaccatctgacattgcgataggtttcttatttttaatttcaggaaaagaaaccacaaaaatttaaaaacaaatagtcgaaactcacagtatgtcttccttaaacgatagcaacgacgtctactcctcaaactattctagcagatcaggacttcatggtaaagtaagccccttttcttcgccgtatttgaattatgacccaggatatctaccacaagcgcaaccagaatttatattcttggatggagccagtaaacaaagaggcagatttgaacttgcttttggacaaattggtggatcatgcatgataggagcagctttaggaggtgcctcagggttttataatgggttaaaagccactacattggcaggtcagactggaaaacttagacgaacacagttgataaattacattatgaagaagggtagtgctactgcaaatacatttggatctgttgctgtgatatattctgcatttggtgtaatactttcttgggccagaggaggaactgatgatgatcttaatacaattgtagctgccacagcaactggatgtttatataaatcgacagctggacttagaaaatgtggtttgggtggagctattggattaggagtatcaacagcatatgccctctgggtcaatagggataagttatcagaattacggcaatttaatccagcgtaagatttagttttaaaatactttaaggataatatagagtatagtgattctaaaataaatatttatgccataaaaaagtatattcgtaaaacatagtgagtcatagatgttatttttggttataacacttttgaagatatatatttcaaatttaaaatatattatgtcagatgcccgttagcactcttaagagcactaaaattatgagaaagaagaagaaaaaatatattacagggtttgctgtctcgttaaaaaaccatgagattatcaaaaaaggggtttgctctttaagtgaaggaggatatgaaattatactttaactgaaacattataaataatacaaataatcattgtataatgtagttgatgatttcttaaatacagacataaaaattagagcaaaaagaggagcttatcatgtttctttttcaaatatatatttttgaagggactatagtacagtttttcggaagaacttccttgatctgattattcaaatgaaatttcacgagacaagaagtagatatgtaatttatttgaaattttttttacttcaaagtattttatacactaataatagttgttgaaaatttacaaagctttatttcagaccattagagatgacacatgtaccaaagttttaatatttcaattatttgaaactgttccttattggtaaaaatggtagtgaaaagtattttggttaaataatatgtgatgtttgattgattctctgatgcatcaaagttgatatattttatgacttatggtgttttatgatatatttttaagaaacaaaactataatgcacatattgtacatttgtttggttccaaggctagttgttttatttagcttaaaattcaaaactgaatagagtatagtataatgttgaataatttgttttatataggttcaacttatggactaactctttttttgtgtactttgtgctgtgatcttttttgtttgtttatatctctgtgttcatactgtgaaaactttttatatacatataaaatttagagaaataaatctttgagttccttaattctttaactaacaataaatattggccaaaattcaagtaaaacactatagaagaaactataaaccaaaattctttagtg

SEQ ID NO: 3758 - DNA, 693 bp, Diabrotica virgifera
ttctcgcacctgattgacaggtacagtagtacccgttaattggttcctatgcaggctcatcttcatcaaccgtataggaaatgaatacttggtgttttgtagcttgccgaaacctagaaaatattcgaactcttacgaatcccggttcatacatattctcatcaatttatacttcattcaagatggcgccgaacgatgcgcacgtgaaattactcctctctgtaaatgatgagaattttaaggaaaaagcattcaaatgttgccagaaaactactaacgttatagtgtgcataaaatgtggaagtatttttcatttatcttgttcatcaagaaaaaagcagaaatgtataaagttatgtgatactagaattgtatgtgagacatgtgaacaatctgaaaatcccaaaggaaactcagtaagtcatactcaagaggtaaatgcacatatcctacagttggaaattgattttctaaaaacaattttaagtgaaaagaggaaaatataaaattttatttgataataatcaattgttaaaaagaactaacgagctccttgaagaaaaagtaaaacaaaaaactaaagaacctgaattcaaggtaattaacgttgacaaaagaaaaaactggacttcccctggtaaagatgataaacaactacaaaatgttaatgaccttactaatagtaaacaaact

SEQ ID NO: 3759 - DNA, 981 bp, Diabrotica virgifera
atgtattctagatgctagatggctgcttcattgtcagcaacgtgttgaggaatcgcttttgcaccgctcctgaagctcgtacgcgtctttttgaggtaagaaatgatagtgtgagtgaatcattaaaagaaaattggaagaaagaaatttgggggcttcccgtccgtcttgcgcgagaatatggtgactagtctgaggcgaaatggaagaacatagtgttctcagattagagcagaatagttctaaaaggtccagatgaacttcagcgtgtctacaggcgtcaaaatgaaaggtttgttctatttactataacagaaacagtggcttaccgaagagcgtcaatatttggggaggaatcttttacgaagctcttcttcttcttcttcttcttcttcacccagctaacagtgttcgtatatataacgtcaaacaaacgtcaacattttgggagaagttacgacaaaagttacatcaaattttacctaaaatatacgtaaaaaagtcacagcgatgttacgtaacaattttaggttatttctacgtaacctttttaacgtcacaaaaacgtcactttttaggagaattttcggtataaatgatatttataaataggacttaaaattattgtgtaaataaaaccacatacgtgatgctgacacatttattaaatatttgaaataaatatttattatatatttgacttttatgtgagagaaagagacaaaattattatactttatattacaatacataaacatacccttgaagtaatcttcattcgtgtaaactgcacactttcatataaggactaggctgcttccccatttttagaagagatttccatacatttcgttttcaaaactgtcattgaatagaattctattttgtttatcctatttagggaaagaatgaaacgataaattactattaggtacgctttatccaagaatcacattgaggcacacaataataataattcga

SEQ ID NO: 3760 - DNA, 793 bp, Diabrotica virgifera
atgtattctagatgctagatggctgcttcattgtcagcaacgtgttgaggaatcgcttttgcaccgctcctgaagctcgtacgcgtctttttgaggtaagaaatgatagtgtgagtgaatcattaaaagaaaattggaagaaagaaatttgggggcttcccgtccgtcttgcgcgagaatatggtgactagtctgaggcgaaatggaagaacatagtgttctcagattagagcagaatagttctaaaaggtccagatgaacttcagcgtgtctacaggcgtcaaaatgaaaggtttgttctatttactataacagaaacagtggcttaccgaagagcgtcaatatttggggaggaatcttttacgaagctcttcttcttcttcttcttcttcttcttcttcttcttcaggtgccatctccgctatgaaggttggcaatcatcatagctattttaatttttgaggcagtagctctaaatagttgttttgagctgcatacaaaccattttcgcaggttcttcagccatgaaattcgtcttcttccgatgcttcttctgccatctatctttccttgcatcgccccgcatcacatgtccgagaaactgtagttttctttctttaattgtaagttcaacttccttctctttacctattcttcttagtactttgttgttcgtaactctatctacccaggaaaccctcataattcttctataggttcacatttcaaaggcgttaagtcgcctcatttctatacatttaacgtccatgattccactccatagtatagtaca

SEQ ID NO: 3761 - DNA, 617 bp, Diabrotica virgifera
  SmartBlast Evalue=0.000000006; Info=Endonuclease-reverse transcriptase n=1 Tax=Bombyx mori RepID=D5LB38_BOMMO
atctcaaacgagatcttatacgtgtctatacctaaccaaaatccacgtgttagagacgaataaattcatacgcattaaaacctatcaaagagccacgtttcagaaacgaataaattcatacatataatatacgtattaaaatttcgtatcagtaacgtaatttttgatagatgttacgtaacaatgtatacgcaagataacgttaatgtaacgttatcttgctagctgggcaggtgccatctccgctatgaaggttggcaatcatcatagctattttaatttttgaggcagtagctctaaatagttgttttgagctgcatacaaaccattttcgcaggttcttcagccatgaaattcgtcttcttccgatgcttcttctgccatctatctttccttgcatcgccccgcatcacatgtccgagaaactgtagttttctttctttaattgtaagttcaacttccttctctttacctattcttcttagtactttgttgttcgtaactctatctacccaggaaaccctcataattcttctataggttcacatttcaaaggcgttaagtcgcctcatttctatacatttaacgtccatgattccactccatagtatagtaca

SEQ ID NO: 3762 - DNA, 1206 bp, Diabrotica virgifera
gataattcgataaatcaataattatgatctaactgtcactattttttccccataactcggaaatatccaccgcacgaaaaaaattataataaacgaaattatagaaaatcgcattttcaacaatttcggtttctacactttttgttgagaatggcggagatattgagcggggacggttctcgtttggaatcaagatggcggctggcgcagcggtcgggttcagtcgagattttgaatttgtactactattgacccccccctaaagattagaaagataaagtctggggcagctcgtaatgcaaggtcaaatgctatcccgactgggctaaaaatcaagttaagtgttcaaatggtccaaatacatttgtttatggatgactattgtcaaaacactctgtttatctctaattagtttataaatgtagattgatttgtaacataaatatgataacatagtgtaacaataatgaactggataatacagagctctatacttcattcagcaagcgaggcaaaagaggaagagaatcataaaataggtttgatagaaatatttcaaggccaacaaggatttaaatgtcaattatcacagtattatgagaatgctttgagtcaaccaattgacaaaagattaatttaaacgattcttctttagttccaactggatctactgtttcttgttaagtgttgtcaactagttctttttggtcaaagcaacctttattttattatattatatttatatatattttagtatattagtgtaccaatgcgatttctgtaaactttctcacctggtatgagtggaaatacttaaatcacaggatttgtgttttggtatcattattcatagtttttccatcatctttaaaacaccaatggcaaaatcgagttccatggcacgtcgtcaaaagccattaatcgatgaaatactgaaatacacatttcgttagcttttcgtgtcaaaattatttttgaaaccaaagtgtgtggcttatatttcttcctaatgtatgttaagcatttggctgctaacaattgatctaaacgatctactactacatgtcgatttatagcgttctccgccgttttcagatttctaatcgtcacttcatccggtcattccataggttctcttataggtttctttctctaagctttatgtcttttcattctccccatcttgttctcggtctaccttgtttt

SEQ ID NO: 3763 - DNA, 865 bp, Diabrotica virgifera
gataattcgataaatcaataattatgatctaactgtcactattttttccccataactcggaaatatccaccgcacgaaaaaaattataataaacgaaattatagaaaatcgcattttcaacaatttcggtttctacactttttgttgagaatggcggagatattgagcggggacggttctcgtttggaatcaagatggcggctggcgcagcggtcgggttcagtcgagattttgaatttgtactactattgacccccccctaaagattagaaagataaagtctggggcagctcgtaatgcaaggtcaaatgctatcccgactgggctaaaaatcaagttaagtgttcaaatggtccaaatacatttgtttatggatgactattgtcaaaacactctgtttatctctaattagtttataaatgtagattgatttgtaacataaatatgataacatagtgtaacaataatgaactggataatacagagctctatacttcattcagcaagcgaggcaaaagaggaagagaatcataaaataggtttgatagaaatatttcaaggccaacaaggatttaaatgtcaattatcacagtattatgagaatgctttgagtcaaccaattgacaaaagattaatttaaacgattcttctttagttccaactggatctactactagaattcaccagtctctattcgataaaggtctcttgttctattttcatctcaaccagatatattaagtgaaagaggaatcacatggatgtgatatctacccctatctttttccattgtctttatgattgtttcatgttaagtgttgtcaactagttctttttggtcaaagcaacctttattttattatat

SEQ ID NO: 3764 - DNA, 334 bp, Diabrotica virgifera
gataattcgataaatcaataattatgatctaactgtcactattttttccccataactcggaaatatccaccgcacgaaaaaaattataataaacgaaattatagaaaatcgcattttcaacaatttcggtttctacactttttgtcgaaaagttgaaaatggcggagatattgaacaaggaacgttctcgtttaaaatcaagatggcggctaacgcaacggtcaaattcagtcgagattttaaatttatactactattgactcccccaaagattggaagaataaaatttggggcagctcgtaatgcaaggtcaaatgctatcccgactaggcta

SEQ ID NO: 3765 - DNA, 1261 bp, Diabrotica virgifera
tctgcacagtcacagtggtcaactgtggaaaatttagctttagtgggttcaaagagatttttcagcgctacctctccgtctatataggtaggtatataaatatatctttagatatatttatgcagactgcatttgatgtttgttcgattcttggcaaaacttaagatgtgcctactcttctctattgtgttgttgctttttatatcacatttgcttttttgctgtttttatatttctttgattttccttgttgtcttctgtttctaaaatctttggttagttgttatatctttatcatttgtaattttcgtattcgtggagtatgtgagataaatgcagtacgagtatacatatatatattttatttatttgaaccggttacacttaatattttatataagatagtcgtccggaataagctaacgtgttgaaaaagtgtaaacatttatttgcaaaaatagatgtccatgattttcaagcataattattccccattttttcgtacttcactggaacatcatacctggcaaattaactaagccctttcccataaaggaacatcattcataatgtgataaagcaaaattttacttattacaattttgttcctcaggaagtgtaactcacgtgaacatttttgtagttcattactaaatgttgtattttgtgttgccttcttcgaagggcaagtatgtgcgaatggattactaataaattgcaaattgcagttaaaacaacggaaaggggtaaggtaaatgagtagttattttagtaggtgtataagattatgttatatttagctatgtaatgtttaattataaataacatcaatattctaatattgtaactgtaagaagtatgaaattatagataatcccaacaaaaacatgtaaaaaaattgttttgtgaataatatttccgttccataaatgacctaacgtgagcactgacaatggttacgttaggtttgaaggagggaataagtatatcaagggggcagtctctagacaaaagaaggtttatgagaataggactagtgttttgtcatactctattctgcttcattttttaaattttgaaatatttaacttttatgtgtgtaattacagtagttttaagtatgaggaacatttgtaaaactgttcaaattttcctttttgacagtttaaacacttataaatctacattattctttaatacgattgtgtttgcacatttttagaatcagtgagattaacggaaaatgtaagtagatgtattg

SEQ ID NO: 3766 - DNA, 628 bp, Diabrotica virgifera
gtagttcattactaaatgttgtattttgtgttgcctacttcgaagggccagtatgtgcgaatggattactaataaaattgcagttaaaacaacggaaaggggtaaggtaaatgagtagttattttagtttttattttagtaggtgtataagattatgttatatttagctatgtaatgtttaattataaataacatcaatattctaatattgtaactgtaagaagtatgaaattatagataatcccaacaaaaacatgtaaaaaaattgttttgtgaataatatttccgttccataaatgacctaacgtgagcactgacaatggttacgttaggtttgaaggagggaataagtatatcaagggggcagtctctagacaaaagaaggtttatgagaataggactagtgttttgtcatactctattctgcttcattttttaaattttgaaatatttaacttttatgtgtgtaattacagtagttttaagtatgaggaacatttgtaaaactgttcaaattttcctttttgacagtttaaacacttataaatctacattattctttaatacgattgtgtttgcacatttttagaatcagtgagattaacggaaaatgtaagtagatgtattg

SEQ ID NO: 3767 - DNA, 496 bp, Diabrotica virgifera
gtagcacactatctgaggacttcgcatgcctatattattaattataggatcttatagttcgattccagcaatggagttgctggtaaataacttttcccaaaaatggcctattctccgataatcagcccagactaagataatcccaacaaaaacatgtaaaaaaattgttttgggaataacgtgagcactgacgatggttacgttaagtttgaaggagggaataagtatatcaaggaggcagtctctagataaaagaaggtttatgagactagtgttttgtcatactctattctgcttcattttttaaattttgaaatatttaacttttatgtgtgtaattacagtagttttaagtatgaggaacatttgtaaaactgttcaaattttcctttttgacagtttaaacacttataaatctacattattctttaatacgattgtgtttgcacatttttagaatcagtgagattaacggaaaatgtaagtagatgtattg

SEQ ID NO: 3768 - DNA, 950 bp, Diabrotica virgifera
  SmartBlast Evalue=1E-10; Info=Endonuclease-reverse transcriptase n=1 Tax=Bombyx mori RepID=D7F169_BOMMO
acagtctacagctcagtggagtcgctcagtattatcgccgttgttttcatttatcacgcttcattttacatctactgctagcgtaaatctgtagctcgtggagccctagcctaaatagcgaaaatattaatgtaatattatttatcgaaaaaaatatgaagaaaatggaatacttagcaatatcgaaagaagacgtcaaaaacttagaaacagaagaacaagtagaaataaaaggaacgaagaattttaaatatttggactttataatgtcgaaaaaggaaacaacagaagcagaaataaaaataggttgcgacaaacaagatattgcatcagacaactccatattgtaatctggaataagaacatcaatggaaaaacaaaaaaatgatatatcaaacaatagtaagaagtaagaagcatcatgacatatgccgcagaaatttgggtcataaacaaaaaaacccaaaagggcattctggcaaccgaaatggaatactggagaagatgctgtggtctcaccagaagtgacagaataacaaatgaggagataaggagaagaatgcaagtggaaaaagatgccctgcaatatatagacgagagaagactgaaatggtacggccacgtacgcagagcagaaaacacttggataaacaaggttgcagaacggagcccaagaggaacaagaagaagaggaagagctagaagatcatggaagaatgaagtcgacgaagccatgtcaaagaaatgattggaagacagagactgggaagatcgtaaaaaatggttgtcctgattgacggaaaggaaacggcactagctgtagacaactcttgattattcctttggtgtatttcttcaagccacacgttttacaaattaaactaaattaggaagtttaggtctactaaatatatgcatctaaggaatatcactcagtgatggaggggtta

SEQ ID NO: 3769 - DNA, 812 bp, Diabrotica virgifera
acagtctacagctcagtggagtcgctcagtattatcgccgttgttttcatttatcacgcttcattttacatctactgctagcgtaaatctgtagctcgtggagccctagccttaagtgctcttcaaccttcaagtaatgtgagtcgtacagagtatcatcattatatttatcccagttacagtcattttattaatattagtacgagagtgaatttatacaatctttactctcgaattaaatactaacaaatactcaaattcgtactttgtaaaaaacctataaaaaggtcgcgactactatcttaatctaatgccctttttaacatcataaactttatcaaaaataatactttatttattgtataagtttcgatttaaggacactttactgcactttatactttaatatttgcgcaaatatccacaaacaaaagctcataaacctgaacgcagaattaaacagggcctcactaaggaccagtcttacattttgttttcgtaacactttaacaaatttatttttaaagtaaaggacaccgcgaatagattcgtctcgaaattacaaccacttcacatcactgcgccaaccgagttttgactaataacggcgtaaattggtataatatataaactcacgtgcatagaaatcggcccactcaaaaacccggtcatctctgatgtctcgcatttcccaaacctgttggccgacccaagtgatctttaaatatgttatagcctcactctttcacaatatcgctgtaatcatattgttgcaaacaggcaaatttccactgtacaccgggtgcacgaat

SEQ ID NO: 3770 - DNA, 528 bp, Diabrotica virgifera
cctggaaataaatatgtagaaaacagaaatttgggccataaacaaaaaaacaaaggagcattctggcgaccgaaatggaatgctgtggtctggccagaagagacataatgtcaaatgaatagataaggagaataatgaaagtggaaaaatgccctgctgtataatatagaagagataagactaaaatggtacggccatgttcgcataaagtacatggataaataagaaacaaggttgcagaacggagcccaagaggaacaagaagaagaggaagagctagaagatcatggaagaatgaagtcgacgaagccatgtcaaagaaatgattggaagacagagactgggaagatcgtaaaaaatggttgtcctgattgacggaaaggaaacggcactagctgtagacaactcttgattattcctttggtgtatttcttcaagccacacgttttacaaattaaactaaattaggaagtttaggtctactaaatatatgcatctaaggaatatcactcagtgatggaggggtta

SEQ ID NO: 3771 - DNA, 1022 bp, Diabrotica virgifera
attttttgacaagaagtgtagagactggattgttggaatgcgattttctataatttggtttattataatttttttcgtgcggtcgatattttccgagttatggggggagggtggtgacagttggagcataattgttgtattgttgaattgtctcgtttattgttggttttgcaacggatgtgtacctgtacaaaagtgaagagaattaaattctacacaattttgatttctttcatttttttgctaaaattaatgtttggggtggtacgtatgcgttaatggcgcgagcgtgggaccggattgattttgtagcaagtgtttttgttcaatatctacgccattttcaactaaaattgttcaaaatataatttcctacaatttctttttaacaatttttttcatgcggttaatattttccgagttacatgggaaaatagtaaaaagtggtgggggagcataattattgaattgaattttgtttgcgagatgccccaaattttataattctatcctttaggagagatcaatagtagtgtaaatttaaaatctcgactgaattccgcggttgcattagccgccatattgattttaaaggagaaccgttgttgcttaatatctccgccattttcaacttttcgacaaaaacggtaggaactaaaattgttggaaacgcaatttcctacaatttcttttccacaatttttttatgcgatcaatattctccgagttaagggggaaaataatggaagcggaggggaagcataattattgaattgtctcatttattattaactttacgacataattgtacataaacaaaaataaagagaattatattttatacaatttttgaaacttccaatgaaacaccaaccaaactaagtacataaaagacaaatagtaacttatatgcattaagttcacttaattttattaactagcgggttttattggttgaatttgtctgtcgataattaagtttcatgtcagctaacatattttaatatttcaacaactttttt

SEQ ID NO: 3772 - DNA, 824 bp, Diabrotica virgifera
gagagaattgaattgtacacaattttggtttctttcatttttttgctaaagttaatatttaaggtagtagtatgcggtaatggcgcgagcgtgggacctgattgattttgtagcaattgtttttgttcaatatctacgccattttcaactaaaattgttccaaatatgatttcctacaatttctttttaacaatttttttcatgcggttgatattttccgagttaagtgggaaaatagtaaaaagtggtggggggaacataattactgaattgaatcttgtttccgagctgccccaaattttataattgtatcctttagggatgatcaatagttgtgtaaatttaaaatctcgactgaattccgcggttgcattagtcgccatattgattttaaaggagaaccgttgttgcttaatatctccgccattttcaacttttcgacaaaaacggtaggaactaaaattgttggaaacgcaatttcctacaatttcttttccacaatttttttatgcgatcaatattctccgagttaagggggaaaataatggaagcggaggggaagcataattattgaattgtctcatttattattaactttacgacataattgtacataaacaaaaataaagagaattatattttatacaatttttgaaacttccaatgaaacaccaaccaaactaagtacataaaagacaaatagtaacttatatgcattaagttcacttaattttattaactagcgggttttattggttgaatttgtctgtcgataattaagtttcatgtcagctaacatattttaatatttcaacaactttttt

SEQ ID NO: 3773 - DNA, 404 bp, Diabrotica virgifera
gagagaattgaattgtacacaattttggtttctttcatttttttgctaaagttaatatttaaggtagtagtatgcggtaatggcgcgagcgtgggacctgattgattttgtagcaattgtttttgttcaatatctacgccattttcaactaaaattgttccaaatatgatttcctacaatttctttttaacaatttttttcatgcggttgatattttccgagttaagtgggaaaatagtaaaaagtggtggggggaacataattactgaattactttaccgcatacgtgctaccttgaatattgattttatcaagaaatttaaagggatcaaaaatgtacaaaatttaattctcttgatttttgtataggttcagatttgttgtaaaactgataataaacgaga

SEQ ID NO: 3774 - DNA, 690 bp, Diabrotica virgifera
ttaaattttttgtatactttattaatttcaataacacagtattttattttatacaattttattttctaacaccaagaacctgataaacgtcatctttagcaattactatctcctcctcttggatatccaaatgcaatacaccgtttctatcttcttcatggtagttgtggaagatttttccaataaagtcaccatattttggtacatcggcagctcctatatacagagaagcgttagcctttgtatccagctcatagatccagcctccttgaacgggctcgaagtcatcttggttcagcaactcagtgaagttttcagcggtagcgggcctccattctagtttgtcataatcgttggtgagtaaaaagtaaagttctgcatagttaatatagtgatttccgttcagagttgctggttggtactggtatccaaaaatgaaagaaccaggcataaaagaaacgctttgttcatctgctacaatggtccgtgatatataaactctctctccagttacggtctgtccatggtaaattgccccgacatagttcatatggtacctgaaatctccccagtaaacaactggatcttgagaagcgctatttacatcgtaacaagataaggccagcagaaacaccacagagtattttacagtcattttaaaaatcaattgatcttacgacgacgattttg

SEQ ID NO: 3775 - DNA, 679 bp, Diabrotica virgifera
gtatactttattaatttcaataacacagtattttattttatacaattttattttctaacaccaagaacctgataaacgtcatctttagcaattactatctcctcctcttggatatccaaatgcaatacaccgtttctatcttcttcatggtagttgtggaagatttttccaataaagtcaccatattttggtacatcggcagctcctatatacagagaagcgttagcctttgtatccagctcatagatccagcctccttgaacgggctcgaagtcatcttggttcagcaactcagtgaagttttcagcggtagcgggcctccattctagtttgtcataatcgttggtgagtaaaaagtaaagttctgcatagttaatatagtgatttccgttcagagttgctggttggtactggtatccaaaaatgaaagaaccaggcataaaagaaacgctttgttcatctgctacaatggtccgtgatatataaactctctctccagttacggtctgtccatggtaaattgccccgacatagttcatatggtacctgaaatctccccagtaaacaactggatcttgagaagcgctatttacatcgtaacaagataaggccagcagaaacaccacagagtattttacagtcattttaaaaatcaattgatcttacgacgacgattttg

SEQ ID NO: 3776 - DNA, 686 bp, Diabrotica virgifera
aactgtttaattttgactgtattactcgtccttcatagaaacagcaatttgatactgcccacccatatcttggtacggcacttcaacagaggtaccgtccatatatagtatcccttcttgatgctgataaggagaacccttaagaccacggtagatttttcctatcaaattccctccgcctgtcgggccttgtcctacgtatatagaagcgttgtaactcaagcgggagtttgcttcccatccaatttcgataggggtgtagtcatcccgatcaaacagactttcaaaatcgtcttgattggaggttctccataccaagtctttatctttgcgacacgcaatcttaatatttttgcttgctatatagggtctttttccgagggtaacattgacataccatgatcctccaagtatatttacaggtatcagcgcaatattttctgtgtcaactagagttaccacaccaagatagataggtccacgtgggttgtgagcatcgacaaccactgcatcatctggtatattagtacggtcgtagtctttccattcaaaaaagtcactttctccgtaactgcaaccaattacagcaacaaaaattaatagatatttaataaacatatttatgttcatcaagaatatacctactgaacactagaaatctagttgcaaaattacctgtacaataa

SEQ ID NO: 3777 - DNA, 1134 bp, Diabrotica virgifera
  SmartBlast Evalue=1E-138; Info=Acidic p0 ribosomal protein n=2 Tax=Cucujiformia RepID=Q6EV08_BIPLU
tttttttagacctgtttcatttatttgacagtctgactcgacaaaacagcaaataacgtatcaaaaatataaaactttctagtcaaagagacccaagcccatatcgtcatcttcactttcagattcctccttcttctcttctttcttagactcggcagctggtgcagcggcggctgcagctacaggagcagcagcagcagcaaatttgctgggatccttgatgtattctttgatggtcttggcttccttgaagtcaacatcagtaacagcagcaatagccaacaagttcttgaatccattggcaatgctgtgtggagcagaagcaactgttgggtatccaatggacaaacaaacagcagccaaattggctactccagccaagaatttctccctcaaatcttctggtttgatgtccaaaatagctggagcaaatacagtgcctgagtcatagacttgctcaacttgaagaccatatgagaagggagaaatgtttaacatgttgagtaatgtggcttcggaagctcctactttgtctccgggtttaagaatgtggacatcattgatgatttcaatagtacccttggaaatcttggtggggatactcaaagcctggaagaaagaagtcttctcagggaacaatccagtgttttgggcaggaatgatgacagataatggagcaatggcaccagctctagcaggggctttgactttgttttccaatagtttgtctctgatttcaaccaagtcacctcgggtgaaaacaaaaccaacattacccttgatgtggggcaagatcttttccagagcagggttgtgttcaatatggcccttgatagctttacgcatcatggtattttttcccataagaacgacagcatttcctcgcaatgaaatacgaatttgctgcatttgttttgagccgacattgtcagcgcccacaatgaaacactttgggtagtcttctagcaattggataagtttggtgaagtattttgacttccaagtagccttgtcctccctacccatctttgaagtggttagggactcgtattttcgaatttaagaactcggcaataaacaacggcgcaatgaaagagaatggcagattttcctgtcacgtcacgtcagtttaat

SEQ ID NO: 3778 - DNA, 890 bp, Diabrotica virgifera
  SmartBlast Evalue=6E-72; Info=Acidic p0 ribosomal protein n=2 Tax=Cucujiformia RepID=Q6EV08_BIPLU
tttttttagacctgtttcatttatttgacagtctgactcgacaaaacagcaaataacgtatcaaaaatataaaactttctagtcaaagagacccaagcccatatcgtcatcttcactttcagattcctccttcttctcttctttcttagactcggcagctggtgcagcggcggctgcagctacaggagcagcagcagcagcaaatttgctgggatccttgatgtattctttgatggtcttggcttccttgaagtcaacatcagtaacagcagcaatagccaacaagttcttgaatccattggcaatgctgtgtggagcagaagcaactgttgggtatccaatggacaaacaaacagcagccaaattggctactccagccaagaatttctccctcaaatcttctggtttgatgtccaaaatagctggagcaaatacagtgcctgagtcatagacttgctcaacttgaagaccatatgagaagggagaaatgtttaacatgttgagtaatgtggcttcggaagctcctactttgtctccgggtttaagaatgtggacatcattgatgatttcaatagtacccttggaaatcttggtggggatactcaaagcctggaagaaagaagtcttctcagggaacaatccagtgttttgggcaggaatgatgacagataatttatttatttaaaataataaaatattttttagtaaaagtaaagaaaaattttatttaatgatagttaattagtattgtgagagaatattttatttttataaaagaaaaatttattttttgtaccttgtgtatcagggattattaattaataattatatatttattattttcgaatttaaaagagctaaaaaattaaatttttatgtaaataatattt

SEQ ID NO: 3779 - DNA, 850 bp, Diabrotica virgifera
acttatttttcataaaagcttcaactttaatccgccaataatgttgaacacattttcaaataagaccatttagagatctattaattttgggtggctttatactaaaaataagcatatacggtatatgcggcaaaataaacagtactgaaatcatagatataataatatagattaggcaaggttcgaaaaatagcgtaacgcggagcagttcgggtcggtggtctatttatctctctctagcatatgatggccgctgcctctgtgtcatttcattactcccacctcttggtagatacgctcacactcgtacgacagacaaagatagctagaccactgtacttgatattggcgttacaccccgatgcagtgagtggcatatccctagcctggtctattgttaatatgtctatgactgaaatgcgcatgcctcaaatttgtatgtgccatgcgccgaaacgtaccgagtagtttccgaacgtcattataacttatgtgaatgtcgtgttaatgttaggtgcttcaggatggttctcatttttgcagaaaaattgtttatgggtgagtacaattttcggccatacaaaaaaggtcacgaaaacggtccaagcttaaaatcaacaatcgtttcggcagtcctgtcacactgacaaggagtctcttcgaatactgcgcgataattttgggagttgccactcactagaactagagccaccagatgcgtacatatgggaaatgctaaaggagtcagacagatccaccgtctgccatttcggaattgcggattagaattaaagattttttcacgtcagaggcagtagcggatttaaaaatttgcattgggagggaaaat

SEQ ID NO: 3780 - DNA, 716 bp, Diabrotica virgifera
acttatttttcataaaagcttcaactttaatccgccaataatgttgaacacattttcaaataagaccatttagagatctattaattttgggtggctttatactaaaaataagcatatacggtatatgcggcaaaataaacagtactgaaatcatagatataataatatagattaggcaaggttcgaaaaatagcgtaacgcggagcagttcgggtcggtggtctatttatctctctctagcatatgatggccgctgcctctgtgtcatttcattactcccacctcttggtagatacgctcacactcgtacgacagacaaagatagctagaccactgtacttgatattggcgttacaccccgatgcagtgagtggcatatccctagcctggtctattgttaatatgtctatgactgaaatgcgcatgcctcaaatttgtatgtgccatgcgccgaaacgtaccgagtagtttccgaacgtcattataacttatgtgaatgtcgtgttaatgttaggtgcttcaggatggttctcagttttacagaaaaaatttttatcgtggagtcacgatatatggagtctattttcggtcatacggaaaaggtagcgaacacggtccaagcaaattcacactagttcaagcaggacggggcaatcttgcacacggccagggagtgtcttcgaatactgctcgatcattttgggagatcgccactc

SEQ ID NO: 3781 - DNA, 620 bp, Diabrotica virgifera
tgatctattttctttacatatctctgttagaaatacaaataccaaaaaataccgaaagtcaaaaaaaagataataaaatataacatggaagtaaaacaagaaattagtgaagaaaagtgtaaaatagaaataaaatataataacttggatgtggatgatgctgttttgggtggctttcaatatgaaatgaaggaggaatcaaatagtcaaagttcacatgacacatacgattatttagatgtaaaggaatgtccaataaaaactgaaatgaagcaatatgaagaaaataaaaaaagtagaagaagaaatttttttatggtggagtactattttcggtcatacggaacaggtcacgaaaacggtccaagcttaaaatcaacaatggtttcagcaggatggaacaatttgtcacactgccagggagtttctttgaatactgcgcgatcgttttgggagttgccactcactagaactagagccaccagatgcgtacatatgggaaatgctaaaggagtcagacagatccaccgtctgccatttcggaattgcggattagaattaaagattttttcacgtcagaggcagtagcggatttaaaaatttgcattgggagggaaaat

SEQ ID NO: 3782 - DNA, 1133 bp, Diabrotica virgifera
  SmartBlast Evalue=2E-17; Info=Reverse transcriptase n=1 Tax= Bombyx mori RepID=Q868Q4_BOMMO
tacatatttttctgatcaaacctggtttctctgttgctataatctttattgcctctggtggcagcccgtcagggccgggagctttccctgtcttcatttcctgaccagcggtttttatttcctcttccgtgaactcctcgaccatggtaggaaataccttaataaaattctgtggttccttagtggggaagaggagctcagctgatttcatccgctggtcttcgtcgagtctatatggggccattatcttcaaggttttcattgtaatcctgtatgcgtcgccccatatatcctcgtccagtgcttttatcagggtctgccacttttcctttttctctcgttttattttattatttaatgttttctttaagtctttatatatttctttgagctcgaggttgccctggcttctcgtgtaattccttcgagctctgaggcatctctcccgtagaccttctatctcatccgtccaccagtagggggattttttatcatttttcttcttaacggtggccaatttgctgcactttgcagtgctcttctcagttggccaaggtcagaaatctcttgttcattaattttcctgacctccgataggtacttggttttgttaaaataaatctccgtgtgtcctatcggccgccttattcccctttaacctttatttcgtattgtatataccggtggtaggtgaataactgatcgtcaaggacatcccagccgtgcactctcctggatagcccttcactcgcgaacgtaatatcaatgtgtgttcggctgaccccccttacgaatgttggtttgttattgtttaatacttggaggccagcctgggctatccattcattccatatttccccctttctgtcgtttatgggggcaccccacaacctcgatttcgcgttaatgtccccggcgatcatcacttctttttcgttcgtggcggcgctcattatttcatctacaattgctttgtatcttatcatagggatatttggggacacgtagcatgccagcaggctgaaatccctcagttttatgaggatatgatttcctcccctgacaatgccctgcactcccacatccctatttctaatgagtaccgccacgttctttccattgtcttggaccca

SEQ ID NO: 3783 - DNA, 692 bp, Diabrotica virgifera
  SmartBlast Evalue=1E-15; Info=Endonuclease/reverse transcriptase n=1 Tax=Drosophila melanogaster RepID=Q9N9Z1_DROME
tacatatttttctgatcaaacctggtttctctgttgctataatctttattgcctctggtggcagcccgtcagggccgggagctttccctgtcttcatttcctgaccagcggtttttatttcctcttccgtgaactcctcgaccatggtaggaaataccttaataaaattctgtggttccttagtggggaagaggagctcagctgatttcatccgctggtcttcgtcgagtctatatggggccattatcttcaaggttttcattgtaatcctgtatgcgtcgccccatatatcctcgtccagtgcttttatcagggtctgccacttttcctttttctctcgttttattttattatttaatgttttctttaagtctttatatatttctttgagctcgaggttgccctggcttctcgtgtaattccttcgagctctgaggcatctctcccgtagaccttctatctcatccgtccaccagtagggggattttttattatttttcttcttcacggtggccaaacttgccgcgttttggagaactcttctcagttggccaaggtcagaatctcttcttcgtttattttcctgacctctgataggtacttgtttttattaaagtatgattctgtatgacctatcggccgctttattccccttttgtttttacttcatactgtatgtagcggtggtaggt

SEQ ID NO: 3784 - DNA, 344 bp, Diabrotica virgifera
  SmartBlast Evalue=3E-11; Info=Reverse transcriptase n=1 Tax= Bombyx mori RepID=Q868Q4_BOMMO
acgaatgtaggtttgtcgttgtttaatacttggaggccagcctgggctatccattcattccatagttccccctttttgtcgtttatgggggaaccccataatctggacttcgcattaatgtccccggcgatcaatatttctttttcgcttatggcggtgctcattatttcatcaacgatggcttcgtatctcatcatagggatgttcggagatatgtagcatgccaggaggctgaaacccttcaacctgatgaggatatgatttcctcccctgacaatgccctgcactcccacatccctatttctaatgagtaccgccacgttctttccattgtcttggaccca

SEQ ID NO: 3785 - DNA, 796 bp, Diabrotica virgifera
tgggcggtcggccatgttggccgccattttgaatttggaaatgtcaaattccgtatttctatttacctatcgatgagctaactttaagttaaatttcattctttcggtcaaaatttgcaaaaatgggccctaaataacccccctatttcggcccccctttgagaggtttttttaaaagcttagtttctcgacaaaattctcttaaacttactcataccgaatttcatcgaaatcggtccagtagtttttgctgggcggtggcgacatacgtacgtacatacgtacgtatacatacttccgacatgttttttttatttgctttttagactcagggggactcaaatcgtcgaaaaaaagtgaaatctgaaaaaaaattttttgcacgatcctataactttatctattatactcatactgcgtatgtagtacgataaagtaaaaatggatggaaatgcataattgtactttaatgtgcataggatgcatccaaaagtgcataaacatgtcaaaatcagtatattaagggccagattttgttattcggtgggtttttggggtcacaacacgaatatgcaatcagaaccgaccccatgcatctgatgctcatggttactgttagggcacgtcatctggagtttggaggggtttcggtactatgtaaattgatgcaaacagattactcggagggtttttaggatcgctgaacacgaatacgtcatcagaactgaccctcggagcacctagtgcccaggataactgatttgcacgatatattctggaatttcgttttcggagg

SEQ ID NO: 3786 - DNA, 666 bp, Diabrotica virgifera
tgggcggtcggccatgttggccgccattttgaatttggaaatgtcaaattccgtatttctatttacctatcgatgagctaactttaagttaaatttcattctttcggtcaaaatttgcaaaaatgggccctaaataacccccctatttcggcccccctttgagaggtttttttaaaagcttagtttctcgacaaaattctcttaaacttactcataccgaatttcatcgaaatcggtccagtagtttttgctgggcggtggcgacatacgtacgtacatacgtacgtatacatacttccgacatgttttttttatttgctttttagactcagggggactcaaaacgtcgaaaaaaagtgaaatctgaaaaattttttttgcacgatcctataactttatctattatactatactacgtatgcagtacgataaagtaaaatgtctagatgtttccgccggcggagccgagattcgattcccggccttcttcgtggaagtcacacatcctaacgcctgagctatccaggctctacctatgaattaggaaagatatttaaatgttaaacagacaatagcataatcaagtttataaaaaggcttacctatgtaactgttaattcactcgcgtatcaataatagtcatatatgcggtggtttatctcagat

SEQ ID NO: 3787 - DNA, 676 bp, Diabrotica virgifera
atacacacttctaatactaaaaataaaattcggtatactattaaattattggaagaaaatatcactattacaaacaaaaaatgcaaaaaaattaaaaattttagttttacattaaagaataaaccataaaattaaacatcaataaatgctacaactaacgggacaattgaacaattcataaaatatttgtaggagccgtaaatgtgtaccaaaagcgtatagatcggggcatttagcaataaaaacaccagaataaataaatttttaaacacagcacctatcgacttacaactttttgcattgtgttcaggaccatgtcaggaaaaaagtccactatagaaaatgggcagaaatgcataattgcatccaaaagtgcataaacatgtcaaaatcagtatattaagggccagattttgttattcggtgggtttttggggtcacaacacgaatatgcaatcagaaccgaccccatgcatctgatgctcatggttactgttagggcacgtcatctggagtttggaggggtttcggtactatgtaaattgatgcaaacagattactcggagggtttttaggatcgctgaacacgaatacgtcatcagaactgaccctcggagcacctagtgcccaggataactgatttgcacgatatattctggaatttcgttttcggagg

SEQ ID NO: 3788 - DNA, 1128 bp, Diabrotica virgifera
tgggagcgatgtttgttgtcgttttctgtgctacttcgattgataacttattttgtttttcggtagatggctctagtacatccgtgacatttcgttctttgcaattcggaaaggcccaaagtgtgatgcctggggaaatcgtagagaagaggatatgggactactgatgaggaggaaaaaacctccgaaaccggtatagactcttcctgcactctcagatttaaccagagtattatgcggctgctgcattttcgtgttgcaaagaaattgaaaatgtttatacattttaaaatggaacttgacagaaacattacaacactccattctgaatagtccagtctctgtgatcattcgtaaatctcatcctgttagctcgataagctgttgttaatttagggcatgctactggcttatgagagcgtaaaccactttcatgtaggactcttcttacagttcgtgaagaaatataagttcctggagcttgtaacggacgaagaagaacttcatggttgaagaacttgcgagattggtatgggaagcatgctatcaaagtgacagtgaataaaattaagatagctatgatggtaaccaactttctgagaggacatagtacatgaagaaggagaagagctcctaacaaacgactagcgagaacagttgacgttaaagagcggttccgtaatgtggaaatctttgaaaaaacgttcatcacgctgatctctgcacctttttctgcgtaatcctggtcttctagtgtattctccagtctgagcgctactaggagcgccatcaagttacctttcgtaaaagcttgtgacagctctcgtatatctaagacaaacttaaaagtaatcttaacatacttaagtactttttcgtacttaatatttttattttgtacttattatacatggtgagaaaaaatatttagtctgtacattgattcgttttgtattgtttggcatcttgaaaatgaatttacaatatttgtaaaatatttgcaaacatcatcagtattcttgccaatttgtttgtaaatagaagatgttttcactttataattgtaaagaattaaactactttttatacactgtaagagttgtcgtttgtttaataaacttttaaatc

SEQ ID NO: 3789 - DNA, 607 bp, Diabrotica virgifera
gattggtatggtgttgatgatacaagcatgctatttagggtagcagtgaataaaattaagatagctatgatggtaaccaacgatctgaaaggacatggtacatgaagaagaagaagaggaacttctaacacatgactagccgagaacagttgacgttaaagagcggttccgtaatgtggaaatccttgaaaatacgttcatcacgctgatctctgcacctttttctgcctgaggtcttctagggttcttagcgctactagtagcgccatcaagtggcctttcgtaaaagcttgtgacagctctcgtatatctaagacaaacttaaaagtaatcttaacatacttaagtactttttcgtacttaatatttttattttgtacttattatacatggtgagaaaaaatatttagtctgtacattgattcgttttgtattgtttggcatcttgaaaatgaatttacaatatttgtaaaatatttgcaaacatcatcagtattcttgccaatttgtttgtaaatagaagatgttttcactttataattgtaaagaattaaactactttttatacactgtaagagttgtcgtttgtttaataaacttttaaatc

SEQ ID NO: 3790 - DNA, 404 bp, Diabrotica virgifera
tgggagcgatgtttgttgtcgttttctgtgctacttcgattgataacttattttgtttttcggtagatggctctagtacatccgtgacatttcgttctttgcaattcggaaaggcccaaagtgtgatgcctggggaaatcgtagagaagaggatatgggactactgatgaggaggaaaaaacctccgaaaccggtatagactcttcctgcactctcagatttaaccagagtattatgcggctgctgcattttcgtgttgcaaagaaattgaaaatgtttatacattttaaaattcaacaaatttttcctcatatattagttttttcgctaccctcaagtttggcaggaaagcgctgttgccaaataaaaacgtatacgtacatatttacgaacgcagataccgg

SEQ ID NO: 3791 - DNA, 713 bp, Diabrotica virgifera
ttcaagctgtaataacttacttattttaaatggaacaccctgtatcttgctagtctgtcgcgtggagggtttgcttagcttttaattcttgttggggtttcctgtacctatctccgttcatttttcgaatatttggagatttcctaatttgtaagctttaaaaatcacaattacgtacctatgtcttggttgtgtgacacatcaccaacaccggcaatatacttagctatcttagtcaagatactttcgttaataaaattcacatttttatcatttaatcacacagagtgttcttattttaaatgacatactcgatattctattctttatagtggaagatatttaaaatctattcaattccatgtaaacattctcaatacacatattattctgtaaatataaattccaatgatattctgtaaatacccattttgacatatttttgtacaatatgctcgttttcgtcatagtagccattgcatttaattgtttgtaattgcgattctaagattcaaacaaaaagtggtgttcttaaatttacttaataaccgtcggtttaagatatggaaaatacttatatgaaatgaaatataggtattaatttaaatatcttccagaatacagcatctaatatagggtatgcagtttaatataaatataaacatattattcaatgttacatgtaggccaaaaccactaaaataatacaacac

SEQ ID NO: 3792 - DNA, 676 bp, Diabrotica virgifera
ttcaagctgtaataacttacttattttaaatggaacaccctgtatcttgctagtctgtcgcgtggagggtttgcttagcttttaattcttgttggggtttcctgtacctatctccgttcatttttcgaatatttggagatttcctaatttgtaagctttaaaaatcacaattacgtacctatgtcttggttgtgtgacacatcaccaacaccggcaatatacttagctatcttagtcaagatactttcgttaataaaattcacatttttatcatttaatcacacagagtgttcttattttaaatgacatactcgatattctattctttatagtggaagatatttaaaatctattcaattccatgtaaacattctcaatacacatgttattctgtaaatataaattcccatgttattctgtaaatacccatttttacatatttttgtacaataggctcgttttcgtcaaagtagccattgcatttaattgtttgtaattgcgatttaaagattcaaacaaaaagtggcgttcttaaatttacttaataaccgttgggttaagatatggaaaatacttatacggaatgaaatataatttaaatatcttccagaatacggcatctaatatagggtatgcagtttaaaataaacatattattcaatttcacatgtaggcc

SEQ ID NO: 3793 - DNA, 678 bp, Diabrotica virgifera
ttcaagctgtaataacttacttattttaaatggaacaccctgtatcttgctagtctgtcgcgtggagggtttgcttagcttttaattcttgttggggtttcctgtacctatctccgttcatttttcgaatatttggagatttcctaatttgtaagctttaaaaatggaattgggtgcctatgtcgtggttatgtacagcgcatcaccaacaccggcaatatacttagatatcttagtcaagatgctttcattgataaaattcacatttttatcatttaatcacacagagtattcttattttagatgacatactcgatattctattctttataatggaagatatttaaaatctcttcaattcgatgtaaacattctcaatatacatgttattctgtaaattatataaattcccatgttattctgtaaatacccatttttacatatttttgtccaatatgctcgttttcgtcaaagtagccattgcatttaattgtttgtaattgcgattcaaagattcaaacaaaatggtattcttaaatttacttaataaccgttgggttaagatatggaaaatacttatacggaatgaaatataatttaaatatcttacagaatacggcatctaatatagggtatgcagtttaatataaacatattcaatgtcacatgtagtaggcc

SEQ ID NO: 3794 - DNA, 1007 bp, Diabrotica virgifera
  SmartBlast Evalue=1E-118; Info=40S ribosomal protein S3a n=4 Tax=Cucujiformia RepID=RS3A_BIPLU
gtattgtttgccacatatgacaagaccatttaaagtagaagtagaaaaattaaagttttgacttttgacaacccgacatctgtcattttgcctagtcgattttaattttctttttcgagtacgacagcaatcatggccgtcggtaaaaataagggtttgtcaaaaggtggcaaaaagggagttaaaaagaaggttgttgatcccttcacaagaaaagactggtacgatgtgaaagctccatcaatgtttgccacccgccaggtcggcaagactttggttaaccgtacccaaggaaccaaaattgcctctgaaggtttgaaattcagagtttttgaagtgtctttagccgatttacaaaatgataatgacgccgaaaggtctttcagaaagttccgtttgatagctgaagatgttcaaggtagaaatgttttaacaaatttccacggtatggatttaaccactgacaagctgaggtccatggttaagaaatggcaaaccttaattgaagcatctgctgatgtcaagacatcagatggatatttacttagggtgttctgcataggctttaccaacaaagaccaactttctcaaaggaaaacatgctatgcacaacatacacaagttagagctatccgtaaaaagatggtagacattattaccagagacatccagggctcagacatcaaagaagtagtgaataaactccttcctgacagcatagccaaggatattgaaaaggcctgccagggtatctaccccctacatgatgtgtacatccgtaaagttaaagtattgaaaaagcctcgttttgaactctccaaattgttggaattgcatggtgatggaggcaaaggtggtgctggtgactccactggtgaagctggttctaaagtcgacaggcctgagggatacgaaccaccagtacaagaatccgtttaaaattttgttattttgtaaatgaaaagattaaaaaagagtataaatacaaggtatttataataaaaaaa

SEQ ID NO: 3795 - DNA, 1007 bp, Diabrotica virgifera
  SmartBlast Evalue=1E-118; Info=40S ribosomal protein S3a n=4 Tax=Cucujiformia RepID=RS3A_BIPLU
gtattgtttgccacatatgacaagaccatttaaagtagaagtagaaaaattaaagttttgacttttgacaacccgacatctgtcattttgcctagtcgattttaattttctttttcgagtacgacagcaatcatggccgtcggtaaaaataagggtttgtcaaaaggtggcaaaaagggagttaaaaagaaggttgttgatcccttcacaagaaaagactggtacgatgtgaaagctccatcaatgtttgccacccgccaggtcggcaagactttggttaaccgtacccaaggaaccaaaattgcctctgaaggtttgaaattcagagtttttgaagtgtctttagccgatttacaaaatgataatgacgccgaaaggtctttcagaaagttccgtttgatagctgaagatgttcaaggtagaaatgttttaacaaatttccacggtatggatttaaccactgacaagctgaggtccatggttaagaaatggcaaaccttaattgaagcatctgctgatgtcaagacatcagatggatatttacttagggtgttctgcataggttttaccaacaaagaccaactttctcaaaggaaaacatgctatgcacaacatacacaagttagagctatccgtaaaaagatggtagacattattaccagagacatccagggctcagacatcaaagaagtagtcaataaactccttcctgacagtatagccaaggatattgaaaaggcctgccagggtatctaccccctacatgatgtgtacatccgtaaagttaaagtattgaaaaagcctcgttttgaactctccaaattgttggaactgcacggtgatggaggcaaaggtggtgctggtgactccactggtgaagctggttctaaagtcgacaggcctgagggatacgaaccaccagtacaagaatccgtttaaaattttgttattttgtaaatgaaaagattaaaaaagagtataaatacaaggtatttataataaaaaaa

SEQ ID NO: 3796 - DNA, 756 bp, Diabrotica virgifera
ctcattaatagattaatagatactaaacattcattcatttggaaatagttattatttaatattatatttacagacggcaattcgtagttctttacctgctcaaaaagatttatttcaaactaaagaaatttgcaattatttgaaatacaagtgcctatctaaatgaccaaacaagaattatgctaattctcagaatgaaaatcgagtataaaattagtatttttaataaatgtaaaatacgtaagtcaattgaaaaacagcgtcactacaataacttttttcatattgaatgttttttcaacaggggaagttttttcctcggaaaatttcacattttcatttcatttctcatttcaacatgcgaggcagaataataattagcctaatgagccacttacttaaaacatttttaaaagtgatatacagcagaatatataaaaaatgcgaagaaccagtatcatggacaaagactggattctgcaatgtcttgcccttaggcacccgagaggctctattgactgtccaagtgcttatgcagaggtgcagatatgtcaactgtgacgtacctctatatttgttttatcgactacaaaaaggcatttgatagagtacaacatgataagctcatactcataaccatcttggaggaaactggattagatgatatatctaaacaacattagatatgccgaccacgcagtagtttttgcagatagcctagatgatttgcaaagaataatgtcgcgcatataagat

SEQ ID NO: 3797 - DNA, 740 bp, Diabrotica virgifera
ctcattaatagattaatagatactaaacattcattcatttggaaatagttattatttaatattatatttacagacggcaattcgtagttctttacctgctcaaaaagatttatttcaaactaaagaaatttgcaattatttgaaatacaagtgcctatctaaatgaccaaacaagaattatgctaattctcagaatgaaaatcgagtataaaattagtatttttaataaatgtaaaatacgtaagtcaattgaaaaacagcgtcactacaataacttttttcatattgaatgttttttcaacaggggaagttttttcctcggaaaatttcacattttagtcgcattttaagaatttcgtggatgagtcgtgtgactaatgttgaggtcttacgtagaatgtgcaatgggcaaggaatgctagattattaacacacattattatcaaagagcgcaaagtagaatatcttggccatgttatgaggaatgaatagagattgccgctactcattcttcagggcaaggtattgggaagagaggaccagggaaaagaagaatatcttggcttcataatctgagaaactggttcaatacatcgacaaacagactattccgaatagcagcaagcaaagttaggatagccatgctgaacgccaacatccggaacgaataagcaccgtgagaagaagaagtatacttcattttaaattattcttcttccttattccatgtgcttcgtccg

SEQ ID NO: 3798 - DNA, 498 bp, Diabrotica virgifera
gcgtcactacaataacttttttcgtattgaatgtttttttccacagaggaatttttttcttcggaaaatttcacattttcatttcatttctcatttcaacatgcgaggcagaataagaattagcctaatgagccacttaaaacatttttaaaagtgatataggtacagcagaatatataaaaaatgcgaagaaccagtatcatggacaaagactggattctgcaatgccttgcccttaggcacccgagaggctctattgactgtccaagtgcttatgcagaggtgcagatatgtcaactgtgacgtacctctatatttgttttatcgactacaaaaaggcatttgatagagtacaacatgataagctcatactcataaccatcttggaggaaactggattagatgatatatctaaacaacattagatatgccgaccacgcagtagtttttgcagatagcctagatgatttgcaaagaataatgtcgcgcatataagat

SEQ ID NO: 3799 - DNA, 698 bp, Diabrotica virgifera
attattttcgtgccaaaacaggttttatggtgattgctataactctcatgcactgaggttgaaaaacgtttgcgttcattgcatccacggaaaatcccccagagaaatattcggcagcaaatatttcttggggacctcttgtaggaatattttgtccaaaaaaatttgtgggggatcatttgtccgggatattttgtggggatttcttgtccggtgattatttgtccggggattatttgtagggattatttatggggattttttgtctggggatattttgtccaggattatttgtccggggattatttgtcctagcttctccaagactattctactataactacgttaagtatatcatgatttaatataactttatataaataaaagtctttcaataaaaaattacctaaatatcctaccacaaatccagtcgagtaacatcagttacaaatccgtcgatttcatcataatttcagactttcttcttaaactaaataattcttttaatacttaggttaataaggctcgatgcacctttgcgtgttttcaagctgcgagcaagccaagtgcgatcgcttgcggttcagcagtacataagttgaattcattcactgcacactcgagccgagccgcgggtgtaagtgacttgcaagccgcgtggaccgatagcacgccagtttctgctacgccgccacatg

SEQ ID NO: 3800 - DNA, 684 bp, Diabrotica virgifera
attattttcgtgccaaaacaggttttatggtgattgctataactctcatgcactgaggttgaaaaacgtttgcgttcattgcatccacggaaaatcccccagagaaatattcggcagcaaatatttcttggggacctcttgtaggaatattttgtccaaaaaaatttgtgggggatcatttgtccgggatattttgtggggatttcttgtccggtgattatttgtccggggattatttgtagggattatttatggggattttttgtctggggattttttgtccggggattatttgtcctagcttctccaagactattctactataactacgttaagtatatcatgatttaatataactttatataaataaaagtctttcaataaaaaattacctaaatatcctaccacaaatccagtcgagtaacatcagttacaaatccgtcgatttcatcataatttcagactttcttcttaaactaaataattcttttaatacttaggttaataaggctcgatgcacctttgcgtgttttcaagctgcgagcaagccaagtgcgatcgcttgcggttcagcagtacataagttgaattcattcactgcacactcgagccgagccgcgggtgtaagtgacttgcaagccgcgtggaccgatagcacgccagtttctgctacgccgccacatg

SEQ ID NO: 3801 - DNA, 547 bp, Diabrotica virgifera
tggtgattgctataactctcatgcactgaggttgaaaaacgtttgcgttcattgcattcacggaaaatcttttagagaaatattcggcagcaaacacttcttggggattttttgtctggggatattttgtccaggattatttgtccggggattatttgtcctagcttctccaagactattctactataactacgttaagtatatcatgatttaatataactttatataaataaaagtctttcaataaaaaattacctaaatatcctaccacaaatccagtcgagtaacatcagttacaaatccgtcgatttcatcataatttcagactttcttcttaaactaaataattcttttaatacttaggttaataaggctcgatgcacctttgcgtgttttcaagctgcgagcaagccaagtgcgatcgcttgcggttcagcagtacataagttgaattcattcactgcacactcgagccgagccgcgggtgtaagtgacttgcaagccgcgtggaccgatagcacgccagtttctgctacgccgccacatg

SEQ ID NO: 3802 - DNA, 984 bp, Diabrotica virgifera
tacataaaagacataaaataatagcttatatgcattaagttcacttaattttattaactagcgggttttattggttgaatttgtctgtcgataattaagtttatgtcagctaacatattttaatatttcaacaattttttttttaattttggaccctgttggggggaattttcccattccccctccctcgtagacccgccactggttctctcgaaaaattgtagtaaatcgtaattgcaacaatttcagtccttacactttttgtcgaaaagttgaaaatggggaagatattgaacaaaaacaattgctttaaaatcaatcgggtcttacgctcgcgccttttaccgcatacgtactaccttaaatattgattttgtcaaaaaaatgaaagagatcaaaattgtagaaaatttaattctcttcatttttgtataggtcaaaatttgttgtaaaagtaataataaacgagataattcaataaatcaataattatgctttaactgtcactgtttttccccataactcggaaaatatggaccgctacgaaaaaattataataaacgaaattatagaaaatcgcattttcaacaatttcagtttatatatttttgtgaaaagttgaaaatggcggagatattgagcaaaaaccattctcgttcaaaatcaagatggcggccaacgcaacggcgaaattcagtcgagattccaaatttacaccactattgacccccccccccttaaagattagaaaaataaaatttggggcagcttccaatgcaaggttaggcctattattcgtctaacccgactggactaacaaacagttccatgaaactacaaaacacggatcaatcccaggattatcattgttagtttaaaaacattaaaatagtttgaacattaatataaaaattaccctactttcaaattttgttaacatccaacaaaaacaatagacgaaacttagataactatgatattccc

SEQ ID NO: 3803 - DNA, 423 bp, Diabrotica virgifera
tacataaaagacataaaataatagcttatatgcattaagttcacttaattttattaactagcgggttttattggttgaatttgtctgtcgataattaagtttatgtcagctaacatattttaatatttcaacaattttttttttaattttggaccctgttggggggaattttcccattccccctccctcgtagacccgccactggttctctcgaaaaattgtagtaaatcgtaattgcaacaatttcagtccttacactttttgtcgaaaagttgaaaatggcggagatattagaacaaaaacaattgctataaaatcagtcaggtcttacgctcgcacatttaccgcatacgtactaccttaaatattgattttatcaaaaaaattaaagagatcaaaattatagttaggtataggttcaaa

SEQ ID NO: 3804 - DNA, 467 bp, Diabrotica virgifera
cataactaggaaaatatcgaccgcacgaaaaattgcaataatagaaattacagaaaatcacatcttcaacaattttggttcatatacttttttgcctaaatgcgaaaatggcggagacaatgaccaaaaacggttctcgttcaaaatcaagatggcggccaacgcaacggcgaaattcagtcgagattccaaatttacaccactattgacccccccccccttaaagattagaaaaataaaatttggggcagcttccaatgcaaggttaggcctattattcgtctaacccgactggactaacaaacagttccatgaaactacaaaacacggatcaatcccaggattatcattgttagtttaaaaacattaaaatagtttgaacattaatataaaaattaccctactttcaaattttgttaacatccaacaaaaacaatagacgaaacttagataactatgatattccc

SEQ ID NO: 3805 - DNA, 875 bp, Diabrotica virgifera
  SmartBlast Evalue=2E-14; Info=Pol protein n=3 Tax=Drosophila virilis RepID=Q86GH5_DROVI
acttgagatccaactgcctgcgtttcatttggatgtgttcattccatgttagcctttggtcgatatgtaatgcaaggtatttcacttctgtgctgacggggatgtgtgtattgttaagtatgagtggatgacatgatatattaaaaccgaatgatataatgaaacctaaatttattgtatcatgaggggatgacagatttcccggcgggtgagggtggtaaatgttacttgtactgactttctttcattgattttaattctccattgattgtaccattctgcgagtaggtttaggtgggtttggagatgagaagaggcatctactggattctcactcgttgataatacagctacgtcatctgcaaaggatgcaattgtagtattgtgtttctggaaaatccgctgtgaaaaacaggaaaagtagtggacccaaaacgctgccttgtgggacccccgattcgatggtacaaatgatggattcagcgctaccatgtctaacggagaagcttctatttgatagatatgatctgagtatgaggtagtagttactcgaagagtattttttaatttaaagagcagtccagagtgccatactctatcgaaagcctgggcatctctgaaaaaaattgttaaaacagttttactaaatatattttattttttggctgactttatatgtgctatttttatctttgtttatggatttaaaatggtggttcgattggtatagtatatgaaccaaaattgatctacaatgtaagtttccagttttattttccatcttggacataattagcaatgattacaattttgtttgttacgtttttgggaataaggtttataatttgaccaataaaaacgaattaaaactatat

SEQ ID NO: 3806 - DNA, 707 bp, Diabrotica virgifera
  SmartBlast Evalue=2E-18; Info=Pol protein n=3 Tax=Drosophila virilis RepID=Q86GH5_DROVI
acttgagatccaactgcctgcgtttcatttggatgtgttcattccatgttagcctttggtcgatatgtaatgcaaggtatttcacttctgtgctgacggggatgtgtgtattgttaagtatgagtggatgacatgatatattaaaaccgaatgatataatgaaacctaaatttattgtatcatgaggggatgacagatttcccggcgggtgagggtggtaaatgttacttgtactgactttctttcattgattttaattctccattgattgtaccattctgcgagtaggtttaggtgggtttggagatgagaagaggcatctactggattctcactcgttgataatacagctacgtcatctgcaaaggatgcaattgtagtattgtgtttctggaaaatccgctgtgaaaaacaggaaaagtagtggacccaaaacgctgccttgtgggacccccgattcgatggtacaaatgatggattcagcgctaccatgtctaacggagaagcttctatttgatagatatgatctgagtatgaggtagtagttactcgaagagtattttttaatttaaagagcagtccagagtgccatactctatcgaaagcctaggagaatattttttttctttgcaatttcattaactatcctatgaacttgtgttgtcgagtggttctcacgaaagccaaattggtgagtcgggatatgt

SEQ ID NO: 3807 - DNA, 305 bp, Diabrotica virgifera
acttgagatccaactgcctgcgtttcatttggatgtgttcattccatgttagcctttggtcgatatgtaatgcaaggtatttcacttctgtgctgacggggatgtgtgtattgttaagtatgagtggatggcagatttcccggcgggtggtaaatgttacttgtactgactttctttcagttgattttaactctccattgaatgtaccattctgcgagcaggtttaggtgggtttggaggtgagaagaggcatctactggattctcactagttgataatgcagctacgtcatctgcaaatgatac

SEQ ID NO: 3808 - DNA, 1269 bp, Diabrotica virgifera
gtagctcttatatggagcgtaccccccaacttacatatactaggttaaataacaaccttcaccaaataattgtacgattgcaatacgtacagcaacgttaaaccctatagaactaatgaaccagaatataattaagggaggattattcacaatgaataatttccgtaactctcaaagagttaaataggcactagcctcattaaggtgaacctacggtctacttgatatataaaaatcagttgcttcgacacgtagtcactaaaaaatataacaagtaaaatggatagctattcaaagggaatagcgtccaaagatataattaaaaattgattaaatgaagttaagtaaaagttaagcaaataagttaaattaattatgattgactaaagaaagttaaagttatatgaataagttaataaattaagcaaattaagaggacaaagtatataaatttaaattgataagtggagacaagcaaggttagtactaaaaatataaagttaattaagtaaataaatggtacaagtaaatttcaggtaatatataaaggtaaagagaatctcatatggggaaaagatgatctgagctcaaacctctttgaccagagagtttactggtttggggaacactatcaactattatagatatataaaaacaatatgcaacttaaatattgaaacaaaatatgtgcgataaactataaaacttaatcatcaaaataaatgtcccgagtcttatacaaaaaatgaatgtggtgtaatagtggaagtgacaatcactagcagatactaagtgtcccaaaacaaaccctaaatggtccccgagagtgtccttgctacggattccaaaatccctggtaggcgaattagcacagggatggtgctagcttgtaccaattaatataccgatgcccttctggggtgcagagggcaggatacaaagtaggtatgtgggaggttctccaggctggtctccaaatgacctggcttggcgtagaacggttgctcccagttgtgaggggagctgacggactggttacagtttaagatttcccccaagtggctaaaaacaaacatgtcccgttttagtttcaatgtcagaatctaaggaaaggtcaaagagccaaaggaaaagaaatgagatatctttttttcagaatgaacaacaaaaagatcattagcaaaaacaatgatggatttgaccttgattcacattacacacattaatttgggatttaactttaaattcaatatttaatacagaatatga

SEQ ID NO: 3809 - DNA, 586 bp, Diabrotica virgifera
aatttacaggatatgtgacaagataatcttcatctgagtgtatattttcgaactatggatataattaaagatactaaattcaaagaacaactccgattcatacatttacagaaataaattcaataggaatttaatatgacatgatagcggccatattcgttcctttttctcaacctttttaagagtaaaaaaaatttaccggatgacatgacttccaattcctccgggatctcccaaaacttagtctcctagcttctccaaaacaccaccaataatttgccactaaatatcacttataaaagcttgaaactattgtattaaaatttccgtccttttcaatcagtcatccgccacttttccgttctagcgtaccaagcgaagtgtcaattatttccgtcgttagacgaggagcctcacagaacgaaactcacatgacagcgaatggtgtctaataccaactgaagtacttgtgccaactaatagttaagtatgacgtcagtcaaagatttattttagttagatcttattatttttaagtataatttaatgacaaaccgttattaaaatttaaataaaataactataa

SEQ ID NO: 3810 - DNA, 953 bp, Diabrotica virgifera
  SmartBlast Evalue=2E-22; Info=Endonuclease-reverse transcriptase HmRTE-e01 n=1 Tax=Heliconius melpomene RepID= C6Y4D5_9NEOP
atttattcgaattttttctatcaatataaactgaatatgtccagacattgggggtgtccaataatgggtacatttgacagtcgaatacacttttgctaaatttataatatcagaataattggaaatactattttactatatatatataaatcccgttcacagcgtaatacgcctttgggttcccgttcgccaagcctgtctattctgccagtcttcttcagatagatttcttgctgacattgcttttgagattccttggatccatgttgttggtggtcgtcctcgttttcttttctctggtggtacccattctaatatctttttgggtagtctttcttcccccatacgtctaacatgtccgtaccatattagttgctgtttttcgatgtcttctataattgatctttgtactttcatttgtctcctgatgtccttatttttcacatgttctaatctagactttcccgctgctctcctccaaaaatccatttcaactgccaataggttacctttaagtgtttgtgataactgccacacttctgagccatagacgattactggttttaatatggtattatatattcgttttttcgtttccggtcttatatgtttttgccataatactgaattcaacgcacctataacttgttttcctttggttattctgtcttttatggcttcatcacttcttcctgtctttgtcagttttacccccaaatatgtacattggtcacatttcttaatagtttcatcttctaagtcgaggtcatctggattattttctcctcctacgcaaagatattgtgttttttggacatttacttcgaggccccattttttgactcttccattagttttctagccatatactccaggtcttctttgtcttgggcaataactacctggtcatctgcatagtgcaacgtatataacgtttcatccccaatagatag

SEQ ID NO: 3811 - DNA, 889 bp, Diabrotica virgifera
taaaggacaaatacaggacgggtctaaaaaaatggtattgcaaacgcagttaaagaatcttttattttgacaaatgacatgaaatatttttgtaaatataaaaataacctataaaattccatttgtcgatataaattaaaataagataattgaagagtaaaacgttaaatttaattattttgtcatttaaagatgtttagagaacaacataatatatcccataatactcatcgttcaataatatggaagtgcaataaattggaaatactattttaggagtttttaaatacttttgcattatgggtatatgtaatggggaatttctggagaatatattattagggaatagtggatatccattcctcaactacaactaccgaatgacaccattccagaattttcagacagaagttgtgtttttataatccatcacaaatcccttcaagaattgttattgaaagaacatttggtattgtgaagagatttcccattttaccatatgtaatgagatgcaagttaccttttattcaaagaataatatcagcttgttcagttttacatattgcagtagtacataatagagaaaacgttgaaatactggcaaatgagtgtgctgttgatattgatatagaagctgtggcagtacattttcaaccaggagctaatctaatgcgactaaattgtgtgtgtgtttgtttaaaattattgttcgacatttaaagctagcgcttaaactaattttatttttattggactgcagtttgttaataaatttataaataaatataaatattatattggtgactgattttaagtattttatgatcattagcaggttttaaataataaattataaatatatacatgctattggcgttttatcttttat

SEQ ID NO: 3812 - DNA, 712 bp, Diabrotica virgifera
gtcggcttaagctttcaaatggtgtgtaagccgtcacgatcagatatatacacagctcagtatagccgaaaactgaaaaactatactttgaaaattttggtttttcgacaattactcaaaatttcaacatacgaattgcgccaataactaagcgtttgtagaaggactctagacgaatctaacggtgtgtacctcatatccgggaaaattcgaatttttaagttataggcttcataagtatgatcaaatctattatctatggaaaaacggttttcaagctcaataattcctgtaatagcttcagttatcatacttgaccttagatgcatcagatactatttgtcaatacgtttcaaactcatgtttagtgatcaaaatcggttaagccgtttagaagttattaagctacaaaagtataatccaattaacgattattcccgaaatggtttatgtagttgtagtggttacgacgctaaatttgatctggcaacgggcaatccgacttcatttaccggccatcccaatatttttttcaatctatttcgaatagaaaaaaatctagtgtacattcgatggacactagatcatttgggagataatgcgacaaaggcgaccatttataaagcttgacgtgtaatagaggaacattgcattcaacttcatacatttaatttataaataactttgaaaaactcctgatacaagaatgaag

SEQ ID NO: 3813 - DNA, 578 bp, Diabrotica virgifera
caacatacgaattgcgccaataactgagcgtttgtataaggactctagacgaatctcatatccgggaaaattcgagtttttaagttataggcttcataagtacgatcaaatctattttgctatgggaaaaaatggtttttcaagctcaataattcctgtaatagcttcagttatcatagttgaccttagatgcatccgatactacttgtcaatacgtttccaactcatgtttagtaatcaaaatcggttaagccgtttagaagttattaagctacaaaagtataatccaattaacgattattcccgaaatggtttatgtagttgtagtggttacgacgctaaatttgatctggcaacgggcaatccgagttcatttaccggccatcccaatatttttttcaatctatttcgaatagaaaaaaatctagtgtacattcgatggacactagatcatttgggagataatgcgacaaaggcgaccatttataaagcttgacgtgtaatagaggaacattgcattcaacttcatacatttaatttataaataactttgaaaaactcctgatacaagaatgaag

SEQ ID NO: 3814 - DNA, 543 bp, Diabrotica virgifera
gtcggcttaagctttcaaatggtgtgtaagccgtcacgatcagatatatacacagctcagtatagccgaaaactgaaaaactatactttgaaaattttggtttttcgacaattactcaaaatttcaacatacgaattgcgccaataactaagcgtttgtagaaggactctagacgaatctaacggtgtgtacctcatatccgggaaaattcgaatttttaagttataggcttcataagtatgatcaaatctattatctatggaaaaacggttttcaagctcaataattcctgtaatagcttcagttatcatacttgaccttagatgcatcagatactatttgtcaatacgtttcaaactcatgtttagttcaattaacgattattcccgaaatggtttatgtagttgtagttggcaacgggcaatccgaatttatttaccggccatcccaatatttttttttcaatctatttcgaatagaaaaaaaattagtgtacattcgatggacactagatcatttgggaggtaatgcgacaaaggcgac

SEQ ID NO: 3815 - DNA, 838 bp, Diabrotica virgifera
ccactatttttaatagtatttgttatgtgtggtgtatatttgacgagaaagtatcatcttgtttcgtggttgcgaagtaggttacatagaaggaacgaaacgtatgatgagtttatgataggacaagatgatgacgatgaaccactcagttaagttcccctgcagagcttttaacattcatgaaagttcaaatgttatattttttgttatgatgcacagtacaacacacattttcatgttataaactgtttctaggttcctattataccagatatggatagaagtaaattaagcgctagattatttcattgccctaataaaaacaaaaatatcctagtcgtgatattattttgtcgtgttttgtttagatcgtgatttaaatgaatcaaattgcctataatattttcataacagttcagttaaaatcattgaatttatttgtggtcattttggtgaaatattaagactttttctgaatgtcgctttaagcgtaaaaacagacgaaccacaaagtagcttctttagtagtgtggatccacaaagtagtcactttgtggatccacagagtagcgctgcaaagtggttcgtttgtttttgctcttaggtacctgcgcacttgacaaaaccgaacaataacggaacgtaccgttatagcccgaaattaaatgctgtaacacgcattttctggcaaaattacgttagctcggtcagaggatttacatatttcagagaagacataggcgtaactagcggggttttggggattagaacccctccccatttggatgtactttgagctctgtatgcttaacaccattacgattccacaccctcaaga

SEQ ID NO: 3816 - DNA, 663 bp, Diabrotica virgifera
ccactatttttaatagtatttgttatgtgtggtgtatatttgacgagaaagtatcatcttgtttcgtggttgcgaagtaggttacatagaaggaacgaaacgtatgatgagtttatgataggacaagatgatgacgatgaaccactcagttaagttcccctgcagagcttttaacattcatgaaagttcaaatgttatattttttgttatgatgcacagtacaacacacattttcatgttataaactgtttctaggttcctattataccagatatggatagaagtaaattaagcgctagattatttcattgccctaataaaaacaaaaatatcctagtcgtgatattattttgtcgtgttttgtttagatcgtgatttaaatgaatcaaattgcctataatattttcataacagttcagttaaaatcattgaatttatttgtggtcattttggtgaaatattaagactttttctgaatgtcgctttaagcgtaaaaacagacgaaccacaaagtagcttctttagtagtgtggatccacaaagtagtcactttgtggagtagtcactttgtgtgtcacagagtagcgctgcaaagtggttcgtctgtttttgctcttaggtacctgcgcactggacagaaccgaacaataacggaacgtacac

SEQ ID NO: 3817 - DNA, 337 bp, Diabrotica virgifera
tgggcatgcgcaggaaagtgccccgtagcggattttgattttgatgtatttgttatctacaagggatggtgcaagcatgaaagcaaaaagagtggggggttcgataaacttttatttgggattttctcttgaacaccgtgcgtaccgttatagcccgaaattaaatgctgtaacacgcattttctggcaaaattacgttagctcggtcagaggatttacatatttcagagaagacataggcgtaactagcggggttttggggattagaacccctccccatttggatgtactttgagctctgtatgcttaacaccattacgattccacaccctcaaga

SEQ ID NO: 3818 - DNA, 880 bp, Diabrotica virgifera
  SmartBlast Evalue=5E-48; Info=Endonuclease-reverse transcriptase n=1 Tax=Bombyx mori RepID=D5LB38_BOMMO
gtgtcgttgagagttgtagggaggcaggtctgtatctgaacaatacggaaaaccaaaagtgctcgtaataagtaaacaacagcatataaaaccgtatatatatgtaaataataccaaacttgagcaagttgataaaatcgtttaccttggacagcaattaaattgtaacgcagaaagtcacggcgaaattagatctaggatagagcaggctagagccgcttttagaaggatgtccaaggtgttatgtaacagagacctaaaattggcattgaggatccgcctacttcgctgctacgtgttctcggtcttactttatggtgtcgagtcctggactgtgaataaaatcgatctaaatcgccttgaggctttcgaaatgtggtgctatagaagaattttaaaagtttcctgggtggagaagattcgaaactccacaatactagaacgtctcagcaagactactgagatcataaaaagcatcaagcagagaaagctggagtatttcggacatgtaatgagaggtcccaaatataggttgctacaaaatatcatgcaaggaaaatagcaggcaaacgcagtccaggacgaagaagaacctcatggttgaagaacttgcgagattggtatggtgttgatacaagcatgctatttagggtgtcagtgaataaaattaagatagctatgatggtaaccaacgttctgaaaggacatggtacatgaagaagaagggtgttcgataacatcgtgacagaccaaacttatgttctttaaatggaacaccctatattccatcttatattcgaaatcttctcaacttctccattacaaaaatataaaggtctatcatgttatacagggtatttacgaagttaaagccaatttt

SEQ ID NO: 3819 - DNA, 541 bp, Diabrotica virgifera
  SmartBlast Evalue=2E-13; Info=Endonuclease-reverse transcriptase n=1 Tax=Bombyx mori RepID=D5LB38_BOMMO
gactgtgaataaaatcgatctaaaccgccttgaggctttttgctagggaagaattttaaaagtttcttgggtggagaagattcgaaactccacaatactagaacgtctcagcaagactactgaaattataaaaagcaccaagaagagaaagctggagtatttcggatatgtagtgagaggtcccaaatataggttgctacaaaatatcatgcaaggaaaatagcaggcaaacgcagtccaggacgaagaagaacctcatggttgaagaacttgcgagattggtatggtgttgatacaagcatgctatttagggtgtcagtgaataaaattaagatagctatgatggtaaccaacgttctgaaaggacatggtacatgaagaagaagggtgttcgataacatcgtgacagaccaaacttatgttctttaaatggaacaccctatattccatcttatattcgaaatcttctcaacttctccattacaaaaatataaaggtctatcatgttatacagggtatttacgaagttaaagccaatttt

SEQ ID NO: 3820 - DNA, 405 bp, Diabrotica virgifera
gcctcgccgcatcatagcacggcacgggccctggaatgagaggttccaaatataggttgctacaaagtattatgcaaggaaaaatagcaggcaaacgcagtccaggacgaagaagaacctcatggttgaagaacttgcgagattggtatggtgttgatacaagcatgctatttagggtggcagtgaataaaattaagatagctatgatggtaaccaacgttctgaaaggacatggtacatgaagaagaagggtgttcgataacatcgtgacagaccaaacttatgttctttaaatggaacaccctatattccatcttatattcgaaatcttctcaacttctccattacaaaaatataaaggtctatcatgttatacagggtatttacgaagttaaagccaatttt

SEQ ID NO: 3821 - DNA, 759 bp, Diabrotica virgifera
cttatgctgaattaattttatttaactatctttaaaactatctttactatttttaaattttactccctttaattaattttgaattgtagttatgtttaagtaatcaatacagtgaaacgggtcagatttgtaagtcctgctagttcccctttaatatagttcggaggctggttgttttttctggtgattaaatatgtaattaaaatatttattttacttagatataccgttaaagcaggacatatcgtatgtgctaaaattaattattaattaattaattaatcttaaattaaacaacattttacactccattatcgagctttaaatcacacacctatactccagtaagacatactactgaactaaaagttttgtaaaacttgtaaatgtctgaggggaccgattatgtgggtgtgaaaaacagatgtctcaaacgaaccgcctcttaaaacatctttgacaaagaataccatattctcggactatccctacctagattttttgtctagaactttgaacaaagttttctcaaaacttgtcacttggggagctcgcaaaccaaagcaatatccctacatcgcataacatacattgcggaaagatacgcactgagtgtcacatctggttttcggtgaacgaaattccaccgaaagtcaccgaagattcaccgaaaaccagatgtgacactcagtgcgtgtcttttcgcaatgcatgccacatgcgatgtcggatattgcttcggtatgcgagctcgcttaa

SEQ ID NO: 3822 - DNA, 625 bp, Diabrotica virgifera
cttatgctgaattaattttatttaactatctttaaaactatctttactatttttaaattttactccctttaattaattttgaattgtagttatgtttaagtaatcaatacagtgaaacgggtcagatttgtaagtcctgctagttcccctttaatatagttcggaggctggttgttttttctggtgattaaatatgtaattaaaatatttattttacttagatataccgttaaagcaggacatatcgtatgtgctaaaattaattattaattaattaattaatcttaaattaaacaacattttacactccattatcgagctttaaatcacacacctatactccagtaagacatactactgaactaaaagttttgtaaaacttgtaaatgtctgaggggaccgattatgtgggtgtgaaaaacagatgtctcaaacgaaccgcctcttaaaacatctttgacaaagaataccaaattttgccgaccttaaagctgtttcacaatataaatttctcgaactatacctacgttaactaatacttccactttccactttttatggtaaactttccaatctctattgtagttacgttgtttagccactgttgatgtacattcaccatgac

SEQ ID NO: 3823 - DNA, 420 bp, Diabrotica virgifera
gttcctgtcgactttattgaaacatgtagagactaacaatacacgaccgtcggaccaatcagaattaagtcactaacttttgcgcatatgtctcaaaaattagtacttatcactagtcaatcgcaaattattagtttaaaacgtctacacacgccccaaccaaaccacctgactgtcgaggctgacaatgttgagtctgactgttagggagctcgcaaaccaaagcaatatccctacatcgcataacatacattgcggaaagatacgcactgagtgtcacatctggttttcggtgaacgaaattccaccgaaagtcaccgaagattcaccgaaaaccagatgtgacactcagtgcgtgtcttttcgcaatgcatgccacatgcgatgtcggatattgcttcggtatgcgagctcgcttaa

SEQ ID NO: 3824 - DNA, 676 bp, Diabrotica virgifera
  SmartBlast Evalue=2E-30; Info="Ribonuclease UK114, putative n=1 Tax=Pediculus humanus corporis RepID=E0VAS8_PEDHC"
aacaaagtgttcaatatatttttcaataataacataactttatgtaacgcgaactttgaccatgagtctgtaaaatattgtaagatataagataaatgaagtaggtaacggttagctatttagtgagatacgactgttaagtgtaaataagtaaatagtagcttagtattgactaagaattctgaatactttgaaaatggccaaacttattagacaaattattttatctactaaggcacctgctcctgttgtaccagtatacagtcaggccgtttcctttaataacatgctcttcctttccggttcattgggaatttcaaaagatacaaacaaactagtagaaggaggagcagcatcagaagctacacaagcaattgaaaacattaaaaatatcttagaagctggtaattccaatttgagtcaagttttgaaaactaccatttacctcaaagatatcaaggattataccgcagttaatgaagtctactttaaatactttaacaaggatcctccagcaagaactgcattccaggttgctgttctaccaatgaatgcttcagtggagatagaagttattgctgccgttggcaacgttgttactagtcacgctaaattataaaaagttatattttgaattatatttgtattgaatttatattaaatttatattattgtt

SEQ ID NO: 3825 - DNA, 580 bp, Diabrotica virgifera
  SmartBlast Evalue=1E-27; Info="Ribonuclease UK114, putative n=1 Tax=Pediculus humanus corporis RepID=E0VAS8_PEDHC"
agaccacgttcaggtagcttcagtaaaaaattacacgtttttgtgctttaaaactaatacttgttttacatctatttctgttattggtgtacttggaacaataatggctcagttagaacgaaaaataatcgaaacttcaaaaaatacaccaccccctccatttctcagtcaggccgtttcctttaataacatgctcttcctttccggttcattgggaatttcaaaagatacaaacaaactagtagaaggaggagcagcatcagaagctacacaagcaattgaaaacattaaaaatatcttagaagctggtaattccaatttgagtcaagttttgaaaactaccatttacctcaaagatatcaaggattataccgcagttaatgaagtctactttaaatactttaacaaggatcctccagcaagaactgcattccaggttgctgttctaccaatgaatgcttcagtggagatagaagttattgctgccgttggcaacgttgttactagtcacgctaaattataaaaagttatattttgaattatatttgtattgaatttatattaaatttatattattgtt

SEQ ID NO: 3826 - DNA, 546 bp, Diabrotica virgifera
  SmartBlast Evalue=2E-26; Info="Ribonuclease UK114, putative n=1 Tax=Pediculus humanus corporis RepID=E0VAS8_PEDHC"
ttttaaaataatagttgtttcattattattttctatcatataagtggttttctttttcctcgaacaattatggcacaagctggacgtaaaataattataacttcaaaaaatgcatctcttcctccatatattagtcaggccgtttcctttaataacatgctcttcctttccggttcattgggaatttcaaaagatacaaacaaactagtagaaggaggagcagcatcagaagctacacaagcaattgaaaacattaaaaatatcttagaagctggtaattccaatttgagtcaagttttgaaaactaccatttacctcaaagatatcaaggattataccgcagttaatgaagtctactttaaatactttaacaaggatcctccagcaagaactgcattccaggttgctgttctaccaatgaatgcttcagtggagatagaagttattgctgccgttggcaacgttgttactagtcacgctaaattataaaaagttatattttgaattatatttgtattgaatttatattaaatttatattattgtt

SEQ ID NO: 3827 - DNA, 617 bp, Diabrotica virgifera
aattattttaaatattgtaaacgattaaaaaacaatcaaattaaattgaaatgaataaccagtgtatatcttccacatttacttcatatttaacgtagcctgtaccataacattgcatatattattatccctgtatagcaacgatataccatgaatgtgaattcatacttgagaaatgtcctatatccagtctcacaaaaaaagggattcctcaaacataatatatatgcagacaaaatcagccaaagtgatttgcgatatctaatgaaaggtatgttccgtttgtttgtagaattatatttaattagatttgctttaattactaaaataaataaattttcaattatattttatgtatttgtggaaaaggaaacctagcattagtggccacatttctataacggccaattgtttttattttttagtggccgttattgacaggttttactgtaccaataatattttattaaattatgaaacattatttaaataacaaatttataaacttgataaaagaaagttttcttagaatttactcctctatctaattatgtggttattttaacaaaatagtgttcacccatgagaagtgcaacatccacccccaggataaaagc

SEQ ID NO: 3828 - DNA, 579 bp, Diabrotica virgifera
aattattttaaatattgtaaacgattaaaaaacaatcaaattaaattgaaatgaataaccagtgtatatcttccacatttacttcatatttaacgtagcctgtaccataacattgcatatattattatccctgtatagcaacgatataccatgaatgtgaattcatacttgagaaatgtcctatatccagtctcacaaaaaaagggattcctcaaacataatatatatgcagacaaaatcagccaaagtgatttgcgatatctaatgaaaggtatgttccgtttgttaaaataaataattttcaattatattttatgtatttgtggaaaaggaaacctagcattagtggccacatttctataacggccaattgtttttattttttagtggccgttattgacaggttttactgtaccaataatattttattaaattatgaaacattatttaaataacaaatttataaacttgataaaagaaagttttcttagaatttactcctctatctaattatgtggttattttaacaaaatagtgttcacccatgagaagtgcaacatccacccccaggataaaagc

SEQ ID NO: 3829 - DNA, 507 bp, Diabrotica virgifera
tatagtatgttgttttatattatgtattacctatattaaattagttttagtatgtttcgtttatctaaaaaaaagtaaaacaaacaaaaattctgtttttcttgtagttgttttttcgtatagatactgttttatattgtagtaaattgaatttagttttagtatgttccgtttgtttgtagaattatatttaattagatttgctttaattactaaaataaataaattttcaattatattttatgtatttgtggaaaaggaaacctagcattagtggccacatttctataacggccaattgtttttattttttagtggccgttattgacaggttttactgtaccaataatattttattaaattatgaaacattatttaaataacaaatttataaacttgataaaagaaagttttcttagaatttactcctctatctaattatgtggttattttaacaaaatagtgttcacccatgagaagtgcaacatccacccccaggataaaagc

SEQ ID NO: 3830 - DNA, 823 bp, Diabrotica virgifera
tccagtgtccagaaattgtgaaaatattacgagcatcaaaaatgtctttttttgagtgatgcttaaaaatattcattacggataccgtattatataacattgaaataattttgaaaatttggtgtaataacagggtttaatgattaacttccatttatgtgtgatgtttaccaaatagaagttcctgtcaaggaccatatctacaggagatataatcgtgcaatctttgtaacttagttgttctgacagtacagaaatacatttttataagcgaatacagtatagctaggtttacatgtcatggaaatacattctatctacattttttgcagcatttcagtttttataacggaatttcgcattagaaaagttgtaaaagcagttgacacattttcggacacacttcacatgtagacacatctgcttatagagtaagtgtgtgcaggtgcagtcttgtccgtgaatgtgtcaacaagtttttgatttcagaacttagtaaaactttgggtcatgtgaagtttggcaaaaaagtaatattacaacaaatagttatagataaaaaaacaatttcataacatcggacgagtaatgatagtgtgtgtgcaacatatataggtacatgtagaaggacagtgaagcaagaacacataaataagccacagtcatttgaaatgtggtgttacagaaggatacttagaatagcatggacacagcagaaaacgaacacagaaatcaagaaatgagcaaagaatacgaaataataaacacaataaaaataagaaagctacaatatctgggacacgtaatgaggggagagggatat

SEQ ID NO: 3831 - DNA, 483 bp, Diabrotica virgifera
cggcgattttgagatgcgcttctgtcaggggtagaccgagtagttgaattgtgtgcatagtgcatattgagttccttcctatgcgattaatttttaatatttttcaatgcctattgcctaggtaataatatgtagataactgggattggggaaaattttgataattaaatattagttaataatgtattttgttatatcgaagtatataatagggaagcggtgcttcccccgcttccatggaccgcacgcctctggtgtgtgtgcaacatatataggtacatgtagaaggacagtgaagcaagaacacataaataagccacagtcatttgaaatgtggtgttacagaaggatacttagaatagcatggacacagcagaaaacgaacacagaaatcaagaaatgagcaaagaatacgaaataataaacacaataaaaataagaaagctacaatatctgggacacgtaatgaggggagagggatat

SEQ ID NO: 3832 - DNA, 412 bp, Diabrotica virgifera
cggcgattttgagatgcgcttctgtcaggggtagaccgagtagttgaattgtgtgcatagtgcatattgagttccttcctatgcgattaatttttaatatttttcaatgcctattgcctaggtaataatatgtagataactgggattggggaaaattttgataattaaatattagttaataatgtattttgttatatcgaagtatataatagggaagcggtgcttcccccgcttccatggactgaattgaccgcatggaccgcatctgaattgcgccaataactgagcggttgtaggaggactttagatgtgtctaacggtgtatacctagtgtgaccaactccaattcagtcgaattcggctgaaaaaaatacctgaaattcgggacttttcagtgaaaaacggattttcc

SEQ ID NO: 3833 - DNA, 674 bp, Diabrotica virgifera
  SmartBlast Evalue=3E-12; Info=Putative uncharacterized transposon-derived protein F52C9.6 (Fragment) n=1 Tax= Harpegnathos saltator RepID=E2BUQ3_9HYME
ttgtgacgtcacaatgacgactttgaggtaggatatcccgaagatggttagagatacgaaatgccgttttcaagatttggattcagaagacaaaactacataggaatccatcgctaggtggcctttaaatattgcaggagcggcgacgcacaaacgaacgaacaaaccttgcgaatttataaacgaaaagttttcgttgaaaatatttatatgcaatatattacctgacaagtaagttgctgaatcgtgagtctaagcttagaatctacaaaatactaattatatcagtggtaatatggaaacgtggactgaaacgtggaccctctctaccactgatgaaaatcaacagataatatttgagcgcaaaagactaaggaagatatttgaaccaactcaatgctgcgatggttcgtggagaattaaaatgaaccacgagctggatgaactaatgcagagcagatattgttagatttgtaaagtcacaaagactaaactggcttggtcacctagaaagaatgccagataatcgagctgtaaaagtaatccagagatggaaaccccaaggaaatagaagaggaaggccaagtaaaagatggatagacgacgtatctaaaaccacgaacatcaggcagtggcgaaagaaagtatccgacagggcagaatggaagaacatt

SEQ ID NO: 3834 - DNA, 617 bp, Diabrotica virgifera
  SmartBlast Evalue=1E-19; Info=Putative uncharacterized transposon-derived protein F52C9.6 (Fragment) n=1 Tax= Harpegnathos saltator RepID=E2BUQ3_9HYME
cccgcatcccgcaaacgaagcatttgcagacatatgtttatagagcaaagcggcattatttttcatgtagaattagcccttaaaatgtttcatacttatttactaacaccctgtatatacaagcacggattcttagcggtactaagtgcttttatgcatacaaagacttaatgaaaagtaagttactgaatcgtgagtgtaagcctagaatctacaaaacagtaattagaccagtggtcacatatggatttgaaacgtagaccctctctaccactgatggaaatcagctgaatttttgagcacaaaatactaaggaagatcagctcaaggaccagtccaatgcagcgatggttcgtggagaattaaaatgaaccacgagctggatgaactaatgcagagcagatattgttagatttgtaaagtcacaaagactaaactggcttggtcacctagaaagaatgccagataatcgagctgtaaaagtaatccagagatggaaaccccaaggaaatagaagaggaaggccaagtaaaagatggatagacgacgtatctaaaaccacgaacatcaggcagtggcgaaagaaagtatccgacagggcagaatggaagaacatt

SEQ ID NO: 3835 - DNA, 418 bp, Diabrotica virgifera
cccgcatcccgcaaacgaagcatttgcagacatatgtttatagagcaaagcggcattatttttcatgtagaattagcccttaaaatgtttcatacttatttactaacaccctgtatatcataagcttattatgtattgacatatccaattttctttgaaggggccagtatagttttctataattgatgttcaattatatatttttctctcttcatatgttctttccattttaacctgacatatagattcatgcccaggtaaaatcataaactgcaataaaatgggcaaaattatttaacaagaacatgacaatcatttcaaatgtggtatctaatcggaaaactgtgatatatctaaatagatatatggagataaatgtaaaacaaagtccaaagtctagataacccaatcaatgaaa

SEQ ID NO: 3836 - DNA, 1003 bp, Diabrotica virgifera
ctgctaataactcagaaagttttcgttttatcaaaataactttacttaacaaaaatgtaccttttgaaaaaataaacaaaaccgtttttttaattttctttaaggccaatagtaatcgagttatactttattatatgttggctcttcttcctcaaatgctaaatattgtagtttcaaagtcgaacgacgggaaaactatgcatttttcgaggacaacttggtcaaactaatttaaagtacagtggaaccccgataagtcggccccgataacccggaagtccggctaacccggaccgattttcatcagataaacattttgattttcaatattttgtattttcaatttaattgtggcttatttccaatcaaaatagttaattatcagacaatcctttcaacaataaaagtgtatgtaatataatatttgagagataatgtgtctagactctctgtgtcgtgtacttatgtgtgtaatttgaacacgagattaaaaattactcatagtacacgccgcagaaacaacagccagctgtctgtagtatctattcctttttatttcaaactgtcagcattgtttaggaaagactatttaaaaaattcttttataaacaatggtctttagtattgtgtgtcttgtattgtttgggtttggtttttttttagaattgtaatgagtaggtaatatgtactgtgcatatttataaaaatatttcatgttatttcaattctaacggagtttatctgtaagtataccgtattttattaatttttaccatattctccggctatctcggattttcgataacccggatcggtcgtggtcccgattaatccgagttatcgaggttccactgtacttcatttggattatacttaaatctattctaaaaaataggatgtatgaagtcgatgatcagaataataagtatatattattatttatagcacagtatactgcaatgttgctgcaagcgtctcggtcacgcatgagattatttcgggc

SEQ ID NO: 3837 - DNA, 361 bp, Diabrotica virgifera
ctgctaataactcagaaagttttcgttttatcaaaataactttacttaacaaaaatgtaccttttgaaaaaataaacaaaaccgtttttttaattttctttaaggccaatagtaatcgagttatactttattatatgtaagctcttcttcgtcaaatgctaaatattgtagtttcaaaatcaaaagacagataaactatgcctttttcaaagataacttgtttaaactaatttaaattattttaaaaaatatctattaccagaaatacaaaaaaaaaaaactctagctcaaaaattaagtgacttttacagtccctatttttttcaacgaaaaagtgatcggaaacaactcctaattacca

SEQ ID NO: 3838 - DNA, 316 bp, Diabrotica virgifera
atggttaattacttgattttgattatcattatattcgaaaactaacacactggtttatgatgaataaaataagattattttatttttatttatttaaatgtaatttaattttgtttgattttatactttattcattatcattaagtattatcttgtatttgtttaattacttcatttggattatacttaaatctattctaaaaaataggatgtatgaagtcgatgatcagaataataagtatatattattatttatagcacagtatactgcaatgttgctgcaagcgtctcggtcacgcatgagattatttcgggc

SEQ ID NO: 3839 - DNA, 608 bp, Diabrotica virgifera
  SmartBlast Evalue=3E-22; Info=Endonuclease-reverse transcriptase n=1 Tax=Bombyx mori RepID=D7F170_BOMMO
caggtacactggggatcgaatctcttgctataatcccaaagccgcgtttagcggtataaaacgtgagactattattattatgaaagtacataacttcatgttgttctgaagctaattttccttgtggcattttttgcaatcaacttttctaaatgggaaataagccacaatttagtaattgaatttggacattaccgacatccaagttggatgtcgaaacgttaataaaatcatttttttagttaaattgtggattagttcccattgagccttggcctcctttattttttgcctccacccttgcttgtctgtggctgctcttctccatacacggactcctaaaagggcttgtgcgtcgctgtttactgtgtcttcccagcgctttcttggctttccaaccggtctctttccctgcattctagcattcagtgctctttttggtagcctatcctctcccattcttatcacatgtccggcccattgcaatctttgtattctaatgaagtctgacaggggtgcttccttataaagttgataaagttcgttgttgtatcgacttctgaagattccgttttccctcacaggtcctagtattctcctcagtactt

SEQ ID NO: 3840 - DNA, 589 bp, Diabrotica virgifera
  SmartBlast Evalue=5E-23; Info=Endonuclease-reverse transcriptase n=1 Tax=Bombyx mori RepID=D7F170_BOMMO
tatgctgtcccaaaatgaatcttcccttatgaagttttagtctgtgcagattagtgatgtaacgaatatcattttttgaacattcgcgaatacgaatgcgaatatctgctactgacattcgcgaatgcggatgcgaatgcgaatattcagttttttaaatttatttctatttttgtaatgttttctaaatttataataagaagattaagctttattctttttcttctacggcaccacagcccaaattgagccttggcctcctttattttttgcctccacccttgcttgtctgtggctgctcttctccatacacggactcctaaaagggcttgtgcgtcgctgtttactgtgtcttcccagcgctttcttggctttccaaccggtctctttccctgcattctagcattcagtgctctttttggtagcctatcctctcccattcttatcacatgtccggcccattgcaatctttgtattctaatgaagtctgacaggggtgcttccttataaagttgataaagttcgttgttgtatcgacttctgaagattccgttttccctcacaggtcctagtattctcctcagtactt

SEQ ID NO: 3841 - DNA, 412 bp, Diabrotica virgifera
  SmartBlast Evalue=3E-21; Info=Endonuclease-reverse transcriptase n=1 Tax=Bombyx mori RepID=D7F170_BOMMO
atgaattttgcatgaaaattcgtcccccttccattacttcttcttcttctacggcattacagctcaaattgaaccttggcctcctttattttttgcctcgacacttgcttatctgtggctgctcttctccatacacggactcctaaaagggcttgtgcgtcgctgtttactgtgtcttcccagcgctttcttggctttccaaccggtctctttccctgcattctagcattcagtgctctttttggtagcctatcctctcccattcttatcacatgtccggcccattgcaatctttgtattctaatgaagtctgacaggggtgcttccttataaagttgataaagttcgttgttgtatcgacttctgaagattccgttttccctcacaggtcctagtattctcctcagtactt

SEQ ID NO: 3842 - DNA, 679 bp, Diabrotica virgifera
  SmartBlast Evalue=2E-14; Info=Endonuclease-reverse transcriptase n=1 Tax=Bombyx mori RepID=D5LB38_BOMMO
ctgaacattcttaatttattacctcaattcattacctgaactctacaattcagtgtattgccctgaagagatgaataaatattcaccaaaacgtcaggcccattgatacctacacatatacaaagatgacggtcaaacaattagatggcatgtttataaaacaatagcaaatatcaaaaaaacttaaatgatttcttggcaatcgttggtaaatctaatttgtgaaaatcgtcgtcccaaatataaaacaactttatattttatttccttggaaaaaacttttataaacgatagatatttcatgtcaaatcggcttaacgcgttttaaatgtggacatttagaaaagtgttaaggatttcatgggtagagtcacgaatatagatgtgttaaggagaataggcagagagaaggaaatggaaaacacaataaaagaaaggaaattgcaatatacttggacatattgtgataagagacgaaagatacatcttgagactcataattcaaggaaaaatagagggtagaagaagcgtaggcaggagacgcttttcctggttgaagaacctgagagaatggtttggttgcagctcaaggcaactgttcagagcagctgcctcgaatgtcagaatagccatgatgattttccaacctatgaagaatctcctgtcaatacttcacatc

SEQ ID NO: 3843 - DNA, 568 bp, Diabrotica virgifera
  SmartBlast Evalue=5E-10; Info=Endonuclease-reverse transcriptase n=1 Tax=Bombyx mori RepID=D5LB38_BOMMO
agcagattgagagagtaaaaaaatatacttacttaggaacgataatcacagaaaataacgattatactgcagaaataagagtgagaattgaaaaagcacgtgccaacttcgtgaaaataaaaaagattttatgcagcaaagatttgactctggcactcagaatgagactaattaaatgttatgtacacagtgtgcttttcatgaagctgagtcatggtcattaaaccgaatgcaataaatcgacttcatgggtagatagtcacgaatatataagtgttaaggagaataggcagagagaaggaaatggaaaacacaataaaagaaaggaaattgcaatatacttggacatattgtgataagagacgaaagatacatcttgagactcataattcaaggaaaaatagagggtagaagaagcgtaggcaggagacgcttttcctggttgaagaacctgagagaatggtttggttgcagctcaaggcaactgttcagagcagctgcctcgaatgtcagaatagccatgatgattttccaacctatgaagaatctcctgtcaatacttcacatc

SEQ ID NO: 3844 - DNA, 347 bp, Diabrotica virgifera
  SmartBlast Evalue=1E-14; Info=Endonuclease-reverse transcriptase n=1 Tax=Bombyx mori RepID=D5LB38_BOMMO
agcagattgagagagtaaaaaaatatacttacttaggaacgataatcacagaaaataacgattatactgcagaaataagagtgagaattgaaaaagcacgtgccaacttcgtgaaaataaaaaagattttatgcagcaaagatctgatactggccctcagaataaggctaattaaatgttatgtacacagtgtgctttactatggagctgaatcatggacattaaatcgaaatgcaataaatcgacggttctcttagcaagacagagacgaactagttttggtgttagtgaaatagttttgagtatttttttctgttaacagtcatttttaattatctttattataa

SEQ ID NO: 3845 - DNA, 573 bp, Diabrotica virgifera
tcagcttcctatccttccccttgattttccaatttcgtactcttaatactcgtaaatcgtcttccacctggtcttgtggaactgctctggtcctgccttctgttcactccatcaggtatttgtttataaatgtgtttcgacggctccacctcatccattctctctaagtggcctagccaccgtagcctgtttattttgatagatctatcaatactagtctcactataaaggcggtaaagctcaaaattatagcgtctatgtcataatccgttttcatgcacgcctttatagatatggacccaattcttttttactgctacttccaatgccgtcaacgactgcgccaagtccacctttcttcttgctatgatatcaatgtcgtctgcatacgctagtatttgtacactcctattaataatgacacctcttgtcgttattccagattctctaatagctttctctagggcattgtcgaataaaaggcacaataggttatctccctgtcgaagccctgtctgtgtctggaaaatgtttgatattctgttctgcactctaaccttacactcgactgtt

SEQ ID NO: 3846 - DNA, 551 bp, Diabrotica virgifera
  SmartBlast Evalue=3E-10; Info=Endonuclease-reverse transcriptase n=1 Tax=Bombyx mori RepID=D7F170_BOMMO
tttttcaatttcgtgctctcaacactcgcaagtcgtcttccaactggtccttaaatcatgctctgggcctgcctcttctgctcactccatcctgtctctgaatataaatgtgtttcgacggctccacctcatccattctctctaagtggcctagccaccgtagcctgtttattttgatagatctatcaatactagtctcactataaaggcggtaaagctcaaaattatagcgtctatgtcataatccgttttcatgcacgcctttatagatatggacccaattcttttttactgctacttccaatgccgtcaacgactgcgccaagtccacctttcttcttgctatgatatcaatgtcgtctgcatacgctagtatttgtacactcctattaataatgacacctcttgtcgttattccagattctctaatagctttctctagggcattgtcgaataaaaggcacaataggttatctccctgtcgaagccctgtctgtgtctggaaaatgtttgatattctgttctgcactctaaccttacactcgactgtt

SEQ ID NO: 3847 - DNA, 458 bp, Diabrotica virgifera
  SmartBlast Evalue=8E-15; Info=Endonuclease-reverse transcriptase n=1 Tax=Bombyx mori RepID=D7F170_BOMMO
atttcatgctatggaaaacggcccaaaccacagtcatcttttgttgatttgtgagcctagatatacgaactctcttactccttcaaaagtatatgttccaaccgttagatcttcaggtgttgctacttgattattatttgtgaccttcatatatgtacttagttttattagcgttaacgtgtagccccattctttttgctgctgcttctaatgccttggacgattgaaccagattcgcctttcttcttgctatgatatcaatgtcgtctgcatacgctagtatttgtacactcctattaataatgacacctcttgtcgttattccagattctctaatagctttctctagggcattgtcgaataaaaggcacaataggttatctccctgtcgaagccctgtctgtgtctggaaaatgtttgatattctgttctgcactctaaccttacactcgactgtt

SEQ ID NO: 3848 - DNA, 1478 bp, Diabrotica virgifera
  SmartBlast Evalue=3E-18; Info=Histidine-rich glycoprotein n=1 Tax=Plasmodium lophurae RepID=HRPX_PLALO
ataacaaatcacataagaagagtacgtgttggccttgatgaccttagtgtcttatataaaatcacatttttacgcaattcaactgcaattcgtgaaaaaagttgaatgagaacgtgaagagatgaagtcattagtatgtctctcaattattatcgccactgtgtatgcccacggtggtggaggctatggtcacggaggttttagtagcggaggctatggtcatggaggatacagccaccacacagaacaacatgtagattcgtatggaggtagacatcatggtgggtatggttctctccatgaagatgaccatcaggttgttgaaactgtccatggatatggcggacatcacgatgttcacggttatggtgggcatcatgatgctcatattgtcgaaagtggtcacggatatggtggacatcatgattctcatattttcgaaactagtcatggttatggtgggcaccatgatagtcatgttgtcgaaactggtcatggttatggtggccatcatgatactcaggttgtcgaaactgttcacggttatggtgggcatcatgatgtcgatactggtcacggatttggcagagttgatacccataatgttcatgaagttgtagaatctagccacggacatgatgatgttcacggtgctgttgaaaatgtttttggtggacatggtggtggtcacggtagtgttagcgtacataaggaagtagtagaaaccactggatatggcggacatcgtggtggacatgcttcaaccataggatctggccacaacagtggacaccaagatagttacgtcgaggaaacagtagaaactgtacgcaggcaaccatcacacactgtatacaccagtggcaacaccaaactggtcaagaagctttcgaagacgtcgatgaagtaactggaggaaaatctaaaatcatcaaaacaacacaatatgtaagacaaccaaatcaacaaggactacacggttatggcgaagatgacttagaaggtgttgttggaggacataacagtcaacgtaccgtaaaagtagtaaaaaccacacacaccagtggcagctacggatctggccaacaacaaactggtcaagaagctttcgaagacgctgatgaagttgttggaggacatagtgggcgtatcgttaaagtagttaaaaccactcataccagtggtggctatggatctggtggacaggaacaactcggtcaaataaaatcatatctgaggagagaaccactacaaacaggacaacaagcttttgacgaagaagatttaggtgaatcagtgcattctggaagttcttctcgcatcgttaaaactaccgtcaccaaacacaccagctcatatggcagaaacgataaccagctttagatgtaatacagaaaatcaaaaatattgtttgtaaataaattataaaaaatagcaaaaattattttttaaattattaaagtagtctcttatatttg

SEQ ID NO: 3849 - DNA, 553 bp, Diabrotica virgifera
  misc_feature (475)..(477): n is a, c, g, or t
atttcaaacaaacaaccagttacgaacgaagaagaaaaatgaaaacgcttttgccctatttctctgcttctgcattatcgcaagcagccaagtgtttggtgaagacgaaattccaaaagctcccaaactaaatttggaagacaaagcgagtctagacgcaagaccatttagaaaatctgattgtgacctgggtgtagaacaagaatccatatgccgcgctttgcacccagtatacagatgggacaacacacaaaagaaatgcgttgatgatttctatggtggctgttacgctactaaaaacaactttagacataaagcagactgtgagaagatagcaacaccaatttgttccagttaaattctggacaagatcgtgttaagacaacaagtttggtattttcctgttacatactagcagatcgagaatatatatcattacacaatatgttttttagttatttaatgaagtctagannngaaatagtgttttttaagttatgtgtctttgccttattttccaatatatgtaatattatcttgtcttcatgcattt

SEQ ID NO: 3850 - DNA, 522 bp, Diabrotica virgifera
  misc_feature (444)..(446): n is a, c, g, or t
aaaatgaaaacgactgccctatttctctgcttctgcattatcgcaagcagccaagtgtttggtgaagacgaaattccaaaagctcccaaactaaatttggaagacaaagcgagtctagacgcaagaccatttagaaaatctgattgtaccctaggtgtagaacaatatgaagaaggcatatgccgcgctttgcacccagtatacagatgggacaacacacaaaagaaatgcgttgatgatttctatggtggctgttacgctactaaaaacaactttagacataaagcagactgtgagaagatagcaacaccaatttgttccagttaaattctggacaagatcgtgttaagacaacaagtttggtattttcctgttacatactagcagatcgagaatatatatcattacacaatatgttttttagttatttaatgaagtctagannngaaatagtgttttttaagttatgtgtctttgccttattttccaatatatgtaatattatcttgtcttcatgcattt

SEQ ID NO: 3851 - DNA, 495 bp, Diabrotica virgifera
atttcaaacaaacaaccagtacgaacgaagaagaaaaatgaaaacgactgccctatttctctgcttctgcattatcgcaagcagccaagtgtttggtgaagacgatagcagtccagaagatagtccagaaaacaaagtacctttggaagatgaagcggctttagcagcaaggccctttagaaaatctgactgtgctcttgatgtagaactaggcgatgaaacttgccgtgccttgataccagtctacaaatggagcatcgaagccaagaaatgcgtagatgagttctacggtggatgccatccttccaaaaacaacttcaaaactaaagcagaatgtgaaaagattgccacacccatttgttcacagttaattgtgattaaaaaactatttctaccttacagtttatcgaaggttggatacagatcatcttaaaatttgttagtatgtttaattattagattttatatacttaataaatatgattgattgaattg

SEQ ID NO: 3852 - DNA, 766 bp, Diabrotica virgifera
gtccgcctaccaatgaaacgagtgtgattcatgctcatggcacatttttattttcggagagtttcataaatgggcggacgtttatttgtttagcactgttttatttccatgaaacgtaatttacgtttcatgtttctttggtgtgcggctgggctaaagattgactaaacttgaaaagtaggtactatgttaccaataatgaggttaagaatgtatagtgtaggaagcggaggttgaacatcgcaaggttggcacaggtccggttttattttttcttggtgtatcgaggggtatatcaaaccctgcggcagttaatcacaggtaggtggctgattttttggtgtaggtttcatttgggggcaattgcaaattttttgattacggggtgttacattttaaaacaatcctttattttccataagtacgttatcaataaaatgaataggtgacgaaaaaaaaaaaataaaaaactaggagcccgccaaagcatttctgaggtttacggcgccactgtgccgtaacggttgcttatacgaaaaaatgcataggaccttatttgtagagaaaatagtggtctttaattctgtataagttttgtttaaaaaaatcataggtaatgagaaaatcataaaacatgctctccaacggataggtttggtttctgcagattattttcaagggataggggtagtttccgcatggatgttgcaataatcatatatatttatgaaaaaccctattgatggagcatatgtccatatgggtc

SEQ ID NO: 3853 - DNA, 448 bp, Diabrotica virgifera
tatgcaaaaattgactctgggccaccactgtggctttagggtgcaaagaaagtaaaatatgtataggtcataatatgtagcagacagtgtgttcttttatttgtcataagtgtgttattaataaaatgaatacgtgacgaaaaaaaacaaaaactggagcccgccaaagcatttctgaggtttacggcgccactgtgccgtaacggttgcttatacgaaaaaatgcataggaccttatttgtagagaaaatagtggtctttaattctgtataagttttgtttaaaaaaatcataggtaatgagaaaatcataaaacatgctctccaacggataggtttggtttctgcagattattttcaagggataggggtagtttccgcatggatgttgcaataatcatatatatttatgaaaaaccctattgatggagcatatgtccatatgggtc

SEQ ID NO: 3854 - DNA, 262 bp, Diabrotica virgifera
gcccgccaaagcatttctgaggtttacggcgcctctgtgccgtaacggttgcttatacaaaaaaaaatgcataggaccttatttgtagagaaaatagtggtctttaattctgtataagttttgttttaaaaaaatgtataggtaataagaaaatcggcaaaacatgctctccaagggataggggtagtttccgcatggatgttgcaataatcatatatatttatgaaaaaccctattgatggagcatatgtccatatgggtc

SEQ ID NO: 3855 - DNA, 498 bp, Diabrotica virgifera
  SmartBlast Evalue=5E-18; Info=YLP motif-containing protein 1 n= 1 Tax=Harpegnathos saltator RepID=E2BBJ0_9HYME
ttatatactcctttaaataaaacaatacaaatttaacgactcacttaatatatttattttccataaatacctacaaatcatcaattaatataaaaaagaattattacagtattcttatctacgacctcgcgaaacgcgttcaatgtacttggttttagtgagtgccctactgcctgtcgggtccatcattctatcccaatcagtctggcctaccacgaatccgatggccctcatcttctccacgttcctctgttcctccaaatcggcccaccgaaccctctttttccccggttggactgattttggggggctccactcctcgagttgaaggtattcttccatggttcgcgatttacggaggggtttgttgacgccatcgagcttggctttttacgactgcttatcaacaccgggctaatttaacaccaatttataacttaaaattttaaagaaacaattcacaatcttcacgtggtgataaaatgtaaaatcgctaaa

SEQ ID NO: 3856 - DNA, 483 bp, Diabrotica virgifera
  SmartBlast Evalue=2E-12; Info=YLP motif-containing protein 1 n= 1 Tax=Harpegnathos saltator RepID=E2BBJ0_9HYME
ttatatactcctttaaataaaacaatacaaatttaacgactcacttaatatatttattttccataaatacctacaaatcatcaattaatataaaaaagaattattacagtattcttatctacgacctcgcgaaacgcgttcaatgtacttggttttagtgagtgccctactgcctgtcgggtccatcattctatcccaatcagtctggcctaccacgaatccgatggccctcatcttctccacgttcctctgttcctccaaatcggcccaccgaacctaaaacaacaatccgcttaatataaaaaacaaacatattaaatttagaataaaaattaagatcttatcaaatgcggcgttcacgtgatatttactacagttaacaatttaggtacctttaaaactaggtgtgtttttcaattcttcatacttcatatgaagagcctttctaatatgatttcacccaaaggacatgtcatcatcatt

SEQ ID NO: 3857 - DNA, 436 bp, Diabrotica virgifera
cgtttaatggtagatttattttcagttttaaattacattggcacctacaatagccatatcatttttcttacagataatgaaatatatacacaatttttggtatgtaggtagtcttttattgcactattctcataaaacgattaaaaaaaatatgtgaagtatgctgataacatatgtgcaaaatgtcccattgtatattaccgttagtgacaatgcgaaaactgttttgcatatacatttatttgtgactagaattataaaaaagtggttactatgttgcaagtaaccaatttataaacataattaattgctaaatatttccaaaaatctttttatcagtttaaagcccggactaaaaaaaaacaaatacacgttttaaaattttaaagaaacaattcacaatcttcacgtggtgataaaatgtaaaatcgctaaa

SEQ ID NO: 3858 - DNA, 440 bp, Diabrotica virgifera
aatcattatcaaaggtcattggaatgcccaaccagagtaaacgtatccgctgtcctgcgcgtagcaccaaaaatcaatgtttattcaaaaaattcctgacgccgtggtaattaatcgattttaattttgcaaattgcaaatgaaaggcacagtacacctccacaagcaaaaaaaaatcaacttgccatctgcttcattttcagtcctgcaacaattcacaaaaatgaatttctcttgcgaaagctggattgcaaaacttaccctgcaaaatccattaaaccgatcttaataaaatttacagtgcggttctaccatatgataaagtctttctgggtaaaacatgaaggtcccaagtgcagcacaaatggttgaaaaacgtaaaatgcaaatacctgcttttgcatgtcttttttatcgaaattattgctattgtgcaacaa

SEQ ID NO: 3859 - DNA, 423 bp, Diabrotica virgifera
aatcattatcaaaggtcattggaatgcccaaccagagtaaacgtatccgctgtcctgcgcgtagcaccaaaaatcaatgtttattcaaaaaattcctgacgccgtggtaattaatcgattttaattttgcaaattgcaaatgaaaggcacagtatacctccatatgtaaaaaaaatttaagttgctgtcaagtgctattttcagtcctgcaacattttgaaaattttttgcgaaagctggattgcgaaacttaccttgcaaaatctatcaaatcaatcccaatgaaatccacagcattgccttactacatcataaatattttctgggcgaaatataaaggtcccaagtgtagcacaaatggttgaaaaacgtaaaatgcgaatacctgtcttttatgtccttttcgccatcactgctatttcg

SEQ ID NO: 3860 - DNA, 346 bp, Diabrotica virgifera
aatcattatcaaaggtcattggaatgcccaaccagagtaaacgtatccgctgtcctgcgcgtagcaccaaaaatcaatgtttattcaaaaaattcctgacgccgtggtaattaatcgattttaattttgcaaattgcaaatgaaaggcacagtacacctccacaagcaaaaaaaaatcaacttgccatctgcttcattttcagtcctgcaacatttaaaaaaaaagaatttctgcgaaagctggattgcaaaatttatattgcaaaatctattaaaccaatcttaatgaaatttacagtgttgctccactataccataagtttttctgggtagaatatgaaggccc

SEQ ID NO: 3861 - DNA, 975 bp, Diabrotica virgifera
  SmartBlast Evalue=5E-63; Info=Putative ferritin 2 n=1 Tax= Anoplophora glabripennis RepID=Q4PLJ6_ANOGL
acacagttgcgcacgtcgttttcgattattgagattatccgaatgcgtagacaacaaatataacaaaaacttgaatcgtttattgttattcatgattacgctgacgagatgccagggatcatgaagactttcattgtactatctttcctttgcgtcgccgctttggcctccgaagatttttgctatcaagacgcagttaccgcatgcaatccaactgctgcgaagtatgttgacaagttgaattgtacagccaaatttggagctatcgatgcagttgaatctgacctacagaagttcataaaccatcatttcatcagatccttcgagtatctactcctagccaccaattttgccacatatgaaagaaacagagcaggattcgaaaaacttttccgtggcttgtctgacaacaagtggcatgaaggtattgaatttattaagtatcttacctctcgtggtggacacatgaacttcaatgctatttccaaagacatcaaaggagaagaggcagaagctcgtagctttgacttgcgtgaacttactgctattgctaaagctctggacatagagaagaagtttgttcatgaagctcactccatccatcgtgaagctaccagaaacaacaaacagttccacgatcctgaaatttccgattatttggagaaggaagttgtgcacaaggagagagatcttatcaggaagttagcagggtacagtactgacttggctggtctccttaacggaccagacagttcattggctctgtttatgtttgatgactatttacaaaagcagtaaatatttatttttaagtttgtgatttaataatattccatagataggttagaatcacttttcgataaatgtatcatcttcgtgtgattattagcgagtaagaatgtttgtacattattcaacaaatgtctataattatgttttttaaatagtaaaataaatacatccaagacaaatact

SEQ ID NO: 3862 - DNA, 593 bp, Diabrotica virgifera
tcttctttagtttattggcctccacctattttggtatacctcgtcgcggaataaaggaaaaatatttatattctattaacatttatcgtatgtcattgtaataatatataccagtttgttgacattggagtttgatatagttattgaaggaaaggaaagaaggtttactacggaaaataaaaccattttgtaaaagtacagttttctatgaatagttcaaacgatcaaaaacacttgtaacgtcacataaatgtattttctactgacgtttataacgtctaatttaaaattctgtttactttattggaaaaatgtaaatgtacaaaccaagtgacgtcacgacgcgttttggaccacctgttttaatttgaatttttaatcgtctttaggggccaaacgaaagacaaacaaaacttttttatctttgatacatgttttaagttatgttctgttgtgatttataacatttttttcgaatttaaaaatttatgcaagttccctattgcgggtgatgcgccggaacgccaacaaatattggcgcggtgttaaaacaatattattataactgtaaaggaactttccggtaacccggt

SEQ ID NO: 3863 - DNA, 470 bp, Diabrotica virgifera
  misc_feature (451)..(451): n is a, c, g, or t
tttatagtctcttatctttttcgtactgttttaaaatgttcttaaactcgttaaaagaactaaataattgtccacactccgtagttaatttaaaaacaaacactaaacaaataaaaaataagaaatcactgacactctaacttttttatttgcgtacacgttaacgtatacctagacacaaccttatatttaggtatattcttcttctcttctttagtttattggcctccacctacttgggtatttggcaagctcatcgtcgtggaataagtcaaaaatatttatattctaatgacatttatcgtatgtcattgtaataatatataccagtttgttaaaattggagttttatactgtttttgaaggaaaggaacgaaggtttactattgaaaataaaaccattttgtaaaagtacgaaattttctatgaatagttcaaacgatcaaaaacncttttaacgtcactactgt

SEQ ID NO: 3864 - DNA, 463 bp, Diabrotica virgifera
gtaaaaaggaaaaattataaaatttaagaaaatagctcacaactaaatttgtatattgatttaatcctataaaaatacctttcttttaaatgcatagtttgtggttataactcataccactagatggcgctattttgtttgcttccaaaaaattaatgggaaatgtcaagagttgtatacattgttacaaaactgacttgacctttttatgatcttttaggcactaatgtttagttttagttaactttatttattttgaataacttctaaacaaatgaaaaacactgaatttatatcctttattttacaaactacgatatttaatttatttattacactaaatctaataatttatctaattacaaattcaaaaatataccgcgcccgttacatatcaaagtacaccgacgttttcaaattcacaactgaaccccgtaattacaaaaagatactatttatacaa

SEQ ID NO: 3865 - DNA, 279 bp, Diabrotica virgifera
tgttacaaaactgacttttctatgatcttttaggcactaatgtttagttttagttgactttatttatttttaataactacatctaaacaaatgaaaaacactgaatttatatcctttattttacaaactacgatatttaatttatttattacactaaatctaataatttatctaattacaaattcaaaaatataccgcgcccgttacatatcaaagtacaccgacgttttcaaattcacaactgaaccccgtaattacaaaaagatactatttatacaa

SEQ ID NO: 3866 - DNA, 288 bp, Diabrotica virgifera
tcaattaacccaacaattattaacaaaattgattaaccaatctcataattgtaatcaataattatgacctcagcaacccaatcaaagttgacactgacagttggcgacagtaattaaacacttgacaatgatcatctctgattagcgcccgaacaaccggtcctaaatctaataatttatataattacaaattcaaaaatataccgcgcccgttacatatcaaagtacaccgacgttttcaaattcacaactgaaccccgtaattacaaaaagatactatttatacaa

SEQ ID NO: 3867 - DNA, 423 bp, Diabrotica virgifera
agttttactcaacccattcgctcaggtccgcgccgtccatgtatgcaatgtgtgcaccgcacacaggcgccagcaattaagcatagccactagagttgttacaaaaattttacgcggggtaaaaacaacacttacccatttaccgaccttgtcaccctgtaggcacattacgtacctattgatttacaatctgcataaacaagaaaaatattgtaaagacatgcagccaaaaaatgtttaggagatgaaatatatcaacatttacattcatacgctcagtcctcatatggtatgaagttctgatgaaagttaacttcgttagcaaaattttacaataaaaacaatgaatatgcagctggccttaaatgctttacaagagtaaaaataattcttgcctgactttcgaacagatagaaaatttaa

SEQ ID NO: 3868 - DNA, 385 bp, Diabrotica virgifera
agttttactcaacccattcgctcaggtccgcgccgtccatgtatgcaatgtgtgcaccgcacacaggcgccagcaattaagcatagccactagagttgttacaaaaattttacgcggggtaaaaacaacacttacccatttaccgaccttgtcaccctgtaggcacattacgtacctattgatttacaatctgcataaacaagaaaaatattgtaaagacatgcagccaaaaaatgtttaggagattaaatatatcaacattatttatattcataccctcagtccacatatatggtatgactcgagtttggacagaaatcaaatttaatgatgttattactacagcaaatgaaactgcagagaaactggatgttagttatatgat

SEQ ID NO: 3869 - DNA, 203 bp, Diabrotica virgifera
ctacatacctatggtgtaaagttctgatgaaagttaacttcgttaacaaaattttcaatcaaaaacaataaatatgcagctggccttaaatgctttacaagagataaaacaactgttgctcgagtttggacagaaatcaaatttaatgatgttattactacagcaaatgaaactgcagagaaactggatgttagttatatgat

SEQ ID NO: 3870 - DNA, 739 bp, Diabrotica virgifera
catttcaaaagtttggtgttctcttgttaggttttgaaaaacaaacgagtaaacatgagtgctaaaatgcttttaatttttgccgttgtgctgcttgttgttattgaagacagttttcaattcccaagacctggtggcaacggcgacgatagaggacataatggaggtggcacaggacaaggtggtggtaacggacaaggtggtggtaacggagatggacgtggtaatggaaatggaggtggtaatggaaatggaggtggtaatggaaacggtgatgataactgcgataacagtaccagtaccacagaaggcactactgtaacacctactactgaaacacctactactgtaacacctactactgaaacacctactactgagagcaatgacacagatgaaaattgcgatgaaaattcctcagaagaaagtagtgaaaaatctactgaaagaaacgtcacagatgataatagcgacgaaaattgctcagaagaaagtagtgaagaatctactgaaagaaacgacacagataatggaaatggaggtggtaatggaaatggaggtggtaatggagaagacgatgataattgcgacgacaattcctcagaaggcagtagtgacgaataacgacagacgtaaatgagaaaaatactaatgtgttgtatttcttaaaatgtatgttttcttttcatattaattgtatatttgagatacttttgtcataataatataatgagggcat

SEQ ID NO: 3871 - DNA, 4057 bp, Diabrotica virgifera
  SmartBlast Evalue=2E-26; Info=Cyclin-G2 n=1 Tax=Harpegnathos saltator RepID=E2BQG8_9HYME
gattgttcatattactataatattattatgtggtaaagatataaatatattctgacgtcacacaaaacgttattgatgtcaacattaaaaaacgcctgatggcgtcgcatttctcttttgttctgtaaacaaacgatggaaaaaaattttccctgttctatcctttcaagtgtcgaaccttgaggtacacacacgatatattttttagtttgatttttttcataagtgaataatcaaactaaaatagcgctttactacaaggcatcctggttttaggccttctcctacttttgctgttaccctttttttaactgaagctaaagaaagcggtggaatggttactggtctctactaattaaagaagaatcaacagccatggacaaaacggtcaaaagcaggggatggcctttaacaggtgctaagtgtaacatcaaaccattactatttgatctcgaggaagcactttctgtagagaacacctacaggcccagtgtattagcaattcaatataacgttaaaccaggagaagttactctcaagtccagggatggtattgtacatcttcttcgtttcctgaagtcttggtttgataccccagaacaagtcttttttgtagccgtcggctatctggatgcatttatagcacgtataaaggtaccagaaaagtacttgatgtgtcttgcatttgcttgtttcttcatagctgcccgtgaagagcaacttgacattcctttaagcactctgatctacatggctaggtgcaattttactttccaagacgtactaagaatggtggacgttgttacaaacaagctccaattagggtccaaaatcactactattggagatattcttcggctgtatatccagtttttaggaagctgtcactcaaccgtaagtgaaattctggatgaagaagagttgttgaccaagctgggggttctgctgactgacagcagctgtgcatttttcagaccatcagtgttagccttcacacttttgagatttgaagttgacaagcaactatctcatactattaacaaaacagcaagttttggtgacgtcatccatacattagctgtgatgaaggagttacaactgagatgtgagacatcagctgctgacttggttagttgttcccaattcgcatccaaagtgttaaaacgctacaacaaccatgaaccctgcggaaacaatgcgtacctgaaatggaacttttttccatcattccgtagacgtgaccgctcctcccgatcgaccctgagtgtaatcaatgagaaacctaatgggcaaatcaaaaatggaagaatcaataggaagaagaatcgtactaactaattgccaaatttctatgcagtactattgtaagcacagtttgttttaaattcttataaaaaaatggtcttagcttttaatgtatagtgtgtgttaactgcaagtttgttcatgtgtaattaattcccagaatcgtttcaatattaatttatatatccttattcatcctcatttgtattgtggaatcttgcattgacacacacttacctaatttttaaagagacaaacgataatttcttctttgtccgtcagctcctatattttttgaacatcttcaataccatatttactcgttggaaaatggactgcaagaagttatgtttgtctccttatttttattctagagtacctatatgtaacctaagatatctatatcgaaagtgatgtgagtgtaaattatatgtttttatgtaaagagtttactatatatatttttatgaaaaatttaaatctagtgatattaaatataagctgtgagtctctattgagcgccattttttgacttgctacaaaaacttgcgttctggtaaattttgcatgataagctacaccacatcacaaaaatttgtaaaattttatataaaaaaatatatacataattgcaaaatatgcaaaaaaaatataaaatgttttaaccctgctgtcctgttcgggtctatttgacccaaaaaataatttatttcttattttacaaattattacgctgagtaacgatttggtgtttcgtgactttattacctaatatgaggtctttcaattgcatatgagataaacattcaacttcctgatttttttgataaaaatgaaattgttacctagggtacgttcgggtcaatgtgacccgcgtatttaaaccgttaaaaattacctgtgtatgtgtgtttagttggcagtattatatattagcagtacccgtgtgtttgtcagccggatacgtctgtaaataaaaacaggtttctgcaagcgaaaacttgtaaaataaactgtagtatagctggacgatgctgcaaaccaaattataaatatggccaacatggacggacagcaagtatttggaaccaactggaaagacatgaataaagttggtttccaagcatacattggtcttttattgttagctcgagtttataagtcccatggtgaatcaactaaaagtttatggaatgaagaaacgggtcgtactatatttcgatcaacaatgtcgcttgacatatttacaaaaagtttgcaagtaatacgttttgataacaaaactactagacaggataacagacgttttgataaacttgcggcaatacgtgaaatttatgaaacatgggtagaaaatgtaaaaagaaattttaaccctgatgaaaatgttatcgtcgataagtaactagttgcctttagaggcctctcaaatggtacattccagcaagccagcgaaatatggcacaaaactttggggtttatgtgattatgaacagtaaaacttcttatgctctaaaattgcagatctatacagaaatgcgtgtgctgtgtgacttaagtagtgatttggaatgccacaatattacgtgtataataacttttgtacatcgtaaaatttaggacaatttcttctaaaacaaagtagatacaaggccggggattataaaataaaccggagctttcagcaaaaatcgcgaataaagaagttcatagctcgtcttttttgcttcatgcaagatttgacaatattcctaaaaataataaaaatgttgttcttatgagtactttgcatcatgaatcgatgcatcatgcatcactttcatcaaatgaaaaagccccaaattattttagattacaattccaataagggagcagtggatactctagattagcttgttggcacgtatacatgtgagaagagataaatcgctggccaatgatcgttttttataatctactggacatttctgcctacaacgcgttcgtgttacgggcatcaataaatatccaatggaataccaatcaattgggaaaacggcgaatttttttgagaaattttgaaaaaactaatgaatccagtcatcatttccagaaaaataaaccaataactaaaggctcttacgaactggtaaaaatgttacgagcaggaacaagtagacaagatggaaatgctagtgaaccgtctattaaatctaaccccgcctgctaaacgaacacgctgtaaacttgccgtaaaaacgatcacaagactaattattatgttatattatatcacaaacatatttgtaaaatccattctttttaatactgtcccagttgtaaactgaattaaatttttgtagataattgttactaggcttttttgaaagaaaaaatgccttttgtttttgtcaataaggtttaatttacattaacaacataatttttgtttaattaaccattatttcttgttaataaagttttatttattaccattagcttattttatttcgattaaggagcgtaaaccatagtttgggtcatattgacccgaacagtacatttgtgtagttgactcgaacgggacagtagggttaaatattaaaaaatatcttggttaaaatgttacatatttttagttttatttttaaaaagattttgattgattataaatgtgcttactcattgtctgttctgtcctgaaactagtccttctgatttgttaccatgtaatggcatatcttttgaatacgctaatatacatctccacaga

SEQ ID NO: 3872 - DNA, 4054 bp, Diabrotica virgifera
  SmartBlast Evalue=2E-26; Info=Cyclin-G2 n=1 Tax=Harpegnathos saltator RepID=E2BQG8_9HYME
gattgttcatattactataatattattatgtggtaaagatataaatatattctgacgtcacacaaaacgttattgatgtcaacattaaaaaacgcctgatggcgtcgcatttctcttttgttctgtaaacaaacgatggaaaaaaattttccctgttctatcctttcaagtgtcgaaccttgaggtacacacacgatatattttttagtttgatttttttcataagtgaataatcaaactaaaatagcgctttactacaaggcatcctggttttaggccttctcctacttttgctgttaccctttttttaactgaagctaaagaaagcggtggaatggttactggtctctactaattaaagaagaatcaacagccatggacaaaacggtcaaaagcaggggatggcctttaacaggtgctaagtgtaacatcaaaccattactatttgatctcgaggaagcactttctgtagagaacacctacaggcccagtgtattagcaattcaatataacgttaaaccaggagaagttactctcaagtccagggatggtattgtacatcttcttcgtttcctgaagtcttggtttgataccccagaacaagtcttttttgtagccgtcggctatctggatgcatttatagcacgtataaaggtaccagaaaagtacttgatgtgtcttgcatttgcttgtttcttcatagctgcccgtgaagagcaacttgacattcctttaagcactctgatctacatggctaggtgcaattttactttccaagacgtactaagaatggtggacgttgttacaaacaagctccaattagggtccaaaatcactactattggagatattcttcggctgtatatccagtttttaggaagctgtcactcaaccgtaagtgaaattctggatgaagaagagttgttgaccaagctgggggttctgctgactgacagcagctgtgcatttttcagaccatcagtgttagccttcacacttttgagatttgaagttgacaagcaactatctcatactattaacaaaacagcaagttttggtgacgtcatccatacattagctgtgatgaaggagttacaactgagatgtgagacatcagctgctgacttggttagttgttcccaattcgcatccaaagtgttaaaacgctacaacaaccatgaaccctgcggaaacaatgcgtacctgaaatggaacttttttccatcattccgtagacgtgaccgctcctcccgatcgaccctgagtgtaatcaatgagaaacctaatgggcaaatcaaaaatggaagaatcaataggaagaagaatcgtactaactaattgccaaatttctatgcagtactattgtaagcacagtttgttttaaattcttataaaaaaatggtcttagcttttaatgtatagtgtgtgttaactgcaagtttgttcatgtgtaattaattcccagaatcgtttcaatattaatttatatatccttattcatcctcatttgtattgtggaatcttgcattgacacacacttacctaatttttaaagagacaaacgataatttcttctttgtccgtcagctcctatattttttgaacatcttcaataccatatttactcgttggaaaatggactgcaagaagttatgtttgtctccttatttttattctagagtacctatatgtaacctaagatatctatatcgaaagtgatgtgagtgtaaattatatgtttttatgtaaagagtttactatatatatttttatgaaaaatttaaatctagtgatattaaatataagctgtgagtctctattgagcgccattttttgacttgctacaaaaacttgcgttctggtaaattttgcatgataagctacaccacatcacaaaaatttgtaaaattttatataaaaaaatatatacataattgcaaaatatgcaaaaaaaatataaaatgttttaaccctgctgtcctgttcgggtctatttgacccaaaaaataatttatttcttattttacaaattattacgctgagtaacgatttggtgtttcgtgactttattacctaatatgaggtctttcaattgcatatgagataaacattcaacttcctgatttttttgataaaaatgaaattgttacctagggtacgttcgggtcaatgtgacccgcgtatttaaaccgttaaaaattacctgtgtatgtgtgtttagttggcagtattatatattagcagtacccgtgtgtttgtcagccggatacgtctgtaaataaaaacaggtttctgcaagcgaaaacttgtaaaataaactgtagtatagctggacgatgctgcaaaccaaattataaatatggccaacatggacggacagcaagtatttggaaccaactggaaagacatgaataaagttggtttccaagcatacattggtcttttattgttagctcgagtttataagtcccatggtgaatcaactaaaagtttatggaatgaagaaacgggtcgtactatatttcgatcaacaatgtcgcttgacatatttacaaaaagtttgcaagtaatacgttttgataacaaaactactagacaggataacagacgttttgataaacttgcggcaatacgtgaaatttatgaaacatgggtagaaaatgtaaaaagaaattttaaccctgatgaaaatgttatcgtcgataagtaactagttgcctttagaggcctctcaaatggtacattccagcaagccagcgaaatatggcacaaaactttggggtttatgtgattatgaacagtaaaacttcttatgctctaaaattgcagatctatacagaaatgcgtgtgctgtgtgacttaagtagtgatttggaatgccacaatattacgtgtataataacttttgtacatcgtaaaatttaggacaatttcttctaaaacaaagtagatacaaggccggggattataaaataaaccggagctttcagcaaaaatcgcgaataaagaagttcatagctcgtcttttttgcttcatgcaagatttgacaatattcctaaaaataataaaaatgttgttcttatgagtactttgcatcatgaatcgatgcatcatgcatcactttcatcaaatgaaaaagccccaaattattttagattacaattccaataagggagcagtggatactctagattagcttgttggcacgtatacatgtgagaagagataaatcgctggccaatgatcgttttttataatctactggacatttctgcctacaacgcgttcgtgttacgggcatcaataaatatccaatggaataccaatcaattgggaaaacggcgaatttttttgagaaattttgaaaaaactaatgaatccagtcatcatttccagaaaaataaaccaataactaaaggctcttacgaactggtaaaaatgttacgagcaggaacaagtagacaagatggaaatgctagtgaaccgtctattaaatctaaccccgcctgctaaacgaacacgctgtaaacttgccgtaaaaacgatcacaagactaattattatgttatattatatcacaaacatatttgtaaaatccattctttttaatactgtcccagttgtaaactgaattaaatttttgtagataattgttactaggcttttttgaaagaaaaaatgccttttgtttttgtcaataaggtttaatttacattaacaacataatttttgtttaattaaccattatttcttgttaataaagttttatttattaccattagcttattttatttcgattaaggagcgtaaaccatagtttgggtcatattgacccgaacagtacatttgtgtagttgactcgaacgggacagtagggttaaatattaaaaaatatcttggttaaaatgttacatatttttagttttatttttaaaaagattttgattgattataaatgtgcttactcattgtctgttctgtcctgaaactagtccttctgatttgttaccatgtaatggcatatcttttgaatacgctaatatacatctccac

SEQ ID NO: 3873 - DNA, 2145 bp, Diabrotica virgifera
  SmartBlast Evalue=1E-26; Info=Cyclin-G2 n=1 Tax=Harpegnathos saltator RepID=E2BQG8_9HYME
gattgttcatattactataatattattatgtggtaaagatataaatatattctgacgtcacacaaaacgttattgatgtcaacattaaaaaacgcctgatggcgtcgcatttctcttttgttctgtaaacaaacgatggaaaaaaattttccctgttctatcctttcaagtgtcgaaccttgaggtacacacacgatatattttttagtttgatttttttcataagtgaataatcaaactaaaatagcgctttactacaaggcatcctggttttaggccttctcctacttttgctgttaccctttttttaactgaagctaaagaaagcggtggaatggttactggtctctactaattaaagaagaatcaacagccatggacaaaacggtcaaaagcaggggatggcctttaacaggtgctaagtgtaacatcaaaccattactatttgatctcgaggaagcactttctgtagagaacacctacaggcccagtgtattagcaattcaatataacgttaaaccaggagaagttactctcaagtccagggatggtattgtacatcttcttcgtttcctgaagtcttggtttgataccccagaacaagtcttttttgtagccgtcggctatctggatgcatttatagcacgtataaaggtaccagaaaagtacttgatgtgtcttgcatttgcttgtttcttcatagctgcccgtgaagagcaacttgacattcctttaagcactctgatctacatggctaggtgcaattttactttccaagacgtactaagaatggtggacgttgttacaaacaagctccaattagggtccaaaatcactactattggagatattcttcggctgtatatccagtttttaggaagctgtcactcaaccgtaagtgaaattctggatgaagaagagttgttgaccaagctgggggttctgctgactgacagcagctgtgcatttttcagaccatcagtgttagccttcacacttttgagatttgaagttgacaagcaactatctcatactattaacaaaacagcaagttttggtgacgtcatccatacattagctgtgatgaaggagttacaactgagatgtgagacatcagctgctgacttggttagttgttcccaattcgcatccaaagtgttaaaacgctacaacaaccatgaaccctgcggaaacaatgcgtacctgaaatggaacttttttccatcattccgtagacgtgaccgctcctcccgatcgaccctgagtgtaatcaatgagaaacctaatgggcaaatcaaaaatggaagaatcaataggaagaagaatcgtactaactaattgccaaatttctatgcagtactattgtaagcacagtttgttttaaattcttataaaaaaatggtcttagcttttaatgtatagtgtgtgttaactgcaagtttgttcatgtgtaattaattcccagaatcgtttcaatattaatttatatatccttattcatcctcatttgtattgtggaatcttgcattgacacacacttacctaatttttaaagagacaaacgataatttcttctttgtccgtcagctcctatattttttgaacatcttcaataccatatttactcgttggaaaatggactgcaagaagttatgtttgtctccttatttttattctagagtacctatatgtaacctaagatatctatatcgaaagtgatgtgagtgtaaattatatgtttttatgtaaagagtttactatatatatttttatgaaaaatttaaatctagtgatattaaatataagctgtgagtctctattgagcgccattttttgacttgctacaaaaacttgcgttctggtaaattttgcatgataagctacaccacatcacaaaaatttgtaaaattttatataaaaaaatatatacataattgcaaaatatgcaaaaaaaatataaaatgttttaaatattaaaaaatatcttggttaaaatgttacatatttttagttttatttttaaaaagattttgattgattataaatgtgcttactcattgtctgttctgtcctgaaactagtccttctgatttgttaccatgtaatggcatatcttttgaatacgctaatatacatctccacaga

SEQ ID NO: 3874 - DNA, 2142 bp, Diabrotica virgifera
  SmartBlast Evalue=1E-26; Info=Cyclin-G2 n=1 Tax=Harpegnathos saltator RepID=E2BQG8_9HYME
gattgttcatattactataatattattatgtggtaaagatataaatatattctgacgtcacacaaaacgttattgatgtcaacattaaaaaacgcctgatggcgtcgcatttctcttttgttctgtaaacaaacgatggaaaaaaattttccctgttctatcctttcaagtgtcgaaccttgaggtacacacacgatatattttttagtttgatttttttcataagtgaataatcaaactaaaatagcgctttactacaaggcatcctggttttaggccttctcctacttttgctgttaccctttttttaactgaagctaaagaaagcggtggaatggttactggtctctactaattaaagaagaatcaacagccatggacaaaacggtcaaaagcaggggatggcctttaacaggtgctaagtgtaacatcaaaccattactatttgatctcgaggaagcactttctgtagagaacacctacaggcccagtgtattagcaattcaatataacgttaaaccaggagaagttactctcaagtccagggatggtattgtacatcttcttcgtttcctgaagtcttggtttgataccccagaacaagtcttttttgtagccgtcggctatctggatgcatttatagcacgtataaaggtaccagaaaagtacttgatgtgtcttgcatttgcttgtttcttcatagctgcccgtgaagagcaacttgacattcctttaagcactctgatctacatggctaggtgcaattttactttccaagacgtactaagaatggtggacgttgttacaaacaagctccaattagggtccaaaatcactactattggagatattcttcggctgtatatccagtttttaggaagctgtcactcaaccgtaagtgaaattctggatgaagaagagttgttgaccaagctgggggttctgctgactgacagcagctgtgcatttttcagaccatcagtgttagccttcacacttttgagatttgaagttgacaagcaactatctcatactattaacaaaacagcaagttttggtgacgtcatccatacattagctgtgatgaaggagttacaactgagatgtgagacatcagctgctgacttggttagttgttcccaattcgcatccaaagtgttaaaacgctacaacaaccatgaaccctgcggaaacaatgcgtacctgaaatggaacttttttccatcattccgtagacgtgaccgctcctcccgatcgaccctgagtgtaatcaatgagaaacctaatgggcaaatcaaaaatggaagaatcaataggaagaagaatcgtactaactaattgccaaatttctatgcagtactattgtaagcacagtttgttttaaattcttataaaaaaatggtcttagcttttaatgtatagtgtgtgttaactgcaagtttgttcatgtgtaattaattcccagaatcgtttcaatattaatttatatatccttattcatcctcatttgtattgtggaatcttgcattgacacacacttacctaatttttaaagagacaaacgataatttcttctttgtccgtcagctcctatattttttgaacatcttcaataccatatttactcgttggaaaatggactgcaagaagttatgtttgtctccttatttttattctagagtacctatatgtaacctaagatatctatatcgaaagtgatgtgagtgtaaattatatgtttttatgtaaagagtttactatatatatttttatgaaaaatttaaatctagtgatattaaatataagctgtgagtctctattgagcgccattttttgacttgctacaaaaacttgcgttctggtaaattttgcatgataagctacaccacatcacaaaaatttgtaaaattttatataaaaaaatatatacataattgcaaaatatgcaaaaaaaatataaaatgttttaaatattaaaaaatatcttggttaaaatgttacatatttttagttttatttttaaaaagattttgattgattataaatgtgcttactcattgtctgttctgtcctgaaactagtccttctgatttgttaccatgtaatggcatatcttttgaatacgctaatatacatctccac

SEQ ID NO: 3875 - DNA, 3106 bp, Diabrotica virgifera
  SmartBlast Evalue=0; Info=Elongation factor 2 n=15 Tax= Pancrustacea RepID=EF2_DROME
cgaccagcacgttcgtagaaggaagccaaacgggcacctaagtaagccggataaccggaatcggcaggcatttcagccaaacgacctgaaatttctctcaaagcttcggcccaacgtgatgtcgagtcagccatcatagatacgttgtaacccatatcacggaagtattcagaaagagtaataccagtatagaattagggccatgatggacaaaaagaggaacatccgtaacatgtccgtcattgcccatgtggaccatggtaaatctacattaacagattctctagtatcaaaagctggtattattgctggtgccaaagctggagaaaccagattcacagacacaaggaaagatgaacaggaacgttgtattaccatcaaatcaactgccatatctatgttcttcgagttagatgataaagatcttgtgttcatcaccaacgctgaccaacgtgagaaagatgtgaaaggtttcttgattaaccttattgactctcctggacacgttgatttctcatcagaagtaacagctgcccttcgtgtcactgatggtgcccttgtagtagtagattgtgtatctggtgtatgtgtacagactgaaactgtactccgtcaagctattgcagaacgtattaagccaattttattcatgaacaagatggaccgtgccctcttagaattacagttggaatctgaagaactttaccagactttccaacgtattgttgaaaacgtcaacgtcattattgccacctacaacgatgattcaggtccaatgggtgaagtcagagttgaccccagcaaaggttcagttggttttggatcaggtctccacggatgggctttcactctcaaacaattctctgaaatgtatgccgagaaattcaagattgatgtagttaaactaatgaaccgtttgtggggtgagaacttcttcaaccccaaaaccaagaaatggtccaaacaaaaggatgatgataacaaacgttcattctgtatgtacatcttagatccaatctacaagatttttgactccatcatgaactacaagaaagaagaatatgaagcactccttccaaaattgggtattgccttaaaacatgaagataaagacaaagatggtaaacaattattgaaagtagttatgcgtacctggttgccagctggagaagctttacttcagatgatagccattcacttaccatcacctgtggtagcacagaaatacagaatggaaatgttgtacgaaggacctcatgatgatgaagcagctgttggtatcaagaactgtgatccaaatgcacctcttatgatgtatgtatctaaaatggtacccacttctgacaaaggtcgtttctatgcttttggtcgtgtattctctggtaaagtagctactggtatgaaagcccgtatcatgggacccaactacacccctggcaaaaaggaagatttgtatgaaaaggctatccaacgtaccattctcatgatgggtcgttatgttgaagctattgaagatgtcccatctggtaacatctgtggtttggttggtgttgatcaattcttggttaagactggtaccattaccactttcaaggatgcccacaacttgaaggtcatgaaattcagtgtatctcctgtagtacgtgttgctgttgaacctaagaaccctgctgatttgccaaaacttgtagaaggtttgaaacgtttgaccaaatccgatcctatggtccaatgtatcattgaagaatctggtgagcacatcattgctggtgccggagaattgcatcttgaaatttgccttaaggatcttgaagaagatcatgcctgcattcccattaagaaatctgaccctgttgtatcctaccgtgagacagtaagtgaagagtctgatcagatgtgcctctcaaaatcacccaacaaacacaacagattgttcatgaaagcttgtcctatgcctgatggacttgctgaagatattgatgatggtaaagttaacccacgtgatgacttcaaagtccgtgcccgttatcttactgagaaatatgactatgatataactgaagcccgtaagatctggtgctttggacctgatggtactggacccaacatccttgttgattgtactaagggagtgcaatatcttaatgaaatcaaagactctgtggtagctggtttccaatgggcaaccaaagaaggtgtcttgtctgaagaaaacttgagaggtgttagattcaacatttatgatgttaccttacacgctgatgctatccatcgtggaggtggtcaaatcattccaacaacccgtaggtgtttgtatgcttgtttaatgacagctgcacccagacttatggaacctatctacaagtgtgaaattatgtgtcctgaagttgctgttggtggtatttatggtgtattgaacagaagacgtggtcacgtatttgaagaagctcaaatcgctggtacacctatgttcttagtaaaagcttacttacctgtaaacgaatcattcggtttcactgctgatttacgttccaacactggaggtcaggccttcccacaatcagtcttcgatcactggcaaatcttacctggtgacccaatggaacccagtaccaaaccctatggaattgtgcaggacacacgtaaaagaaagggtcttaaagaaggacttccagacctggcacaatatctggataaattataaacaactaagaaacttaatttatgtacagattatttaataaaattatttcaatttactcaacggtttttatagttaattgtatttttgatatttttattctgataagttttcagttctctcaaattgatggcaacactagaaatgaaataaactaaataatctgactaatattttatgtttgttatatatatttttgttaacagtccagatatttgtatatttattaatttgacatcaaaagtaaatctgatgaaacatttttgagtatttatttgtggatacaaattcgtcttgttttatttttactcccttgaaacattttattagtgtaatttttatttgagcagtactgattaatgttaagtatattttttggatatgtgtataataaaactcagtttt

SEQ ID NO: 3876 - DNA, 3037 bp, Diabrotica virgifera
  SmartBlast Evalue=0; Info=Elongation factor 2 n=15 Tax= Pancrustacea RepID=EF2_DROME
cggcgtggcagagagtcggtctctttctttcacgggagtgcgccatcgttggcgtatcgtaatttttggttgtgcttgagaaaatcgtcaaacatccaaaatggtgaacttcaccgtagatgaaattagggccatgatggacaaaaagaggaacatccgtaacatgtccgtcattgcccatgtggaccatggtaaatctacattaacagattctctagtatcaaaagctggtattattgctggtgccaaagctggagaaaccagattcacagacacaaggaaagatgaacaggaacgttgtattaccatcaaatcaactgccatatctatgttcttcgagttagatgataaagatcttgtgttcatcaccaacgctgaccaacgtgagaaagatgtgaaaggtttcttgattaaccttattgactctcctggacacgttgatttctcatcagaagtaacagctgcccttcgtgtcactgatggtgcccttgtagtagtagattgtgtatctggtgtatgtgtacagactgaaactgtactccgtcaagctattgcagaacgtattaagccaattttattcatgaacaagatggaccgtgccctcttagaattacagttggaatctgaagaactttaccagactttccaacgtattgttgaaaacgtcaacgtcattattgccacctacaacgatgattcaggtccaatgggtgaagtcagagttgaccccagcaaaggttcagttggttttggatcaggtctccacggatgggctttcactctcaaacaattctctgaaatgtatgccgagaaattcaagattgatgtagttaaactaatgaaccgtttgtggggtgagaacttcttcaaccccaaaaccaagaaatggtccaaacaaaaggatgatgataacaaacgttcattctgtatgtacatcttagatccaatctacaagatttttgactccatcatgaactacaagaaagaagaatatgaagcactccttccaaaattgggtattgccttaaaacatgaagataaagacaaagatggtaaacaattattgaaagtagttatgcgtacctggttgccagctggagaagctttacttcagatgatagccattcacttaccatcacctgtggtagcacagaaatacagaatggaaatgttgtacgaaggacctcatgatgatgaagcagctgttggtatcaagaactgtgatccaaatgcacctcttatgatgtatgtatctaaaatggtacccacttctgacaaaggtcgtttctatgcttttggtcgtgtattctctggtaaagtagctactggtatgaaagcccgtatcatgggacccaactacacccctggcaaaaaggaagatttgtatgaaaaggctatccaacgtaccattctcatgatgggtcgttatgttgaagctattgaagatgtcccatctggtaacatctgtggtttggttggtgttgatcaattcttggttaagactggtaccattaccactttcaaggatgcccacaacttgaaggtcatgaaattcagtgtatctcctgtagtacgtgttgctgttgaacctaagaaccctgctgatttgccaaaacttgtagaaggtttgaaacgtttgaccaaatccgatcctatggtccaatgtatcattgaagaatctggtgagcacatcattgctggtgccggagaattgcatcttgaaatttgccttaaggatcttgaagaagatcatgcctgcattcccattaagaaatctgaccctgttgtatcctaccgtgagacagtaagtgaagagtctgatcagatgtgcctctcaaaatcacccaacaaacacaacagattgttcatgaaagcttgtcctatgcctgatggacttgctgaagatattgatgatggtaaagttaacccacgtgatgacttcaaagtccgtgcccgttatcttactgagaaatatgactatgatataactgaagcccgtaagatctggtgctttggacctgatggtactggacccaacatccttgttgattgtactaagggagtgcaatatcttaatgaaatcaaagactctgtggtagctggtttccaatgggcaaccaaagaaggtgtcttgtctgaagaaaacttgagaggtgttagattcaacatttatgatgttaccttacacgctgatgctatccatcgtggaggtggtcaaatcattccaacaacccgtaggtgtttgtatgcttgtttaatgacagctgcacccagacttatggaacctatctacaagtgtgaaattatgtgtcctgaagttgctgttggtggtatttatggtgtattgaacagaagacgtggtcacgtatttgaagaagctcaaatcgctggtacacctatgttcttagtaaaagcttacttacctgtaaacgaatcattcggtttcactgctgatttacgttccaacactggaggtcaggccttcccacaatcagtcttcgatcactggcaaatcttacctggtgacccaatggaacccagtaccaaaccctatggaattgtgcaggacacacgtaaaagaaagggtcttaaagaaggacttccagacctggcacaatatctggataaattataaacaactaagaaacttaatttatgtacagattatttaataaaattatttcaatttactcaacggtttttatagttaattgtatttttgatatttttattctgataagttttcagttctctcaaattgatggcaacactagaaatgaaataaactaaataatctgactaatattttatgtttgttatatatatttttgttaacagtccagatatttgtatatttattaatttgacatcaaaagtaaatctgatgaaacatttttgagtatttatttgtggatacaaattcgtcttgttttatttttactcccttgaaacattttattagtgtaatttttatttgagcagtactgattaatgttaagtatattttttggatatgtgtataataaaactcagtttt

SEQ ID NO: 3877 - DNA, 2967 bp, Diabrotica virgifera
  SmartBlast Evalue=0; Info=Elongation factor 2 n=15 Tax= Pancrustacea RepID=EF2_DROME
cgaccagcacgttcgtagaaggaagccaaacgggcacctaagtaagccggataaccggaatcggcaggcatttcagccaaacgacctgaaatttctctcaaagcttcggcccaacgtgatgtcgagtcagccatcatagatacgttgtaacccatatcacggaagtattcagaaagagtaataccagtatagaattagggccatgatggacaaaaagaggaacatccgtaacatgtccgtcattgcccatgtggaccatggtaaatctacattaacagattctctagtatcaaaagctggtattattgctggtgccaaagctggagaaaccagattcacagacacaaggaaagatgaacaggaacgttgtattaccatcaaatcaactgccatatctatgttcttcgagttagatgataaagatcttgtgttcatcaccaacgctgaccaacgtgagaaagatgtgaaaggtttcttgattaaccttattgactctcctggacacgttgatttctcatcagaagtaacagctgcccttcgtgtcactgatggtgcccttgtagtagtagattgtgtatctggtgtatgtgtacagactgaaactgtactccgtcaagctattgcagaacgtattaagccaattttattcatgaacaagatggaccgtgccctcttagaattacagttggaatctgaagaactttaccagactttccaacgtattgttgaaaacgtcaacgtcattattgccacctacaacgatgattcaggtccaatgggtgaagtcagagttgaccccagcaaaggttcagttggttttggatcaggtctccacggatgggctttcactctcaaacaattctctgaaatgtatgccgagaaattcaagattgatgtagttaaactaatgaaccgtttgtggggtgagaacttcttcaaccccaaaaccaagaaatggtccaaacaaaaggatgatgataacaaacgttcattctgtatgtacatcttagatccaatctacaagatttttgactccatcatgaactacaagaaagaagaatatgaagcactccttccaaaattgggtattgccttaaaacatgaagataaagacaaagatggtaaacaattattgaaagtagttatgcgtacctggttgccagctggagaagctttacttcagatgatagccattcacttaccatcacctgtggtagcacagaaatacagaatggaaatgttgtacgaaggacctcatgatgatgaagcagctgttggtatcaagaactgtgatccaaatgcacctcttatgatgtatgtatctaaaatggtacccacttctgacaaaggtcgtttctatgcttttggtcgtgtattctctggtaaagtagctactggtatgaaagcccgtatcatgggacccaactacacccctggcaaaaaggaagatttgtatgaaaaggctatccaacgtaccattctcatgatgggtcgttatgttgaagctattgaagatgtcccatctggtaacatctgtggtttggttggtgttgatcaattcttggttaagactggtaccattaccactttcaaggatgcccacaacttgaaggtcatgaaattcagtgtatctcctgtagtacgtgttgctgttgaacctaagaaccctgctgatttgccaaaacttgtagaaggtttgaaacgtttgaccaaatccgatcctatggtccaatgtatcattgaagaatctggtgagcacatcattgctggtgccggagaattgcatcttgaaatttgccttaaggatcttgaagaagatcatgcctgcattcccattaagaaatctgaccctgttgtatcctaccgtgagacagtaagtgaagagtctgatcagatgtgcctctcaaaatcacccaacaaacacaacagattgttcatgaaagcttgtcctatgcctgatggacttgctgaagatattgatgatggtaaagttaacccacgtgatgacttcaaagtccgtgcccgttatcttactgagaaatatgactatgatataactgaagcccgtaagatctggtgctttggacctgatggtactggacccaacatccttgttgattgtactaagggagtgcaatatcttaatgaaatcaaagactctgtggtagctggtttccaatgggcaaccaaagaaggtgtcttgtctgaagaaaacttgagaggtgttagattcaacatttatgatgttaccttacacgctgatgctatccatcgtggaggtggtcaaatcattccaacaacccgtaggtgtttgtatgcttgtttaatgacagctgcacccagacttatggaacctatctacaagtgtgaaattatgtgtcctgaagttgctgttggtggtatttatggtgtattgaacagaagacgtggtcacgtatttgaagaagctcaaatcgctggtacacctatgttcttagtaaaagcttacttacctgtaaacgaatcattcggtttcactgctgatttacgttccaacactggaggtcaggccttcccacaatcagtcttcgatcactggcaaatcttacctggtgacccaatggaacccagtaccaaaccctatggaattgtgcaggacacacgtaaaagaaagggtcttaaagaaggacttccagacctggcacaatatctggataaattataaacaactaagaaacttaatttatgtacagattatttaataaaattatttcaatttactcaacggtttttatagttaattgtatttttgatatttttattctgataagttttcagttctctcaaattgatggcaacactagaaatgaaataaactaaataatctgactaatattttatgtttgttatatatatttttgttaacagtccagatatttgtatatttattaatttgacatcaaaagtaaatctgatgaaacatttttt

SEQ ID NO: 3878 - DNA, 2898 bp, Diabrotica virgifera
  SmartBlast Evalue=0; Info=Elongation factor 2 n=15 Tax= Pancrustacea RepID=EF2_DROME
cggcgtggcagagagtcggtctctttctttcacgggagtgcgccatcgttggcgtatcgtaatttttggttgtgcttgagaaaatcgtcaaacatccaaaatggtgaacttcaccgtagatgaaattagggccatgatggacaaaaagaggaacatccgtaacatgtccgtcattgcccatgtggaccatggtaaatctacattaacagattctctagtatcaaaagctggtattattgctggtgccaaagctggagaaaccagattcacagacacaaggaaagatgaacaggaacgttgtattaccatcaaatcaactgccatatctatgttcttcgagttagatgataaagatcttgtgttcatcaccaacgctgaccaacgtgagaaagatgtgaaaggtttcttgattaaccttattgactctcctggacacgttgatttctcatcagaagtaacagctgcccttcgtgtcactgatggtgcccttgtagtagtagattgtgtatctggtgtatgtgtacagactgaaactgtactccgtcaagctattgcagaacgtattaagccaattttattcatgaacaagatggaccgtgccctcttagaattacagttggaatctgaagaactttaccagactttccaacgtattgttgaaaacgtcaacgtcattattgccacctacaacgatgattcaggtccaatgggtgaagtcagagttgaccccagcaaaggttcagttggttttggatcaggtctccacggatgggctttcactctcaaacaattctctgaaatgtatgccgagaaattcaagattgatgtagttaaactaatgaaccgtttgtggggtgagaacttcttcaaccccaaaaccaagaaatggtccaaacaaaaggatgatgataacaaacgttcattctgtatgtacatcttagatccaatctacaagatttttgactccatcatgaactacaagaaagaagaatatgaagcactccttccaaaattgggtattgccttaaaacatgaagataaagacaaagatggtaaacaattattgaaagtagttatgcgtacctggttgccagctggagaagctttacttcagatgatagccattcacttaccatcacctgtggtagcacagaaatacagaatggaaatgttgtacgaaggacctcatgatgatgaagcagctgttggtatcaagaactgtgatccaaatgcacctcttatgatgtatgtatctaaaatggtacccacttctgacaaaggtcgtttctatgcttttggtcgtgtattctctggtaaagtagctactggtatgaaagcccgtatcatgggacccaactacacccctggcaaaaaggaagatttgtatgaaaaggctatccaacgtaccattctcatgatgggtcgttatgttgaagctattgaagatgtcccatctggtaacatctgtggtttggttggtgttgatcaattcttggttaagactggtaccattaccactttcaaggatgcccacaacttgaaggtcatgaaattcagtgtatctcctgtagtacgtgttgctgttgaacctaagaaccctgctgatttgccaaaacttgtagaaggtttgaaacgtttgaccaaatccgatcctatggtccaatgtatcattgaagaatctggtgagcacatcattgctggtgccggagaattgcatcttgaaatttgccttaaggatcttgaagaagatcatgcctgcattcccattaagaaatctgaccctgttgtatcctaccgtgagacagtaagtgaagagtctgatcagatgtgcctctcaaaatcacccaacaaacacaacagattgttcatgaaagcttgtcctatgcctgatggacttgctgaagatattgatgatggtaaagttaacccacgtgatgacttcaaagtccgtgcccgttatcttactgagaaatatgactatgatataactgaagcccgtaagatctggtgctttggacctgatggtactggacccaacatccttgttgattgtactaagggagtgcaatatcttaatgaaatcaaagactctgtggtagctggtttccaatgggcaaccaaagaaggtgtcttgtctgaagaaaacttgagaggtgttagattcaacatttatgatgttaccttacacgctgatgctatccatcgtggaggtggtcaaatcattccaacaacccgtaggtgtttgtatgcttgtttaatgacagctgcacccagacttatggaacctatctacaagtgtgaaattatgtgtcctgaagttgctgttggtggtatttatggtgtattgaacagaagacgtggtcacgtatttgaagaagctcaaatcgctggtacacctatgttcttagtaaaagcttacttacctgtaaacgaatcattcggtttcactgctgatttacgttccaacactggaggtcaggccttcccacaatcagtcttcgatcactggcaaatcttacctggtgacccaatggaacccagtaccaaaccctatggaattgtgcaggacacacgtaaaagaaagggtcttaaagaaggacttccagacctggcacaatatctggataaattataaacaactaagaaacttaatttatgtacagattatttaataaaattatttcaatttactcaacggtttttatagttaattgtatttttgatatttttattctgataagttttcagttctctcaaattgatggcaacactagaaatgaaataaactaaataatctgactaatattttatgtttgttatatatatttttgttaacagtccagatatttgtatatttattaatttgacatcaaaagtaaatctgatgaaacatttttt

SEQ ID NO: 3879 - DNA, 1871 bp, Diabrotica virgifera
  SmartBlast Evalue=5E-52; Info=Female neotenic-specific protein 1 n=1 Tax=Cryptotermes secundus RepID=A6Y7R8_9NEOP
ggacgacttagtcaaatagcagcatcatgcatttaaaattagcagttttggcttttttgttgtactttgcaaataaaagggcaattgcatcccctttaagtgcaacacactacgaagacgatgatttaatagttgaattggagaatttaggcaaaattcgtggacatattcttcaaagtaacgaaggaaaagatttctacgcttttcaagatgttcactatgcagaatccacagcaggaaataacagatttaggccccccaaacctcgtgctccttgggaaggaatattgaatgcaacagaaaacaaagtagtttgtccacaagcagacaacccagatgcaagtgaagactgcttggttttgaacgtttatacaccagtaaaacccaattctgacgtattattaccagtattcttttttattcctggcggagcattcgtcactttcagtgcccaaatatcaaatttggacccaaagtatttggttgattatgatatagtaatcgtaacaatcaactatcgactgggatcatttggatttttaacaacacttgatgaaactatccccggtaatttaggactaaaggatcaacttctggcccttaaatggacacatgagcatatccataaatttggaggagatgctaacaaattaacgttaggtggacaaagtgctgggggtatgtctactggatttcatttgctcagtagagcatctaaaggcttatttaggagcgttattcaacaaagtggctcatcaatatccagtgtcttttatccaataaacgatagaaaactggcatttgaatttggtaaagccttaaacagttcatttacatcaacccactcaagagatttgttagaactgttgcaacaggcatctttttcagatctactggctctcaatactaagttcacctctggagtcacaactggttttatggatggcttgacgtttagacccgttatcgaggatgaccacgaagatgctattgtaaccgaaccaatgcaggctgctctatcgaacggccgttttaacagagtacctgttctcatcggcttcaattctgaagaatctttggctttcctaggactaattggagaacaaaatatcgaagaaagggccaaattactagatgaaaatccagcaaatgtagcagaagccctcaatgtagctgaagaagacaaagaaaacgttggtaaacaattaaaagcattatatacttcttcttcttttacggatgatagagatgcattgataacgtttacaagtgacgcagtttttgtacgatcaataatacgtcaagccgaaagcatatctaggcacgtacctgtgtatctgtatgacctaacatatttgccagaggatagtactgctcaaggagtcgcgcatggagtagacatgcggtatttgtttggtggagattctcatggcctagtatttaatgaaaatctccgaaaatctttattaaagttttggactaattttattatataccaagaccccactcctattttcgatgaagatcttcaagacgtcatttggtcacaagtaaaacatgacgctgccgctgtaaagtacttagaaatagattcgcagttcacactgaaggaaaatcccaaaaattataacagtattaagaagctgttggatcattacatacgtcaaccctacataacttattaaaagccagtgttgccaatcgcatttctctagattatccgatgatcgctcgaaaaatatccgattcgtcacgaaaaggtacgctaggtcaaaaattattctgttattaaaatcaatgttgacaatgttattcttgtagtcccttaacaaccatcaaataacaaaattcgttgttcgtacgccaattag

SEQ ID NO: 3880 - DNA, 1854 bp, Diabrotica virgifera
  SmartBlast Evalue=5E-52; Info=Female neotenic-specific protein 1 n=1 Tax=Cryptotermes secundus RepID=A6Y7R8_9NEOP
agcagcatcatgcatttaaaattagcagttttggcttttttgttgtactttgcaaataaaagggcaattgcatcccctttaagtgcaacacactacgaagacgatgatttaatagttgaattggagaatttaggcaaaattcgtggacatattcttcaaagtaacgaaggaaaagatttctacgcttttcaagatgttcactatgcagaatccacagcaggaaataacagatttaggccccccaaacctcgtgctccttgggaaggaatattgaatgcaacagaaaacaaagtagtttgtccacaagcagacaacccagatgcaagtgaagactgcttggttttgaacgtttatacaccagtaaaacccaattctgacgtattattaccagtattcttttttattcctggcggagcattcgtcactttcagtgcccaaatatcaaatttggacccaaagtatttggttgattatgatatagtaatcgtaacaatcaactatcgactgggatcatttggatttttaacaacacttgatgaaactatccccggtaatttaggactaaaggatcaacttctggcccttaaatggacacatgagcatatccataaatttggaggagatgctaacaaattaacgttaggtggacaaagtgctgggggtatgtctactggatttcatttgctcagtagagcatctaaaggcttatttaggagcgttattcaacaaagtggctcatcaatatccagtgtcttttatccaataaacgatagaaaactggcatttgaatttggtaaagccttaaacagttcatttacatcaacccactcaagagatttgttagaactgttgcaacaggcatctttttcagatctactggctctcaatactaagttcacctctggagtcacaactggttttatggatggcttgacgtttagacccgttatcgaggatgaccacgaagatgctattgtaaccgaaccaatgcaggctgctctatcgaacggccgttttaacagagtacctgttctcatcggcttcaattctgaagaatctttggctttcctaggactaattggagaacaaaatatcgaagaaagggccaaattactagatgaaaatccagcaaatgtagcagaagccctcaatgtagctgaagaagacaaagaaaacgttggtaaacaattaaaagcattatatacttcttcttcttttacggatgatagagatgcattgataacgtttacaagtgacgcagtttttgtacgatcaataatacgtcaagccgaaagcatatctaggcacgtacctgtgtatctgtatgacctaacatatttgccagaggatagtactgctcaaggagtcgcgcatggagtagacatgcggtatttgtttggtggagattctcatggcctagtatttaatgaaaatctccgaaaatctttattaaagttttggactaattttattatataccaagaccccactcctattttcgatgaagatcttcaagacgtcatttggtcacaagtaaaacatgacgctgccgctgtaaagtacttagaaatagattcgcagttcacactgaaggaaaatcccaaaaattataacagtattaagaagctgttggatcattacatacgtcaaccctacataacttattaaaagccagtgttgccaatcgcatttctctagattatccgatgatcgctcgaaaaatatccgattcgtcacgaaaaggtacgctaggtcaaaaattattctgttattaaaatcaatgttgacaatgttattcttgtagtcccttaacaaccatcaaataacaaaattcgttgttcgtacgccaattag

SEQ ID NO: 3881 - DNA, 1717 bp, Diabrotica virgifera
  SmartBlast Evalue=9E-56; Info=Female neotenic-specific protein 1 n=1 Tax=Cryptotermes secundus RepID=A6Y7R8_9NEOP
ggacgacttagtcaaatagcagcatcatgcatttaagattagcagttttgtgttttttgttgtactttgcaaataaaagggcaattgcatcccctttaagtgcaacacactctgaagacgatgatttaatagttgaattggagaatttaggcaaaattcgtggacatattcttcaaagtaacgaaggaaaagatttctacgcttttcaagatgttcactatggcgaatccacagcaggaaataacagatttaggccccccaaacctcgtgctccttgggaaggaatattgaatgcaacagaaaacaaagtagtttgtccacaatcaaacagcccagatgcaggtgaagactgcttggttttgaacgtttatacaccagtaaaacccagttctgacgcatcattaccagtatacttttttattcctggcggagcattcgtcagtttgagtggaaaaatatcatatgtggacccaaagtatttggttgattatgatatagtaatcgtaacaatcaactatcgactgggatcatttggatttttaacaacacttgatgaaaatatccccggtaatttaggactaaaggatcaacttctggccctcaaatggacacatgatcatatccatcaatttggaggagatgctaacaaattaacagtaggtggacaaagtgctggaggtatgtctgctggatttcatttgctaagtagagcaagtaaaggcttatttaggggcattattcaaggaagtggctcatcaatatccagtgtcttttatccaacaaacaatacagaactggcatttgaatttggtaaagccttaaatagttcatttacatcaaccgactcaagagatttgttagaactgttgcaacaagcatcttattcagatctattggctctcaataataagttcacctctggagtcacatctggttttatggatggcttgacgtttaaacccgttatcgaggatgacaacgatgatgcttttataacggaaccaatgcatgctgctctattggacggccgttttaacttagtacctgttctcatcggcttcaattctgaagaatctttgactttcgtaagacaaattggagaacaaaatatcgaagaaagagccaaattactagatgaaaatccagcaaatgtagcagaagcccttaatgtagctgaagaagacagagaaaacgttggtaaaaaattaaaagcattatatacttcttcttcttttacggatgatagaaatgcattgataacgtttacaagtgacgaagtttttggacgagcagcaatacgtcaagctgaaagcacatctaagcacgtacctgtatatctgtatgagctaacatggatgccagagaatagtactgctcaaggagtcgggcatggagtagacatgccgtatttgtggggtggagattctcgtgggcaattaattaatgaagatcttcgaaaacctatattaaagtggtggactaattttattaaataccaaaaccccactcctgaaaaggatgaagatcttcaaaacgtcatttggtcagaagtaaaacctgacgctctaaagtatttagaaatagattcgcagttcacagtgaatgaaaatcccaaaaattataacagtattaaggatctgttggatctttacatacgtccaccctacataacttattaaaagccaaagaataaaacagaatattataaatatggaat

SEQ ID NO: 3882 - DNA, 1700 bp, Diabrotica virgifera
  SmartBlast Evalue=9E-56; Info=Female neotenic-specific protein 1 n=1 Tax=Cryptotermes secundus RepID=A6Y7R8_9NEOP
agcagcatcatgcatttaagattagcagttttgtgttttttgttgtactttgcaaataaaagggcaattgcatcccctttaagtgcaacacactctgaagacgatgatttaatagttgaattggagaatttaggcaaaattcgtggacatattcttcaaagtaacgaaggaaaagatttctacgcttttcaagatgttcactatggcgaatccacagcaggaaataacagatttaggccccccaaacctcgtgctccttgggaaggaatattgaatgcaacagaaaacaaagtagtttgtccacaatcaaacagcccagatgcaggtgaagactgcttggttttgaacgtttatacaccagtaaaacccagttctgacgcatcattaccagtatacttttttattcctggcggagcattcgtcagtttgagtggaaaaatatcatatgtggacccaaagtatttggttgattatgatatagtaatcgtaacaatcaactatcgactgggatcatttggatttttaacaacacttgatgaaaatatccccggtaatttaggactaaaggatcaacttctggccctcaaatggacacatgatcatatccatcaatttggaggagatgctaacaaattaacagtaggtggacaaagtgctggaggtatgtctgctggatttcatttgctaagtagagcaagtaaaggcttatttaggggcattattcaaggaagtggctcatcaatatccagtgtcttttatccaacaaacaatacagaactggcatttgaatttggtaaagccttaaatagttcatttacatcaaccgactcaagagatttgttagaactgttgcaacaagcatcttattcagatctattggctctcaataataagttcacctctggagtcacatctggttttatggatggcttgacgtttaaacccgttatcgaggatgacaacgatgatgcttttataacggaaccaatgcatgctgctctattggacggccgttttaacttagtacctgttctcatcggcttcaattctgaagaatctttgactttcgtaagacaaattggagaacaaaatatcgaagaaagagccaaattactagatgaaaatccagcaaatgtagcagaagcccttaatgtagctgaagaagacagagaaaacgttggtaaaaaattaaaagcattatatacttcttcttcttttacggatgatagaaatgcattgataacgtttacaagtgacgaagtttttggacgagcagcaatacgtcaagctgaaagcacatctaagcacgtacctgtatatctgtatgagctaacatggatgccagagaatagtactgctcaaggagtcgggcatggagtagacatgccgtatttgtggggtggagattctcgtgggcaattaattaatgaagatcttcgaaaacctatattaaagtggtggactaattttattaaataccaaaaccccactcctgaaaaggatgaagatcttcaaaacgtcatttggtcagaagtaaaacctgacgctctaaagtatttagaaatagattcgcagttcacagtgaatgaaaatcccaaaaattataacagtattaaggatctgttggatctttacatacgtccaccctacataacttattaaaagccaaagaataaaacagaatattataaatatggaat

SEQ ID NO: 3883 - DNA, 1775 bp, Diabrotica virgifera
  SmartBlast Evalue=0; Info=Eukaryotic initiation factor 4A-II n= 4 Tax=Apocrita RepID=E1ZX82_9HYME
ttatcaccacttttattaagtcttaatgtacaaaaagtctatgtgataatccagaatttccttctacatcttttacgattataataacctttccagataccaactaaacccttacagagacgaacgaactgtgtggagcaaatcacaacacgcctacgaccgtcggtacccctcgaaacgaggggacctcgggcctccatacagccacacgtctcccgaatgataataaacactaactatatgtatatcaaaaaattaaaaatacactagagattaaaccgaaacaattaaatatatttaaaaattgacactcagagagttcgtggatgattgtgcctcgaacggcgttgtcctaaagaaacgtgatggggcgcagcgcacaatattcgcatatatatgtcgcagcagatttagcatagaaagctaatactcacaccaaagatacttcaggagacgtcgtagaacacaccaacactctttattagctcgcttttatatgagatccgcaacgttcataggcatttcatctatctttgtattatagaactgttcgatatccttaagcgtgcgtttatcatcgtccgttacgaaatttattgctacacccttacgaccaaatcgaccacctcgaccaatcctgtgaatgtaattttctctattagaaggcaaatcataattaataactagggaaacttgctgtacatctatacctctcgctaacagatcagtggttattaaaaccctagatgatcctgttctgaactgacgcataataacgtcacgctctctttgttccatatcaccatgcatagcggaaacagtgaagtctctcttgtgcatgttttctgttaaccaatcgaccttgcgacgggtattgcaaaagattacagcctgcgtaatcgaaagagtatcatagagatcacataatgtctctaatttccaatcttctttttctacatatacataaaattgtttaataccttctaaggtaagttcctcttttttgacaagtatccgaacaggactcctcataaaggattttgtcacgtctagcacatcgtttggcatggtagccgaaagtaaaattacctgtacgtcagtgttcaacattttaaacacgtcatgaatttgatctttaaaaccccttgacaacatttcatcagcctcatccaaaacaaacattttaatatgagtcggccttagggctctcctcgttatcatatcgtaaactctaccaggtgtaccaacaacaacatgtacgccagtttcaagttttcttatgtcttctcgtacattggtaccaccaatacatgcatgacactgcgctgacatgaaatctcctagggcaattactactttttggatctgttgagccaattcacgagttggtgccaatataagagcttggcactccctcactgacgtgtcaatttgttgtaaaatagagatggagaatgttgcagtcttaccagtacctgactgagcctgagcaataacatcgtgtccctttacacaaggaatgatggctctctgttggatagcagaaggtttttcaaaaccataggcataaattcctcttaaaagttcctcttttaggttcatgtcgtcgaaattatcgaccacctcttcccagttggattcaataatgccatcaggctccatacctggtgggccgtcatagccttggggctggctgtcttcattagctgggccattcttgtcccactcttcacgacgatctggcatagacatgtctactccgcgtatagctaaac

SEQ ID NO: 3884 - DNA, 1769 bp, Diabrotica virgifera
  SmartBlast Evalue=0; Info=Eukaryotic initiation factor 4A-II n= 4 Tax=Apocrita RepID=E1ZX82_9HYME
ttatcaccacttttattaagtcttaatgtacaaaaagtctatgtgataatccagaatttccttctacatcttttacgattataataacctttccagataccaactaaacccttacagagacgaacgaactgtgtggagcaaatcacaacacgcctacgaccgtcggtacccctcgaaacgaggggacctcgggcctccatacagccacacgtctcccgaatgataataaacactaactatatgtatatcaaaaaattaaaaatacactagagattaaaccgaaacaattaaatatatttaaaaattgacactcagagagttcgtggatgattgtgcctcgaacggcgttgtcctaaagaaacgtgatggggcgcagcgcacaatattcgcatatatatgtcgcagcagatttagcatagaaagctaatactcacaccaaagatacttcaggagacgtcgtagaacacaccaacactctttattagctcgcttttatatgagatccgcaacgttcataggcatttcatctatctttgtattatagaactgttcgatatccttaagcgtgcgtttatcatcgtccgttacgaaatttattgctacacccttacgaccaaatcgaccacctcgaccaatcctgtgaatgtaattttctctattagaaggcaaatcataattaataactagggaaacttgctgtacatctatacctctcgctaacagatcagtggttattaaaaccctagatgatcctgttctgaactgacgcataataacgtcacgctctctttgttccatatcaccatgcatagcggaaacagtgaagtctctcttgtgcatgttttctgttaaccaatcgaccttgcgacgggtattgcaaaagattacagcctgcgtaatcgaaagagtatcatagagatcacataatgtctctaatttccaatcttctttttctacatatacataaaattgtttaataccttctaaggtaagttcctcttttttgacaagtatccgaacaggactcctcataaaggattttgtcacgtctagcacatcgtttggcatggtagccgaaagtaaaattacctgtacgtcagtgttcaacattttaaacacgtcatgaatttgatctttaaaaccccttgacaacatttcatcagcctcatccaaaacaaacattttaatatgagtcggccttagggctctcctcgttatcatatcgtaaactctaccaggtgtaccaacaacaacatgtacgccagtttcaagttttcttatgtcttctcgtacattggtaccaccaatacatgcatgacactgcgctgacatgaaatctcctagggcaattactactttttggatctgttgagccaattcacgagttggtgccaatataagagcttggcactccctcactgacgtgtcaatttgttgtaaaatagagatggagaatgttgcagtcttaccagtacctgactgagcctgagcaataacatcgtgtccctttacacaaggaatgatggctctctgttggatagcagaaggtttttcaaaaccataggcataaattcctcttaaaagttcctcttttaggttcatgtcgtcgaaattatcgaccacctcttcccagttggattcaataatgccatcaggctccatacctggtgggccgtcatagccttggggctggctgtcttcattagctgggccattcttgtcccactcttcacgacgatctggcatagacatgtctactccgcgtatag

SEQ ID NO: 3885 - DNA, 1497 bp, Diabrotica virgifera
  SmartBlast Evalue=0; Info=Eukaryotic initiation factor 4A-II n= 4 Tax=Apocrita RepID=E1ZX82_9HYME
ttaaaaattacgaaataaattaaaaaatgtgtaaaaataggaaaatggagtatggaaaacgggttttaaataagaagcaaaaccactgaattgtaattttaaaatggaaattagttctttatttccaaattttggtgtccacaggattgacgacgcaccaaagatacttcaggagacgtcgtagaacacaccaacactctttattagctcgcttttatatgagatccgcaacgttcataggcatttcatctatctttgtattatagaactgttcgatatccttaagcgtgcgtttatcatcgtccgttacgaaatttattgctacacccttacgaccaaatcgaccacctcgaccaatcctgtgaatgtaattttctctattagaaggcaaatcataattaataactagggaaacttgctgtacatctatacctctcgctaacagatcagtggttattaaaaccctagatgatcctgttctgaactgacgcataataacgtcacgctctctttgttccatatcaccatgcatagcggaaacagtgaagtctctcttgtgcatgttttctgttaaccaatcgaccttgcgacgggtattgcaaaagattacagcctgcgtaatcgaaagagtatcatagagatcacataatgtctctaatttccaatcttctttttctacatatacataaaattgtttaataccttctaaggtaagttcctcttttttgacaagtatccgaacaggactcctcataaaggattttgtcacgtctagcacatcgtttggcatggtagccgaaagtaaaattacctgtacgtcagtgttcaacattttaaacacgtcatgaatttgatctttaaaaccccttgacaacatttcatcagcctcatccaaaacaaacattttaatatgagtcggccttagggctctcctcgttatcatatcgtaaactctaccaggtgtaccaacaacaacatgtacgccagtttcaagttttcttatgtcttctcgtacattggtaccaccaatacatgcatgacactgcgctgacatgaaatctcctagggcaattactactttttggatctgttgagccaattcacgagttggtgccaatataagagcttggcactccctcactgacgtgtcaatttgttgtaaaatagagatggagaatgttgcagtcttaccagtacctgactgagcctgagcaataacatcgtgtccctttacacaaggaatgatggctctctgttggatagcagaaggtttttcaaaaccataggcataaattcctcttaaaagttcctcttttaggttcatgtcgtcgaaattatcgaccacctcttcccagttggattcaataatgccatcaggctccatacctggtgggccgtcatagccttggggctggctgtcttcattagctgggccattcttgtcccactcttcacgacgatctggcatagacatgtctactccgcgtatagctaaac

SEQ ID NO: 3886 - DNA, 1491 bp, Diabrotica virgifera
  SmartBlast Evalue=0; Info=Eukaryotic initiation factor 4A-II n= 4 Tax=Apocrita RepID=E1ZX82_9HYME
ttaaaaattacgaaataaattaaaaaatgtgtaaaaataggaaaatggagtatggaaaacgggttttaaataagaagcaaaaccactgaattgtaattttaaaatggaaattagttctttatttccaaattttggtgtccacaggattgacgacgcaccaaagatacttcaggagacgtcgtagaacacaccaacactctttattagctcgcttttatatgagatccgcaacgttcataggcatttcatctatctttgtattatagaactgttcgatatccttaagcgtgcgtttatcatcgtccgttacgaaatttattgctacacccttacgaccaaatcgaccacctcgaccaatcctgtgaatgtaattttctctattagaaggcaaatcataattaataactagggaaacttgctgtacatctatacctctcgctaacagatcagtggttattaaaaccctagatgatcctgttctgaactgacgcataataacgtcacgctctctttgttccatatcaccatgcatagcggaaacagtgaagtctctcttgtgcatgttttctgttaaccaatcgaccttgcgacgggtattgcaaaagattacagcctgcgtaatcgaaagagtatcatagagatcacataatgtctctaatttccaatcttctttttctacatatacataaaattgtttaataccttctaaggtaagttcctcttttttgacaagtatccgaacaggactcctcataaaggattttgtcacgtctagcacatcgtttggcatggtagccgaaagtaaaattacctgtacgtcagtgttcaacattttaaacacgtcatgaatttgatctttaaaaccccttgacaacatttcatcagcctcatccaaaacaaacattttaatatgagtcggccttagggctctcctcgttatcatatcgtaaactctaccaggtgtaccaacaacaacatgtacgccagtttcaagttttcttatgtcttctcgtacattggtaccaccaatacatgcatgacactgcgctgacatgaaatctcctagggcaattactactttttggatctgttgagccaattcacgagttggtgccaatataagagcttggcactccctcactgacgtgtcaatttgttgtaaaatagagatggagaatgttgcagtcttaccagtacctgactgagcctgagcaataacatcgtgtccctttacacaaggaatgatggctctctgttggatagcagaaggtttttcaaaaccataggcataaattcctcttaaaagttcctcttttaggttcatgtcgtcgaaattatcgaccacctcttcccagttggattcaataatgccatcaggctccatacctggtgggccgtcatagccttggggctggctgtcttcattagctgggccattcttgtcccactcttcacgacgatctggcatagacatgtctactccgcgtatag

SEQ ID NO: 3887 - DNA, 1463 bp, Diabrotica virgifera
  SmartBlast Evalue=1E-84; Info=Transgelin n=1 Tax=Bombyx mori RepID=Q1HQ70_BOMMO
ttttcttgcgagcaactccgtggacttttggacacgttctccggagtgtgtctactgcacaactcaactgccgttcgcagctcacgtttcacaagtttcacgttagtcgagttcatagttcgtcgtagttcgggtgcctttaattcgagtttttgtggatatcttcacattttccagaaacaggacaaaatggcaaacaacagggcagcaaagagcggattcgctgcagaagctcaacgaaaggtaaacgccaaatacagcgaagacttggctaaagaaagtctcgaatggatcgtgacgatcacaggagacgaactgaacacagctggtgatatggacaacttttatgaagtacttaaggatggaaccgtattgtgcaaattagtaaataacatccaacccggtatcgttaagaaaattaacacctccacaatggctttcaagtgtatggaaaatatcaacgccttcctagaagctgccaaacaattaggtgtaccacctcaggaaacattccagactgtagatctatgggagaggcagaaccttaactcagttgtcatttgcttgcaatcattaggcaggaaggctgacaaatatggaaaacaatccatcggaccaaaagaagccgaaaagaacgagagaatgttctcagaagagaagcttcgagctggtcaaacaatcataggacttcaaatgggaagcaacaaaggtgcaacccaatcagggatcaatttcgggaacacaagacacatgtaaattaagaacaaatcaacttggaaccattccagcggtttgatgttaaaactatttcaagagttttaacgttaaaactgttcggtactcaaaaataacagagtcttttatagtacttagaaccacatagttgcctgttagatgttaggtacttagcctactgtttgtcgttgtataacttttaaactcaagccagaaacctgatcttttggttgaattaaaattgtgatattataaagaaatatacgagtatttcagaaccaaattgtttacacttttggagacataattgcaccattacatagctaacacttctttctgccaagtatttcaaacacggtactgttcaactaagatttcgatctttcttgagtactaaagaaatcaatttcttccatcgttatatataacatagcaagtagtattacaatatatgcaacactgaattagaagtttttactgaaaataacgtttttgaaatttcaacattttccaagagttttagcttgagttttaagattctgctgtttttgatcatttttatataagtatatttttaagactattatttatgaaatatatgttttgttaatacatcgaaaatatatattagtgtagatttacaagctatttttgatcgatttttaaacagtattgttgtgaacattcctgttaaacacttccataaacaataaagtaaggaatagcgt

SEQ ID NO: 3888 - DNA, 1460 bp, Diabrotica virgifera
  SmartBlast Evalue=1E-84; Info=Transgelin n=1 Tax=Bombyx mori RepID=Q1HQ70_BOMMO
ttttcttgcgagcaactccgtggacttttggacacgttctccggagtgtgtctactgcacaactcaactgccgttcgcagctcacgtttcacaagtttcacgttagtcgagttcatagttcgtcgtagttcgggtgcctttaattcgagtttttgtggatatcttcacattttccagaaacaggacaaaatggcaaacaacagggcagcaaagagcggattcgctgcagaagctcaacgaaaggtaaacgccaaatacagcgaagacttggctaaagaaagtctcgaatggatcgtgacgatcacaggagacgaactgaacacagctggtgatatggacaacttttatgaagtacttaaggatggaaccgtattgtgcaaattagtaaataacatccaacccggtatcgttaagaaaattaacacctccacaatggctttcaagtgtatggaaaatatcaacgccttcctagaagctgccaaacaattaggtgtaccacctcaggaaacattccagactgtagatctatgggagaggcagaaccttaactcagttgtcatttgcttgcaatcattaggcaggaaggctgacaaatatggaaaacaatccatcggaccaaaagaagccgaaaagaacgagagaatgttctcagaagagaagcttcgagctggtcaaacaatcataggacttcaaatgggaagcaacaaaggtgcaacccaatcagggatcaatttcgggaacacaagacacatgtaaattaagaacaaatcaacttggaaccattccagcggtttgatgttaaaactatttcaagagttttaacgttaaaactgttcggtactcaaaaataacagagtcttttatagtacttagaaccacatagttgcctgttagatgttaggtacttagcctactgtttgtcgttgtataacttttaaactcaagccagaaacctgatcttttggttgaattaaaattgtgatattataaagaaatatacgagtatttcagaaccaaattgtttacacttttggagacataattgcaccattacatagctaacacttctttctgccaagtatttcaaacacggtactgttcaactaagatttcgatctttcttgagtactaaagaaatcaatttcttccatcgttatatataacatagcaagtagtattacaatatatgcaacactgaattagaagtttttactgaaaataacgtttttgaaatttcaacattttccaagagttttagcttgagttttaagattctgctgtttttgatcatttttatataagtatatttttaagactattatttatgaaatatatgttttgttaatacatcgaaaatatatattagtgtagatttacaagctatttttgatcgatttttaaacagtattgttgtgaacattcctgttaaacacttccataaacaataaagtaaggaatag

SEQ ID NO: 3889 - DNA, 1363 bp, Diabrotica virgifera
  SmartBlast Evalue=2E-80; Info=Transgelin n=1 Tax=Bombyx mori RepID=Q1HQ70_BOMMO
gttggattcgtttagttgatagatattttttgtcattcctgttagtaacttcagtgagtacactcgtgtttttgaactgattcaacatgtccctggaaacaagagctgccaaaagtgggcttgccgcagaaactcaaaagagggtaaacgccaaatacagcgaagacttggctaaagaaagtctcgaatggatcgtgacgatcacaggagacgaactgaacacagctggtgatatggacaacttttatgaagtacttaaggatggaaccgtattgtgcaaattagtaaataacatccaacccggtatcgttaagaaaattaacacctccacaatggctttcaagtgtatggaaaatatcaacgccttcctagaagctgccaaacaattaggtgtaccacctcaggaaacattccagactgtagatctatgggagaggcagaaccttaactcagttgtcatttgcttgcaatcattaggcaggaaggctgacaaatatggaaaacaatccatcggaccaaaagaagccgaaaagaacgagagaatgttctcagaagagaagcttcgagctggtcaaacaatcataggacttcaaatgggaagcaacaaaggtgcaacccaatcagggatcaatttcgggaacacaagacacatgtaaattaagaacaaatcaacttggaaccattccagcggtttgatgttaaaactatttcaagagttttaacgttaaaactgttcggtactcaaaaataacagagtcttttatagtacttagaaccacatagttgcctgttagatgttaggtacttagcctactgtttgtcgttgtataacttttaaactcaagccagaaacctgatcttttggttgaattaaaattgtgatattataaagaaatatacgagtatttcagaaccaaattgtttacacttttggagacataattgcaccattacatagctaacacttctttctgccaagtatttcaaacacggtactgttcaactaagatttcgatctttcttgagtactaaagaaatcaatttcttccatcgttatatataacatagcaagtagtattacaatatatgcaacactgaattagaagtttttactgaaaataacgtttttgaaatttcaacattttccaagagttttagcttgagttttaagattctgctgtttttgatcatttttatataagtatatttttaagactattatttatgaaatatatgttttgttaatacatcgaaaatatatattagtgtagatttacaagctatttttgatcgatttttaaacagtattgttgtgaacattcctgttaaacacttccataaacaataaagtaaggaatagcgt

SEQ ID NO: 3890 - DNA, 1360 bp, Diabrotica virgifera
  SmartBlast Evalue=2E-80; Info=Transgelin n=1 Tax=Bombyx mori RepID=Q1HQ70_BOMMO
gttggattcgtttagttgatagatattttttgtcattcctgttagtaacttcagtgagtacactcgtgtttttgaactgattcaacatgtccctggaaacaagagctgccaaaagtgggcttgccgcagaaactcaaaagagggtaaacgccaaatacagcgaagacttggctaaagaaagtctcgaatggatcgtgacgatcacaggagacgaactgaacacagctggtgatatggacaacttttatgaagtacttaaggatggaaccgtattgtgcaaattagtaaataacatccaacccggtatcgttaagaaaattaacacctccacaatggctttcaagtgtatggaaaatatcaacgccttcctagaagctgccaaacaattaggtgtaccacctcaggaaacattccagactgtagatctatgggagaggcagaaccttaactcagttgtcatttgcttgcaatcattaggcaggaaggctgacaaatatggaaaacaatccatcggaccaaaagaagccgaaaagaacgagagaatgttctcagaagagaagcttcgagctggtcaaacaatcataggacttcaaatgggaagcaacaaaggtgcaacccaatcagggatcaatttcgggaacacaagacacatgtaaattaagaacaaatcaacttggaaccattccagcggtttgatgttaaaactatttcaagagttttaacgttaaaactgttcggtactcaaaaataacagagtcttttatagtacttagaaccacatagttgcctgttagatgttaggtacttagcctactgtttgtcgttgtataacttttaaactcaagccagaaacctgatcttttggttgaattaaaattgtgatattataaagaaatatacgagtatttcagaaccaaattgtttacacttttggagacataattgcaccattacatagctaacacttctttctgccaagtatttcaaacacggtactgttcaactaagatttcgatctttcttgagtactaaagaaatcaatttcttccatcgttatatataacatagcaagtagtattacaatatatgcaacactgaattagaagtttttactgaaaataacgtttttgaaatttcaacattttccaagagttttagcttgagttttaagattctgctgtttttgatcatttttatataagtatatttttaagactattatttatgaaatatatgttttgttaatacatcgaaaatatatattagtgtagatttacaagctatttttgatcgatttttaaacagtattgttgtgaacattcctgttaaacacttccataaacaataaagtaaggaatag

SEQ ID NO: 3891 - DNA, 685 bp, Diabrotica virgifera
taacacgttttccatctttcccgctattttgtccagttattagcgcgctcatcactgtatatatttacataattattcaataaaatatggaaacagaacagatgcaaacgaacgccgaaaatttgagatttgtgaatggcaacacatcactggcaatactgtattcgccccgtgcgtctcccctctacttacagtcacgtgacacgctgtcagattttgtaaggacgttttaacattgagtcttatgggattattttgttaaacttgaatattttattttgtagtgataataaccgaatacaattgttagaattcattagttattaatttatactgtaatttatagtgcaacaaaaatattttctttttcgttaataaagatttattgacataaactgcgatagtgaggttatgtatacataatcaaactgtgggaaagtgaagaatttatatcagattaagtgcatttttttaaatgtctcatttaaacatacacaaagcgtccttacaaaatttcaaaaaaccgccaccatgagcaggtcggtcgattttgctttgacttagtttccaaaattaaagaatttaagtttccaaaatttttgccactatttattattgcgcattatttattttcaattgtttaataaagttgttccatcttatccttgcccatgcgtcataggtt

SEQ ID NO: 3892 - DNA, 553 bp, Diabrotica virgifera
taacacgttttccatctttcccgctattttgtccagttattagcgcgctcatcactgtatatatttacataattattcaataaaatatggaaacagaacagatgcaaacgaacgccgaaaatttgagatttgtgaatggcaacacatcactggcaatactgtattcgccccgtgcgtctcccctctacttacagtcacgtgacacgctgtcagattttgtaaggacgttttaacattgagtcttatgggattattttgttaaacttgaatattttattttgtagtgataataaccgaatacaattgttagaattcattagttattaatttatactgtaatttatagtgcaacaaaaatattttctttttcgttaataaagatttattgacataaactgcgatagtgaggttatgtatacaaaatcaaactgataatcaatattggaaagtgaagaatttatatcagattaagtgcgtttttattttctgtttatattaatacataatatcactagcgtgacacggcattttttttaaattgtttcatttaaac

SEQ ID NO: 3893 - DNA, 517 bp, Diabrotica virgifera
cccgtgcgtctcccctctacttacagtcacgtgacacgctgtcagattttgtaaggacgttttaacattgagtcttatgggattattttgttaaacttgaatattttattttgtagtgataataaccgaatacaattgttagaattcattagttattaatttatactgtaatttatagtgcaacaaaaatattttctttttcgttaataaagatttattgacataaactgcgatagtgaggttatgtatacataatcaaactgtgggaaagtgaagaatttatatcagattaagtgcatttttttaaatgtctcatttaaacatacacaaagcgtccttacaaaatttcaaaaaaccgccaccatgagcaggtcggtcgattttgctttgacttagtttccaaaattaaagaatttaagtttccaaaatttttgccactatttattattgcgcattatttattttcaattgtttaataaagttgttccatcttatccttgcccatgcgtcataggtt

SEQ ID NO: 3894 - DNA, 385 bp, Diabrotica virgifera
cccgtgcgtctcccctctacttacagtcacgtgacacgctgtcagattttgtaaggacgttttaacattgagtcttatgggattattttgttaaacttgaatattttattttgtagtgataataaccgaatacaattgttagaattcattagttattaatttatactgtaatttatagtgcaacaaaaatattttctttttcgttaataaagatttattgacataaactgcgatagtgaggttatgtatacaaaatcaaactgataatcaatattggaaagtgaagaatttatatcagattaagtgcgtttttattttctgtttatattaatacataatatcactagcgtgacacggcattttttttaaattgtttcatttaaac

SEQ ID NO: 3895 - DNA, 863 bp, Diabrotica virgifera
  SmartBlast Evalue=1E-29; Info=Endonuclease-reverse transcriptase n=1 Tax=Bombyx mori RepID=D5LB38_BOMMO
ccgtcagaagttggagatgaagtttttgttttagggacgaaggaaactaagagaagttaggtatacgattttgggtaaataaaatctgacaagcgcagaatatatgattaggaagaaagaaagcatgtgtgctgagagcgtagggttttagtttagggggatagaaaaatattagaagttattattaaaatattagaattacaaaaactattgtagaaaagacaattttctacacatatacttaccttggtacgaacgtcaatgaaaattgggaccattctatagaaatcaaatgtgggatagagaaagcaagatctgcatttcaaaaaatggcaaagttgttcaaatgtcatgatttgtcgatacccataaaagtcagattactacgatgttatatatttcctatactgttgtacggagttgactctcacagacgccacctggaagaaaattgaggcttttgatatgtcgctttatcgtcgagtcctgaagatatcttataccgaccacattactaatgagggtgttttgctgagaatgtaaaaagaaaaagagctgttaatcaaaataaaaacagccaaaatcgaatacctcggtcacatcatgaggaacagtgaaagatatggactgctgcaactggtcttacagggaaaagtagaggaaagcgaggaccaggaaggcgaaggatttcgtggctgaaaaatctacgtacgtggttcaacacaaccactacaaatcttttcagagcagcagtgtgcaaagtacagattgccatgatggtcgccaacatccgaaacggataggcactacaagaagaagaagaattgcactgtgaattgcaagtgagagcactaataaccgac

SEQ ID NO: 3896 - DNA, 824 bp, Diabrotica virgifera
  SmartBlast Evalue=1E-29; Info=Endonuclease-reverse transcriptase n=1 Tax=Bombyx mori RepID=D5LB38_BOMMO
ccgtcagaagttggagatgaagtttttgttttagggacgaaggaaactaagagaagttaggtatacgattttgggtaaataaaatctgacaagcgcagaatatatgattaggaagaaagaaagcatgtgtgctgagagcgtagggttttagtttagggggatagaaaaatattagaagttattattaaaatattagaattacaaaaactattgtagaaaagacaattttctacacatatacttaccttggtacgaacgtcaatgaaaattgggaccattctatagaaatcaaatgtgggatagagaaagcaagatctgcatttcaaaaaatggcaaagttgttcaaatgtcatgatttgtcgatacccataaaagtcagattactacgatgttatatatttcctatactgttgtacggagttgactctcacagacgccacctggaagaaaattgaggcttttgatatgtcgctttatcgtcgagtcctgaagatatcttataccgaccacattactaatgagggtgttttgctgagaatgtaaaaagaaaaagagctgttaatcaaaataaaaacagccaaaatcgaatacctcggtcacatcatgaggaacagtgaaagatatggactgctgcaactggtcttacagggaaaagtagaggaaagcgaggaccaggaaggcgaaggatttcgtggctgaaaaatctacgtacgtggttcaacacaaccactacaaatcttttcagagcagcagtgtgcaaagtacagattgccatgatggtcgccaacatccgaaacggataggcactacaagaagaagaagaa

SEQ ID NO: 3897 - DNA, 303 bp, Diabrotica virgifera
gaataatacagtatacaaaaagttaagaatataaagaggaacggagctgttaaccacaataataaaacaaccaaatcgaatacctctggactatggactctgaatatatggactgctgcaagtagttttacagggagaagaaaaacgatgaccaagaaggcgaagaagatgacaaatcttttcagagcagcagtgtgcaaagtacagattgccatgatggtcgccaacatccgaaacggataggcactacaagaagaagaagaattgcactgtgaattgcaagtgagagcactaataaccgac

SEQ ID NO: 3898 - DNA, 264 bp, Diabrotica virgifera
gaataatacagtatacaaaaagttaagaatataaagaggaacggagctgttaaccacaataataaaacaaccaaatcgaatacctctggactatggactctgaatatatggactgctgcaagtagttttacagggagaagaaaaacgatgaccaagaaggcgaagaagatgacaaatcttttcagagcagcagtgtgcaaagtacagattgccatgatggtcgccaacatccgaaacggataggcactacaagaagaagaagaa

SEQ ID NO: 3899 - DNA, 528 bp, Diabrotica virgifera
tttgtagtgataataaccgaatacaattgttagaattcattagttattaatttatactgtaatttatagtgcaacaaaaatattttcttttcgttaataaagatttattgacataaactgcgatagtgaggttatgtatacaaaatcaaactgataatcaatattggaaagtgaagaatttatatcagattaagtgcgtttttattttctgtttatattaatacataatatcactagcgtgacacggcattttttttaaatgtcccatttaaacatacacaaagcgtccttacaaaatttcaaaaaaccgccaccatgagcaggtcggtcgattttgctttgacactttgttaacgctcggagcgaatagaactttatcactaacagaaaatttaagaaactgctaacacattatgaaacgtagatctttcagttatttaagttaaattatgtacactgtgaagtatagaacacttatttttccagaggtgtagttaattactatttctttgtaagcaattatattac

SEQ ID NO: 3900 - DNA, 515 bp, Diabrotica virgifera
tattttattttgtagtgataataaccaaatacaattgttagaattcattagttattaatttatagtacaacaaaaatattttctttttcgttaataaagatttattgacataaactgcgatagtgaggttatgtatacataattaaactgatggaaaatgaagaatttatatcagattaactgcgtttttattttctgtttatattaatacataatatcactagcgtgacacggcattttttttaaatgtcccatttaaacatacacaaagcgtccttacaaaatttcaaaaaaccgccaccatgagcaggtcggtcgattttgctttgacactttgttaacgctcggagcgaatagaactttatcactaacagaaaatttaagaaactgctaacacattatgaaacgtagatctttcagttatttaagttaaattatgtacactgtgaagtatagaacacttatttttccagaggtgtagttaattactatttctttgtaagcaattatattac

SEQ ID NO: 3901 - DNA, 369 bp, Diabrotica virgifera
tttgtagtgataataaccgaatacaattgttagaattcattagttattaatttatactgtaatttatagtgcaacaaaaatattttcttttcgttaataaagatttattgacataaactgcgatagtgaggttatgtatacaaaatcaaactgataatcaatattggaaagtgaagaatttatatcagattaagtgcgtttttattttctgtttatattaatacataatatcactagcgtgacacggcattttttttaaatgtcccatttaaacatacacaaagcgtccttacaaaatttcaaaaaaccgccaccatgagcaggtcggtcgattttgctttgacactttgttaacgctcggagcgaata

SEQ ID NO: 3902 - DNA, 356 bp, Diabrotica virgifera
tattttattttgtagtgataataaccaaatacaattgttagaattcattagttattaatttatagtacaacaaaaatattttctttttcgttaataaagatttattgacataaactgcgatagtgaggttatgtatacataattaaactgatggaaaatgaagaatttatatcagattaactgcgtttttattttctgtttatattaatacataatatcactagcgtgacacggcattttttttaaatgtcccatttaaacatacacaaagcgtccttacaaaatttcaaaaaaccgccaccatgagcaggtcggtcgattttgctttgacactttgttaacgctcggagcgaata

SEQ ID NO: 3903 - DNA, 6365 bp, Diabrotica virgifera
  SmartBlast Evalue=0; Info="Vesicle associated protein, putative n=1 Tax=Aedes aegypti RepID=Q17KX9_AEDAE"
tataatttattaaaaagcaccttagatatttgcatattattaataatctatgctcattataactttacaaatagtgtaaaaaatttaaaccttcaaaaaacaaaacaattaaacatcagttaatttgtttttagaaatactagaggcattatacacacaaattgaaaacactactaggtatttttgtaatttacaaaattgtgtatgttatttatatcaaatcgttcagattataagaattggcagttatttttacaaacgatcaaggagtcactgtagttcttaagccacctttacacggtcaatattattgatgcaatattttttcaatgatattattgtttcaatgtattccttacaagttcaatatattgatcaatatcgatattgtctcaataatattgatcgtataaaggtggctttactcttactattacatgttcatggatatttattgcaagagaactctaaagacctaaataagtaaaagcaagcaaagcaatgtcggatttagatgcagagatgagaaaaaaattgtgcaaaatagaataaacgaaatactttcatacgtacatatattaagcaatttaattatagcattcagaaaaggacatcgcagacatcttatgggaaaaggaatgtcacacaaatgcaataaaatttactgaatggatgcatcaaactttcagattcataaatactattagtctagtcgctattcaaaacagcttaacccagcgtgagctaaaccgattagaggaactataactttggtataactggaagtgcgttctcatttattatttataaaataagagtcttagtcagcgttagatgaaatcgtgtacttgagccaattcaactggtttgtagttggtagattatttattcgtagcctgagtttgcatttctcattggtttgatctgacaataatcacattgttatcaaataggatcccaaatgatctcacagggcgggtgtaagccaatggttagaaaaaagcagagataggaaactggaggaaaataactatataaatactatataataaaatatatatcttctcgatatccttaatgtcacttagggattttattctgctttctatttttatcaatttcctcgacatttctgcctaatcacttcttttttttttctccccaagatttaccttctttttttttctacatttcttttttggttcaaccatctcgatgagtcttcatttgcccttttgtcttaatttttcacatacataattatccctattaaatttgtcttgtcttattcaaaccacacagccataacaatttaataaatttctagggatgcagggcatccctaccatttcgttcgttgcaattcgtaactgcacgccggggtttgtcctggttgggtcagagagagcagcatatgtgcctcctgatgagagactaataagtttcgaaaccggtagaggtgcttgctgcactctctgattgaactagaatataatgcggctgtagtttcgtgtagcaacgaaattgaaaatggttattcatttttgattaataaatttctattgtattcattatcaatttctttttaaccgattaattaatttaagatcttacattagaagtattatgattttcattacatttagtttagtttttatggttaattgttaaaaactttaaatgaatgcacattggttctataatatattacgaaataattaattgctactgattaatatgatatttttgtaacaaggcagtgtatacgtcctattaatagatttttgtcatctcttctttgctaaattttgtttctttataaacacggttaaagaaaaaggtttttaggttcggttaagagtcagtttgggatcaaatactatcattctcacacaacaatttttttaataaaggatcaaggctatgtgaagaagaaatggttaaatgagataaaccattaggtactattaaaattctgcataatgatttattagctgaatataaagctgtaatagatatattatatcttctatattactaaatgttgatgaaagaaaacactatttacaacaataggttttttatatttttatggttcgtatcatgacttaaaatatattttaaagcacaaaatatttcatatatcatataaaaaaaaacaactgccaactctttgagccataaagaaaattatcactaaatatattttggtatatatattttatacaaattcatcttttttatataaaacctacaacctcgactttttctgaccaagtcgagtaattatcctatatcaaagattcagttctttcttcagacaaatgatacctcaacatttgtactctcttctatctaatatagacctgcaactgcaatgcgcattgcaacaatactttgattcctggcatgaagctggcgatttgagcgaaatctgggccagatacgagctgcgtgtgcaaattcaaacctcccgtatagtttcctgtttggatcatctggaccaggtcgtgaagggatgccagtgtgttaggcgaaagcttttgatctctaagggcgtcatacaataattccaattttctacctacgtcctccaatttccttttggtttgtggattattagcggcacaactgcactgattcttgagttcatcgaacaccgttttcatatgtaggtgttcctccggtataggcgccttttgaaccggttgtggggttatcgtccgagctgcctgttggatttcttgtggttgttggtgctgagttaaattaggcaccactgcattttggttgaaacctcctggattgtaagaggtagcaaagttatttgctggtgcctggggttggtacattgtcggtgcgttctgtgggtagaacattgtattataaggttgtgctacttgaggatttatgtcaccactgtatccatttgtgggtatcggcataggttgaactggtgctgcgccatataacggatgggtgataggatcaactacacccggttcaggttttggttgttgctttagaggcttgtgaagaggaggaggcggatcattccatccagaaggtgcactactatatctgggggtcgttgtagtagtcgcttcttgggcaatgtctgtaggtggaagtgatagattagatcctccgtagcttggttgggcaggcaccaacggtgttagattgaaactggaattagaaggaacttcgactggatttagcatcgacgagttgtttagtggtggaagctgcgacgaatttacggatggcggtgcgtaggggttagactggaaggcgttattttgctggaaggaatgaattggaggtggaacgtattggtttgggggagagccgtagggatttgaagataccgatggatccagtacgtattttctcgatggtaaacctgagccaccttggttggacccaacactggtaggtctaggcggatgagaaggtggcgcttgaggggctggagaaaacgcctttggtggttgagggaaacactgcgtgggttgtggttgccatggctgattgtttattgatggattaggcaatcctgtgttgaactggttgtaacttggaacaggtgcgggtacaggtgcaggctgagcaggtgctccaaaactactttgtggtggttgaaacggattcgtatttgcaaaactattgttaccaatggtggataaagaagtgcgatgacttcctctgcgattcggttgtctaggatcttgggcgagaacttgctttactccaagggctacttgcagtcgatcgcgtaatgttgatactttttcattggtagagtttcctaagtaagctattgccgttgataattcgccttgggacgccaataaagaagagtagtgcgagagaaggtctgccaaagcaccagataccgtaacttgccttccttgcctttcaatggctttttgcaaaaatgtcaccaattctataagctcttgcagattgtccgtagacttcaaagcattgtcactccagcttgatacgagtttttcgaaactaccagcacatatatagcacaattgagcatcattagctaatttaggatcattatggctttcttcctctagcctattgcccaactgttcacaaagtccgggaagatcttcatctgaagcgtgggtgagaacagcagctaaggcttctttccagttactaatatcacagttattgataattaggctacaatcctcggacacgatggcagatataagagtagaaacatacccactcgattgttctaaatattttagttgtgtttttgccaataaatcggggccacctgtagtagctatcaccagagcatcggcatatcgtttagctttaaggcaaagttctacagcagcaactacattattaagtaataaagcttgtgtaataaggccttcggtatcatctccagtattgattttaaaaggctctattcgttttttctgcggtgttcctaagttgtcaaatgcgttttgttggttataatcttctatcctatttgagctgataaaatcttcacttagtccgtctatattattttcgttttgcacgccagcatgcacatttaacttatcattaacatccgtgaggttataacccaacagattcaacaactccacccgaggaacttcttcaaagttcgctttcaagaaatgccagatgtatttcttgtgttggtcgttggtttggttagatttttctttacaatagtctgtaaaattcccatattctaatgttttctccaattcgtttgatttctgcacaaagtcagcttcagttataacctgacttatctgaactgttctgtgaattggaggcggttgttggccaggttgcagattctgtaaggcttgtgcgattgctgctttttcatgttcaaacgtaaccagtttacctccaaacccaaaacgtgctccgactggtttctttaaccactttggtggtttactgagatcaacactggcaggagcaaggtcttgttgtggaactggtgcttccacatagccatccatacccgggaagctatcggctattttattggttgtttgaatttgttgagttttaccacccataacggaatatacagaaacatgtccatcgaagttcgaagaagcaatcaacgcgggatttctaggacaccacacaacatcaaaactccactgattcgtttttgctacctcagctaacacttctccattttggtgatttgaattgggattccaacataccaacctgttatcttttccacatgatactaataaatctgcatcctcagaacaccaggcaagggaaagaatacctctttgatggttttgaagggtttttaatggcgaagttgcaaaccttagatcccatagttgtattactggggcttggtcttcctcagatgccagacacagctgtgtggctacctctggatgccatgcaacaactttccacctgattctagacactgtgtcagttaacttgataattggctcattctttcttagatcccagatcacacattttgagggaaaagttgaggctaggatgtgttgtacttgtttgttccatgctactgacaaaacgtcctccaacggttgactctttgtacctggtgacattggagtactagtgttgtttaaatcccatataaagatttctgactctcctgcaccactagcaaacaagttctgttggaaattgttaaaatccaaagcatgtactggtcctgtatgcttctcttgcttaccaatgatggcatcttctcctttgagtaactttgaggcattgtatatttggattaatcctccatcacaaccacctatgatagtactatttacagggttgcttccgtagctcccccaaatgattttatggaagcggtggtcactttgaacagatgaaaccagctgtgtatcaggtccaggatctgtcaaatttaaggagtaaatttctaaagctgcactggtattaaaggaagcatctagttgttgggcagctgtacccgctgctaaatatattgggtgttggtttttaggagaccaagctacactggcggtgcgttctatatcttttaccttcatctttaggaggataacttattgtccgttaaattgaaatccataaacaattcaaacagactgaaaataatgaagaattttacttccaacgtggctcaaattaattttgacagctagaatataggtgatatcaaacacgtcgactctgcaacgacatagattaaaaattataaggatcattaaattgcctcgcttgattactttacaaagtgtaatgttaaaattaactacctacttaattacaaatttaaaactaaaattataaatccaacaaaaacaactcac

SEQ ID NO: 3904 - DNA, 5047 bp, Diabrotica virgifera
  SmartBlast Evalue=0; Info="Vesicle associated protein, putative n=1 Tax=Aedes aegypti RepID=Q17KX9_AEDAE"
ctagcagttgccgctaaggcatccctgtcattgcgttcgtcgcaatccgtgactgcacgccggggtttgtcctagttgggtcagagagagcagcatatgtgcctcctgatgagagactaataagtttcgaaaccggtagaggtgcttgctgcactctctgattgaactggaatataatgcggctgtagtttcgtgtagcaacgaaattgaaaatggttattcatttttgattaataaatttctattgtattcattatcaatttctttttaaccgattaattaatttaagatcttacattagaagtattatgattttcattacatttagtttagtttttatggttaattgttaaaaactttaaatgaatgcacattggttctataatatattacgaaataattaattgctactgattaatatgatatttttgtaacaaggcagtgtatacgtcctattaatagatttttgtcatctcttctttgctaaattttgtttctttataaacacggttaaagaaaaaggtttttaggttcggttaagagtcagtttgggatcaaatactatcattctcacacaacaatttttttaataaaggatcaaggctatgtgaagaagaaatggttaaatgagataaaccattaggtactattaaaattctgcataatgatttattagctgaatataaagctgtaatagatatattatatcttctatattactaaatgttgatgaaagaaaacactatttacaacaataggttttttatatttttatggttcgtatcatgacttaaaatatattttaaagcacaaaatatttcatatatcatataaaaaaaaacaactgccaactctttgagccataaagaaaattatcactaaatatattttggtatatatattttatacaaattcatcttttttatataaaacctacaacctcgactttttctgaccaagtcgagtaattatcctatatcaaagattcagttctttcttcagacaaatgatacctcaacatttgtactctcttctatctaatatagacctgcaactgcaatgcgcattgcaacaatactttgattcctggcatgaagctggcgatttgagcgaaatctgggccagatacgagctgcgtgtgcaaattcaaacctcccgtatagtttcctgtttggatcatctggaccaggtcgtgaagggatgccagtgtgttaggcgaaagcttttgatctctaagggcgtcatacaataattccaattttctacctacgtcctccaatttccttttggtttgtggattattagcggcacaactgcactgattcttgagttcatcgaacaccgttttcatatgtaggtgttcctccggtataggcgccttttgaaccggttgtggggttatcgtccgagctgcctgttggatttcttgtggttgttggtgctgagttaaattaggcaccactgcattttggttgaaacctcctggattgtaagaggtagcaaagttatttgctggtgcctggggttggtacattgtcggtgcgttctgtgggtagaacattgtattataaggttgtgctacttgaggatttatgtcaccactgtatccatttgtgggtatcggcataggttgaactggtgctgcgccatataacggatgggtgataggatcaactacacccggttcaggttttggttgttgctttagaggcttgtgaagaggaggaggcggatcattccatccagaaggtgcactactatatctgggggtcgttgtagtagtcgcttcttgggcaatgtctgtaggtggaagtgatagattagatcctccgtagcttggttgggcaggcaccaacggtgttagattgaaactggaattagaaggaacttcgactggatttagcatcgacgagttgtttagtggtggaagctgcgacgaatttacggatggcggtgcgtaggggttagactggaaggcgttattttgctggaaggaatgaattggaggtggaacgtattggtttgggggagagccgtagggatttgaagataccgatggatccagtacgtattttctcgatggtaaacctgagccaccttggttggacccaacactggtaggtctaggcggatgagaaggtggcgcttgaggggctggagaaaacgcctttggtggttgagggaaacactgcgtgggttgtggttgccatggctgattgtttattgatggattaggcaatcctgtgttgaactggttgtaacttggaacaggtgcgggtacaggtgcaggctgagcaggtgctccaaaactactttgtggtggttgaaacggattcgtatttgcaaaactattgttaccaatggtggataaagaagtgcgatgacttcctctgcgattcggttgtctaggatcttgggcgagaacttgctttactccaagggctacttgcagtcgatcgcgtaatgttgatactttttcattggtagagtttcctaagtaagctattgccgttgataattcgccttgggacgccaataaagaagagtagtgcgagagaaggtctgccaaagcaccagataccgtaacttgccttccttgcctttcaatggctttttgcaaaaatgtcaccaattctataagctcttgcagattgtccgtagacttcaaagcattgtcactccagcttgatacgagtttttcgaaactaccagcacatatatagcacaattgagcatcattagctaatttaggatcattatggctttcttcctctagcctattgcccaactgttcacaaagtccgggaagatcttcatctgaagcgtgggtgagaacagcagctaaggcttctttccagttactaatatcacagttattgataattaggctacaatcctcggacacgatggcagatataagagtagaaacatacccactcgattgttctaaatattttagttgtgtttttgccaataaatcggggccacctgtagtagctatcaccagagcatcggcatatcgtttagctttaaggcaaagttctacagcagcaactacattattaagtaataaagcttgtgtaataaggccttcggtatcatctccagtattgattttaaaaggctctattcgttttttctgcggtgttcctaagttgtcaaatgcgttttgttggttataatcttctatcctatttgagctgataaaatcttcacttagtccgtctatattattttcgttttgcacgccagcatgcacatttaacttatcattaacatccgtgaggttataacccaacagattcaacaactccacccgaggaacttcttcaaagttcgctttcaagaaatgccagatgtatttcttgtgttggtcgttggtttggttagatttttctttacaatagtctgtaaaattcccatattctaatgttttctccaattcgtttgatttctgcacaaagtcagcttcagttataacctgacttatctgaactgttctgtgaattggaggcggttgttggccaggttgcagattctgtaaggcttgtgcgattgctgctttttcatgttcaaacgtaaccagtttacctccaaacccaaaacgtgctccgactggtttctttaaccactttggtggtttactgagatcaacactggcaggagcaaggtcttgttgtggaactggtgcttccacatagccatccatacccgggaagctatcggctattttattggttgtttgaatttgttgagttttaccacccataacggaatatacagaaacatgtccatcgaagttcgaagaagcaatcaacgcgggatttctaggacaccacacaacatcaaaactccactgattcgtttttgctacctcagctaacacttctccattttggtgatttgaattgggattccaacataccaacctgttatcttttccacatgatactaataaatctgcatcctcagaacaccaggcaagggaaagaatacctctttgatggttttgaagggtttttaatggcgaagttgcaaaccttagatcccatagttgtattactggggcttggtcttcctcagatgccagacacagctgtgtggctacctctggatgccatgcaacaactttccacctgattctagacactgtgtcagttaacttgataattggctcattctttcttagatcccagatcacacattttgagggaaaagttgaggctaggatgtgttgtacttgtttgttccatgctactgacaaaacgtcctccaacggttgactctttgtacctggtgacattggagtactagtgttgtttaaatcccatataaagatttctgactctcctgcaccactagcaaacaagttctgttggaaattgttaaaatccaaagcatgtactggtcctgtatgcttctcttgcttaccaatgatggcatcttctcctttgagtaactttgaggcattgtatatttggattaatcctccatcacaaccacctatgatagtactatttacagggttgcttccgtagctcccccaaatgattttatggaagcggtggtcactttgaacagatgaaaccagctgtgtatcaggtccaggatctgtcaaatttaaggagtaaatttctaaagctgcactggtattaaaggaagcatctagttgttgggcagctgtacccgctgctaaatatattgggtgttggtttttaggagaccaagctacactggcggtgcgttctatatcttttaccttcatctttaggaggataacttattgtccgttaaattgaaatccataaacaattcaaacagactgaaaataatgaagaattttacttccaacgtggctcaaattaattttgacagctagaatataggtgatatcaaacacgtcgactctgcaacgacatagattaaaaattataaggatcattaaattgcctcgcttgattactttacaaagtgtaatgttaaaattaactacctacttaattacaaatttaaaactaaaattataaatccaacaaaaacaactcac
